United States Patent Application Publication US 2024/0410020 A1 - sequence listing, part 2

SEQ ID NO: 17029 - DNA, 120 bp, Homo sapiens
atccgatgtgtcatcgtgggaagagcagtgtcttcatgaggcctggacagtgcctgggtgggagatagctccagcctccttggaagacctattgaccacgtttctcttgtgacgcacttc

SEQ ID NO: 17030 - DNA, 120 bp, Homo sapiens
acccgagcctctggggtaaggtagagttcaaggagaaccaaggcagcccaagtgagcctggcagcagagccgagggcagccccaccaaagccacggagccagccctgctggcatccagag

SEQ ID NO: 17031 - DNA, 120 bp, Homo sapiens
ccccgagctctgcccccaccctttaggattgcaccctgccttgttaagggatcagctgctgctcctctcaggtctttttgggagtcctgaatctgaagtgagcctgggagaaagggagtc

SEQ ID NO: 17032 - DNA, 120 bp, Homo sapiens
ctccgtgcaggcagggccgagcctgtctccctcagcatctcagatgctcacagaaccacgggggcagcagggttcagtgttaaaggccaggctagaggaatggaaacagctgccccagcc

SEQ ID NO: 17033 - DNA, 120 bp, Homo sapiens
ggccgtcagcaccatgtgccctgtgctgtccccgcagactggctccagggacagacaggagctcactgagtcattaaccctcaatccaattctccaatctgtcaaggtagcattgaggtt

SEQ ID NO: 17034 - DNA, 120 bp, Homo sapiens
ttgcgggaggaagagggaagcactaaccagattggactgtaagtgaccctggtcatccagctctgtccccagacacctccccatttcctgaggctagtagcagtgggaggatgaccaggc

SEQ ID NO: 17035 - DNA, 120 bp, Homo sapiens
gttcgggctgtctggtgctttccttggggcaagggtagtgggccaggcaaaggggcctaggcaagccaggtaacccctctgagcaccactttccacatctagaatggaaatgttttgagc

SEQ ID NO: 17036 - DNA, 120 bp, Homo sapiens
cctcgtgagcccaggagcctctcacagtcacttctcggaggtgaacagaactggagggcatcacggcagcccccacacaagaggaagtccagactgacgaggccacagggtgacaagagc

SEQ ID NO: 17037 - DNA, 120 bp, Homo sapiens
gagcgagccacgttctggggccctcccaccaggaggcccaccccacccatggtgctccagccaggaacaggtcaccagaggtcctcccctctcccctgcccactgccctgtctctcaggg

SEQ ID NO: 17038 - DNA, 120 bp, Homo sapiens
cctcgctaccagagaccctctcccaccacctgagcagatgggcagtagacagtgtttggccaaccaggctgtgtgcccctgtgggcacctgccccagctcaagggtcagcagcttcacct

SEQ ID NO: 17039 - DNA, 120 bp, Homo sapiens
gtgcgtctgcagagagttcatgccaagctcagcagagggaggaagcagctggcctgggaggcagctgttgtcattgactcctgagagctcagtgttgggaaggacccaagggcccaccac

SEQ ID NO: 17040 - DNA, 120 bp, Homo sapiens
tggcgagcacacggggcaactcaggcctccctgcccaccatctttctttgggcagctgcaccatgttgtctgtcctcttgtccacttggggtcagcgacgattccatctaggtgctgggt

SEQ ID NO: 17041 - DNA, 120 bp, Homo sapiens
cttcgaatgagggggtaggatagcactgggattccagcaggcgatcatcatttgctggggggcctgcgcgccttccctgtgagcgtgagcaggaatgactcatgcctcctccacctgctc

SEQ ID NO: 17042 - DNA, 120 bp, Homo sapiens
tgccggggagtggcctcactgtctgcctggtttttgtctgtctgcccctttgtctcccagtcccattacctgtcatgcatcctaagctcctgaggacagagaaggtggagagtagcagag

SEQ ID NO: 17043 - DNA, 120 bp, Homo sapiens
tgacgtggctggctctgtaccgagcagggggtgcggccacaaatctccaagcccaggccaggggagagaggcaagcgcactggactcggttccgcctagtggcaaagaggcccagaaaag

SEQ ID NO: 17044 - DNA, 120 bp, Homo sapiens
aaacggagatgccaaggcagtcttctctgaggtcagtggtgatgccagagaggtgaggctcaggccattgccagctgcaccagagacaccaaagcactccagggtcccccaaggtcactt

SEQ ID NO: 17045 - DNA, 120 bp, Homo sapiens
ctgcggcccagagcagaagtgacatgcccagggtctcactgcagtttggtgggagaattaggtttcagaacacaagacagccagtacctcccaggccccttcctcagggagccagcaggg

SEQ ID NO: 17046 - DNA, 120 bp, Homo sapiens
ggtcgtgggcaagcggccaggctccacagggcaagcccctttggacttaaccctgtttgtgacagccctggtccctgacagtcctcagatcccggtggcagtgggcagtgggctgtctga

SEQ ID NO: 17047 - DNA, 120 bp, Homo sapiens
ccccgcagcccaaaggagggctgcctgacctccgggcctcacttctctcccagcaccaagaaagaggttcccagctgcatttctggtttctgaggggcccttctgcttccccagctgcca

SEQ ID NO: 17048 - DNA, 120 bp, Homo sapiens
tcacgtgcattttatgtgaggtttgaggcccctagttgggccagctggccttgctctgtgctgtggccacagcaaactgcatggggtcctgtggagtaagggacctagtggagagtgagt

SEQ ID NO: 17049 - DNA, 120 bp, Homo sapiens
gtccgggggcccctcacctggctgaggtatgtgacaaggctctgagctgatggtgtacgttcagcctgagtaggtgtttgcatgtggttgcccccaaaccagtgtgatttggggctgcat

SEQ ID NO: 17050 - DNA, 120 bp, Homo sapiens
tgacggtcccaccatctctggggtgtgtgcaagggtcagggtttgggaaggggttggacaagaccagtgtccctgaggactgcctacctgctgggagctgacatgggaatctgggagtgc

SEQ ID NO: 17051 - DNA, 120 bp, Homo sapiens
gtgcgtctggcctcctggagggggtctcgggttgcccagaggggagcgaggaggaggcccagaacataccccttcctagaacaggaaggtggggtgaccctgcagggtggcctcccacac

SEQ ID NO: 17052 - DNA, 120 bp, Homo sapiens
cctcggtgacccctaaggcagaagatgcgtgaagcaggcatgaggccctgagcactgctggccacccctgcaaatggaggggccccacctgaagttgggggccggggctcatgtttgagc

SEQ ID NO: 17053 - DNA, 120 bp, Homo sapiens
gtgcggttggctgagggcctgggccaggccaagcacaccaggaaggtgccgcgcatgtgccagatgggccctgaggccgctggggtcccacagcaaacaacaaaacagtcaaacaggtgc

SEQ ID NO: 17054 - DNA, 120 bp, Homo sapiens
ccacgtgcccaggaccacgtctgtgtgtgcgtttgcctgggtaagccttgcttcgtgaagctgccatgacctccgtctcctcactgaggggcacagggcaacaggctgccaggtgagggg

SEQ ID NO: 17055 - DNA, 120 bp, Homo sapiens
actcgaggcacagtgagttgtgggaacgaggagtaacttggaggtggagctgcgggtgcagagggaaaaagacacctgggtcatgaagggctggcctgtccgcctgaggggcccagaagt

SEQ ID NO: 17056 - DNA, 120 bp, Homo sapiens
tgacgtggctacgcgcctgtgacagggcacctgaggacatttgcagtgcaggagggagagcgcttcagagcaggccagtgtccctcccacccggcccagtccctggtccctgggtagtca

SEQ ID NO: 17057 - DNA, 120 bp, Homo sapiens
gaacgtgtgaggccctggatgagcctctcacctccccacccccagcccaggcgcttgtcccacacagctgccttggatgtcattagctggaaagccgtgagtgcctgatggggaaggagt

SEQ ID NO: 17058 - DNA, 120 bp, Homo sapiens
tgccgcacctgggagggggacaggcccctggctgagatgaggaagcctggaggatgcctctgttccctctcccaccgcaggcccatgagctctcagaccagcaggaggctgatgctggaa

SEQ ID NO: 17059 - DNA, 120 bp, Homo sapiens
atgcgcgcacctgctgggggatctgtgcgcctcagctccaaagtacaggagctagactccagtgtccatgtcaggtcccatccagctgggatgcaggaaaccaaaggcagccctcccatg

SEQ ID NO: 17060 - DNA, 120 bp, Homo sapiens
gaacgttggtaactggaagagcctggtacttggggctgttctgtgccccacaaacagagggaccggctgtaaggagactggcctgatggggaatgagaggggctgagccagaggtgccga

SEQ ID NO: 17061 - DNA, 120 bp, Homo sapiens
acacggtatgttttaagtaaggtccaggtggctgcaggcgggatggaaacacatccaccattcatcacatcggccattgcatctccaggctaaggggccacaggagcctcccaaagagcc

SEQ ID NO: 17062 - DNA, 120 bp, Homo sapiens
tcccggttcccagaacctagccaggagtctccagttcccccataggctgcagagaaacctcaggcgctgtcgacctctctggccccgtcctcccctgcagttcacctgcactggttctcc

SEQ ID NO: 17063 - DNA, 120 bp, Homo sapiens
ttccgctcttgcccccaatgatccctttgcctagcatgtccttccccatcctcacagctcaaagtcacctgggcagcttcttggaagtctcctccttccctgcattccatctgtcagggc

SEQ ID NO: 17064 - DNA, 120 bp, Homo sapiens
ggtcgagtgggaaggggtgttggaaactccattgagcagctcaaggccagcgcctctgacccacctcattcctccaaacaatgccccatggagaaggcgcatgctgagctgggatggtcc

SEQ ID NO: 17065 - DNA, 120 bp, Homo sapiens
caacgggaggtaagcaccaggactcaccaaggttgctggtgagaggaggctagagtaggtggcagggtgcctgaaggggaggacctggggatggctgggccagccctgcccactgcaggt

SEQ ID NO: 17066 - DNA, 120 bp, Homo sapiens
tcccgccttgtcctacttcacgcagccccagcctcctttcccaggacccaccatcatgtggctccctgtgggatattgccatcctcacctatagcccacgtggtcaccctggtggtgcaa

SEQ ID NO: 17067 - DNA, 120 bp, Homo sapiens
tcacgataatcccagctctcctcagtgactgctcactggggggcacactcatgggaggccaagatgcttgattccattctacagaagtggaagcagagaccaggagaggcgatgacttat

SEQ ID NO: 17068 - DNA, 120 bp, Homo sapiens
caacgtcagccctccagaacaaatggtccatctggctcaggggacagtgccaggaagggctgcactgcaccatgaggacttgaggcaacactgaggctggacctcaccctggatgagctc

SEQ ID NO: 17069 - DNA, 120 bp, Homo sapiens
catcgaaggaagctgggtgtccacgggtggctgctgaagagggacagggtgcagtggtggcccacccaaggccactagcctggaatgagacatacggctcactgcagtgggagcacctac

SEQ ID NO: 17070 - DNA, 120 bp, Homo sapiens
ccacgtacctggggttcagatgacattgggtgcattctgggtggtatagctgtagacccccagatttctccctagcttagatgctatgactccagggatgtcccctgaacccccaaatga

SEQ ID NO: 17071 - DNA, 120 bp, Homo sapiens
acccgcggcaccctccccttcccaagcccagttctcctttccaaggtcacggagccaatttccagaggcagggcccaggcgcatccttgctgcctccctcctcctctcgggctggtgctc

SEQ ID NO: 17072 - DNA, 120 bp, Homo sapiens
ctccgggctgggagggtcatccatctccacccccgggctgcacacgtgtggagtcagggtcagaacaggccccatcatgctgctgctaaagctgggctggggtctcagagcctggcacaa

SEQ ID NO: 17073 - DNA, 120 bp, Homo sapiens
ttccgggggaccctgagctgttcaactgcaccccaaaatctggttagagaagaattgtcaatttcagccacagaactctctctcccacaaaaatgaaacctgttttctcatggggttcta

SEQ ID NO: 17074 - DNA, 120 bp, Homo sapiens
caccgatagggacactctggcctcttggttcctggcctgccaggcctccccctctcatcgggctggggagcagaagcagaccctgtgcatcactcagggcccagctggcagggagcctgg

SEQ ID NO: 17075 - DNA, 120 bp, Homo sapiens
acacggcaccaccacggcgcatgagtagccagcctggaaggaacttagaggaatgcgtgtgggtgagcgcagcagcttgggcccagggcccctgcagggccagggcccacttgggacaat

SEQ ID NO: 17076 - DNA, 120 bp, Homo sapiens
gcacggtggccagaacaaaacaggggcccaacacatactgtcaaatgaatgaaggaatgagcaagcaggtaagtgaactgtagcaagaagacaaccagcaattgatcctttaaagtatga

SEQ ID NO: 17077 - DNA, 120 bp, Homo sapiens
gagcgctagccacatgccaggcgccctgccaggtgcagagggtgccatggtgaaaacggccttccagtgtggccactgataggaaaccataccaatggccaccagcattcactgggagcc

SEQ ID NO: 17078 - DNA, 120 bp, Homo sapiens
ccacgttcccacaggtgatggtactgcccaaggtcacacgctggtaagaacagagccactgaaatagatgccctcgccaccccccaggccccccacccagaggcccatgaaggacaccac

SEQ ID NO: 17079 - DNA, 120 bp, Homo sapiens
actcgctaatccagaggccacgacactcagtgtacccccagaacagatctcctgggcgtctgccacattgcctccttcccttcctccctctgctcattgtccaactgtcccctgcatacc

SEQ ID NO: 17080 - DNA, 120 bp, Homo sapiens
gagcgctcagagcttggaactaacataaaataaataaaaatcagtctggaacagagggccccataagatccacacagaggcaaccaaaaccaccccacaaagagtcctgctctggctaaa

SEQ ID NO: 17081 - DNA, 120 bp, Homo sapiens
tcccgcagtggactccaatttccctgagggtggacaccatgtccgttctctttccttgtctccccagtgctaggcatataccaggaagctttcagtacatgtaggacaaatgaatagtta

SEQ ID NO: 17082 - DNA, 120 bp, Homo sapiens
ttgcgtttattttatagttgagtaaactgaggtgcggaaggtggaacaactcacctaagttcaccccctaagcctcaaccttagcagtgaaactcactaaaagacattaaacagagccag

SEQ ID NO: 17083 - DNA, 120 bp, Homo sapiens
ccccggacttcgaagctggttccacggttttataagggccacaagaggccatctagcccaaaacagctaactttccaaaccgaaactagttcagaggaaatcactgactcaggtcagctt

SEQ ID NO: 17084 - DNA, 120 bp, Homo sapiens
taccgtgagctctagaagccaggcatatgatattcagacagcactggattcagaactatgcagactaaggtcagtagatggtaggcaggtctatcttctgcagctgcagggtgcttgact

SEQ ID NO: 17085 - DNA, 120 bp, Homo sapiens
aaccgcccaacctctcccagccgagctgatcaccagaacctgcgcgaatctctccacggtcagccccacccagggctcaggctccgcccccgggcctccatagccccgcccaccgcccac

SEQ ID NO: 17086 - DNA, 120 bp, Homo sapiens
caccgcccttgttgtcatggtgatctccggctctccagggtgtccaggagtctctctgctgccagccccgcccagactccaggcaggttctcgttgctatggtgatcgccggtgcaagct

SEQ ID NO: 17087 - DNA, 120 bp, Homo sapiens
ggacgcgccgctgccagtccaacgcagaccccgcccacgacgtcgacgattcgtgtagcccgcaggtcccgcgtggctctcgttgccatggtgatcgccgccgctggctcaggcggacca

SEQ ID NO: 17088 - DNA, 120 bp, Homo sapiens
ggccgcgcggagccccagctttcacagccatcgctggtgagtcagctcgcccactctgtccgaccctcccggtcacccaaccccgtgctggcacatcccgaggccagggccgcgagggca

SEQ ID NO: 17089 - DNA, 120 bp, Homo sapiens
cagcgtccgcgcccacttcccgcccctataacttgaaagcggcctgcggccccggggcgtcctcatttccggagcgcaaactctgggccaggcccgcgctggttgtggaggagagccagg

SEQ ID NO: 17090 - DNA, 120 bp, Homo sapiens
atgcgggaagacaaccggactccgccaggaccaccccagcccagcctggagaggagtccggacagaaaaaggagacagaggggctgttgaggaggctcgaggagtcagaggcctggtgaa

SEQ ID NO: 17091 - DNA, 120 bp, Homo sapiens
cttcgtcctttgcagactgggagcaggagacccctccccactctacttccactgcctgagctgtgccatgcctcacagcccagtaaggtaagctcagaggggagctcctccttggtagac

SEQ ID NO: 17092 - DNA, 120 bp, Homo sapiens
tttcgctcagtttctaactcacagcttgccttccgagctcctgcagcctccctttccccacattgtccttgctggctgccctgcccacccatggcctgcgtggaccatcgcttcctgatg

SEQ ID NO: 17093 - DNA, 120 bp, Homo sapiens
ttccgggcacatttctgtgagtacacccctgtgacgacttcctcatcccccacaggttttgcaagaatgtttttgatcgagactacaaggccaccattggggtggactttgaaattgagc

SEQ ID NO: 17094 - DNA, 120 bp, Homo sapiens
gagcgctttgagattgctgggattccctatagcctccagatgtaagttgctggttcccccatggctcgtgggcagcttcctacaggcacctgagaaaggatttggggagctccttcactg

SEQ ID NO: 17095 - DNA, 120 bp, Homo sapiens
gatcgggaaatatagcaatttcccacatactccctacccctacacccccacagcctccccagttaacatctcccaccagaggggcatgtttgttacagtccatgaacctacctgcattgg

SEQ ID NO: 17096 - DNA, 120 bp, Homo sapiens
tgacgtgggtccatgtatggcaggcatggaaagaggaatcctcactggctcagccatctgtctctgcctgtttactgatgttctttagagggctgtggagcctgctggtctgaaaaggaa

SEQ ID NO: 17097 - DNA, 120 bp, Homo sapiens
agacgggacagatcttgtgtttcttcatggacttcatgtgagtggctgccctgtgttttcacatttttattaagcagcttaatttgccctttgaattccggtgatgagttggcgccagag

SEQ ID NO: 17098 - DNA, 120 bp, Homo sapiens
catcgtcatctcttaaggccagagcctcgtggccacctctcagttgagtacaggctcctttccatggatggagacagagtgggcagatctgggtggagtctgaggccgctaaaggcatca

SEQ ID NO: 17099 - DNA, 120 bp, Homo sapiens
aagcgttctctggttcaggaaggctgacttgttttgggaacagaatggagcattctgaaacatttcactgaagaaggagctgggagtgctgttgatttgactgggttcaggggagcatgc

SEQ ID NO: 17100 - DNA, 120 bp, Homo sapiens
ggacgaggtctggctgggaagatgtagcggagatacacagaggtagccggctgtgtgtgcacagggccaggtgcagggcccagagagccaggtgagtgaccagggagcactgggaaggaa

SEQ ID NO: 17101 - DNA, 120 bp, Homo sapiens
gcccggggagatcctctactcaagtgccactgttggctcaagaagagtttttgaagattcacttcactttaaaggcctgacatgcttccgtgtttaaagtgctgctggggtcagtttgta

SEQ ID NO: 17102 - DNA, 120 bp, Homo sapiens
gcccgtagagtagggagagattttctgcacatgacgaggtattgatgagcattcgaagcaacctacaggcaacatatgttgacagtgcagactttgaagggaaaagatctggacttgccc

SEQ ID NO: 17103 - DNA, 120 bp, Homo sapiens
cttcgtgggagtagcgggtgcagaccatctggcctcctgtctggtctcatagagtctcctgttcatgtatctgatgtcagttgattgaacatcacttagcaaaaaatcttaagaagaaat

SEQ ID NO: 17104 - DNA, 120 bp, Homo sapiens
ctccggggggaccctggggtgtgtcagggccctcattctcctcctataatcctcctgggctgagtggagttcttacattttgaaggttatgcaatggactgcatgtttggatccatctgc

SEQ ID NO: 17105 - DNA, 120 bp, Homo sapiens
acccgcaggggtcatttgactcctaccttatctgggtagataggatcatctttgtcccacagtccttcccagtattgtgaagtgatgcattggcgtgagcccaggggtgccaagggtggg

SEQ ID NO: 17106 - DNA, 120 bp, Homo sapiens
ggccggagcaggcccttgggccttgcgtcctgggggaggtcacgtgagagaaagaagtgggggagtttatgttgcggaaaggctaaaaggaagtgactgttaggaggttatgggataaag

SEQ ID NO: 17107 - DNA, 120 bp, Homo sapiens
gtccgagtgctccccgagtgtccaccgtcggcctgctctgttccggggcagggccacatctttgtccgtgtgccgaggaggggactggtgggctggagtcccagggggagattattccaa

SEQ ID NO: 17108 - DNA, 120 bp, Homo sapiens
caccgcaggtaaggggagtgaaagggtggctgtggcggctgttccctgtggctggtggccatggataagtgaagaggaacgtgatgctgggcaccatgctggtggtgcctggggcagagc

SEQ ID NO: 17109 - DNA, 120 bp, Homo sapiens
caccgggccgaatcgtgatacccaagggaggcatcttgtcgtggagcagttgcatgggcccgcccttgttccctggagcagctggtgaggtactgttagaatttggccctaacaggactg

SEQ ID NO: 17110 - DNA, 120 bp, Homo sapiens
gcacgccagccaaggcgacaagaacgaaactccgtctcaaaaaaaaaaaaaagaatttggccctaacaaatgcaggttgtgattattaacataagtctggtttcctctctcatggcattt

SEQ ID NO: 17111 - DNA, 120 bp, Homo sapiens
catcggagactgggtcccgccatgcctgtgtcatctcctggcttccccggcccttgtgagccccgcggttgcttatttatcctgctaaggccacagtctcaggttccagaaactctggca

SEQ ID NO: 17112 - DNA, 120 bp, Homo sapiens
tggcgggctgggagaggtgctttgttttcactcctcaggaagcttgaggcttcttgtggaagcgtctgctgctttgggctgggcagctgcgcccccagaaagccagctaggggtctgccg

SEQ ID NO: 17113 - DNA, 120 bp, Homo sapiens
ctgcgtctcaaaaaaaaaaaaaaagcaagacaaggcatatgacagggcatgatactgacgagaccttggacatcaaaggctggagcaggacttcctcctagggaacatcctcagatatgt

SEQ ID NO: 17114 - DNA, 120 bp, Homo sapiens
caccgtgtgggctcagacatccagggtggaccagagccggtggcttaggtctggtggtctgtccctgactgcacttttttcagagctgttttggtttgaagctcaaagcgggctttttat

SEQ ID NO: 17115 - DNA, 120 bp, Homo sapiens
ggacgggtctaggcctgagaagccgtagtctcctagtgcttggtgctgctaagcccaaagaacagagtggttacaggaaatggaacatttagtctggcagaggccaagggcagcaggtcc

SEQ ID NO: 17116 - DNA, 120 bp, Homo sapiens
acacgtgcgcagctggtctgattaatgagtttgttttttgatgtcacagtttctgggcacagcagagctggctcctctgcttggggtctcctcaggctgcagttgaggtgttggccgggg

SEQ ID NO: 17117 - DNA, 120 bp, Homo sapiens
caccgcgcccggccaagtctgggttttttgaaaagctccctgggtgacttgactctagccctcagggttcagacccttcggtttctgggagtccgtggacattggctgcaggttttgaaa

SEQ ID NO: 17118 - DNA, 120 bp, Homo sapiens
agtcggtgaaagctgagcgtgcccaccaaagacacttgaatgggcggctggcattttcaagctctgttccttatgttagacgatgttgttttagcacaaagcctccccccggatcccaag

SEQ ID NO: 17119 - DNA, 120 bp, Homo sapiens
cagcggggcagtctgaccttgtccctttggctgtgaccctgtcccacccttggcctctgtccctggttcttgcccaggtccactattgcatggccagattcatcctcacagggacctgac

SEQ ID NO: 17120 - DNA, 120 bp, Homo sapiens
gaccgctgttcccttctcacaaacctctgagttgcccatgggctgaaggtcaaggtcacgcatctcaggcaggcaggtgtgcaggaccctccacgctcgtgggcactggcggtgcgggag

SEQ ID NO: 17121 - DNA, 120 bp, Homo sapiens
ccccgccacccctctgtgtgcttcctgcaccccctctccttgcctagaatgtcccccacaatgtctccacttgcccagctctgtcctctgtgtccagctttgaggctactttctgcagtc

SEQ ID NO: 17122 - DNA, 120 bp, Homo sapiens
ccccgacctgcatgtaacctgtttccctcctccggccgctctcagccgctccttcatgcctccttcctgggctccctttggtacttgtgtgtgcaccgccttctcgcctccaagtctgca

SEQ ID NO: 17123 - DNA, 120 bp, Homo sapiens
actcgaaggacacggccccttggggctggctggtgtcatgtgtggctgcacagaggggaggggctgttctgccacctgccctttgaggctgtgtgggcacggttccctctagagctccat

SEQ ID NO: 17124 - DNA, 120 bp, Homo sapiens
ggtcgtcttggccactggctcggagacagccaccgagacccggcatttggagcagctggctgggatgctgcagggaggggtgtccaagcaggaggcagccaagcctgcctggagcaggat

SEQ ID NO: 17125 - DNA, 120 bp, Homo sapiens
gcacgtctcaggctttggggtcttcctgttctctttcttggccctgctccactccttggttcccctggccctgtcttgcctgcctgttaactttgggtaccctcagcctgtcccaaggca

SEQ ID NO: 17126 - DNA, 120 bp, Homo sapiens
gcacggtgcctagcacctcacagggactcggggtgtcctggctgaccagccgaatccactttttattgacaagaagcctgggtcccagagacattaagtaacgtgctaaggtcacccacc

SEQ ID NO: 17127 - DNA, 120 bp, Homo sapiens
cagcgagcctacctgctgcacccgtgagcatgggcggccccatctgcctcctccttcaggtgagatggcaggatcagagagatggaatgaatgctgccgtgtcgcattcatgtaggaagg

SEQ ID NO: 17128 - DNA, 120 bp, Homo sapiens
ctgcgaggtgggggatcgcattgagggaagaaaaggtgctctaatagcttcagcctggacttgggtccagagctttggatagaagcatctttccagacaattgggatcctgtagaaaatc

SEQ ID NO: 17129 - DNA, 120 bp, Homo sapiens
gcccgtggctgggccctggccccgggctcagggtggtgaccgccagcagggggaagtccctcttcctgccattcccccccgaccaaccctctgtatttcctctttggaggggcagtgagt

SEQ ID NO: 17130 - DNA, 120 bp, Homo sapiens
cagcggccatggcccgcatcctggctgagcacctttgctggtgtggagggactccctccagtcactttcagacctcactccccatgctgctcccacaccagggcactgttcccacgccat

SEQ ID NO: 17131 - DNA, 120 bp, Homo sapiens
gtgcgtcagtgcccctgcctgcgtttttctaccaacaccaggcctacctggagtgaccatcgcagaagcccccagccctgccccacctccagtgccacactcagatgtgctgccagaacg

SEQ ID NO: 17132 - DNA, 120 bp, Homo sapiens
ggccgaagcaagatgctttatcctttttcgataaagaacaataagtttgagaagtggcaggacaagggggatctggctaggggcagtaaattcttgagcagtcactgggagatatatgag

SEQ ID NO: 17133 - DNA, 120 bp, Homo sapiens
gctcgaagtcagtgtagccatccggtgtattttgggatggcacgtccttcactctttcccagcctttctgcatttgtaagccccaggaaagccggcagctgagtcagcctgaatccctcc

SEQ ID NO: 17134 - DNA, 120 bp, Homo sapiens
gggcgtctttgcagctccctgcccctgctggttgaaggctctgttggtcgcattcttctctctcacagactctgcccctccaaagcccttccagccctctcctgggggctgggttatctc

SEQ ID NO: 17135 - DNA, 120 bp, Homo sapiens
caccgagttcaggccatgtcttagtgtcctgtggcttccttaacagaatgccacaagcttagtggcttacaacaacaaacatttattctctcccagttctgaagactgaagtcccacatc

SEQ ID NO: 17136 - DNA, 120 bp, Homo sapiens
gtccgcagggccaggctgtctctggaggctctaggggaggatccttcctttctgttcccagcatctgatggcccacggcattcctcgacctggtgacaacatctctccagtccctgcctc

SEQ ID NO: 17137 - DNA, 120 bp, Homo sapiens
ctccgccttcaaatggcctcctgtatgcctgtgtcttctgtctctttaaagatatttgtcattggatttagggtccatcagtgtgatattgtgatataagaaacctgtatgtggtcttcc

SEQ ID NO: 17138 - DNA, 120 bp, Homo sapiens
ccacgtgattagagggttggaactttagctccacccctgaactctggggatggggagaggggtggagattgaattgatcacccgtgtctacagccatgccagcctgatctcggctgaact

SEQ ID NO: 17139 - DNA, 120 bp, Homo sapiens
ccccgtgcactcaaccttgcatccccaaaccaaacctattattcatggaccccaaacttgttcctcttatgtcctgtccctttgaggggcaccaccatccacccgcatggccaagccaga

SEQ ID NO: 17140 - DNA, 120 bp, Homo sapiens
aaccgtggtctgctctccctccgttaaatgccattctccatcagtgaggcttcttagtcatctctggctgcctggccaggccctggctgtggcctcctccctggtctttgtagctctgga

SEQ ID NO: 17141 - DNA, 120 bp, Homo sapiens
taccgcccacagcccagcccactcttctccaggcctcgcctccctcccttccccctgcaccccacgacttctccagcactgagctgcttcctgtgccccacagtggcctggagtcccctt

SEQ ID NO: 17142 - DNA, 120 bp, Homo sapiens
cagcggggtctgctctgattgtaggggcttcccacatcccccaggatggctgccctctgctgtggcatcactgtgtaacaatggcgtgtacacctctctgtccccaccagtgcagggccc

SEQ ID NO: 17143 - DNA, 120 bp, Homo sapiens
catcgtaggggctttagctggggtttgtggatcgactgagtgaacgaatgttgtgggaagtcccgtttcccagccgcacccagggaaattccacagagcgggcaggggcatcgcatgagg

SEQ ID NO: 17144 - DNA, 120 bp, Homo sapiens
tcacgccagaccacaattaggtgtttaatttttaaaaagaaagttacaaccttttttttttatttttattttttctgattctgcaaataacacctgctcttacagaccatgtgggtgatg

SEQ ID NO: 17145 - DNA, 120 bp, Homo sapiens
agacgcgcgtctacagggacacagctgagccaaactggaacgaggtgaggaactgattccacaagggcccagcctgccaggtggggcacaggatattttccactggagataatctaaacc

SEQ ID NO: 17146 - DNA, 120 bp, Homo sapiens
ccccgaaggcagtgctgctgaattccaggaatctcctggggggccagtaggtgacgtgtccaagagattttatctccttgttcctgaaaaccttacccatccctgtcatcacaaagaagc

SEQ ID NO: 17147 - DNA, 120 bp, Homo sapiens
tagcgcttatgtttacttggtaggtttccatagtgtttttccgcagaagttggaatgagctcccgtgaccctcttggcttccggaagcctggggctctgctggtggggctgggacaggga

SEQ ID NO: 17148 - DNA, 120 bp, Homo sapiens
tctcggggtgttgggtttgtattgtgtgtcgccgtgccttcctccaccttggagagctgctgtgtgagtcacttagccatttggccctgcaccttcgggagtaggggaatgattgcagag

SEQ ID NO: 17149 - DNA, 120 bp, Homo sapiens
gcccgtattgactaagtcccagatccatgagaggtgccatttcccagcttctgcagcagctgtgacctcgaaggtctcattcttgatgctgcaggtagaggccagctgggcctgcagaga

SEQ ID NO: 17150 - DNA, 120 bp, Homo sapiens
ctgcgaaggaggaagccaagagcccccaggctgcttggtctacacgggtcacgaggctggtggatggagcagtggggctggaacccaggtctcctttctcagcatccactactctttgat

SEQ ID NO: 17151 - DNA, 120 bp, Homo sapiens
catcgaagaagcctttgcagagaccaagagtgccacgacccagcagagacaacaagagagggtgccaggcagtgtgcaaaaggttcaggtgccaggcagccacggaagctccggggaggc

SEQ ID NO: 17152 - DNA, 120 bp, Homo sapiens
gggcggggtcagtggtgtgtggggcttggatgatgggcaaggcttcgctagggattcgacctggaagctagtcctctccccagaatctgtctacggctccacctaccccatccacctctt

SEQ ID NO: 17153 - DNA, 120 bp, Homo sapiens
aggcgccgccgctccggccgggcctggccgcgggacaacgctaggcgtgcagggcgagggcggcgcgggcctccgggaggatgaatgtcttatggaatcaggtggtttgacactcgagga

SEQ ID NO: 17154 - DNA, 120 bp, Homo sapiens
atccgcccagttcccctgggccggccagggcgggccgggggcggacccgggctgggcctcgcggtgggcggggcgctcacctgggcgccggcgcgggcgcgggcccgggctggggctggg

SEQ ID NO: 17155 - DNA, 120 bp, Homo sapiens
ggacgggcatggggccaaagaacccagtgacacccctgcacacaggggtgcaggtgtcccttctctgctttctgctcggggcacccaccgggcctcactgatgtgctcctaagtgtatcc

SEQ ID NO: 17156 - DNA, 120 bp, Homo sapiens
ctacgcagctggtattctctcccctagcacacatgtttcactgatgggaaagccgaggctcagagacggccagcaacttctccaaggtcacacagctttcacatgctagatctgggacac

SEQ ID NO: 17157 - DNA, 120 bp, Homo sapiens
taacgtgcttgtttgaggatttgctgagctaaagcatttacaacacctagcccaaagtaagcacttgttacatatcccaggatccctgggagccaggtccacggtggagcgctcatacac

SEQ ID NO: 17158 - DNA, 120 bp, Homo sapiens
gaccgtgactgggccacttcctgttccggctactgagcaggaacaaagcctgggacgggagcggggggctggaggggcgcttctcccactagctcctcagaggtgacagcgcggaggagg

SEQ ID NO: 17159 - DNA, 120 bp, Homo sapiens
aaccggccagcaattcctcaggaagccaggcctctgctgctgctgctgctgctgctgctgctgctgctgctgtctgcagcacacctccatgggcagggggccttggcctgcactggggga

SEQ ID NO: 17160 - DNA, 120 bp, Homo sapiens
agacgtagctgtttgctgggactccccactctgccctttgcagacacccaaaaacggtcatgtcagaggattctcaccggttagcagcgacgcatgctcatgacaagtatctgggggatt

SEQ ID NO: 17161 - DNA, 120 bp, Homo sapiens
aatcgtccatgcaaatgagaaggcaacatgtcaccccacccaggactctggaaaaccctgccattgcagtcagagatggcgcatcaggaggctacttcctcagtggagaaagagagagtt

SEQ ID NO: 17162 - DNA, 120 bp, Homo sapiens
ttccgtgcacggaactcccctgggggatcattggcgaggcgaagcctttggcatggctcaaacccagtttgcgtggcagagattccagtggggctgggataggcaggtgccacttaacca

SEQ ID NO: 17163 - DNA, 120 bp, Homo sapiens
tcacgactgtatgtggctggagacctagacactcaaagactccagagaacacgaccctgatgggtggtggtgctgggatgtgagctgaaggcagccgagacggagcctccaggagcagaa

SEQ ID NO: 17164 - DNA, 120 bp, Homo sapiens
aggcgtcctctctttgggggccctggggagccactgcccgctctgggcctctgtttcctcatctggaaaatgaagggatgctgagcctgtagtgcaggcctcacagggtagaaatgaagt

SEQ ID NO: 17165 - DNA, 120 bp, Homo sapiens
gctcgtgcctggttcttcctcagagggatgacggtgagaacaacggcaacagctacaggaaactgagccctcagaggccctgtgaggtagctgtggtttgcatcactctttacagaagag

SEQ ID NO: 17166 - DNA, 120 bp, Homo sapiens
gcccggctgcaagactgggtgacacacacagggagtgtggatctgggccagtggtatgagcacggtgccaggtggctcccgccactccctggggatccaagtgcggggtggctggggtgt

SEQ ID NO: 17167 - DNA, 120 bp, Homo sapiens
tgtcgctgacacctggcaggcggggagctttaaggtggccacccaggagaggaacccccagagagtccagatgaggctgcggaggcagaagaaggtgagtgagcctgtggcatggacggg

SEQ ID NO: 17168 - DNA, 120 bp, Homo sapiens
ggccgcaggggatcagaggacagggctcccttccccgccagctggaggcctccatatcaagacagcgggggcttcctccccagccctgtcctcctgtggccactgggcctggaaaacctt

SEQ ID NO: 17169 - DNA, 120 bp, Homo sapiens
aaccgggagacctgaggagggggctctgggagacaggggctgatgggatttcatgggacaggaccttgggcaggcacctgagggccaatactcatcaccactacccctcccacctcccca

SEQ ID NO: 17170 - DNA, 120 bp, Homo sapiens
cccgtttcttcaaggggcacctccacttgctttccccagcaggaactagagcaggccccagtggagcctcttccatgactgctggatgcagcctcttgcaggcatgcacgtccttgggag

SEQ ID NO: 17171 - DNA, 120 bp, Homo sapiens
aggcggcggtagccctgaccctgggcctctgggacctcgaccctaaccgaggggccagaagctccctcttggcgttgaagacacatgaagatgcagggagagaggccaagtgcagtggct

SEQ ID NO: 17172 - DNA, 120 bp, Homo sapiens
gtgcgtggccaagtgggaagaaccttgggaggcctggttccagccctgctctgccttgctgtcgtgtttctcatgtgtataatgtgatgcttagactagatggtctccaagatcttcccc

SEQ ID NO: 17173 - DNA, 120 bp, Homo sapiens
cttcggagtttagggaagagttcaaggtcagagctctattgaaattcagtagctccagtgatagtagtggatggacggtctcagcccactgccctgtggaaaacaggcactgtattcaga

SEQ ID NO: 17174 - DNA, 120 bp, Homo sapiens
atgcgccatctgtggagctgtcttgggaaggcatctgcatttactaagagtgtgtgtcactgttctgccattaacagacagctgtatttaccaagccggagtcatggagctttgaggacc

SEQ ID NO: 17175 - DNA, 120 bp, Homo sapiens
aagcgagtgacttgctgtgtctgctcttctctcagcgttcagtagccctggttgttgattacagtcactgctgaaaatggagaaacattttatttaatactatgcctgggtctcacacct

SEQ ID NO: 17176 - DNA, 120 bp, Homo sapiens
acacgtggatgttcatagcagctttatttataatagcgggaaactggaaatgatctagatagccttcagtgagtgaatagttaaagtgaggccccttcgtaccacagaatgtcacttggc

SEQ ID NO: 17177 - DNA, 120 bp, Homo sapiens
gggcgcagtgtgcatggaatttctctgtgttgtttcttgcatctgtacatgaatctacaattacttaaaaattttaaaatgctctgggcagtgtattcactgggtgtttaccccgtgcac

SEQ ID NO: 17178 - DNA, 120 bp, Homo sapiens
ccccgcaggctgttaggatgctggtctccagcgtgtctttagggcagggaggagatagtggggctgtggtctgttaggccgacctgcttcttgatgatggaatcctactgtctgctctga

SEQ ID NO: 17179 - DNA, 120 bp, Homo sapiens
aggcgtcttgtcagtacggtctgggtggagcagggagagaatgttgactgagaggaccttgctgaggtctggctggccacagatggtccctgtgagctcccatctggtacaattcctttt

SEQ ID NO: 17180 - DNA, 120 bp, Homo sapiens
atccgggatctgtagggacctccacgcttgtgaccttgttgaggccctgctgctgctactgcagtcacaggcctggaaatcgctgtggcttggcacagtgtgttttgctcacatgaggcc

SEQ ID NO: 17181 - DNA, 120 bp, Homo sapiens
tcacgtctgccaccagttcagcacagaggggagtagagagatggcacgcaagctttgatgtgcctttgctggcctcgcctggatcatctcattagttgggataatctcatgcgcccaccc

SEQ ID NO: 17182 - DNA, 120 bp, Homo sapiens
atccggagatgtttggcttcaaagaagaaggggtgagggaggccggtccatgcccaagcatggtgcaatctcttggcatcccttccctctcctgatttcagagaagttgatgacgcctga

SEQ ID NO: 17183 - DNA, 120 bp, Homo sapiens
tgacgatctggatttgaacccgctgacgtttgtgccagccatcgcctctgccatcagacagcagatcgagtcctaccccacggacagcatcctggaggaccagtcagaccagcgcgtcat

SEQ ID NO: 17184 - DNA, 120 bp, Homo sapiens
gcccgtctttgggttccatatcatctggaaagtcataacacctggctttgctccctgcaatcccccaggaagggcataggctgagttctcatagtaaagtgttatattccggacacattc

SEQ ID NO: 17185 - DNA, 120 bp, Homo sapiens
gcccggaggtctagaggaggtgaaggcagctgattggctgggccaggctgagtgctccaggggggcctagtaacccaataagatgctgccttagtggccatattacaggtgaagaggtgg

SEQ ID NO: 17186 - DNA, 120 bp, Homo sapiens
gcccgacagagctagactccatctcaaaaaaaagggttttcagctctggacctaggtcactccataatggaagcactcgctgattccccaagagccagtccctccatctctcccagccag

SEQ ID NO: 17187 - DNA, 120 bp, Homo sapiens
cctcggcagtggggacattgattggatccatggtacagtggggcaagctgctggccacaggacatgtgtgtgcaaggccactatgcccacacctcaggggaaccagggcagagaacagcc

SEQ ID NO: 17188 - DNA, 120 bp, Homo sapiens
aggcgtcccagagccagtggagtgggatgaagggccagcgaaaggagggagacagggctcaaggggaaggaggctgggctaggcagagcctctgaggagagctgatcctgcaaagttact

SEQ ID NO: 17189 - DNA, 120 bp, Homo sapiens
ggacgggaggagacagtgccctgtctggcagaggaaacagattcatgtgcatgactatcagtgtgccatggccacagaaagcaccggaggctgtgggcatgaggaagggcagttgggggc

SEQ ID NO: 17190 - DNA, 120 bp, Homo sapiens
gaccgagaggagaccagggacaggcaggtgcttgagaaggaaggtgggccctgtggatcaggcagggtatctgccccagggggctctgcacaccagcagtcctacacgtacagggtgggg

SEQ ID NO: 17191 - DNA, 120 bp, Homo sapiens
acacgttgggctggttgagcgtaagcctcaggttccttccgaagctctgcccgccagccctggcctgatgtcaggttttgtttgtttttttaacagctttattgtgatataattcataaa

SEQ ID NO: 17192 - DNA, 120 bp, Homo sapiens
cagcggtttttgatatatgcagagagctgtgtaactatcaccactgtcaattttaggactttttcatcaccccactgcaggcagtcccgttcctccccgctgtctctcagccctaggtgt

SEQ ID NO: 17193 - DNA, 120 bp, Homo sapiens
actcgaccggcatcagtcctggctccctctgtccctcagacgtgagcatcccctgcctgggtatctttgtccccacctggacactttgggtggtaggaaggtctggggtccctggcggct

SEQ ID NO: 17194 - DNA, 120 bp, Homo sapiens
cttcgaagcccgtgaaccagaattccctggaaggaatggggagcagggtggctcccagggtccccagcactctttggaactcaggacagcatctccatgcccacatgcccccaaaaccca

SEQ ID NO: 17195 - DNA, 120 bp, Homo sapiens
gcccgttcttacatggttggtgcgagcatttcttactttagaacaaacccactggagtggaatattcccagcatcaaggggaggtaaacaaaggaccctctgggacccactcgccagctc

SEQ ID NO: 17196 - DNA, 120 bp, Homo sapiens
cctcgttgtgggcttggtacctttcacgtctgccctccaaggaaggctgctgggagccctcacggtgaggaatgatgtttggggtctgaggctagggtggtccctagactgctaaaccac

SEQ ID NO: 17197 - DNA, 120 bp, Homo sapiens
acccggtgctggccagggaccagctgtcaggagctgctgaggatgggtcagccccagagggtgggggtgccgacattgcctctggccctgcctctgcgtcaccagtacgagcttgagctt

SEQ ID NO: 17198 - DNA, 120 bp, Homo sapiens
ctgcgactcatgagcatggacctggtgggctgagcttcagctgtgaggggtcaggcctgctgcagggagagccagctgcagccagtgccctgcgctgtgcccacagtccctgagacccca

SEQ ID NO: 17199 - DNA, 120 bp, Homo sapiens
gaacgggctcacggctactggagctgggtgtgtgctcactggtgtggatgtgcagagccgggactcgctctgcaagcaggctggtcccacaaccttgagccacccactacagggaggctg

SEQ ID NO: 17200 - DNA, 120 bp, Homo sapiens
tggcgcctcccccgagtccggcctgcccttgcttctcccagagctcatggtgtttttcagggccgcaggctggcagggtgtccttctcccaggggactgagcctagggagagccaagtgg

SEQ ID NO: 17201 - DNA, 120 bp, Homo sapiens
ccacgaaatctgccctgcacacctacagcctcatcccagggcccaaccactgcctgtccctgccccagtttctcccggctactcgcattcagggctcagctagtggccctgacaacccac

SEQ ID NO: 17202 - DNA, 120 bp, Homo sapiens
cagcgactgtgtccctctctggcatggctgtgttggccccaggaccaacacaggctggacgccgaggcgccctagcccgaggttccagagcctgcgggaaggatacggtcataaggacgc

SEQ ID NO: 17203 - DNA, 120 bp, Homo sapiens
ccccgaagagaaacatgaagacgaagtcggccgtgcggccgcggaaggagccctcttccagcatgcggcagtagcggaacctacggcgtcggtataggaagtgccaccaggcggggcctc

SEQ ID NO: 17204 - DNA, 120 bp, Homo sapiens
tttcggggctgggaggtggaacctggaggacaaggaggggtgggatatgggtttgcctacagacgggacagggctgagaggggagtccaagtggattcagaggcctgagccgcagagtgg

SEQ ID NO: 17205 - DNA, 120 bp, Homo sapiens
gctcgtggggagaaggtgaggggcatagagggtcctgttctggactcatcgaatttgaggcatctgtgtgacatcacttggaaaaatctgagtgtggtgttggggtaggggttggagcag

SEQ ID NO: 17206 - DNA, 120 bp, Homo sapiens
tgccgtcatccagtagtagatcaatggtatttgtagctttgggcgtgtgtgagatgctcaaggggcaagggttgatggagaaaagaggccaggcctgggtagcctgacctgcagtagcca

SEQ ID NO: 17207 - DNA, 120 bp, Homo sapiens
agacgtggcccgggaagggactgtgaattgcagccatgccaaggttcctggtaaccaggataatggcaggcaggagggagaggaaggcacacaaatggatgtgccttaacaaacaagggg

SEQ ID NO: 17208 - DNA, 120 bp, Homo sapiens
aaacgagggatgctctggacagggccctgaggtcccccgaggagactggaactggccaagagggagaactggctgagaaggctctcaggtggatcccaagagcgtgagggtcccacaagg

SEQ ID NO: 17209 - DNA, 120 bp, Homo sapiens
ggacggggagagcctggagtgctggagggaagtgcatttgctggagggatgtgaggagaaggtctggcctcatacagcaggggttggaccaagacactgaggggttgggggctgggagca

SEQ ID NO: 17210 - DNA, 120 bp, Homo sapiens
gagcggacccccgcagacaaccttggttttccagcaaagcaggctaaggtcatgttggaagcatgccaggcagagcaaatcccaccctggcagccacagtgtgcagcagggcggggaccc

SEQ ID NO: 17211 - DNA, 120 bp, Homo sapiens
tgacgcctgggcgggcgcccggtgggcacaaaggagccggtgcaggaggtcgggtttcatgtcagcgtggggaaggggagatattcctcctccaggcacttagcaggcgctggccggccc

SEQ ID NO: 17212 - DNA, 120 bp, Homo sapiens
tgtcgacaggggcgtctgtctccccttcgactgggggccgataaggcaggcgcccagattgggggctgagaagcacattcctgggaggccaggagcctggggcgggtgggggaggccagc

SEQ ID NO: 17213 - DNA, 120 bp, Homo sapiens
ttccggagccccgggatatcctcagatgggggaactgaggcacgtaaggatgcagaacagggcctggggcagacctccattctttcttgtccagtctgaggcccagaacaggccactctg

SEQ ID NO: 17214 - DNA, 120 bp, Homo sapiens
tgtcggctgggccagccttctttctcctgtgctgaggatggtgggtgggtggagacctgtggttcctcggcaaggtgacaatgggctctgctccccatgccacctccctggcattgtgac

SEQ ID NO: 17215 - DNA, 120 bp, Homo sapiens
tgacgcttcctgctgactcccagaggacacctagatctcctgtccaggccctctcagtgtctgtaggcaggatagcgccctctgcatactctccccacccagctttccccctcactggcc

SEQ ID NO: 17216 - DNA, 120 bp, Homo sapiens
gaacgtttgtgtacctgctggtgcagctgtattttcttcttgatgacacatagtgccttttgggccctgagcacttgtccattgggggacctctcccctctttgagcacggggcccaccc

SEQ ID NO: 17217 - DNA, 120 bp, Homo sapiens
cctcggccctggcctttatcacatcccctcagctcctgggtgcccccagccccagcctcccaaggcctgaggctgagctttgcccaggacccccagttccccccacaacaaactctttct

SEQ ID NO: 17218 - DNA, 120 bp, Homo sapiens
cctcgggccccacaccccaccaagccctggctggccccctggctcccaccccgcctcagcggtctttgctctcggctgtgtcacagatagggagagcaggggcgcagtgccccatgagca

SEQ ID NO: 17219 - DNA, 120 bp, Homo sapiens
atgcgtcctttgtctaccactactagggtgggtaggaaaggaccctcaggtgaggacggtgctaggcatgtctgagatcagactcttcttgggcaggtgttgctgtagctgctgtggagg

SEQ ID NO: 17220 - DNA, 120 bp, Homo sapiens
ccgcagagtcgtgtgctgccatgccaggtactcatccacacgggcacgggcctgcaggtcctgagggtaccagtagtcagggaccttatatttgcgcgtcaggtagagcaggatggccac

SEQ ID NO: 17221 - DNA, 120 bp, Homo sapiens
aagcgctggcattataggcatgaaccactgtgcccagcacacttctttaacctttctgacaatttgccaaagtattagcctcattttccagagaagaaaaccaggcttagaaaggcagag

SEQ ID NO: 17222 - DNA, 120 bp, Homo sapiens
gaacggggcatcaaagctgagctttaaagaagctcagttctttccattcggtatccactctcatctgctgggattccgaccagcctctgatggcctgactgttcaaaaaggcttccgtgt

SEQ ID NO: 17223 - DNA, 120 bp, Homo sapiens
ggccgccatggtgatgagatgagcatggacctggaaggacacaggatgtgtccatttggagacacagaaaagctttcaggaacttggggtttcccaaaggttgggcatgcaggccaaaag

SEQ ID NO: 17224 - DNA, 120 bp, Homo sapiens
ccacgggcctatattctcttttaagctggggctacacacgtgtcccagcttaacgactccgttgtctgtgcagggtgcccaggagctccttttgctcccagccaattgttcaagccacct

SEQ ID NO: 17225 - DNA, 120 bp, Homo sapiens
caacgctgagtgacacaaggactcaggacacctggggcaccagggaggaagacgggccctggcagaatgtcagaggaattcatcggaggtgcgtccatcctgagatttcagagatgagct

SEQ ID NO: 17226 - DNA, 120 bp, Homo sapiens
agacgtccatatctggtggctcttccatggggaagacccatcctgggaagctgcagcccagagatggagccaccgggcagcccagatgccactgagccatcgccacacaagcttggccag

SEQ ID NO: 17227 - DNA, 120 bp, Homo sapiens
ccacggtgggcaaagctgccatcgtcctctggcctaccctgtctcaaggatactctcaccactcaccagcaaccaaagcactggtgtggaagtaaagtagatatttgcttttctaatcat

SEQ ID NO: 17228 - DNA, 120 bp, Homo sapiens
atgcggggcacagagactctctgcctctgaagactttagtttccttgtctatgaaatagagggttagaacaggatggttccagcaggcctggcagcagtcctagggtcccagttacctct

SEQ ID NO: 17229 - DNA, 120 bp, Homo sapiens
gaacgctgagcccgccatggcctgtgcccctccctgcaatgctctggccccagtttcacagttcttcttcccaccagtctgcactcctggttggcaaagactggaagggcccctgcggga

SEQ ID NO: 17230 - DNA, 120 bp, Homo sapiens
caccggctggtacaaaatagacaacaccccttgctaagtcctgtaggcacagcctcctcccacaggctgcccctctgcaacagagctcactgtgcagggtgtggttcctggacctttgca

SEQ ID NO: 17231 - DNA, 120 bp, Homo sapiens
tgtcgcttccaggcagtgatgctggactccacagatgtcaacctctggtataagattggacatgtggccctgaggctcatccggatccccctggctcgccatgcttttgaggaagggctg

SEQ ID NO: 17232 - DNA, 120 bp, Homo sapiens
ctgcggtgcaatcctgaccactggccctgtttggataacctaatcactgtcctgtacaccctcagtgattacacaagtgagtcatgctttgatgctttcttccatgtgccagtggttttt

SEQ ID NO: 17233 - DNA, 120 bp, Homo sapiens
gcacgaagcattttaatcattaacattgttgaactgggaaatagttaagaggtgcgactatgggaacaaatggaagcacctcagtcatggggaaagggtaagaaagagttggtttgggga

SEQ ID NO: 17234 - DNA, 120 bp, Homo sapiens
cagcggatgagatgtgtgtgacctgttacctggcaggctgcaaggtggcccagcatggctatgtgtgggagggacagccagcataccaggaagggtgctgggtgggagaaaggggagaga

SEQ ID NO: 17235 - DNA, 120 bp, Homo sapiens
aggcgctgagctgtgataagggctgtgcttgaggtcggagccgaatgctgtggaagctcctgctttttgtgaattaaggtttcctgattattgctcagttttgtattgagagtgttttct

SEQ ID NO: 17236 - DNA, 120 bp, Homo sapiens
tctcgaggggggccgacaagagacccatcaacagagagataaaaagagtatttgcttttgttttattcccgcagtgttaatgttttatgttttgcatttaacttgtttcatttagctttt

SEQ ID NO: 17237 - DNA, 120 bp, Homo sapiens
tggcgctttcttccagtgggcaagctgcctattatgttcttcagtctaattggatagtttgtgtcttgttgagttgattcttagtccttaatatttttggttgctatattgagcagaatc

SEQ ID NO: 17238 - DNA, 120 bp, Homo sapiens
ctacgttgctggcttatagaaaccctattgatttttttgtgtttgagtctgggtgcttcactgagttcccattatttcttgttttctgtctggcttgttttattgtgtttgggtagatga

SEQ ID NO: 17239 - DNA, 120 bp, Homo sapiens
agtcgatggtaatttggtctcctcattcattggtgtttattctacttttttgctctgtctggccttgagccctggagattatgtcatattttagagcaccgttagcaggtccttgtcttg

SEQ ID NO: 17240 - DNA, 120 bp, Homo sapiens
cctcgcaccccagtggcctcctggtaaaggctgctggctttctctaatgaaacacaggccccattttcctggcaattaggatttataaattggggggggttttgatctgtgttcagatac

SEQ ID NO: 17241 - DNA, 120 bp, Homo sapiens
agccgctgccagacctgggctgtggcgaggttagagcccaatgggtcaccgggcagcaggtgcttcctgtaggtgtaacaagcgtcccaccagatctgtgaattcacagacaggctgtgt

SEQ ID NO: 17242 - DNA, 120 bp, Homo sapiens
ttgcgaaaagcagtggtttccaaagagaagcttttaaaatagaagtaacagttcagtgtggtgttctgagagttcttccatgtgccaggcactgtgctgagtgtaatatgcacatcagct

SEQ ID NO: 17243 - DNA, 120 bp, Homo sapiens
tgccgctgaggggatgatgtggtggctgaggctcaaatggcttacacattggccccatcagggcacctggggaggaggaggctgatagagtgatgactttagtgttgcctggccagttgc

SEQ ID NO: 17244 - DNA, 120 bp, Homo sapiens
ggtcggcagagctttgtacaggaaaaagtctgatccctgggcaggttcaggcgtaaggccagcccagtctcatgatcttcttacagatggagggccggcgcgacagcatgctagagacag

SEQ ID NO: 17245 - DNA, 120 bp, Homo sapiens
gcccgctgcgagggtgatggtgacgaggaggagtggctcatccactacatgctgggcaaggtggctgagaagcagcagcagccacccaccgtttacttgctgcactacaggcaggctggc

SEQ ID NO: 17246 - DNA, 120 bp, Homo sapiens
gcacgaggaggctgcccgctaccccaagaagatccactaccacaacccacctgagctggccatggaggccctggaggtgacaccatgctggcccagggcggggaagcagggcaggggcag

SEQ ID NO: 17247 - DNA, 120 bp, Homo sapiens
gaccgtccttcaacctgccgcaaacttatctgtgttgagcagcttcatgtgcaattgaattaaaacatcatttcctctcttttcccaaggggtgtttatcatcctttctgggagagtgac

SEQ ID NO: 17248 - DNA, 120 bp, Homo sapiens
ccacgattgtcaattttgtaggcaggaaaaccaaggacattggtagagatccagatgtccatcatttggttcagcccaggacttgaagcttctgaaggccctgtgcacgttggctttgcc

SEQ ID NO: 17249 - DNA, 120 bp, Homo sapiens
tcacgtgcccagcaagcctcttggagtgtggacagaatctgctgcttgcttttttctgcctttgtgattttttttcctgattataaaagtgtgtgtgtgtgtgtgtgtgtgtgtgtgtgt

SEQ ID NO: 17250 - DNA, 120 bp, Homo sapiens
gtccgaattttttcctattaacatataaacatatagtaacattttcttatgattttgcagcttgccttttcgctggacaaaatttaatggaaggtgtggtgagcttccctgcctgcccta

SEQ ID NO: 17251 - DNA, 120 bp, Homo sapiens
gggcgtttgtttatctgcacggacccttgataggtttggtttcctctccacttcttgctatgacaaggcacaggcagtgcatgtctttgtacttgaagcagggagcacatcatgagtatt

SEQ ID NO: 17252 - DNA, 120 bp, Homo sapiens
aggcgtgtcctgggctggggctcttgaggctgagagcagtgacaatggaggatgctaccctgcctgcagtgccacagcagctgggcctggctgtgcctggccttgttgggggcctggcag

SEQ ID NO: 17253 - DNA, 120 bp, Homo sapiens
tgccgcatgtgccgtccccgtggatgtgcacgtgatccaggcacagctgtccactgagatggaggcagccccagactgagggacagggatccttgagtcgatccctgctgtggctgaccc

SEQ ID NO: 17254 - DNA, 120 bp, Homo sapiens
ctgcgtcctcactcatggctcacacagagcatttggactcagtgacatctaaagttcagcacaggctggacaatttctgagtagcagaagctctagcctgcaagaatcaagtggagctgt

SEQ ID NO: 17255 - DNA, 120 bp, Homo sapiens
aaacgcacttcactctgtctcgaccgttggggaaaggagaggaaactggctgactcggaactgtaaggctcagcagtctctgctgtcacactctaggtagaaaaattgccagacacaggt

SEQ ID NO: 17256 - DNA, 120 bp, Homo sapiens
gggcgacagagcagagaaaaaaaaaagaaaggagccaggagaaatctacaggtctgcacccactcaggccttggaagggatggctatagggtgccactggggctatgaggtcccctgggc

SEQ ID NO: 17257 - DNA, 120 bp, Homo sapiens
agccgacagcacctttggcagcagcctagctctgggatctgggccttggatttgcaggaccagaagcccaccaccactggggtggggggtgtgaaggtacttacttggaccagccacgtg

SEQ ID NO: 17258 - DNA, 120 bp, Homo sapiens
ccacgaagagctgggacgtaggggtctagatgcggacagcagtggggacggctggctattcagcagagtctggggtgttggggggcacccgagccacagggcatgccccctacctaggct

SEQ ID NO: 17259 - DNA, 120 bp, Homo sapiens
ctgcgccccctgacttccagcatctccctgttaaggtggatgaggaggctgcgctggagcaggctgtgaagttctgccaggtccatcttggggctgccgcccagagacaggtaagcccaa

SEQ ID NO: 17260 - DNA, 120 bp, Homo sapiens
ttgcggagcctgctccatatcaaggccctaggatgcaggctgagaagcagatccactcttgggactgttcttgtggtcagcttgggctgaggggagatgagcagggggcagctgagcctc

SEQ ID NO: 17261 - DNA, 120 bp, Homo sapiens
gcacgtggccatagtgggcaggaacttgacggcccagaccccagttcagacatgctgaggggtcccctcacctcagccaccttttctgtaacaaggaggatggcccctagccagctgacc

SEQ ID NO: 17262 - DNA, 120 bp, Homo sapiens
ttccgtttggaacagaagtagaagcagcaatgttagagccagtctggttaggagccaggtggcaggggaaggtggagatgcagcctatacagggactgccccccgccccaccgccccagg

SEQ ID NO: 17263 - DNA, 120 bp, Homo sapiens
gggcggggtccaagatatggcagggagtagggagttggggaggcccctcctgggaggaccccaagctagaggtgggagggctgggatcagaattcaacaagaggatgtggcagggagggg

SEQ ID NO: 17264 - DNA, 120 bp, Homo sapiens
tcccgatgcccccggtagcctcgtcccaggtccctttgttccaggtcccctagcagagggctggtagctgcctttggggtccagacgggcttccttctcagtggaatggagcctcaggcc

SEQ ID NO: 17265 - DNA, 120 bp, Homo sapiens
ttacgtctgcggaagccctcgaggttcagctttgaccaagcaggctgtgggccagacgaggcatgctgtggggagtaggtgggcctggtccccagctaagggccagagtccttgacaggg

SEQ ID NO: 17266 - DNA, 120 bp, Homo sapiens
gggcgcaggcccaggcccaggtccaccagggtgcccctgcctcctccactggcccaggtggagcaggtggacatgggagtggtgatcactcaggagataggagggctgtttctgcttttg

SEQ ID NO: 17267 - DNA, 120 bp, Homo sapiens
tgacgtccttaaaagatagacccacacaggaaacccccccacaaccccacactgtagcgtgagaagaaagggctactgagttggcaggagccagggctgggccagaccccattttgccga

SEQ ID NO: 17268 - DNA, 120 bp, Homo sapiens
ttccgtcagagacctcggaagacacagcctgggttatgggggtggccagagccaggggacccaggtccttacctttcaggttgcctgctgctgggcgacgccaggccaggccccagcagt

SEQ ID NO: 17269 - DNA, 120 bp, Homo sapiens
gtgcggtgggggcgccttggtatctgccgtgggcagatttgcgtttcctacctaggattcttaccctgggcccagagaagatgccactgtaggggctagctgccatcctctggttctctc

SEQ ID NO: 17270 - DNA, 120 bp, Homo sapiens
tcccgcccctcagggagtgtccattttgctcacggcatgtccttgttgccatggcagccctgaacccgcctggagggtgctctggacataattagaggctcagtgcccacggctgaggcc

SEQ ID NO: 17271 - DNA, 120 bp, Homo sapiens
gcccgctcctgagcgagcacagggacactgcactcaccttcctccagcgtgtctgctcacgctgccagctaggctgctacaacaccactggtattgccgcaggcccgcagggcccgagag

SEQ ID NO: 17272 - DNA, 120 bp, Homo sapiens
ccccgcactcccacaggatgggctgcccacaggacaaggctaggccccagagcaccggcctggggcacatcccagacacccagtatgtggcagagtccacaggggcccgtcctgaaccat

SEQ ID NO: 17273 - DNA, 120 bp, Homo sapiens
catcggtggtagcaaactgcccccccccccgcccccatgcactgaggtacctacctgcaggcgtgtgactctcccacactcgagggggtggggatgggggtgctgtcagcctcatgtggg

SEQ ID NO: 17274 - DNA, 120 bp, Homo sapiens
actcggaggcccctagggcccggctcacctggaaatcgaaggcccatggtgggagcagttgccaaggccaggctgcagggagaggccaagctgggggcagcactgggtgccgtggcagta

SEQ ID NO: 17275 - DNA, 120 bp, Homo sapiens
gtacggcctggacattctcccagggaggggttctgggtctccagctgtgtcctagcatcagcaggatcctgatggggtgcctctctgatggaccttgttggcagcattgtgggggctcag

SEQ ID NO: 17276 - DNA, 120 bp, Homo sapiens
aggcgcacaggatgtcctgtgggacagcactggtcggctggcgggcagagcagcgtgggctcagggctgcctagccagcctttctcacctcttgtttgtcctcacaggcctcgggggaca

SEQ ID NO: 17277 - DNA, 120 bp, Homo sapiens
agccgagagaacttctttcctgtgacagtggtgcccacagcccctgaccctgtgccagctgactctgtccagcggcccagtgatgctcacaccaagcctcgccctgcactagctgccgcc

SEQ ID NO: 17278 - DNA, 120 bp, Homo sapiens
ctccgtcagcatcagcttccaccctggaccagtccaaggaccctgggcctccccggccacacaggcctgaagctacccccagcatggcctctctgggcccaggtgagtcccatcccagtc

SEQ ID NO: 17279 - DNA, 120 bp, Homo sapiens
ctgcggggagagtgtgagtatgggtaagggaggcaagcagtgccctcccgcccagtcgatcccacagggtggcggggcaggtgaccgcgggtccactcaccagtcactggcagcctcggt

SEQ ID NO: 17280 - DNA, 120 bp, Homo sapiens
tcacggacgtgtttgctactgtttcctccccacaaagccttatagtaagtaggaaggatggcttggtcaggtaggaaaaggatactagcccacaccaggcctccctcagggcactgggag

SEQ ID NO: 17281 - DNA, 120 bp, Homo sapiens
atccggcctcagttacctgtgagcagttcctgggtaccaggccctactgggtgtggggccagcagatctgctcaaaccccatcttgcctcatgggcaagacagaagccagccaggatgag

SEQ ID NO: 17282 - DNA, 120 bp, Homo sapiens
gtgcgggcagtagagggccctgctggcctcatcggtgaaagctcctgttccttctaaaacccaggatccattggaatggcagcctgcagacagctaagccacagatccttcctttgggga

SEQ ID NO: 17283 - DNA, 120 bp, Homo sapiens
cagcgctgctacagccagtgagtgagaggggagtagacaaggcaccatccccctcgctggtcctgacaccagcagctctggcagctgcaattctgccagactgggttcagctcaggcctg

SEQ ID NO: 17284 - DNA, 120 bp, Homo sapiens
cagcgtggtcagagggttccctgtgcccctggggacatccagcgatggaccagtttccccaaccctccctttcaggccctcccctgcttctccctccctgcctcaaggacccagcctgtt

SEQ ID NO: 17285 - DNA, 120 bp, Homo sapiens
tgccgcagaccctgcactggcccacagcctgtgtcacccctggaggctcacctgtcttcccagttgaatttcctacccatctgaaaaacgagacagccactctgcagaagtgcccagcag

SEQ ID NO: 17286 - DNA, 120 bp, Homo sapiens
gtgcgcctgagtggaggttgagttgagaagtcttcctcagctctttcccacggtggctcaagcagcaagcaggtgctgatgttttcacctgatgccatccacactgctttgaggattgtg

SEQ ID NO: 17287 - DNA, 120 bp, Homo sapiens
cctcggttgcactggtcgtggccctgtgagacaaagaattacttccctttgggtcagaacctgtggccatttgttcccagaggagcctgtgaaggcttcaggacaaagagccgtaaaaga

SEQ ID NO: 17288 - DNA, 120 bp, Homo sapiens
gcccgccttagccatgtgaaggtggattggtcgccatctgcacgccaggcggcatccttttctatgaagtgttgactttgtaaatctgcccacacccagctggccatatccacccctcga

SEQ ID NO: 17289 - DNA, 120 bp, Homo sapiens
cgacgccgggatgagccggctctgcctgtgtcacagtggaggggtcctttagggccaggctcacccctcaccctttttttggttgcttttctaataaagatggaacagttgtctttgcct

SEQ ID NO: 17290 - DNA, 120 bp, Homo sapiens
tggcggagagttgctgtccccagggattctgggcctttactgccatagtccatagggcagggcctagcccccctccttctccagcatctcagggaccagccaggcaaccaaagcagcggc

SEQ ID NO: 17291 - DNA, 120 bp, Homo sapiens
agccgactcggggctgggccaggcagacgcctctagtgcagctggagccaggcttcaaaggggagttaggtgcatccccagaacgcacctgggtgccagtgggtgggaggctgtacggtg

SEQ ID NO: 17292 - DNA, 120 bp, Homo sapiens
ggccggcagggagggtacttaactcccatcacagtcgccctaatggggccagtcacagaatagctgggctcagtgcaagacataaatatgaagctccttgatcaaaaaggattaaggatt

SEQ ID NO: 17293 - DNA, 120 bp, Homo sapiens
gcccggggatgggccctgtctcccttccgggccccccgctgggcttgggtaccttctctccccttcctccttcctccctccagaggggacccctgcagagctgcctccgccccagggctc

SEQ ID NO: 17294 - DNA, 120 bp, Homo sapiens
cctcggctccttggctgggtgcagtcgctggcaggatcagttccaagtcctcaggagaccagcgcccaggctccttagcccaggaatgtccagaatctgggcacagagcccaggcctcag

SEQ ID NO: 17295 - DNA, 120 bp, Homo sapiens
ccacggtggcccacctgagcagctctttgtcggcgcttcctgtggggcctggcatggaggcacagacctggaagcagctggaggatgaccagggtccatcaacctttgtggagagggtcc

SEQ ID NO: 17296 - DNA, 120 bp, Homo sapiens
tcccgaatggggactcaggcagggtagcattggtcgggtttgccccttaggtctcagagaaagtgctggagagggtgaggctggaagttgggggccaggtagagaacactgggtggggag

SEQ ID NO: 17297 - DNA, 120 bp, Homo sapiens
agccgcctcagtgtgacctgcagcgctgggagtggccatataggggcagcagaggataggaacagcgagtctgggtggcaggaggttgggagggcagtcagccctgccctgcagctgggt

SEQ ID NO: 17298 - DNA, 120 bp, Homo sapiens
agccgacttggtcacaaccgcagccaaggtctgcgcacagcccacccctccgcctccccgcacctgggtcatccccgcatctcaggagtgttgaagaggttgcacaggtctccccaggtc

SEQ ID NO: 17299 - DNA, 120 bp, Homo sapiens
cagcgggcactgaccatggggtgggagtccaggcctctcacctgctcagccttgcccttggtgaatgggagagctggggaggcagagacatgtctcatctgaggccttcctggaggaggt

SEQ ID NO: 17300 - DNA, 120 bp, Homo sapiens
gcacgtgtgcgggaaccgagctgagggttgcagggcaggggtggcgggaggctagcggaggggaatggggtctggccttctctctttctagagctcactccgttgcttccccattcccct

SEQ ID NO: 17301 - DNA, 120 bp, Homo sapiens
tggcgggctgggcaggtactttcctccctacagatgaggtaaggcagggctcccctcccactgtctgaatccccagcgcacccctgtgccacgccaggcctgggccggccacgtgtcagt

SEQ ID NO: 17302 - DNA, 120 bp, Homo sapiens
gaccggtacatttggatttggaaagagaattaggaatggtgccctggcggaggcatggtctgttggcagcaacagcagtagcttggatgtacctgttgttacttcaccaactagatgggc

SEQ ID NO: 17303 - DNA, 120 bp, Homo sapiens
tggcggtgggcagacctaagcagtttgaatggaactctacagggttgtcttccctttagctcaaggttttgttcctttttcttgcattctttttccatttaacttccactaatgacatgg

SEQ ID NO: 17304 - DNA, 120 bp, Homo sapiens
gcccgattgtgggctgaggggtctgcattcaagcacgatgttctagaataggagtttaacgtgtctacgtaacctagaatgtggttattaggaaaggggctgtgcatgtgggtgcagctg

SEQ ID NO: 17305 - DNA, 120 bp, Homo sapiens
tggcggcacacctggtcaccagatggccagaagctgcccatcagccctgcccagatgtcagcctgggagctcaggctgctgccgctggctggatgccctttggtgaaatgcctgttttca

SEQ ID NO: 17306 - DNA, 120 bp, Homo sapiens
ccccgcagactcctggccccgtcccgccccctgtctgagttgtgtttttgttgctgttcctctgttgatggccagctctgctgttggcatgagccactgatgttcatgtgagaattactg

SEQ ID NO: 17307 - DNA, 120 bp, Homo sapiens
gtccggatccagctgtctggtcatggtttggtttatttattttgtccttcaggggctgttttgccctaagaatgagggggcttcccctggtctgcagttcccaactttatcccttgctgg

SEQ ID NO: 17308 - DNA, 120 bp, Homo sapiens
atgcgagcccagccctggtgcctcatgggatgggggggtaggggtccccaggatcttctggaggaaggtggccatggatggatgggctgtatctgtgttttccctctgggagtctcatgg

SEQ ID NO: 17309 - DNA, 120 bp, Homo sapiens
gcacggggagggcttggccccgcctatctagaggcttgcctcgggcccctccttggggaaggtttgcgtgcagagctgcaagggagagggttccagaagcattgccttttgcctcgtcta

SEQ ID NO: 17310 - DNA, 120 bp, Homo sapiens
cctcggggagcctgctgtgaggcagggggaggggtgcggagagaccgggcacagcttgccagttgactgcaccaggcccagagcaggtgctgaaaggtctggtcttttgtctgcaccctc

SEQ ID NO: 17311 - DNA, 120 bp, Homo sapiens
tcccgtgtttgtgaggaaggggtggcagggggtctgcagtcttaagggccaagcagaaaagaagggccaaggcaggcacccaccaggcaggaagcaggtgtgccctgaggggaaggacag

SEQ ID NO: 17312 - DNA, 120 bp, Homo sapiens
catcgcagggctgggttgcacccaagacttctgccaggaagagcactgaggagtcgggacacacaggtcctccccaggtcagccaccgacacttgggatgtgctgggcttgtttccacct

SEQ ID NO: 17313 - DNA, 120 bp, Homo sapiens
gagcgggcaggtggcttagagccatcggggtgatgagtggcaagccccggcatgagggctgcagaggactgtcactgcccacgctggagccagggctccactcccctcagggcctgcttt

SEQ ID NO: 17314 - DNA, 120 bp, Homo sapiens
ctacgccgatcatccccaaggccgggttgctagcgggttgctgtttgtcctgacacccagaagcagatatggggtgaacatcttgagtggggtggggtgagttggaggatgatgaccagt

SEQ ID NO: 17315 - DNA, 120 bp, Homo sapiens
actcggagatcacttcctccgtatgtttcttctgcctttgcaggacctctgttaggataaactggagccttgtgaggtccctgccccattggagaagttggggagcacccagggtgaccc

SEQ ID NO: 17316 - DNA, 120 bp, Homo sapiens
ggccggaatcctggagctggggaggcccagctggccccgccgccgccgggcctgaggatctggagcctggatggaaggaagggtgggcgcccacagccttttcaaagcctgcctggggct

SEQ ID NO: 17317 - DNA, 120 bp, Homo sapiens
caacgcctggagccagaagctggggcctgccaggggcctccccgtgcccaccaaagggcagtggttgcaattggagagcttctgcccctcagccttgttgctcccttgggcctgggggtg

SEQ ID NO: 17318 - DNA, 120 bp, Homo sapiens
aggcgggcagcccaggcacctgcacagggacctcccccagccccacagccttggtatctgaggacagcactcagctgaggtgggtacggggctggcaagggggcagcaaggccaagactg

SEQ ID NO: 17319 - DNA, 120 bp, Homo sapiens
gcacgtggtgccgagaacacaggcccctccctggagaagacaagctggcttgtggggcaggcagtttggggacagccctgccaggtgccgttccccatccctgaactggacagcttggcc

SEQ ID NO: 17320 - DNA, 120 bp, Homo sapiens
tgccgtctctgggcaatggcagcgctggagacctgggccaaagcacctgacagatgacacaggaccgcggggctctctgcctctgaagggccagggaggagcccagtaggggaagggtgg

SEQ ID NO: 17321 - DNA, 120 bp, Homo sapiens
agccggcccatcacagcctccttggcactggctcctcatgggtggctgtggggactgtggagctggctctggggctggagccactccaggccctgcctgaccaccccctggcctcaggac

SEQ ID NO: 17322 - DNA, 120 bp, Homo sapiens
caccggcgccactgctgaggaatggaggaactgccccttgagccctagaggtgaatgttaagggctttggcactgtgaccctgaggaccagctttggaacaaagccatcactccctgcgt

SEQ ID NO: 17323 - DNA, 120 bp, Homo sapiens
ggacgttgcggctgcaaccctcctgctgtgggactggggtgcacatggctagaccatgcatgggaaggtccacgcaggaaggttgcgggccccaggatgggaatggcagaggagtcattg

SEQ ID NO: 17324 - DNA, 120 bp, Homo sapiens
ggacgcgtaaggtttggcagctcagcagtgactggcatcgtggccagctgactctgtgttgctccccagttacggtccacgacacattagtagcttgaaactgggcacaaggggagaatt

SEQ ID NO: 17325 - DNA, 120 bp, Homo sapiens
ccccggccaggagctgatttgccagcctacggctgggtagctcccaacctttccccaatgaatgcactcctcttcccctgtctgccccaaaggtgcctctgactccactgatctgctttg

SEQ ID NO: 17326 - DNA, 120 bp, Homo sapiens
ggccgagaaaggcacagctgagagtggattctggcttggcaggggcccaggttgcctgtgggtccgggcaagcctcacccgggatgtgctggcagcagctgggagagcctgcaggagtgc

SEQ ID NO: 17327 - DNA, 120 bp, Homo sapiens
ggacgggcagcgaggtggcctgtgtggaccctgctggcaggagccgtgggtgtctttagccccgtgtgaggccggcctgggcagaggggtctgttgctgtcactgaggctggtgggcagc

SEQ ID NO: 17328 - DNA, 120 bp, Homo sapiens
tatcggtatctagtgctgtttagcatggggacccacagcacagaaggtggggagaccctgagaacgggggtacacaggcaggtacccagggctgccagggaagccttgccaaacagaggc

SEQ ID NO: 17329 - DNA, 120 bp, Homo sapiens
gcccgtgaggcaggcgccgatgatttgaccccaccagcagggctctgggtgatgggactggggagtcctccttcactttggcagacgtgttatgttccaccttgtttgcccccagcaagg

SEQ ID NO: 17330 - DNA, 120 bp, Homo sapiens
gagcgtggtctggggctgcatcagccttctagcctgggatggtcagattggcagaaggctgtggcatccttcaatgcagatgccctagagagggccgtggtgggaggcaggatccctggg

SEQ ID NO: 17331 - DNA, 120 bp, Homo sapiens
aggcggctcctcagtggcccactgggcctcactggacagtcgcctgttgctgctgctggtggtgctgggcctgggagtccaccttggagccacaggccaggcacctgggtgggaggcagc

SEQ ID NO: 17332 - DNA, 120 bp, Homo sapiens
gcccggggccagcaccagctccacttgtacctgttgggcaggggctatcgtgagtcaggtgggccctggtgagtactgctcagggagagaggccaagagcatcagggataactgtgttcc

SEQ ID NO: 17333 - DNA, 120 bp, Homo sapiens
caacgacacactttgtgaatggctgcctggcaagtgctccatggaaagcaggggcttgggaggactcggccctctccagctgctgcaggccctccgttgctgcagggtttctggctctgc

SEQ ID NO: 17334 - DNA, 120 bp, Homo sapiens
gcccgtgccaatcctgttccagccacttgaggtgccgacagcattggagttggagggaaagttggggtctgtgtgtttgagctctgtcacatggacaatggggtagaggggagcctggcc

SEQ ID NO: 17335 - DNA, 120 bp, Homo sapiens
agacgaggtggctgcccgagtccacgtgaaaggcagcctctgacctcttgtccccaggcaggtggtggcggctggcaacacactcatagggccccatgagggttcaggattggagggggt

SEQ ID NO: 17336 - DNA, 120 bp, Homo sapiens
taacgggcagaggtccatttggatccagaccattcacaggctcgaaggggacactgggagttggggctgggctcaggcctgctggggaaccaaaacttctgcttctgaggggtgtcagta

SEQ ID NO: 17337 - DNA, 120 bp, Homo sapiens
caccgtatcaatgaggaaactgaggcccagaaaagaaaagcatttttgcccagagtccctcagtgagtcctggttccgtacctgctttctgccagggaccaaactcccgttagtcattcc

SEQ ID NO: 17338 - DNA, 120 bp, Homo sapiens
gggcgtgggaggagggaggtgaggcagctccctccgagtggaagctcacagtcagctgcagcgccgcccctgccctgactgcagctgactggcaggggcacctggaggcagcgggttcgg

SEQ ID NO: 17339 - DNA, 120 bp, Homo sapiens
gggcgcagtatgagagggcttaccctctgcggcagtgggagacaggaccaggcagctccccacatccttccacatccgagctccaggggtctctggcttgtcctttcacagggcggctgg

SEQ ID NO: 17340 - DNA, 120 bp, Homo sapiens
tgacgggatggagcaggccaggggggctgagaagttggcctggcgagagaaggtgggtgggactgggagagcctgggcagggaggggcctttctgggagggagtgtcatggggctggccg

SEQ ID NO: 17341 - DNA, 120 bp, Homo sapiens
caccgtgacaacaatgcgcagagcagggaatgcagggagccatggatagtgctggggtgagctggagtcctggcaggggcccagctagggcagtactcattctgcagagcctgggagaag

SEQ ID NO: 17342 - DNA, 120 bp, Homo sapiens
cagcgggaattctattggaccaggggaaccagccttgctcagtgacttctctgggtgtcctcctctaaagtgagggtcaaattcccacctctctcgcctcctggctatgaccacagcaga

SEQ ID NO: 17343 - DNA, 120 bp, Homo sapiens
aggcggggtcaggggccatcctcaggctgacacctggcctgtgggtagggtgggatctgaaactatagggtcttcagggggccaagtgtggggtaaggggtggcactttccgcagggctc

SEQ ID NO: 17344 - DNA, 120 bp, Homo sapiens
gctcgccctctgcagatggttcagcttctcatcggctgtccctttgcaggtgcctcaggaaccctgaagctgggctgagccatgatgctgctgccagaacccctgcagagggcctggttt

SEQ ID NO: 17345 - DNA, 120 bp, Homo sapiens
gagcgccccagcagggctgcacttggctcctgtgaggaaggggctcaggggtctgggcccctccgcctgggccgggctgggagccaggcgggcggctgggctgcagcaatggaccgtgag

SEQ ID NO: 17346 - DNA, 120 bp, Homo sapiens
gcccgcgtccgtgctgagcctgcctgtcgtctgtggccatgcccatcatgggctcctcggtgtacatcacggtggagctggccattgctgtgctggccatcctgggcaatgtgctggtgt

SEQ ID NO: 17347 - DNA, 120 bp, Homo sapiens
tgtcgtttgccatcggcctgactcccatgctaggttggaacaactgcggtcagccaaaggagggcaagaaccactcccagggctgcggggagggccaagtggcctgtctctttgaggatg

SEQ ID NO: 17348 - DNA, 120 bp, Homo sapiens
atacgttttacttattcctcctttgaattctactcatttatcactggaacactatccacatttatatatagcagactcaaactatcttaaactgaattggaagactgcaggcttgaatta

SEQ ID NO: 17349 - DNA, 120 bp, Homo sapiens
ttccggtttttacaaattcatgcaatcattttctcctgtgactacagtaaagggttttatggctatggtcctttcgttagcacacatgtctctagaactctctagatctgctacacatac

SEQ ID NO: 17350 - DNA, 120 bp, Homo sapiens
caacgcagactttcatctactcttatgttccagatagactagctactctgcaatggctatctttttctgcttgtggtcttgcttttccttctttttgattgaccttcctgtgccttccac

SEQ ID NO: 17351 - DNA, 120 bp, Homo sapiens
gcacggtacttttggtaatgttatcacctactattgtaaacacagctactgtttatcccacctctggacctgcacgatacttttggtaatgttatcacttactattgtaaacatagctac

SEQ ID NO: 17352 - DNA, 120 bp, Homo sapiens
cgtcccctctagttgaagaactgtagttgggactttgcagccagcctcacccaacctcacttccacatccttcttttgaaagtgtgtttacattagagtggttgtgtaaacaggaaaaga

SEQ ID NO: 17353 - DNA, 120 bp, Homo sapiens
aggcgagcctggggagccttgagcctgctaccaaggcccccaggactgttgctggcagtgcctgccgcctgcttggcaagatggtggtggtgccattggcgggatatttactgtggtact

SEQ ID NO: 17354 - DNA, 120 bp, Homo sapiens
gaccggaaggaattgagaggctgaggcttctcttccttctctgtgaaataaagggggtgacaccagcttagggatgttggagacgatctgcctattacgaagataggagttataaagaaa

SEQ ID NO: 17355 - DNA, 120 bp, Homo sapiens
gaccgcctccagataactcatacatgttcaggacatcatggcagctcacgtttgcatattaaagggctaaggtgggagggctagattttttgcgggctacttgaatgtcacacctggtca

SEQ ID NO: 17356 - DNA, 120 bp, Homo sapiens
gcccgttgctttggagcacaggccttagcagccaaccttaaaggactaggggctccccacactcaagagggcagaccctgctgtcaggattttggctggtgtcaggaggcctcctgggtg

SEQ ID NO: 17357 - DNA, 120 bp, Homo sapiens
ccacgaggcctaccagtgggatctaggcccgagagccctccatctgacagagctggaggacctggagggctgtgggggctttaagagtctccagcggccagggctctgcatggcagggca

SEQ ID NO: 17358 - DNA, 120 bp, Homo sapiens
atccgtcaagcaacttctctctccaggctcagtcctgcggtctgtggggagaccattgccatggatctggctcaaaggcaacaagggcactgtcgggactggacttcctgtgggcgcagc

SEQ ID NO: 17359 - DNA, 120 bp, Homo sapiens
acacggcactggcagacaaagcagctgtgccagtctccgagttcctgggactctgccagatgggctgaggctgcagttccacattccaaccccagcagccccaagcctgggccagggcat

SEQ ID NO: 17360 - DNA, 120 bp, Homo sapiens
gagcgggcccggctggggtggggatggggtccgagggcctaggcgcaccaggctcctgctgtcagctgtccaagtagacaaagaggatgtcctcatctgtgccatagctggttctggcct

SEQ ID NO: 17361 - DNA, 120 bp, Homo sapiens
aaacgtgctccaggccacatagacggggtaagtctatgtggtcagggcgtccaggggctgtctatgtgaatccagtctatgagagtcagggcagcccttccctgtgcccggagggcagta

SEQ ID NO: 17362 - DNA, 120 bp, Homo sapiens
ggccgggcttttctttctgaggaatgtgccggccatcctggtggttgggggaggggtgcagcctgggcagcatgaaagggtaaggcagggacctgggcagtggcgtggggcctgtggtgt

SEQ ID NO: 17363 - DNA, 120 bp, Homo sapiens
atgcgcacctccacccgctgcatgctctcccacacggggactcccacacggggacccccagggcctggagggaacacacaagcactttgtctctggcttgctgtctcctaaccccacaga

SEQ ID NO: 17364 - DNA, 120 bp, Homo sapiens
aggcgggcagcacgtgaccccctgcctgggacagggagctcctgggcctctggcttgggcatatgaagagcagtcatgaagtcagccccaggaccttcatgccgaggctcggctacagcc

SEQ ID NO: 17365 - DNA, 120 bp, Homo sapiens
gaccggggcttgcaagcccagctctatcctcctggctcaggcccctctgaaggcacagagcagcagagctgggtgggtgtcttcattacacaaccctgtgaggacaggagggaaccctgc

SEQ ID NO: 17366 - DNA, 120 bp, Homo sapiens
agccgccagcagttaagagaggtgcagcctttgcagggcaagggactcaggctcctaaggacacaggtgcccaagaccactttgggaaaggaatttttttcataccagaggcacctgaga

SEQ ID NO: 17367 - DNA, 120 bp, Homo sapiens
taacgtcctgacacaatcagcctgttgtgtattttaagtgctcaccacactgcagacccctccatcctaagcccaactttgactcagttgctcccctaggcagctggtgaatcgaagtgt

SEQ ID NO: 17368 - DNA, 120 bp, Homo sapiens
cgacgagacggtttcattgaccctagacagcttcctcatgatgtatgtatagggcacttgccgagtggttcacttggcaaagttaatactttcagcaacccactgaaataagtagtagta

SEQ ID NO: 17369 - DNA, 120 bp, Homo sapiens
gggcgaactacttaaatctccctgaatcttactttacctttaaaatacagatagtaccacctatagcagatgattgttatgaggatctgcctttcactcatcaagttcactaagtcttta

SEQ ID NO: 17370 - DNA, 120 bp, Homo sapiens
gatcgacttgaaaaccagcagccttctcaccaaaatgggtatgaaaaccaaaagcttaggagtaaacagaggggtcaaaattgtttggacctcttcaaaataccccacccccagaaaatt

SEQ ID NO: 17371 - DNA, 120 bp, Homo sapiens
attcggcctaactcagaggtagctgtgtgaacaaccctcttcacagggcatctgtcaaataaaatcagtggcaactgcttaacatcacaactgcctgatgcagcaatacatatcaggtaa

SEQ ID NO: 17372 - DNA, 120 bp, Homo sapiens
cctcggaatctaaaaatgtgcagtactgtgtgcattcccaagaaggacctaagaagctcctaatctctcatctggctgtccttgaggttctacataaatgggaagtgaaggctaagagtt

SEQ ID NO: 17373 - DNA, 120 bp, Homo sapiens
tcccgggaaacgtatctcttgggatcaggagctgggatggaacccagggctcctgagatgggacaaagctatgctctgtgcacctgtcttgcctcctcactttgtacaatgaggtaggca

SEQ ID NO: 17374 - DNA, 120 bp, Homo sapiens
tggcgtggcagccataaatccagtttcctccttggcatttcttaaatgtgttctgcctgaattaaaaactgaaaggggggaggcccagtagaccttgaaatgttcagcttgctttctgtc

SEQ ID NO: 17375 - DNA, 120 bp, Homo sapiens
tgacgaaatcccagaggccctgaaacctcccttccagtaagtgcccatgtttgcatatcctggttcaagaataggaactgcttgatggaaactgatcagggagctaaaattactgattaa

SEQ ID NO: 17376 - DNA, 120 bp, Homo sapiens
taacgaatgttggatgtatgctaggcactgtgtgagcacttggcatccattctctctttggttcccgcaagttaggaattggccccttttctcagaggagaatgaggccctgtgaggtta

SEQ ID NO: 17377 - DNA, 120 bp, Homo sapiens
ccccgtgtcctggaggttgcccaggcatggaaaagatccaggcctggtccactgcttttagacacttctcaggcaaccccctctttcagtaatttgcgtttgattagatagaaactgaaa

SEQ ID NO: 17378 - DNA, 120 bp, Homo sapiens
agccgggcagagtccacacctagctgagtaaatagcacctgaaggccctggcagggcatgcaagctccccaggggtgccttgctttgagagacaaccatgagaatgtgcccttggactgg

SEQ ID NO: 17379 - DNA, 120 bp, Homo sapiens
tgccgggtgggtgatttcaagttccagtggcagtggtaatttttgcatttcctgactcttgtgtttaaatttgcagtctcaacattgcatcactgtaagttttcacatttaatgaatatt

SEQ ID NO: 17380 - DNA, 120 bp, Homo sapiens
atacgaatgtggtggtttctgacttgattatagcttgctgtgtactgtggccaggagtgccctacagacaacagagttggcacacgtctcagcatgccaagccccggcggatgtggttag

SEQ ID NO: 17381 - DNA, 120 bp, Homo sapiens
ccacggtgactggggcattggttgccataccaaccttgtttttggaagggaaagctctgaaacagcaatgggatgggggcagaatagttttgaatattccaagtaaacttattccctata

SEQ ID NO: 17382 - DNA, 120 bp, Homo sapiens
tctcgaactcttgggctcaagcaatagttagtttacttttgcaaggctgttttaattgtccttttgcaaaggtgtggaagttatatggtgggcctttcatgtgtgaatttcttccctact

SEQ ID NO: 17383 - DNA, 120 bp, Homo sapiens
caccgtgcctggccacatggagtcattttcacataaaatgccaaggtgccaaatggcacagccacactgcatttgaccatgtatcttacatggccttgtgctgtccttcaactctcattt

SEQ ID NO: 17384 - DNA, 120 bp, Homo sapiens
aagcgactcaccaagggagcaggtggtggccgcatggttccccacagtgcccagatggtgtccgtgcctttcatggtctggttccatggggatttgttgataagattttgctttcatttg

SEQ ID NO: 17385 - DNA, 120 bp, Homo sapiens
cagcgcatggtgcagagtggtgtcagcacactttcacttgctgagttgattggtaacatattgaatctagaacaaaagatacaattgaaaagcatttgtggttgtctttgtatagttaca

SEQ ID NO: 17386 - DNA, 120 bp, Homo sapiens
gggcgttttctaaatgcactattgatttgaagctaacatgatgctctacttttggatcatgaaaataatgttaattttttatttggctgtttggagggaccactggagtaggtcatttat

SEQ ID NO: 17387 - DNA, 120 bp, Homo sapiens
tagcgttgggccgtgtgcaagtctcttttggtggggatatgcgagagtcactaactagcaacctttagggaaaaagaagtccaagagggttgaattagtaaccactggggcctgtacgtg

SEQ ID NO: 17388 - DNA, 120 bp, Homo sapiens
agccggattgctggatgcgcggtcagttggatgcaaatttgcttttgctaaagaaaaagaaggcctgcattaataatacaatgataagacctgtgctttcagtttgtgttttttaaagcg

SEQ ID NO: 17389 - DNA, 120 bp, Homo sapiens
tttcgagtcctgcccctaacccctcagtttgggctccatctgttgactgccctgggtttcagaagggagatagtgagtgtgctctcttgaacatggtcctttaggattaggcaatagagt

SEQ ID NO: 17390 - DNA, 120 bp, Homo sapiens
ctgcggcttcccccaaatgaatgaggaatatatttttctaaatccagccagtgagccaaatgagccacactgggataaactttgtttgtttacaaattatgtaagagaagggcccggcca

SEQ ID NO: 17391 - DNA, 120 bp, Homo sapiens
tcccgagaaacaggagcagatgctcctgggaggccttcagcaactttggaatgtttaaagtagaaatatgtaaccaaggtgaagttgttccagaaacattgcctgctctggccagaacca

SEQ ID NO: 17392 - DNA, 120 bp, Homo sapiens
gcacgtgtcagcttttttatttagggcaagaggtgcagaatggactgggccagtccaggcagaattttctttagaatgtttaatttttggttttcatcttaacccggcttctcatagtat

SEQ ID NO: 17393 - DNA, 120 bp, Homo sapiens
atccggggatcaaggagcccgcctcttaaagcactcaattattgtccctaggaaagatgtcagctgtagcacaaacactccaggggagggaggctgaggctcgccttaacttcattattg

SEQ ID NO: 17394 - DNA, 120 bp, Homo sapiens
gtgcggaggattatcccctctaggagcaagttgccccatctggttgagggagaggtggttctgtcaccagtagagcatgttgagtgctgcagagatggctggcgacggggatgtctggcc

SEQ ID NO: 17395 - DNA, 120 bp, Homo sapiens
ttccgaatggcctttgtttccatttccttttttttttttttttttttttttaaagctgcatccttttgcatcgaatgaaaccccatcaagggcatctcctaactcttcttccattctctt

SEQ ID NO: 17396 - DNA, 120 bp, Homo sapiens
actcgtctgcaaagaaaggggtctgcctttcagtcctttgaagccacctggtctgacaaagacagtttccctgtccctttttggaccttgagctgagcaaaaaattacttagttgctgaa

SEQ ID NO: 17397 - DNA, 120 bp, Homo sapiens
taacgtgcctattgtgcagaatgcagggctttttgttcaaggctgtctccatttggaagtagaatgacaaagcagtgtagatttacacagagcatctctgagtctgttacaacccttaag

SEQ ID NO: 17398 - DNA, 120 bp, Homo sapiens
tttcgagccaggacagtacttcttacattctgtctttgtcaagggcttttgtagtcctgagattttactgtggtgcactggttatgagatgagactcatagttacaaaattccaaactga

SEQ ID NO: 17399 - DNA, 120 bp, Homo sapiens
taccgtgattaggggtgggaaataaatgttgtgtgcagttttggatctggagaactttgtgggagtgaagagccaagaaggatgctttgaaaagcataactcttgctgggcgcggtggtt

SEQ ID NO: 17400 - DNA, 120 bp, Homo sapiens
ccacgcatctgctttattctctcactccccatttggtaggagacgcagccccccagtctccctgggcatgaactctctgggttttgagtctgaaaaattccagaaaagggattcattggc

SEQ ID NO: 17401 - DNA, 120 bp, Homo sapiens
ccacgtggactggaggagttgggcaggttttacagagtgggggttgtgtaagacagacgtacgaggagacaggatgaggtaggaaaagaatctccagaacagggcagaagaaaagggagc

SEQ ID NO: 17402 - DNA, 120 bp, Homo sapiens
gcccggaaattactgagggctcttcatgtttgccatctctcctttctgtttgcacatttaagcaaatgtgaaatgtaggagcaacatgtccaacagcatgggaaggtggaaaactatgtt

SEQ ID NO: 17403 - DNA, 120 bp, Homo sapiens
cagcggggaaaccaaggtacgagaggtgggtggaaaattgaaccatatggtcagcccactaacccacgtccagccctcagtgtcttgggaacttctttgcaaagcacaaatacagactct

SEQ ID NO: 17404 - DNA, 120 bp, Homo sapiens
aaccgagtcaaaggaaccttgacttttcaaagtgattgggagagggggagcatgtaagggttaagacttgggtttagtcatcatactaacacaggtttcaaccccagttctaaccctttt

SEQ ID NO: 17405 - DNA, 120 bp, Homo sapiens
gctcgagtttttttgtttttgtttttgtgttttttaatctccccagttgcctcctccgtgagcgaaggttgagaagcatagctgcccctgtgaggaactcagccttcagagagagcctgc

SEQ ID NO: 17406 - DNA, 120 bp, Homo sapiens
gcccgccgcctctcatcctccagagaggctgtagggtgtccagactttgcaggcactgttgttcctcgttaagcctgatgctgccacctaattaacacttgtttatattaattagttgcc

SEQ ID NO: 17407 - DNA, 120 bp, Homo sapiens
taacgacttccaggttcttccaaaagcttatcttccaggcataggcaggtaatgaaacaacccaactgcggttttttccataacatctttcaccccacagtatcgatggagcaggagggt

SEQ ID NO: 17408 - DNA, 120 bp, Homo sapiens
aaacgtctatgtttaagattaagatctagggaaatgcatttccgtttgacacccactagtttctgattgtgaaaagggtaccaacctgtgcaatggcgccgcgacccggccgcggactcc

SEQ ID NO: 17409 - DNA, 120 bp, Homo sapiens
agtcgggtacctttaattaggagaaattaagtggggctgctacatattttgagaataagtaacactatttaaacttaggcagccttaaccactaacttaaccgctgaattctcgctgcta

SEQ ID NO: 17410 - DNA, 120 bp, Homo sapiens
tcggccccggacccggtgagtgtgagcgaccccccgccgcccgccctgagcggagcccactcgaggggcgacaagggccggccggcctgagagccccctccctcccgcttcaggaccttc

SEQ ID NO: 17411 - DNA, 120 bp, Homo sapiens
ttccgggccccttcccctcgcccctaggcgacgcccctcaggccgggatggtcccttcctgggacccgggctacccccaggcccgtcatcgacgcccccgggcccggtactgtcccccgg

SEQ ID NO: 17412 - DNA, 120 bp, Homo sapiens
acccggtgctcctcagcgacgcccctcagcccaggaggccctctccgccttgagtcttccaagaccctctgcgacgccccccgggctgggacatcttctctgtctcgggatctgggaccc

SEQ ID NO: 17413 - DNA, 120 bp, Homo sapiens
acccgctgcccgagtccctcagcgaccccaaccaggccgggacgccccctctccccggtacctcctgggatcccgtcccaagtccccagcgacttcccccgggccgggacgtcctctgct

SEQ ID NO: 17414 - DNA, 120 bp, Homo sapiens
ccccggtacctcctaggatcccgtcccaaaatccccagcgactccccacgggccaggaggccccctgctccccggtacctcctgggatcccgtccccaagtccccagcgacccctcccgg

SEQ ID NO: 17415 - DNA, 120 bp, Homo sapiens
ggccgggacgacccctgctccccagtacctcctgggatcccgccccaagtccttcatcgacgcaccttgcaccgggacgactcccccgctacaagaggctatacgcccctctccgagacc

SEQ ID NO: 17416 - DNA, 120 bp, Homo sapiens
cagcgacatccctcccctgggccaaggtcccctccctgagcctcactgcgacgcccccgcgtcccccagtcctctcctcccgcctacaccggtggaacccggcgcctccccgcgcagagc

SEQ ID NO: 17417 - DNA, 120 bp, Homo sapiens
gagcggaggcgggaggagccggcgctcagccccttttcccgagtcctcggctgcacccgcttggcggacattataacttctgcctcgcgaggaacgggatggacttgttcgccctgctag

SEQ ID NO: 17418 - DNA, 120 bp, Homo sapiens
ggacgaccttgtacccagacggacgggacgtgccctctctctccgctgggccgctttgaacttccctatgactcaggtgatggcgcagaagggggagagaaaaaaggaagcagtgatggg

SEQ ID NO: 17419 - DNA, 120 bp, Homo sapiens
caacgccgagctccgtgttttgggtcagcccacaccttagacaggtcactcactacccaggccaaggccaaggccaggtcttcccgaggtgaggccctggaccaggatgaagcttggctt

SEQ ID NO: 17420 - DNA, 120 bp, Homo sapiens
acacgcaaccttgtagccgaatcctttctaagtggaagagaaggcaagagggcgttgcatttctctgcaggctgtttgggtgttgagcataggccatttgtgaaagggatgggaagagtt

SEQ ID NO: 17421 - DNA, 120 bp, Homo sapiens
aaccgttgagagatctatttctcagaggaaagcccaggcagcaggtggcaccagccctgacacagaaaaacagccaggaaaaaaaaaaaaaagaagaagaagaagaaaacaaacttctat

SEQ ID NO: 17422 - DNA, 120 bp, Homo sapiens
agtcgttttaaaaaataacaatgtgcttagcatagctgattattttgttttaattaaaacatttctgaaaaaacaaaatgaaacattcaaacataccaagttgattgtgcttgtactgtg

SEQ ID NO: 17423 - DNA, 120 bp, Homo sapiens
ggccggaagtttggatctgtagttttgccttgagtgtctgccgcctgaataaggacaacataggaggaagtgaatgtgtcccttagaaaactacctgtataggtttgaagtgagatccag

SEQ ID NO: 17424 - DNA, 120 bp, Homo sapiens
caacgccacttggcaggttaccttctggccggctcactgggcagccttgtcattggtgagaatgatgactgacattccttctatattcagtttgaccttgagaatccagctggaacccgt

SEQ ID NO: 17425 - DNA, 120 bp, Homo sapiens
tggcggtgcttccctcaacccttacctcaccttctgagactttgtctgtattcagactgatgagggaaaggaaagaggccatcgcaaaaaaatgtcagattggcgtccatacacctcaca

SEQ ID NO: 17426 - DNA, 120 bp, Homo sapiens
aaacgtgacttctcttctaagggaattccttcccctccttttaaattctctttctaggtaaacaccttcctagcctgcacttgtaccagtttaaagaggaatgaatgaattggggtgcta

SEQ ID NO: 17427 - DNA, 120 bp, Homo sapiens
acacgcaaagttgcctctctccctgcatttatacaacagggccctctcagagctacccctctgccgggcccagcttctagcttcccttgccacggatttaatctctggcaagtagccaaa

SEQ ID NO: 17428 - DNA, 120 bp, Homo sapiens
gggcggggccctgcttctagtgggctgaggaggctgcagctgcttccaaacccaagtgtcacaccacattagcaactgcagactttgagggctggatttctttcagtttggttagattct

SEQ ID NO: 17429 - DNA, 120 bp, Homo sapiens
gaacggtatactcacacacaaaattttaaagctaggaaatagtaaaaacagtgtaggcaacttttaaaggtgattcagagcggctgtagctatcagcgtgtatgattgactctgcgtggt

SEQ ID NO: 17430 - DNA, 120 bp, Homo sapiens
ttccgaagacccttctggttctaatcagattgttcccacataaaatacagtggaaatctacaataataaaatccctattcctatgtctatggggaaataaacaggatggggactgtcctt

SEQ ID NO: 17431 - DNA, 120 bp, Homo sapiens
cctcgtctatacaggccttttcagctgagaatcactcaacttccaaatggcaggaagagatttggaaaaagtttagttggaggggagattaacttaaaaggagtgtcttcaaaggctggg

SEQ ID NO: 17432 - DNA, 120 bp, Homo sapiens
gtgcgatgccctgcttgctgtgatgtgtgcatggccaatgcagagcttcactggcctggctcaccaaagattcttccctagcgcttctggcagatgaagggtttttggttgtcttagctg

SEQ ID NO: 17433 - DNA, 120 bp, Homo sapiens
tctcgtttgatttgatggaatgcaggagacctgaactatttaataccagtttatactttggaaaagggaggctgaaattgttgattatcacatcaaagagcccaggccttttgttttagc

SEQ ID NO: 17434 - DNA, 120 bp, Homo sapiens
caccgaatagagggaggaaaatgacaatgaaatactgtttaaagaagggctttgtacaagttctcctactttgatttctcaactgacacccgacaccatgtttgtcttgtgtgacttttt

SEQ ID NO: 17435 - DNA, 120 bp, Homo sapiens
ggacgctttgtactttgggaaagcttatcttctacgccacatgacaggcttagcccactctggcctgataggggttgctcccagctcctgctgcaggatctttatgcccatttccggcct

SEQ ID NO: 17436 - DNA, 120 bp, Homo sapiens
aaccggagtgtcagctttccagtgttctgagtctaaataaaaggggcttggaaagcggtgaagagaggcgagccttttctgtgtgtccagtagcccctgccattttatttatctgcttca

SEQ ID NO: 17437 - DNA, 120 bp, Homo sapiens
tgacgcagttttcttcagtattctctgaggagtcagcattttgaggaaggaatagcacccatttctagcaaatgtgagcctcgtcctggtgaaagtttgtcagtggagtctgtattttat

SEQ ID NO: 17438 - DNA, 120 bp, Homo sapiens
gagcgaaaccttgcctaagagatacatgactatacttttaaacaaggtaaagaaaatactgtgtgtagaaaggtcttgcagaaggtttgaaccacagaaactaaagcaagatctgcttct

SEQ ID NO: 17439 - DNA, 120 bp, Homo sapiens
attcgtaacatcctatctgggttatttttttcttattatttaaacctgctctttgcattgccctctttctcacctctcaggtcaggagtcttgtgtatgggatctggcaaccctttcact

SEQ ID NO: 17440 - DNA, 120 bp, Homo sapiens
cctcggtccatttgttcaacacaaagatagtcttttagtaccagcctgtgtcattctcttgggagtggtaaagagggggtttcaatctgggcacttttatttggaaagataatctttgac

SEQ ID NO: 17441 - DNA, 120 bp, Homo sapiens
aaccgcttagtatgcctctaatttgtaatatttaccggatatgctttcctgttccaaaaaaggaaaattaaatattatttcagtttttctgtggccccttgataaccctctaaaatctct

SEQ ID NO: 17442 - DNA, 120 bp, Homo sapiens
agccggacctcagacattgagtctggcagcatattgtacttctagtgtgtctgattaacatagttgagcaaaacctgttttacagtttgtagcaagagatgtttgtaattgcctggtgga

SEQ ID NO: 17443 - DNA, 120 bp, Homo sapiens
aaacggaggaaggagaggtgctgacggaaacagagggtgaaatggtgcggctgcaagccaaggcatatgggcagctgctaggaggttgaaaaggcaaggaatggattctccccttgagcc

SEQ ID NO: 17444 - DNA, 120 bp, Homo sapiens
atacgtattcggttagttaaatgtagacctagtctcacatactcttcaaaataaaacaaaaacatggtttttagcagaggacactaaagcttccattttcaaagctggttgcttgttgtt

SEQ ID NO: 17445 - DNA, 120 bp, Homo sapiens
gggcgacagagtgagactccatctaaaaaaaaaaaggtccatctagtagagagtaaaatagtttgaacagctcaagtaccgcctcatggaaatccttatgactcattgaacaaggctgag

SEQ ID NO: 17446 - DNA, 120 bp, Homo sapiens
aaacgaccaggttacagtctgtctcccagaacatgaggccctgctaccagtgtggctcgcatgtgggtctcagtcagagtgtcagcgacatcttcctgtcctctgctgattagaggaaca

SEQ ID NO: 17447 - DNA, 120 bp, Homo sapiens
agacgacggggctagtgggggtggagggtgaggggcagctggcagaagctgtctgctcagtcatcactgccacatcaagtaatttgtcacagactctctggctgatttttcagcaagctc

SEQ ID NO: 17448 - DNA, 120 bp, Homo sapiens
tgacgggggcttcatagcctctgctacccctagggattataatttattgaattaacataaccaaacagaagaacatgtaggccagagtcaacagtgggttacaggaactacccaggctag

SEQ ID NO: 17449 - DNA, 120 bp, Homo sapiens
cctcgtcagagcgtgcctctccacaaggcacttgggcctgggtgattgttgcgcctctggctttggcgtttcctctttgcagcactttgcctacctcccccaagccctgagccactgcct

SEQ ID NO: 17450 - DNA, 120 bp, Homo sapiens
tgccgcccctgggaggaaagagggccacacaggaagtgtctgcagggagaggtggcactcggcagcctgagttcaggagaggtgcttggagcttcaggcagaggggccttcagaggaggg

SEQ ID NO: 17451 - DNA, 120 bp, Homo sapiens
aaacggagcaatgtgtcacaggcaggcaggggcaggactgccaccccaggccccgtgggaggcctgctgagggcacagagctgctcggtgcagccttcatgctttgatctggaaagagca

SEQ ID NO: 17452 - DNA, 120 bp, Homo sapiens
gtccgcaggcctctgtctccaagaggcctgtcacacaggaggaccgctggaaacataccaacacgtgcagtctcccctccaagctattcatgctgtttgtggaatctctctcaaacataa

SEQ ID NO: 17453 - DNA, 120 bp, Homo sapiens
tgtcgtcccaacgggtcctgtgctgtgaatagatccatgtgcagcacaaagggaatgtggcacgtggccccaggaagagttcacccggccagggggcagttgttcagttgcctggggctg

SEQ ID NO: 17454 - DNA, 120 bp, Homo sapiens
cagcgggggcagcacttcctcggagggcctgggaggtgctggggatgccccagcgcttctcttcctgcctcgccctggcatggcccagcgcctctaggatcaacttacgatccgtggagc

SEQ ID NO: 17455 - DNA, 120 bp, Homo sapiens
ccccgggaaacccaaatctggctcaggacagcgtacgggcaggagggctgtaaatcatcccaggctaagcctccgtgggcactggctcctgccgcagcctggctatggactcagttagaa

SEQ ID NO: 17456 - DNA, 120 bp, Homo sapiens
cagcgacaccccacagaaggccactgcggctaggtaaacacctgagaaagaaactgctccagaagagatgacgtgggcttccaggagcatggaggaggtggcacttgaacttttaggaaa

SEQ ID NO: 17457 - DNA, 120 bp, Homo sapiens
tggcgaaaagagggtaaccctgggaaagtcagtcagaacccatggcagaagactgcaggagaggcaggggaggggcttcggggaccactgtggacagagctctgaaagcaccctggccaa

SEQ ID NO: 17458 - DNA, 120 bp, Homo sapiens
gagcgtgggaggaggctgcactgggcctgcgtgccatcctcacccctgttccccgctggcgccaggccctgccttcttggtacctgtgccaacaggagagccctcaccagccgatcttgt

SEQ ID NO: 17459 - DNA, 120 bp, Homo sapiens
ctccgtggtgacagtgtcttggccagctgtggcccctagtttctagcagcgtttctcagtgtccttggcccttctgagaaggcaggcgggaggcacacggtgccctgttcttccccgttt

SEQ ID NO: 17460 - DNA, 120 bp, Homo sapiens
acccgagtgacttcacccgccctgtcccccacgtcaggacaggcttgaggcctctctgggcgtgagcgaggaaaccaggctgctctaacttctgaagagtgggctctggctcaagactcc

SEQ ID NO: 17461 - DNA, 120 bp, Homo sapiens
aatcggccagaagcccacagagatcaaagcactagcaagttcagctgtcctggccctcgggtagaacccacgggcgtgcctgggtgcggctccacccacatgccccactgtcagcccagg

SEQ ID NO: 17462 - DNA, 120 bp, Homo sapiens
ggccgggctcaggatctgcctgcagcccagccaggccatcacccagccccgatgcatcctggcactgcacgcttactcttcacaagcacttatacgcggatggcctccgagaccctgcct

SEQ ID NO: 17463 - DNA, 120 bp, Homo sapiens
ccacggagccgggcagctccacaccccaccacctggcaccgttaggtttcagatctcccgtgtggtgtttgatgtcggcttttgttcctaccttgggagtttggattgtttcctctggtg

SEQ ID NO: 17464 - DNA, 120 bp, Homo sapiens
ggacggctccggggtgacagggcttcaccctctgcctgcagacccctggtgggcacatctcacaggcttccgtcttgctgagttgggtacggaggcagaagtggggtgtggaggaaagtc

SEQ ID NO: 17465 - DNA, 120 bp, Homo sapiens
agccgactcttctcggaccctctctccccttttccctgttcctgtttttttgctttgttttgttttttgtttgtttgttttgtacccaggctatttatctccctcggaggagggactggg

SEQ ID NO: 17466 - DNA, 120 bp, Homo sapiens
tgtcggagataccccagggacctggcattttggacagagaaaagagggagcacagtcttccttctgctctcctagcggcggggaacctcctccctgctggcctttacggaggagctccca

SEQ ID NO: 17467 - DNA, 120 bp, Homo sapiens
gaccgaatgaggtagggaaaactgtccccattcaacggttaagcaaactgagaccctagggaattggcatcatcttttagcctcatgggctattcactgaagagctaggttgcaaatctg

SEQ ID NO: 17468 - DNA, 120 bp, Homo sapiens
cagcgagggtcccctcctaaaggccagccgccgttgtccaaggcagacaatgtggagtagccaggcctctccaggccttttcatcccattcaaaggcctgcgcggcccccaccccctacg

SEQ ID NO: 17469 - DNA, 120 bp, Homo sapiens
ggacggaggtggttgaagcatcagaggccagaagagcagttgtctgagacaggggtggacgtgtggcagatgttacagccaccacctattgtgtgcagacaacagttagcctgagtcggc

SEQ ID NO: 17470 - DNA, 120 bp, Homo sapiens
ctccgttacctgcattcatcagctccagaatcctcccagctgcttggaggtatgctctttatgattctgtttcatagaggaggaagatgaggctcagagagggaacatgacctgcccaga

SEQ ID NO: 17471 - DNA, 120 bp, Homo sapiens
agccgccaggatcccagatgctaagaggacagagactatgaactcagaaatcccactgttaggctcaggatgatggtggcgacagcttaaggcccagaccgccctgcagccagttcaagg

SEQ ID NO: 17472 - DNA, 120 bp, Homo sapiens
cctcgtgggaaggaccagcaccgggcctcacctgcagtggttcctgctatcaatcatgtcacatgggggtagggacctggagcttgaggagtctgtgggctaccagaacctccacttgtg

SEQ ID NO: 17473 - DNA, 120 bp, Homo sapiens
ccacgttgctggagacagcatgggggtgtcatgccctgtcagccttcctgccacccacaccccagcaccccaggcaccccttggcagccaagggaccagacgcagaaaagaggctttgtc

SEQ ID NO: 17474 - DNA, 120 bp, Homo sapiens
ggccgccccttgccccaggaaggtggtgacacttggagacccccggaaccagggtgcccaagggctatgcagagctgccttggcttgcccctgcccctggggctgcttcctgccccgctg

SEQ ID NO: 17475 - DNA, 120 bp, Homo sapiens
cagcgtttcagctgagggttcaagccttcaccagcccagatctctcgcccctgcagcaccggcttccttccggcaaatcctaggatcagggagaatggagggctctaaaatggaggggat

SEQ ID NO: 17476 - DNA, 120 bp, Homo sapiens
cctcggagtgggcaggcccaccctttccatgggtcaccagggtctcagtgcccacttgtcctccaaccaacagtgacacggcaccctccacacggcctgtggctgccagtgccaccaccg

SEQ ID NO: 17477 - DNA, 120 bp, Homo sapiens
ctccgtagggaagcccatgcgctccagctgctgcagcctgttgggggtggggggagaagtggggagtgtcagggccaccccggcccctataccaggggaccccacctctgcccaccccac

SEQ ID NO: 17478 - DNA, 120 bp, Homo sapiens
taccgcagagaggagacagaggacttggacagccatggtgcgctctggggttcctgggctggcccgtcaagaagcgaggcctggatgccctcctgcagcatctgctcatccaaggccgcc

SEQ ID NO: 17479 - DNA, 120 bp, Homo sapiens
catcggagtccctggggagaagctggccccagcccagtccaggcctgcctctgaggagccctcccaggtgggctgcacaggcctcaggcttggtgggggcagggctgagtcttcccagtg

SEQ ID NO: 17480 - DNA, 120 bp, Homo sapiens
aggcggtccagggatgggaggcctggaggagtgggaagagaagagggcctgactggcagccctgccacagtgcccaccacctggactggcatcccccccatcaccctcacctcactccgg

SEQ ID NO: 17481 - DNA, 120 bp, Homo sapiens
ctccgccaggctacccggggtggcaaggagcctcaggggccagcaccccgccaaggtcctgcacaagacgccctcctgcagcacctgcagccgtcgctctgagggttccagccaccggaa

SEQ ID NO: 17482 - DNA, 120 bp, Homo sapiens
gcccggggcagggcggccggtcaaggaaaaccaaaagcagccaggggtgggcccacgccacaggccaggccccatgccaagtgtgctggccaccattccctcccgtctcctcactgtgga

SEQ ID NO: 17483 - DNA, 120 bp, Homo sapiens
tagcgtcaccctggtcagcagcagaggctcagaaaggaaaagggatctgcctgaagctactcagccaaacagagccaggtatgcctcaccccaaggcctgggctcacccgtgacccactc

SEQ ID NO: 17484 - DNA, 120 bp, Homo sapiens
acccgtcctggaagaagtcccatggacacacctgctattgccttcagacaggcctggataactcctgtcaccaatccagagtgcagaggccagcctgttctctccagtggcactgttttc

SEQ ID NO: 17485 - DNA, 120 bp, Homo sapiens
agccgcacaggcctctttactgatcctcgaacacaacatgcatccaccccagggcctttgcccgtgctattcactttgctaggaaggctctttctccagacagcctcatggctcagtccc

SEQ ID NO: 17486 - DNA, 120 bp, Homo sapiens
cagcgaggctggtggctgtttaagcgcctactgctttatccttcaccctgcaagtatgttcctgaagagcaccagccttggggtccacaaaagcccagggacagcaggggctgagaccca

SEQ ID NO: 17487 - DNA, 120 bp, Homo sapiens
ctgcgggtggatggatggatggatggatagatagatgaatatatcgttctactcacttccaaatggtaagaatcacagggaggaaagtgaaagcgattcgagccccaaggactcagggca

SEQ ID NO: 17488 - DNA, 120 bp, Homo sapiens
agacggaacttattcattcattgattcatttacacaccacagagtggtaagagcagcattagagattagcactgggaaccatgggaaccaccaggaggggacaattaactaaatgtgggg

SEQ ID NO: 17489 - DNA, 120 bp, Homo sapiens
aggcggccagggatggctttctggaggtgagcctgaagggtcctttgggggaactgacctcagggctccagccctcatgccattttctccagccacaagagtcatgcttggggcttcttg

SEQ ID NO: 17490 - DNA, 120 bp, Homo sapiens
acccgccccatgcctttctcagggacctcagaccagccactcacctccatcctcccagcaccacctgcaaccagccccttgccctctgcaaactggagcacgactggatctttagatggg

SEQ ID NO: 17491 - DNA, 120 bp, Homo sapiens
cagcgcactctccttccagtaaaaagtggttaaagggacagcgccatcaatttcccagctctgagggtctgcttagaactagggggctggaaggagacagagggcaaagagaaaggaact

SEQ ID NO: 17492 - DNA, 120 bp, Homo sapiens
acccgcgtaaagtaggggtgtagtgggtgttgagataactgcctgggggaggttcagagtggaagtacgagtctacaaactctcaagggcgtctcagggctcccagcatccccaggggtc

SEQ ID NO: 17493 - DNA, 120 bp, Homo sapiens
tttcgcaggggtccctaagcaggaggggaacagcccagaaaacacggaactggacccccgacaggaagtccagggaggggtccctggctcactatgtgaccctgctggatcacttgcctc

SEQ ID NO: 17494 - DNA, 120 bp, Homo sapiens
tctcgggtcccctcagcacagtgtccctcccttccttcccctaaagtaaaagcagagggttaatctctttccccgccccacgcccaacaaagagcaggccctgtccccggtgctgaagcg

SEQ ID NO: 17495 - DNA, 120 bp, Homo sapiens
agccgcagcaccacccccactcccacagcataaaacatgagccaaaaccaataaagagccaaatgtcacagccgttgcagggccccctaaatcctggggaccccttcttctacctgacat

SEQ ID NO: 17496 - DNA, 120 bp, Homo sapiens
tgccgactcaggcgcctgcttgtctgttacaggagtgggggaagagaggacaagttgaggctgagaagatggggagggggagggagaaaagaggacttcctagtgttgacagaacggcaa

SEQ ID NO: 17497 - DNA, 120 bp, Homo sapiens
agtcgggggtcaggagttggagcttgtctctggggcaagaccccttcgttgtacagatggaaaaacaagggtgggaggacacagcttgtccaaggtcattcgaccagcaaactgcctagc

SEQ ID NO: 17498 - DNA, 120 bp, Homo sapiens
gctcgggtgacacccatcatttccccccaccccacacaggggccagctctctcaacttcatgcccaagccctcctacggtacccccactgtaggttctctgcccctcaaactcagcccag

SEQ ID NO: 17499 - DNA, 120 bp, Homo sapiens
gcccgcttcgctgagggtccgtcccctttactggggctggcagcagggtctcccatctcctctctcgggggccactgcagactttttagagaacgccttgcctccccccaaccccaccca

SEQ ID NO: 17500 - DNA, 120 bp, Homo sapiens
atccggggttccctctctccatcctctgcagtgtctcccatacccccattcagggtagccttgctattctccccaactccaggtcccccttcatctattccggggctggccgcggagttt

SEQ ID NO: 17501 - DNA, 120 bp, Homo sapiens
gagcgctctccaagtgggtcctctagatgttaggagaacactgtacctcccccggtcaggggtctcctgtctccgttctatggagcgtccatgctcccattcaggactgccttgctccct

SEQ ID NO: 17502 - DNA, 120 bp, Homo sapiens
ttccggggctggctgcacagtctctgcaccccctatcctgaaagcctctcttaactatttggaaagcctcgtgtcctgtctcatacagggatcccctcatcctaatgactgcaatcttcc

SEQ ID NO: 17503 - DNA, 120 bp, Homo sapiens
tcccgagggcatcctgcccctattcccatcaggtttctccttgtcctctccctgtttcaagtcccctttcttattccgaacacactcgcaggctcttccgacgcgcacccgggggtcctc

SEQ ID NO: 17504 - DNA, 120 bp, Homo sapiens
ctccgggagtcctctgcccgcttccccgacctcgagggtctcctctgacgcagcgtcgattccccttccctcctcggtcccctgccccgcccctctcactgcggcggagccggtcggccg

SEQ ID NO: 17505 - DNA, 120 bp, Homo sapiens
ggccgcaggggaggaggcggagagggcggggccctcctccccaccctctcactgccaaggggttggacccggccgcggcggctataaaagggccggcgccctggtgctgccgcagtgcct

SEQ ID NO: 17506 - DNA, 120 bp, Homo sapiens
tcccgccccgtcccggcctcgcgcacctgctcaggccatgatgagcttcggcggcgcggacgcgctgctgggcgccccgttcgcgccgctgcatggcggcggcagcctccactacgcgct

SEQ ID NO: 17507 - DNA, 120 bp, Homo sapiens
aggcgccgcctcaagcaccgactcgctggacacgctgagcaacgggccggagggctgcatggtggcggtggccacctcacgcagtgagaaggagcagctgcaggcgctgaacgaccgctt

SEQ ID NO: 17508 - DNA, 120 bp, Homo sapiens
agacgacgaggcccggcagcgagaggaggccgaggcggcggcccgcgcgctggcgcgcttcgcgcaggaggccgaggcggcgcgcgtggacctgcagaagaaggcgcaggcgctgcagga

SEQ ID NO: 17509 - DNA, 120 bp, Homo sapiens
gtgcggctacctgcggcgccaccaccaggaagaggtgggcgagctgctcggccagatccagggctccggcgccgcgcaggcgcagatgcaggccgagacgcgcgacgccctgaagtgcga

SEQ ID NO: 17510 - DNA, 120 bp, Homo sapiens
cgacgtgacgtcggcgctgcgcgagattcgcgcgcagcttgaaggccacgcggtgcagagcacgctgcagtccgaggagtggttccgaggtacgcaggcgcgcgggtggggggaggggcg

SEQ ID NO: 17511 - DNA, 120 bp, Homo sapiens
ccccgcagcgaacttttgggctgcgtgacccaagggggcgctgccggactgcgcgtggagtggcgcgctgctcaccttccctctgcaaagtgcatgcccctagttaaatcgcagttttac

SEQ ID NO: 17512 - DNA, 120 bp, Homo sapiens
ggacgccccaactctgggttgtccttcggttccccctttccaggttctttacggctgtacttcaactctgggccccctgctgctctctaccccaagcttaggcgaccccactctgagatc

SEQ ID NO: 17513 - DNA, 120 bp, Homo sapiens
ccccgtcaagaaaaaaacaagtttcctctacaggaaaaaagtggtgcaggattctggtctgcaagcgctggagactcttagcccttctaagtagcaaggcttccccgccaatgctgccat

SEQ ID NO: 17514 - DNA, 120 bp, Homo sapiens
ccccgcaagaaactctattcctctcacccctaccaggctccttcccactacctgctcagtgcttaacgttcctaccttaaatcttccacgtgggggtgggtcaggaccttttcgcatcct

SEQ ID NO: 17515 - DNA, 120 bp, Homo sapiens
tggcggaggtggctggtgggccctttcatgttttaatgtcccctttctcctttagggaagctgggagcctcccaagtctgcccctcccccaactccttgcagccctgagtcagctagatt

SEQ ID NO: 17516 - DNA, 120 bp, Homo sapiens
aggcggtgagacacaaggcctgaaggtggacagaccagggggatgccgcctgggacaaagtcccaggcaagtaggtcagggaaaagacaaggagatctcgctatgtggagagaaatactt

SEQ ID NO: 17517 - DNA, 120 bp, Homo sapiens
tttcgatgagcgccatgtagtagagattggtgtccccagccagtcccgcatccacaatgtctttggtgaagtgcagctcctagaagaggtaccacagacaagaggtgaactgctggctcc

SEQ ID NO: 17518 - DNA, 120 bp, Homo sapiens
aggcgagagacaaccttggcagggaagaggtactggcaatcactggtaactggcacaatgccatgttctaaaagagaacaagacagatgacgtcacaggtagaaatcaggtgccacagat

SEQ ID NO: 17519 - DNA, 120 bp, Homo sapiens
gcccggccagctatcctggtatacctggtactcaggaagtacccaggtcaacacgtgccaggaatgcaagcatgtcaacctgaccttcacccagtgctatgtgcttgtggccagatccag

SEQ ID NO: 17520 - DNA, 120 bp, Homo sapiens
gcacggcccgatggacaaacatcagtgctctggagagatcggcagccatgtggagtctaagaactggtggggagtggtctccagatgtgtcctggaaacccaatgcctttcctgacagag

SEQ ID NO: 17521 - DNA, 120 bp, Homo sapiens
tggcgcttgtttttaaagaagtagaaacccaaattaggaagactgagcaaacctcatgcatttggggaagggcttgttggaaagtggaacctgatgtaggtagcaacatgttgaggttag

SEQ ID NO: 17522 - DNA, 120 bp, Homo sapiens
gaacgtctttacttggtttcctcaggcaccttcactcatcttgtctaaaacttaattgctggtctatccctgccagatttgctgcttctccttgattccatctctcctttagtggaacca

SEQ ID NO: 17523 - DNA, 120 bp, Homo sapiens
ttccgtttctcaggctgccttctctcccttctactgccttccttatgtcaggggttggcctactttctggccttcttgatccagggcttcttttgttcaactcatactccaccctgttgt

SEQ ID NO: 17524 - DNA, 120 bp, Homo sapiens
actcgtctgctcaagggtcttcaaagactttgcagcttttggctgaagttgagccacctggtcccaaatggagccccattcccgccatgccacctcctgtctgtttaagctttacaagat

SEQ ID NO: 17525 - DNA, 120 bp, Homo sapiens
aaacgagcaatatctgactcttctgagaatggattttgtttcaaacactggttacttactggaaaaggtgtctggggagtgctggacagcaagaacaaagggaccccacagaacaggaaa

SEQ ID NO: 17526 - DNA, 120 bp, Homo sapiens
ctgcggtttgcctatgttagatcaccgtgaaaaaggccagtgtatgctttggcagctggcaaagaatcctgtgactcagtttccttatttgcacaaaaagggtatgagtctacattaggt

SEQ ID NO: 17527 - DNA, 120 bp, Homo sapiens
ctacgatcctttgtgtcaaagttaaaaatctaagtagggcattctgaattggtgtcagagttgatgcacttctcactgtattgcaagtgccaaggggacaaatacattgtctttttgcat

SEQ ID NO: 17528 - DNA, 120 bp, Homo sapiens
aatcgttaccttgatcttctcaacccttgggtgtttaccttttccaagttaatgcctgttctttaatgttacattatcttgtagcaaggtagtcatttataatttatatactagagctgc

SEQ ID NO: 17529 - DNA, 120 bp, Homo sapiens
gggcggcagcagccaggtctgtctaaggggcgagcagcagtggccgaaggctcccagggccctcgggcagcagcccttgctgaccagtgcagccaggtcgtggctgcctccagctggtgg

SEQ ID NO: 17530 - DNA, 120 bp, Homo sapiens
gaccgcctcagtgccttctggaggactgtggctctctctcctgcccagtggctgtggtgccttcctacttctgtgtgggcagactgatttccctctctacctttacttgtggctgaggcg

SEQ ID NO: 17531 - DNA, 120 bp, Homo sapiens
aggcgctgcagtgcagctcaggtggggctcaggaagcaccccacccaccccagagcactctgcatcctaataagcacatgctcgagtcactggaatctggtgctgctggcagtgccagaa

SEQ ID NO: 17532 - DNA, 120 bp, Homo sapiens
cctcgaggggacagccagcatgctcctcgggtggaggatccaggaattcttggagccaacattgcacaaatgggcaggagcctctcaaggcccccacagcctgggctccctgcctgggga

SEQ ID NO: 17533 - DNA, 120 bp, Homo sapiens
gcccgcctggtaggcatggaggccagtgccatacgtgaccttgttgttgcctgcaccccttcctaacgagcaccctgctccccactggaaggagaggggccagggctcctccctccccag

SEQ ID NO: 17534 - DNA, 120 bp, Homo sapiens
aaacgtgatgttgctattagcaataacagctgccgagttcccaccatgcgccaggtgcagtgttgagtgcatcacacgcggttcccaattcctctgcctgtcaccccacgaggaaggggc

SEQ ID NO: 17535 - DNA, 120 bp, Homo sapiens
tcacgcccgcttcacagtgaggaactgaggctagaggggagcaagtgacctgcccagggccacacagctggtcagtggcccagctgggccttgcaccaggcagctgactgtgcctgtatc

SEQ ID NO: 17536 - DNA, 120 bp, Homo sapiens
gagcggagatactgggctcacatgctttcatttaaaccctctctcatttttgccccagtagttatctggcagctaaatctcttcctcctttcttccccagtgaccattctggttcccatc

SEQ ID NO: 17537 - DNA, 120 bp, Homo sapiens
aagcgctctccattcccatcagaaccgggctttccaaagggctctgaaattggttccactgaagaaggcagctgagctgcctccccacattccgcttgttagtcgggaacttcaaggcca

SEQ ID NO: 17538 - DNA, 120 bp, Homo sapiens
agccgccgatagtaccgaggactcttcacatgcagactcgaggggtccagagaatgggccagaccatcttgcctgccccatggcaacctccagaggaaagaggctcagagaggtcagggg

SEQ ID NO: 17539 - DNA, 120 bp, Homo sapiens
tctcggaccttctcagccgggtgtggagctcttgcctctcccgcgaacctcagtttagttatcttcatagcccacgtcctggtcgcttaacaaacattgagctcctgatcggcacataac

SEQ ID NO: 17540 - DNA, 120 bp, Homo sapiens
ccccgcactcctgtgggaagtcccggagctggaaatggaacacagtcacacccaaggcattgatttcaggagtcagcagagagcagggagtagggagagtgctggctccagatgcttcta

SEQ ID NO: 17541 - DNA, 120 bp, Homo sapiens
gctcggtccctgatccaccccatccccttccacatctccctgactgtccttctttacatttgctgggcagagtgccacctgtgtgcaccagccctccctgcctgcacaagccacactgag

SEQ ID NO: 17542 - DNA, 120 bp, Homo sapiens
agccgttgcctccagctcatggagagaaacaccttctcagctgccacgtcatgagcaagtttgcttcgggaccacctgggaaaccaggagtagaaggggtaaactcttcctcatctgcca

SEQ ID NO: 17543 - DNA, 120 bp, Homo sapiens
ccacgtcaccttaccccagccatgttgccagggcatgaggactaagatgcttgccctgccaagcccggaggggatgagcagcctcagctggtgccgccacagacagcacaccacagaggt

SEQ ID NO: 17544 - DNA, 120 bp, Homo sapiens
ctccggtcctctgtcaagaggcaatgctgacggctttttcctgctggcgtgcctctgcccaccagccttccccttgcacatcctcatttgtcacctcctaatttgaattattgggcaaat

SEQ ID NO: 17545 - DNA, 120 bp, Homo sapiens
ggccgcttatttgggactgacagccaacttcttgagcatctatttgaacagccttccctttcgctcccagccacctttgaggtgagtccaagtggcaggacaggaccctgtgtgacagag

SEQ ID NO: 17546 - DNA, 120 bp, Homo sapiens
gagcggaggtcttgtgccctctcagcttcttctctgctttcttacagctcaccttgcagagcgccaagtcccgagtggccttctttgaagagctctagcaggtgacccagccaccccagg

SEQ ID NO: 17547 - DNA, 120 bp, Homo sapiens
taccgggaccgcgggatggaccagatatcaagagagccatccatagggagctggctgggggtttccgtgggagctccagaactttccccagctgagtgaagagcccagcccctcttatgt

SEQ ID NO: 17548 - DNA, 120 bp, Homo sapiens
ctacgaccctgtagagatttctctcatggcgttctagttctctgacctgagtctttgttttaagaagtatttgtcttcctttgtctaatgtgggattcctgactcccttcgtccaaggca

SEQ ID NO: 17549 - DNA, 120 bp, Homo sapiens
caccggtgtgtgtgtgtcttgcactccagagctgacctccaccgcccagcctgggaagtcattgtagggagtgagacactgaagccctgagaagccagtgccatcatccccaccccgccc

SEQ ID NO: 17550 - DNA, 120 bp, Homo sapiens
ttccggaacattcattcccccaccggtgaggacctggcatgcagcgaagcagcccagcccggcggatcccaggccagcacgcctgccggcttctcatcgtcagggagcccgcccagagct

SEQ ID NO: 17551 - DNA, 120 bp, Homo sapiens
gctcgtgacgagcaagtgctgggtccccgccaggcaccccgaggcggcgctctggctggcagctggtggggaataggcagggcagctgtggctggggagagactttaggcagaagctgtg

SEQ ID NO: 17552 - DNA, 120 bp, Homo sapiens
agccgaggggctgggtagtgccgtgcgggagctgatggtacagggcactcgctgtccccctccggccaccctagaccagggtccgagaggcaggcaggagccactcatgtcttccccatt

SEQ ID NO: 17553 - DNA, 120 bp, Homo sapiens
gcccgacgcccatagacgctccttcctgtgtggggctggggtactccctggtcgtactgcagtcagcacccgtaacccggctatgaccagggatctgtaagccctgtggctccacaggtg

SEQ ID NO: 17554 - DNA, 120 bp, Homo sapiens
caccggcccagtctgcacggcccatctgcttcaccttccctcccagccacgtgccagtggccacagcccacttcccaacccactgttgtacccaggcctcactttgctgttgcccttgtc

SEQ ID NO: 17555 - DNA, 120 bp, Homo sapiens
cttcgggccctgaattttctgttccctgggggccagccagggccctttgtgcccctcccagcacaggcctgatgcaggtgtccactcacaggtggcgctcacctaggctgtcacaggacc

SEQ ID NO: 17556 - DNA, 120 bp, Homo sapiens
ctgcgtcctttttaagcgaacattttagggcctgggagtttgtcaagtaaggaagtctcaagcccaaagagcagcgtcctgaccatggtggtttcattacgagcccttctgctggctctc

SEQ ID NO: 17557 - DNA, 120 bp, Homo sapiens
caccgggaccattcatgaggtcactgcccagctcatgatgtccgtgaggctgtccttttggccagtagccgtgtgcagctgtgtggcacagatggcttcgttcatcctgatcaaggcccc

SEQ ID NO: 17558 - DNA, 120 bp, Homo sapiens
ccccgtggcattacataacacttcatgagtggctgtgtcttgtaattttggggacaggtttctctctttccctctcttttttttgtcaaaagcccagagactgacaaccagctgcagtgt

SEQ ID NO: 17559 - DNA, 120 bp, Homo sapiens
cagcgttggcagggagacagcctggcccagtgaccctgggcccaagccagcccctccagggctttcagggaagcgccatccattttcaaagatgtcaaacgtcacttcttcctgtagggc

SEQ ID NO: 17560 - DNA, 120 bp, Homo sapiens
gcccgagtcctgcctcctatcagggccagatcatagaaggctattttctattctggggaacgattataacttaaatgattgttttaataaaaattctaagctggaaaatacttgccttgg

SEQ ID NO: 17561 - DNA, 120 bp, Homo sapiens
aggcgtcaagaacacggctgggtggtggggctgtcttgtggttctgtggagaaacgagccctctgctgtctctcactgcttgggccttcacctctggccccttgtctttggtggcaaaag

SEQ ID NO: 17562 - DNA, 120 bp, Homo sapiens
cttcgccagggaactgcctccctcttcctggggcacttggggggtggcaagggccctgcatggcgtcccagcactccatttcctctctgtggtccctgcccatccgtgatttcagaccag

SEQ ID NO: 17563 - DNA, 120 bp, Homo sapiens
tttcggcgttccaggctctgggggtgcatgcagagcccctggggcccaggcgctgtctgcagagtaaatgaggcgcagccactgtcagggctatgtgacatttgcacttgaagttggaaa

SEQ ID NO: 17564 - DNA, 120 bp, Homo sapiens
aaacggcacagctgagaggctaagagccctccctgcctcagaacacagacaaacctgcgttcctgctaggccactgaccagccatgtgagcctacgtaaattgtccagtctattgggcac

SEQ ID NO: 17565 - DNA, 120 bp, Homo sapiens
ttacgaatgcccagaaagctctaagcaccttgcctagatgtgagtcaccacttggtacacggtggctttttttctgatacttcttttgggggcagagggcaagaggaagcaaaggaaaga

SEQ ID NO: 17566 - DNA, 120 bp, Homo sapiens
tcacggctcccctgtggcctccatcccctccacctgcaccctgagcttaatgagcctgcagctggtctgtttgtccaagcccatgtttgcccagtgccagctgcaaagcccgggaaatga

SEQ ID NO: 17567 - DNA, 120 bp, Homo sapiens
ctccgggctggagctgcctgcgaaggatgttctcattttgtcccattaatactggctgctcaggtcaataattgactggaggctcagggtgggagagaaccaggtgggccacactgtgca

SEQ ID NO: 17568 - DNA, 120 bp, Homo sapiens
ggtcgggggaagatccagagagagaaggcagcctctgcctcgctcactgcaccataggcatgagccaccaggctcctcaccaactgcccctgcaaaccctcagaagcggggagagctgtg

SEQ ID NO: 17569 - DNA, 120 bp, Homo sapiens
atgcggacaggacagatggatgattggggccccccgacatgacctcaccattcacccctaaaacccagggccagagcctcctccagagcccggggaaaggaggggtacgatggtgggggg

SEQ ID NO: 17570 - DNA, 120 bp, Homo sapiens
gggcgaaaggtcaggagatggagcataggccttctcctccccacctttgtcccctccggccctgggccacctcaaacctcctgcagatttttccctccagaggccctcatccatcccctc

SEQ ID NO: 17571 - DNA, 120 bp, Homo sapiens
ttccgcttcactccctccccttgctcccagcacccccaccaggaccccaccaccccaactccagccctttctgggtccctcctctcctgatccccagtcctggagtgcactccctgagga

SEQ ID NO: 17572 - DNA, 120 bp, Homo sapiens
gggcgaggggccgcagggtgggcagtgcaggggcaaggccgcaggctccccaaccaacgacatggcgtgctggcaggagcccagctgcgttagtcaccagccacaacaagtgccctcccc

SEQ ID NO: 17573 - DNA, 120 bp, Homo sapiens
ccccgcttctctcctgtccccttctcctgggccctggggagctgaggggccctgactcagggggcatctgaagggcagggccctccctgggatgggcaggtggggtcatggagtagacag

SEQ ID NO: 17574 - DNA, 120 bp, Homo sapiens
tggcggccccaggtccctttcagcagtccttgaatgccagggctggccattcctggcacggatccccctctgccctctccgcctctgcagggcctcatgagtgctcctgccccagggcgg

SEQ ID NO: 17575 - DNA, 120 bp, Homo sapiens
gggcgagacccaggccctctgccgggaggacgccattcgcggaggagccacatgtgccaggaagagggagctgggcagcccgggatggaatgctgcagacagtacgtgcctgccgcagaa

SEQ ID NO: 17576 - DNA, 120 bp, Homo sapiens
cggcgggactgagcctgggtcctatacaaggggctgtgccaggtggcttggggtgggagaagaattccaggctgcccacgtccgcttagtggttcctgaccccagccacacatcagaatc

SEQ ID NO: 17577 - DNA, 120 bp, Homo sapiens
acccggccccagccctctcaggttctcttttaattcattggaagggagggcatcagaattgtttaaagctcctcggtgactctgaagtgtactcagggttgagaacccctggcccaggcc

SEQ ID NO: 17578 - DNA, 120 bp, Homo sapiens
gcacgaggaagcccatgctcttgcagtgggtattcaaggcccctcatgatctgatcctattggtccttcttgcttcatctcccagatgaacagctgcccctggtgcctcatgtttctttg

SEQ ID NO: 17579 - DNA, 120 bp, Homo sapiens
ccacgccaggctgaggatttaagtggagaacaagtcggagctggtccttccttctggtccaacagtcacactaatccctatggatgtaagcggggtaaacatctagcgtgtagccaaacg

SEQ ID NO: 17580 - DNA, 120 bp, Homo sapiens
acccgttctaggggtcggggaggacgtccctgaggatttgctgcctgacttgagttctgaggtggtgggggggcctggcttggggcagggaggacagcaggaagggcatgtctacagagg

SEQ ID NO: 17581 - DNA, 120 bp, Homo sapiens
ggccggcaggtcatggaggcctgggcaggacaggggctttgcccagaacacaccattctaattgggcgcaagctcgctaggcagaggggccctattttatccacctttgaatctttagag

SEQ ID NO: 17582 - DNA, 120 bp, Homo sapiens
agccgcggacatgctgaatgaatgagcccatgagatgaaggctggagggaatccttctgaggacccacaggcaccatgcctacttagtaagctcttatgtgccatgcagtcatcatgagg

SEQ ID NO: 17583 - DNA, 120 bp, Homo sapiens
actcgctggaggctgctgcctaggaagtgggcagacagggcagggcagttctcttcagcctggccaatccctgaagaggccaacagcacgtccagcatctgaggtggtaaatctttcgta

SEQ ID NO: 17584 - DNA, 120 bp, Homo sapiens
ctccggcccattttatacctgcatctgcttcttgaagctctgtaacaacagattggcaaaataaaaatcactagatgtccttttacttattaaattcacaaagttttttttttttaatca

SEQ ID NO: 17585 - DNA, 120 bp, Homo sapiens
atccggcatgagccaagatatgggaaatgatcgtttcaaacactgctggcgggaagacccattcaacaacatcagtcaaaaaacttgacccagcaattctatttctaagaatttatcctg

SEQ ID NO: 17586 - DNA, 120 bp, Homo sapiens
taacggcaaataattagaaagaacctcaatgtacaaaaacagggaattgcccgactaaagcatggtataatagaagacaagtaagccattcgacatgatgcagatgagaaacagaaagat

SEQ ID NO: 17587 - DNA, 120 bp, Homo sapiens
tcacgacagaagtcacccatggaggcaaaagccttggagttcaagccacccccgattctgtcccaccagggagaactaccagccaaaacccagagtgacgggccgctctataactgttca

SEQ ID NO: 17588 - DNA, 120 bp, Homo sapiens
acacgaaatgtgctgaacggaagccctggaaacaaagggaatgaacttggttcaggaggtctggctgggcatctgtaggaaggggtaatggaggctccacggtagggggttacttgattg

SEQ ID NO: 17589 - DNA, 120 bp, Homo sapiens
gtacgcttaagatttgtgcatttttctgtatgtatgcaatacagttttgttctgttttgtttaaggaagttacaagtatagctatcctaagagaaggatgcaattttttctacagaatgt

SEQ ID NO: 17590 - DNA, 120 bp, Homo sapiens
atgcggcagggctgggaacgtaagatcctctgacaccaggtgtgagactctttcatagccctcaatcacttcttaaattcctccccagtggagcttctgtgaccttattctattctttct

SEQ ID NO: 17591 - DNA, 120 bp, Homo sapiens
tcccgtctgcttcacattcagcagaggagaaagccagcctgtgtcacccatgatttatgccgtgccgtttgctctctttctctagaacattaaacaccctgagcagaggaggaagaggta

SEQ ID NO: 17592 - DNA, 120 bp, Homo sapiens
agacgggtgtctgggggtggggagctctctgctctgttgggaaaagggaggaggttgagttaaaaaaaaaaaaaaaggcccatgcggcttccacataaaaggaataagggagtctctgtg

SEQ ID NO: 17593 - DNA, 120 bp, Homo sapiens
actcgtttactaagtacctttgggcaagactttcctgtttctgggcctcagttttcctgcctgtcaaagaagggtctggatggtttgagctccctacagcttcatggatctggagctagt

SEQ ID NO: 17594 - DNA, 120 bp, Homo sapiens
cagcgaccttgcatagaccgagacaatgtagcacagtggttaaccatagggactccagtcccctgggtgggttctgactccagctccacctcttacctcccactatgtggccctgggaaa

SEQ ID NO: 17595 - DNA, 120 bp, Homo sapiens
gctcgcttggtgcagggcagggcatcttagtgagcaattggaagttctgggcagaagggagaaggagctattttcagtgggttctggttctatttgtagctggtgagttggcccaggctg

SEQ ID NO: 17596 - DNA, 120 bp, Homo sapiens
cttcgtgctatgattacattggtagaaggcagccaagaaatctagatgagatcttgcttgtacctcctaagagtaatggtatataggtaggaaggacttccacagtcggatgcaagtaag

SEQ ID NO: 17597 - DNA, 120 bp, Homo sapiens
aaccgtggtggaagctttccttctacggacctggatgagaacagccttatagtgactgagggtaactcaagaagctcaatgccatattagttttctagagctaagggaatatacatagtt

SEQ ID NO: 17598 - DNA, 120 bp, Homo sapiens
tatcgtgttcatgtcagacactgtagctactgcttcctgctagaacagaccagaagaaaccaaagcaagaccagaatcatttcagttttgaggaacagaccctttccttactagcattgc

SEQ ID NO: 17599 - DNA, 120 bp, Homo sapiens
atacgttgttctaggtggcaaattaatcttttatcagtaccacaaattgattgttggccctttgcggaaatagcaggaatatgtctttttcattttgttgaagggtagctcagagataaa

SEQ ID NO: 17600 - DNA, 120 bp, Homo sapiens
aatcgtaatgtagaccaagattaggctgaagaataaaatattccttaatgtatctaatatttttatagtattgaactgtaaccccataatgaatttttttggggaaagtcagattatttg

SEQ ID NO: 17601 - DNA, 120 bp, Homo sapiens
atccggtcagctttttgcttccttgttcttatatttgctctattgtgctggtgcccataacaacataaacttacagctcagtaatgcagggcaagtagacttcttcctgccctggagctt

SEQ ID NO: 17602 - DNA, 120 bp, Homo sapiens
tggcgtgttttcaaaaatatgagtagccccctacctaaatgccagaatacaaattttaactaggccagtagaagaggggattattttcatttcacatagcctctagtatttgaattttgt

SEQ ID NO: 17603 - DNA, 120 bp, Homo sapiens
tgtcgatttttgatgtctgttattctgcataaaactgtgtggcaggcgccagaacttttaagaatctttttgtttacagatggggagacaataacattaacattcattaacattcaaaat

SEQ ID NO: 17604 - DNA, 120 bp, Homo sapiens
gggcgtactcttgagttctaatggcaagccagccttcaaattaagttgtcttcctggaaaagaaacctcttaggcaactgtgaagggagagggataatataaaaaggatggagtttagaa

SEQ ID NO: 17605 - DNA, 120 bp, Homo sapiens
aaacgaataaaggcttgaaaattcatgtacttacagcaaatgccttcttccttctttacttgccagtgttgtggctttctacactccacttccagcacagagaagtgtattatgacacgt

SEQ ID NO: 17606 - DNA, 120 bp, Homo sapiens
ctgcgaatgcccaggtgaggtgtatggtgctttgttccccatactttctccttgtgagtgtagcccttgcccaactgagacttagttcccaatttgaaataagtggcaagccatattcct

SEQ ID NO: 17607 - DNA, 120 bp, Homo sapiens
tgtcgtgagagtgccagagcttctctttggattcttaacactgtatgttcttttctgaggagaaatggaggaggaggtgcagtgaagtcacataatcttccttccttgtgccaacttgta

SEQ ID NO: 17608 - DNA, 120 bp, Homo sapiens
agccgtctaaaagctttttgttgcctttgacagagggtatgctcaccactggccttgtagcaaactcctcaagggcctctccttagaaaacctggggtgaaaattgaagcagtaaataca

SEQ ID NO: 17609 - DNA, 120 bp, Homo sapiens
gaacgcattgttctgtggagttcttttcaaagagatttcaaagccacaagttagataaggcccaagaagtaaagccagagtgagatcgaagtaggcctttcttttaaaaaataatagctt

SEQ ID NO: 17610 - DNA, 120 bp, Homo sapiens
gaacgaggactcagggcaggggtggggtgggtagtggatggagaaagaggagagtaaccaggaagagaaatgggtacccaggtatcctctgagggtgactcgaaagagagatcaaaaagc

SEQ ID NO: 17611 - DNA, 120 bp, Homo sapiens
caccggaatccatgaatgttgaagatcgactgagcaggctgttttctttctggtgatggacagttccttctagatgcagcagaggtacaattccatactgtaatatgttggataatgagc

SEQ ID NO: 17612 - DNA, 120 bp, Homo sapiens
cttcgtctatcctccagaaaagaccaagctgacccactcattgtcagcacaaagaatgctgtaagggtcactgaagacaaatcgtgctggtttgggaataagaaaaaagaagacaaactc

SEQ ID NO: 17613 - DNA, 120 bp, Homo sapiens
caccggtgcctagagactctctaacttgtttttcctggccctgtgccctactcaataccccacaccccagatttactccttattacagctggcttgtgggaaatgggactggcctggggt

SEQ ID NO: 17614 - DNA, 120 bp, Homo sapiens
tctcgaaagtggctattgtttctgaactgagagctctgcaatgagcagacactgcatggactgttcttctgaagatttaattccacatatatagacattgcccaagaaggctcttccttt

SEQ ID NO: 17615 - DNA, 120 bp, Homo sapiens
gatcgggattatcttctaaacaaaaagaatgacctccttctcctgcgtctaggccctaaggcatttccctgctcactaatgggattaagaatattttcatatgtttattggccattgtga

SEQ ID NO: 17616 - DNA, 120 bp, Homo sapiens
acacggaaggagatctgttaccaagggaatctgagaactgtgaaaatgtgaactatctgattttacacagcagagctcaaatatgcaaccagctatcaatattggagtgtattcagttct

SEQ ID NO: 17617 - DNA, 120 bp, Homo sapiens
tgccgccagcctttgaagccaggcaccgaaaccacaccttcatttcccctcttgcaggtccctctgctgtctgggtcctttcattctccagctcacctcttccaggaagaggctggaaat

SEQ ID NO: 17618 - DNA, 120 bp, Homo sapiens
aggcgtgagccactgcaccaggccctgaaacactgctttgattctgtctctctcctactcagatgcctttgtgcaggccgacaatcttttctggtgtcttctctgtgcggggctgtgtct

SEQ ID NO: 17619 - DNA, 120 bp, Homo sapiens
caacgaatgccgatgagatgagatgagttttatgttagtaaatgccaaagccctattcacctgtaagggatgactttttaaatatgtgctgtacttcaaggcgccttactccccatgttc

SEQ ID NO: 17620 - DNA, 120 bp, Homo sapiens
ccccggtgcctaaaattccagcattagtcactcgtttgccgtagggcactgaaggccccaattaaaatgtaaatgtgtgacctagtggtgttgccatggagccaccagcacccctgacag

SEQ ID NO: 17621 - DNA, 120 bp, Homo sapiens
tgtcgatgaagggactcatctacagagaaccagagaactcctatgcagaagagagaaagtggagcaggaaatgatgctggccggcattcgggggggcctcagggcccatgcattgaccgc

SEQ ID NO: 17622 - DNA, 120 bp, Homo sapiens
acacgcctgggccgtcacctacctccaagggcacccgggtcaggggcttagaggggcccgccaaggccattccctaaggctgtgagggaaactctggcccattttgccaagggcaaccag

SEQ ID NO: 17623 - DNA, 120 bp, Homo sapiens
gtccgagctacaccctgcaggaagcccacgcagcacagccctccagctggggtcaggtccgcctggccagctgcgggttcgggacaggacgccccttctgggaacacaggaaggaaggga

SEQ ID NO: 17624 - DNA, 120 bp, Homo sapiens
gggcgctgctgaccactgtcaggatgagtcccttcctccctgcccctttcctcaccccttacctccatggccccaccctcttccccaccaggtggcagcccctccgaggaccagagggtg

SEQ ID NO: 17625 - DNA, 120 bp, Homo sapiens
gcccgagccacatggaggctgatttggacacatttggtccaggtggcatataggccttggaaagatatgggtgtgttcgtgtcccaaggctgcctaacacattaccacaaaccgagtggc

SEQ ID NO: 17626 - DNA, 120 bp, Homo sapiens
tcacgtggccttctcctcttctctcctttcttagtctcttatgacacttgtccctgcatttagggctcacccagaaatccaggatgatctcgcttcgagatccttaactgaattacgtct

SEQ ID NO: 17627 - DNA, 120 bp, Homo sapiens
tcacgttctggggattaagactcagctatatcttttctggggggccaccatccaaccgcctacagtgggaagtgcaggtaaggctcctgtttgagacagggcagggaaagcagggagggg

SEQ ID NO: 17628 - DNA, 120 bp, Homo sapiens
ccacgggctgtcagtgcctgggccttgcctatggcacacttctcatctatctgcaaagaaaggtccttcagggaaatggggagtgttccagctggctcgctgggaggtggggcctgagtg

SEQ ID NO: 17629 - DNA, 120 bp, Homo sapiens
caacgtggatgaaccccaaagacgttatgctgaaccaaagaatctagatgcaaaatgtcacctattacacaattccattgcaagaaatatccaccataggcaaatccatagagacagaat

SEQ ID NO: 17630 - DNA, 120 bp, Homo sapiens
ccgcagacggctcagcatccccggctactcctttctcctgcctcctgctcaggcccttcccactgggcaggatcctgggtcccagaggaagatgaagaacatgtacagtttcttctcacc

SEQ ID NO: 17631 - DNA, 120 bp, Homo sapiens
atgcgacccagcagcctcacccacctgggagggagatgaggactttaaatcctaaatctctgctccagtatttcggagaggggaatttaggagttcacttcctctgtctaggcatgaaga

SEQ ID NO: 17632 - DNA, 120 bp, Homo sapiens
atccgctgactctgcctggctgaggtttcctcatctcccgtccccacccacccaggcccacatcctccctgcagatgctgggcaccaggctggcagttggagggcagagagccccctccc

SEQ ID NO: 17633 - DNA, 120 bp, Homo sapiens
gaccgtgggcaggcccctccctgggacctgctaccatctttatgaagacaggcacttcggctccccagcctgtgctgatgtggacaggtgaccaagagctcccaaggtgaaggatgtggg

SEQ ID NO: 17634 - DNA, 120 bp, Homo sapiens
cctcggttatgaatgacccacatggagcccaaccccggacccaggctgaccagaccagcttcctgtgccccaggactctctgggggcctggatgggactaggaggtagctctgtgagtct

SEQ ID NO: 17635 - DNA, 120 bp, Homo sapiens
ctgcgtgtgagattccgggtcacgttcctggaagatgccccccactttctcatctgtgtgtccctggggcacttcccaagttctgtgcccctgagcccagcttggtctcatgatctcccc

SEQ ID NO: 17636 - DNA, 120 bp, Homo sapiens
aggcgaagagctggcccagtgacccctaaggaccctattatctaggagctaaaaatcctccacacagacacacaggtatgtggcagagacacacacaggcacactgacctcaggcctgtg

SEQ ID NO: 17637 - DNA, 120 bp, Homo sapiens
gcccgcagtggtgcacctgtggcccctcacccaggccagcctcgtggacaaccccaagaactagcggaggccaggttgggacttggtatgagggacccaagagaggcctgaggcccttgg

SEQ ID NO: 17638 - DNA, 120 bp, Homo sapiens
agccggggtgacaggaacaccaaaccaggcaatgactcataggcagacagacagatggtgagacccccagggctggatatggggccaggagcccactagctgtaggttaaacagccccaa

SEQ ID NO: 17639 - DNA, 120 bp, Homo sapiens
tatcgggacaggaggagggataacaacagagggcaccctctctggccactgactggcgtctgaccccttgagctacttgggcagttcccttcagcccccttgggtttggctctgctactc

SEQ ID NO: 17640 - DNA, 120 bp, Homo sapiens
cctcgtgagacctaattattaataatcaccagcgtttactgagccacgcacgcccgaagctctacctactttctcctgtagtcttttccccagcagttttatggaacataaacataccat

SEQ ID NO: 17641 - DNA, 120 bp, Homo sapiens
gggcgtccaataggaactgagctgctgagagcccgaggatgacactctctctacttgggacttggcgggtcaaactcgacctgctactttggcaaacactgaaagagtcactaaagaggc

SEQ ID NO: 17642 - DNA, 120 bp, Homo sapiens
cctcgactaagtctctcctggagacaagccaacagtcctcaaagacccaataagccctgcagcccttctctgacgccaactggtttctcatatttgccacttacctccctccctgttcca

SEQ ID NO: 17643 - DNA, 120 bp, Homo sapiens
gtccgacctcaagaatgaagctctaaaaaagtcagttccagggtagatgctggcttactgtgggtggtcggggcactgaagtgatgggtggagccgagctggggatgttggtggctgaag

SEQ ID NO: 17644 - DNA, 120 bp, Homo sapiens
tggcggtggctgttgagggatttcattgggcttgctggggccaatcttctctttagtgtcatcctctggcaccaggcctttggccttgtgaatggcctcaatctgctcctggagggtgat

SEQ ID NO: 17645 - DNA, 120 bp, Homo sapiens
gtccgggccatgctgcctgagtggccatcccaggtcacctgcaagtgaaagcaaagccacaatgcttctggaactaagaccaagtatggaagacggggggcagagaaggcactaggttcc

SEQ ID NO: 17646 - DNA, 120 bp, Homo sapiens
ggacgcccatgacaggcaattagtccatcagccaggggaaggacagggcaggcagagggtgagccagggcccggggcatagctgtgctctgggcaatggggcctcacaggagtcctcaga

SEQ ID NO: 17647 - DNA, 120 bp, Homo sapiens
agccgccatgtatcaggtgtctgctgtgacccaggcttcaggcgccgcagcctctgatgcttactcctcgctacagcaacaggaggtagatactcttgtcacccccattttacgaatgag

SEQ ID NO: 17648 - DNA, 120 bp, Homo sapiens
ctccgagcagtccagcgttagttcttcctgctttccattcagtgggtgttaggaaatgtgggcttcagcaacatgggatgatgtgacactggagacccgaggagaagaaaaacttagttc

SEQ ID NO: 17649 - DNA, 120 bp, Homo sapiens
ctgcgttccaagggccggggtcttcaagctgggatcctggccttgaccaggtccggtgtgcatctgcctgctgccagcttcccccgacccctacccttccacgcatgtgaccagcattcc

SEQ ID NO: 17650 - DNA, 120 bp, Homo sapiens
agccgaggggtagtagatgctgtagcctccttagttccacatggctgggcctagccctgtgggtctcacagcctccctgcttgtccgttcctgcttagtctctgcaggccaagcagcgag

SEQ ID NO: 17651 - DNA, 120 bp, Homo sapiens
gaacgtgaggagctgcggggcagcctggacgaggctgaggcccagcgggcccgcgtggaggagcagctgcagagcgagcgggagcaggggcaatgccagctcagggcccagcaggtgagg

SEQ ID NO: 17652 - DNA, 120 bp, Homo sapiens
ctccggccaactgagtgcctgcaggcctgtcccatgtcttttcttgggtagggacggtgccccagggcgctgagtaccatgtagctcactcaggagccaggcctgagcctccgtctgtcc

SEQ ID NO: 17653 - DNA, 120 bp, Homo sapiens
aggcgactacggacctgcggctaaccatcctggagctagaacgggagctggaggagctgaaggagcgggagcggctgctggtggccttcccagacctgcacaggcccaccgagacccaga

SEQ ID NO: 17654 - DNA, 120 bp, Homo sapiens
gctcgtgtgggcaggacactggggactgcagctccctagcctgcagcaagggtgttaaagccaggcggccagcagcgcagcccctgtggacccaccacagcacgcaagtgcttcatgcgt

SEQ ID NO: 17655 - DNA, 120 bp, Homo sapiens
ggacgtgaaagcccaacagtgatgtgactgcctctagtcacaacagccaaacgcagacacaggtctggttgtccccacagcctgtgctcttcactacgtcacatgctaattcttgctcga

SEQ ID NO: 17656 - DNA, 120 bp, Homo sapiens
gctcgtgagacatcatccaggcccttctgtccccttctcaaccaccttgtgaggcaggtcatagccccatagctatttcccatagcaggaaactgaaccagaaggggcagcaattctccc

SEQ ID NO: 17657 - DNA, 120 bp, Homo sapiens
tcccgggctcctggagccagaaggaagcatccatcacaaaagcaggggaagagcagcctggcggaattcctgccgttcccaagcttgagctggccgtgtgaccttggacagctcactttg

SEQ ID NO: 17658 - DNA, 120 bp, Homo sapiens
tcccgagtagcttggcctacaggtacacaccactgtgactggccctattatttctttatggacacataaagacatgcacatgcacaccctaggagtcttggggcagatgaagagatgtat

SEQ ID NO: 17659 - DNA, 120 bp, Homo sapiens
gcacgctcctgagaggctgcttgtaaacatctgagggcagatccatccaggagcctctggaagtgtcacttgcccctttccccaaaaaagcttccataccatccccctaccccagtccac

SEQ ID NO: 17660 - DNA, 120 bp, Homo sapiens
caccgcccagagatggtggaggggtagtgtgggggcggcagtggaatcagttcaggctggaggaaattttggcccagcatttgctaaagggctgcagctagaagcaggtgggtggagaga

SEQ ID NO: 17661 - DNA, 120 bp, Homo sapiens
tggcggtcattcaaagaatgtggtcggtcattctcatttgccagatgagaaaacaggctcagagaggggaggggacttacctgaagttacagttaatgcgaagcagaatcagggcagaaa

SEQ ID NO: 17662 - DNA, 120 bp, Homo sapiens
acacgggcagaatgtctgtccctaacccaggtgtgtgcttggggctcctctccctccctttctccactgagggcttcagttttctgctggcttccaggcatggagagcaggtccgcaagt

SEQ ID NO: 17663 - DNA, 120 bp, Homo sapiens
gagcgggtctgagtctctgcattttacaggtctagggaatgaatgaaccaccaccacccagacagctgctcctgagctgggttcttgcagtgccccaagccatgctttgagttgcccctg

SEQ ID NO: 17664 - DNA, 120 bp, Homo sapiens
ttccgaaagcaaaaggacattgacaacatcattagctggcagcctccagaggtgagcacaaattatcccacctcatccctatgctaggcctttcagacccacaacctgggtcctggatcc

SEQ ID NO: 17665 - DNA, 120 bp, Homo sapiens
gtacgacataattggacctctggatgccaagggtctgctgttctcagcctccaaacaggacctgctgaggaccaagatgcgggagtgtgagctgcttctgcaagagtgtgcccaccagac

SEQ ID NO: 17666 - DNA, 120 bp, Homo sapiens
tcccgaaacactgaagcgtctttttgttgttaaaggtaagttgggaatttcttgtgataaagccagatggaaaagaggggtcaaaaacatgactgcggcagatggagggtcaaacagtga

SEQ ID NO: 17667 - DNA, 120 bp, Homo sapiens
tcccggtagcctgggaaactggcagtaaaccatatgaccatgataaggtctgttaagtaaattacagtccatccatacaatgttaaagagaataaactgacatgtaaactgtctgggaca

SEQ ID NO: 17668 - DNA, 120 bp, Homo sapiens
aggcgtcgttcaaggctggtatacctgcaccctctcccatgtgaacaacatggttctgggtaatgggggctgtcatccagtctcctccctgcccctgctggtgcacttcctgcctctgct

SEQ ID NO: 17669 - DNA, 120 bp, Homo sapiens
gggcgcttcctgcctcggctggtgtatctcctgcccctgctggtgcactttctgcccccgctgatgcacttcctgcctctgctggtgcacttcctggctctgctggcgcacttcctgcct

SEQ ID NO: 17670 - DNA, 120 bp, Homo sapiens
tggcgcacttcctgcccctgctggtgtatttcctgcccctgctggtgtacttccttcccctgctggtgcacttcctgcctctgctggcgcacttcttgcctctccaggccctacctagcc

SEQ ID NO: 17671 - DNA, 120 bp, Homo sapiens
gtccgggcaccagagtctaaggagcccctacacccaccaggattttccaataaagagatgttcaccaatgagtttagctctctggttttcctgaggaagggctgggaacatgaggtcccc

SEQ ID NO: 17672 - DNA, 120 bp, Homo sapiens
gtgcgtttttcctccaaacctgtggctgccttgggtaggctgggctcagagcactcctgcctttgccccttaatgtttgagaagcccagcagccccctagggcggaggttgagcctcttg

SEQ ID NO: 17673 - DNA, 120 bp, Homo sapiens
agacgccattggcctcatggtgaagtggggttagcaacagagactcctcccaccagcttgggagggctgaagtgagacatcccaggttcctggcccagaatgggcagtcgccccctccca

SEQ ID NO: 17674 - DNA, 120 bp, Homo sapiens
tttcggataaacagcaaaggatgttttagaagtgtacccctaacattgcatggcacatacttatactaaactgggcatcctgtattttacctggcaaccttacttgaaggggtatccaca

SEQ ID NO: 17675 - DNA, 120 bp, Homo sapiens
aatcgccattccctgtgtaagaggatggagcggacctcagctgggatggggcggggtcttttcccacccccgggttttgtggcctttgtcctagtgcatgctgggagtcgggccccaagt

SEQ ID NO: 17676 - DNA, 120 bp, Homo sapiens
tcacgcaatactagcaataaccacaaggggggagcacctcccaacgtgcccatgttggccgattcaaactgattattgataaactcttagtgaattgctcatagtgggcaccgggtcctg

SEQ ID NO: 17677 - DNA, 120 bp, Homo sapiens
atgcgatgtgactcatttaatcttaacaaccttcaacagaaatggggtacaaaaaataataataatcttcataacctcatcttgagatggatgttgttattaggtctctgtttcctagag

SEQ ID NO: 17678 - DNA, 120 bp, Homo sapiens
tcacgcagtcccctaactcccgatacctcccccagcctaggactgcttttgcccactgcccttccagcctatgaccctctacacagtcaggggatgattcataggctgtgtgaccttggg

SEQ ID NO: 17679 - DNA, 120 bp, Homo sapiens
aatcgttccatctgtgtctaacccagatataaaaaatgccaattacatggttcaaggattccacttttaagaatttattcagaggaactaattggacaattgtccagagatgtgcatctg

SEQ ID NO: 17680 - DNA, 120 bp, Homo sapiens
tgacggtccccaggatccagtctgaacacatcagtttggcattcaaaatcccctggcctcatctctcaccacacacatccctgcacccatgctattgcctcccctgaatcctcgtcattc

SEQ ID NO: 17681 - DNA, 120 bp, Homo sapiens
gcccgccccccatcccatttcccttttttcccagccttcaaggtccagctctaacggtacccgctccatgaaccctgcttggctccctccccaagacggaatcatcttgccctacagtcc

SEQ ID NO: 17682 - DNA, 120 bp, Homo sapiens
gcccgcgatgctgtccacaatcaggactgccacgacctccattctctcaaagatgttgctgccctgggcagtgttggacatgggtgccttattggacacatcctggtcccccgcagagag

SEQ ID NO: 17683 - DNA, 120 bp, Homo sapiens
cctcgttgtcctccagttccttggtttcagtgggaccaggttcccaggccctgccctctcagggatgtggttatctagaagcaccaagggttggatcacttcagggatgatcttggggtc

SEQ ID NO: 17684 - DNA, 120 bp, Homo sapiens
aggcggtcctgggttgatgacctcagtttcttggattgactcaggggtggtgggggtgcctgcaaaaagcagcagcagcagcaggagcaggagggcgggggcagtggtaccgccatccag

SEQ ID NO: 17685 - DNA, 120 bp, Homo sapiens
ggccgcaatttcttcacatccttgccaacatcgttcacatcttttgttattttccatttgctttttttttttttatcatagccattgtagtggctgtcaagtggtatctcattgtggttt

SEQ ID NO: 17686 - DNA, 120 bp, Homo sapiens
tgacgatgttgatgatactgctgctgctgctgtctgtactacgcaataccaatggccaccaagaagtcaagacactctggagaagactccaaagacctctgaggtgggaacacaaatcct

SEQ ID NO: 17687 - DNA, 120 bp, Homo sapiens
ttacgttcccagggtcccagccacaaccccatcaaagtgtgtgcccactggcccacgatggaggcttgcaggcagccaagtccagggatgatctcaatgtagccagagactcctagcctc

SEQ ID NO: 17688 - DNA, 120 bp, Homo sapiens
ggacggtccccccgtcaccagcccactccatctattcctgcccttctagattacgcccatcacattggcctgcatcagtgcaggcagctggcagcaggccaggcccagccatcctcctgt

SEQ ID NO: 17689 - DNA, 120 bp, Homo sapiens
cctcgggctgtggctggctgcccctttctacccactgcctgagccacgtccaactcccaggctgcctctgcgatcactgggagacaggaatgctccaatgacacccagcagcaagctggc

SEQ ID NO: 17690 - DNA, 120 bp, Homo sapiens
aaccgcagacgcctgcagagagcccagaacaggctctaaggctgagtgagggacagagaggtgcaggtgggctggggtgccagagggctaattgccccacctattgcatttcatttaagt

SEQ ID NO: 17691 - DNA, 120 bp, Homo sapiens
taacgtcacctgcccaaggtcacgcagctagtagagggcagacagagctggagtacatacgcagacttgccaaactccagggcttaaagatgctgagacacaaccagggaccaaggttta

SEQ ID NO: 17692 - DNA, 120 bp, Homo sapiens
actcgaccagctctgcaggatttgggctgattggagatgcagatcttccccaaggccttggcagaagaggcagttctaggtgccctggccctaagccccaggaaccctaggactcagttc

SEQ ID NO: 17693 - DNA, 120 bp, Homo sapiens
ccacgaaacaccagagcttaaactgccacaaggcagaccagagtcgccttctctctaggtactggaaccaggtttgggacatggtatggagttgttttatccagcctaacatcccattga

SEQ ID NO: 17694 - DNA, 120 bp, Homo sapiens
tgacggtgagtcagggcggagctggcatcaaaccgcaggggctgtagtttattagcgtggactctgaacccaacacggtccacttctgtgcttgggacctgtcatgcatcatgcagcctc

SEQ ID NO: 17695 - DNA, 120 bp, Homo sapiens
ccccgagggcttgttaacagcacattgccggcgccacccccagcatttctggctcactagttctgggataaggtctgaatattcacatttctatcaggattccaagtgctgttgctgctg

SEQ ID NO: 17696 - DNA, 120 bp, Homo sapiens
aaccggtgtcgcttctctggttttgtctaagtcaaatctcattatgacagatgactttgcaagtagatctctgcattaccaaatactttcatggccgagccagtgacctactttaagcag

SEQ ID NO: 17697 - DNA, 120 bp, Homo sapiens
aaccgcatccagaatgcttttagtttgtgccacaaaatatgaagaaaatgttttcagtttatggcaactagatccatgacatatgatgctccaggaactgtttttacagtgcgcaagatg

SEQ ID NO: 17698 - DNA, 120 bp, Homo sapiens
ctacgtggctgatgttaaatttgctttttaagacagccagatcaagaaatgtctgaagactttgagactgcagcagggagatgattttgcagttagtaaacacagccctgggaagccatg

SEQ ID NO: 17699 - DNA, 120 bp, Homo sapiens
tgacgtggcctctagagaatgttgcccagggcagtagagcctccctggtggcactgctgtcagcaccaccctgcacagcccggcagaaccctgccttgccctggccatctctgtctctga

SEQ ID NO: 17700 - DNA, 120 bp, Homo sapiens
ccacggaggttagcttggttataggtgagctgttaagagtaggggtttgtgttcttggaagttagggcttaggagccacacatttccttcttgcccagctcttgcttgcttagaccattt

SEQ ID NO: 17701 - DNA, 120 bp, Homo sapiens
ttccgtccttccttccttccttgtatagccagaaacctcttaattttcattttccttttgaatcacctatataaacctagcacaagcaatttaaaggaaaaacttcactggttttgtaat

SEQ ID NO: 17702 - DNA, 120 bp, Homo sapiens
cagcgagtaattgttccactttctgatgtctaaaaggcctgtaggaagaaagtctgttttccctgaagtctaatctttcctcagccatgcctgcttaggaaaagctgtgccggcataatt

SEQ ID NO: 17703 - DNA, 120 bp, Homo sapiens
agtcgctgctaaggtcaaaatactgtgtgcctatggtttataaacctctaattcagcctcaatagttacaagctagtgtataactataaaaacaacagtaaaaagcctaatataagcttc

SEQ ID NO: 17704 - DNA, 120 bp, Homo sapiens
attcgcttcttaataaataaaagcgaatcaaaaagacagcaaagagaaaggagaaacattttataatgcagagttttgagcaaaatacttaactctgtgtctttatatgccaccacatct

SEQ ID NO: 17705 - DNA, 120 bp, Homo sapiens
tgtcgtttgtatttcataagccatctgtactgtgttcagactctgtgggttctttgttgtttaattataggaaaaggaggtatagggcaggaactttttacatacttgtgaattttggtc

SEQ ID NO: 17706 - DNA, 120 bp, Homo sapiens
tcacggaccattgggataaaccaggcatgtaggttcaattttttttgcctttgttgggatgctgtggccagtagccagggccagtcattccagattcatcccctgccactctagtcccca

SEQ ID NO: 17707 - DNA, 120 bp, Homo sapiens
ctacgggcttgaccttctgcttcctctgtcccactgcattccaaaaatgctaacaagtgactagcgagcgtaaattttatgtgttgcaaaagcagttgtggaacttgggtttcaatgttt

SEQ ID NO: 17708 - DNA, 120 bp, Homo sapiens
ctgcggctactaagaagctctgctgtacttaggccacctgccattgttctgtctctgctgctgctgctgctttttctatttttaataagttgccaattacttggtttttatagtgatacc

SEQ ID NO: 17709 - DNA, 120 bp, Homo sapiens
gcccgccttgtgccttccccccaacccccaggctgctagagacctcgcttccttcccccacctgaaagggtttaactataaaacagagatagaaatatctgtggtacaagttcactacac

SEQ ID NO: 17710 - DNA, 120 bp, Homo sapiens
atacgcacagctttcagttgttaacactggtgtagaatctaaactcatttacactatttaagtttgcccctttgactgcagtggagacggtgttagggcttaaataaagactggcttcag

SEQ ID NO: 17711 - DNA, 120 bp, Homo sapiens
aaccgtctttcctagaacttaattaaattgtaaggaaaatattctttacctgtcaccttagtccaggaacctggaaatatgcttgaccagagtttcaaaaccttggaaatgacatttggg

SEQ ID NO: 17712 - DNA, 120 bp, Homo sapiens
gggcggcacaagatgaccaaagaaaggcagaaggtgacagattacagttggattctggtaacagcgagtacaagtctcttcagggagacatagaggagatggggataaaagttgaggcca

SEQ ID NO: 17713 - DNA, 120 bp, Homo sapiens
ccacgtgaatgtcgagcttttaagagccagccaagaatgttggcttgatcctgatgggaaggatggagtcattggcaacagtgggacacttttgaggaaaagcaggcataaattagaact

SEQ ID NO: 17714 - DNA, 120 bp, Homo sapiens
gaccgggctgagccccttgaagacaggctatgtctggttcacctctgtatctatacccaggaccaatagcacttagtacatgggcagtaaatacttgctttaaagaacgagtaagtgctc

SEQ ID NO: 17715 - DNA, 120 bp, Homo sapiens
tcccggtctgtatggttcaggcattcaccgtgcccctcacgccacatctgttccatcttccctgctgcctttggctgaggaaattggtgtccgtggtggccacccagacctccttcctgc

SEQ ID NO: 17716 - DNA, 120 bp, Homo sapiens
ctgcgcttcacactcaaacaaggctgttccccatgtcttgggtctgtctttcctctacctggatcgttcttccccatggcctggtctcagcattgagttctcaaatgtccccccttccct

SEQ ID NO: 17717 - DNA, 120 bp, Homo sapiens
atccgaaggacccattccccgtcctctctacattctgtcctattaccctgtctggtttattttcttcctagtattgattactactggaatcctcatattcatcagtctgctggtttaatg

SEQ ID NO: 17718 - DNA, 120 bp, Homo sapiens
aagcgtggcctatggaggacactaaatgaacgcatgggggaaaaacgggttttattgcagagggagaccctttgtttcatacagatcgtttgtaaacttagatattttattagcaacaaa

SEQ ID NO: 17719 - DNA, 120 bp, Homo sapiens
aatcgctgcggtagtaggtgggggtggagcttctctaggcagcatttcagtgtgtcctagcttggatgctgtggcttcccgagctctgaatctatactgcttactctgggcttatggagt

SEQ ID NO: 17720 - DNA, 120 bp, Homo sapiens
ttgcgctacattggctggatgtcgtcttctccatctcagtttgagagtggctggccccagcctcctgtctggcacaaatgtcagctaaatgaaaaagggcgtgcaggaatgcactgagac

SEQ ID NO: 17721 - DNA, 120 bp, Homo sapiens
gatcgatggcagtcatacacatcttcacgccttcacagagagacatcacttatttagcgagcaagagccaagatcaaagcttggaatcaaaaatacctgtttctgagtggagaaactctg

SEQ ID NO: 17722 - DNA, 120 bp, Homo sapiens
tggcggcatggactatggcatggttggtgggaaggaggctggaaccgagtctcgctttaaacagtggacctccatgatggaggggctgccctctgtagccacacaggaagccaatatgca

SEQ ID NO: 17723 - DNA, 120 bp, Homo sapiens
ttgcggagcaagggatcataacaatacctatcttgttggttgtttgaaccataataaatttatcggctttaaaaaattttcctgccttttaatctccaaaagaggactaatagatcataa

SEQ ID NO: 17724 - DNA, 120 bp, Homo sapiens
ggtcgtgatgttggtcggcttttcctctcagtttctctctataagggcttctccatttcctgtaaaacagataaaaggtctcagaaccttccttcagcctttgtttcagtgtttgtttca

SEQ ID NO: 17725 - DNA, 120 bp, Homo sapiens
gtccggctgttcctgctgcagcgccctggcaggccccagccccagccaggtcattcagtctgaagcctttcaggtttcctttataaaccactctttaataagcccatccaggaggctggt

SEQ ID NO: 17726 - DNA, 120 bp, Homo sapiens
ccacgtggagctctctgcctgccatccctaagcattatcatttggtttcatggcatgaagtcaaaaatgatttattgaaattgtaaaatctgtttgtggactgaataatctaagcccact

SEQ ID NO: 17727 - DNA, 120 bp, Homo sapiens
cagcgacaaaaccactgaagtgctctcaggaaaccagttacaaaggatttgctgttcttcatgtgtgaggccacggatcccagagctgcagagttcattgctggtcttgtgctggcaaag

SEQ ID NO: 17728 - DNA, 120 bp, Homo sapiens
aggcgggaattccatctcattgcgttggaatttaaagcaattgcagatgcttttccctccaatggactctctgtttacactgctgcttccagctaatctaagcctgatcagccagccctt

SEQ ID NO: 17729 - DNA, 120 bp, Homo sapiens
agtcgttagcatagaaactagggataatggtcagattcctagtatgtgaacgtttcattaatttcataagaccatggaattttaaaactgaaaggaacattcaagcatgagaacaatcct

SEQ ID NO: 17730 - DNA, 120 bp, Homo sapiens
aggcgaaatgacttgttgttggtcatgctgcttagtaattctgtgctgagtctcgaatgcaacctcttattccagtgctgtttgtatatactccatcagcttcagaagactgtttgcatt

SEQ ID NO: 17731 - DNA, 120 bp, Homo sapiens
cagcgaataaaaaatagacaagttctattcataggagttattctggatgatttaatttcctctcttttctcaggcgctatagtggcccctggtaaaacccggggagggtcaccgtacaac

SEQ ID NO: 17732 - DNA, 120 bp, Homo sapiens
atacgggtcctgctggtgatagctggttacctgccaaatctccaccaacaaataaaatcggaagtaaatccagcaatgccagttggcctccaggtattgtctaggaaatgcttttcccag

SEQ ID NO: 17733 - DNA, 120 bp, Homo sapiens
ggacgcacatgtgtgtgtgtgtggtccagtcactccacagatgtaagatactcacccataaaggaaattggagtggttctggacaggccccaaaggcagtgggctgaatttaaaataaat

SEQ ID NO: 17734 - DNA, 120 bp, Homo sapiens
aaacgtcaagcaagttaatatgcttatgtctcagtaatgtagaatgccaagttccttcctgtgtcgtgtgccctccattactgtgcattgattcctccaggtgtgtaattgtgacaactg

SEQ ID NO: 17735 - DNA, 120 bp, Homo sapiens
cttcgtctcctccccttttcccccagacctcccccttctttttgtcaacttgctgggagctttgctttattggttggcagtgacctaagaacaggatatggtgaggatgtcatggaagag

SEQ ID NO: 17736 - DNA, 120 bp, Homo sapiens
ttccgtggtattctttggcaagagccatgtctactaagaggttagatgacttcagtatacttataaaattcagtgagagtgccttcttctcttctaccacactctggcatagatacaggc

SEQ ID NO: 17737 - DNA, 120 bp, Homo sapiens
acacgagtagccaaaagaaaagaagcactaatagagaaaggggtgtctcacaccagacagaggacctctgctgtcaattagatccagtatcatgacctaactttaagtgtggaaaagagt

SEQ ID NO: 17738 - DNA, 120 bp, Homo sapiens
ggacgtgtttcatttacaacattcataggagttaacttagcagtgttgcaagttaaggttccaaaccaaattatttaatcagtgtccccccaataaatcacttatccatttattgctagt

SEQ ID NO: 17739 - DNA, 120 bp, Homo sapiens
aatcggttcttccaaactcctgtgggttgaatatggtatagaaggtatgcaagaggaaaaagaaaggaaaagataaaactcctgcctgagaatttggaagcacctttattaacacatata

SEQ ID NO: 17740 - DNA, 120 bp, Homo sapiens
tctcgcagaaactagaagctcataggctgttaactttttgcaactattcactcatttttaccacttttttttttgggtgagggggtgatttttgtaaggttaacagccagattccatttt

SEQ ID NO: 17741 - DNA, 120 bp, Homo sapiens
ttacgccaagcctgtttttctctgcagagtaaacaggatgttttcagcagacttggctctaatagccatctctaagattagggaacaattgagtctttatgtagaaaagatccatttttt

SEQ ID NO: 17742 - DNA, 120 bp, Homo sapiens
ctgcgcactacatttacttctttatctgcaagtacagggagtccatacagtcaagaaacacacagatacacataatgctattgaggacattgtcattctgtaagaaaacagaatattatc

SEQ ID NO: 17743 - DNA, 120 bp, Homo sapiens
cagcgccaaaggtgtgtgtattttcagaaatggtccctatttgtcagtgatagtgttttttttttcttaagtttgacaaagggggtggtaatatcacattctttagatttgaaataatta

SEQ ID NO: 17744 - DNA, 120 bp, Homo sapiens
catcgaccctccctaacctgctcaccatacctccccaccccatgcctctgaagaaagaggccatgaacctacgaggtggtaaagggggacacaggtcagggagtggagagctactcctcc

SEQ ID NO: 17745 - DNA, 120 bp, Homo sapiens
tgacgtggctaactctctgggctgttcctgccaactcccagatggctgctttcaggaaggtttccatagcgaccagaggcaggaaaaacctgcccacccagcttaacaattcacatccgg

SEQ ID NO: 17746 - DNA, 120 bp, Homo sapiens
tggcgtgtttatatatacttatatacattacatacatttatatgtgtgtgtagcattaaagagctcaaccctgcagactctatatccagaatctggctgggtgtggtggctcacacctgt

SEQ ID NO: 17747 - DNA, 120 bp, Homo sapiens
cctcgtagtcccctgctgtgtcttctcccaccattcaggctgtttcctcccactctttccttctcattccccagcccctccagcctgctggctgccttgcagctgtttcagcatgcccag

SEQ ID NO: 17748 - DNA, 120 bp, Homo sapiens
gggcgcagttggacgaggtgagttagcaagggagtgccagagagagaccacggagagccgagaagttttgagcagagaatggcagacaaaagcgtacaaggctggatgtaggaacaggtg

SEQ ID NO: 17749 - DNA, 120 bp, Homo sapiens
tgccggggctgtggggccaggattgccccagaagaagggaacagagccacagagagcctgtgagcacaggctggggagcaggaagaagtacaggcagaggcagaggcagaggcagaggca

SEQ ID NO: 17750 - DNA, 120 bp, Homo sapiens
aaacgtggtaggcaaaggaaggcaacaggagtgtgaggagaagcacattggaggaactctgggggaaaagcagggacacctgctgacagtgagaagagaatgcaggtgcaggacaggcac

SEQ ID NO: 17751 - DNA, 120 bp, Homo sapiens
acccgggcaggcagtgctgaaagcaggggtaggctgggaggagaggccactcactgctcccaaggcctgaaagaggagactgacattcaggaagccacagtgactttctgacatggagga

SEQ ID NO: 17752 - DNA, 120 bp, Homo sapiens
aggcgggactggggatgtcaccatgggacagagccagggagtgccacaagaagggcgggcagctcccagagctagtggggcctactaaggccagagcacaagcaccagacagcccaggct

SEQ ID NO: 17753 - DNA, 120 bp, Homo sapiens
aggcgtgggccaggcagaggtgtggggctggggtccccgagatcctggtgagatcctggtggccaggcagctctgtggagcagggaggactctgcatgagctcttggtgcagctgaattt

SEQ ID NO: 17754 - DNA, 120 bp, Homo sapiens
caccgacagtggtaacccccgcctcctgcaggcatttcaggccaggccttgaaggaggggaacaccactcagtggcacctcctgcatgactctggccgcgtcacttcacttctcagctcc

SEQ ID NO: 17755 - DNA, 120 bp, Homo sapiens
ttgcggagttgttgagtgaacaagacataatgtgtgggaatgacttcatggatgagagcaggagtgaggacctggaatgcccaaggccagcccatagccacgaataattggtggctatga

SEQ ID NO: 17756 - DNA, 120 bp, Homo sapiens
gaacgggaagaaactcccagaccaatgggagaagacacgcaccacaccctctacagctgtccccacagctggaatgaagtcacagcaggactccaaagggcacagggaaggggagggtac

SEQ ID NO: 17757 - DNA, 120 bp, Homo sapiens
tcccggcccatcggaagttgagacacaacctgagagggaaaaagggaagtgaggacatggccacctccaggtagggtgtgcccagcctgccctgaccctacacagggtcctcagacgcca

SEQ ID NO: 17758 - DNA, 120 bp, Homo sapiens
gaccggaggaggagaagagcaacccccagggtggcaggagcaaggaggagctaggaaagagagaaggcaatgaaaaggtcacagaactgaatatactcaagaaaaacaggctgctccaaa

SEQ ID NO: 17759 - DNA, 120 bp, Homo sapiens
tgacgtttgcaatcccactgcaaggcagccatggccagcgtcgtcctccacctgacctctggctgctggagaggggccactgcccacatctcccaccaccggggagctcaagcagccagc

SEQ ID NO: 17760 - DNA, 120 bp, Homo sapiens
gctcgcaggccacaggcagagtgcctggcccacagcccacatgccccgtgaggcaggcaagccgaggagactagcagccaatctgctttcttggtccaaaaaagctctggtcatcataat

SEQ ID NO: 17761 - DNA, 120 bp, Homo sapiens
ggccgagcaaacgcctcctttagcctcttgcttgtaactctatactgtgtttagtcttcaatgtcaagttgtccctccctcccttgctcctccctgggagacccgggctacctttctacc

SEQ ID NO: 17762 - DNA, 120 bp, Homo sapiens
aaccgtctccctattgttaaaggtactctgtatcttcatcccacactgcacaaaactctcttattcccccatgatgcttacagatggtgcagtgagggctctgaaccagctaacgaggga

SEQ ID NO: 17763 - DNA, 120 bp, Homo sapiens
aaacggctttttcccttttacactaaaggaatcaagtccaaactcccaagtgtgccaagaggccctgcacgtcctgaactgtgcttactgctcccacctcgtttttgtttttgagacagg

SEQ ID NO: 17764 - DNA, 120 bp, Homo sapiens
tcccgcctcagactaccaaatcactgaggacctggcctcccacctctcatcttgacaccctcccttccagtgccttctcatcaggtcctagggttgttctccctgcctggagcaccgtcc

SEQ ID NO: 17765 - DNA, 120 bp, Homo sapiens
gaccgaataggcgcacaggcaacgccatcctttcccccaacactgtactctccagtgctctcagcaaactaaaccactgctgcttgttactcctttggttcccaggacccatgacctcat

SEQ ID NO: 17766 - DNA, 120 bp, Homo sapiens
ctccgtctcaaaaaataaagtaaaataaaatagccgtgggtcttaaggagatgcagcccatgatctgtctagggggattatcttcccatgattttatgtgaaaggaaaaagtaaagggag

SEQ ID NO: 17767 - DNA, 120 bp, Homo sapiens
aaccgaaacagagttgggatggggacgcaagtaaggtgctgtggcagaaaacttgggcttggagtgtgggccagtttctgctttccacaagagtcaagtggataccacctactctgggca

SEQ ID NO: 17768 - DNA, 120 bp, Homo sapiens
gcccgtcctgtgaggtgtggccagtgtaaccccggacttgggaagcttttccattggctaatgtttgtgtcccaacatctacaaaacgttaagtggaattaaagatggggaaataccagt

SEQ ID NO: 17769 - DNA, 120 bp, Homo sapiens
gatcgggtgatcattccatatccttaaatgtacaaaaagagaaacctcattccaatcatgttccatataatcaccatgggaggtaaatgagagaagggatgaagtaggagaagcagagct

SEQ ID NO: 17770 - DNA, 120 bp, Homo sapiens
gcccgctccaagctccttctctgctcatgaaatgcggctggacttttcaaagctgttgagagaagaaccgtaaagattaccttcaagcgaagcatcatgtctagtgctacgatattcagt

SEQ ID NO: 17771 - DNA, 120 bp, Homo sapiens
gagcgagaaaccgtcccccaaaaaaaaaaaaaaaaaatcacattactgttagtagtactataaatatcagttgaagtgaaggcaatgacacctgagtaagcatgtatctttatggtttag

SEQ ID NO: 17772 - DNA, 120 bp, Homo sapiens
cttcgatgcttctcctgggcatgaaaacagcctgaactgtggcaacagctggggatcattaaactgacagaaatagcttaggagactccaatggtgtgtgaaggcgggaggagagcctga

SEQ ID NO: 17773 - DNA, 120 bp, Homo sapiens
atgcggcctaaattgcttagcctcctacctattcctagatggaaggtttagtcaaacctaaaaatgtgggtctcaatgaagacatggtggggaagagtagggaggagaactgcggaatct

SEQ ID NO: 17774 - DNA, 120 bp, Homo sapiens
taacgtagtcctaaggcatctccctcaactgggaaggaccaaatgctacatgaaatgcatgttcttgttcttgctagagcacagccatgcctccccagtggtagcttttcaacctggcag

SEQ ID NO: 17775 - DNA, 120 bp, Homo sapiens
cttcgaaggtcggtgcaggaatgagccatctgcctggcccactgcccgagtgtgttcagcacatacctgaatgccctagagtagctttattcagatcaccccaagggagtgggcttgcag

SEQ ID NO: 17776 - DNA, 120 bp, Homo sapiens
tcccgacttacgcctttaaatctggttagtcccaggatcctggtgtaccttcttcatccccacacttgttaggctgtctattcaatattatcatcaaggcttctcccaccaaggcgtttt

SEQ ID NO: 17777 - DNA, 120 bp, Homo sapiens
gcccgaacaggaaatgattcgattacggatattaagactgcaactttctttggcaagagtgttttgtaactatgagattgcaccaagctcggttgaacattttattcaatgaatctaatt

SEQ ID NO: 17778 - DNA, 120 bp, Homo sapiens
aaacggagacagccttgtaactatttatacaatccctcagcatggtaagtgctctgatgaggacaaagaagaggggaccttgctggggctggagagttagagaaggcctccaggaggaga

SEQ ID NO: 17779 - DNA, 120 bp, Homo sapiens
gaacgcacaaaagcaaaagttatgaaaataacaattacttgaggaatggagaatagagagaaagagaaatagagaaaggtcatttggacagcagtgtggaaacaaggagggacaaagaca

SEQ ID NO: 17780 - DNA, 120 bp, Homo sapiens
aatcgcatggggtagtaaatcttttcttcttatgtaaaaggctacatatgccataaacaaacctgataaatattagtttaagatgtaccttggccgggcacagtagctcacacctgtaat

SEQ ID NO: 17781 - DNA, 120 bp, Homo sapiens
caccgtaggtgggttatcataatggtttgtatgtataagtgttctacattcatcatttacttcttgagtcctcacaatgtgatgagcactaataccaggtgctgaagaggattcattctc

SEQ ID NO: 17782 - DNA, 120 bp, Homo sapiens
ttacgtaagagatgctctaaagctggacctttaaaaataagttagatcagcaaagagtggagaaagtctttccaggcaaggaaaagagaacaaagacataacagagacagaatcaatggt

SEQ ID NO: 17783 - DNA, 120 bp, Homo sapiens
tggcgggtaacattaatcctggcactcaaaaaaaaatagcctctgttgtaaataatttttattatttaagatacaactgaggctgagtgccgtagctcagttggaagaagaaagaaagat

SEQ ID NO: 17784 - DNA, 120 bp, Homo sapiens
tgccgccatgatccgatcacctcccagcaggccccacctccgagaccgggagacacatttcagaatgaaacggcgtacgtctgtagtcccagccactagggacagggagctggggtggga

SEQ ID NO: 17785 - DNA, 120 bp, Homo sapiens
taccggtgcctctgaacagtccctggtgagagctgccagcggggacggcagcagctgaagtgggcttcctcatttcactggggatgtgtagagcctgcagtgatagaaagcaagttgcag

SEQ ID NO: 17786 - DNA, 120 bp, Homo sapiens
gtacgtgaaaaacttcaggcttggtcaacagagatctgactttagccaccgtgattgagagcacagtctctcacccaatttccaaacctgagtcagcccttgttccagaagtcctggaag

SEQ ID NO: 17787 - DNA, 120 bp, Homo sapiens
gtacgggctgggaatctgcctctagccttccccaggagtatctgagaccatctaccagggaactatacacaatgaaaagattaataccagacctttgatttttgtttcctcttttttgag

SEQ ID NO: 17788 - DNA, 120 bp, Homo sapiens
ggacgccattccccagtgtggtcagccagctacgtggtggcaggttgattacgctggacgacttccatcatagaaggggtagggttttgtccttattggaacacacacttactctgaata

SEQ ID NO: 17789 - DNA, 120 bp, Homo sapiens
gcacgcaatgcttctggcaaaactagcatgtgtgggcttgtgggatgtcttatccaccattatggtattctacacagcattgcttctgaccaaggaacccacttgacagtcaaataagta

SEQ ID NO: 17790 - DNA, 120 bp, Homo sapiens
ctgcggcatacgcctgcccaacccagacactgacctctactggttcaccctgtaccagtttttcctggcctttgccctgccttttgtggtcatcacagccgcatacgtgaggatcctgca

SEQ ID NO: 17791 - DNA, 120 bp, Homo sapiens
cagcgcatgacgtcctcagtggcccccgcctcccagcgcagcatccggctgcggacaaagagggtgacccgcacagccatcgccatctgtctggtcttctttgtgtgctgggcaccctac

SEQ ID NO: 17792 - DNA, 120 bp, Homo sapiens
tagcgctcctcctcttgatagtcaagcttcctggaaaagttgctcctactggtttagaacccaccaaagtcaaccaatgacctctttatttctaaatccaatgtgccctgtattagtttc

SEQ ID NO: 17793 - DNA, 120 bp, Homo sapiens
gagcgagactccatctcaaacaaaacagaacaaaaaaaccaagtatttacagagacatgagtcatcgagaggctatctaaaccgagataagctgcagtgcagtgatgacagtttctttcc

SEQ ID NO: 17794 - DNA, 120 bp, Homo sapiens
ccccggaggggctcatggctcagcagatcagctgcaggaaagagagaaacatcgtctctccgtgcgcctttccttgtatattaatctgcgatcctgctacacatgccactgtcagtcagg

SEQ ID NO: 17795 - DNA, 120 bp, Homo sapiens
ctacgaagcctggggagaacagggcaagatttccgaggcctggccggaggcaacaggcacatagaaaaggggtatggggtccggaaggtgcagagtaaatgtgtgcgtggggcaagattc

SEQ ID NO: 17796 - DNA, 120 bp, Homo sapiens
tctcgtgtttgccagtgatcctggcttccctagcaagtaggaattgcatcgctgctatctctgcctccactgtcgcatagctatctgcccctgtgtgtctcctctcttctcttcttcctt

SEQ ID NO: 17797 - DNA, 120 bp, Homo sapiens
aggcgtgagccaccgcgcctggctgctaagtgatttgtaagctaagacatactcttaaattccttcaaagcaagggaagcagtgactgttttaagaacaaatactgtctttgaaatttga

SEQ ID NO: 17798 - DNA, 120 bp, Homo sapiens
agtcgagagagagagagagagagagagagagagagtcagttagaagtcacgggtattgaagtgcttattagttaaatcgggttctttgtctctctactttgctaatggctgatcttttga

SEQ ID NO: 17799 - DNA, 120 bp, Homo sapiens
tgacggtctcatttaataccaatgcaaaaattctacagatgaagaaatggggactcagagagattaagtagtttgcttaaggtcacacaactaggaaatgaccaaattggcatttaaatg

SEQ ID NO: 17800 - DNA, 120 bp, Homo sapiens
tgtcgattcatgtagtagcttcctagcacttcggtaacaaccataacccagcggcgttggtggtacagtagcgagcatagctgccttccaaataatcataactttggtgggattttttgt

SEQ ID NO: 17801 - DNA, 120 bp, Homo sapiens
aagcgcctgccacagagctggacacatagtaggtgcctaacaaacagcagctctccataggagaaggctggttcagtcccttcaggttgaaaggaccagagacttctcgggttccctcaa

SEQ ID NO: 17802 - DNA, 120 bp, Homo sapiens
caccgcctacacctgcaggtggactaagaagccccaaggggatacagcgcaggggaccaacagctcctgcaaccaccacggcctctccgccgccttactcctgcgtactcctgcatgctt

SEQ ID NO: 17803 - DNA, 120 bp, Homo sapiens
ccacgtaagccttgcgtttcatctgtccacaagaaacaggtgattgggcaggactgttcacgctagcccagctcacagggcactgacctccagagatggctgcccttgccacagtcacct

SEQ ID NO: 17804 - DNA, 120 bp, Homo sapiens
ttacgatattaaagggaaaatgccattatagacatttctaggcgaatcgcactggagcagtaaacacgtggatgaacagcccggaatccactctcatcagataagagaagaatccagctg

SEQ ID NO: 17805 - DNA, 120 bp, Homo sapiens
ttccgattcctcttggctctactttcccggcctctgcctggtggcctgagagctgcgggctatggctggccagggggcgggcccaggcgcggagcatgtgttttgagcattagtggaatc

SEQ ID NO: 17806 - DNA, 120 bp, Homo sapiens
tgtcggattagtgcttcctgctcatgctggtttcacagagagagcagaggcaagatggatgcgggaggcacaggcgtgtccccgcggtcctgtagtgtgggtacaatggctttatttcag

SEQ ID NO: 17807 - DNA, 120 bp, Homo sapiens
tgccggtttccaacttggcttatccatgtgtccgtcccctgcaagtccacgctgcttccgctgtggagtctacagacatctggttatcgagggaagcatttgtccagcgaggattcaaag

SEQ ID NO: 17808 - DNA, 120 bp, Homo sapiens
tcccgcagcccacccaccatggcgaggagcagccgctgactatgccgacctgtttagtgtcgccagtgatttatggcccagtggggcccagctgttggccgtggacacagcagctgctca

SEQ ID NO: 17809 - DNA, 120 bp, Homo sapiens
gggcgatcatgttgccagtctgaaaaccaacgcaagctaaggagggctgttccctgcaacacacatgcacttgccccctccagctaaggcccaaagctctgctctaagtctgaatccgct

SEQ ID NO: 17810 - DNA, 120 bp, Homo sapiens
ctgcgtggctgttggtgccaggctgagctgagaggctgttcaggaggccttgtgcagccctgcaggaacatgtgggttgtcagagctgctgccctgttgtcccatggcattacctgattg

SEQ ID NO: 17811 - DNA, 120 bp, Homo sapiens
gacggatggaaaacctagttgcatatgctcggaaagttgaaggggacatgtatgaatctgcaaacaatcgagtgagtgtctggtttttttctattaatagccaagattgaacctgttgtg

SEQ ID NO: 17812 - DNA, 120 bp, Homo sapiens
agacgggggacacgctgtagctatcccgtcttattgtccccaagcatagttaggataccaaagcagtttcttaagtgtatgtcatcaagaatcttatgtttttcctcctaatacagtgca

SEQ ID NO: 17813 - DNA, 120 bp, Homo sapiens
tagcgacttaactgttgttcacggtagttcagattctctacataagttgaactttcctttctaaattggcaccagttcttaatgcagcatataaaatgaaactaatatctattctcagtt

SEQ ID NO: 17814 - DNA, 120 bp, Homo sapiens
gcgggttgtgcagcataccaagggttgcaaacggaaaaccaatggcgggtgccccatctgcaagcagctcattgccctctgctgctaccatgccaagcactgccaggagaacaaatgccc

SEQ ID NO: 17815 - DNA, 120 bp, Homo sapiens
gcccggtgccgttctgcctaaacatcaagcagaagctccggcagcaacagctgcagcaccgactacagcaggcccaaatgcttcgcaggaggatggccagcatgcagcggactggtgtgg

SEQ ID NO: 17816 - DNA, 120 bp, Homo sapiens
caacgacaccaactggccaacagccaaccaccccgcagacgccccagcccacttctcagcctcagcctacccctcccaatagcatgccaccctacttgcccaggactcaagctgctggcc

SEQ ID NO: 17817 - DNA, 120 bp, Homo sapiens
cagcggagacgcagcgccagatggcccacgtgcaaatttttcaaaggccaatccaacaccagatgcccccgatgactcccatggcccccatgggtatgaacccacctcccatgaccagag

SEQ ID NO: 17818 - DNA, 120 bp, Homo sapiens
gaccgacagggatgcagcaacagccaccctggagccaaggaggattgcctcagccccagcaactacagtctgggatgccaaggccagccatgatgtcagtggcccagcatggtcaacctt

SEQ ID NO: 17819 - DNA, 120 bp, Homo sapiens
ttgcggactctcaggtctcccagctctcccctgcagcagcaacaggtgcttagtatccttcacgccaacccccagctgttggctgcattcatcaagcagcgggctgccaagtatgccaac

SEQ ID NO: 17820 - DNA, 120 bp, Homo sapiens
aggcgggcgttcagagggctggcctgccccagcagcaaccacagcagcaactccagccacccatgggagggatgagcccccaggctcagcagatgaacatgaaccacaacaccatgcctt

SEQ ID NO: 17821 - DNA, 120 bp, Homo sapiens
ttccgagacatcttgagacgacagcaaatgatgcaacagcagcagcaacagggagcagggccaggaataggccctggaatggccaaccataaccagttccagcaaccccaaggagttggc

SEQ ID NO: 17822 - DNA, 120 bp, Homo sapiens
cagcggatgcagcatcacatgcaacagatgcaacaaggaaatatgggacagataggccagcttccccaggccttgggagcagaggcaggtgccagtctacaggcctatcagcagcgactc

SEQ ID NO: 17823 - DNA, 120 bp, Homo sapiens
gtgcgctctccccagcctgtcccttctccacggccacagtcccagcccccccactccagtccttccccaaggatgcagcctcagccttctccacaccacgtttccccacagacaagttcc

SEQ ID NO: 17824 - DNA, 120 bp, Homo sapiens
ggtcgaggctgctataagccatgattgtggcactgcatttctgctagggtggccgagtgagaccctcctgggctgttacagcacatcaatctatgaaatgggtccagtgtgctagcagtg

SEQ ID NO: 17825 - DNA, 120 bp, Homo sapiens
cttcgcttactgactcctcaataacagccccactcaacaaatgaaaaacaagctcaggtgaaataaggtcctcaagatcacatagccagtaaaaggcttaccaggacaatggcctgttgg

SEQ ID NO: 17826 - DNA, 120 bp, Homo sapiens
ctcgggaaggaggaggtggcaaccgcacccgggcggccgagtgcttaataatggcagttgccctgccagcccggtcacctgtcactccctcctccgacttctcccgcaccgcggccgcaa

SEQ ID NO: 17827 - DNA, 120 bp, Homo sapiens
gcccggacactctgagggctctctctgagctgggcacggtcctcgctgctcggccgagtgcagccccctcacctcagtgcgactgagacaaagcaagggtcccaccggcccctgtcccct

SEQ ID NO: 17828 - DNA, 120 bp, Homo sapiens
aggcgcgccctcagggcgggagacccacctcagccagccccccagctcagtggtccagaggctcgggtcccgcgctgacgcccagcgcctccctcctccacagccgtcactgaccgctcg

SEQ ID NO: 17829 - DNA, 120 bp, Homo sapiens
gctcgcctctagcctggaccccgctgtccagcagtcccggctggcccgcgccgcgctcctcccgctctggcagtcctggcactggtaggacgcccgcagccttccaccctagagggcgcc

SEQ ID NO: 17830 - DNA, 120 bp, Homo sapiens
cgccgggcgggcacgcgctgggggcgacgggggtggggcgggggaggcggggcgacgcagcgcggggcggccggcggttggtgctcgcagcccgcgcgcccgccttcccggccacgtgac

SEQ ID NO: 17831 - DNA, 120 bp, Homo sapiens
ccccgcccagatcgggagttccgcgcggactcttggtgcgaccccgtcccactgagcgctcgggtcgggaccttcccggtgtccctgtggggcagagtcccgttgtgcagaagaggcgag

SEQ ID NO: 17832 - DNA, 120 bp, Homo sapiens
gcacggtggcaggcggggcgtccaagcagttagcgccgcgcctggccgctcgtccgcgcgggaaagcgttgtctcccttccttcggatggaattggaacggcagctctcgtagcgcccga

SEQ ID NO: 17833 - DNA, 120 bp, Homo sapiens
ggacggggggccctccacagatggcttggactggttctgctaccatgcctcttcccacgccatcttcccggccaccttctgtcagaagaatgacattgagctcacaccgccaaaaggtaa

SEQ ID NO: 17834 - DNA, 120 bp, Homo sapiens
tctcgcctacctattaggtcccagcccgctaggcagagcagataccatgcccactttatggatgatgaaatcaaggctcagagaagtccaccctcaacatccccaggaagggtaactaac

SEQ ID NO: 17835 - DNA, 120 bp, Homo sapiens
acccgcccctccccacaagctgctcggatgggcatggacatggtgtgcctggggagatgacaggggcttgactgagagtggctgggtggtctttggctggaggtctaggtgggggtgccc

SEQ ID NO: 17836 - DNA, 120 bp, Homo sapiens
cagcggaagcagctggcagtcacagtggaagggattgctgctgaggtcgatgagctccagctggctgagactgggcagggcaggcagggcccgaagctggttcttctgcaggtgcaggct

SEQ ID NO: 17837 - DNA, 120 bp, Homo sapiens
gcccgggccccaggcctgaaaaggccccaggacaaatctgcaaggagttgccaggccccaatgtgagctcctggcagagctgtcccacccccaagtctggaagggagccccatcttccct

SEQ ID NO: 17838 - DNA, 120 bp, Homo sapiens
cagcgctgggtcaaaacccaggctggtctgatgtcaaaacacttgctccgtccaagtcacccagatgcccagttcatggtccaccccaccacccaataatggcaaaacctcttgggggct

SEQ ID NO: 17839 - DNA, 120 bp, Homo sapiens
taccgtcctgtgcaggcaccgtgtgtggcctgggttctgcccggactgtcactcacaccggtaggggcagtcctggtttatctcagggtccccgtgcccaggctgagacctggcaccaag

SEQ ID NO: 17840 - DNA, 120 bp, Homo sapiens
gcacgctgcctgtggccttgtgccgcctcctgcaccaaccccgccagatgcccagtgcccacctgctccaggccactgctgttcaggaagaggtgctgcagcgacctgcccacaggctgg

SEQ ID NO: 17841 - DNA, 120 bp, Homo sapiens
ctccgtcacgcaaggccctgagtgggttgcccgagagctgcagctccaggagggcaggcagcccctccaaggccccagtgggcacctctcgcagctgattcctgtccaggtgcagcttct

SEQ ID NO: 17842 - DNA, 120 bp, Homo sapiens
tcccgagctgggcccagcgccccaagggacacttcggtgatgcggtttccactcaggtagacccagcgcaaggcccgtgttctccccaggtccccaggtgccaggcggtccacagcgttg

SEQ ID NO: 17843 - DNA, 120 bp, Homo sapiens
gggcgcgcagggcagcccctggcacctgcaggaaacggttgcgttctaggtacaggtagccgaggcggggagccccttcaagggcagcagcgctgaggcctgcgagctggttgtcggaga

SEQ ID NO: 17844 - DNA, 120 bp, Homo sapiens
aggcggcccagcccggccagggcgcccgcttccagctccgcgatgccgcagtgctgcaggtgcagcgacaccaggtggcccaggccggggaaggccgctcggggcaccgaggggaagtgg

SEQ ID NO: 17845 - DNA, 120 bp, Homo sapiens
ttccgcctcaggtccaggagctgggtgtcgctggggaagccgcggggcaccgcctgcaggccgcagccctcgcagctgctgtgccgggactcggggacgcacacgcaggcgcgagggcaa

SEQ ID NO: 17846 - DNA, 120 bp, Homo sapiens
aggcgcgactgcccgctcctccccggggccgcgcggagggccgcgcggaggggcgcggggcccggccacagcccgctcttccagctcttcctcttcctgcgccgcgtccccagggcagcg

SEQ ID NO: 17847 - DNA, 120 bp, Homo sapiens
ggccgcagggcgtccagagcctcgccccgcaggcgccgcggcccctggcacgcgccgtccgagcgcacgcgcgcccgcgccagccactcgagtaggggccgcgcctggcagccgcaccac

SEQ ID NO: 17848 - DNA, 120 bp, Homo sapiens
cagcggattcccctgcagccgcagccggcgcagctggcccgggccctgcagcgggggcagggtgtctagctggttcccgcggaggtcgagggtgtgcaggcgcggacagtgtgcgaaggc

SEQ ID NO: 17849 - DNA, 120 bp, Homo sapiens
ccccgaacgtccccggccgcagctcctccagtgcgttcccctccagctccagccgccgcaacgagcccagcccgtccagcgcctcctggggcagctcacgcaggtggttggaggccaggt

SEQ ID NO: 17850 - DNA, 120 bp, Homo sapiens
aggcggcccaggccacggaaggcgccctcggccaccagctccacctcgcagtggcgcaggtccaggtgtgtgaggtgaggcacgccctggaaggcggctgcggggatcaccttcagcaaa

SEQ ID NO: 17851 - DNA, 120 bp, Homo sapiens
agccgctgggtcagctggggacagcgaggagaaagtggggctgagccaggcagggaccccgcctttgcaagtgctgcttcttccccggaacactcttttctcctgtcacctttcccatat

SEQ ID NO: 17852 - DNA, 120 bp, Homo sapiens
atccgacccctgacacctcctccaggaagccttcctctccagtgccctgggcatcacccactgtggcatttttcacactgtgctgtccctgcctcctcgctctctctcctccactagctg

SEQ ID NO: 17853 - DNA, 120 bp, Homo sapiens
gcccgcctctccaccacagggtctgcagtgaattcagtatcgatctatgggtcacctacttattccattcacacagtaaggattttaaatagatcatctccctgttactggtttttatta

SEQ ID NO: 17854 - DNA, 120 bp, Homo sapiens
tcccgggcaggcggtggcagatcaactggtgcccagcccaggctcctccctctgggtccccaccttgccccactgccactctgtgcctgtgctcctgccctgctgacctcagggatggcg

SEQ ID NO: 17855 - DNA, 120 bp, Homo sapiens
tcacgtcaggccgagggacacaggcaccctctgcaggggaggccactccagctcctcagcctggggctccatgggcctcacagcactagctatgtgatccactccaccccatctctctaa

SEQ ID NO: 17856 - DNA, 120 bp, Homo sapiens
atacggcaggccgcccttgatgcaggttctgggaagcaaagaagctccactctacactgaccagcccaacgtgaagctctacactgaccttgcctgaggacacctccctgggcaaggccc

SEQ ID NO: 17857 - DNA, 120 bp, Homo sapiens
tgacggtgccccccctgagcatatgctcctcttttcagactccctctgcctatgtgccaggctctaccagctgctctgcgggtacagtgagtatagggatgccccaagccctgagttttg

SEQ ID NO: 17858 - DNA, 120 bp, Homo sapiens
ctgcgttgccaagccaacccaagaactggggatggttgcttggcaaccccaccctcatggacgcctctaccctccggccacaggctgttgcctttgaggcctttctcttttgaaaacaac

SEQ ID NO: 17859 - DNA, 120 bp, Homo sapiens
caacggctgaccatcccagatggtggtggccaagggccagggcacatatgtcagacggatgtggatggaccaggggactctgcggggagggggctgccacacccaccttgccgccgccaa

SEQ ID NO: 17860 - DNA, 120 bp, Homo sapiens
cctcgaagccttgcacaccgtcgggcccgaatgcgttgtcgcttaagtccagctccaccagctgagccccagctgtgatgagtccttcccctagtgagatctgggcacagaggaagctcg

SEQ ID NO: 17861 - DNA, 120 bp, Homo sapiens
ccccggctggtgcagaaccaacacagacacaaaccatttcagtattcttaagactggaaaccctgcaaagggctcctaacagctggagagtgggggatgcgtatgcctggagtggcccgg

SEQ ID NO: 17862 - DNA, 120 bp, Homo sapiens
agccgtggcatgggctttgggtggaagggaagtgaggggtcagatcaggcaagagccttgaatgccaggccaaggactgtgagcctcagcctgagagcagtgggctttgaggtggctgag

SEQ ID NO: 17863 - DNA, 120 bp, Homo sapiens
cagcgacactggcaacagaggggacctgccagccggtgtgacaagtgtgggagaggagctgcctgttcatggagcaggggacatgcagaagctgttggttccctgttcgtgcaggaggag

SEQ ID NO: 17864 - DNA, 120 bp, Homo sapiens
ccacggccaggatcagctttgacagggtgatttgaagctctcctggaaacctcctgggctggggagagctacattccctcaccccaccaggagaaatggtcagagaggaggctctgccag

SEQ ID NO: 17865 - DNA, 120 bp, Homo sapiens
actcgccccactctgctcaccttcaactccgacttcttctctaaggccttggcgatgaccctggctgcttccacgcccactgtgttgccttccagacgcagagcctccaagctgtcaaag

SEQ ID NO: 17866 - DNA, 120 bp, Homo sapiens
agccgagggaaaagagcaactggatgctcacagcaaagaagactttgccaagtaggtggtgtgtgtggagcctccaaagatgggcagtgtaccaggccaagcagagaaacggcacccaag

SEQ ID NO: 17867 - DNA, 120 bp, Homo sapiens
gcacgatggcacaaaggctttcattgttaagtgattcatgtgtggggtgtttgtccactactgtactattttattttgatgaaacattccaaaccacctaaatgtccatcaagagaagac

SEQ ID NO: 17868 - DNA, 120 bp, Homo sapiens
cgtagcctcctcactgttcctcccatagcctcagcctcctcactgtttcttccatagcctcctcactgtttcttccatagcctcctcactgttcctcccatagtctcagcctcctcactg

SEQ ID NO: 17869 - DNA, 120 bp, Homo sapiens
ttgcggacttcagtgccttcctcctcctcctcctctcctccttagagctgcagcctcctcctcttccctgtcctgtgcacccactgactcaggttcatgagatcctgtgggaggctctgc

SEQ ID NO: 17870 - DNA, 120 bp, Homo sapiens
cagcgaactcttctggataaatggctcctggatgcctcagggttaacccttgtacactctgcacacagagctgccttcatggtctcactgcctcttagagatgccattgttactctcagc

SEQ ID NO: 17871 - DNA, 120 bp, Homo sapiens
agacgtgcttgagtggccgggctcatggttgtagatcttcaggcccttccctgcaatatcctgcccgtgcccactgcagccccatcagctggacacacagacacccttgatcagagtctg

SEQ ID NO: 17872 - DNA, 120 bp, Homo sapiens
cctcgagccctgtccctgacccaagacttcagctcctctgtctctgccaggaagggaagctggtgttccttcctaggcaggggcaggaggcctgggggagggagggtaacaggtgttgac

SEQ ID NO: 17873 - DNA, 120 bp, Homo sapiens
aggcgctggaggacagcgagaaggcgctgggcctggacagtgagagtatccgggcgttgttccgcaaggcacgcgctctcaatgaactgggacgccacaaggaggcctacgagtgcagca

SEQ ID NO: 17874 - DNA, 120 bp, Homo sapiens
agccggtgttccctcgccctgccccacgtgagtgtggctctgcagccacgccggtgcctgctcagaggccaggcttctgaccttccggccctcacttgggcccagccaccacatccttct

SEQ ID NO: 17875 - DNA, 120 bp, Homo sapiens
gagcgctgactgggtgccaggcactgctaggatgcattgtgtgtattaactcacctaatactggcaataaccctaagaggcagatactgtgattattctcattttaaagatgatgaggcc

SEQ ID NO: 17876 - DNA, 120 bp, Homo sapiens
ccccgggctggcgactacacctaccgtgagggccttgagcacaagtgcaagcgggacatcctgctcggccggctccggagctcggaggaccagacctggaagcggatccggccccggccc

SEQ ID NO: 17877 - DNA, 120 bp, Homo sapiens
cttcgtgggctcctactacctgtgcaaaggtgggtgggctgcagcggggcaggcagcacagctggggcccagcccctccacccccagccgctgctctactccccatcacaggtagacaga

SEQ ID NO: 17878 - DNA, 120 bp, Homo sapiens
gcacgggaggagaaagccacggcctaggctcctggggcccgtgcaggatgaattccacatcagaatgagcgtcttcttcccttagcagcttccagaggcaggtgggacacatttgggaca

SEQ ID NO: 17879 - DNA, 120 bp, Homo sapiens
gaccgagcccgtcactggcctgtgctctggagtgtcaggagcctacatgactcatagggggctggcttctcttaccactgtagggccctgaggggccgcggggcagtgtgcccagcagcc

SEQ ID NO: 17880 - DNA, 120 bp, Homo sapiens
tggcgcatggtgagggctccatccacttgagctctctgtcactcttctgttgtcactgtcctcatttctggctcacatcagcctggttggtatttaatggacatccatcatgtccctgac

SEQ ID NO: 17881 - DNA, 120 bp, Homo sapiens
aagcgccttggtcccgctgtacggcgatatgtgaatagtcacgaattgctaaggccttcccagtgtagccctttcatttcaccagcatgcagcctcacagctctggaggaggaaacggag

SEQ ID NO: 17882 - DNA, 120 bp, Homo sapiens
ccacggctctgcctctcccccaacctggcccctagcagtggcccgcccaggcctcctgaacttgctccttgtcctcccagcagccaggctggtctaaggacatgtcactcttgggtcaaa

SEQ ID NO: 17883 - DNA, 120 bp, Homo sapiens
gcccgtggccagtgggatgaagtccacattctgcaacaagacctacacgtgcccgtatccaccccctcacccctctgccctaaccattccccaaatgcactgaccctccctgattccgtc

SEQ ID NO: 17884 - DNA, 120 bp, Homo sapiens
acacgctgtgccctttgagcctagtcaccctctgctcctccttcaagcaccgcctgaatcttgggaagcccttctctgcggtgcttccccttgcaatcacccccactcccacccagggat

SEQ ID NO: 17885 - DNA, 120 bp, Homo sapiens
gggcgctgtcctgtgtttctgggcttggaacctctcagctggactctgatcccagcagccccactgagctgttaattccctccccaaagctgtccctgaagaccccgcttggcctccgga

SEQ ID NO: 17886 - DNA, 120 bp, Homo sapiens
gcacgtctgtgtccgtagagcaagggctccaggtccgggttgctggcagggtttggtgccgctcagtccaaccctcatccctggcaccaccagcccttcccctagctcttccaggtcggg

SEQ ID NO: 17887 - DNA, 120 bp, Homo sapiens
ccccggatcatcagcaaaggcaccaaggactctccgtctgtctgctccaacctggctgccaagcacagcttctacaacaacaagtgagtgggaccctcagcccaggctgaggcctagggg

SEQ ID NO: 17888 - DNA, 120 bp, Homo sapiens
tgtcgaacatctactatattccaagcgtcatcttgggtatgttaattatcttagcaatcctgtgagggaggagttactggccctgttgtacagaacaaaaagctgaggcttggaagtagc

SEQ ID NO: 17889 - DNA, 120 bp, Homo sapiens
aagcggggggcctcgtctctgactgtagcccagcaccctccaatgtcatgacatcagtgtcaggcagtgaggggaggcctgggtcaggtctggcaccacccctttctccctcttgttccc

SEQ ID NO: 17890 - DNA, 120 bp, Homo sapiens
ccccgcacagacactaactctaaaatcccaccctgcctctctgcccacccccaagggtgctcaggtgagcagctccctctgggctaaggccaaacaacaggagggttgaagtccagggac

SEQ ID NO: 17891 - DNA, 120 bp, Homo sapiens
cagcggtgtcaccccaccacacacactgccctgcaaaaggactgccaatacccccagcccattccccagcctcacatataaataaggacttgcgacccagaatcacatccagaagggaag

SEQ ID NO: 17892 - DNA, 120 bp, Homo sapiens
gcccgagaaggcctgctgaggttggatggctttgagtgcgaggatagctgggtgacagaggcagtgacacgggccagcctctccctgttccagggagggtcaggctccagctgcagctct

SEQ ID NO: 17893 - DNA, 120 bp, Homo sapiens
ggccggtgggcgagcggtaaggggtgagtgaaacacacttgggtgctttgcagggccctcccattccgtgcctgggctggatcttttttctagaagtaagagtgagaagatcgaaaatct

SEQ ID NO: 17894 - DNA, 120 bp, Homo sapiens
aaacgggcctggggtgccgctgccctggccatcggccgcatcaaagaagaggctgggtgagccaccaccgttgtacacgaactccttggcattgggtgagagctgggactgaggggccgg

SEQ ID NO: 17895 - DNA, 120 bp, Homo sapiens
ggccgtgatgaagttcagtgaatgcatagacagagagaggctcttgtgcttcagcaggctgttggtgggtgagcgggccatgcgaggctgctgtggtggctgctggccacccgccccact

SEQ ID NO: 17896 - DNA, 120 bp, Homo sapiens
tggcgatggggagttggacagggagctgtcctggctgccaatgggcacgaacacctgggcgtcagggttgaagctgctcttgatctccttgtccagctctggggcaccgcaaccctcact

SEQ ID NO: 17897 - DNA, 120 bp, Homo sapiens
gcccgcacatcttccaccgccaggccactccgcttggcggccagctccaccacggggtccaccatctccccaatgtgaacacagcggaagccagagcctttcagtggcttctcagggtac

SEQ ID NO: 17898 - DNA, 120 bp, Homo sapiens
gcacgtgtacagccttgggctccaggcggctctgggaaatgagaggcaccgtgagaaaatatgcagaaagctggtggtgaccaacagctagggatagacagaaaagcaccaactttggat

SEQ ID NO: 17899 - DNA, 120 bp, Homo sapiens
ctccggtagggacccatcatcactcagtctcccagggactgtctgaccacctgtcctcggcagcagatcagatttatcaagtgttttgagatccccggagagaaggcagcccaagataaa

SEQ ID NO: 17900 - DNA, 120 bp, Homo sapiens
ctccggggctcatgctgggggagaaactgaactgaaagagccatctctgagaggaggcagagccagaacatgttcctagccagacctctgggcaaggctgtgctgctgagctaagcaaag

SEQ ID NO: 17901 - DNA, 120 bp, Homo sapiens
agacgacgggggaagaagtggggcgtgaagctcaaaagaagcctcagtcagtgcagattccagagagaacttctgataaaaatgtgaggaaggtgtgtgtgtgtgtcacacgcgcgcgca

SEQ ID NO: 17902 - DNA, 120 bp, Homo sapiens
agtcggggctggcaatgcacaccagcctgcactgccacacttccaccttgctcttcatcaggcatgaaggagagctgtcatagaagtttgctttgattgattggaacctgaacaactgca

SEQ ID NO: 17903 - DNA, 120 bp, Homo sapiens
acccgctgggtagctgaggctcagctggagaaggaacctgcccacaaccatgcagtgcatgagtggtggtgtctcgtctttgtaccctctagtactctaaccactaccccatactccctt

SEQ ID NO: 17904 - DNA, 120 bp, Homo sapiens
cttcggttttaagggtagggacttccttaatctggatctccagcctccagcacagcatcatctaattatagtaaaggacctattgtttgtcaaggacggctgtgacaggagtacccacct

SEQ ID NO: 17905 - DNA, 120 bp, Homo sapiens
tgacggacacctgggccccactcccagcaattctgattcaagtgatctaggcattgctattcaaaatgtggtccatgggccagcagcattggcatcacctaggagcttgttagaattcca

SEQ ID NO: 17906 - DNA, 120 bp, Homo sapiens
aaccggccatttaacaggatccccaagggacttacgtgcctgtcaaaatgtgagaagcactggcccgttccccagcaggtcccatagtgcagtcaggacgaagaaccactgtccctgtca

SEQ ID NO: 17907 - DNA, 120 bp, Homo sapiens
ggacgttgtatttattcttggagctctcacaccgctgctcagtggaaaagtgatagatttttctttactctgtaaaacacttccaccttgctttcatcaggtatgaaggagagctgtcat

SEQ ID NO: 17908 - DNA, 120 bp, Homo sapiens
cagcgcacagggcagccccacaacaaaagaattctgcggcccaaataggttcatagtgccctggctgagaaaccctgacacggagaaagagggcagaggtgaggttatgctaaaaagaat

SEQ ID NO: 17909 - DNA, 120 bp, Homo sapiens
aagcgttctattctaagaattttttagaaggccaggggacttgctgggcgacttctcttccaccttgtgtctccaacagaaggggtctaagtctgttcttgagaactggatctgtgtcat

SEQ ID NO: 17910 - DNA, 120 bp, Homo sapiens
cctcggggcccagaaggaggggctgtgagtcattgcccgtacaccagccttggcggtgctgccgcaatcggcgcaggctgtacctcaggctagtgctgtttttattcatagagatgctca

SEQ ID NO: 17911 - DNA, 120 bp, Homo sapiens
ctccggctctcccgcctcatgggggcttcagcaccatcagagccactcaccacaagcgtgtacggagcctccttctttggcagctcctcactggaagtggtggcatctgctgagctgggc

SEQ ID NO: 17912 - DNA, 120 bp, Homo sapiens
ggacgtgtcaacaaagctctcgtccaccacccggaagcggatctcctcgccggtgtccatgtagaggtcgtgtgctccttcctccgtctcgtactcccacacccacacctgctccgcttc

SEQ ID NO: 17913 - DNA, 120 bp, Homo sapiens
cttcgtcgctgagggggtccagggtcaaggcagcaaccagatagtgggaggggcttccctcagcacccactccccgaccccgcaggaaaaaccaatctcagggtgagatcactgtggctg

SEQ ID NO: 17914 - DNA, 120 bp, Homo sapiens
aagcgctcttggaggccaggacccaggaaggggaacatggggtccccagccaggcaccacggccagacgcacatggatctcagagcaccagagcaggaggggacgagacagggtccgagt

SEQ ID NO: 17915 - DNA, 120 bp, Homo sapiens
ccacggagccccacacacccttttcatcaaagccttgtgacaggctgatgggcacccaaggacttgccgttttcaagaggacatagtgggatgggaggtcacctgcccacttggatgaca

SEQ ID NO: 17916 - DNA, 120 bp, Homo sapiens
agccgggctgcgccaggttttctaacacatcctggagtcacatgcagacccagagccgtgctgccacccagccagggcagtcccccttggctctccatcgtccctggcagagcccacaca

SEQ ID NO: 17917 - DNA, 120 bp, Homo sapiens
aaccggaagtgaatggtgtcccccaggacaccacagctctaatggtgtgcagtgtacaacccagacagccaagcctgatggccccgacaaagacaggcatgtgggcatcacatgactccc

SEQ ID NO: 17918 - DNA, 120 bp, Homo sapiens
aggcgaggggcaggcacagaggccagtgacatcaggttacaggccccaaaggccaccctaaggagtggggaccttcctttggagaggcctgagctccctgtgacaaaccactttaaccct

SEQ ID NO: 17919 - DNA, 120 bp, Homo sapiens
tgccgccccccatttccttgaagtcttctccaaaaatgtctgttttctgtgtctgcccatcttgacccatcctcacccccttcaaaaaaaaaaaaaaagacaggtatagacaggaactgc

SEQ ID NO: 17920 - DNA, 120 bp, Homo sapiens
gcccgtgtcctgggaaaggccagaggacagttttggccacagatggctctcccaggcttggagagacatggctaggcaatgttcacggatgcgcagggggattccctgagggggacttgg

SEQ ID NO: 17921 - DNA, 120 bp, Homo sapiens
atacgtattgttaattctctgatttcaatggcagggactgcttatacttctaatgtatacttactgcattctggtttttgttaaaatttgatatttatgcccattactttcactgattca

SEQ ID NO: 17922 - DNA, 120 bp, Homo sapiens
gctcgatgtggactttgttaaatgggttaaacagctctggggtgaaaaagggtccttctgttagtcttgtggtaaaggcagccactgacattcttctgatttttctttccatttgactcc

SEQ ID NO: 17923 - DNA, 120 bp, Homo sapiens
agccgggccaggaccaaagccggtgatctccgagatacaggtgggcatatttccccgttctcttaaattggcacttaattattgtttttttattttttatttttttaggagttcaggagt

SEQ ID NO: 17924 - DNA, 120 bp, Homo sapiens
agtcgcttcttgcatggtgttgcccaactccactgcatcgtttttatccacctcctctctctcactgggctgtaagctcaccgcaggcatgagcacttgtttgaattcccagaatctagc

SEQ ID NO: 17925 - DNA, 120 bp, Homo sapiens
agccggatacttactaagaatcaggcactgccattctgtcatcaaaatggaacagatttattaggatgctcacaagaatggagaacacatgaactagcactctcctcatgtgacagagag

SEQ ID NO: 17926 - DNA, 120 bp, Homo sapiens
tcccgactctttcaagacccaggtcaactgccccatggctcacccacccaggctgcctccggagtcctgcagcacatctctttggtatgctgctgccctgctaccctcaagggcatggtt

SEQ ID NO: 17927 - DNA, 120 bp, Homo sapiens
ccccgcacacaacaggaagctagtggctgaaagctggaaccagatctctgtcctggctccatcagctttctcctggctctttctgcctttcaacggtgccaccaccctgcttctgtctgc

SEQ ID NO: 17928 - DNA, 120 bp, Homo sapiens
ctgcggagagaaggacgtgaagctaataggtgatgtgggcttgggcagggcagccacaacaaactgggaagaatgcctaggcacacacaattatgtgtcctagaccggccctgggatatg

SEQ ID NO: 17929 - DNA, 120 bp, Homo sapiens
tcccgtgtggcccagccccggaagctgccatcattctagcgggtcctcccaccgccctcactgtcctgcccaaggggacaggcctcaagaagagcaaacgactgctcctggagtccctca

SEQ ID NO: 17930 - DNA, 120 bp, Homo sapiens
atgcggaggaggattgcacacctgaagtggggtcttccccggcggatcctggagtcctatttcctgtttaacttcttaggatcttgctcattgacccttgctggggcgaggctctctgga

SEQ ID NO: 17931 - DNA, 120 bp, Homo sapiens
cagcgcccagacagaaaaagctcgaaacttcctatacaagccagagctctggagaggaacagaccgcacatgtcagagcccattaagcatttccatccagcctgaaaaggccaggagagt

SEQ ID NO: 17932 - DNA, 120 bp, Homo sapiens
gggcgccagagaaccacaggagatccaggaagcgcttgctaggaccaagctcccagctcccaggacccccaggccggcagcggagtccaggagctggtgtggcccacaaagggtcggaga

SEQ ID NO: 17933 - DNA, 120 bp, Homo sapiens
ccacgcccactggaggaaggaatgtacatcctgggaggcctctaagctccccagactcaaatgccagcagctcacatactggagaagaggaagcctggaatctacagggtgcagaggggc

SEQ ID NO: 17934 - DNA, 120 bp, Homo sapiens
ctgcggtggcaaagctgggcctgacccttctggccaagatgtcctggtccccacagctcgccaagcgcaagcacttggcccctaacctgagcctgagggaacctgattctactctgcctc

SEQ ID NO: 17935 - DNA, 120 bp, Homo sapiens
ccccgctggtggcctagctcagagcaggctctttgctgccacagactaaatcagactgctcttctcttcccttcagttcattcccagcactgaccctttccagaaggccctgagagaaga

SEQ ID NO: 17936 - DNA, 120 bp, Homo sapiens
aaacgccgaaagaaagaggagaagcggaaggagatccgaaaaggcccaaggatctccagatcccagtctgagttatagccctggagcagctcagggctcagggggccacaaggaggcagg

SEQ ID NO: 17937 - DNA, 120 bp, Homo sapiens
ggtcgggaggaagaagaggtggaggtgtggttgtggtggagagcaccagctagccccttccagaaggggaggccacatttgcccggccccctggagctgggtctgagccccagctgaagg

SEQ ID NO: 17938 - DNA, 120 bp, Homo sapiens
ttccgcccttggtggggaagcagcagaactaggttctgagccacgggtcagggtgccaccctgctgctggccccactgtgtcacagagctgcctggcacaggtcccagcccctctgcaga

SEQ ID NO: 17939 - DNA, 120 bp, Homo sapiens
gaccgaccaaggctggtggggacactgtgaggggaccagggcccctcagggatgtagaaacagcttggaggatgcctctgccccaccaggaggggccccaggccctggcagggcagagaa

SEQ ID NO: 17940 - DNA, 120 bp, Homo sapiens
ctacgccatcactgcccttgacaaatgattggtgttgggaaaggacctggaagtgccctgggacctgggaaacatttagctcaagaagaccttggagcaacatgatccctgtcctcagat

SEQ ID NO: 17941 - DNA, 120 bp, Homo sapiens
cagcgctggaagacagtcaacctgtgggtggggggctgcagggggacaggccgcagccctgcaggaggccgtgctccgcaatggctgccctaagctgcatgggtcagacagcttcccgtc

SEQ ID NO: 17942 - DNA, 120 bp, Homo sapiens
tctcgggaggccacagggcagggaagctgcagagggcatgtggccctgggtagggcagctgcccttcactcatgcccctcccaagcagaggagggaagggctttagtgagaattctagct

SEQ ID NO: 17943 - DNA, 120 bp, Homo sapiens
cctcgacacccagccccctaccactgacagagcacaagtgagatctgagtgttagcccttcagatttgctgactggccttggcccacccctccctgtgctgcagcttcattggcaaaatg

SEQ ID NO: 17944 - DNA, 120 bp, Homo sapiens
tatcgaagggcttgcaaactagaaaatttctgcatatctcaggccttgagaattgctaatggatatgtatctaaatgtcccttacaagcttgctcctccacgtggccctgtggaacaggt

SEQ ID NO: 17945 - DNA, 120 bp, Homo sapiens
tttcgagctgctgaaccagatatggaactgctttgctaacctggtgtctgcccagcttaagccccctccatcccacagctgtgaaaggaaatcatgcttcttcccaagtgctaacattcc

SEQ ID NO: 17946 - DNA, 120 bp, Homo sapiens
aaacgaaatttgtgtaaagtgtttaattgctgatacatagtaagagctcagcaaatgttaattcctgtactttttaaaaattattactactaatttgctcagtttttcttcttgattgtt

SEQ ID NO: 17947 - DNA, 120 bp, Homo sapiens
gcacggatgataacaggaacctctaattttggttatttgcttttagagaccagaacccagatacagtttcctggggcctcacctactttgttaagcaacttagctataagtttacaaagc

SEQ ID NO: 17948 - DNA, 120 bp, Homo sapiens
gagcgtgccagcctagctcgtgggaggcctgtctctggccctgagctttgtggcctgccgtaggaactggagcttcattttcaaagctccataaaactcgccttctcccgggcctccctt

SEQ ID NO: 17949 - DNA, 120 bp, Homo sapiens
caccgcagaccagatggggtcctggagaggctctgcgtgcccttctggagcttcccatcactcctttctgcagatgttcatcttaacagcccctctgtgccactcagcccagtacccggc

SEQ ID NO: 17950 - DNA, 120 bp, Homo sapiens
gcccggctgactggagatggctccactggagctttttgtgtgtgggttgaaagggacttttttattttaatttaagtagtctcattccatctgcctacacactcttacgcttcgtgaact

SEQ ID NO: 17951 - DNA, 120 bp, Homo sapiens
taccgccaacattgacctgcataagggtctacccttcaccaagcacttcggataaattatcttattaatcctcagggcaaagaggccaagtgtgtattttcaaagcagccttttgtagtg

SEQ ID NO: 17952 - DNA, 120 bp, Homo sapiens
ccacgctcacaccactgattaggtgggcctccagagactcacacctaggcctgactaccaccaaagcctgtgcgcatctatgaggccaccctggccttctgccctccttagctttccatg

SEQ ID NO: 17953 - DNA, 120 bp, Homo sapiens
tgtcggccagtgtgtgatattcttctggctctgtgttacagccctctgtattgatttcttacagagttgggattttgggggaattctaaaaggttcaacaaattcttagatttctcttag

SEQ ID NO: 17954 - DNA, 120 bp, Homo sapiens
cagcgagtgccttgtgtggctggtgaggccaggcttggcgtaagacacaccaggggacaggaccacagactgggatgggagtgctgggcctcgtcgcaagaggagtcaggatgtgactga

SEQ ID NO: 17955 - DNA, 120 bp, Homo sapiens
gcccggtgaggcccaattgcagctggtcccgtgcacagctccatcattttcagggatggccactgcccacagcctcagcctggctccactgggatggagatccagggcccttggaactga

SEQ ID NO: 17956 - DNA, 120 bp, Homo sapiens
gaccgtgggcccagagctctgtcctggtgcttctaggccttggtttccttaacagcctaaagggacagggaggtggaccctttgtggcaggagcggagaccgggcctggtgggttctggg

SEQ ID NO: 17957 - DNA, 120 bp, Homo sapiens
agccgattcacagcaattcgggagagtcctaacctgggagtctgctgggtgaccttgggcaagctacttaggtttcaaaacccaaatttcctcctctgtaaagacacacccacttgaggc

SEQ ID NO: 17958 - DNA, 120 bp, Homo sapiens
tggcggagaggaactctgtggaagatgcacgcagactgctagcagtgctctggaccacagccaggtgcaggaagccctcccggagggacactgccagggaccctgctccagcttttcccc

SEQ ID NO: 17959 - DNA, 120 bp, Homo sapiens
tggcggctggagggggctcaccttcagtacagggcatggaccccccactgggccttggacccaacagccctctctcctgtgcccgggcctttctatggctgaagtctaactgttccctct

SEQ ID NO: 17960 - DNA, 120 bp, Homo sapiens
ccacgggggtgggcattaaccctgacattcaaccctggcccccctctccagccacttccccctggctctggccggtgcactggagcagtcctccaaccttgcactcgccgtgccctctgc

SEQ ID NO: 17961 - DNA, 120 bp, Homo sapiens
cctcgcagccacgctggggcttctttattctcaggggcaggaaccacataaaagggcttatttacaagacgaacccgcggcctgcaggctccaagacaccactgccgttgaggcagacag

SEQ ID NO: 17962 - DNA, 120 bp, Homo sapiens
ttacggcaggcgctcctctccctgtggcctgaggctccgacgggcagacaggaccccagcccatgcctcgagggcaccgcggccccgcttcacacggtgacctcggtcttgctattggtc

SEQ ID NO: 17963 - DNA, 120 bp, Homo sapiens
taccgggacccgcggcccgcgctgccgtaaaggccggggagctgcgggttgaaggtctcaggcatcttcacactgaactggcgccgggccgcgtgcccgggtcgccggggtacctggaag

SEQ ID NO: 17964 - DNA, 120 bp, Homo sapiens
gcccgagccgtcgggtggctgagcggggcgggccgggccgggcgactggaggtccaggcggcataggggcccggcgcggcagggggcgcgtagaccggcggggcccaggggcaggcgtcc

SEQ ID NO: 17965 - DNA, 120 bp, Homo sapiens
cagcggcgcaggcaagtccggggatggtcgcggagcccgcgccgggggttgccgcggggacggctcgagggcggggaaacgctgacagaagtcccgcggggcggcctctgcggggacagg

SEQ ID NO: 17966 - DNA, 120 bp, Homo sapiens
tgacgccgcgccgagcacccaagctcaggactggacaaggggtcccggccggggactgggacggggaccgggccggggcgggccgggggcggggcccgctggggcgagggagccgattgg

SEQ ID NO: 17967 - DNA, 120 bp, Homo sapiens
ggccgagcggcgggcgcgcggaactgggaatttggcgcttggagctgcggccccgcgcttcgcagtccgggagctcgtgcgcccaggtgccctgacgctgcccgcacccgccactcacct

SEQ ID NO: 17968 - DNA, 120 bp, Homo sapiens
ctgcggccttgagcgcggcggccttgaacgtggcgtacttggcgtagtctggctgcagcgtcaggctgccgccgccctgcagccgcgggccgcgcgggggccccggggcggccgaccccc

SEQ ID NO: 17969 - DNA, 120 bp, Homo sapiens
ccccggggcgcgttgttgaggcgcttcttgtctggagcgaggagtgagacgcggctcggtccgatgccccggttcactccgccctcgctgtcacctctccgtagtcctctccccgaggcc

SEQ ID NO: 17970 - DNA, 120 bp, Homo sapiens
ggccgttcggtgagaacctgggggaccgttctccgggcgaggctgcgagccaagcctgtcttcgccgcagcctccagcgcctggaacagggcctggctccgagtcacgcgcagcggcggc

SEQ ID NO: 17971 - DNA, 120 bp, Homo sapiens
cggcggcagccagcccggggggtgccaccctcatgaacggctcgcccggaggcgacgctcgagccaggcgcggagtcctgggacctgctcccgccgagacgggggatgtctgaggaacag

SEQ ID NO: 17972 - DNA, 120 bp, Homo sapiens
ctccgtcaaatgaagcccaatgcagggtggggaggggtggcacctggctgaccctgagtccagaggcctggccagtggggagctggcagggcagggagttggggagctggggctcagtct

SEQ ID NO: 17973 - DNA, 120 bp, Homo sapiens
ctccgttagactcccaaagggcaggacagactcctccctcagacggggcccccttcctgcaacctgtctcttcctcacactggggtctgtcagggcagagctgttcctggctccgaccag

SEQ ID NO: 17974 - DNA, 120 bp, Homo sapiens
cagcgcaaactcttttccactctgtctccgtttccccttaaagcccttctctccccctcaggggccatgcatctccccctagaccgtcccgacaccccagcccctgcgccccgctcagac

SEQ ID NO: 17975 - DNA, 120 bp, Homo sapiens
acacggaactcaccgtccttgtctccgtcgggggcctctgcggaggacgcgccgcgaagccgccgctgtcgccgcctccagctcaccagacccaccaggaccagcgccaggaccagtgcc

SEQ ID NO: 17976 - DNA, 120 bp, Homo sapiens
actcgggcctggaccactggccatggagaacgtgaactccctggggtcccaaggactgctcacagccaggtggaatgagggggacaaatgagtgtgtgactccgagtaagctctactcct

SEQ ID NO: 17977 - DNA, 120 bp, Homo sapiens
gcacggacggggcagcttccaggcccagctgaagaggcgccgcttccagtagccttcgcccccccattcccagcctgtaggcctagggggttcttgcccgccttcaacatcctgcaatga

SEQ ID NO: 17978 - DNA, 120 bp, Homo sapiens
catcggttagcctggcgccacgctacagctgaggaactgaggcttgccgagggtgagtgacctgcctgaggtcacgccaccaagcaagcagccaagcccagcctctcccatctccctcca

SEQ ID NO: 17979 - DNA, 120 bp, Homo sapiens
ttccggcacacactgatcttccattacttccctcagccaaactgtctcctggacaatgtcactgggtctccagatggcgtgaagcaaccccactctctggccacccatcccccgccttcc

SEQ ID NO: 17980 - DNA, 120 bp, Homo sapiens
tggcggcagtgacagcactgtgttccccagtgcttggaaggttcccagactcttggctggagaatgcgatgccacttctcttgttaaatggtaccaggtggcaaggaaaatgtggcacag

SEQ ID NO: 17981 - DNA, 120 bp, Homo sapiens
atgcgggcatgggggggagggggtgtgggggaaggcctctcctcctggtcgccagcaaaaagtgacatcccagatcaggcaggctgcatccacaccgccttcctcccctgcttggacacc

SEQ ID NO: 17982 - DNA, 120 bp, Homo sapiens
ccccgccaaagacctactctaccctccagttaccctgcaaagacacgcattctggccaaggacagaagggccaaagacaaggtcactctctgggaaggctggccttccgggctctgctgc

SEQ ID NO: 17983 - DNA, 120 bp, Homo sapiens
ccccgaccaagtgcccgaggggctttttgctgcgggcgaaggcctgctcaggcccagagcctgcaccactctgctcccacgctaagggcctctgccctcgggcctatcctgccaccccct

SEQ ID NO: 17984 - DNA, 120 bp, Homo sapiens
tctcgcgatgctgtgttctagtggtcccatcctgaggcaggaaccatggcttgcagactgctgctttctggagcacacgggctgtctccaccttctgtattccagctcagggcctggcca

SEQ ID NO: 17985 - DNA, 120 bp, Homo sapiens
aggcgtgagccactgcgcctggcctccaaacctttcttcaaggattaggcaggcacacagaaaaactggagagaagcagagtggggctggctctgctgccagttagctgtgtgactgtga

SEQ ID NO: 17986 - DNA, 120 bp, Homo sapiens
caacggtctgtttcatgaactgtgaattggggaaacatcatctacctcacaggtctgctgtgtgagaagagctctgtgaagcatgacgtgcctgcaaatgtcgggtgacatgtggggcct

SEQ ID NO: 17987 - DNA, 120 bp, Homo sapiens
cctcgaccggaatctacgtggctgaagtcctcagcggagcccaagggactgccaggaagtcagccaggtgtctacaaacccttactgagcactaggggtggggcctgagctaagttccag

SEQ ID NO: 17988 - DNA, 120 bp, Homo sapiens
ggccgcatccccgacacctacaaggagttagaaggcggcccacccctcagtgaagggcatgggcccagctgcgatggtgacatcaaagcagagaggccttaggccggccgcggtgactct

SEQ ID NO: 17989 - DNA, 120 bp, Homo sapiens
ctccggagccctcatttcttcgtgaagtccccagctcccctgcctccactcaatggcaccggccctgcaactttaggcaggtcgaagccaacccaaggaaagaacctaagaacctcgttt

SEQ ID NO: 17990 - DNA, 120 bp, Homo sapiens
agccgcaccccgcggggctcaggcttggaactggtgagggtgtgtggtgggggtatgcagagggataagaccgtggtagaggagagggttggtgaggagagagagagagagagagagaga

SEQ ID NO: 17991 - DNA, 120 bp, Homo sapiens
gagcgggcaagcatggggagatgagatgtgtatatgtgagagagagtgtgggggccccaggcagggcaggaggtggtggaaacggggtgaactccgtgggctgtgtgaggactgtccata

SEQ ID NO: 17992 - DNA, 120 bp, Homo sapiens
ccccgccccccttcgctggggcttccatcttaatttattctcaataataaagacttcatgatgatctctgcaggaccctgtcttttcctgaaatgaggatcatgtctgtcaactcactgg

SEQ ID NO: 17993 - DNA, 120 bp, Homo sapiens
actcgatcactcttggttgtagggggttgtcctgcccattgtaggatgtttagcaaccctggtttctccccagtagatgccagttgcaattgccccctctcctgttaggacaatcaaaaa

SEQ ID NO: 17994 - DNA, 120 bp, Homo sapiens
agtcgttagattgtcagacccctttccctccaccccacacactcagtctgggcacctcacctaaattctggtcttcacttctccctacgagatctcagctctccctccatctgcagccca

SEQ ID NO: 17995 - DNA, 120 bp, Homo sapiens
acccggatgtctcccgggcatgtccagaggtagcccttttcttcttgaactgactcctgcctccctgatctcactctctcagctgtaggcattgcctaccttttattaggtgcctagaaa

SEQ ID NO: 17996 - DNA, 120 bp, Homo sapiens
acccgggtatcctcttcttcctcatctctctcttgccatctcatccagtctacttcccaccttgttggtttacctcctcagtactcaactatctggctggctgtcccctcctctccatcc

SEQ ID NO: 17997 - DNA, 120 bp, Homo sapiens
caacgactcccacattgaatggcagcactttcggcttaatattcgtcagtgactcaccattaccttccattaaaatccagcttccaaggctgcgtgcggacttctccagcctcttattta

SEQ ID NO: 17998 - DNA, 120 bp, Homo sapiens
cagcgacaccaaggactctgggctgtccaccagcaccacgcagctctcacctctggagaccctcacctctgctgtcctctctttgcagaatacctctccctttccattcttcccttccac

SEQ ID NO: 17999 - DNA, 120 bp, Homo sapiens
ccccggcccctgcattaggacattccatcttcctgtctcctccactagacccagaaccttcgaggggagggatggttgtcctcacccctgtgaggcaatatgctgtccattagtatccac

SEQ ID NO: 18000 - DNA, 120 bp, Homo sapiens
atgcgtgaaatttttttctaatgggcaaactgaggctcagagaagttcctgtctggctcaaggttattggttcatcattctggagcagggcctggaacccgggcccctgactcggctcta

SEQ ID NO: 18001 - DNA, 120 bp, Homo sapiens
acccgcgcaacaccccagcccccgcgtgactcacgcgcgctcacggccgcccgcagctgccactggtcccctgcgcccctccgcccgtccccgccgcagcccagtgggtaaggggcgggg

SEQ ID NO: 18002 - DNA, 120 bp, Homo sapiens
gcccgcgccccgctcagccttgcagccccgcgcccggagcatctccctggaggaacggagacaaaggaggattcatgtccaaaggtagggcggccggccaggccaccggcacccgccagg

SEQ ID NO: 18003 - DNA, 120 bp, Homo sapiens
ctgcggccccggccagcgcggctggaggcgctcctgggggagggtttccgcgccgaggagcccacgcgcggtgacagatgcgcggacacacgcacacacggtggcacccacctcgagaga

SEQ ID NO: 18004 - DNA, 120 bp, Homo sapiens
actcggagtggcaccaaccctcctagctctctgtctcctttcctctccaatcccttgtccaccagtgaccaaataatcttcccaccttgcaaaacttatcgagtcacccaacttacttaa

SEQ ID NO: 18005 - DNA, 120 bp, Homo sapiens
actcgtagactgtcctgattgtacctcttcagctcatctctgaccacttcccatctagcattgtactcctcactcagaagaggcagtgctcgtccacatgccatgctctctcctacccta

SEQ ID NO: 18006 - DNA, 120 bp, Homo sapiens
ggtcgggaggccactcacctatcactcaccccttcgcgctcgagccaattctcagggcccgcctctttctcccctttctcggcgggggcctctaccctgactccgccccgctccccgggc

SEQ ID NO: 18007 - DNA, 120 bp, Homo sapiens
ctacggggcggcaggaggcccgaagcaagatggcggtgaatcagagccacaccgagaaccgccgcggagccctcatccctaacggtgaaaggtgcctgaggggaagcacggcgtgctgtc

SEQ ID NO: 18008 - DNA, 120 bp, Homo sapiens
tgtcggaggagaggagacgaatgagatagacatggcggctcgcaaactctcagcgagtcagggactttgccgccttttttgggcgcggcgctcttagctccgcccccgacctttgggagc

SEQ ID NO: 18009 - DNA, 120 bp, Homo sapiens
tgccgcctcaaggtataataggaaaacataggtgggtagatatgctctcccacttgctaagctgtaggactttagcaaaaccactttacctctctgacttagttttctcatctataaaat

SEQ ID NO: 18010 - DNA, 120 bp, Homo sapiens
gttcgttccttttccccttctctccttcccctcctcccctagtacagtacagcactatgatgtcagcatcattagcgtggagaagacaggaaatgttgctgtcagttttagtgtagttac

SEQ ID NO: 18011 - DNA, 120 bp, Homo sapiens
tgtcgcaatactgaagtagccattcaattctgctaagtaggagtcaacacccactggggtacacagagatgaaaaggcaagtcctgccctcaagttgctcatatcatagtagtgaaaata

SEQ ID NO: 18012 - DNA, 120 bp, Homo sapiens
ggacgcagctggtcacagaggcaagccaaactgatgcaaaatgcattatggctaagttaaatcagagaatccaaggacacccaatgtcatctttatctgtccagaaaagccaactgctga

SEQ ID NO: 18013 - DNA, 120 bp, Homo sapiens
gctcggttccagcaaccagcacaaacccagtcacaggctgctttgtgctttgtgcccggtgctgtactacatatcagctaaagccagtaagctgagctgacctctgctctctaggaggaa

SEQ ID NO: 18014 - DNA, 120 bp, Homo sapiens
acacgaaaataagtgaaaacttggtatcaaacaagcaaataaatacatttgctcatatcattctcttctcaggttcctgttgatttttctctaagatgaaaaagcttaggtgagactgaa

SEQ ID NO: 18015 - DNA, 120 bp, Homo sapiens
catcgttatttttcaaaaccaatttcctaactgttgcatgacaatcagcagtcaaactaattggaatgttactttaacatttcttcctccttttagcattttttgtgctgtgttgtgggg

SEQ ID NO: 18016 - DNA, 120 bp, Homo sapiens
cagcgatgcttacatagaaccttacctttcctttcctttcttatcactgctcccaactgggtcttcagcttcttgggtcagtgggacaaactacaagcaactgctacagtgtccctttca

SEQ ID NO: 18017 - DNA, 120 bp, Homo sapiens
ctacgaatagcacagatattgtttctaaacaggaaaaagagtggtaggggaaggaattctattaagcaaacattgttggtttttctccccctgattttcttcgagaaatgtgtgtaggga

SEQ ID NO: 18018 - DNA, 120 bp, Homo sapiens
acacggactaaactaagtatgccatctcaaaggaaaacataagtagtgtttaaaggtctggtctagtctcagctggtcagcctagaatccactggacaactgcacttcattactaacatc

SEQ ID NO: 18019 - DNA, 120 bp, Homo sapiens
ccccggtagtgttcagatcttgcaaagccaacaaaactgcagcataggtcagctgcaaactccccctcatcagagacctccctgagccagcaaagtcaaggctgtgagctcagggccttc

SEQ ID NO: 18020 - DNA, 120 bp, Homo sapiens
tctcgtaaggcagccaaggaaaaagctctgtaagaacctggaacaccctgataatggagaagagggtggaggaaagaagcaacagacagacaaactccctgtcctcagcatcagcaaaag

SEQ ID NO: 18021 - DNA, 120 bp, Homo sapiens
agccgaccaggcatttcctaccacccgcaggttacccctttccccaacaaactcacctttctcagagcttccccagtatttcatgtcttgtttcctcagcatttctctgccttgtcattt

SEQ ID NO: 18022 - DNA, 120 bp, Homo sapiens
aatcgtatttagctagagcagaagttctcctccctaagttttcatgagaattacctgggaaagctttaacaaaaactgatgctagattctgttcccagggtttctggtttagttgatact

SEQ ID NO: 18023 - DNA, 120 bp, Homo sapiens
ccacgagatctatatcaagttgctcaacagcctaacatcttgtttccctccatttacctattgacttaaaactttgtgtactcttggggctcctaagcacaactattgagatctactttt

SEQ ID NO: 18024 - DNA, 120 bp, Homo sapiens
ccacgatgtgtccccaaagcactatctggcctgccctgcttccaggcgggaaagcccaacaagcaagcatgaacagctggagtgttcccactgatctggaaggaatccgtaaggacaatg

SEQ ID NO: 18025 - DNA, 120 bp, Homo sapiens
attcggccctttgtcaagaatgtccttgacacttaaggaattgatttcttcttcctttcctttaaataataagccaacagatacgcaggagttttataaggtatcaatttaacatacaaa

SEQ ID NO: 18026 - DNA, 120 bp, Homo sapiens
taacgttttcttaacctgtcaaaacattcctgtgctctgggcttactgagagcagacatgccaaggatttagaaatgtcaaattaaaatagtctgggctattttcaaaaagacatgagcc

SEQ ID NO: 18027 - DNA, 120 bp, Homo sapiens
gaacggtgtgaacattacacagggaacagagagtttctcaaggtcatatgatggttttctagaagcacttcaacacaaatgtttgcctcatctgtggttagatgagaagggctggaaatg

SEQ ID NO: 18028 - DNA, 120 bp, Homo sapiens
ttacgaaatagaactagagaattcctcatctcagaacaaatttatgtcatcagctcgctaaatgcttacagtatgagccaaattatactgagtctgacacaaaagtaacagaacacctgt

SEQ ID NO: 18029 - DNA, 120 bp, Homo sapiens
ctgcgttccaatatctaaaataagacagagtgtgctcagttacctcactcacatgtccttggccaacctctgaggacttacttgagtgttttataactgagtatacagcttctctcaggc

SEQ ID NO: 18030 - DNA, 120 bp, Homo sapiens
ttgcgtgacatcacacaaagagaattacagagcccgaatcctctttctcttggagcaaatggaccactctgatgtggtcagatgtattcatcagtagcacataaaagttacaagttaata

SEQ ID NO: 18031 - DNA, 120 bp, Homo sapiens
ttccgtctgcagatgaaactacattctaagagttgcatgtgtttacttaattgtagctatttctagctatttttagtcagattccaccccatggagcaagttaggtactttgggagacac

SEQ ID NO: 18032 - DNA, 120 bp, Homo sapiens
ttccgtgttgctgcaaaaggctaaagtaggaattaatttgaatgatgttctgcaccagtggtttctcttcccaccttgcaaatggattgagttctaaaagatgtgtaatctggctggcct

SEQ ID NO: 18033 - DNA, 120 bp, Homo sapiens
atgcggaaatggtgctactgtcaggagatgtgcattgagtagccccccacccctatagaaggacaaatctgcactggtttatccaacttcttttaccctgtccctcttgtgaccaattgc

SEQ ID NO: 18034 - DNA, 120 bp, Homo sapiens
atacgagctaaagaaacagatctctagcccccctacaatgcattagctgtttgaaatggtattcacatctctgaaaaaaaaggaggtgacagctggcagggttgcttttgctctgacctt

SEQ ID NO: 18035 - DNA, 120 bp, Homo sapiens
cagcggtatagacctgcaactgtgactttgaggtttgtcccttgaagccctttagacaacaattaaagccaaggcagggttgttgtgagagtttaacaagataatgcctctaaagccttt

SEQ ID NO: 18036 - DNA, 120 bp, Homo sapiens
ccacgctctcaacaaaaaaattatccagcccaagatgtcaacagtgccaaggaagcagcaggccaaataaatggttgcagaaactccttaaggggttggcagtgaaccaatctagcattt

SEQ ID NO: 18037 - DNA, 120 bp, Homo sapiens
taccgtgggagtccaaagaagagaaatttcatgataggcaggctggactagccagggaaggcttaatggaagaagttataaacgtttctgaggccaccacagaactgcctcccctagcaa

SEQ ID NO: 18038 - DNA, 120 bp, Homo sapiens
aaacgtcacagctcaaggcaagaaatacaattaaaagaaaaaccaaaaaaggaacaatgttccttttactaaatggaaagcaattacagggctgttgaaaataggcagtaaacaaaggga

SEQ ID NO: 18039 - DNA, 120 bp, Homo sapiens
tgtcggctgctgtcctgctttgtcgactccacaaacgatctgattaattctctggtgctaactgcctcagcaggctttctcagcagtagaacagaggctaattaagatcatgtcaggcga

SEQ ID NO: 18040 - DNA, 120 bp, Homo sapiens
aggcgctgattccatagcaggcttcccatttatttccacgggttcctgtgtcaatgggtctccgttttgttaacgatttacatcctcctcctggggataaatagttgctactgtgttgct

SEQ ID NO: 18041 - DNA, 120 bp, Homo sapiens
cttcgaaattctgctgaaatatttgcttccccagaccctagatctccagccccttagccctgctgtgtgtcctcatagctatttatgcagcactggtcttacaatagtattattatttgt

SEQ ID NO: 18042 - DNA, 120 bp, Homo sapiens
gtccgaccaacttagaagcaaaacagatatcttggttctgggaaccttagtcatgggtttctggctagaggacaaagctgcagtgcgccttatggttcctgagtctcagccagtagaatc

SEQ ID NO: 18043 - DNA, 120 bp, Homo sapiens
taacgctatttcatataaatcaatggtatttagacagccacatgaattctctaaagacaagagtagcatagtattattttccacagctcctaatgaaaaactaaagaaggaaaactgctt

SEQ ID NO: 18044 - DNA, 120 bp, Homo sapiens
aaacgttactgatctcacaatgacctgagatccttgttcctgagactataatgtctgacggacacaaataaagaataaacaaaatcaacaataaacatcataagcttagtattttttgct

SEQ ID NO: 18045 - DNA, 120 bp, Homo sapiens
acacgcatactacagaactatttcacagaagcattttatacctctgagaggctgagaaaaaggcttccaaagattggtccagtctctttttctcttggaaagctcttggcacaaatgtat

SEQ ID NO: 18046 - DNA, 120 bp, Homo sapiens
attcgaaaaatctaaaggctagccccagatttatcgcgttaagccttttctaccctgtctcaattcttttatctgcataatggcagtaatatactttgtaccctatcttgcaggaataaa

SEQ ID NO: 18047 - DNA, 120 bp, Homo sapiens
tgccgagtatgactgggcaattgcctaaagctaaaagaactgctctgtatataagtgattaagatgcgggaggaaagcctcttccttttgtgcccacgcagtcacagtgctttgtgtaag

SEQ ID NO: 18048 - DNA, 120 bp, Homo sapiens
catcgattagcaagtcaacaagtcacggcattaaatgctaatcagaacagcggcttttgtggtatactctctgggccatattgtgacgagaaagaatgaccacaggcattaggctctgtg

SEQ ID NO: 18049 - DNA, 120 bp, Homo sapiens
gaacgaagatctttagctgccctagctgatgtctcccatgccttggtgccaccttgctcatctctccaatgtgctaattttggttttcttctatgagaatcagaacctgttcccaggaga

SEQ ID NO: 18050 - DNA, 120 bp, Homo sapiens
aaacggctgatggacaacgtctctcagacatctctgtggtttaggcaagtgtagaaggcctcgggccaaaggaaggaagtcttgtttttggaatcgcaatactggtgatcagaaagcgga

SEQ ID NO: 18051 - DNA, 120 bp, Homo sapiens
atccgcctatcccacattttgctaaggttaggcccattgctgcagagaagaatgcaatcagaaaagctggaccaatgcatttttatggctttactgggcatatattttggagaatcataa

SEQ ID NO: 18052 - DNA, 120 bp, Homo sapiens
aaacggaagtgcctaaaggcagcttaagctaaacagacttctttggaaattcttgaagtcagtggctccaccaaaaatatatctacattttcatttcttaataagctgagagaaagcaaa

SEQ ID NO: 18053 - DNA, 120 bp, Homo sapiens
atacgtattttctgacatatttttaggctcccctggattcatagtacatattgaatcttagaattgggaaactaagcttagtttacggtcttgcatttgtttggcttaagctggtgacta

SEQ ID NO: 18054 - DNA, 120 bp, Homo sapiens
gatcgtaggggctgtccccgccaagtggatgctcagaattctgtggtacaatggacctattttctgaatgcaaaaacaggacacatggtctgaaaatacgttttcttttctttctggctt

SEQ ID NO: 18055 - DNA, 120 bp, Homo sapiens
gagcgtctgtaaaatggcaatgattatagtatctacttcattgggctgttatgaaaataaaatgagatactgtgaaagtgcttagcacagtgtctgataaacagaaatactcaacaaagt

SEQ ID NO: 18056 - DNA, 120 bp, Homo sapiens
acacgaaatttggattgtcctagaaaatcctgggtgttttatcactgtatctgtattcactgtctccccttcagattaataaggcatcttagaagaagagacagaaagaagacaaaaata

SEQ ID NO: 18057 - DNA, 120 bp, Homo sapiens
gaacgcgggactaaagcccgtttcctaacacccagtccaaaaatcttccattacaccagaccactgcacacctttaggacaaaagattattatatccttactgacaatgaaaggctcagc

SEQ ID NO: 18058 - DNA, 120 bp, Homo sapiens
tttcgaaatgatcacaacagcagtatttctccaagctacattgagctttcttggcaccacagacagagtaggggagcctagggttgaaccaacatacttgtacccatccagctgtgccca

SEQ ID NO: 18059 - DNA, 120 bp, Homo sapiens
tgccgaaagcttgcagccaggggaggtttgtccaaatgtctgacctaaaagggccatggcttcacttcttttctaattaggataattaacctcccctgctcattcatcctgttccaatcc

SEQ ID NO: 18060 - DNA, 120 bp, Homo sapiens
gtgcgctgtagtctcggtgccaagaattcgttggctacagacctttgtgagcctccatggctgataggaaaggcaacggacaacaggttaatagatgagattgtgctgctcatttggact

SEQ ID NO: 18061 - DNA, 120 bp, Homo sapiens
atacgggtattttatactacaaaaatgtgggtatttctctcctagtgtataagtttaaatgttttattttctattctgcctctctgtgcctcagtttctttatctgtaaaatacctctgt

SEQ ID NO: 18062 - DNA, 120 bp, Homo sapiens
aaacgaataaataacaaagactggtctctgtaagcagaatgattagcctcctgccagctgctgttgtattgagttcagcattaatttggatctcgaatctcattaagtctgtcacacttc

SEQ ID NO: 18063 - DNA, 120 bp, Homo sapiens
gtacgtaatacttttaaaatttagtcgcatgctccttaaaggtatacatcgttaggataacatcacattgataagcatgaaacactcttccccgcctccttcctgccccccttcgctccc

SEQ ID NO: 18064 - DNA, 120 bp, Homo sapiens
tatcgtggtatcagttaattcatttcatgaaatgccactcattttccccgtgcaatgaaccattttgctactggttttctacatcccacatcagggaattctataactcttgtgaaactt

SEQ ID NO: 18065 - DNA, 120 bp, Homo sapiens
ccccgtttctgaatgcaattcaatttcaattggaccttttattaaagtaaacaagtataggactggcttctatgaaaatgggataagaaggacacggccatattgtctttacttttaatt

SEQ ID NO: 18066 - DNA, 120 bp, Homo sapiens
gaccggcttcctcaatttttcccccttgttacaaagaaagcaaataagtgtaatttttaaaaattattctctacattccctggagtaaaagttaaaaatgagctggatttttaaaaaaat

SEQ ID NO: 18067 - DNA, 120 bp, Homo sapiens
acccgatggatcctctgacactctccttaaactctcaggaaaatggaacggagccaattctttgtgctgtgcccttgttccagcaacacaaagacttgctgccctgattttaactaggat

SEQ ID NO: 18068 - DNA, 120 bp, Homo sapiens
caacgtgtatggaacagagagtgttaagatctaggggtacggttaaggtctagtaaactaatcagctttactttactgtatgtcaatctctttttttcttctttttttttttttttagtt

SEQ ID NO: 18069 - DNA, 120 bp, Homo sapiens
ctccgccaccttgaaggccacaggtggccagacattctgggaatcactggagctttctcagggccacaggggaaccgtttgtttgaaatgtaataaaggttcctttacaccaaacgtgga

SEQ ID NO: 18070 - DNA, 120 bp, Homo sapiens
cagcgtgagaggtcttttctagccacttaaccagccaatcagcaagggggcgcctgctgggaactctttcctctcctggaagttaccagggatacacgggcttggccctgaaggggcttc

SEQ ID NO: 18071 - DNA, 120 bp, Homo sapiens
tatcgaacagcttataacctctctaaaggcaggacctttcttattcttatttcttgtgggcctcagtgccccaggcctcctgctggacacatgttagttacctatagcttaattaaagct

SEQ ID NO: 18072 - DNA, 120 bp, Homo sapiens
gagcgagtgctgagctgatgtgaccacgtagccccattccccaaggtaaagtgactacatacattttgtcttggaaactcactgccttctgcagagtcctttttcactggtaaaggttaa

SEQ ID NO: 18073 - DNA, 120 bp, Homo sapiens
aaacggacaaatccagaaattaaaagactagatgccccaaagtaggaatttcaggcatctgagagggggccgcaaggttgtgtgtgtgtgtgtgtgtgcgcatgtgcatgcgtgtgctcc

SEQ ID NO: 18074 - DNA, 120 bp, Homo sapiens
tcccgtatggaggtggaggagggctctctagtatcttacaaatgacacagacatagatagctttctttgcctatgtctaaagtcggctcagctactttgttatgccccagattcctagga

SEQ ID NO: 18075 - DNA, 120 bp, Homo sapiens
gagcgctctcgctcgatccctctctcttttcttgggcctccttttaaaatgctaattaaatttacttgatctccactccgcgctccccccgctaattttggagatcaagaaagggagctt

SEQ ID NO: 18076 - DNA, 120 bp, Homo sapiens
tgtcggggccctaaacactaacatacataacattgattgtattctgcataacaaattggattaggataattaccacacagatgttaaaaaatcctgaatgcaaatcaatgcaattagtca

SEQ ID NO: 18077 - DNA, 120 bp, Homo sapiens
gcacgtgctctgaacaagaaattgttttatgctaatctggaattccaccactcagaattcttattaactaatcagatccttcaatttctcttgccctcttttatatagagaaagccgctt

SEQ ID NO: 18078 - DNA, 120 bp, Homo sapiens
atgcgcaattcaacttgaatgccaccattatgaacaaaggaatttgcacacggatgcttttgacaaacatggctttagaaaactgagccttggtggtggggggaaagccctccccactga

SEQ ID NO: 18079 - DNA, 120 bp, Homo sapiens
gttcggtcacagagaaaaaataacagcagctgggaccccttgattctgaactgtgaactcaaatccaattcctaaagtcttttttggcttatcctaccttccagtgttctgtgctggctt

SEQ ID NO: 18080 - DNA, 120 bp, Homo sapiens
acacggtatactctttttgcaattgttctgtatctgatttatgtcaaagctttgcaaacccaactgatctgggggacccttgagggctacgcttgtgccatcataatcctctctgaagtc

SEQ ID NO: 18081 - DNA, 120 bp, Homo sapiens
actcgtttaggaagggagagaagaatgtaacttgaaataagacagagagaaatgggccctcttcaaatttcccagcacagctttgagagccgtcctatagccaagtctccccagggttct

SEQ ID NO: 18082 - DNA, 120 bp, Homo sapiens
cctcggcagccactgaagacagccaggatgaaacttttttctgaacaaagaaaactgaaaagggccaagtctcaaagtcacaggctcccagctcgccactggctcaaagccaagaagagc

SEQ ID NO: 18083 - DNA, 120 bp, Homo sapiens
gcccgtgtgctcaggccagcagccgtgcagctaatggacagacagcaggctgagaagggcactgtgtatgttggggagggaggcacacaacctaccccgggctctcccctgccacccagg

SEQ ID NO: 18084 - DNA, 120 bp, Homo sapiens
actcgcttccagcaattaagtccccatatctgacatcattatcccctggcatgtgtgcatgcatatgtgtgcttgtgtgtgcatgtgtgcatatgcatctttgtctgatataagcattcc

SEQ ID NO: 18085 - DNA, 120 bp, Homo sapiens
taacgccctcctttcatgaacaccgggaacaagaccttgatgtgctcacttgctgaatgcccatcccccagctggtcagcagcaaggcagggactagcatccaggcttcctgatccccaa

SEQ ID NO: 18086 - DNA, 120 bp, Homo sapiens
tcccgcctggcagtgatgtttatgtgctcatgttatagctgtgtccacttagaataggaaaaaagaaatcagcctacagtctagtgtaaatattgaaatttgataacatcagaccggaaa

SEQ ID NO: 18087 - DNA, 120 bp, Homo sapiens
tcccgaatcaaattttgattattgctgttgttgttatcatctgcctacgcttatgagtttgagacaccttccctaatgagggctctaagttacagtgaatccctaaaaggccatgcaaca

SEQ ID NO: 18088 - DNA, 120 bp, Homo sapiens
gatcgcttcctttcctcccaagaggccacttgtaaaccaggactgggatagaacaagaagagaaggtctggaaaagaatggcctggatcccaaatccttttagttctgtattgttggagc

SEQ ID NO: 18089 - DNA, 120 bp, Homo sapiens
aatcgatttggaccttacatattgttcttaattattaacaggctttaatctgttaaatgtactgcagtcaacaatacccaaaaaaattgcttcgtgaacacaaggagggcatgggaatca

SEQ ID NO: 18090 - DNA, 120 bp, Homo sapiens
tgacgttattgcagagtcagggaaagggtgggataagaagtgaggagagtctggtacagaaagaagacttaaagggaaacattcatcattctcactcctgtggcataataaaggcccatt

SEQ ID NO: 18091 - DNA, 120 bp, Homo sapiens
ttacgcctgtttctatactggccgtctaaaggtatttacttgggtctgtctgtgttgtgacagtgtcctagactcaaatgaatgcctctaacactccacatttttgagccattcagtcat

SEQ ID NO: 18092 - DNA, 120 bp, Homo sapiens
gtgcgaaattgcactgcatgagctaaagtccttggtggtcttccaaggattccagctaaaaaggcacttcctttgttcctcaggagaatgcagtccagtaggtcattcaaaaggggaaat

SEQ ID NO: 18093 - DNA, 120 bp, Homo sapiens
atacgcaaaatatccctcaggtgatttctggggatgatgacaatcaaagggaacacctagcacagagtctctgagcacccttcaagcttcctttttcctgagatgctggctggggaagat

SEQ ID NO: 18094 - DNA, 120 bp, Homo sapiens
cagcgaaagactgcacagagcaaagttggggaaactggggagggcagtttcacaaccccactcgctgaatgcctgcagtcaatatcaaaggcacatattgtttgcatgagcagaagatga

SEQ ID NO: 18095 - DNA, 120 bp, Homo sapiens
tcacgccaatcatctccgctgtgcccaggcctaaactgtgcagggcacaaagaccccaggtttgacctgcagagtccccaagcttcagcggctggtggttcacttcattttttttctggc

SEQ ID NO: 18096 - DNA, 120 bp, Homo sapiens
tggcggggcaggaggaagggaaagaaagagggcttttcagggctctacaaccaataaaatcgtgccgctttgaggacatacttgagctccccaaaagacaggcagctgaagggcaaacag

SEQ ID NO: 18097 - DNA, 120 bp, Homo sapiens
gggcgcctgggctgctccaacaatttcttcgcttctatttctagacagacgccagttacactccaaaagtgcccagcaacttccctcaattacctttgtaattaatatgtaattgatgac

SEQ ID NO: 18098 - DNA, 120 bp, Homo sapiens
aagcgcctggttgaaattacagtatttcctttgctggctgccggccccctgcccgccccacccggagaccagcacggcaaggcaaaggcgcgctccactcacttccatgaaaggttcgga

SEQ ID NO: 18099 - DNA, 120 bp, Homo sapiens
ccccgggctcgaatctctcactcctccgttagattacgctggccaccagccagctagattcgtggtgctttctgagcccccagggcgaacgggctacctgcgcggccggcggggctgcgc

SEQ ID NO: 18100 - DNA, 120 bp, Homo sapiens
gcgcgcaacagttggccgctgctaagaagacagtgcgacccggaggggacccggccggacaccgccgccagcttcgctgggagggacgcagggcacccgccgaacgctgcctccccagcg

SEQ ID NO: 18101 - DNA, 120 bp, Homo sapiens
aaacggctcaaaattaattttagttcacagaagaactaatcattcacctgtggcccagggcaaccctccaaagtttcctgagtgaccagctttgggtgtcagaagcctgttcccctccct

SEQ ID NO: 18102 - DNA, 120 bp, Homo sapiens
acacgctttttcaaatctctctgctcagaacactgctttgtttgtctccagtcgctgcagggcccacaacaaacatccattctttaatgtggtgatcttcaaaatgaagaacaggactct

SEQ ID NO: 18103 - DNA, 120 bp, Homo sapiens
acacgtttgggagagaggcaagtctgaaacaggaaaaagtgtgcctggtggatttttctcttgtgtggcatctctagaatatgtagtaaacagagggaggaaaggctcctcagtgttctt

SEQ ID NO: 18104 - DNA, 120 bp, Homo sapiens
ttccgtcagctcctctggccttagtcacagtcacttccaggcctcaaaccttcaacctgcagaattagccctacccagatcctgagccagtagtgacaagggcaggaaggtgttagttta

SEQ ID NO: 18105 - DNA, 120 bp, Homo sapiens
attcgttttgttcctccaagccagtatttcatgtttttttgagtgagccccgggtgttcaggtatgacttcctcttgccagctgtgttttcctgagcaaaactctgtcctggggctcttg

SEQ ID NO: 18106 - DNA, 120 bp, Homo sapiens
attcggacagatggacaagggacagtatacactatgagggctcaatccatctgtggaaaaggaaatccagctgttggccaggcctgccccatttatgtctgctctcggtacactgacatt

SEQ ID NO: 18107 - DNA, 120 bp, Homo sapiens
gcccgggcactattttaaaataatgcttggagtaatctgatgtctaaagtggctttctgccaaaaggatcttttgtcacactgctacattcaagaccgcttattttaaatgggcatttga

SEQ ID NO: 18108 - DNA, 120 bp, Homo sapiens
ggtcgtctgatcctgttgcttagcgctttccttaaacatgcctgagggcccctctgtgtgggcctggagacatccccaattccagtgcaaaggaagacatggcacaattgcactgtgtct

SEQ ID NO: 18109 - DNA, 120 bp, Homo sapiens
aaacgctaaattccatctcatggggtctagaatagtgaagttgacatcactgaaaattctatttgtttaaggaaagaaagatgaggccaaacccctcaaaatggtattgtttaggtttga

SEQ ID NO: 18110 - DNA, 120 bp, Homo sapiens
gcccggaatgaccaaaaccaaactagagaagtaaattgttttctattatattctccttaggctataaattctctgggcagagagggaagaaggaaatattagtgctgtgtggtcttggca

SEQ ID NO: 18111 - DNA, 120 bp, Homo sapiens
aatcgcccctgtaatagacccataattagcttgctccattcctatgctgtgtttaagctcttcagaattgctcagatctgaggttttactatagaacaagacaccagtattcagagacgc

SEQ ID NO: 18112 - DNA, 120 bp, Homo sapiens
cagcgacagccaaggccctgaagtgggtaggggcctggtgtgtgtgaggaacctcaggattgccatcatggctggagcagagacatgaagcaagaaggccatggagatgagggcagggag

SEQ ID NO: 18113 - DNA, 120 bp, Homo sapiens
acacgattcctggatatatgtaatttgtaggccaaatggtgcccaatccctacctccctcaccccctcacttccctatccctaaaacctgtacctcaactcccgttcgtaagtgatggga

SEQ ID NO: 18114 - DNA, 120 bp, Homo sapiens
tcccggttgggttttctgagcaaagaggtaacatagcagctctgttatttctttcacgtctccaagggaaccatgactcacccttagctatcccccgggaatgtggccctcagagtgttc

SEQ ID NO: 18115 - DNA, 120 bp, Homo sapiens
attcgtgattttgttatgtacacctggagtgatggaacataccataccagcttgtcagggttgctttgtgcaaagatcgatgacgtgtgtgaacccggatccatgcttggggtcctgagt

SEQ ID NO: 18116 - DNA, 120 bp, Homo sapiens
gctcgagagggatagatcacatcctgtgtggcttcttcttaaatgaagaaggacattggaagcctgtgctgggcttctctggaccccccgatgtatatgtatgtatattaaagagagacc

SEQ ID NO: 18117 - DNA, 120 bp, Homo sapiens
caacggtcagaacagaaagtacatgcgtatcttcccagcaacaagcatatctggtactagagaaggccccctatgtgacaggaggcatttagaatggctgtagccttgaatagggctgct

SEQ ID NO: 18118 - DNA, 120 bp, Homo sapiens
atccgtctaaaactgtgactaaagaaatgaaagtattatgtttttcaatcagtccaaagcatttactattctgaaaaagaagacctacttactatatagtggatgatggtgcaagaagta

SEQ ID NO: 18119 - DNA, 120 bp, Homo sapiens
tggcgtttacttcacaacagctggcccagggatctcaagtacttagtctcagctgccagcttagggaaggagaggcccctgtagttgagcctgtgacaaagacagcatttgtttccacac

SEQ ID NO: 18120 - DNA, 120 bp, Homo sapiens
caccggtattttcaatgtcaacagcagtgacaggctccaaaggggatcatacccagtcactgcccacttggtgagaactccacaagctcagggatgtccattcatccagcttcagctctc

SEQ ID NO: 18121 - DNA, 120 bp, Homo sapiens
ccccgcaatgctatgagatgactagagaccactaataagattcccatttttatttgcccatggggaaaggagacaaatggctggagactgggggactcgtctaaaggaattaatgatcat

SEQ ID NO: 18122 - DNA, 120 bp, Homo sapiens
ccccgggggggatgggtggcattcctgccttccttccaccaacaaatgttgactgtgccatgcactgggatgacagagatgactcagatgtgcccttgtcctcaatgtgttcatggttgg

SEQ ID NO: 18123 - DNA, 120 bp, Homo sapiens
gctcggagaaagggaacagagcacacttccccactcaattatgctttcattctttataaataactctgtttttaaaacaacaccacataaaataaaatttagagcaagatttatagaaac

SEQ ID NO: 18124 - DNA, 120 bp, Homo sapiens
tgtcgctttacatggaggagaaactggatttctgttccacacagtttggcaaaggctagcagggagtgagagattacagccagatgtacatctgcatgtcagcagcaagaaggtctggga

SEQ ID NO: 18125 - DNA, 120 bp, Homo sapiens
ggtcgcatctacacacaattggtttccttaacaattccagcaggcttccagctcattcttgaatgtgcttcttatttttagaagaactatcctcttttcctccagcatacatttgaaaaa

SEQ ID NO: 18126 - DNA, 120 bp, Homo sapiens
gaccgagaatttctatctgtttttcaagacagataaatgtggtcccggcacaatcaccccacgaaacctaacctggaagctacctcttgggtcacattctcatttctaagaagctcaaca

SEQ ID NO: 18127 - DNA, 120 bp, Homo sapiens
agccggtacagtagcatagaactaatagctaaccaagggctgccaagttccaggcctgccagatctgttttaatcacaagataagaaccattcataattaatgcatttggtctgtatgtg

SEQ ID NO: 18128 - DNA, 120 bp, Homo sapiens
cctcgccaacagtttgttccctgggttgtgatgagcatgtgcccacgatgcttaccccattttttaacaggatctcaaaaaaaccccaatctttatgaagcccagcccctgaaaaatgct

SEQ ID NO: 18129 - DNA, 120 bp, Homo sapiens
gcacgactgtgggcgaggagaaaccttgagctttattagaatgaaacatcagcctcctgagtcaggaacggatcctaccttccttatctgcaaggaatatgtccaatgtccttgctagga

SEQ ID NO: 18130 - DNA, 120 bp, Homo sapiens
caacgttacccaaacatcagctgaacacattgtttttgtgggcatcaagtggagagtgggaggtagtcagagaagccagagatgcaactctgtggttacttaaccagcttggagtaaaag

SEQ ID NO: 18131 - DNA, 120 bp, Homo sapiens
agacgttcccagcaagctgggaagagagacggcgaggggcccacaccactgcttcctaatactgctgggaatagacacccactgctgtttcctcccaggaaaagtgaatgaacaacaagg

SEQ ID NO: 18132 - DNA, 120 bp, Homo sapiens
ttccggggcttagaagttttgtctgttgggggaaatctctgcaggctcaaaaagtaacccagggttggccttatgggtgtggtggatttgtgtttcagtgaagtgaacacagaaaagagg

SEQ ID NO: 18133 - DNA, 120 bp, Homo sapiens
cttcgttgtcagtctcgttttctttgtcctgtggagtagcggggagatttggagttcatgaggatggacgcacaggcagtatgtgccccaaagcccttgaccaggcagtaatgggggcct

SEQ ID NO: 18134 - DNA, 120 bp, Homo sapiens
gagcgttcactgcccttcccttagaaaaaaaaagatgtttgcagaccgatgtgattttatgaactgcaagctttaggaccctgtctgtttagtggcctcacctctggggaataaatctct

SEQ ID NO: 18135 - DNA, 120 bp, Homo sapiens
ttacgttaaacaatgtaagaggtaaaatggatggtgggatgtcaaaccacaatggctaccatcttaagcgtaggagatctgtacttcttaatgttacagataatgaaaaataaccctacc

SEQ ID NO: 18136 - DNA, 120 bp, Homo sapiens
atccgcagtaacaggaatgtcactgcctggaaaaacagggtccttttctaaaatgggctttcccttctggccagactccttggtccagaactgcagttgataggatctttgggagaggtt

SEQ ID NO: 18137 - DNA, 120 bp, Homo sapiens
cagcgttagtttcagagggaggtaagtaacccctaaaatctgttcccctccccacctctcccttgtttttgttgaatttaaaatgaatcagcttgagaattgaagactcacccaagccaa

SEQ ID NO: 18138 - DNA, 120 bp, Homo sapiens
tctcgctgggcaggttgccttgttctccttcagctggccaggctggctggctgcctcattgtcccaagagacaggaaggcaccctttacatctctctgctgttggtccatttttactgcc

SEQ ID NO: 18139 - DNA, 120 bp, Homo sapiens
gaccgaggtaagtaagccctcttgtgaccactcctgtttctcctttctcatttttttctgtccttagctgtaggtggctccctcccaccccaacgatttcagagagaaacaagtcggaat

SEQ ID NO: 18140 - DNA, 120 bp, Homo sapiens
gggcgatggctgtggccctgggttgtgcaatccaggcatccttgaatcaaggctctgtgtttcaagaatatgatactgactgtgaagttttccgtcagcgcttcaggcagttccagtaca

SEQ ID NO: 18141 - DNA, 120 bp, Homo sapiens
actcggtgccctgagaggccccaggtatcaagggatctaatgttagtggcagcccagcgaaaatgctactgctgctccaggtgtgaagtgcttctacagatgaaagaaattctttttaaa

SEQ ID NO: 18142 - DNA, 120 bp, Homo sapiens
tgtcgaaattttagatattgtaacatggagatggcagtggggagatgagctgtttagggcctctcctgcagcccccagattaccccatcagaggaccctgcccaagtggacaatcgttag

SEQ ID NO: 18143 - DNA, 120 bp, Homo sapiens
tgacgatgtttctgttttctcttccagactgggagctcctggagcctggggctgacatcatatttatatgtgtatttcttgtgcctggcctaatgcctgcatctcagaggaacacccagt

SEQ ID NO: 18144 - DNA, 120 bp, Homo sapiens
ccacgaagtcctgcagtcctgagttacaccacaccctcatgcacacactacaagtcccacggctgccttcatatttacaatatccctgtggccagggccgtttcctgtgttcgatttaga

SEQ ID NO: 18145 - DNA, 120 bp, Homo sapiens
atccggactaatctgcccatgtgtccgccaggtctctagaagatgccgtgggaagagagagcagtgtttgtgtttgtctttgtgttggaagaggcaccatctgtgtgtgggggagcaaac

SEQ ID NO: 18146 - DNA, 120 bp, Homo sapiens
cttcgaggctgcccaatgggcccagagctcctggaagggtggctgcttgggctggctgtgtgcattcatgctgaagcattgcctttttctccttgagtgcctgccattcagaaccactgg

SEQ ID NO: 18147 - DNA, 120 bp, Homo sapiens
aatcgggactaagaggcggactgcatagcacaactgagtgcttttagtggatctgaccagcctgtgggagggaacctaggatggctctgtgagaaaagggggaagacaggcttgatctga

SEQ ID NO: 18148 - DNA, 120 bp, Homo sapiens
agccggtcaggcagagggcagacggtaggcttccatggggtgggtctggcctgaatgggtttgtgcaggagggggctgccttgaagtggtcccctcccttccaacagagcttgaggccct

SEQ ID NO: 18149 - DNA, 120 bp, Homo sapiens
cagcggcaggggatttgaggggtggttgtgtgatttgtacagctgtcattagggtaattgcatgatattttcccaaatttctcctgcagcttcaggatgggtttccaaacttcctgccct

SEQ ID NO: 18150 - DNA, 120 bp, Homo sapiens
ccccgggttggaggtatggtggcttcataaaaggcacaatggtggtcactgttaattgtacccagtgtcacttccccctctcaatatggaaacaggtacaaatgaaacctgtgcttcttc

SEQ ID NO: 18151 - DNA, 120 bp, Homo sapiens
gtccgcaactgcagatgtgtgagtctggccacagatatctgctctctctaaacctcagtttccttactgttactgggagtgttttgaagactcgaggggctagtttatttgcaaaaaggt

SEQ ID NO: 18152 - DNA, 120 bp, Homo sapiens
ggccgggaaagcccatcaagagcggttgtgcatggcaacagtaaaaggatggtttgttacactagtacaaaaagaggtggccagaggccaacgttgccagggaagccccattcccctccc

SEQ ID NO: 18153 - DNA, 120 bp, Homo sapiens
ccccgatgagacacctgcctcccctctcctatgctcatcctagtctcgttggagtgtgtttggcctctgagatcatctcaggctgttatcaaacaggagttccccattgtggccctgaga

SEQ ID NO: 18154 - DNA, 120 bp, Homo sapiens
ggccggctgccttttgggggacagtttcgcttcttctcttcccccttccagctttcctgggtcccagctgcacagccactgtgggcacctttggagaggcttccgggctaatatagggct

SEQ ID NO: 18155 - DNA, 120 bp, Homo sapiens
gaacggaggactggagagaatttcagacttccagggccagactctcctagtgtcacctaaacccaccgaaaagccctgtcagggtcctctcttctgacttcggctcagctctacatcttc

SEQ ID NO: 18156 - DNA, 120 bp, Homo sapiens
gatcggagagtgtgagggaacaggagctgtggtcaccaaaagaccctctgtgggccccgtttcttcctcagaggctgtttccagaacagcgagcttgcagcagcagggggaagcatgggg

SEQ ID NO: 18157 - DNA, 120 bp, Homo sapiens
ggacgaaagaggggcacccaaggacccaccagctgtaaggcaggagctgttctgacagagggggcgcccgtgagctggggccgctcttggcttctgcacttgggccctgactcagcggct

SEQ ID NO: 18158 - DNA, 120 bp, Homo sapiens
cctcggatgtcctcccagggtcaggccagaccagaccatgacagggcgctcagcctggaaacatggcagcgggcatcctcctcgttggatgtggagggcagtgacacaggtggttaaact

SEQ ID NO: 18159 - DNA, 120 bp, Homo sapiens
atacgctggccacaggccagccttccggcttggcaattacacactctccctgctgccccgtcacctccctgtcaggcagctttaatgccgctcgcctcttcctgtcagcaaatgtttgtg

SEQ ID NO: 18160 - DNA, 120 bp, Homo sapiens
tggcgttgctgggtgacagttgaacagggcttgcattttcctggcccctaggcccccgagggagccttccctctgcgggctttacaagccttccaagtcaacgccgtgcgagtcacagca

SEQ ID NO: 18161 - DNA, 120 bp, Homo sapiens
cctcgcccagctcctggagaaagggtcactctggccagatccactgagggggaccggaaagtggagccagacctttctcatgctcccagctcccaggggaactgatccattagaccccct

SEQ ID NO: 18162 - DNA, 120 bp, Homo sapiens
acccgagggcagtggtagtgaggaacgaatcgaaaccgatcaggataatacaagacagcccagccctttgccattcccaagatttctctgtgcctaactctcccccacgcctggcccatc

SEQ ID NO: 18163 - DNA, 120 bp, Homo sapiens
ctccgggagtctggggagggctccaagctgacctctccatttctcttagtgagcagtaagtgaggagagcaggtggccacaggcggacagccatataagcatgactttcctagggcaaag

SEQ ID NO: 18164 - DNA, 120 bp, Homo sapiens
aagcgggggtggaggaagtcacagcccttggggctagtttatgcctttaaaacatgcagatgtacagagagacagaacgagtcttttctattataaaatatgtgcttagcatatttatgt

SEQ ID NO: 18165 - DNA, 120 bp, Homo sapiens
aatcgagttattgcattagggaaggagatttcctttgctgcttttgacacactttggtctgcctgcagcctttgtgcaggtggccttcacacacaaaaggaaccctggtgtctggcaggg

SEQ ID NO: 18166 - DNA, 120 bp, Homo sapiens
ccacgcctggctttgagcttcactcagatgctctctagtgtgttgctcccaagaaatgcaaaagaaggggattttctgcaaggagctccatgcagagcactgggggccctgctgtgctgt

SEQ ID NO: 18167 - DNA, 120 bp, Homo sapiens
gcccgcagaaagctggggtgctgggaaacttggaagactgcctgcacccagggagttggcctcctgggccagcagcctgggtggaaccatgagatgcagggctcagctggcagaaaagac

SEQ ID NO: 18168 - DNA, 120 bp, Homo sapiens
tctcgtcttctctcatttccccactctctttcaatctctttcccccgactttttctatcttaattggccataacaaggaactgaattctttttattatgtactatatttgttgaatacag

SEQ ID NO: 18169 - DNA, 120 bp, Homo sapiens
ttccggttctccatgtgggcacgtccgacacggatgtcccctcctgttttcgagatacctcatggccatgtcgcttgttttggccaattaaaaatgtgcgcactcctaggtggaagtgta

SEQ ID NO: 18170 - DNA, 120 bp, Homo sapiens
tgtcgaggtgaagactttctcagcttggcatctgaggggctgcagtgtgcatattctccctgccagcccatatcaggcacagagcatagagaataagcgttgctgtatttaagccactga

SEQ ID NO: 18171 - DNA, 120 bp, Homo sapiens
attcgaactgatgcagtcgttttaccgtacatcatcctagtattaagtatcttttctaataataaatcatttactgcaatgtcaaaattacctatgctggtttttaatcttttgcatggg

SEQ ID NO: 18172 - DNA, 120 bp, Homo sapiens
gcacgcagccctgagaattctacaaatgtggaattacaaatgatggcccaccaccatatacacacacgtgcacacacagccctgaaggccacctctgcttttctctctgattgtttccca

SEQ ID NO: 18173 - DNA, 120 bp, Homo sapiens
ccccgttccgttggtgcaggtccaaactgtcaccatttggcatcctgacacaccgatgtccccatcagctgttaacgtcagccaaaggggccctcccccagtcaacaaatcagagatttc

SEQ ID NO: 18174 - DNA, 120 bp, Homo sapiens
tcccggaaggatgagcgacctcacgtgggcctccccccatctccctcactgccccgctcccttctgctacacaaacaggctcacagcaactagattggattcagatcttgtagatgaaga

SEQ ID NO: 18175 - DNA, 120 bp, Homo sapiens
atacgacagcagcgcctcgccagacccggagcgagggccaagccccacatggcagctgggctgcctcggtaataaccactcgtaatatctgacagaaagaacccacgctggtcatatccg

SEQ ID NO: 18176 - DNA, 120 bp, Homo sapiens
tctcgggggccggggctaggggagagcctccgcacaaatcagaaacattttccacgaagctgctattcaagggctgcaaaatcaacaggggctgctttcctaacatcctgagagatgcta

SEQ ID NO: 18177 - DNA, 120 bp, Homo sapiens
ctccgggcggtgcagctcacagaacgcagcaaggccagcttaacccgaattcactgagcatttggcatttctgagctcagaggccttgaacgggtgggaacaaaaacccattctggttgt

SEQ ID NO: 18178 - DNA, 120 bp, Homo sapiens
caacggagacagcctgggcctctgccattcagaatgagccccagcctcagccctggggcaggaacatgggtgcctcaggctatggcaagcagcccaggtggaagggacacttgggacaat

SEQ ID NO: 18179 - DNA, 120 bp, Homo sapiens
ccacgacagccctgagccacccctcctcagccaaaagcttccagacacagggccatgcccttgtagagccaggactacatgattgagtctttcaaggcccatgcccacctgaagcagaaa

SEQ ID NO: 18180 - DNA, 120 bp, Homo sapiens
gagcgtccctagacacacccaaccacctgtgataaatacacaagtaatggccctgtcaatactccccaccacctcaaattcttgtccttcacatcttttcattgcggcagcattgtccta

SEQ ID NO: 18181 - DNA, 120 bp, Homo sapiens
caccgcacttgatcctcaagcctctccagacccacagcccccagccgtgtggcagctccagcaggcagccttcctaacacacctcaagtggctaggcagccccagatgcctcctacaccc

SEQ ID NO: 18182 - DNA, 120 bp, Homo sapiens
caccgcaggccacatcggggctgacagaggaggcccacagaggtacacaggtgtggtccctgggtgctcatccaccaccactcacacctttcccaagtccagctttgcattctgcttcag

SEQ ID NO: 18183 - DNA, 120 bp, Homo sapiens
gtgcgcgcgggcacgtgcgcacgtgtgcatgaaaagatttgcctggaaacaccaacccttcaccaaggatgttcccagccctcatttgtacacacagtcttcaaacatcaaagtgtttgt

SEQ ID NO: 18184 - DNA, 120 bp, Homo sapiens
tgccggtgagcctgtgtgggagtgtgtgcgcacatcctgcttctctacttccaggatcaaaataaattgcctgattgacaaacctcctctgtagttcgtgtgcgctgggcccgtgggtcg

SEQ ID NO: 18185 - DNA, 120 bp, Homo sapiens
gtccgtggctacagatgcagtcagctgacctaatccatttatcttatttatactgtattccattttccatatgcagagttagggcctcccggatctgttatgcaaattagacatgatgat

SEQ ID NO: 18186 - DNA, 120 bp, Homo sapiens
tggcggggaggagggaggctggaagggaagaaatgaaggcatgtgatccaaagcttccttctctatgtggctggttggctcacccctccattctcccagccttctgaacccctgctgact

SEQ ID NO: 18187 - DNA, 120 bp, Homo sapiens
tgacgagcacaggcatcactggggagaaagaaaaggctggcaggggattcacaaagagctgaaaaaggccagagggagatgtccaacagccgggctgcaagtagcccttgaaagctggca

SEQ ID NO: 18188 - DNA, 120 bp, Homo sapiens
gctcgctgatggatgtgttacttttgtagagtggggaagtgagatgggtggatggtgattttccagggtttttctttagggcaagtaagtaccacctgtaggctgttccataggatactc

SEQ ID NO: 18189 - DNA, 120 bp, Homo sapiens
agacggcttggttcaaaactacaccaagttgggcctttagcttagtccttagccatgacctatagctcagaggtcagcatatggatgagatcaagtgagggcactcgcatctgaatcttc

SEQ ID NO: 18190 - DNA, 120 bp, Homo sapiens
cttcgggcactccaagcagtacattgaaagtgaggcgccacgtatggtcccacaaggcatcatggaaaatgatccatctctggccagccagatgggggccagttggggtacccagactcg

SEQ ID NO: 18191 - DNA, 120 bp, Homo sapiens
caccgtcatcatgttccttctggtttcccctgctggggctcctggcagtctgctgtgttgttttctagtgtggtatttgagaaagaaccctcattttagttcaaagttctgcagattaat

SEQ ID NO: 18192 - DNA, 120 bp, Homo sapiens
acacgtgtgagctgtgacagcgcctgccagccttcctcccaactgtgagagtataggaatggctgctgcttcacttccacccacacatcgcacataaatttcacttctggccaaccccaa

SEQ ID NO: 18193 - DNA, 120 bp, Homo sapiens
cctcggacctagctaattaatatctgtttctcttcaagccccagtattgagctataagaaaatttctccatttaaagttacagttggtggtgtttgtatttaaggacaatgattactttc

SEQ ID NO: 18194 - DNA, 120 bp, Homo sapiens
tcacgggtcaggaattcagacagggcacagcacgggtggccagactctgctccatgttgtctgggacctcagctgagaagactccaatggtgaggagtgatttgaatgactgtggaccca

SEQ ID NO: 18195 - DNA, 120 bp, Homo sapiens
tggcggaagccacatggccttttgtgactcagcctctgaagtcacattatatcacttctgccattttctcgtgactgaagtagccacaagcccactggactcaaagggaagggatacaga

SEQ ID NO: 18196 - DNA, 120 bp, Homo sapiens
ctacgggaactgtgtttttaggtcccaataagagacttacaagttcactttggaacagaatttatttataaggtgggacttcctgaattctcatttccccctccaaaatgtctaatactg

SEQ ID NO: 18197 - DNA, 120 bp, Homo sapiens
atgcgccatgctgattgaacacttcctaggtgctaggctctatgctacgtggattgtgtcattggatcctcccaaccacccgatggatgctatggttatttccattttacagatggggga

SEQ ID NO: 18198 - DNA, 120 bp, Homo sapiens
aggcggggaagctggcttggccctggctctggatcaagaatagagcgctgtgtccagaggccttgctgaatctccttcctgagcagccgcctggcccacgcgtcacagtttatcctccgg

SEQ ID NO: 18199 - DNA, 120 bp, Homo sapiens
ccccgggcccaccttcaggagccaaacccaacagtctcctcagcttcctggcttgtgccagcacactgtttggcaagagaggaggtgaccagcaggcagaaggagctccggcacaccaga

SEQ ID NO: 18200 - DNA, 120 bp, Homo sapiens
tctcgctggtccccaaggggcagctgggagttgctttctgagctcaggcctggagcatctcaatgggcaacatgtcccacggggctgggtgggtggcagacagtgtgtgacgcagggcct

SEQ ID NO: 18201 - DNA, 120 bp, Homo sapiens
gggcggcccaggaccactccgaatgcactgaaagctgactgtgttcagtaggggagaggggccccttctctaaatattttctctccaggtttggctggagacagtcacagccggtcaggg

SEQ ID NO: 18202 - DNA, 120 bp, Homo sapiens
aggcgccaggcctgccaagaaccacctgaggatggcgtttgtgaggaaaacccagggagcagggctggcccactcccaggcagcaaaagtacggggccaccctccccttcctgggttgga

SEQ ID NO: 18203 - DNA, 120 bp, Homo sapiens
gcccgcagccctccagtcagctgccgcgtgtttgttttcacagctgctcctccagctcggctgttccagtgagcaaaggaatctgtttgtctgagaaaaagaatgtggcagagaggcggg

SEQ ID NO: 18204 - DNA, 120 bp, Homo sapiens
ccccggcagcctcctcagcttcggagctcaccaaaaccagccagccacctcggggagtcacccaagagcctagatggtaaggtcacagactcagagacaccttcacctcccccggcaccc

SEQ ID NO: 18205 - DNA, 120 bp, Homo sapiens
ccccgctcctccgtggaccagggctttgcccagagaccttgggcaggtgccaggctggcagcctgggcacacaggacagagacccacccgcctgaggtattttatttacttctttctcat

SEQ ID NO: 18206 - DNA, 120 bp, Homo sapiens
tgccgtgagggtgaagacgagcaagcagaggggctttctgcctctctgcaaggacgccctaggccccctaccctcgccccagcccccaggccagcctagtcccatcctagacagaagagg

SEQ ID NO: 18207 - DNA, 120 bp, Homo sapiens
agccgtcaagcaggagcccaggcagagccagtccaaagggcattctcctttgggcggttttggccatggggagacctgggatcccaaaagaaggactctgcactcttttggctggagtgc

SEQ ID NO: 18208 - DNA, 120 bp, Homo sapiens
gaacgctccctccaggtgcttgagtgactccaggcccagagagcttaaccgtgcccctttcaccttggcctgggtccttcttgactgaataagacacatttccgccatctaataaggaaa

SEQ ID NO: 18209 - DNA, 120 bp, Homo sapiens
gcccgcaggggatatctgggatgccctgtccatgtaagtctttctccccagtgttcgtcggctttcctgattgcctaatccagacaggctctggcagggacccctgaaggcgaaccacat

SEQ ID NO: 18210 - DNA, 120 bp, Homo sapiens
tatcgagttcaagaacagggctcaaaagcttgtggggctaaggcaggtcatggccacagggtctctctaccagatccccctcccccatctctgtgcgccccaccactcctgcacccatcc

SEQ ID NO: 18211 - DNA, 120 bp, Homo sapiens
tatcgttaaaccagggtagtaggcataaataaggaggtgttccaggcaaaccaggatgtttgggcaccccagatagagacacagcatgaccaaaatgggggggagttcaggtcatggggg

SEQ ID NO: 18212 - DNA, 120 bp, Homo sapiens
agccggagcctggcagagatataccagagtcaaaggagggccatccaagaccgtccagttgacctaaacgtgatgtggagagggatgtgtcttagctacacctatgtccagaattaagcc

SEQ ID NO: 18213 - DNA, 120 bp, Homo sapiens
cctcgaggctaataaagcttaaagttcagggccttgactcgcacagtccccttccaaggccctggtagggtcctagcagttatcatttgtacctctgcactgtttttcttcaagaaggcc

SEQ ID NO: 18214 - DNA, 120 bp, Homo sapiens
tcacgtaacttttaggcccccaaacttggatctgaccctgcagctgcattaagaagagattgggctgctattctggtttctccttccagggggtaagtttatccgcagggtacaggaggg

SEQ ID NO: 18215 - DNA, 120 bp, Homo sapiens
ctccgctctgcttctcttggaggagcatttcccaagctcctcctcctcacctcgttctgggagagggttaatagacgtgggggtaggaggcctcttggggccaaatacttctggaaagat

SEQ ID NO: 18216 - DNA, 120 bp, Homo sapiens
tggcggcctctccactgccccccacccaccaacctccggaagattcacaatgtacattagcatagtaaaggctccagataaagaaaacgtttggctttgtttactgtgggggttgcccat

SEQ ID NO: 18217 - DNA, 120 bp, Homo sapiens
aagcgaaaggatgagtaggagtcagatagttgtaggagtcagatagttttaggagtcagagggttttaggcttgagggtacagccccagcaaaagcctcgcaaagcccggagaactggaa

SEQ ID NO: 18218 - DNA, 120 bp, Homo sapiens
agccgggagggatggactagaggagccccccaagcaggcctttcatcctgaggacaccgggcgacaacgcgctcagagctctgaatcagagcttccctgaatcacaggcagagctcccag

SEQ ID NO: 18219 - DNA, 120 bp, Homo sapiens
tagcgatgtttcaggctgggcaggcattgtcctcatagagtttctcccccattgtctctgcctctgctcaccccaaagctggcagaaccacagcgcccagtggcctctggctgcagaggg

SEQ ID NO: 18220 - DNA, 120 bp, Homo sapiens
caccgttcccaaaacccctgcccatggagctatagcctagtgctgccaagtaaagtttggttctggaaaaaacaattagcctacaggggtagcactagctgtttctgaagttctacagcc

SEQ ID NO: 18221 - DNA, 120 bp, Homo sapiens
gagcgagcggaccaggctttgctttccagcctcacataaccaccctcccgatgccaaatatgacacattcttcaagctaatgacctctgcccccaccttaaaaataacagccctccactt

SEQ ID NO: 18222 - DNA, 120 bp, Homo sapiens
tctcgagcaggcacggactctagcagttcctttgttttccagtgatgctttttatcctccatctgatttcatgtcatctgtgtctgtgactgagcagggctcccccgtctcctggctcgc

SEQ ID NO: 18223 - DNA, 120 bp, Homo sapiens
catcgctgacccctcagcggatggtagaagccacatggtctccccacagcaacacggccagcgcttcctgctggacggccaacagcaccctggcaggccctacgtcagcaggtgacagcc

SEQ ID NO: 18224 - DNA, 120 bp, Homo sapiens
cagcgtacaataaatagacattgaatagaattgaaccagctgtaaccacggacacagtcgggaatatctcctccccgcccttgccatgcaatgcctgaaatatgcccctgcctccaatgg

SEQ ID NO: 18225 - DNA, 120 bp, Homo sapiens
atacggtgaggactgagagctggagagggaagatcaaggcagcggcgatggccacagtgatgagacagtgactaagggccagtgtgcggtttgccaagcaatttggcttgtccccatgcc

SEQ ID NO: 18226 - DNA, 120 bp, Homo sapiens
acccgccatgccctgtgcccaccctccctcctctgaccaagtctaagcaagtggaaaggagggcttggcctccagtgggagcttagcaaggcctctcaagggcctggaagacaaggggac

SEQ ID NO: 18227 - DNA, 120 bp, Homo sapiens
tcacgggggcactggatgctccatctggagttacgtctcttctcctagaggaaagggaatccagggacatgaattctctctcagtgactcacctctgagccctgtcaggtctccccgggc

SEQ ID NO: 18228 - DNA, 120 bp, Homo sapiens
ggccgccccctccttgaggagctgtggaattagagaatgagcctgcacagaaatgcccacggtgagtcgattacccagttccgctctcctctggcccaagcggtggccccgagagtcccc

SEQ ID NO: 18229 - DNA, 120 bp, Homo sapiens
gcacgccagggaggcgttgctcaatctctcacccacgtgggccccagggaaagcccgcagcccagccatgactcctgaactgccctgagagcctgggacaggctcgcactgcgctcactc

SEQ ID NO: 18230 - DNA, 120 bp, Homo sapiens
tcccgtcctccttgcttgctggctttcacttactctcttcttctccctggtgctctgttccccgctctgtgccctctttcatgccccctgtccatcaccccgccactctcttgctgtctc

SEQ ID NO: 18231 - DNA, 120 bp, Homo sapiens
tctcggcttactctctcctgcttgccctcttgctgccttactttcctctcttgccctctcactctctgactcttccgtgctctctgctgccctggaccctccatggcccccacccccgcc

SEQ ID NO: 18232 - DNA, 120 bp, Homo sapiens
tgacgatggggagagatggccaccagcgtcaacagcaggcagcaggcctccctgtgggctgagctcagcacacacttccagccctgacgcagagccagtcctacttgggcctatcatgtg

SEQ ID NO: 18233 - DNA, 120 bp, Homo sapiens
agccgcctcaggccctggggcagaaccaggtaggcactggacctctgtattcctccgagggatatgggcatttggggcccctccagccctgccacagcttggctctgcattcctctcccc

SEQ ID NO: 18234 - DNA, 120 bp, Homo sapiens
ccccggcttggacatacatggggccggcaggggcgagggatgctctgtccacccacagtgccctgagaggcccaggcagggctcgaacgctgactccagccccttcccacctagagggag

SEQ ID NO: 18235 - DNA, 120 bp, Homo sapiens
gcccggcttgtgaccaccctgaatttttcttgcagcctcttggcccagcctcgctgcaagtctgttgacaagctgggagagctgacagtaaaacgagctgaggcccaaagtagggaggcg

SEQ ID NO: 18236 - DNA, 120 bp, Homo sapiens
ctgcgaggagacacttcgtcattagaatgcagcacgattccgcaagcctttctccagtgcccgggccactcttgccaagcgctgtgtgcagagctgcagggaacagggcaggacaaggcg

SEQ ID NO: 18237 - DNA, 120 bp, Homo sapiens
tcccgggaagacaaggagatgcttgtcggggttctgggaacctgcagaggccgcagggcccagggcaggcccgggctgcgcaaggagctccagctcccagggaggggcactgggagtccg

SEQ ID NO: 18238 - DNA, 120 bp, Homo sapiens
cagcgcccccatccactgtcctttctgcctgactccctcttccctggctttaaaggatcattaattctttcttctgtcaatccacaaaggcagagacacctcctactaaatggggaggat

SEQ ID NO: 18239 - DNA, 120 bp, Homo sapiens
gagcgaggaggaaatgggggtctctatgatgcacctctaagttattcttgctcctgccctccgggagctcacagtctaatcagggagatagatatagttgcaaccgcccatgatgcaatc

SEQ ID NO: 18240 - DNA, 120 bp, Homo sapiens
tggcgtctatacttagtaacatgagagttgggggaaattcatcacagtagctaacgcatccagcaacaacctcaccccaggtactgtactaagtggttgacatgcattcactcatttcct

SEQ ID NO: 18241 - DNA, 120 bp, Homo sapiens
agacgttgagtaactttcccaaggtcacacaggtggaaccaagatttgtccctagtggcctggctccagagtctgtgcctttaaccaccaggccagactaaaggaataatggcatctctt

SEQ ID NO: 18242 - DNA, 120 bp, Homo sapiens
catcgctattccaccccaatcagaatgatcccaggaaaggaagcaaggaagccagcagagaagggaaggaagccaagaaagcttatgtaatcaaggcagctgttactgtgggcaactggg

SEQ ID NO: 18243 - DNA, 120 bp, Homo sapiens
agacggcgtagaacacgcctcaaagtttccccaacagaaggatgaggcagctggagtatttatctgctgatccccccgtcacggctgcatttctggcctgccctgcgtgctgaaagagtg

SEQ ID NO: 18244 - DNA, 120 bp, Homo sapiens
ggccgaggcatgggtgtttgaggctacaggcaggcgggtggggcaccaaaagtgtctgctacaaagagcaggtcaagacaagccaccaggaggagcagagatgtcccctggcaaaattcc

SEQ ID NO: 18245 - DNA, 120 bp, Homo sapiens
tagcgagggttgcagggtacatggggctacagaaatgaaccctaggggccaccccacaaccatgtagctagggaaccaaggcaaccaagctccaggatgaggcttaagggagcagcttcc

SEQ ID NO: 18246 - DNA, 120 bp, Homo sapiens
gagcggggcagtggggagctgggtctgccacaaccacatcccctactgtgggggctaaagtccaagactggagcatggctgggcctcggcgttcaccctagcagcttttcctgcccaaaa

SEQ ID NO: 18247 - DNA, 120 bp, Homo sapiens
ccccgacgtcgcccactatctagggcctccttctacggtggtgaagggagctgaacctgggccacagaggcagagaacgagcatcactccaccccatacccgggtcagagcacagagctc

SEQ ID NO: 18248 - DNA, 120 bp, Homo sapiens
ttccgggcctatcccaaagactgagctgctccgcgagcgtctggcaggcccagcgccccggcctgagaccgcactgagggtggcagggcaaacacttttcacattaccgcgtggctgtta

SEQ ID NO: 18249 - DNA, 120 bp, Homo sapiens
agacgccgcgactacccctttgcggcggcgggggaggggggagcgggtcaggagtgggcagtgggggctgcttataatagaaggactgccctggggagcctcagatatcggtaaccccca

SEQ ID NO: 18250 - DNA, 120 bp, Homo sapiens
ctgcgcctggcaccgtctcgggtctttaatcggttctgaatgtcagcgaggcttccccgacagcctgagcactgctttttcaatgtgttgaaagtcgctgcgcgcacaccaggagacaaa

SEQ ID NO: 18251 - DNA, 120 bp, Homo sapiens
ctccggggaccaaggcaactgggcgctgggaggggccttcctcccgcggctcccgctgccccgggcggcctcctcttcccggcctgccccaaagccaacactgtcacccggaacgtcccc

SEQ ID NO: 18252 - DNA, 120 bp, Homo sapiens
ccccgccccccgccccgggtgcatgcatggtggaaactccggcttgcagcgaaacagagcgctgcgcgcgggcgcgcagggagcctcgcggtcacccagaccgagacctatgctaatgag

SEQ ID NO: 18253 - DNA, 120 bp, Homo sapiens
gcccgggttgtttgtgtgcgcggacgtcaaagggggggcgcagataaagtgtggaaaccgggatgacttggaggggggaggggcaggaagccccaggagaacaaagctcctggccgtcgg

SEQ ID NO: 18254 - DNA, 120 bp, Homo sapiens
agtcgcagaagtgaccgccactggctcgtgcacaggcggaagcgggggagggcgggggacgccaggcctaaagcgcctcgtgggtttagagaactcagagagggcaccgggtgggggtgg

SEQ ID NO: 18255 - DNA, 120 bp, Homo sapiens
acccgtagctaaatgtttggcctttggctattttttaaggaaacgaatctcagggaggtcggggcgcgggggatgggggcatcatcgcgcctcggagatgggaagcgagttcccctccgc

SEQ ID NO: 18256 - DNA, 120 bp, Homo sapiens
ttgcgttgacccatctctccgctcgggaccggcaggaggacggagccgcaggggctgaccgcggcccagaggctgcccaggggtcgcgctgctgccggcctgcgcttccgcactcccggg

SEQ ID NO: 18257 - DNA, 120 bp, Homo sapiens
gttcggtgcgtcgcctctcgcggcagcgcctcgcttcttccagactgtaattccacactcccgcaagcgctggggctgcggaatcgtttgagggagttggaactgcatcagatgagcacg

SEQ ID NO: 18258 - DNA, 120 bp, Homo sapiens
agccgcaacctccgccaccctctcgattcttcaaggtttgcagcccagtcctgtcatatggttttgtttctgtgctgctgttttttttcagacacgaaaattggacacgtggagaattag

SEQ ID NO: 18259 - DNA, 120 bp, Homo sapiens
acccgtgaggaagcccaagaaatggagttaaagacccttttcgcacaaccgattgttgtctgtgtgaccttctgcggcccttgccctctctgaaccctctaaaatgggcatgaggatgtc

SEQ ID NO: 18260 - DNA, 120 bp, Homo sapiens
aagcgtgggcactatgggagaggctgacgctctgtgttccccagcgccctccactcccaccccttcactgttttcttcgacattatctccctagagaacacagcaagcaggagcgggatc

SEQ ID NO: 18261 - DNA, 120 bp, Homo sapiens
cttcgactcggctgactctcaactccttccaaacgtgaggctgacggggagaactcctgctctgcccagtttccattcccgcctccagaataacgagccgaaaacatgtgtactgtaaat

SEQ ID NO: 18262 - DNA, 120 bp, Homo sapiens
actcgggtaaaggctaccgagaaaacactccgcatcgctctgtgctcagagcgtgagtcagcttcccagccccgggggaacaatggggaccttgccaagggtccccttctgtcgacccct

SEQ ID NO: 18263 - DNA, 120 bp, Homo sapiens
tgacggcccccaggcccgtttgggtggcgggagtgccggcaccctgggaccttcgggcccgaggttcgggagggctaagggcgctccaggcgaccagggttggggtccagccccaggatt

SEQ ID NO: 18264 - DNA, 120 bp, Homo sapiens
tagcgcggccaggaatccctctgcccgcagctgccgcggaggggttgagggttaaacagacaccgggcagaggagcgagcctgccggctgcggccggcgcggcgcggcgcggggagagga

SEQ ID NO: 18265 - DNA, 120 bp, Homo sapiens
ggacgggagggaagagggcgcacgctacctagcctcccgacgagaagacgtctcctccccacgtcaggccgggctctcgcccactcggctggccgcctctgctccctggcctctcaagtc

SEQ ID NO: 18266 - DNA, 120 bp, Homo sapiens
cagcggaaagaaacgtagcggctgccaaaagcaccccactccttttattgtccccataagcctatacacgtacactagccacccccccaacacacacacacaacacgcacacgtgtgcgg

SEQ ID NO: 18267 - DNA, 120 bp, Homo sapiens
cttcgctgccacccagaagacatgctcctctaggacaggggagtgacgtgtggtgtgggggaggagtccaggaaaaggaaagctttgtcccctcaagctgggaagcaggcaggcggggat

SEQ ID NO: 18268 - DNA, 120 bp, Homo sapiens
gttcgcacaggccccagagggaagccggggtcaagaggtaccttgccatcggcattctccacgtagtattcccctgtcagtggcaatccccgcctggactcctgagggatcaagtgtttg

SEQ ID NO: 18269 - DNA, 120 bp, Homo sapiens
tcccggatggcttctcgctgttgtcggtgtatttctgcagcagggaggcagcctggcaatcctcttcttcgtctgcacacagcacatctgtcttctggttttctttaattttctgctgtt

SEQ ID NO: 18270 - DNA, 120 bp, Homo sapiens
aggcggcctggaggctggtgcgcagcttggctgagcctgctttttgccgcctgcactggtggatgaaagactcttcatgggcggagagccggagaacacaggcaagcctaaatacggagg

SEQ ID NO: 18271 - DNA, 120 bp, Homo sapiens
tgacggggtggcgggcggatgggagacgggagaagaagcgggcgttacacagttgtagccagtgcaggaagaaaagcccattgttaacactgatcactggagcggcttcagtttttaaag

SEQ ID NO: 18272 - DNA, 120 bp, Homo sapiens
aaacggcacctaagttaacccacaaaacgccaagtggcaagttgcttcaaagggcccggaagagaggacagaagctggctcttcctgctttcctgccccctacccactgggtctgggttg

SEQ ID NO: 18273 - DNA, 120 bp, Homo sapiens
ccacgggcaaggacatcaagagagaactccctgcctgccacatcttcgttgaagtcaattgctatggccttctaagatctcctcaaaagccctttcctacagagagtggatgacccaccc

SEQ ID NO: 18274 - DNA, 120 bp, Homo sapiens
ccacgaatttttgtagctgttcagggcttaattactcctccttgatccatgggactagacacgacaccgccaaggttaaaatgccccgaacagcgctgagcagatgtgagcgagctggca

SEQ ID NO: 18275 - DNA, 120 bp, Homo sapiens
agacgcgcaaatgaggcctgcctcggagcacgataacaagtgactaatacattgcatatcgttgaaagaaaattatttttctctaatttgcatttgcttgggggaaaaaaagccaacgcg

SEQ ID NO: 18276 - DNA, 120 bp, Homo sapiens
gcccggctgctttaagagagctggaaggagggaaagactgccagtgttttggcgttgcaggcttgtttatctttccgcctttcctccaaggcgaaactcgttttgcaagcaacattccta

SEQ ID NO: 18277 - DNA, 120 bp, Homo sapiens
acacgtcataaaaagagaccaatttatagaactggcaccgaagttcatgtctcactccagaagcatctcccagctccccatcggaaacccaactagatgtagaagtccatgttaaaactt

SEQ ID NO: 18278 - DNA, 120 bp, Homo sapiens
ggacggtccagaggcaggtccacattcttggccatcctaagtccacctgcttgggccagccatgaacctccaggactggcctagtgggtaactgccaccaccaactgctctccctcccac

SEQ ID NO: 18279 - DNA, 120 bp, Homo sapiens
tggcgcctctctgcagggcctggcggggtaccaggaactcaaagaaagcctgttgctgtgggcatctagttgatgaagtcagagtaggtggtgctgtgggcaggcttcaggacggcacct

SEQ ID NO: 18280 - DNA, 120 bp, Homo sapiens
ttgcgtgctgcagttgaaggcaaatgtgctcttgaaaacgggaaggcttggaagaaaaggttaagggatgtgggtaatcaaaagccaatctgtcctcccttccccccaaaatacaccccc

SEQ ID NO: 18281 - DNA, 120 bp, Homo sapiens
actcgctatctgcgaggcagggtgaacgcgcagcctgggcctccatccccagcgcgcctgggcaccacctggggccggtcacgctgcctgagcccatctgcgaggaaggaggtcacgagg

SEQ ID NO: 18282 - DNA, 120 bp, Homo sapiens
agacgcagtagcaggcctgggtcttctgatgttcatttaaagcaaaatgatcgcctttcttcactgtccccaccccagacgccaacaacaccttgcacctagcagaccaagcctgagtca

SEQ ID NO: 18283 - DNA, 120 bp, Homo sapiens
tctcgaaatgatgtaaaaggaggttcaaaatattaggttgcttttgggttccctttatctcgaacattgttgcgtagatttgagaaagggctgatttctactttgttttctaatcagcaa

SEQ ID NO: 18284 - DNA, 120 bp, Homo sapiens
agccgcatttacaaagtgccttcacattttggtcctcagaaacccatccgagggggacagagtaggtgttactgttctgattttacacatgaagagactggccactcgcccccacaaatt

SEQ ID NO: 18285 - DNA, 120 bp, Homo sapiens
acccgggccaccctcctgctggaggcaaccccgacagcccatattttaagcagctcttttcacagcctgcaaacctcacggattgtctcttacaactgtctgtttactcacttccctcca

SEQ ID NO: 18286 - DNA, 120 bp, Homo sapiens
ttccgactccaggcccgggaggacaattttaaagtgtttctgcagacagaccctctggccgcgccggaagtgttttatggacctgtgagccgagttaatcccaggaggcgcggctggatt

SEQ ID NO: 18287 - DNA, 120 bp, Homo sapiens
tgccgagggggctggtgacaagtgatgctgaaccagaggtttgggatgctaatttgatttattatctgtgtacagcctggggaggagaaaaggctcataaaagtgttctaggctggtcat

SEQ ID NO: 18288 - DNA, 120 bp, Homo sapiens
tgccgaatatccctgcaggaagtcgcaggcgcagcaacccctgactgcacagacaaaagtctcccctttacacagggctgcttttattgtttccaacagctttgtgctttccctggggga

SEQ ID NO: 18289 - DNA, 120 bp, Homo sapiens
tcacgctgcagaggaagtgatgttgtggaaacagtggcattaacttggccttcgaaccacacaggagccagagttgggaaaagctcggtgcaggcagacactcctgtggttcatttaggc

SEQ ID NO: 18290 - DNA, 120 bp, Homo sapiens
aagcgtggggatgatgggtgcacacaatgcaagagaaaccatacttaggaattattccccggatacaaggggcccccaagatatagatgttcttgaccccttgaacctgcttcccattag

SEQ ID NO: 18291 - DNA, 120 bp, Homo sapiens
gcacgcaatggtaagcaagagacatggtccctgccctcatggagcttacattctacttttcttggcacacaagcaaacagggtagaggatacagcccctaccatcaaatcctgcagtgtc

SEQ ID NO: 18292 - DNA, 120 bp, Homo sapiens
tctcgctgagggaagccaggcaaaatctagcggctcagctgtaacagccggagctcttggctcccaagcaacaggaaacaattctggcttatttaagcagaaaaggactttatcaaaagg

SEQ ID NO: 18293 - DNA, 120 bp, Homo sapiens
aatcgtagagtggaaatgctggcaacgctttaatcagagcagggctggcgggtgttgagaccatgcagatgaagtgcggctcagagcttgaggggctatagcttaggtggcaccggaggt

SEQ ID NO: 18294 - DNA, 120 bp, Homo sapiens
aaacgcctccatgcaaggccagggtgtcctctctggggaggaagccccacgtgcttgaaggtttcttaaaatagagccaaaagggtttctgctgccagcgctaaggagctgagggctttt

SEQ ID NO: 18295 - DNA, 120 bp, Homo sapiens
tcccgctgaaggttgtaattctcctgccatgattcgggttccccttgccaggactgcttagcattactggctgatctgaaggaggcttggggcctttgatgacactgcctgatgactcag

SEQ ID NO: 18296 - DNA, 120 bp, Homo sapiens
gaacgcagcttggaagcgctaactgagcagattgttcagggcaagctggggctgtcttctgccttctgaagatctatggtttgggccctgttattggctaaatcatgtcccccaccacaa

SEQ ID NO: 18297 - DNA, 120 bp, Homo sapiens
tgccgaaggtcacacagctagttaagtggcagagctggaattcaaattcaggcagatggttccagaatctgtgctttcacccattctgctatcttacctctcattccttgatgctgtgtg

SEQ ID NO: 18298 - DNA, 120 bp, Homo sapiens
acacgagaaactgctctcacgtttaagccacattgcaattttgagtctctagctcctagccaaaccgaatcctaactgatagagtccctatcccccaaggagctcacaatctactggagc

SEQ ID NO: 18299 - DNA, 120 bp, Homo sapiens
aaacgcaggacaaatgatagctatgcagcaatgccagagccaaaaggaaaatgccatgtgagccctgaggaaggagcaagaatttctaatgagggaatcctgatcagattcaccgaagaa

SEQ ID NO: 18300 - DNA, 120 bp, Homo sapiens
gctcggcaggagacggagctggagagctttttccttccttgttggggaggaaaaggctttttacccagctccctctggcaggcctcaggtggttgtgtgggcctgggacatttgacacgt

SEQ ID NO: 18301 - DNA, 120 bp, Homo sapiens
atacgcagtttcctttgcccactttctgccccttgtgcccactgcctaaattaaatgttgaaggtcctgattatgggacaagttagtgccacatctttcaagtgaacaaaatgaggagca

SEQ ID NO: 18302 - DNA, 120 bp, Homo sapiens
gaccgagccatgcccttggtgctgttgttcacttacttggatgtgagcagtttcgttttaaatattgatgatctcactcagcacattctgagaaaggccctgctgggagttgtgcaatgg

SEQ ID NO: 18303 - DNA, 120 bp, Homo sapiens
gcccgagaaagccttgagagcactattggaaccagctaggttcttaaagggtcaggcttgctttctgtcttgattttcttcccttcttccttgttttctgactcctttccctgattcttt

SEQ ID NO: 18304 - DNA, 120 bp, Homo sapiens
ctgcgtgtaaagcaaatgccttcccttcatctcagctggatgtcacatggctgcttgaagcagggaggagggcagagtctgcttcagtggggccatgtgtgcatgtacacgtggacaccg

SEQ ID NO: 18305 - DNA, 120 bp, Homo sapiens
acccggcccaggaaacttcatttattgataatgaagtgccaggaccttttgcttgccccatcatagctaacctgtcgagggtcggtggagggtgggggacatgggtcaaatccagtgctc

SEQ ID NO: 18306 - DNA, 120 bp, Homo sapiens
aagcgtgccttgacctgaaccatgctcggggtggtcagagtcatgcctgctaatgacccttccttgaacttctccttcagcacagagcacatactgccctgaaaagtgtgaagctgcaaa

SEQ ID NO: 18307 - DNA, 120 bp, Homo sapiens
ctgcgaggacctaagctattgcttctctctccccagcattcgtatcacacctggcatcctgagcctgcacagtgccactgaactgttcctagaaaggaatgttaactatgctagtatggt

SEQ ID NO: 18308 - DNA, 120 bp, Homo sapiens
agacgacaagaaacagtaaatgctgcagctgggtggattcctgggcccctgcagctgctgagagcatgtgaggacttgcgagaaggaggaggagtcacaggcaggagccaattagattct

SEQ ID NO: 18309 - DNA, 120 bp, Homo sapiens
aggcgcaaagtcaaatgccaggaaagtacacatttccccggcccctcctcctccccacaccccaagccttctgtggcagacgtggggttgagctgctccgatccccttcaggagcacatc

SEQ ID NO: 18310 - DNA, 120 bp, Homo sapiens
ctccgagtgttgtgagcagacagcctcagggcccacctcaacctttcccacgtgttccccggcaagcggctgagcaaggcgggtggtactcagggccagccctttctgaattagacaggg

SEQ ID NO: 18311 - DNA, 120 bp, Homo sapiens
gctcggaactcccgctgggctagcagagacttttcagatctgcactgccacctgatggctctccctgccccgtccttcttcctcccctcctccttccgcggtgctacttccaacaaaccc

SEQ ID NO: 18312 - DNA, 120 bp, Homo sapiens
catcgtgggtgtacgttcttccagatagtcttttctttgtatttatatacatgtaggtacgtatgccaccaaaaggtttgttattactcattttgtttttacataaatgggattatacgg

SEQ ID NO: 18313 - DNA, 120 bp, Homo sapiens
gagcgccctcttgagggcaattagtttggttagttgaacacttgtgccctaggagaggtgcactttcaactatatcgttcatatagctgttgcataccctgctttatgggttctttgttc

SEQ ID NO: 18314 - DNA, 120 bp, Homo sapiens
acacgagatttggatggggacacagagcataaccatatcaccaggcaagagaattggtgtgtaagaggcagtgaggccacagtgttggcaaagaaacaaggtagcagaaactaggaagca

SEQ ID NO: 18315 - DNA, 120 bp, Homo sapiens
tatcggtggctaataaagtgaaagcaaaagtcattgcctgagtcgtctgagaaagctttggaaaaggaactgattaatgtgagtgatttcaccttctgcccttgccccttcttcctgcct

SEQ ID NO: 18316 - DNA, 120 bp, Homo sapiens
tgacgggagccatgccctataggggagcagaaagaaagaacctgggtcctaatatatgtagagctgctatgtcaccactggacgcccatccttgaactcctttcacaggaaaaaacaaaa

SEQ ID NO: 18317 - DNA, 120 bp, Homo sapiens
cgatcccagtcctgcgtgccagccagcccgcccgcctgcccgccggcctgctgcgcgctgcccccgtgcaccagcgcctcggcgagccgctatattaccagccccgggagcccggacgcg

SEQ ID NO: 18318 - DNA, 120 bp, Homo sapiens
ccccgcccgcccgcctacgcgcaggcaggccgggtgcagcgcagggccaccgcccccgcccgcagctctgcagcccaggcccggggagggcgggtgcctgggcggagaggtcacctagga

SEQ ID NO: 18319 - DNA, 120 bp, Homo sapiens
tcccgccccagaatccccactcctcagccttctgcacggtattttcccatcagcctccctagtgcactatcaggcttggcggctgggaggacggcaaattggggtgtcttccttcagggc

SEQ ID NO: 18320 - DNA, 120 bp, Homo sapiens
gtgcgtgtgaatcatctaggatcttgttaaaaggcaagttctgattgagtagttctggcctagagcctgagattctgcatttcccatcagattccagttgatgtcagtcctactgggctg

SEQ ID NO: 18321 - DNA, 120 bp, Homo sapiens
tttcgctaataagaacatttattgagcacttgcaatgtgagttatttcatccttacaacaaccctacaagaaagtactgttatgatctacactattaggacagataaggaaactcaagct

SEQ ID NO: 18322 - DNA, 120 bp, Homo sapiens
ttgcgattttactccgacagagtggaaaagtattttgcctttttcgcagcagtgaacactatgcacccttatttccatggcacctcttgaaacaccctctataacctcaggaacaagatt

SEQ ID NO: 18323 - DNA, 120 bp, Homo sapiens
cagcgtcgagggtccgagtccattatgaatgagctgtccgttttactgtctgtatctcccattatcaccagcagggagagcatagaaaaggatgcagctagtacatgttttctcattgtt

SEQ ID NO: 18324 - DNA, 120 bp, Homo sapiens
tcccgttcaaggaaagggcaggatcgggctgaagctttctggttgtcattgtcctttatgtgctggagttttgtcttactctttgcacttgcaatccatcatcacagtatctgctgcaca

SEQ ID NO: 18325 - DNA, 120 bp, Homo sapiens
gagcgtcattagcaaaggctgtcatccattccaccccaactcccatagcttatgctacatatttataaccatttggaggtggacacaatggtttaatggaagcacatgttgactttaatt

SEQ ID NO: 18326 - DNA, 120 bp, Homo sapiens
caacgtaaccgaattgggtggtctcatctttgtccttggttggtcggggcgggagggtctattcagtttctcagcaagctttggtgtcagcgtcagcttacagggctagagaggaggcag

SEQ ID NO: 18327 - DNA, 120 bp, Homo sapiens
acacgcgtatttgccaacagagtcacatttctgcagagcctttgtagcctgggcacatggtgtaattcgaaaaagaaagcagttgttggaacagacttaccattaaaataggatcatatt

SEQ ID NO: 18328 - DNA, 120 bp, Homo sapiens
taccggtttttctgaaatttgctttgttcttttgaccatacctcttggacaaaggactggggtccagagatctctccagattacctcactaactccccaggcatagccaacactggtgcc

SEQ ID NO: 18329 - DNA, 120 bp, Homo sapiens
cttcgggaaaactttcaaaggtatttcagataaaagtttgatcattttgttcataggcaacattttccttaacttcctactcatgaacagtctgaataaacagggcaaagtgttgataaa

SEQ ID NO: 18330 - DNA, 120 bp, Homo sapiens
ttccgagacacccaactcagaggactcagtcttgccaaaatgcatgaatgtacattctccctgtggaaaagaaaaggtgccaggtgttctggggatacctgtgctgaaacaactaaacac

SEQ ID NO: 18331 - DNA, 120 bp, Homo sapiens
ctgcgtttgaacctcctcacccgcaacaacactttggaatggtgggtagtgatctcacctaacagctgtagagcccttagttaggaatggggcataaacaataggagcaactcagtcttt

SEQ ID NO: 18332 - DNA, 120 bp, Homo sapiens
tcccgttgcaatccggaatgctcctagactcagacatatgtcaaaggggcaaggttctcataaaaatcacataaaaatacgtgtccctatattgctgataaccctgaacttgttggggtg

SEQ ID NO: 18333 - DNA, 120 bp, Homo sapiens
cttcgagttgaagataggggatgttttttcacttgaggagttgacctccttttcaggtaaagacagcaacttcaaacaccttcctgggagggagagtgggtgaaataaagggatccttcc

SEQ ID NO: 18334 - DNA, 120 bp, Homo sapiens
attcgaataggagaagacacacacagcacatacacatagataccccacccccaagtaaacagatctctaaataaaataactgcaagttgtgctaagtgctgtgaaaaatataaacaagtg

SEQ ID NO: 18335 - DNA, 120 bp, Homo sapiens
caccgagaaggcatgactagctttgtatctcctcaattaaagcttctggacaacagctgacatcagcataggccccagctctgagggaaatgagcttaaggaacaccaggccacagagat

SEQ ID NO: 18336 - DNA, 120 bp, Homo sapiens
ggtcgcctatagtggggaacataactgatggaaggccccagctgctgtgttcttaaatcaatcttcaggtgtgtgttgaggtcactcttcccacaggctgctgccaacagatgagtgagc

SEQ ID NO: 18337 - DNA, 120 bp, Homo sapiens
tgtcgaaattttcttagaatttcactgcagtctaagactccctctttcttccttccctctgtgcttcacaagcatcagaactgcactacagtctgacagctctcccagcctcttctggct

SEQ ID NO: 18338 - DNA, 120 bp, Homo sapiens
atgcgtgtcttcagcactgataaaagttctaaacatgttgagacaaagaacaggatcctacagtgccatgattgggcaagtcaatgcctctcctcagcaatgacagtggtaccagcatat

SEQ ID NO: 18339 - DNA, 120 bp, Homo sapiens
tgacgattgaatttgtgtatctgggattcttgtcttacagccaaacaaaaatgttgtaagtaggactaccaagaatacagacttcctcttggcttgctggatacaagtaaaactagtggt

SEQ ID NO: 18340 - DNA, 120 bp, Homo sapiens
gtacgtgtttggggcctcagttgtgatgactcatggcagagagagactgaaggatggcttcatcacatgtgtggcaccttggcaaggatgtgtagaagggtgggctcagctgtgttgtca

SEQ ID NO: 18341 - DNA, 120 bp, Homo sapiens
cagcgtggctcgtttaaggtagttatatagaagctcagggatccaagagtgagtgtgtaagaggaccaagtagaaagctgcatgtccttttaagtgacctgtcgtcagaagtcacacagt

SEQ ID NO: 18342 - DNA, 120 bp, Homo sapiens
ttgcgtgatgatttttgtttttaaggaaacttgttgaagtgtaacatgaacccatttgagttcacatatcacaagtgtgccattcagtgaattatcacatagtaaacacatttggtaaat

SEQ ID NO: 18343 - DNA, 120 bp, Homo sapiens
agtcggattctgctaaatgggccgaggtggggtgtggggtgagtttcaactcattctcggtgtcctgtctacaagaggcactgtggtctgtgtgtagaagggaaggaattggaaatgagc

SEQ ID NO: 18344 - DNA, 120 bp, Homo sapiens
ttccgtttaatcctactcaatttctatgtgttgtcgggaccatcttgtcacacaggtaatgctttagtgttttgagatatgcatttgcttttatacagcatggcccagatatacaagtca

SEQ ID NO: 18345 - DNA, 120 bp, Homo sapiens
tggcggctggcaaagagctgtcagagaatgatgcaggtgagttgagccctggcagaggggtggactggcaagggtcatcctgtcagatcttcaggccagaggtcgcagctaggaactttc

SEQ ID NO: 18346 - DNA, 120 bp, Homo sapiens
tctcgaatcgtcactgaggatcacatcagagagaatgagaaatgacagtgggatggaaccttataagtaaaccttgtttagttcctgtcttaccgtaagccactgttttatgacagtgtt

SEQ ID NO: 18347 - DNA, 120 bp, Homo sapiens
gtccggcgtgaggcgcttggcctgcagccatttctggaacctctctgttttccgcaggacacgctcaatgctgcaggtctttggggctgatgcagaggcacagattctcctgtctgagat

SEQ ID NO: 18348 - DNA, 120 bp, Homo sapiens
tctcgttttgatatttgctgaccagtctaaagatctccacagggcgccagattttggaatcatctgagtaatttgcaggataagaaagcaaggaatcgggaggcagtccaaggtgggaag

SEQ ID NO: 18349 - DNA, 120 bp, Homo sapiens
gttcgaaattctttctgtgagaggactatttttgcttcttcaaacttacggtagtgtatatgtcatatcagaaaaggtgagggaggtgtgagtcacgcacaaacattatcctcttcatac

SEQ ID NO: 18350 - DNA, 120 bp, Homo sapiens
gtgcggaccccgggctgtcagtcagcaaaccccagtatctctccctttccctacactgattccccaaactgcttaccctctgaccaatggctgggtcttggaaccacagaggttcttgaa

SEQ ID NO: 18351 - DNA, 120 bp, Homo sapiens
tctcgatgtgttaatcttgttcgtcacctagaagaccttaagctgctaaaggctcagtgtcatatattctttgaactactcaaaacatttaacacaatgttgagcatattgttaatccat

SEQ ID NO: 18352 - DNA, 120 bp, Homo sapiens
tctcgagtggcttaaccaggccctagatttcactggggagattatgattttaatttaacatatcctgccatacagtgtgtgaaatatgcagccagcagcgatcgctatgagatgaaagcc

SEQ ID NO: 18353 - DNA, 120 bp, Homo sapiens
atgcgtctggaaaaatttggaaggcagagttgcaggggaaggtattttagggggaaattatttgggcaaacagggccaccatgtgcagttgtgcaggttgtgcaggctatgcaatataca

SEQ ID NO: 18354 - DNA, 120 bp, Homo sapiens
agtcgttttcactcaaaaaggaatagcaaaaccctctcatacagagaaaatgacagggcgcaaggagctcaaaaatgaagaggagccttccacttctaacaagaacacactagatgtaaa

SEQ ID NO: 18355 - DNA, 120 bp, Homo sapiens
gcccgtggatagtctaaatgtcccacgtagatgtgacaagccaggaatgatcccaatttacctagctccagaattgcctgatcttcttcttgactcaatgcccccaacctcacattcatc

SEQ ID NO: 18356 - DNA, 120 bp, Homo sapiens
ccccgtctcaattaatttgtacctaatgccactatcactgacacagagtaccatcttagaggtacaggagatgaaaaaccaaggagaagcaaccctgtgaggctttgtccagggcaagcc

SEQ ID NO: 18357 - DNA, 120 bp, Homo sapiens
ctgcggtaggtacatacccaggcacattctggcaggggtctgagaaataaaggagagagaacagaactgaactgcaacgtcatggttcaagcaataatctgtgtcccaagctataatcag

SEQ ID NO: 18358 - DNA, 120 bp, Homo sapiens
gtgcgggaggagattagctggggaaggtgccaccaggacagatcctgtggggccactcacatccatgaactggaccggcttgctcccaggagcaggaccacgactgggcaggaagccctc

SEQ ID NO: 18359 - DNA, 120 bp, Homo sapiens
tcacgttcttgcctgtagctggatagggcagggaaataggggccgataagagggaaatcctaacccctgatccctgagcccacctccttggacccctgactcaccccacagcatccgaag

SEQ ID NO: 18360 - DNA, 120 bp, Homo sapiens
gaacgagcatgcttcaaagtgaggggagctgaagaaggggggaggggagtcccatagagaccgatggaaagacggagaaagagacaaggcaggggagcaggaacagacagggatagaaat

SEQ ID NO: 18361 - DNA, 120 bp, Homo sapiens
agccggaccccagcgcagatgagccgaccacgtggagaagggatagcctctcctcccagaccccagactcacgctgtctctcttgccatctgtgtctttcattccccggtcccccgcgcc

SEQ ID NO: 18362 - DNA, 120 bp, Homo sapiens
caccgcgtggccaggcggctcactccttgcagggacacgtgtcggcctggctgccccacccctcctaatgccctcacccccctccttcccgcctgggcccccaagcccgagaccagagct

SEQ ID NO: 18363 - DNA, 120 bp, Homo sapiens
actcggagacccctgccccagacgctgcaaactgctctctgccacgactctgaatatcctcactagaagccaaagacaagtgcccgaaccgagccccttcccagggacagaaatgaccca

SEQ ID NO: 18364 - DNA, 120 bp, Homo sapiens
tgtcgtattattatcattacttttatttctgccaaaggaactcttctacgggagagatgaacctccatccagctctgagaacccgacagctctgctaagtttcagggcactgcagatagc

SEQ ID NO: 18365 - DNA, 120 bp, Homo sapiens
agccggtatggcagcgggaaaacaaagggaatgtgtgatctggctgcttagaggaatttgctttagaaggaacagatgtctttaagcaggaccgaggccttgaggctgtgccagggataa

SEQ ID NO: 18366 - DNA, 120 bp, Homo sapiens
tcccgtgaaatctgttaaaagtcactttgggttatcatcagttctaaggagacatttgatgaaaacagctcacttcccggtagcatccaggggagggagggacacagtgaagcagttaac

SEQ ID NO: 18367 - DNA, 120 bp, Homo sapiens
taacgcctaactcattgggctatcgagacaattgaattaattaacacaggcagagcacttaagacaatgctttacacatagttattgctcaatacatatttgtgggaggaattaatgatt

SEQ ID NO: 18368 - DNA, 120 bp, Homo sapiens
ctgcgaaagcaaagtcccacttgctgggctgcatatgggattccaatctgtcctttcatgcaggctccccacggagtaactctttccagtcacttcctttcctcaaagcagcccctgggc

SEQ ID NO: 18369 - DNA, 120 bp, Homo sapiens
cctcgttccctcacactgctaagatgcccccaccgggaaagagctggcctggcagctcccccttccttgacccctccaggaggccaagggaaggacacctttacactcagtggggtgccg

SEQ ID NO: 18370 - DNA, 120 bp, Homo sapiens
ggccgacaccctacttcgggaagagcctggagagttcagagcctggctcctgtcccccaaacccccggtcctgctggaggaagcaagtttctttgctaaaagttaaacatcctcttcgtg

SEQ ID NO: 18371 - DNA, 120 bp, Homo sapiens
gagcgacaagaaaacaggacgtgggaagcgtcccacagggtgaacatgggcccccaatgcctggcaccccctcctctcttgtggagcggaggcctggtggctcgaacccttcctttctca

SEQ ID NO: 18372 - DNA, 120 bp, Homo sapiens
actcgctcgcctctgcaggggagtcatgttcccacagtcccacaatgcccttgagttctgctgacaaagctctggcttcttccctggttctcagagtctctacgcctccacccagggctc

SEQ ID NO: 18373 - DNA, 120 bp, Homo sapiens
ggacgcaccactggggaaaaaattaaggaacgaagcaacaaaaggatgaattcaaccaacatttattgaacaccaactgtgcgccacccctgttccaggcactgggaggcagcagtgaac

SEQ ID NO: 18374 - DNA, 120 bp, Homo sapiens
tgccgccgcccctggctaatactcatatgcatgttgccaggattaaaatgaatgaacaaagggaaggacatgctggagccaacttatacaggttgggaggagctgttcaattttcagaaa

SEQ ID NO: 18375 - DNA, 120 bp, Homo sapiens
ggccgtgtggcaaaaggatggggagatgtcagggagtgtgccaagtactcaatggaccaggcagctcaaaggcagccccgggaggagagagcaacctccttcccatgttctgtctccatt

SEQ ID NO: 18376 - DNA, 120 bp, Homo sapiens
aggcgcatctgagctcccggctcttctgctcccctcctctgagggacctgtctgtctagctatcagcctgtcagttcagctctgctgcaaagctgttgtgtaggtgtatattcatcgagt

SEQ ID NO: 18377 - DNA, 120 bp, Homo sapiens
acccgctctttcttgtagatacccacagttcatctactcaaccactcacttagccttgcgcccattcatccacccatgattcacccacttacccactattcattcatctgtttatctagc

SEQ ID NO: 18378 - DNA, 120 bp, Homo sapiens
atccgcacacccacataactggtcactgctgtggctccagctttgtgccatgcattgggagcacagagatgagtcatatcccctcctgctctttcagccctcccagtctaactggagaga

SEQ ID NO: 18379 - DNA, 120 bp, Homo sapiens
tctcgctgcatgattctgtgatcaatgctgtggttaccccagggagcatttgattatgaccctgacattttagccgagtgctgacagatctcttggtgttgccaggagagaggaggagga

SEQ ID NO: 18380 - DNA, 120 bp, Homo sapiens
cagcgtagataaaccctgggaggtgtaagagagaatgagtgtggttaaagcgcagggtggatgaagggctgaggcagaagttggcacttgggctgggtgcagtggctcatgcctgtaatc

SEQ ID NO: 18381 - DNA, 120 bp, Homo sapiens
tgtcgcattctaagatgggatgcagttagcatttgggatgagatgatttttcgttatgtagaactgtctcatgcattgggggacatttagcatccctggaccttgaccatttaaatccat

SEQ ID NO: 18382 - DNA, 120 bp, Homo sapiens
ttccgtttcaatgatgttcaaaagcaggaaaaactaaacaatggattttttttgagagctacacatatgtgataagctacaaacaaaagtaagggatcaatggacagaaaatacagaata

SEQ ID NO: 18383 - DNA, 120 bp, Homo sapiens
tggcgaggggcacgcaggggcttctaactcttggtcaggctctatttattaagctgagtgactgctacacgagagagttattttgtcatcattctttacattgtacatatatattaaaca

SEQ ID NO: 18384 - DNA, 120 bp, Homo sapiens
ctacgacaccccaactctgtaccagggtcctggtccgcatgactccacactggacacctacctccaaaagtcccacaaatctcacatctaggtccctgctttcccacacatacacagcct

SEQ ID NO: 18385 - DNA, 120 bp, Homo sapiens
ccccggggtcaaggaactccggaatctgaagccccctgccccccccccccgcccataacctcctagaccgacacacacacgcgcacgcacacacacctggccctctacacacactgcagg

SEQ ID NO: 18386 - DNA, 120 bp, Homo sapiens
agacgccgggagaaggctgggtcccaccgttgggggcaggtctggggaaaccacaccccgaggggctggcggtgtgtactgggcagtggcagtagcagcagcggcagcaggaggaagaga

SEQ ID NO: 18387 - DNA, 120 bp, Homo sapiens
gtgcggggtccctggaaggaggcctgggaagggcaaggtccagtgggacccctggggactatcccaggatgggttagggcgtgggggctggaccagggaaggatgaggacagcgctagtg

SEQ ID NO: 18388 - DNA, 120 bp, Homo sapiens
tctcggggcgtcctcacctgtgtccccgctgcaggagcagcaacagcggtggggctgggggtaccaaacacccgagctcctggccccctctgcagagctgcctgagttctcctcctcctc

SEQ ID NO: 18389 - DNA, 120 bp, Homo sapiens
ccccgcccctctgagcttgccgggagatggagaggcagggaggggcctcgtggctccctgagccccctcccctaggacagccagagagggaccctggggagactccgcctcctacaaagc

SEQ ID NO: 18390 - DNA, 120 bp, Homo sapiens
agtcgcgtcatctggaaaatgggggtggcagggaacttcgccaattctctccacctccttcctggactcccctctcttcctgcccagctcctacccgctctgcccccaggggcccccacc

SEQ ID NO: 18391 - DNA, 120 bp, Homo sapiens
actcgcctgaatcagcagcacttagcagatccgatcgatgggaaggcgtcagttaatggccccagagcggagtgccacagggaatgatgcagcgctgtcccctccctgccccccagactg

SEQ ID NO: 18392 - DNA, 120 bp, Homo sapiens
agtcgggggtaattgctggggagtgtttctctagatggccaagcttccgaagccgcccccttgaggggcgcagcatgggttacagccccagctctaagacttcggctgtgggattggagc

SEQ ID NO: 18393 - DNA, 120 bp, Homo sapiens
gcacgggacttcctgtttttagatatgaaatgagggtaaagggaatgtagagggggacaatccaggtcccacccccctaccatctcaggcaggccccactccgagggggtagtctctctt

SEQ ID NO: 18394 - DNA, 120 bp, Homo sapiens
ctccgctagagggctctgcttctggatggcaggagcactgattatggaatgcctctggctggctatgggtgggttcaaaccccagctttgccactgacttgctgcatccttgagcaagtg

SEQ ID NO: 18395 - DNA, 120 bp, Homo sapiens
tctcgggtgcatttgcattccaaaaaggcgaagggtcccgctattactgctcctggtacctggagctgccaagcacccctgcgatggggcgccccgggggctgtgcgccaggctgggagt

SEQ ID NO: 18396 - DNA, 120 bp, Homo sapiens
gggcggggcgagggggcttccggggcggcagcacctggcccggctccggccccgcccgcgtcagctctgcgcggtgattcactccctccttcgccccggggcccccttcccggccagacg

SEQ ID NO: 18397 - DNA, 120 bp, Homo sapiens
gagcggggtgggcattggactctaagattcgggccaggcttagacattagggggtggctccaagtggaaggagaatggaaagctgggcctgaagaggaggcctggctggtgggggcaggg

SEQ ID NO: 18398 - DNA, 120 bp, Homo sapiens
ctgcggcttagttttcattagtggttaaggctgctgactgtactgccaaactgcctgagtagtttagatcctagccccaccacttggtaactgtgtgaccctaacccttctgggccccag

SEQ ID NO: 18399 - DNA, 120 bp, Homo sapiens
catcgggttcttccatttcagtgcaagggtgcctagccaatgtagtgagcaaaggttgatttcaagattgaattttgagggatcaaagttggagcaggtcaaaattattaacaactcggc

SEQ ID NO: 18400 - DNA, 120 bp, Homo sapiens
cggcgatgcccgatcccttctgcctgcagctactaacactgcatggttcctagcttaacaaccctctgaattttggggaagcttcctgtaaacactaaataaaacaaacaatatgtcttg

SEQ ID NO: 18401 - DNA, 120 bp, Homo sapiens
aaacgtactatgccaggtgcttttcatgcatttttcaagggagaagagatatagcgtaatcagattctcagaggggtctgagtcttaagccactgttgcaatggggagtcttggatttgt

SEQ ID NO: 18402 - DNA, 120 bp, Homo sapiens
attcgttttaaatgagacgttcatgtgttcccttccccatcccccaataaatagctctattaaataaaaggcaaccggttgagattttggataacagagatatgtatttttcaaaaatgt

SEQ ID NO: 18403 - DNA, 120 bp, Homo sapiens
catcgtgtgctttaaaataatgatgatgatgataatgataattctttgcacttgcatagccagtagtcctctcatttatctcatcggttgttgacaaagccctcctcttactcttgtaaa

SEQ ID NO: 18404 - DNA, 120 bp, Homo sapiens
attcgtttcataagctgttgcttggcaatcccacgcgtcagctggctctttttcctcagcactctcgccacacgctgtctgaagtataatgagactgaggctgggcaaaggaggatggca

SEQ ID NO: 18405 - DNA, 120 bp, Homo sapiens
gcacgttccatcttcccacacaacactgtttgttaccatgatgcttgataaatgtgttaaaagcagagcagtgaagtggttgcaaacatgggatttagtgtcacatagacctgggttcaa

SEQ ID NO: 18406 - DNA, 120 bp, Homo sapiens
acccgtctcagtttctccatgtatcaagtgagagattataatatgcagcacctggagtggatgtgagaattggaggaaaaaattcatttaaagtacctgcacacagtaggtgctcagtag

SEQ ID NO: 18407 - DNA, 120 bp, Homo sapiens
acacgtgattcaaaacaaaagcatcatgtaatcaggaaatgaatgtaaggaagtacaacaaagttctgatttttcccacgaggactacttaaaaaaaatcaaatgtcaaactgtttctgg

SEQ ID NO: 18408 - DNA, 120 bp, Homo sapiens
tgacgtactgggggcataaagaaaaatgcactaaatatgaacttaggggcctaattcccaacgtgtcattggagtcagggacaccatcacttgactggaagcaccatatgtgagccaagg

SEQ ID NO: 18409 - DNA, 120 bp, Homo sapiens
caccgtaaacagtactgtacacaaataatcggagttaatttatgcagacagcttctttaccctaaagctgcggtttgatttggacaagaagttcttcactaatattcacttcctctcaca

SEQ ID NO: 18410 - DNA, 120 bp, Homo sapiens
ctacgtgatttctaagatttcctatgtgcttagtcacccacagatgaaggaagattggacagcaatgaagttatgaaaatgagtaagtacagctatccataggagtagcggctactacca

SEQ ID NO: 18411 - DNA, 120 bp, Homo sapiens
gctcgaatccaagggcagtctcgaggcagaattttttcttcatggggggatcccagtctttttttttttctttaagactttcaagtgattgaatgaggcccagccacatcatggagtata

SEQ ID NO: 18412 - DNA, 120 bp, Homo sapiens
acccgagaacactatagagaaaatctcacctggtccccagaccatggttctgctcacaacctcagaacttccctcgcctgactgtcctgagcacttccaggaaggcagcccctggctgtc

SEQ ID NO: 18413 - DNA, 120 bp, Homo sapiens
tcacggtgaggtgaataccgatagtattggtatgaatggttgtattagtcagggttctcccaagaaacagaaccaaagaggggacttgttatgggaattggctcatgtgactgtgggggc

SEQ ID NO: 18414 - DNA, 120 bp, Homo sapiens
tcccgccatctccatctgcaagctggagagccagggaggtggatggtgtgattcagtttgagtccaaaggcctgagaaccagcagagccagaggcataattcatggagtctgaaggcttg

SEQ ID NO: 18415 - DNA, 120 bp, Homo sapiens
acccggctgcttttgtcattattttttccagagatgctctattttaatggtcagttaactcctttaatactgataacatccctgggtggttgttattattattaatcactgttttacaga

SEQ ID NO: 18416 - DNA, 120 bp, Homo sapiens
attcgatcctcacaacatgctgaagaaagactagacatttgaagtactctcagtctcagtgagtcactcctccctgtgcatgtcctgggagctgggagaatccatcctatgggttctgtc

SEQ ID NO: 18417 - DNA, 120 bp, Homo sapiens
caccgctgggcagggcatgctgatggcatctgttctagggactttctacccctgggctcagctgacccatcatgacctccttcctggcactctccgcttcgagtggctgcaacagcccac

SEQ ID NO: 18418 - DNA, 120 bp, Homo sapiens
tgtcgtgtactttacacacgatacatcctcatcatcataaatggtaactgtcatgatagcaacagctgttaaatttttacactgacagaacgtggggagtttccttcaacctcttcatca

SEQ ID NO: 18419 - DNA, 120 bp, Homo sapiens
tctcggaggccaagacagctagaattcacagagcagaggtcctgagaaagagagctgcatggagaggagagagctgcagagacagagagagagagttctggaaatctgccaagggtcccg

SEQ ID NO: 18420 - DNA, 120 bp, Homo sapiens
agtcgcggaaaaggagtgggtggaacaaccccagaactcacaaagggatggaaatagtttatctcctcacctgccagagtgggaaaaacttcataacatgcaggcttctgggtagagtac

SEQ ID NO: 18421 - DNA, 120 bp, Homo sapiens
ctgcgggagccaacttcatgtctgggtctacaggggctgacatggtgctgaggtggacctgaagcctaaatctgcatgtcaagcctgggttctgggtccatgggggctggcctggatcct

SEQ ID NO: 18422 - DNA, 120 bp, Homo sapiens
ggccggtgtggagcctggattctctaggcccagcccagtactgggatctactgggatgggcctggaccctgggtctgttggagcatggggctgcagggaccagcctgaagggtggggcca

SEQ ID NO: 18423 - DNA, 120 bp, Homo sapiens
tgtcggggcaggcctgcggcctagggctgtgtaggtcaacctggttctgggctgggctggaacctaaggtgggcctggagcctgggaccacatggcctggcctggcactgggtgggcctg

SEQ ID NO: 18424 - DNA, 120 bp, Homo sapiens
ggccgggggggccagccccatgctggggatggtctgggacccacggccacctgggctggcctggccctggaacaagcctggtacctgagtctatgggggctagcctggcactggggtggg

SEQ ID NO: 18425 - DNA, 120 bp, Homo sapiens
aaacggtctgggagcaccccctctctggactcttcccagccaggagcaaaacatctgcatgtgcacacacacacacacacacacacacatacactcacacacatgcatgcagaggtacaa

SEQ ID NO: 18426 - DNA, 120 bp, Homo sapiens
atacggacacaaccacacacacacactcacacacacacacacacgcccatgtgcgctgtctgctgggctattctgtgggggaaattggagagcatcctctgcagagggggaaataagcta

SEQ ID NO: 18427 - DNA, 120 bp, Homo sapiens
actcgcacttactgcgcaccttccctgtgtcaggcattttccacacattatttaatctgcatggcaaacgtgagggaagaattaggattcctattttgcagatgaagaaaaaaactccaa

SEQ ID NO: 18428 - DNA, 120 bp, Homo sapiens
gcccggaaggcttcctgggggaggaagcttgtggactgggtcttgcctggaaggagttggtagagatgaagagtgagggaaccttgtgtgccaaagcactaagatggggagaagcagtgt

SEQ ID NO: 18429 - DNA, 120 bp, Homo sapiens
gcccggaaccaggcagccagcaggggatgggatcaggatgcagttgtcatggaaacgaatgggggctgttgccatggatatcataagatgagggcaagaggaagctagggatggtgagga

SEQ ID NO: 18430 - DNA, 120 bp, Homo sapiens
gaacgggacggactggaagtagagacaagaaaacaagacgaggaaggtcattgcacctggatgggaccaggggctttgggttctggaaggagcagactgggccaggagactggacccagt

SEQ ID NO: 18431 - DNA, 120 bp, Homo sapiens
acacgggctttgggagcgcaagacctgagcttgaatcccagctttgctgctgtgcagccctaaaaataatagttgtcatttattgagttgtcattttgctaggctgagcaacactgcaag

SEQ ID NO: 18432 - DNA, 120 bp, Homo sapiens
gcccgtgctcttaccaccaccccaccctctgtcccaggcactataagcagtcccttcaaggtacagtcctcgcattcttcatctccccgtgccttcccacagtggcacacaaaggatcgc

SEQ ID NO: 18433 - DNA, 120 bp, Homo sapiens
gaacgaggaagcaacccgggaggaagcaggaaggactgaggttagatggaagaagctcctgacctcaagagcgatgactcatggatgtggctagccaagggtggcagaagatgcacagag

SEQ ID NO: 18434 - DNA, 120 bp, Homo sapiens
ggacggactaggctttatgaaccatccaatcccacagacccaaatggaggcccagagagtcaaagtgacttgcccagggttgcacaggacaagaatccccctcacctctggccagcatcc

SEQ ID NO: 18435 - DNA, 120 bp, Homo sapiens
ccccgacttgcttgatctgggtgagctcatcttcatcttgcagtaccctgggcaggttggtccttctgggaagtcaatgctgactcactcctgccgctcacggaacatgacagggtcagt

SEQ ID NO: 18436 - DNA, 120 bp, Homo sapiens
gtccgtctcccaccccacacccccgtcctgtttcccaagggcagcggcccggtgtgattcacctttgcggacctatggcactcatgccagtactaagcacacagcagttactcagcagcc

SEQ ID NO: 18437 - DNA, 120 bp, Homo sapiens
cctcgaagaccacaggtagaaatcacgtgtgtctgtgtgtgtgtgaccatcctgcctgacaactgtcaccctaaaggccacagcctcacgtgcttaaaagccacccacacccagccttgt

SEQ ID NO: 18438 - DNA, 120 bp, Homo sapiens
gagcgcttctagaagagacaatcattcaaggacggaaagggggaacaccaaaaaaggaaggtgcggttaggcacaggtattgtagcacagatcagctgggtactacaatgacagagagag

SEQ ID NO: 18439 - DNA, 120 bp, Homo sapiens
gggcggaagggggagcagctagcacagcctgctgttgcagaagcctcagctcagcctccaagcccccccgagtgcttggggcccatctctggcccacttgctcccaccgcctggacaaag

SEQ ID NO: 18440 - DNA, 120 bp, Homo sapiens
tcccggcaaagcccagcttacagcagacggagagcctctcaagccacagagagggcacccagagaggtggaggggctggcccaggggtccagagggaggcaggggcagggctgggatcag

SEQ ID NO: 18441 - DNA, 120 bp, Homo sapiens
gtccggttcctcggctgagggctcgcttgactccatggtctaggcagcagaggttgaggaaaggggtgctctggaggccaatggaggaatgcttatgataagggctggggccagaagcaa

SEQ ID NO: 18442 - DNA, 120 bp, Homo sapiens
tctcgaggcagtccactgcaccaccagaatgccaggttggaaagttcttcctaatctatctcaaatgttcccactgtttcgggttctgctcactgaagccacacataatgagtccgctcc

SEQ ID NO: 18443 - DNA, 120 bp, Homo sapiens
gctcgaccataccccatgcagtcttcctctgcccccggcccaccatgaccctccctgaatggaccttggtctacctctgtccctcttccagtgtggcgccccaaggcacacagtcggtcc

SEQ ID NO: 18444 - DNA, 120 bp, Homo sapiens
tcccggactgagctcgcagcagccctgcctgggcaggaaagcccatttcctttgcccccagactcctcaggggcagtccacactaaaattcagcttagggtgtgctgcagtggagcccag

SEQ ID NO: 18445 - DNA, 120 bp, Homo sapiens
agccgagccctcaagctacagctgctgctcctggggcccagccatctcaacccagcaccccagcctgctgcctcaccacgggggagttgcagagagctgtctcccggcagatttcctgag

SEQ ID NO: 18446 - DNA, 120 bp, Homo sapiens
attcgctacaggacttcagacttgctctgtagtgtggctggattaaacatagaaccatcaaatctgagctggaggggtacttcaagatcatccaaggcagaccttgccatttaaaaagat

SEQ ID NO: 18447 - DNA, 120 bp, Homo sapiens
atacgggggaactgatggcctaagagagaaagagactcagtcaaggtcacaaagccaatctgcagcagagctggaaggggaactcaggtctcccaactcccagctcagtgttccttcgaa

SEQ ID NO: 18448 - DNA, 120 bp, Homo sapiens
atacggcagaaaagaaataagggagcctttagggcagccttgggagtctgcacgcccttgactctctcagcctgatacatgtaacccaatcagctcaccatggtatctacacagaaaaag

SEQ ID NO: 18449 - DNA, 120 bp, Homo sapiens
aaccgatccagcagaggggcaatctagacttcccttcccggtagggctctttaaatgggtgttgtttttcttgaagggtggagagggggtggactttgaggaactagccaagggcttggc

SEQ ID NO: 18450 - DNA, 120 bp, Homo sapiens
ccccggccagaatgtgctgcagttcccttcagagggatgtctcagcctccagcagccattctggtccccacctgcctctttggtaagggatggagctgaggcggccagaggagaaaagat

SEQ ID NO: 18451 - DNA, 120 bp, Homo sapiens
aggcgggggtggggggctttctctcccctggggctctgagtagacaccctcgccgaccataaaaattccaaccagcatacccaaaataaataaataaatgaaaacctatcttctggcaag

SEQ ID NO: 18452 - DNA, 120 bp, Homo sapiens
aggcgggggaggcggcgatgactgctctagtccctcgctggccgcggtaccgggaaagaagagacgcctgcactcatctggccaacccagcctggggtggccagggaaggggtgtcggct

SEQ ID NO: 18453 - DNA, 120 bp, Homo sapiens
tggcgggttgggacaggagaggaagacacggaaccagacactggcttcttactctatcagctggacaagttggagagggatctagagggaagagccgggggtacaaacacacattcctta

SEQ ID NO: 18454 - DNA, 120 bp, Homo sapiens
ggtcgtggccgggctggtgctggtactggtgctgtggcctccgccggcgccgggactggagctcctggatgcgccacggctcagctggccccgctcccgcggtggccgcggccccacgcc

SEQ ID NO: 18455 - DNA, 120 bp, Homo sapiens
caccgccgccgaatagcccgcttccttctcgcggcccgggtgcgccggcccggcctcccgcccgccacgctcgcgacccagggctgggttctcgtggtgcaggtggcactgggccacgtc

SEQ ID NO: 18456 - DNA, 120 bp, Homo sapiens
tcacgctcgcgggctgtgtaaccggtagtgtcctggagcgggtaggaggcgtcccgctccttgtcccgatacacagcctcccgattctggtaggcgccttcccggttcgggtagcccacg

SEQ ID NO: 18457 - DNA, 120 bp, Homo sapiens
tcccgggccgcctggtggaactggctctcccgcagctcgcggtggtggaactgggtctcgcgcaggttctggtactggctctcgcggcccgggctatcccgcgcgccgtgggggtcccgg

SEQ ID NO: 18458 - DNA, 120 bp, Homo sapiens
ctacggcctgagatactacccctatcccctgcctccctcctgttgtaccaagcagagttcagaaactgccgccgtaacccaagaacaaagttgcatgcagagccaacctaagagcttcaa

SEQ ID NO: 18459 - DNA, 120 bp, Homo sapiens
aatcgggattccttactgagaaaggtattttgtgtgaacccccaggagtcagggtccctaagccagcgctctccacctccacctacctctgcctccatgcctctcccccatcccattccc

SEQ ID NO: 18460 - DNA, 120 bp, Homo sapiens
acacggtatgtctaggaaactaagaaaatatagaatggttggaacaggggtggccagaggtgagcaccaggtaagtctggagagagtttgggatcagattgtgaagggcgctgtctgcca

SEQ ID NO: 18461 - DNA, 120 bp, Homo sapiens
actcggtagggtgggcaaatacacctttgggcatataacagagtcagcttctgttttcagaatcgtgtctctggcagcaatatggcagatggagtccggagagtgttatggtaaaggaac

SEQ ID NO: 18462 - DNA, 120 bp, Homo sapiens
tgacgtagaactcaaaggatccgatgaccaagtaaatgtgggaagtgacaggagagtgaagaattgaggactccacagcttctggcttgaaactgatgaaagacaccattcatagaaaaa

SEQ ID NO: 18463 - DNA, 120 bp, Homo sapiens
ggtcgagggtagagacagagcaataggaatcatcagaatttaattaatacttaaagccacaataatggatgagattgctcaggaaacaaaagcagaagaatatgactaggacagaagcct

SEQ ID NO: 18464 - DNA, 120 bp, Homo sapiens
tggcgtctgaggcttaggagcttaggtttttgctcctcaacacagactttgacgttggggttgggggctactctcttgattgctgactccctccagcgggaccaatagtgttttcctacc

SEQ ID NO: 18465 - DNA, 120 bp, Homo sapiens
ggacgggctgtagaagtaatagtggttaccattcatgtagttgtgagtatcatgattattgtttcctgtaatgtggcttggcattggcaaagtgctttttgattgttcttgatcacatat

SEQ ID NO: 18466 - DNA, 120 bp, Homo sapiens
aggcggatgcagtgaagctctggctcagtcgcttgcttttcgtggtgtgctgccaggaagaaactttgctgatgggactcaaggtgtcaccttggacaagaagcaactgtgtctgtctga

SEQ ID NO: 18467 - DNA, 120 bp, Homo sapiens
attcgtatttcccccttaggttctagccttctggatcccagccagtgacctagatcttagcctcaggccctgtcactgagctgaaggtagtagctgatccacagaagttcagtaaacaag

SEQ ID NO: 18468 - DNA, 120 bp, Homo sapiens
gtccgactttccctcttacatctagccttactgtagccacactccttgattgctctctcacatcacatgcttctcttcatcagttgtaagcctctcattcttctcccaagccagactcaa

SEQ ID NO: 18469 - DNA, 120 bp, Homo sapiens
aatcgtattttcttatttacaacagactgagagaattaatgctgttaacattggatcttttttcttttttttttttccttttttttctctctcgtttgctttccaggtcatgctgacctg

SEQ ID NO: 18470 - DNA, 120 bp, Homo sapiens
attcgaaagcatttccaggctctgcaatttcatatgagcaggtttttggtaaaatcttttgtccctcactcagggtggtatctggacagtgagcccctttcttctggctcagtagtcaga

SEQ ID NO: 18471 - DNA, 120 bp, Homo sapiens
ctccgtgcagcctgtaagcaaacgatggagggtgctttatcagggagaacagcctgatagagccaatgataatatgcttctctagagtctggcaccacctgttgggaggtgcttccattc

SEQ ID NO: 18472 - DNA, 120 bp, Homo sapiens
acacgggtcacagtgtcccagctggatattgtgaaaggggtggaggagttgagaacagagcagttgggactcagggaagggacttgcagcagatgaattctctaggcagacaaaacagac

SEQ ID NO: 18473 - DNA, 120 bp, Homo sapiens
gtgcggaggcttgggtgagagcacaagctggagaagtcttgagtcagagagcttacaatggtataagacatctcttgggagccctcagtgactccatggagaccatttctttctctctct

SEQ ID NO: 18474 - DNA, 120 bp, Homo sapiens
tctcgctgtctctctctaacacacacacacacacacacgacctcatgggggaggaccaaggaagtacggggaagggggaggaaacaaaaggctgaaagaccaaaaatcagaggttgggga

SEQ ID NO: 18475 - DNA, 120 bp, Homo sapiens
ttgcgagagagctgcatcagttcacttttgacctgctaatcaagtcacacatggtgagcgtggactttccggaaatgatggcagagatcatctctgtgcaagtgcccaagatcctttctg

SEQ ID NO: 18476 - DNA, 120 bp, Homo sapiens
tgtcgttctctctacctggaatatcccccctctccctacatctacaaaatgtctatctatccttggagatgcacataacgttacatctccttcagggagaccagagcccactgtgctcat

SEQ ID NO: 18477 - DNA, 120 bp, Homo sapiens
ttccgtttacttatctgcctctcctactaaatgataaacaacttccaagtgtgtgtgcctgccacacagcaggtactaatgaattatttgtaaaggaattgagctccctagtgctgtttc

SEQ ID NO: 18478 - DNA, 120 bp, Homo sapiens
ttccgccttttttaagccaagtaaattcatcttgattcacaatattaaatcttctggccaggaagcaccactgtgggacacaagtgcccctttcacctgcctatctcagtgcctgtcacc

SEQ ID NO: 18479 - DNA, 120 bp, Homo sapiens
tcccgctgtctgttactgccagccacaccatggcaagaagttgaccagaatcttaacaaaaagtgccatttcttgagagcctctcatgtgacatgcattttacctgtgttcatcctaatc

SEQ ID NO: 18480 - DNA, 120 bp, Homo sapiens
tctcggttcttttctggtagcttatataccagggagtgaatagctcctaggcggtaatccaggttgtcagactctgggatagaacagtaagagataaatggtttggctttctgggcaact

SEQ ID NO: 18481 - DNA, 120 bp, Homo sapiens
attcggagaaagacacccagagacacacacagagagagagataatcaatgagatgaaaagagacagagagataaataggcactgaaatacaataaaaattagagacccagaaacaaagac

SEQ ID NO: 18482 - DNA, 120 bp, Homo sapiens
agacgcattatgatgttaagtcccctgaatctttttcctctacaccacacaggatatgatgcagaataagggtcacattgaggtggagaggggcactcatacagtggcctcagccaaaac

SEQ ID NO: 18483 - DNA, 120 bp, Homo sapiens
aatcgccaacttttgggagtgattctctatgccttatttcctatgtactgacgccctctccctcagttttctcatctagaaaatgtgatgctggcactaacagattaaggacaatggttc

SEQ ID NO: 18484 - DNA, 120 bp, Homo sapiens
agtcgaaaagcatttgaacaggcaaaatgctgaaggaagttgaaacggcaactgtcgtgtaaccatttttctgtcccctggtaatgtgagccaatgttcttgttctgatggaagaggcaa

SEQ ID NO: 18485 - DNA, 120 bp, Homo sapiens
cttcgtcagggaatccaagttgctagtaattcaacaaaagacctgcaaaagcatgggctgagccctctagcaaggtctccaactagctcccagaagtaaaaagaggcacaaaccagtcct

SEQ ID NO: 18486 - DNA, 120 bp, Homo sapiens
ttacgatttgatagatccttagaatttccgaagtgcttttgcaattgtcctcccaataatcctgtgaggtggagcagttattcaaatccccatttacgggaggaggaaactcaggctcaa

SEQ ID NO: 18487 - DNA, 120 bp, Homo sapiens
tggcgggagggcaagcctgcaatgagtcatgatcacaacactgcactccagcctgggtgacaaagcatagaaagaataggtgaggagactgttttgaaaaatattaaagaaagaactcct

SEQ ID NO: 18488 - DNA, 120 bp, Homo sapiens
tgacgaaaccacaagaacagatgccacttctccaggggagctggcaaactggcagtcaaacagctacatgaggtcttccgatatttcttctttgtccagcacagtgtataaaagtgaaat

SEQ ID NO: 18489 - DNA, 120 bp, Homo sapiens
ccacgaccctccaccccatcttccctccctcaaaaatgtgtgccaattcatttgttcttttatgtgatattaggagatttaacaaagaatgagctttgttatcctttccttcttgcaaga

SEQ ID NO: 18490 - DNA, 120 bp, Homo sapiens
caacgtgggatgacggaggaaaataaaagacctacccaggctaagcatctggcacgtggggacattgccaattcacagcggcacagcttacctttcattagtttctatgtcaaaacagaa

SEQ ID NO: 18491 - DNA, 120 bp, Homo sapiens
tgtcgatagactccgtcttccttctcacacagtacttcagtgttaagtccaagggcccctgatatgaaacaagaattaacaggcaatttttaaaaaaagacacagaagctgtttctgctt

SEQ ID NO: 18492 - DNA, 120 bp, Homo sapiens
aggcgtctggtcaaggcagcaggagcaatgtgtagactcactgagaatcttgtcccttcaaacagtatttgcagcaagatggcagatggtttctccccgctccaagaatcaatggctgag

SEQ ID NO: 18493 - DNA, 120 bp, Homo sapiens
agacggaagacttaataggaagctcaatacatatcatgtaaggggagtgtaggagaaatgggctgactgaatggcattaagtgtacagaataaaattttcatgaggcctctggggaggga

SEQ ID NO: 18494 - DNA, 120 bp, Homo sapiens
tgacggggtaagtggctgtctaaaacctcccttagaaagtcagagggtagctgagcaaagaagcttccattaaagtggcagatgaaggagggagaaaaacatttctgtctcccaactcta

SEQ ID NO: 18495 - DNA, 120 bp, Homo sapiens
tcacgctactgcactccactcatctcaaaattttaaaagaataaattgccaattattgtggaaagatgcagagcaagatgtcgaaatagaaggctccaccgattgtccccctccactgca

SEQ ID NO: 18496 - DNA, 120 bp, Homo sapiens
tatcgccgaaaggacactgaggagatagataaaacagtccagaattgcagacaccaccaccctgccaactcctggcagcagcagcatgtttcagagaacatctctggctgctggaggagg

SEQ ID NO: 18497 - DNA, 120 bp, Homo sapiens
cctcgagaacaccatgtccaggcagccagagccaataagcatctgtcctagccagaggaagttagcacaaattgccaaagttttaaaacattggctctggatcagcaaatctcccctctg

SEQ ID NO: 18498 - DNA, 120 bp, Homo sapiens
cctcgcctcttcccacttggaaggagatgtgagcttatataacctcctccacccacttgcaccagtccccgaggatcccagcatgcggaacaggcagggctgtgagctctgagtgaatac

SEQ ID NO: 18499 - DNA, 120 bp, Homo sapiens
gaacgcttcttgtcagcaggacatggtactttggcatgtaacaaactaaggcctttcttcacaagggcactccagcaaaggtttcctaaattcttgctggggtgtcaagagaaaaaataa

SEQ ID NO: 18500 - DNA, 120 bp, Homo sapiens
taacgagcataatgaatgagaactctaaaaactataatgtcagattcaccttcaacactatatacaaaattcagattcatgactatttttaaggtaaggataaatgtggaaaaaggagat

SEQ ID NO: 18501 - DNA, 120 bp, Homo sapiens
ctccgccccaagggaaattgcctcattgctcttttcctatgttagacagaaatggcaaggccaaattgtcttacagactgctaaggaatcagtcatacagataaatcaatcaagccaagg

SEQ ID NO: 18502 - DNA, 120 bp, Homo sapiens
tcacggaaatagaactaatgtttcaatgccaagcatggttttatgcactatctcattgaatcctcacaataaccctgtgaggctgatataattattgttcacattttagagttgaaaaca

SEQ ID NO: 18503 - DNA, 120 bp, Homo sapiens
ccacgtggctaaaggcgtggactctggaatcacataacctgggttcaagtaccagctctgctcctttctagtgcttgactgtgccaaagttatgtcacctccctgtgccttaggtttttg

SEQ ID NO: 18504 - DNA, 120 bp, Homo sapiens
gttcgtgtttggtatttgcgtttattttaatctgtaaaacagaaataagtaagactccctgtctcatagttttgaggattaaatgaattagtacctgtagacttcttagaagaatatctg

SEQ ID NO: 18505 - DNA, 120 bp, Homo sapiens
ttacggattactgtcacatagcttaattctttagcaccttggccacttgatcttccctgctaatgcactctggtagccattgaaacccaaacatggaaattcaaattatttggatctatc

SEQ ID NO: 18506 - DNA, 120 bp, Homo sapiens
atacgttttcagtctcatctacctccagaacaggtccttttcttaaagttctttctgtgataactgtacatggatgagaaacatcattaagactgacaatcccatgtcctgtcatcaatg

SEQ ID NO: 18507 - DNA, 120 bp, Homo sapiens
ctgcgggatgaaagacccattataaacagagctggactaagacttgcttgtcctcccttaatcttgggtcagagaagtcggtggggggaggcggggaagttgcatgattataggaaggcg

SEQ ID NO: 18508 - DNA, 120 bp, Homo sapiens
tatcgttggctccagaaattaactcttacattaacccaatataagatatgtcaaaattcatggactcgcagccaaagaacttgggttcaaatcctggattgtccacttctttttgccact

SEQ ID NO: 18509 - DNA, 120 bp, Homo sapiens
aatcgcccagctgacccgtctgaatgcctaacccaaaaaataattacaaataattagttttagtttaagccagtaatctgcaacctttttggcaccagggagcagaatcatggaagacaa

SEQ ID NO: 18510 - DNA, 120 bp, Homo sapiens
atacgattgaaaagttgttgggacaaaagggcacaacataattaaagacagaagaaaatgagtcagtcatgtggcaaagtatcagcaggaagggtgagaaaaacaacatctcaaaagatg

SEQ ID NO: 18511 - DNA, 120 bp, Homo sapiens
tcacggtcagatcaatgacacatggcctcccacttgtccctgttagacataaactattcagggtaagtcctagagctgatcgtcagggggaggaactcttcagaatcctcaggctttctc

SEQ ID NO: 18512 - DNA, 120 bp, Homo sapiens
agacgggccaacatttcaatagaatcttttgagaagatggctttgggaaaaaaatagcttttctgatttttctggacacaatttatgataactccatccaaacccactactaatcaaagc

SEQ ID NO: 18513 - DNA, 120 bp, Homo sapiens
aggcgcaccttggcagcagtctccaagaatatagcgtagagttccagaaatataaaaatcctgaatctgcactaatagtgtttgccagtggcctcactgggccagtatccaaactctagg

SEQ ID NO: 18514 - DNA, 120 bp, Homo sapiens
atccgtatttggctctgatgaagccgttatttgccctgccacccaccagctgacttctcttagccaatctatctgcaactgttattaaacttcgcagacctacacagcccttgctaaggg

SEQ ID NO: 18515 - DNA, 120 bp, Homo sapiens
ggtcggtttattttataaaccaaagaaggaaggagaggggagaggaacaacaccttgttgccatctaacatttggaaagggtgggatagaagaaaaccctaggtaaactgtagcgacttg

SEQ ID NO: 18516 - DNA, 120 bp, Homo sapiens
agtcgtgatgattccactttctaagtatatcctaaatccctacgcgtttctcaccatctccaccaccaccactttagttcaagccaccattctcttactcagattaatgtaatagcctcc

SEQ ID NO: 18517 - DNA, 120 bp, Homo sapiens
ctccgagaaaaacaaacataggcacatactcacacgttaaaagataaaattgggggagaggttttcacagagaggtgtaatctgaggtgtacaggagtatctgaagtaaagactgaacat

SEQ ID NO: 18518 - DNA, 120 bp, Homo sapiens
agccgccaaatgtccctgtgtgttaaataggaaaagcagcacagctgccaaatgtttcaagtctacagactccagcaagacacttgattcaggaatctacagttttgggagtttgtcttg

SEQ ID NO: 18519 - DNA, 120 bp, Homo sapiens
aaccggtgtcaaatgcctttaagtggaatagaatattgagatgatctctaggaaggaaaaaggcagcaaataagtttaaactcagagaggagacacaactcctggcaggaagctttccta

SEQ ID NO: 18520 - DNA, 120 bp, Homo sapiens
aagcgtgttttctttttgaaggtgttgatgttgaaatgatagctgctttcaatttgcagaaatctaagcagggggtcagtgttcagcaactaaatcaaagagcaattgtgcctttcgact

SEQ ID NO: 18521 - DNA, 120 bp, Homo sapiens
aaacgtccctatcatagacctactgctgtagagactcacagagccgtgccaattggctgcttcctcaaatgtgccttgtgtacgatcctaggctcaagagaacaaggcaaaagggcaatg

SEQ ID NO: 18522 - DNA, 120 bp, Homo sapiens
gcacgagatgtactgcttgatggggagggcatttcttgagcaaaggaaacagttgtaccatctagactcagaaaaatgctaaaagtgaagtgccacagtcatgtctgaggagcgctggag

SEQ ID NO: 18523 - DNA, 120 bp, Homo sapiens
taccgctgcgtaactttgtatatatgtaagtcattcagcttctttatctgcacaataggcttaatgataacaactctacctatttcagagaattggtatgggatgccaaaatggtgcagc

SEQ ID NO: 18524 - DNA, 120 bp, Homo sapiens
ccacggaatagtgcacagcgaaaaccacttaagctattagagaccgtttttggaaaggcaagcctctagactcccagctttattctggatattgagattattagaaatctgaccttcaaa

SEQ ID NO: 18525 - DNA, 120 bp, Homo sapiens
aatcgacatttcctctaggcatacagcacttaattagaaagaactttcatttccatgatctcacttgattctcagaataatcttgtgaggggaacagggtaggtgttcttgatcccattt

SEQ ID NO: 18526 - DNA, 120 bp, Homo sapiens
ttgcgtggttagcaaagatttaagactagaatcctaattctataaaccctaggccagtgctttctgctgggccacactgactctcatgaacacacaggagcatctgtcagtaccctatct

SEQ ID NO: 18527 - DNA, 120 bp, Homo sapiens
ccacgtctgtcttggctgatttaggtggctaggaagcagaggagttgactccatgacctctcaagactctttctaatattgtaattctgattctctttgccctacttacacatgggaacc

SEQ ID NO: 18528 - DNA, 120 bp, Homo sapiens
ccccgaggaggatacatgacagggttttacagagactgagctgtgtgcaaagatggtattaggaggagaggctcaaggagcaggagagggctgagtgcaaagccaggccagctgggacag

SEQ ID NO: 18529 - DNA, 120 bp, Homo sapiens
agacgcagacttcccaaacgcaccctacaaggcataaccattgacctccttctataatacatcataatatagtaaaaaattttccacctctaggagccagaagatctgggtttgaatccc

SEQ ID NO: 18530 - DNA, 120 bp, Homo sapiens
tgccgggggagtggggacatttagctgtgggtctctgggcttatggggagatgccctttgatgtgggcagtgaattggtccagcatcagatctgcccaggcattctccttcctactgggc

SEQ ID NO: 18531 - DNA, 120 bp, Homo sapiens
gaccgcaaagggatgtagtctacttcccagtcctatctacctcgtcctagcttggccagaagaaatgagagatagaggaggcactcttaaaagtcatccttgtgtatgtatctgaggcca

SEQ ID NO: 18532 - DNA, 120 bp, Homo sapiens
aggcgtgagtcaccgcacccagccatcctaactcttcaattggcccttcttgcctatgctgtgagatacttggcacaatccaaactaatggcctgggtaaatgtgctgtggtggtcgttt

SEQ ID NO: 18533 - DNA, 120 bp, Homo sapiens
tcacgcagataatgggtgtggaggagggggacagtacagatgacactgcagggtacctactttctggggaacagagaagacagtgtcctcagctcttgcgttggcatcctataaaagcag

SEQ ID NO: 18534 - DNA, 120 bp, Homo sapiens
acacgggttttctttcaagaggaagatgactcagccctcccagcttctgcagtctagcttaggagaggtgtttgaaaaggagactcagttccctcttgtttatagggtggttagtggagg

SEQ ID NO: 18535 - DNA, 120 bp, Homo sapiens
tttcgtgggagatgacagaagactaccaataatctatttgtatactgcttaatgaggagtcatctcaccctcacaacataagctcctgaaactgggagagcacagattaaatcccccaag

SEQ ID NO: 18536 - DNA, 120 bp, Homo sapiens
ttccgctctcttccagtggctgccagcctgcctctagcaatggcctatttcctgtttttgaaactccaccctgagtttattcccaaatgggccaggttggagttacctcttggtccaagt

SEQ ID NO: 18537 - DNA, 120 bp, Homo sapiens
gtccgttgaagattgggccttccaggaggcccagctcagttaaacagcttcacacatcctgatatctaacaggcaaaccagacaaggtgggtttgaattctggctttaaaaattgcaggc

SEQ ID NO: 18538 - DNA, 120 bp, Homo sapiens
tgccgttacacactgatttgtcctttccactcttgttcctctcaacacccctgtgagaaagggcaaggggagaaatgagctgacttcaaacccaagaagttggagttagagtcctgagtc

SEQ ID NO: 18539 - DNA, 120 bp, Homo sapiens
aaccgcctctctgtgtcacccaaaccccagaaagtcctcctccgctgaccctgcgcctgcagtttgctcattagcacaacaggagcatagccacctgtctctgttgggcacgctacagca

SEQ ID NO: 18540 - DNA, 120 bp, Homo sapiens
gcacggttcgtttctgtccatcacaaggaggcgtgggttctagtcccagctctgtcactgtcttagcccctctgagatggcagccaatatctgccctacttacctcacaggccagggtgg

SEQ ID NO: 18541 - DNA, 120 bp, Homo sapiens
acacgacacaagagtgacgagtaagagcagcaggctgttggtaagctggagggacggaggaggggatgctttttttttttaattttggtaatagagaaggggtctccctgtgttgcccag

SEQ ID NO: 18542 - DNA, 120 bp, Homo sapiens
ctccgatgctttctcaatcagtcttctagatctcaccaccagccaagaggtttgtgacatgcttttcttcatgtgctgaaatgaccagcaaaaaaaaagaactatgcacagtgaaaactg

SEQ ID NO: 18543 - DNA, 120 bp, Homo sapiens
tgtcgatgaggaaattgaggtttagagaagagatttcccaaagatcactaagctctaagtggttgagctgggcctggattccaggttggcctgaggacatatgaaggtaggaaatacatc

SEQ ID NO: 18544 - DNA, 120 bp, Homo sapiens
cctcgcatcactcaacccgcagtggaacatttctgcccccaatgccaagcccacctactttccctttccctgtccagccttacttagctggtctttgttcaagtaaatcttttattttta

SEQ ID NO: 18545 - DNA, 120 bp, Homo sapiens
aatcgcttacttagccagccccagattttgaacatttggaatgattccaggtttttactgttagtttctttattcattaacaaagcaaattaccttatttgcttgtgtatgcaaaaagag

SEQ ID NO: 18546 - DNA, 120 bp, Homo sapiens
ggccgctgttccctggggccttgcctgccatgagaagtgatccagtcactactgcttccaggggattttaaacgtcccctgttctgccctaccctccatctccacaggcccctcgtccca

SEQ ID NO: 18547 - DNA, 120 bp, Homo sapiens
ttacgtatctaggcctccagatacgtaaagagatttgtgaggaaatcagctccacttatcgctttccagccttctcttcttctactcccctccaccaacctgagactcctatcaaactaa

SEQ ID NO: 18548 - DNA, 120 bp, Homo sapiens
ccccgtgtgccaaagcaaacctctggtcttttgtgtatgctgggccactgtaggaaatgtcatcctccccacttctcaacctgttagagcacattgcaaatactccctccccacagctga

SEQ ID NO: 18549 - DNA, 120 bp, Homo sapiens
gagcggagacctgatctgtaaggggcgttggagctcttgatactgtggatctcgtctggcctgggcactctaagcccctccatatctctgctttccctgagcagagccaagcctgcctct

SEQ ID NO: 18550 - DNA, 120 bp, Homo sapiens
tcccgtgcaaattctgagcagatacgctctgatacatctcaccttctatgtggtcaagcagccccaagaagcagctggagaaccccagctagcccaaggggaagaaaagaaagaggagga

SEQ ID NO: 18551 - DNA, 120 bp, Homo sapiens
tgtcgcatgtcagatgaccatctagtgcacacgggggagtgaaagcacaccctgacataccagaaaagttccccaagctcagctctgaagagtcacattggtcagtctaatgcgggaagc

SEQ ID NO: 18552 - DNA, 120 bp, Homo sapiens
aagcgttactgaaaagaaggtaacctttgttggatgtgggccttagcctccaggtccagactactactctatgttctccagaagggtgctaagtcacctactgaagagagaaccaactga

SEQ ID NO: 18553 - DNA, 120 bp, Homo sapiens
gcccgtctactgtttgggaagatccttctgtgctagagggagaaataaaatttcaacctgtgttcctcagcccctgaggaagctattaaggggattcattacaagtacctgagcctccct

SEQ ID NO: 18554 - DNA, 120 bp, Homo sapiens
aatcgcgttagcaaggccagtggcctgacctccactgtagaacctgcctggcttccagatttgggaggaagaaaccgcatttactaaccatctccatgttcttgctacagttttatttgt

SEQ ID NO: 18555 - DNA, 120 bp, Homo sapiens
gaacgcagagctaccatccaagcttcactctagccaactctctagagtgccagcagcagccacttctaatgccctgcagcctaatttcttagtgtaggaggggcgttgcaccacactgct

SEQ ID NO: 18556 - DNA, 120 bp, Homo sapiens
cggaggggatgccaggtaggagtggagggctaggagcaagagcatccgggactcagggagggagtctcgcccctgagactgggagcaagaaaggaagagtcttgcgtggggctttgggct

SEQ ID NO: 18557 - DNA, 120 bp, Homo sapiens
ctccgaggaaagatgcttgtaacaagtgaaggcggtgggccgggaacgtgccctgggagttgggcggatgacactgtgaccttttacagagggcttccttagatgtggttagttttattc

SEQ ID NO: 18558 - DNA, 120 bp, Homo sapiens
gaccgtgaaagacccataaacgcgctgaaaaggtgatactatgcccttgggataggccaactggagtcgactccctcccctccggggggccttctttgtattctcagtgagcagtccttg

SEQ ID NO: 18559 - DNA, 120 bp, Homo sapiens
gggcgaatgggcggggctggtcatgcaaataaaggcgtttgattggctggggccaaccgaggcccaggtgccgaggtgagccgcgggaaggcgcgccctagcctgcgggccagtggagtg

SEQ ID NO: 18560 - DNA, 120 bp, Homo sapiens
ggccggctgagggcggcctccagccgcatgccccgccccctgacccaggaggagggcggcaggcgcccctccttccccccatcgcgcgcctcaggcgtctcctcctcctccctccttccc

SEQ ID NO: 18561 - DNA, 120 bp, Homo sapiens
tcccgcgcgccccgctttgtgtccgtggtctcccgcgcgggacggagggactggccggagctggcgctttctcagcactagatctggactccgacccggcgccaggtgaggtggggcgga

SEQ ID NO: 18562 - DNA, 120 bp, Homo sapiens
ggacgggggtcaggccccctcgcagtcccccctaacctctctacggctctgttctcagcctcttttccaacactgcgtgccccaattctgccctctccctcgaatgccttcgttgcgtgc

SEQ ID NO: 18563 - DNA, 120 bp, Homo sapiens
gatcggagaactgtgtgaagggacagcttagggactagcgtcctgggactagggggaagttcgcgactttctgaagactggcaggaatgtgcctcctggccctcgatgcttcccccctga

SEQ ID NO: 18564 - DNA, 120 bp, Homo sapiens
catcgtgagggactgtggcaggcttcactgaacgctgagccggggaggtccaactccacgtatggatccggggaatgagaattcagccacagaggctgccgcgatcatagacctagatcc

SEQ ID NO: 18565 - DNA, 120 bp, Homo sapiens
tcccgacttcgaaccccagagccgtccccgctcctgcacctggccccttccccgaccagagatcgctaaccagccgtccgagccgcccgaggtggagccagatctgggggaaaaggtaca

SEQ ID NO: 18566 - DNA, 120 bp, Homo sapiens
acacggaggggcgctcagagccgatcctgttgccctctcggctcccagagccggccgggggcccccagcccggaatcctgggggctgtaacaggtcctcggaagggaggctcccgccgga

SEQ ID NO: 18567 - DNA, 120 bp, Homo sapiens
aggcgtgagccactgtgcctggccgaggtttgacttctttaaagatctgttctctctgtttttctgtaattgatgcatggagaataatctttgggaaaatgaggctgtcttttaagtagt

SEQ ID NO: 18568 - DNA, 120 bp, Homo sapiens
aagcggccagccatctcacctgcctacagcaacgagaatgcccaggggtcctggaacggggaccaggatgcagggccactcctggtggagaaccctcgtgactactccactgaattaagt

SEQ ID NO: 18569 - DNA, 120 bp, Homo sapiens
catcgccgtgggggcctccctcctgttccttaacgttctggccttcgctgccctctactaccgtaaggacaaacggcgccaggagcccctgcggcagcctagccctcagcggggagccgg

SEQ ID NO: 18570 - DNA, 120 bp, Homo sapiens
ccccggagttgggagctgctccagaggaggagctggcagcattacaactgggccccacccaccacgagtgtgaggccggtcccccccatgacacgctgcgcctcactgcattgcccgact

SEQ ID NO: 18571 - DNA, 120 bp, Homo sapiens
ctgcggcgctccccggatgacatcccactcatgacccccaacaccatcactatgatccccaactccctggtagggctgcagacattgcacccctataacacctttgccgcagggttcaac

SEQ ID NO: 18572 - DNA, 120 bp, Homo sapiens
taccgggctgccccactcacactccactacccgggtatagctccaactcagagcacagccaatctccaggctccctccctcccagatccaggaacacatgcacacacacacacacacaca

SEQ ID NO: 18573 - DNA, 120 bp, Homo sapiens
aggcgtgagcaacggcgcccagcctttttttttttttttttttaatggttagcctttgctttctacagacactatctgcagaagcacagggagcctgctgtagaaagacttctgtctcag

SEQ ID NO: 18574 - DNA, 120 bp, Homo sapiens
taccgctttggaacggtgtgaccttgaggagttacttatctgagcttcagcttcttcatctggaaaatgggataacaggcttcctaaatgggtcgaaagaaaaaatgtatggaacaacgc

SEQ ID NO: 18575 - DNA, 120 bp, Homo sapiens
ttccggagaggatctaagcctcagggaaaatcctggtgaccttaagcttctgacggggccatgggggagggcctcagcccagagcctctgggtcccctggggtcccctcttcacatccac

SEQ ID NO: 18576 - DNA, 120 bp, Homo sapiens
ccccgcccccccgtggccattcttctggtggggctatggggcgggtgcggcgatggaccgggcgggcacagaacaggtgggtgcaggctgggtgtccggcgctgggacacaagtgctctg

SEQ ID NO: 18577 - DNA, 120 bp, Homo sapiens
gggcggaagtcagggcgtttgatctgaattctaaagggcgttgttcagagccccacaaaggtctcattgtgcagacactgggtataaagcagcatatgactccccagcaccgggcggtga

SEQ ID NO: 18578 - DNA, 120 bp, Homo sapiens
ggacgcaggcgcggagcccagggaccactccccctgcacagacatgagaccataggggacctgtctgggtggcctcagggataggcgctccccaaggtaagagggctttgttgagtttgc

SEQ ID NO: 18579 - DNA, 120 bp, Homo sapiens
tatcggaacaagatgggcttggcaaagaaaggggctggcgggaaaagaatgttggatgaaagcgaagaagggggatggggctcagggaggtcaagtcaagtgagtgaggaggaggagaag

SEQ ID NO: 18580 - DNA, 120 bp, Homo sapiens
tgacgaggaaagacatgaccatccttcctttcctgctactggctcttggaagagttgagggggggtgcgcaggcagtgctatggcgcccgactttccaccccagctttctgacagcttgc

SEQ ID NO: 18581 - DNA, 120 bp, Homo sapiens
tggcgtgaaccggcattctactgccattggccgagtatggctctcggtcatcttcatcttcagaatcatggtgctggtggtggctgcagagagtgtgtggggtgatgagaaatcttcctt

SEQ ID NO: 18582 - DNA, 120 bp, Homo sapiens
cagcgtttgctatgaccaattcttccccatctcccatgtgcggctgtggtccctgcagctcatcctagtttccaccccagctctcctcgtggccatgcacgtggctcaccagcaacacat

SEQ ID NO: 18583 - DNA, 120 bp, Homo sapiens
ctacggcttgagggccatggggaccccctacacctggaggaggtgaagaggcacaaggtccacatctcagggacactgtggtggacctatgtcatcagcgtggtgttccggctgttgttt

SEQ ID NO: 18584 - DNA, 120 bp, Homo sapiens
ggccgtcttcatgtatgtcttttatctgctctaccctggctatgccatggtgcggctggtcaagtgcgacgtctacccctgccccaacacagtggactgcttcgtgtcccgccccaccga

SEQ ID NO: 18585 - DNA, 120 bp, Homo sapiens
aaccgtcttcaccgtcttcatgctagctgcctctggcatctgcatcatcctcaatgtggccgaggtggtgtacctcatcatccgggcctgtgcccgccgagcccagcgccgctccaatcc

SEQ ID NO: 18586 - DNA, 120 bp, Homo sapiens
tcccgcaagggctcgggcttcggccaccgcctctcacctgaatacaagcagaatgagatcaacaagctgctgagtgagcaggatggctccctgaaagacatactgcgccgcagccctggc

SEQ ID NO: 18587 - DNA, 120 bp, Homo sapiens
caccggggctgggctggctgaaaagagcgaccgctgctcggcctgctgatgccacataccaggcaacctcccatcccacccccgaccctgccctgggcgagcccctccttctcccctgcc

SEQ ID NO: 18588 - DNA, 120 bp, Homo sapiens
tgccggtgcacaggcctctgcctgctggggattactcgatcaaaaccttccttccctggctacttcccttcctcccggggccttccttttgaggagctggaggggtggggagctagaggc

SEQ ID NO: 18589 - DNA, 120 bp, Homo sapiens
ctccgacagcgtctccaattatgaaactaatcttaaccctgtgctgtcagataccctgtttctggagtcacatcagtgaggagggatgtgggtaagaggagcagagggcaggggtgctgt

SEQ ID NO: 18590 - DNA, 120 bp, Homo sapiens
taacggggttaagtggtgtgttattaattctagacgcagtgtggtggcctaagaatgggttctggagtcagaccagatttctaatatcagttctgcctactttttagccaggtgactttg

SEQ ID NO: 18591 - DNA, 120 bp, Homo sapiens
aggcgtgaaccactgtgcctggcagtctgttgtatttgaaggtgttattgcagatagcaccttgcagtgacagcacatgttctttgacatggtgactcactagagttgcctatacctggc

SEQ ID NO: 18592 - DNA, 120 bp, Homo sapiens
taacggctataaccctgagttgttttaaacaggtctgtttctgaatctataggttgttgaattgttgcttgtgctttgattgtggatgcacagaatggagagctgctggcatcctggcca

SEQ ID NO: 18593 - DNA, 120 bp, Homo sapiens
tttcgattcttctctgttctgctttctgttgtatatttcgattcttctctgttctgctttttgttaaggttgctgtgcaaatgtcacatttaaatatgtgagtgcttattgtgcatacaa

SEQ ID NO: 18594 - DNA, 120 bp, Homo sapiens
cctcgagtgggtgcttatgacctaagcattctgtaggaaggtaaatagcaagtagacttccttggctgaagtggtgagtcaagtagtaacaagaagtgaatgtagtagaggagagtcaat

SEQ ID NO: 18595 - DNA, 120 bp, Homo sapiens
tatcgacctgattttacttcatatgtatgtacgtgtctagatgttgtggctggtgggggtgggaggctctaggaggaaaggcaggaaactgatgcaatcttaggagaaatagttctacag

SEQ ID NO: 18596 - DNA, 120 bp, Homo sapiens
tcacgattttcccttgtatacagtgccctcctcctttgtctattaaaaccctactcatccttcaaggcccagcttaaacttctcttatgagctcatcatctagttctcttaaaattcttt

SEQ ID NO: 18597 - DNA, 120 bp, Homo sapiens
gcccgtgcgttttctagaaattagctgttcatgcacataggtttggatccccaaacaggagaattggatttcaccgttacatttaatatgatgttttagcttttcctaaaactgccttat

SEQ ID NO: 18598 - DNA, 120 bp, Homo sapiens
gcgccagcccgatgcccggcagagggcgctgcagtgcggctgcggggccaccggcccgcgctgctctggctgccaaaggccggcgctgcctttggctcagagggaaagatcggggcccag

SEQ ID NO: 18599 - DNA, 120 bp, Homo sapiens
gtgcgtgaggaatgaatgtttctgcagtgccagaggtggctctgtttttgatccagaaacgaaatggacttcaagattcagacactgggcagagtgatggggccgacacggcccctactg

SEQ ID NO: 18600 - DNA, 120 bp, Homo sapiens
gatcgccccaagcttttgagcagggatgtcctgtccgaggctggtgtcgtccccactctcgccagagaggatctgtgataggatgagtctcgcctttccaaaatgaatctgcctaaggac

SEQ ID NO: 18601 - DNA, 120 bp, Homo sapiens
atgcgatttgtttcctgggtccttgtccttccaaacaaagagaaacaaattggaacaagatatgttttcagtgtttgaaagccagtgattctcttgtgctttgtgcaccaggaaataggc

SEQ ID NO: 18602 - DNA, 120 bp, Homo sapiens
tggcggaagtgtaggtaggtgaagaggtagggaagatcggcagggttctcctgatgccacgaagagcaagctggatgaccccaagtctcatcctttagctgttgggccttgggaaagccc

SEQ ID NO: 18603 - DNA, 120 bp, Homo sapiens
ctccgcagttgactttacagcctctttgaatacacttctgcttatttttgtggtaatttcctttctttctctcataggttgccagtcatcctttgcctgcttgtaaagcacttccttttt

SEQ ID NO: 18604 - DNA, 120 bp, Homo sapiens
caacgggaggagaaaggtgccatggccccagaaccttgctctgaattgtcagctggaaaagaacagtgcctgggtgcagtcactcttccttgagcctaagatcatagcttttcttctggg

SEQ ID NO: 18605 - DNA, 120 bp, Homo sapiens
gaacgtattttgcgtgttaattatacctataggacctattcggtcttctattgaaattcgtggtttactctctcttctccagcagtccacaggcacccagctgcagagttctcccgaagg

SEQ ID NO: 18606 - DNA, 120 bp, Homo sapiens
ggacgacctgtgtgtgcctcctccagggcacgtctgtggccaaccgggcgctcaggagcctgtggggtggagtccttctccgtcctctttggccctccctctgacactctccgcaacctt

SEQ ID NO: 18607 - DNA, 120 bp, Homo sapiens
tgtcgctgtttcccgtgtctctgtcgccattccctcggtggccggtgcgcaggggataccaacgcagccgttgcctggggactgggccttgtgcggggccggtgctgcgggctgagagcg

SEQ ID NO: 18608 - DNA, 120 bp, Homo sapiens
aggcgggcagccccaacagtgcgaggaccggctggaaaggttgaaggagactcagattgccaacggggcggctactcttgctgcaaagggaacgaggacccgggctctcccggcctcaca

SEQ ID NO: 18609 - DNA, 120 bp, Homo sapiens
gcacggcctgagctgcagactgcctggagcagcttccgccgatggccgggacacggcctgcccctccccacagcggcgcttctgtccacagcagccgcccagcgcaggctcccccaaggt

SEQ ID NO: 18610 - DNA, 120 bp, Homo sapiens
ccccggcaacccccactacaatgcagcgctgtggcctgcggcggaggcaggaggcccggtggcgggtgttctctctggcctgagctctcagatggcgcccattttgatgtgcttgtcatt

SEQ ID NO: 18611 - DNA, 120 bp, Homo sapiens
agccgagatactttcctcaacgagacaaaaacacaagcgatgcttgccttccctccactcggagggccaggaggggttcagcgttctcacctctatcgctgagattggacactaataagg

SEQ ID NO: 18612 - DNA, 120 bp, Homo sapiens
aaacgtgatagccacatacacacaaagaacccgagagatcataaataaaaaaccaaaactcaaaagcaaccgctcaaataaaatctgcccaatatccccgaaactgctgaccacttttat

SEQ ID NO: 18613 - DNA, 120 bp, Homo sapiens
atgcggagtgtttctcatgactagcaaagggagggcttagggacgatgattcagaaattggcctgagccaaatgtgggtgtcagtctctggtgatatttgatgcgcctcaagtaaccaca

SEQ ID NO: 18614 - DNA, 120 bp, Homo sapiens
agccgagctgtgctatttgcaactcccccagggccaactgctgtgaaaagaacagtttattacaaaaaataaaacaaaatgccagctcatctttacagtttcacggtctgccttggggaa

SEQ ID NO: 18615 - DNA, 120 bp, Homo sapiens
gcccgttttggaaagatctggaaaattctctactgtgctgttgactcactgtctgaccatgggcctgccatttaacttggccagccactgcttctctgtttgggaaatggagagaatggc

SEQ ID NO: 18616 - DNA, 120 bp, Homo sapiens
gaccgggtgatctttcaagttccttccattttccaattctgtgagtccacagcatcaccagaagggaaacatggcctcctcaaccctttctctagtttgatcagaaccaaatatgaacct

SEQ ID NO: 18617 - DNA, 120 bp, Homo sapiens
tgccgcagaatggacacctcttttcataatcaactgggaaataggaatgaattctctagtgctcggatgcaagaaccatcaaccctcacaattctttgtttttcccagtcatattcattc

SEQ ID NO: 18618 - DNA, 120 bp, Homo sapiens
attcggaacactgtgtttctagctcgtggtggctttaatctttgtaataagacttctgctaaatgaagtgctgttcagcattggcacagagggctgtttgggtgaacccatagggcaccc

SEQ ID NO: 18619 - DNA, 120 bp, Homo sapiens
gctcgtgccattgctccgtgtggtcaccgtagttccctttccatgcatggtatgtcctttcatctgtgtgattgaaaattggctgctcccaggcaggaagaaggaagacaagagaaacct

SEQ ID NO: 18620 - DNA, 120 bp, Homo sapiens
aggcgctgtctttttatttaggaacaggagtattctccaggggccttgctggtatctatgaccaggacagtgctgtgtggtcgcccctggtgatatgggaagctggataggtatgttgat

SEQ ID NO: 18621 - DNA, 120 bp, Homo sapiens
gctcggaggggtaagtgacttgcctggtgtccagcagcccagagcaggaaggacatcacttagcttctgtttatggcttctccgctactcagctcccctagagtggagcctttgtctcag

SEQ ID NO: 18622 - DNA, 120 bp, Homo sapiens
gctcggcagggcacagtgctgctcccctttctcagtggcagctctgtaaacaccgattgatgaattaattggcaacagtgataatgactgctctcaagtacctacaacaaaagttgttgt

SEQ ID NO: 18623 - DNA, 120 bp, Homo sapiens
cagcggatattagtgaccgaggaagcaggcgccagtttagctctagacaccacactgagattcacacaattagaagtttacagtcaactgttggatgatacagtccattaatctttctaa

SEQ ID NO: 18624 - DNA, 120 bp, Homo sapiens
agccgggagaacatgttcaagggcagcactgccattggcatgcatacttgaggaactattttggcatcttaaatgtgaaatggaagttaggcagtttctccggaaagtcagtccttgctt

SEQ ID NO: 18625 - DNA, 120 bp, Homo sapiens
acacgataaagcatgagcatgttttaatgccaccctcttccttcccatgacccagtggagaagaaaatggagaatgtgtatgtatttaaagaaaaatgtaaagtatttctcaccatacag

SEQ ID NO: 18626 - DNA, 120 bp, Homo sapiens
gtccgacaagctaatgcaataaggccaataataaaaggttgtgtattaggcctaaagcctgtgacagataaaaagaaatgttggaaaccaatgaagcttttgcacaattagattttttga

SEQ ID NO: 18627 - DNA, 120 bp, Homo sapiens
ccccgcatattaaaaggtaaggtgttctactgaacaatctccccctgtcactgaggaaagacacaaacaatgtctatttgagagatatgcagataccttgcagcatactaattagttctc

SEQ ID NO: 18628 - DNA, 120 bp, Homo sapiens
atccggctggctaacgacccttcatgtgagcttgttccttcagagctcttggctacaggattgcaaacaacatcctaaaacgtggagctgcaaaccttggtgatttaaatgctcgctgcc

SEQ ID NO: 18629 - DNA, 120 bp, Homo sapiens
ttgcggtgacataaatttggcccatgtgttttgcatcatgtgaatacgaaacagggggatgccatggagccgagttttgtttgcactggactctggaggtttggtggactattttcagag

SEQ ID NO: 18630 - DNA, 120 bp, Homo sapiens
gatcgtgctgataataatgacatcctaagatgaaagcattttatctttttgccacccgaagccttggataaaaattcaacagtaaaacgaaaacagggctcactatacagtatatgaaat

SEQ ID NO: 18631 - DNA, 120 bp, Homo sapiens
tcacgtcctgcctgttgtgatgacaagagccccggcctggcatcaggcaggaggcctgaagctttggcctcttggtcaaggtgcttgtcctctcaagacttggaatgtgtgtgcgggggt

SEQ ID NO: 18632 - DNA, 120 bp, Homo sapiens
tttcgtgtttgcaacagtattttagctctggagctatttatctggtagcatctttgagaaaaaggaaatggacagatgtccataaacaaagggctccacctggtggtaaagaggaggtat

SEQ ID NO: 18633 - DNA, 120 bp, Homo sapiens
caacgcgtgtgcgtgtgtgtatgtctcctaaaatgaatatgtttgaaggaaagagaatgacaaaatcctccaaatttggattccagtgtggatataggcttacagctaacattatttgat

SEQ ID NO: 18634 - DNA, 120 bp, Homo sapiens
ttccgactcgagggcatcctttaggtggctttgtggctcacctagttaggaagacctgaaaaggatgtggtgcagagctccggggagggaagcaagggtttcaaatccatgactaagaaa

SEQ ID NO: 18635 - DNA, 120 bp, Homo sapiens
ctgcgtattgtgattcttccaccttttcaaactctaaaattaggccaggaattacatatatcaaatactatgcaaaatgtaaaacaggcatgccgtttatggctctctacgtaaggtgga

SEQ ID NO: 18636 - DNA, 120 bp, Homo sapiens
aaacgtattcttttttgctttatcacctatgtagagaccacgaaaacaggctaattcctcatctcttctttctcagaacacaacatgttttgatatgggaaattttaaaattctatcttt

SEQ ID NO: 18637 - DNA, 120 bp, Homo sapiens
ccacgccatggcccagccagcgctgacttctggcatttgtaaagtgtctgtaatagaaatgaaagcctacccagggtgaggaatagaaagcaatgaatactaatgttgcttcttcttacc

SEQ ID NO: 18638 - DNA, 120 bp, Homo sapiens
aggcgaacaagacaggaagctgtctgtgcctctctgtctcggccgtcctcccttggctctgccaagccaccctctagtggactgaggggggaatttcctttcctggctgcctcactcggc

SEQ ID NO: 18639 - DNA, 120 bp, Homo sapiens
gcacgatacagcgagatgaatgttaatcatgaagggatttctcatcaagtttaatggtgtaagacatagagaagttgtgttagcagtttcaatcctgctaaaaatgctaattgttatgtt

SEQ ID NO: 18640 - DNA, 120 bp, Homo sapiens
cagcgtttccatttggaagttgttgcccataattttgaggcaaatatagaggaaaagattacggtccttagtatgaatgacttgtgaagaggctaatttagggctgcttctttggagaca

SEQ ID NO: 18641 - DNA, 120 bp, Homo sapiens
ccacgagattcctaaaacctgggtcttatgctacagtgcactcctagagtgcaaacaaaggtaatgatttagaaaatctctcggtgatgtggatgagaatgagtgttagagcaatcccta

SEQ ID NO: 18642 - DNA, 120 bp, Homo sapiens
ttgcgcacgacctcaaatgtggtgaattctagataacacctaatatttattcatgccattgtcaagagcatctttgcagttcttgccaaggtctgtcgtcgaatatgtttatccagctgc

SEQ ID NO: 18643 - DNA, 120 bp, Homo sapiens
aaacgtaatacacagtcatcattttactcagtcacctactcaatattttcttctataattaagttaactcataaatatcacacttttaatgcgagagagccatggttcatccagccagtt

SEQ ID NO: 18644 - DNA, 120 bp, Homo sapiens
tgccgggcactcagtcatttcattatggagtttgaaataatgaaaatcattgcatttacttaacatgcacagtaaacagaccaggatccttccaagagctcctttattatgcagtgcaag

SEQ ID NO: 18645 - DNA, 120 bp, Homo sapiens
gctcgatttgcagctggcacaatttctggctcaagcaagtagagttgcaaataaatacacagatcttgatcttgcttatacccgattcactaccagctgtgcccatgacccctctaggct

SEQ ID NO: 18646 - DNA, 120 bp, Homo sapiens
aaacgcagtctggttttttaaagcaacctacggcaggtcttacacattcatctccatagtataaagattaaagcttgaggacaagaatctgcctttgccctccaatgccagccctagtga

SEQ ID NO: 18647 - DNA, 120 bp, Homo sapiens
ccacgtggttacccagccctagagacaagggacatattccataggatcatagtgaaatcaccttctgaatggagtatttatagctggcactgccgggcagttatcttgtctagaattata

SEQ ID NO: 18648 - DNA, 120 bp, Homo sapiens
gtgcgttttactttatatgcacccactgaaattagccaaaattaatccatatttgaacaaagactatggatacaaatgagccctaacttccaagactactcagtgaagtacactagctga

SEQ ID NO: 18649 - DNA, 120 bp, Homo sapiens
aagcgtttcgaatgcattggccctgggaggcgaggaagttatagcaaacaacatatgggctctaaaatctggaactatccaagacagaacaagaaagctattttcactttccttgttcca

SEQ ID NO: 18650 - DNA, 120 bp, Homo sapiens
ttccgtgcacccacttctttgatgtgcattccagcccctaaatgtggaaacaatgactaaaattttggatcaaagcatcccatagatggcaagcaacacagctctctgataattcactag

SEQ ID NO: 18651 - DNA, 120 bp, Homo sapiens
aaacgactccagggttttagtaaaaggaaagaaactaaactggatagctctttggaagctcctggccatttctaactatagggaaagcaaaccattgttcaaattccttcaccacattat

SEQ ID NO: 18652 - DNA, 120 bp, Homo sapiens
tcacgtcagcctcacaaaatggcccagatttttttttaaatgaatctttaaaaggagagttaaaaggcccatgaattgaggattttttttttactaattgaaaaatcacagaactaccaa

SEQ ID NO: 18653 - DNA, 120 bp, Homo sapiens
atacgctcaaagcaggttaactgtatactaacttttcatcttaatcctctggagaaaaacatcagccctcacaagactaataacaaaaaaggattggacagtaaaatccaaggaagagta

SEQ ID NO: 18654 - DNA, 120 bp, Homo sapiens
tgtcgaaaatgtggcatggttaaccctctaacaaaaagtaccatctgtgggcactgcagtctggttatgcagatgtgccccagtacaaagcccaaggaagagaaaatgggttggcgttac

SEQ ID NO: 18655 - DNA, 120 bp, Homo sapiens
taacgggtctgaaagcagacagcatattttcttcaatagaaggagcactctgctacagaaggggacaatttgtaacatttataaatcattactgaacctctaatgcacctctaaatacct

SEQ ID NO: 18656 - DNA, 120 bp, Homo sapiens
aatcggtttctcccccacactccccatccagtaacgcctctcattaaaactcttttgaaatatgcaacactggctagcttgtcccacttgctaatggtcctgaattgattcttaattagt

SEQ ID NO: 18657 - DNA, 120 bp, Homo sapiens
gtacggtggggggagggaagcttctaggaagctaaataataggttattttcttacgctctttccaaaagcaaagtgttgctaccagcaaaattcccagttttgtttatgagggcagctgg

SEQ ID NO: 18658 - DNA, 120 bp, Homo sapiens
aagcgaggactcagaaaagcaaggtctcaggaagcccaggaaggagaaggactcgtgccactgctggtaggtgacagtcacgtgaccagcttttgtattcagcagtaataactcactgcc

SEQ ID NO: 18659 - DNA, 120 bp, Homo sapiens
gcccggtactgggatggagcccagcttggctatcccctgaggagcttccaccagacttggatgcacggagtctttgatctgcagattaacatgatcaggaacacaggctttgtcttttcc

SEQ ID NO: 18660 - DNA, 120 bp, Homo sapiens
agacgtttagagaccgacattcatttaattgcttgaaaagcccaaaccaaaccagagtcactggagcttagcccactgtttgttggctgtctgcagatttacaatttagcaccatgtgga

SEQ ID NO: 18661 - DNA, 120 bp, Homo sapiens
ttccgagccaaactgttagaaatctaaggggctcattctatgccacaaaatacaatgggcaagagcaggaaaagcttcaaagtccccagaaggcatcaaatccaattacattgcaacacg

SEQ ID NO: 18662 - DNA, 120 bp, Homo sapiens
aaacgaagaatgtcatcacttaaaaatacaagagagcagtacatgttgtatatgtctacaaactgcagttgctgtctgttagagtttgtagcaacttttaaatctgtcatcacagcatga

SEQ ID NO: 18663 - DNA, 120 bp, Homo sapiens
tcccggtgctcgagccaggaagcaaaaggggaacaggctgtgtcatttatgggcagacaggtattgggtcaagtgtgacatcacactctgctcaggccataatgaggtgaaaaagcgaga

SEQ ID NO: 18664 - DNA, 120 bp, Homo sapiens
caacgtggcagtttgtttactgggaaaatttaagtgggtctgtgtttggagttaatataaaactgaaacaaaggacatggatcacggaattttttttttttttttttgagacgggttatg

SEQ ID NO: 18665 - DNA, 120 bp, Homo sapiens
tcacgggttaaatttctttctcacacaaaagtctgagtggtggggctaggactgatacagtgattcatggtttgagggacccaaggtcctctgtcttgctgttcagctgtgcttggcatg

SEQ ID NO: 18666 - DNA, 120 bp, Homo sapiens
gcacgtcaaggaaggctcccagaagctctcttccacttggaaacctttggccagaacttggtcccatggctgcacctatagttgcaagggaaagggaatcaacgaagactgggtgaggcc

SEQ ID NO: 18667 - DNA, 120 bp, Homo sapiens
tgacgtagtaaatccttagcttcattgatttgggttgctatataaggagatccttctttgggcgatttaagatcatatttgttactgagcatctcttatttttcctttaatggcagtaag

SEQ ID NO: 18668 - DNA, 120 bp, Homo sapiens
caccgctgaaggcagattttggtagactttgaaaatcctgttttacttcaggctatatgtgcttcctgacttgcaaaacctgcagcagaaatggccagtccagctgccaccactgtactg

SEQ ID NO: 18669 - DNA, 120 bp, Homo sapiens
gaccgtggctgcagctcagcttctttcacctccatctggattggtacagccacctgccactaactacactcctttaccagaaagctaggcagccactgccagcagtcacaaaccccagag

SEQ ID NO: 18670 - DNA, 120 bp, Homo sapiens
tgacggaaaccaacagtcacctggtatcatttcacagtcttatgaacctcggaaacacattgtgtttactgtcatagtatacttttctctaagaaatcatctgtgaagcagctgaggttt

SEQ ID NO: 18671 - DNA, 120 bp, Homo sapiens
tggcgtggagtttggctgtatcagacgtgcaggataatgatgcaaatgaccatgcttacacaacccctctgcatgacttaggaacaatgcctacattatctttaagatacagaaaacaca

SEQ ID NO: 18672 - DNA, 120 bp, Homo sapiens
tatcggtgtgtcgtcagtcattttttgtattcccatgtaactgattaaatctatttgggaaaaagtgtcggccatcgtatcttagattctgtttcttaaaaaaaaaaaaaaaaaaaggaa

SEQ ID NO: 18673 - DNA, 120 bp, Homo sapiens
gaacgtttcacgtagaccagcgatgatgctgaaaaaaggctacagttgaatttggcttactgagtttcagagggatggcaggatcccagagtgacatggtctaggtagcacatttgcatg

SEQ ID NO: 18674 - DNA, 120 bp, Homo sapiens
agacggtatccaatttccagatatgaatgcgttctcagacacagttaaaggaaatctgagtaccctcgaggaagtgcctacttgagtctacctcctggaatacaaagggacttgtggcca

SEQ ID NO: 18675 - DNA, 120 bp, Homo sapiens
gtacggacaagaatatagctttaccttcttgccacaggattacatcaccttttggaccctgggtcaaaatgaagtcagcagaaagcttcttatttcctcatttcacatgatatcagatta

SEQ ID NO: 18676 - DNA, 120 bp, Homo sapiens
gagcgctcgagtgggaatttttcaagggtccagtggtatacagaacatgtttggctataattctaaagtgagagataaactgttgtacctgagctccttaccaatatgaagaggtactat

SEQ ID NO: 18677 - DNA, 120 bp, Homo sapiens
tttcgagtccccaacttctatcatttcattacaaaaaggagaaggaaacagggagcagatagggtttggctgctgttgtggaaacaggaacttcatgtcatatgaagtaagctctgggac

SEQ ID NO: 18678 - DNA, 120 bp, Homo sapiens
gaacggtaaggatggacatagatcagttagaggagatcagttagaggaggctgttgtaacacaataggcgagaaataatgaagaattaaactaagatgatggcaatgagaatagggagga

SEQ ID NO: 18679 - DNA, 120 bp, Homo sapiens
ttacgtcttggttttggatttttttcagttttttttttttttaaggctcttgtggtcttacgaaaaagagaagaaaaaataccatgttaactttcattcttccacactgctaacctcttt

SEQ ID NO: 18680 - DNA, 120 bp, Homo sapiens
ttacggaggttataaatgttcaggtcaaaagaatgattaagaacgccactaattgtttagtctacttgcttataatgtcacttacaaatgccattttaataaaaagcagtatattaacgt

SEQ ID NO: 18681 - DNA, 120 bp, Homo sapiens
tgccggaagctttggtagatattttccagaaggaatacagctgagttaacctcttgtaaatatttcccaagagggtatcctgaagcctgtaagagctgatacagagcaaaggttatttgc

SEQ ID NO: 18682 - DNA, 120 bp, Homo sapiens
catcgtttggcaaaattcgagcttattttggtagttatgttgaatgaaatatttaccctattttgagttcctagctaggaattctagtgatagtagtaataggagttttaattgactaag

SEQ ID NO: 18683 - DNA, 120 bp, Homo sapiens
aaacggtgtatggagtatttcatacagtggaataaactctcaagacctaacccagacatcattcctatttttctcccctttgtgtccccaaaggtcctgatcccaactccagcctggaag

SEQ ID NO: 18684 - DNA, 120 bp, Homo sapiens
gaacggagggtagccgagctggccatcttaatgtgcaggcttccccaagtgctgtgtctggcagccctccatgccagcgcaggaggaaaatctggttgaagggagagcagggaactttta

SEQ ID NO: 18685 - DNA, 120 bp, Homo sapiens
ccacgctgctattagctttgaatgttttttgtcagggtgcagtctgctgtgcatgagaccaagatgaaatgccattccaggtgactccgtgaccctatgtgagtatgtgtgtttaggcac

SEQ ID NO: 18686 - DNA, 120 bp, Homo sapiens
caccgtcacccagcgctggtccagtctatctgtgcactgcaggtacaaggaaaaaagaacgtgttagtactttaatccttttcagctggtccaagcccggtctcaggacaaatattaata

SEQ ID NO: 18687 - DNA, 120 bp, Homo sapiens
tttcgtggtgaaagtttgactgcaaaattctggttgctaaggaggaaaaacctcatctaagaaaacaaatgttgctgtggtgaaatgcgatttgaaagtctgtatttcctaggtgttaga

SEQ ID NO: 18688 - DNA, 120 bp, Homo sapiens
ttccgtggatgtgctcaaacacagtagtacatattgtcagctctgcaggaggcgtgctgtggccatatgtgtgttgcggagtgaaatggaataaacagctgctgccaggaatccaattcc

SEQ ID NO: 18689 - DNA, 120 bp, Homo sapiens
gcacgtactgcagagatcagccagggtcacctcagaactgcctggaggaagcagctttgatactgttcaattgttctcagacactgccacctttgttcaccctttgcagaaaaacaggct

SEQ ID NO: 18690 - DNA, 120 bp, Homo sapiens
gcccgctaccacgccttggggttttgtgctctttggttctagctgcagaatctagaagtataagctagtggttaaaacacaaatcctggaaccaaagtgccagttgttctatgcttacca

SEQ ID NO: 18691 - DNA, 120 bp, Homo sapiens
ttacgatagtggtgacatccctccttcctgtgtcaactgtaactcactgtcccatgatcccccaggaagatgcacaaaccaagaggcattttgccttttgcagtttaatcatggatcttt

SEQ ID NO: 18692 - DNA, 120 bp, Homo sapiens
tcacgattttaacaagatgttttgtgcagtggctaactggattcttacaaaagctgaaggctggatctcagactgcactgtgacaatacatccgctgtcagacagatccacaggctggtg

SEQ ID NO: 18693 - DNA, 120 bp, Homo sapiens
caccgaagccgttgtgtaattgtatggcgacagtgtggctagcggccctgcattgatgcgatccccctgtgtaattgcccatgcaaatttgagcaatctgtaacggacacaggaacccag

SEQ ID NO: 18694 - DNA, 120 bp, Homo sapiens
gtccgcagactctcctacctccagaaaaacttcgataatttgaagaaccttttgtcatctttaaaaagctatatggacaggcgtgtcctagtgtccctctcacacatgaaaacatcacag

SEQ ID NO: 18695 - DNA, 120 bp, Homo sapiens
tgtcgtgcctaagcctcctgctattttttacaccatgttaatactgatgcaaattgactagggtttcagtgcctggtagtcagggctctgggaatattgtgtcccccttacgccccccag

SEQ ID NO: 18696 - DNA, 120 bp, Homo sapiens
ccacggtttggtcacggctccaaggtcacaggctgtcattaacattgatctgaaaaacagaaccaaacaaaacagcctgaataatcttttgttgcattcctaaacaaacccgtcctagat

SEQ ID NO: 18697 - DNA, 120 bp, Homo sapiens
aaacgaggccagctcacatcttcctttcctcaacaaggggcagcactgtttatagtccctgtgttcagcatctccatcatgtggccacgctgcttaggaagacaaagctctcacacatcc

SEQ ID NO: 18698 - DNA, 120 bp, Homo sapiens
caccgctgagccaaccagtatacaatgattgtttccttaataatgtacattttcttgtttcctggagttaggatttctgtgaaacatctaagtcttctcacaccctacacaattctgcaa

SEQ ID NO: 18699 - DNA, 120 bp, Homo sapiens
gaacggtcacagcttgtttctagatccttcctgtcctggggactccttcctgcagcctgaccctggggtctggtctggattctctcctctgctgccagcagccctcggagcttcctccac

SEQ ID NO: 18700 - DNA, 120 bp, Homo sapiens
caccgtcattcagggggttcctccttcccctcctgtgtctggttccccacctcctgcagcccatgcctttctttttcctcatttactccctcattttacaggagcacatctgcaggggct

SEQ ID NO: 18701 - DNA, 120 bp, Homo sapiens
ttccggcccttgcgaggagttcttttatccctactctcagtgtttggaacaaacatcttcctttgctccctttcatcattcatgcgcttgtgtttggaacaaacatcttcctttgctccc

SEQ ID NO: 18702 - DNA, 120 bp, Homo sapiens
atgcgcttgtgtttggaacaaacatcttcctttgctcccttttgtcattcaagtgctcagttctaatgatctgattcaattcttaggcccaatggtctctgcaccatatatatgcaaatg

SEQ ID NO: 18703 - DNA, 120 bp, Homo sapiens
gcccggcctcactgaattcttgatgggaactctctgcagatctctggaaatctctctgtgaacatctcccttttcctttggactacagctgccttggtttttctgaactgtcagctcaag

SEQ ID NO: 18704 - DNA, 120 bp, Homo sapiens
gtgcggtgaagaggaaagagcttaccattggaagcccacctgagagggagagttactctagcaatgcagttgagtgagttggctagcagttttattgattcattgactgattcctttttg

SEQ ID NO: 18705 - DNA, 120 bp, Homo sapiens
caccgtgagccccagcctttctcagtttcacagatgagaaaatagaaatgtcaactgactgccaagctcctgcagtttgtaaattgtataatcagatttcaaacccagtttcctgtagct

SEQ ID NO: 18706 - DNA, 120 bp, Homo sapiens
cagcggccttcagttctctatggtgtggacaatggctgtaatggccttaaagaaacaagggagcctgtagttagccccagatgatgacagtgaggagtgatgggggagaaagaagtctta

SEQ ID NO: 18707 - DNA, 120 bp, Homo sapiens
tcccggcacgcccatggctacccatggaccaatcggcatgcactccctcccctctgaagtccataaaaaatctgagactcacccagacttgggcagatgatggaacaacccccctgagga

SEQ ID NO: 18708 - DNA, 120 bp, Homo sapiens
ggccggatcccatgctcacttgcccacacacttctcgctgctctgcacccggcttggcaggtgtgagacccaggctgttagtacaagccaagtgcaggctgctgggccaagtgggcagaa

SEQ ID NO: 18709 - DNA, 120 bp, Homo sapiens
ccacgggctaagcatatgacttaggtataccacttgatataacacaaatcatttctaatcactgtcataaggaaatgtttttcttgctccaaagatatcttactccacagataaaatatt

SEQ ID NO: 18710 - DNA, 120 bp, Homo sapiens
acacgagcacctttccactatgcagctagcatatgtcagcttggggaagcagtcttacactcactgcccatcactttgcacagcaaactcacagacacaggggccacagtttggttgaat

SEQ ID NO: 18711 - DNA, 120 bp, Homo sapiens
ttacgtcttctccatgaagtgggtagcatgtggattggcttctttctaagtacaactccttttcttcatgaagccatcaccttatctgtacctgagcccagtaccctgtcagttctgtcc

SEQ ID NO: 18712 - DNA, 120 bp, Homo sapiens
tcccgagcaacttttccactctcatgaataatggttaaccaaaaaaaaaaaaacaaaaaaaaactcttcctatagcacaagttttcagtgacaaatgaacaaaagcatcaccgagcactc

SEQ ID NO: 18713 - DNA, 120 bp, Homo sapiens
catcggtggtttcatccaaccataaagtgaaatatctgctagcgtgcacttgatagtaatcgctcttccacactccactccactgatattatgccacagccaaccatgttatttgacaaa

SEQ ID NO: 18714 - DNA, 120 bp, Homo sapiens
ctgcgacccctctgtatgaaaagctgagacccaaaccaaacactggagacacaagggagtacagaaaacaaaagccctcctattatcctcatggccctgagagcttggaaactaagagaa

SEQ ID NO: 18715 - DNA, 120 bp, Homo sapiens
ccacggcagatgcttagtaacttaagaataaaactattttattcactatgtgtgtaaatagatgacaagcaattatctcattctcctatcttccttcctcctatttcattttttcttata

SEQ ID NO: 18716 - DNA, 120 bp, Homo sapiens
tgtcggaagaggggtgatgaaaaaaattcaggattccttaatatctagggtgaccagataattatcacccaaaccaggacacttttacatgtgaaagggggtgcttttgataattaagat

SEQ ID NO: 18717 - DNA, 120 bp, Homo sapiens
tctcgtcacctttctaatctctcattcatatcctgatacaaaaggcatcctgtgtgtaatgaagcaacctctgcctctgttaaatcaatcaaacttcaaacatagtcctccctctttcag

SEQ ID NO: 18718 - DNA, 120 bp, Homo sapiens
aggcgagaagcctctggtttctcttaaaggaacacttcacaacagagaaagccacctggttagaggttacacagataccaaccatatagacttaacaagcattttgaatgcaagatcatt

SEQ ID NO: 18719 - DNA, 120 bp, Homo sapiens
aaacgccaaagcatctgtcctcaactacaggtaacaaccttggtttctttgcctttggctgaaatcagtgttgcaaaagccttttaaaagagtaagaaaatataggtttttctcccaaga

SEQ ID NO: 18720 - DNA, 120 bp, Homo sapiens
aggcgcagaaaagctccagctggtttatctcaaatgttcagaatgattttgatttctttaccgacaccacagccattcataaagattcattgccaaatgttgcccaataccgtgatagag

SEQ ID NO: 18721 - DNA, 120 bp, Homo sapiens
aggcgatggtgaagcgaatgtcttagactgggaaatcatcatggtgcccaaacctcagagtctgcggccaaatggtggggatttggaaatcacctgtcacggagatggtgaaggaaactg

SEQ ID NO: 18722 - DNA, 120 bp, Homo sapiens
agacggtttgagtccaaggggccatttatatacaagagctaagaaaggtgcaactgattttcccccagaagcagcacgattatttttaagttcaaagacatttttgttaataaactgctt

SEQ ID NO: 18723 - DNA, 120 bp, Homo sapiens
catcgaagccaaaatgtgccaatgaaataatcaaaacaaatagctcaattgggactttttgaatgttcaacaaaaagaaaaattaaagctggttagactgctggatagtaacgttacagt

SEQ ID NO: 18724 - DNA, 120 bp, Homo sapiens
ccacgctatataaacaatccccgcaggaatcttctgatgaccaaacagattagcaaactccagattttcacgccattaataatatccccatccagattaggccttttattttaataactc

SEQ ID NO: 18725 - DNA, 120 bp, Homo sapiens
cctcgagggaataggagaaatagtaaaaagaaaatcatatttataagacaaacacatggagagctctactaattacactaaaatattcttcttctaaatgacaaactatagaacactact

SEQ ID NO: 18726 - DNA, 120 bp, Homo sapiens
tcccgttcaggctgccaaaggttatgtttgtcagcccagttaattccctgatgcaggcttgtatgaagctcaactggtaacagcagcagttgacagagtacattggcaaccccttccagg

SEQ ID NO: 18727 - DNA, 120 bp, Homo sapiens
acacgctctatatgatttcaattcttttatgttttttgaattttgttttatggttcaagatattgcttatctttgtgaatgttcatgggcacttgaactaaatatgtattctcatgttgc

SEQ ID NO: 18728 - DNA, 120 bp, Homo sapiens
ctgcggcctcagtgccaactgggctgccttcctgctctgctcaggcttccctagtgggtttgtgactgagagggagggagggatggagggaggaaagaaggaaggaaggaaggaaggaag

SEQ ID NO: 18729 - DNA, 120 bp, Homo sapiens
acccgccttccatgacaccctcgccattctccatgatcaccagcccaccaagtccatgtctgaacagctaagacatctgatataagcttccttttagggggttcagggttttgattagtc

SEQ ID NO: 18730 - DNA, 120 bp, Homo sapiens
ctacgaaaggagaggaggagaaaatatgtgtatctttgtagaagcagcaagagaagtcaattctagccttaggatgatgaggaagggagctcatgaggacagagagtggagaaacaaatc

SEQ ID NO: 18731 - DNA, 120 bp, Homo sapiens
tggcgcctcaggacaagggctgagaaagtgagtcaaggggaagcaggagctgactaatctccaagaggctaaggccagctgatagctggaaaatagaaacttttttaaaaggcagtggac

SEQ ID NO: 18732 - DNA, 120 bp, Homo sapiens
atgcgtaaacgtgaactagaggtttagtttaaggcactggctaaaagtaaataacaaatcatagagcttacactattcttttctttaactgaagaagaacaaatgccatcaacagcatta

SEQ ID NO: 18733 - DNA, 120 bp, Homo sapiens
ttacgtcagtaaggaccacagtaaaatcagtttgggtgtgcaaaaatcaataggcatctctggcctcagtaacaggaagctgtgggctaaatgctgtggcatgaaatgaatgcggttttg

SEQ ID NO: 18734 - DNA, 120 bp, Homo sapiens
cagcgaggctaacaacaacagtaataatacttctctacccatttcaccaggtgctaaggagaattaagtgaataggaaagtgctttgtaaattgcaaggcactagaaaaacattagcagt

SEQ ID NO: 18735 - DNA, 120 bp, Homo sapiens
taccgcattctgaaaatttttagttttatgcagatccaaatttggctttcaatattaaaactctttcaaggagaaaaatgatcccacgcatgctgaacctcatacagtgacccacacccg

SEQ ID NO: 18736 - DNA, 120 bp, Homo sapiens
taacgacaccagcattgttcgcgtgtagcttcagagtcccttgagaaatttcaaggtgattagaaatgtaggcaatggcttctttcagtcagtgtttaagtcctccattcctccatttct

SEQ ID NO: 18737 - DNA, 120 bp, Homo sapiens
agacgcaagaagcatttcatcagtgtcatctcttgctgccagcttcctcatcctcttcctctgaacactttcaagagtcttgtttacatgtcagagggagatgtcagatggttttggcta

SEQ ID NO: 18738 - DNA, 120 bp, Homo sapiens
attcgaccagttcccaaacagaagctagagtcaggagggaaataaagccagaccctggactggcagttgtaagaaagtgaaatttccaagggctgaattcttcgccaagaccttgtcttc

SEQ ID NO: 18739 - DNA, 120 bp, Homo sapiens
ggccgaattatttgtccaacatggtaatcattagcacctcattcattattaaattaggaaacagtttggttggattccctaaaggctcagctgccagacacaagctcagagataaaatca

SEQ ID NO: 18740 - DNA, 120 bp, Homo sapiens
tcacgtggaaacgttcaccataagcaagagtcagcagactgaagaaccagcaagaatttgagatcacagaagaatgagatggagaacagggatgacatttaaaataacttaagacacaaa

SEQ ID NO: 18741 - DNA, 120 bp, Homo sapiens
ggccgacagagtgagactctgtcaaaaaaaaaaaaaaaaaaaaaaggtacaaccaagattcctcttcaaaatctcttaggttattttgtttcctaaatgaaacctttgacaaatgtgtac

SEQ ID NO: 18742 - DNA, 120 bp, Homo sapiens
tcccgtggctgggcatgtggaagaaactgaaaaaatacttgttaactgcatgactgtcttccagccaaagtgatgatctttgtcatctggtttcatgcaaaacatgcagattttcccctt

SEQ ID NO: 18743 - DNA, 120 bp, Homo sapiens
agccgccctgtcacaagttcaacaaccttgtggctgccttgctgaactgaagccctggccacatggaaaggccacatagaagtgttcaggctgacagccagcatcagccaccggacatgt

SEQ ID NO: 18744 - DNA, 120 bp, Homo sapiens
ctgcgaagcaactctttagttctgtctcctctctcagaaatgaattgctccttctcctcctctagctcttccccttcttctccctattgctcaggctgggaactcaggactcatttttag

SEQ ID NO: 18745 - DNA, 120 bp, Homo sapiens
taccgtaatccatgtgagtggcgccccctagagctcatgagtacatggcgtcatggccactgcaaacaccctacttcaggcacatcatttctgccctgaccccaactatggtcttcctgc

SEQ ID NO: 18746 - DNA, 120 bp, Homo sapiens
cctcgctcagctctgatgaccggcccctttcttgtctcctctccaacttccttttctaccaccttccccctccttcactctccttcagccacactggccttaattttcttctgggaagtt

SEQ ID NO: 18747 - DNA, 120 bp, Homo sapiens
ggccgtgaagccacatctttgaagcctgctcagtgctgcctggagttcataaatcattctttacagggtataggtcagggcttccaaactacagccccacatcctgggcaggggtccaac

SEQ ID NO: 18748 - DNA, 120 bp, Homo sapiens
gggcgtggatgagagtggatggggagtgtgacaatattgtcaggcatgtgctgagagatgggcacctaccctcaagacaaaaagcaccattctcagatctgtgaaaaaaccatcagcttt

SEQ ID NO: 18749 - DNA, 120 bp, Homo sapiens
ccccggcccctaatcagcgagccagaaacagtgtcaacgtttaaagtgcaggccactgctcttcccagaacactggggcccttggcttcgcaaccatggcatttactttccagatgcatg

SEQ ID NO: 18750 - DNA, 120 bp, Homo sapiens
aaacggtgacctgcaggccggatttggcccacggatgtgttttctttggcctgcacattgttaggtcatcttttggaaccgacatttaacaatttagagatttcctgtattttctcttaa

SEQ ID NO: 18751 - DNA, 120 bp, Homo sapiens
actcgtgatcactgtgcacttctatcatttatgggacctgagtgtgccaccgccattccctgcagcctccttactcccagtggtttctgattcaggtcttgtttagaaggtgcccaagtc

SEQ ID NO: 18752 - DNA, 120 bp, Homo sapiens
gcccgtgttcttgttggtaggtacagatacagatatatgagattatcgttatttattatcagaaaatgggattttactatttcccacacacacactttttttgagatgggggtcttgcta

SEQ ID NO: 18753 - DNA, 120 bp, Homo sapiens
aagcgatcctcccacccaagtatctgtaatccaagtagtctggattacagatgcataccaccatgcctggcttatttccctctcttacaatttgcaaaaataatgatgtactgaggacat

SEQ ID NO: 18754 - DNA, 120 bp, Homo sapiens
ggtcgatagctacaggattaaatcatttctcttaataactatatataatactattccattgtatggatatgccataacatattcaattattccccttcgaatgggcatttgggttgtttc

SEQ ID NO: 18755 - DNA, 120 bp, Homo sapiens
actcgccagactctgcttaaagatataaaaaattcccaagcttggctgctgcagaacatcacactaacactaatttaaaatgcactacttccagacagcacgagcttgaaattacctcca

SEQ ID NO: 18756 - DNA, 120 bp, Homo sapiens
caacgcttgctgtgcccttcaaacaacagtagtcatttaagctgctcctgcccatctggaaaataatatgaataacatgaaagaaagcaataatgaagtgactggaatttagcaaccaaa

SEQ ID NO: 18757 - DNA, 120 bp, Homo sapiens
aagcggtctataaagtaagtctgtttaatgtagacaatgttatttttggcatatcatcttccaaccagttttctggttttcaaaataatatctacgaggtgattactccagagagcccac

SEQ ID NO: 18758 - DNA, 120 bp, Homo sapiens
atacgctgagcctaagcataaaactattattgagcaaataatggaattggacctgtacactgctaagctcctgtagactggctcatacaatctggccgatttatatagccagtttgaacc

SEQ ID NO: 18759 - DNA, 120 bp, Homo sapiens
caacgcacccagatcatctaggaaataaatactgattaaaataaacagaacttgcatttcacaagcaaagacggaatgatggttgtcttggaaggtgggatagaggtgtgcaatgcagcc

SEQ ID NO: 18760 - DNA, 120 bp, Homo sapiens
acacgagcttttttcagggatgcactgtctgtgtttaggtttatgacttaaaggttagactgccaagaatttttttaaaggttgacacatctgtggctgcatttccccagagcaccataa

SEQ ID NO: 18761 - DNA, 120 bp, Homo sapiens
ctccgtagtatcccacagtaacagtttctttctttctcatgttacagtgggaagcaaactggcactggtggagggctgtgctccacgtagtcattcggggcctcgggtctcttcttccag

SEQ ID NO: 18762 - DNA, 120 bp, Homo sapiens
tcccgggaccccaggatcctctgctagatccggtggacaaaccagcagaggcagaggaaagaatcacatgagagatttcatgaaggcaaggccagaaaatggctgcatcacccctgccta

SEQ ID NO: 18763 - DNA, 120 bp, Homo sapiens
ttgcggtgagggcttgaagtgcagaattagttgatgagtgctatttgttatatagtcataaaacagtaaattctgactttaagagacacctggacaaatgaatctaagcataactgcaca

SEQ ID NO: 18764 - DNA, 120 bp, Homo sapiens
aatcgtgctccaagagatgaaaaccggataaatgccacataaagattcaacaaatgcccaggatccctcaaccctactccttctgcagggcaaacaggctgcaagggacttctcttcaaa

SEQ ID NO: 18765 - DNA, 120 bp, Homo sapiens
acacgacctgccccaaaatcatccacaagtatctgaaccacccactcaaactgaggctgccactcacaggtgtcctgaaccccaattagcaaatggtagagcccggactcattttaaaaa

SEQ ID NO: 18766 - DNA, 120 bp, Homo sapiens
ccccgtgccacttcagtcctgagtttgtataatgagagcacacagtgagggagaaggtctgaaggctactgtttttagcttactcccacagaagtggcaaaggcatatctgcctccagaa

SEQ ID NO: 18767 - DNA, 120 bp, Homo sapiens
cagcggggagagatggcaatggtgtagaacggagctgatgagaggcagcatagactcgtttttagagcaaactcgactcctttaagtcctttgccgtcaactgtcgatcttgtataatag

SEQ ID NO: 18768 - DNA, 120 bp, Homo sapiens
agccgactgtattatttctttcccttaagaatagacctttgttctatagagtattgcacccttgaatgtttcagtactagttactataattaaaagaaaggcacaaaatactatatatgt

SEQ ID NO: 18769 - DNA, 120 bp, Homo sapiens
actcgccaaccctcttgcttttaagctacactgctgaactccttctgtgggattggactctgctcaagggaacatgtgctcattaaaaatatttcatgccattaacattttcactagaag

SEQ ID NO: 18770 - DNA, 120 bp, Homo sapiens
attcggagtgtgtgatgtctgtaatgccggctccattcacacccattgtccaccccataaacgtctaaatgacagctaatatacaacatgtaaatcactacaaaagagaatcgcgcacag

SEQ ID NO: 18771 - DNA, 120 bp, Homo sapiens
taacgccttacaaaagtgacatccttgacaagtcagcttggttatttccatgactttcctttccatgcagtgcaccagtgcaacttccggatgcccttccactcctgaaaatgctgcagc

SEQ ID NO: 18772 - DNA, 120 bp, Homo sapiens
ttccgttgtatgtgttctggtagcttcctgtgctcatgtcacagtttgtacagtcattatataactgtgtggtcctttcattaatatccatcttctacaccaaactgtaagctgtgtcaa

SEQ ID NO: 18773 - DNA, 120 bp, Homo sapiens
taccgtaaaaaaaaatggtcaggtcaaataaaggcacagtgaggaagatatttaatagaaagtctgttctgaacattgcctagtcaactggctctacatactatcagcactagtaaattg

SEQ ID NO: 18774 - DNA, 120 bp, Homo sapiens
cctcgttgtaaacaaggtctatagaagttacccaggactggtatggtgctcgatggtgataaggacccaggttccatctatctttttttttttaatttattttttagatggagtctcact

SEQ ID NO: 18775 - DNA, 120 bp, Homo sapiens
caccgtggctagcccaggttccatctgtcttgctgctccattctctgtagcatctgcttctacttcatgatccacaatggctgctcaagtccagcaatctcacccaattccaggcatcag

SEQ ID NO: 18776 - DNA, 120 bp, Homo sapiens
acacggagcatttttggaaattgttcggttagatgccacaatattttaaaatattatacataaaatacagtaccctgaaaccttgatagaagactccttgctacaaagcagagctactta

SEQ ID NO: 18777 - DNA, 120 bp, Homo sapiens
ctacgaaaaggagcattagcaactaaacattgcactcatctcatgagccccaagacctaattatactaaggctccaaagtacaaaacccttagtcacatggcttctaaattactcatgac

SEQ ID NO: 18778 - DNA, 120 bp, Homo sapiens
ctccgttaagaaggatatagaaagatttttacacttgtagaaataaaggaagatatttcagcatgtctgaagcaatggtgaaaccactcaaggcaacaacaaacacctacttcctgttca

SEQ ID NO: 18779 - DNA, 120 bp, Homo sapiens
acacggtataattaaaagcatagtttaaaagtcaatgtaagaaagcgatttttggcaactctagtatctaaattcccttccaaatatcttacactggacaagccaaatccaggtcttcct

SEQ ID NO: 18780 - DNA, 120 bp, Homo sapiens
gtccgatttcaatcttttgcacatggatatccagcttttccaacaccatgtattgaagagactaccttttcccttttgtggattcttggcaaccttgttgaaggtaagttaactgcatat

SEQ ID NO: 18781 - DNA, 120 bp, Homo sapiens
aaccgaatggaacatctgtttaaccagatgttttagttgagagaagtgtaaacatgattctaaatgtataaatatgttggttattcttccttgtctgggaggttgtgccaaagtttacat

SEQ ID NO: 18782 - DNA, 120 bp, Homo sapiens
gtccgtcgtctaattcccggaggacgttgtcactgctgctgaacccagagaagctgttgtgctgtgccagccttccctcctttgtccagcattcccgggagggagaaaggcggcactcct

SEQ ID NO: 18783 - DNA, 120 bp, Homo sapiens
tgacgaggttgtgtctaatccgatgcttctactagtggctttattcttgtcttcaccttttatgtggcggctggctttcttctgaaacacaagacattggtgaccaggagagttaaaaag

SEQ ID NO: 18784 - DNA, 120 bp, Homo sapiens
caacgaccagctcagagctacctccacattcccctctccacccaaatacaaatgaactcccttctccctgttttgtaactctttgtaggttcctggcacatcattcttgttgatgggtat

SEQ ID NO: 18785 - DNA, 120 bp, Homo sapiens
acccgggtattttctactggtttttacagcaaatatacaaagcaaacaaacagctttattaaaggggattttgtgagctactgtggaatgtaataccatttatgacactgtttgtacagg

SEQ ID NO: 18786 - DNA, 120 bp, Homo sapiens
cagcgggttgcatagaaaggagtttattggcagctcagaggcagctcatctttttcttggccaagttaccggagttgagcaagtttaagggaaaaagttgtgaaaggaaaataacccttg

SEQ ID NO: 18787 - DNA, 120 bp, Homo sapiens
aagcgtgattcatccatgtcaactgagacttaggggaactggaacaccatagttctaggttagaaaaattttacttcattcagtaagcaagggagaaaatgacaaagccaggaattagta

SEQ ID NO: 18788 - DNA, 120 bp, Homo sapiens
attcggagaagataggagatacttcatttttttggtgggagtggggtgggggagagacagggaggataaaatggagcagataatatttttaaaggtgactttgctgcctctggaaggata

SEQ ID NO: 18789 - DNA, 120 bp, Homo sapiens
gaccgagtgagtgattgattggttgacttacgaccttggcacccatctttccacctaagtggttactggttgaatggtgagttctttgggattgtgtgtactttataggatatcttttgg

SEQ ID NO: 18790 - DNA, 120 bp, Homo sapiens
ggacgaattccctgtcttcttgactccagatcctgtgcttgggttttgagtgtgatgggaaatgggtggtgtggctactaatttgagacctgcctgacttcccaaatttccatttttcct

SEQ ID NO: 18791 - DNA, 120 bp, Homo sapiens
ggccgcctctgctgcctctcagggctcaacaccagagttctcttttagagtgtgttgactgaagttattcctgatagggcagtggggtctggtggatgtaagtcagtgccaccccaccca

SEQ ID NO: 18792 - DNA, 120 bp, Homo sapiens
ccacgtctgtggatctttagagtagtttcatgcatatgaaatactttgaagtaccaaaaaaaaaaaaatagggcttttaaagacattcttgtgatttagaaaagaattatggctaagagt

SEQ ID NO: 18793 - DNA, 120 bp, Homo sapiens
ccacgattgcagaagtctgacttggaattgacagtgctcagtcagcattgagtgggagtaggacacagactcctgagccagacagcctggctctgcatcctgcctctgctgcctaataat

SEQ ID NO: 18794 - DNA, 120 bp, Homo sapiens
aatcgtgcagtcttcgcatgtcacttacttttctgagccttggtttcctcttctttaagatggggtaattatacccatcttgcagaattgtcaagatgttttcaagctcatgtatgcaag

SEQ ID NO: 18795 - DNA, 120 bp, Homo sapiens
caacgagacagatgattatggccacagttctgaagatgttcagatggacttcaattagctttgggcaaggctgcttcttgcagaagccagtattgattttccagaatgccttctaacttt

SEQ ID NO: 18796 - DNA, 120 bp, Homo sapiens
ccacgggacacgtcattggagagcagactgtgggaagtcttcctgcagtggccagggactggctatctgagctgaggacagtggggctaggtggaggtgaggcagtgaagtggaatgatg

SEQ ID NO: 18797 - DNA, 120 bp, Homo sapiens
ctccgtttcagagctggcccttgaaagaaagagaaatattattgagtttttcactcttttcccctgagtttcattaagaaaaaaaaaaaaaaaatttgcatgtgaagaagttgaatttgg

SEQ ID NO: 18798 - DNA, 120 bp, Homo sapiens
tttcggtgcaaatttgtttaaaacagcccttttttaaaaagaagaatggtgttattgcatcacatctaagaatggcagccacttgctgagagagcagaaggaccctgagaagtcagcaaa

SEQ ID NO: 18799 - DNA, 120 bp, Homo sapiens
tcacgttagagaccaccagcattccgtctgtcactttagaccttctggaaagagtgttccaacatctcagaatagcaggaccctagggtcataagcctccagtttacaaatgaggaaacc

SEQ ID NO: 18800 - DNA, 120 bp, Homo sapiens
tcacgaaagcactgagcacatctgatagctacaaggcaggaaatcgtgacctgacattggtttccgatccattctatgcagaagtggtattgtagtaatggatttgcttctgccagtgca

SEQ ID NO: 18801 - DNA, 120 bp, Homo sapiens
gttcgtatttccttagcagggctgcagtcaggcccctagcttcgggccgccaccctctcctctctggagtcaccccacctctcccatcaggtgacagtatgagttggaaaagggacgggt

SEQ ID NO: 18802 - DNA, 120 bp, Homo sapiens
ggccggctccgttactggctggatgcatgttggtaacctcataatccttagattctcacctgtaaaatgaggacagtgggaaagctaccacatgagctatgagagcatctatttatattc

SEQ ID NO: 18803 - DNA, 120 bp, Homo sapiens
ccacgctatgccgtagttactattattatccctattttactgatgaggaaacacggcctagatcaaagtacttgcccaaatcccaaaactagtaagaggtagagctgggattcaatcttg

SEQ ID NO: 18804 - DNA, 120 bp, Homo sapiens
aatcgtaattgcttgttttcggtcataagaacataaggaagaatctgtattgcagaaaataggcagtgtttactctgcgagattacttaagggcccaagatcctgtgcttggtgacagag

SEQ ID NO: 18805 - DNA, 120 bp, Homo sapiens
tgccgttaaactgaataaagatcaggcaagaacttcacttccttgtgtgagcacatgccccttaataaaatgtatacccctagacatggtttttacattttccatttaatgcaaaattag

SEQ ID NO: 18806 - DNA, 120 bp, Homo sapiens
tctcggaaattagcagatactctcagatactctcactagtaatgcccttattttctactcagtgtttttaacaaccaggtgtgcttaagaagtcccagagttgttctcttttttaagtat

SEQ ID NO: 18807 - DNA, 120 bp, Homo sapiens
gaacgtatcctgtagcacaaagaaaaaaattaaggagtattttaaagatacttgaaaacttctaaatatattttcacatgtttttccacctgaaagaatctgtccaaggctgccctgaga

SEQ ID NO: 18808 - DNA, 120 bp, Homo sapiens
ggccgaattctaaggtagatcattaataaaagaagaagaaaagaaaatgccttagaaccatagtaagtaaggggctttcttgaacactggcgtactgctctttgagaacaaagggaaggg

SEQ ID NO: 18809 - DNA, 120 bp, Homo sapiens
tgtcgagtcacaaagggcctgggatttctgggagctcgtgagatgcgtctgtgcatacacactagcaaaagtgtgccgctcctttcaaagtaactgttccactcattcctgctatgacac

SEQ ID NO: 18810 - DNA, 120 bp, Homo sapiens
tttcggatttcccaggatatagtacgccagtctacccttcccagtgggggaagatcacaggcctgcaaaacaggttctgaacaaacaataacacagtattactttcataaaacccgaaga

SEQ ID NO: 18811 - DNA, 120 bp, Homo sapiens
ttccgtttttctcctcctagtttcatgtagagtaggaaaattatgagttttttttttaacctttgtatgccaccatctttgacaatctctgcttgtctttaatcatagcttcccaggcct

SEQ ID NO: 18812 - DNA, 120 bp, Homo sapiens
gaacgaagccacgctgatgttcagctggcacgcactcattcagcaggtgggacagggtctttcttatgggtcggcgtctgttctgattggccggggctggtaccatactgcttgttgagt

SEQ ID NO: 18813 - DNA, 120 bp, Homo sapiens
ctccgcattttagactcttgtgatattggggggtctaaacaatttcaattgtataaaatgcagggtggttttatttcaaaggaaataaaatgaagccttgtaatgctgttcagctagcag

SEQ ID NO: 18814 - DNA, 120 bp, Homo sapiens
agccgggaattggcagtgtgcaagaacgtgagtgccctttacagttagggctgccaggcctcctgaccctgggaataaagaaccgtacggtctttctgcatttgtggctgtcaagccagg

SEQ ID NO: 18815 - DNA, 120 bp, Homo sapiens
gtacggggcaactgtagcttgccagctcaaggcccacgtggtggtcagtgggcactactaggctatcagcccagctgacatccctctcaggggatgttagaaccgttggtcacagttctt

SEQ ID NO: 18816 - DNA, 120 bp, Homo sapiens
aagcggcagagcccacagtggagggagatgtttttataccactcttttctttttagtgaaagaaatggaaattctttatgcagggaagcctggctgtagggcttatcagtctttggcatg

SEQ ID NO: 18817 - DNA, 120 bp, Homo sapiens
atgcgcctcctgctgggcctgcctccctccccatgctcccattctgcaattgttggcttggcgaatgatgagttaagctccagctgaagtactttccccacaagaaggttctgcagcaaa

SEQ ID NO: 18818 - DNA, 120 bp, Homo sapiens
ccccggcaattcctctcactctagtctccctgaggcaaatgcatggaagatggaatgtggcctggttttaaatctttaacatctaactctggctgttgttacagattgagttcttcacct

SEQ ID NO: 18819 - DNA, 120 bp, Homo sapiens
cctcggtatctaccagcaggttctgctctccagcttatcaactacattgatggtcctgtggctgcctctctatggtggcatctttgtatttgaagaacactaggcctgacatgactcacc

SEQ ID NO: 18820 - DNA, 120 bp, Homo sapiens
taacgaggctttctgattcttttcattattgttattatcagtgctctatagaaaggaatcaagacagtggaaacatttttataaaatgacactttatctctgtgattaactatataataa

SEQ ID NO: 18821 - DNA, 120 bp, Homo sapiens
acccgcctccatgaccaactcagaaaacacagtcgtggtccaacaaagcaatcagtctgtggagtgagaactgattccaagaaattaggttatttaatatgtttcaatctctggccctaa

SEQ ID NO: 18822 - DNA, 120 bp, Homo sapiens
gctcgtcagaagaaagcagaagaactaaagagactcactgaccttgccagtcagatggcagagatgcagctggccgaactcagggcagaaattaaggtcagttctaaaatatcacagcct

SEQ ID NO: 18823 - DNA, 120 bp, Homo sapiens
gctcggatccctaagagagaggctctgattggcctccacttgggtcacgtccatcatttggcccagagagggtgtgacatcttgatcgccagacccaccaagactgtggatctttgaaac

SEQ ID NO: 18824 - DNA, 120 bp, Homo sapiens
acacgccttccagcttcttacccacttccaggaaactagagtggttgcaagacacagctgctgctagctttgaaagtaagattgcaaattggggcataaaactgcttggcaatgattgac

SEQ ID NO: 18825 - DNA, 120 bp, Homo sapiens
aagcgggccccatggggaagaggacctcacctgagggtgctgagggcgtcagtggcctttccctcctcagcttctctgctctggcctttgtggcctcccacccagccaattgcagtggcc

SEQ ID NO: 18826 - DNA, 120 bp, Homo sapiens
cctcgtactccactaagaccagacgtaaactcccaaagcagatctggtttccccagtatatctccttcccctcagaaagaaattcacagctggacttcaatatatgttccaacttccatc

SEQ ID NO: 18827 - DNA, 120 bp, Homo sapiens
ttccgagtttcatttctgcctatcaaaacgccacccatcataaaatagttagtagcacaggctttggagtgaaacagtccagctgcaaaattttctacttctgtgaccttggataagtta

SEQ ID NO: 18828 - DNA, 120 bp, Homo sapiens
actcgtagaaccccaattcccccatctgtaaaacagaggtaataatactgacttcataatactgtgatcagatgaaatgagattatctgctaagaatttgaccagtgcctcgtaagtgtt

SEQ ID NO: 18829 - DNA, 120 bp, Homo sapiens
agtcgcagttatttctgtatttctcaccatgtcttctacacacagatcttaattttaaatgaatggaaaaataatctctttctcacttcttttcacagcacttgaaattctgccatttaa

SEQ ID NO: 18830 - DNA, 120 bp, Homo sapiens
ggacgtcccggttccctgttaaaataggaatgggggtctaggaaggacgacatgttttctcttgatggttaataccttagaaggcacttggccaaactcagaagaccctgccagaatgca

SEQ ID NO: 18831 - DNA, 120 bp, Homo sapiens
gggcgaggggtgctaaaaggttaaatagatgagtcagacacacatttcatgtaggcccaaacaagagaaacacaggcccctcacatattccccaggcaggaagatgctcattccctagcc

SEQ ID NO: 18832 - DNA, 120 bp, Homo sapiens
gagcgtggagcctcccagcaacagggctggaaagatccccaccaggtcagcactgcagtggacaccggaagagcagagtgaacgcatccacgggggtgccttggtcatttctgtaatcat

SEQ ID NO: 18833 - DNA, 120 bp, Homo sapiens
gggcgccagtgacgcccacacacgtgctggtgtcccgggaagagttcctggcaaagagctcaggaacgttggatcttaatcaaggctttctccgtcggggtggatgggttggactttagg

SEQ ID NO: 18834 - DNA, 120 bp, Homo sapiens
ccccgccccactcggcgggtcggtgccgccgggtcccaggtgcccgctacttcccagaacctccgcctcccgctccgggccctcgaaccagcgcggacaccacaatggaccgggcgtccg

SEQ ID NO: 18835 - DNA, 120 bp, Homo sapiens
ctacgtgaacggccgcaaggtgagcgcccgcgggcttcctctgcccccagacctgcggccagggccggggcagagaggagcccctgccgttcgtcccatcctttcgtgcccgccgtttaa

SEQ ID NO: 18836 - DNA, 120 bp, Homo sapiens
gcacggactggctttctcccgtaacagcggctttgccttcgcattcccacccctgcctccggggcagctaaaggctgcgttttcagggactgtcctggatctttgggcccccaccttcct

SEQ ID NO: 18837 - DNA, 120 bp, Homo sapiens
acacgccctccctaaacagtaagataaaaagtattcttgcccatcaggggtcagcactcccagatcttcgttccctcaatcccagccgataacgggaacgtccccagtacactgagagca

SEQ ID NO: 18838 - DNA, 120 bp, Homo sapiens
gctcgcggggtgcgtttggaagcgcagagagcaacttagattcgggacaagaccgtagagacgaacacattcaaaccacccccatcgtttctcagatgaagaaatcgttactttccaaag

SEQ ID NO: 18839 - DNA, 120 bp, Homo sapiens
caacggcaaaggtgtctttatgcatcttcgggaggttggcctgttactgggtatagagttagggaaagtacagcctgagaaattaatatagaatgcatgtgtatatacatacagacattt

SEQ ID NO: 18840 - DNA, 120 bp, Homo sapiens
attcgacaaatacagaagaatataaaaagaaaatcaaaatctcctgtaaacctaccagctatatatggccattgccaaagtattttttaaatactgtattaaaaacttgattctcataca

SEQ ID NO: 18841 - DNA, 120 bp, Homo sapiens
cctcggctctgtattgaccagctgtgcaacattaaattattcaacatctctgagcctcagctttcccagtgataataacaataatagtaataacaataactctgtcttaagattgatgag

SEQ ID NO: 18842 - DNA, 120 bp, Homo sapiens
gaccgcccctatttcagacaccagcttcaaatggagggccctagctactcacactcctgcctggccgactactaatttggaggttttcactacccccattcaggtttgataatttgctag

SEQ ID NO: 18843 - DNA, 120 bp, Homo sapiens
caccgcctccaagcccccatcctaaagctacctaagccctcctcatgagtcgtctcattaggagaataaaacagtaaattccaaggctttacgaactctgaaccaagaaccaggggcaaa

SEQ ID NO: 18844 - DNA, 120 bp, Homo sapiens
taacggccttcaccttcttcctacgccgcaaaccctaatacagtctccatccacggactcccctcctttacagcactgcgtctctcacatccccacgtctcattttccctccctgcttct

SEQ ID NO: 18845 - DNA, 120 bp, Homo sapiens
aagcgccacctgtttagttcagtatctggagcccttcctccctgctgaaggaggagaggcacgtgaacattttgcatgctgccagacgcctggtttacccactcctctcgggcagttcac

SEQ ID NO: 18846 - DNA, 120 bp, Homo sapiens
agccgttcaagatgaagcctgctcaaccccatactctatacacagccctggatttctctgagctgggggagacatctaccagccctacaagactgtattctatttcttggggctcattta

SEQ ID NO: 18847 - DNA, 120 bp, Homo sapiens
tctcgtcactatgataatagaagcagagataaatatagatatgcaatgctgacccatcaaatgaagaacagctgcctggaatcacccagcttgcaccagattttacatgagaggaaacaa

SEQ ID NO: 18848 - DNA, 120 bp, Homo sapiens
tctcgttgttcactatacctgaagagaccaaagatatggatctatcggtttggctaaatggcctttgtaaccagtatttgctcaacaggcacgtgaacaaaatggtcttgtcagcaagaa

SEQ ID NO: 18849 - DNA, 120 bp, Homo sapiens
tggcgataatgtctggttggaatttgtgggagcttccttgagagtcatgaaaagtctgttcttagtctgttttgtgctgctataacaaaatacccacaaccaggtaatttataaaaaaca

SEQ ID NO: 18850 - DNA, 120 bp, Homo sapiens
ccccgcttccaatctggtgccttgaacactgcattctacggaggggaggaatgctgtgtcttaacatggcaaaaggtggaagggcaaaaagagaaataaactccctttatcagccccctt

SEQ ID NO: 18851 - DNA, 120 bp, Homo sapiens
aaacgacaactcacagtgccaggaagtgagaaacaagtgtgtgataaacggtggagaatgggagcactctccgcagtgggcgggaggagacgaggagggcgttccctggggagtggcagt

SEQ ID NO: 18852 - DNA, 120 bp, Homo sapiens
ccacgctctggaggaggagtctagggcagtagccaaggccagctgccagtcaaggaaaggggagcggccccgttgaatccacaaaccacaccatcctggcccatgggttatatacaaact

SEQ ID NO: 18853 - DNA, 120 bp, Homo sapiens
caccgggggttcaagggtacaggggagtccgacatagacaggaaataacatgaaaggcagattctgttaatgcgtcaggggacacaggggatggagagattaattcagtttttccctgag

SEQ ID NO: 18854 - DNA, 120 bp, Homo sapiens
aagcgatagcacttcaatatttattaaactggacttaccagtgatgctctccgagtctctgtgattgctattcatgaggttttcttcacctgttggtgatgtaaaaattgcattctggga

SEQ ID NO: 18855 - DNA, 120 bp, Homo sapiens
atccgtagcaacgagcactctcatgtgattatcatactttggacagtcatgacctaaaacaaaaacatcaagtgactagaactcagcatgctctttaacaacaggaatctaattaatcaa

SEQ ID NO: 18856 - DNA, 120 bp, Homo sapiens
aatcgcttccccagaccctctccagctttatctaaaatgtctccagacattgtcagatgtcccctggggtggggggggcaaaattcatccctggttgagaaccactgataaaacagatgc

SEQ ID NO: 18857 - DNA, 120 bp, Homo sapiens
tcacgaagtgtgctaagatgtagggataaggatgcccatacggtattggtttggggggaaaaaaaaagcacataccacacaactggaactaaatgtctataaataaatggtttaataaca

SEQ ID NO: 18858 - DNA, 120 bp, Homo sapiens
aaacgttatacaaagtcaaagggaaaattcggtttatttaaaaaggggtaagggaccataaaatcaatgataactttccagaaaccagttcagccaagagattggatccaaagacaagct

SEQ ID NO: 18859 - DNA, 120 bp, Homo sapiens
tgtcggtaagtgagatgctaagagtggagtttagtgagtacagaccacgatttcctaacacctagactttcagatctccacagactggtaaaatttcaaacacttctgtggttattggca

SEQ ID NO: 18860 - DNA, 120 bp, Homo sapiens
aggcgctttttttgtttaatcttttctcttgggatagctttcagagcaatatatccaaatgtcagtgagggggttctgacgagcacggattcccagactctcagcaggatcattctctaa

SEQ ID NO: 18861 - DNA, 120 bp, Homo sapiens
gaacgtgaactccatctgcagagtacccagtgtcttgcctgctttcaccaagggaaaaaaaataaatcttgaaaaaagagggaggagaaaaaagtgttttgagtaagaggtttacaggtt

SEQ ID NO: 18862 - DNA, 120 bp, Homo sapiens
aaacgctcctcctttgactcagccgccagaacactcaccctcctccggcagcacacccccttttcacatgctaactgaggcgcccgtgattggctgaacaataaactggtcacacttgct

SEQ ID NO: 18863 - DNA, 120 bp, Homo sapiens
tgccgtctttcacacaattagccaagacacattaatcaagctggcgggccggggctgcgcgggcctcctgcagtgggggaggggagagagtttggtgagtcttaataatactccacagga

SEQ ID NO: 18864 - DNA, 120 bp, Homo sapiens
aaccgcaagctggagaggattctgctatcagaaagttggaagagtttaaagccccaatggatgccgtagctagaatggacaggagttgtggcgctgaagatcccagaaacttagagcaaa

SEQ ID NO: 18865 - DNA, 120 bp, Homo sapiens
tggcgaacctctagagacatttttacaaagttcctttagccttcttagctctccctaccactcccacgaaaatgcactcaggagccactccgctttgaagactgaagccctgggcagtgg

SEQ ID NO: 18866 - DNA, 120 bp, Homo sapiens
ttccgtgggagggatgtgagggagaatttgtcccaggtccctctccttggcttgttgatggtcgtcttctccttgagtctcttcgcctcaccttctctgacgcacgtctatttctgggtc

SEQ ID NO: 18867 - DNA, 120 bp, Homo sapiens
atacgtggagagtggaaggacagcctaaatcccagtgtaggagcggcatagaaattccacacaaaatgaaagaattgttccagtccatctctattttcatgacgctgagaagtcccgaac

SEQ ID NO: 18868 - DNA, 120 bp, Homo sapiens
gtacgcttagagccaaagggcatttatcagggggttatttgccatgaaaaccaggaattccaggattagtttccttttggacagcacctgaagtggaaaagtgtgaatattagaatggca

SEQ ID NO: 18869 - DNA, 120 bp, Homo sapiens
actcgtgaacacctgaagaaacacttgttgaaggagaaattattggtagtccctctcaaaacacagccaacagcaagctaattgcttttgcagatggccagggagtcgctcttcccactc

SEQ ID NO: 18870 - DNA, 120 bp, Homo sapiens
caccggcttatggccacacttgtggtcctcgtggctgagccagcagggcaggacgtcagctggagcagctaggacctaaaattaggcccttggcaactctctaatcttagctgcaggttc

SEQ ID NO: 18871 - DNA, 120 bp, Homo sapiens
ctccgctctgttctttcaggaaaccttccaaatgttacccttggaaatttaagactgattttggaacctagccattttgaactacagacactgatccagaaaagtattttttatctgagg

SEQ ID NO: 18872 - DNA, 120 bp, Homo sapiens
aaacgtgttgtcttttaaagaaatctctttgaaaagtgccagcttaccccatcaatactgccattgttcaggctctttggccttcagaaccatacacaatcctcacgagaaaatgagtct

SEQ ID NO: 18873 - DNA, 120 bp, Homo sapiens
ccccggactttgatctaaatgaattttagctgttaaaaatcaaatccacctttaaaggataaatatttgtcctcatcaagatactccattcacttcagtgtcgaaaaagaaacgatccag

SEQ ID NO: 18874 - DNA, 120 bp, Homo sapiens
ctgcgggaaaggaccctgcctaaacagagacgctcacacacatgcacctcaacccacctctccattctgcaatgtggagccttaagccattgctggcttagggctagagagactatttgg

SEQ ID NO: 18875 - DNA, 120 bp, Homo sapiens
acacgagatcatccttccacaacctttttcagtcgccaacacttgatgagtcagggtagttaacccagcccaaagacactgtagctgggcttcatcactacattagaccctacttaaacc

SEQ ID NO: 18876 - DNA, 120 bp, Homo sapiens
ctacgctgcctcccacttcctcccaaagcaccccccgcccccatcatgctgtgctctccagatgttcacagtcctgaaatatcccacatgacaaaatatatacatgttgtaattatccaa

SEQ ID NO: 18877 - DNA, 120 bp, Homo sapiens
gtgcgtgtgtgtgtagggaggcatgcggggatggctatgtctggtgcctaaaaccgcagcactgatgtccagaatgattaatacaagttaatgttttctatgaatcaaaaccctccaaca

SEQ ID NO: 18878 - DNA, 120 bp, Homo sapiens
cagcgttgccctccaattgctgcattctaaattggagtcttttctacctaaagaataaatccataaatatgtctcctaggtaacatcttgttagccccattactcaaagctcttgaaaat

SEQ ID NO: 18879 - DNA, 120 bp, Homo sapiens
ctgcggttattctttcctatctcgattttacttagaggtagttataacatgttcatccttcatgttattaaaaattaatactttagcccaaatagtcactcatgaataacagccagagca

SEQ ID NO: 18880 - DNA, 120 bp, Homo sapiens
cagcgcagcctctaaaacaagagtttgggcttttcagctacagagtgtcctcgaagtgtagagtgtatcagaatcacctggcacttgttaaaatgcagatttctgggctccaccccagag

SEQ ID NO: 18881 - DNA, 120 bp, Homo sapiens
ctacggcctgctctgctgaggctgcctcatgacatggctccagcagtgccttgtgctccagggccatccgtgtgcagacagagattgggaatgctttcattaccctgaagttattcctga

SEQ ID NO: 18882 - DNA, 120 bp, Homo sapiens
tgacgctgacatacttgggcctcggtgtatcagctcccactaagcaagtttctgttgccttgttacccagcaactagcccagctttgctctcccatgcctgggctccttgcctggtaacc

SEQ ID NO: 18883 - DNA, 120 bp, Homo sapiens
agccgttgtgaggaaacaccctttcctattacatctgctcagagcagcaccttttcctcattcacacagaagtgcagtgccaggccctcgtctggttctctgtccattccttgctccatc

SEQ ID NO: 18884 - DNA, 120 bp, Homo sapiens
acacgtgcttcctagggctgcccagccctgctctgtcaagaccgaggcctgagccagaagggcttcctgaaaagccaaagccacatcccctcccaggcaggtctgatggctctccctcga

SEQ ID NO: 18885 - DNA, 120 bp, Homo sapiens
agacgggcccgtgggcaaagactaaaaatagcaggtgtgagggccccagctttggggtgggatgggtgagcgcattcatccatccatccaggaaacactcactgagcacctaggagggca

SEQ ID NO: 18886 - DNA, 120 bp, Homo sapiens
caccgcacccagctgagttgaaattttatatagcccgatttatttaataagaagaatgcctcactaacaatgcaacctgaaatggagattgcatccccctactggcacgtacaggactga

SEQ ID NO: 18887 - DNA, 120 bp, Homo sapiens
cggatggaggatgtgatcagtctaacactctgccttggcccaaaggcttccttccgccctttcgacctattaacaggagtggggaaggacaaagaaccgtgaatcggaaagaacgattcc

SEQ ID NO: 18888 - DNA, 120 bp, Homo sapiens
gatcgaaaataaataaagaaaaacagagaaagccaaagtctcccatggaagggaacccaattaattgtcttcgatttcagaatgagtttttttcctgctgtagaagaagcgcacgggagg

SEQ ID NO: 18889 - DNA, 120 bp, Homo sapiens
aatcgctcagagctccagcacccgggactgaggcagaagggctccgccaggaataacgttttttaaagcacaggattgctgtgtgtgtgtgtgtgtgtgtgtgtgtgtgagagagagaga

SEQ ID NO: 18890 - DNA, 120 bp, Homo sapiens
gcccggagagaggggagaggccccctggtgacttatgacccccgcaggagtaaccagagagcgcgcgcgagcgcccagcgcctggctcaagacgaagatttaaccgagaacaaaagaacg

SEQ ID NO: 18891 - DNA, 120 bp, Homo sapiens
aaacgctacccgagaacgaggataaccccgctttgtgttttgaaaactctttaattagcctggtttctaagacgcattaaaacattcctacgcagattctaaatggaggatcaaatggtt

SEQ ID NO: 18892 - DNA, 120 bp, Homo sapiens
caacgaagatgggatcccgaaagggcacacgccgcagaaccaaggcacacggggccactgagacgcccggcgcgtcgtacagagtgttcctgggcgctcggtctcaggttacttctagaa

SEQ ID NO: 18893 - DNA, 120 bp, Homo sapiens
caacgccgtcttcgtttccttaaaacctcgctagagtcaccccagttccccagactccaggccgtgcgcgcgggcggggtggcctgagcccgggttccccgctctccctgcttcgggccc

SEQ ID NO: 18894 - DNA, 120 bp, Homo sapiens
ccccgcaatctagtcccaggagtgttctgggttgagcgttgagattcaagtggggaataaatgacttgttttttacttttacagtcaggttataaaaaataccttcaatctttctaagta

SEQ ID NO: 18895 - DNA, 120 bp, Homo sapiens
ggccgtgcatgctgagtactgcacaggacatctgatggaggcggacagcagaggcaggaagcaggaagccctgttctcaggggctgggctgcatacagctgaaggaagggactccctttc

SEQ ID NO: 18896 - DNA, 120 bp, Homo sapiens
ccccgctcacttagccctgcccctgaggtagccaggctctcctgaaggcatgatgtaggcaagtggtagcccctccctgttcatcccaccttgacccccggaaggcagggcctgaacaat

SEQ ID NO: 18897 - DNA, 120 bp, Homo sapiens
ctacgggtgtgtgcccgcgggggaccaggggaacatggcccaggtttggtctgtctccctcaccaacacggtactgacactgcctatgcttgtgcttattttcaagaagattccagcgac

SEQ ID NO: 18898 - DNA, 120 bp, Homo sapiens
aaccgaggcgcttccatcgggtaaaggtaagctaacacattccagggcagccttgttttttttttttcaaaggggaagatgttacctgcagcttccaaattttcccagcagcagcgacat

SEQ ID NO: 18899 - DNA, 120 bp, Homo sapiens
agacgcaagtcagccagtttctcccctttcaccgacacagaggtgcttctgtagctcagagacaatgatccaatgtttgcataacaagtttactcttgctggagcatttggagagagaag

SEQ ID NO: 18900 - DNA, 120 bp, Homo sapiens
ccacgctgatgccttgatgagaatgataaagtccttttggtatttgcccaaactaaacactgccttttctcttctttccaaccaccctgcagaggtggagacggctaattggtaatccaa

SEQ ID NO: 18901 - DNA, 120 bp, Homo sapiens
caccgtgatgtgtatgcatgagtctgcagccagcaggctccttgatgtgggagattaaaagctgcactcatctggggggttacgtcatgacccgctcaataaaaagaacatggattcaga

SEQ ID NO: 18902 - DNA, 120 bp, Homo sapiens
cctcgtctctaagttgccagatgactttgagtcagtccctcatcctccctgtatccaaggttcctccaccaaaatgagaggattgattcctcccctgagaaattccttgaccattgctgc

SEQ ID NO: 18903 - DNA, 120 bp, Homo sapiens
gtccgctgctattgaagcagccacccagtatatggatttccagaaagtagaatgtatttgattccaaattcagcatcaaagaacttccatcagcagttggtttataccaggatatgagta

SEQ ID NO: 18904 - DNA, 120 bp, Homo sapiens
aggcgtgagccacagcgcccagcccaaattatctttattctgtttttactttcagttaagaaggttgtttcggaaaggggggcatgtgtgtctcctgtattgtaattaagcgaaaacaac

SEQ ID NO: 18905 - DNA, 120 bp, Homo sapiens
caccgctctggcagcctccctcaagccaagtcaaaagtcccaccagcacacagaaaaaaatagatccccatgccatgtgcctctcagcttgtcagcagtgcagtgtggctgttttctggc

SEQ ID NO: 18906 - DNA, 120 bp, Homo sapiens
ctacgaggcaaagggcagggcggtggcggtgacagacggtgttcgtgtagccctcctccgccctctcgcctgacacacagagctttctctttcgtgactgttttttagcctccttttccc

SEQ ID NO: 18907 - DNA, 120 bp, Homo sapiens
ctccgtttaatccagagtgtctgtctccaaggtccctactcaataattaatgtttgttctcatttcccattctccagagcatctattcttgaaccgtagggtcaacaattaacactaatt

SEQ ID NO: 18908 - DNA, 120 bp, Homo sapiens
ttacggcttttcctctctccagtgttgatgctcagaatcccaggccgcctgctcagcctcagctatcggtgcgcacgtgaccgtgtgtgtgccctgagatgcaggagcaccgagaggcag

SEQ ID NO: 18909 - DNA, 120 bp, Homo sapiens
tgtcgccttttccaggcccactgcttccccactgtgggtgctgcagaggcagtggcttttcttcctctttcccctcttcaaccctgcccaaggctgcactgctggggcacacagcctggt

SEQ ID NO: 18910 - DNA, 120 bp, Homo sapiens
acacgatctgtagcagattttccagatggtaagcaatggaatgaccaactgtccaggttttcccaagactgagggagttccttggttgtgaacgtttcagtactaaaaccaagatctcag

SEQ ID NO: 18911 - DNA, 120 bp, Homo sapiens
atacgggtctaaattccagctttgccatgactttttaaaaatcttgtacaattgacttaacttctccagtcctgcttccttactagtgacacatgagaaaatgcatatgaagtacatacc

SEQ ID NO: 18912 - DNA, 120 bp, Homo sapiens
tggcgagtaggggcagagtagacaataaccgagttaaaaagcacagataattccagatagttgattcatgttgtaaagacaactaaacctggtgatgtgtctgtattgcatagtcaggaa

SEQ ID NO: 18913 - DNA, 120 bp, Homo sapiens
ttgcgaggaggttagaaaggagggcaagggcaagtcatgggggggctggaagaccatgtgcagcaggatggctagctggctggccaccaaggattcagactgccctccatagcgcttttc

SEQ ID NO: 18914 - DNA, 120 bp, Homo sapiens
ccccgggaagacaggccaacaaagttgtgtgtgtgccagaggctgctacaagctggaaggcttttatgggaaagtttagaagaagggaggaggactccttataccagagttgtcctgttc

SEQ ID NO: 18915 - DNA, 120 bp, Homo sapiens
ccccggggtggggtggtaatttggaagcctgccaaatgtggcctgtaggttatcatgaccagttctcatctgtggaatgtgagttgctgtaatggggtcatattaatgttacagcagtta

SEQ ID NO: 18916 - DNA, 120 bp, Homo sapiens
agacgacacgatcacaagaagaaaaaacctgggtccctgaatcaccatgtggaggaaaattgctcaaaaccagggacacgtgcaccaaactattacctgagccagggatatgttttcatg

SEQ ID NO: 18917 - DNA, 120 bp, Homo sapiens
aagcggtttctgccttaatccatggaaggactggcagattggtgaaacagaggaggtggagaggaatgaagtaatctgagatcaactttgaaagctgagccaaggattttctagctgatt

SEQ ID NO: 18918 - DNA, 120 bp, Homo sapiens
tcacgagatgtgcagaaatgcaagagacccaaggagaattgtctcccaacagcagcagacaaaagaaagctacagacactgagataaacacaaagaataggctgtaagtactgacagcag

SEQ ID NO: 18919 - DNA, 120 bp, Homo sapiens
tagcggcaggagaaataagcaagaaaggacataccatcatcatgccaatggaagtgtgttgatatctataaacatgagctgcaatcatattctctcattaaatagatagtgcagtacttc

SEQ ID NO: 18920 - DNA, 120 bp, Homo sapiens
ctccggggttttgtagaaaatttgtattatggagatgtgggctaaatactggaggtgattcacttcagaaagctaagcattgggaaaccatctctatcacagtaaccatttatgttaaag

SEQ ID NO: 18921 - DNA, 120 bp, Homo sapiens
taacgacaactaaaaaaaaacttcctgttcattgataattagatgttttgcttcatttggacttcctccaacaatcttctgttcagattcagctcttataattaattatcctcttgctga

SEQ ID NO: 18922 - DNA, 120 bp, Homo sapiens
aggcgctggaagaaattcagacctagtttctggcaacacagaaaaactaccatcatgccccttgttattgagctcacactgagagaatcatttcaatggagcagaaatccaactgcatga

SEQ ID NO: 18923 - DNA, 120 bp, Homo sapiens
gaacgaaatagctggtggatataatatcatgcctcagataatggagcacaccacttcccagtcactgatgattcagaatcccagcctgcctgcaagagaaggtcagcactgtttgtcctc

SEQ ID NO: 18924 - DNA, 120 bp, Homo sapiens
aatcgcaacaatggcagaagcaatcttcattgttctcctctctttggctgggtgccattttgtaacaggaatgagccctcttctccagccaaaacagtctacacacagtcgtccaaatac

SEQ ID NO: 18925 - DNA, 120 bp, Homo sapiens
atgcggaacattccaacccaatggaagtgcgtcctcttttgattcaggagcagctgtggtgcgttagaaggagcactgtcctgaaacagaaaatagatgcaatattggctgtattaaatg

SEQ ID NO: 18926 - DNA, 120 bp, Homo sapiens
aaacgagaagaagaatagctactttgtaggctttattgtggaaattaaataaaatcaggattatgaaaatgtttatcattttgttgctgctcagcacatatttctttgcttacttgataa

SEQ ID NO: 18927 - DNA, 120 bp, Homo sapiens
tcacgcccctttcgatgtttatagcaacttgataaaaaccagggctgtgaattaaatgtccattaacaaaagaataggctcacttttataacaaaatactatgcagctatgaactatgta

SEQ ID NO: 18928 - DNA, 120 bp, Homo sapiens
tcacggcactgtccagctcagtaatgaacctttctattagccgcccctctttccctgcttcccccactccccgccctgatccctgcccctacgccctgcagtcacctccccaagtcagtg

SEQ ID NO: 18929 - DNA, 120 bp, Homo sapiens
gagcgagaccctgtctcagaaaacaaaacaaaaaaagaaaaaaagaaagacattgtcaagtgaggacatggtgtttagagctgccttatccatgtggcaaccagggggcaagacctagag

SEQ ID NO: 18930 - DNA, 120 bp, Homo sapiens
tcacgctctgctgctgttctctgggtcccaggagactgaccactgcaagctgtatttcccaggatatttttcctcctccctctctgccttgggcagtatctcagcatctcttctctggct

SEQ ID NO: 18931 - DNA, 120 bp, Homo sapiens
cctcgaattctagtttcctctgtcttgtgtttagaatgctaaatttggttctctctgttaaggtcaaaactcaggcatagaaagagaagttggggttaagaggattgggacacttaaagt

SEQ ID NO: 18932 - DNA, 120 bp, Homo sapiens
atgcgtaatataattcataacacatgacaggtgctcggcctctgtgtgtgtagcaagctctgacaaggaagggacaacttaggacaagccctaaggaaaagaagagagggcgttttttaa

SEQ ID NO: 18933 - DNA, 120 bp, Homo sapiens
tttcgcatcttgtatcacttaggccacaagagcatgcagtatctgcttaatcttggactacacataatagactaggttatataaaagtcctgaaaatgattcagttgcagcttcctggaa

SEQ ID NO: 18934 - DNA, 120 bp, Homo sapiens
ttacgaaaactatttaggactgtgccatggaaagatattagtaacacttacagagtatcagacagtaacatattagacaataacatctgcagactcggtccatgaatttgcactgggtaa

SEQ ID NO: 18935 - DNA, 120 bp, Homo sapiens
gttcgtcctggaagaagcctagttaaggagattgtggactttgattaagaaattatactggcaagagccaggactgtgagcacaacaaattctagctaattcaactccatttcactcttt

SEQ ID NO: 18936 - DNA, 120 bp, Homo sapiens
ttacgatagaatagacatgtttcctgatctataaatgtaaaaccctaatgatatgaaaatctaattgtgcaggggaggcacaggcatatgtgccttcctctaagttctgttagcaagaag

SEQ ID NO: 18937 - DNA, 120 bp, Homo sapiens
ctccggaacacaggtgagtcctaggtcctagatttggagagaactattattagaaaggaaggtgagaaattattctttatgtctttgtccttttcctctataaacatggaatttcaacac

SEQ ID NO: 18938 - DNA, 120 bp, Homo sapiens
tcccgggtaaacacaggttctattctcggaaactagattagcaagtctaattcctgttctattggactgcttcctcttccccatcccccgcacccttcctatttttaagaaaatttccag

SEQ ID NO: 18939 - DNA, 120 bp, Homo sapiens
gagcgctgttatgttttctttacatatagtaaccagaactgattaatatttgtagaggggagaagtgctgtctttgtcctggaagcattctattaatgtcctcagtagaatttgtcagcc

SEQ ID NO: 18940 - DNA, 120 bp, Homo sapiens
catcgaacttctattaaccacctctacttcattctgtctttgtgcttttggttcactttgacacttaagtgggagcgtgggggaggagaagtaatgtttttgtgtgaaatcatcagttgg

SEQ ID NO: 18941 - DNA, 120 bp, Homo sapiens
ccccgccacagctcaactgtgagctggaggctgaacaaagacagaacttcctggatctagatgagtcactggtttgttcttccctagccacctccagaaagccatgctgaacatgccatt

SEQ ID NO: 18942 - DNA, 120 bp, Homo sapiens
ccacgtcttctcacctccaagacggggcaaggagttggctaatggcccagcttcattcctggggcatctacctttgaaaatgtgtgctcctacttggagctctttagcatgactgctctc

SEQ ID NO: 18943 - DNA, 120 bp, Homo sapiens
gatcgggcttgcatttttacaaagactgtgttgggggcagcacggaagaagctggcaggaaggctggctcagaagtgattggaatggtctggagagagaggatgagaacaggaggatgtc

SEQ ID NO: 18944 - DNA, 120 bp, Homo sapiens
aggcgctggggctctgagagctatgtaggtggtgaacttgatgccaggccccagcttggagagtgtacgtgcagccagctgcctcctgttgagatttcttgtgcctcctttgcaagctct

SEQ ID NO: 18945 - DNA, 120 bp, Homo sapiens
tgtcgcttcaataacccctcccctggatttgcatttcctgacttggatatttgtgacattccaggggtcattatcagaaggtttcacttttcatttcctggtggaatcaggacgtgcccc

SEQ ID NO: 18946 - DNA, 120 bp, Homo sapiens
ttgcggggagtggtggtggtgagggagccggtgtgcaatgaggtgtctgccaagagcacagggcaattccacaacacagcagagaggggtgaaaaggaagtgaacgtgccctcctccact

SEQ ID NO: 18947 - DNA, 120 bp, Homo sapiens
aaccggtgtgtattcagtgccaggactcctcccttttgataaaatctctctcctaatcctcattacaatgcctgaaggtgtgcataacgagccttttacacatgaacgcactcaggctct

SEQ ID NO: 18948 - DNA, 120 bp, Homo sapiens
tgacgggatgtggattagaactctggtcttctcatttccggatggctgccccatccccagctgcccctcccagctggagtcagtgcctaggaacaaccatgggtcatcctgggtacaaaa

SEQ ID NO: 18949 - DNA, 120 bp, Homo sapiens
ttccgactgtcttgtttctaagatgagggagactttatttgaaccttgcaaggagcggacgtctccattagcttatttgttttgttttgttttttgagatggagtctcactttgttgccc

SEQ ID NO: 18950 - DNA, 120 bp, Homo sapiens
taacgcatttgagggaaaataagaaacacaagcaacagagtgaagcaggtataagttgtgaatgggctgcactgggctaggttgttggaagaaatttttaaagaaaaatgtatgaatatg

SEQ ID NO: 18951 - DNA, 120 bp, Homo sapiens
gatcgttccctgtaccttgagctctaacaagcaggggccacatctgattgttgtagggatcttgggggaggaagagagaggggagaacattgggagagaagtcgtgttttccagcagaag

SEQ ID NO: 18952 - DNA, 120 bp, Homo sapiens
gctcggaggagaaggctgctttctcaggtcaatcgctcatttaaactgggatcttaattttacggataggaaaagatctcctagacataaaagttttgctgacagaaaaagtctactacc

SEQ ID NO: 18953 - DNA, 120 bp, Homo sapiens
ctgcgggtatcttccgggctgcaaaaagggctaggctgctcgaaaagtacttgaaacaaataaaacagtgactctaaaacacacccatatgtcacattcttagagaaaagaccttctgta

SEQ ID NO: 18954 - DNA, 120 bp, Homo sapiens
cttcggtgtgcagcaaccactcgggtcttttcttgagtccgggctaactcctgaatagcagatttttcttttcttcccctttcaacgtttgcttgccagtgcctttcttttccttcatct

SEQ ID NO: 18955 - DNA, 120 bp, Homo sapiens
ccacgttcagtgtgtacacacaacacacagagacaaaaacagaggccaggctccgtcagaggacacactctagctgagcaaaggctgcattcggcaactagggtggtgtaaacacctcgg

SEQ ID NO: 18956 - DNA, 120 bp, Homo sapiens
agccggaaggaagtcacggcatagtcccttttcaggagtctgagggataccacttgtgttgcaaaccacagatcccaagtattagacgtattcccttcttggtggaggcctactctagaa

SEQ ID NO: 18957 - DNA, 120 bp, Homo sapiens
aaccgatgaccctctcagcgaatccgatgttaaagctcctaactaggtgaccctttagcactacagacgtaaaaatgactctaatgcactccctagaaaaggcagtgaagcaaagggggc

SEQ ID NO: 18958 - DNA, 120 bp, Homo sapiens
aagcgggcctggaaagaacactacccccattccagttgacggctttttaagtactttgtggccttcctgccgcggtgcaaaatgaggtctattttaggaactggcttctttactgcgggg

SEQ ID NO: 18959 - DNA, 120 bp, Homo sapiens
ggacgatctcacacatgagtttctggcacttttaggagggatttcctcaagtgatacactagggaatgagcctttcagcaaaaagcggttccccggagtcagttgccagctccaggagat

SEQ ID NO: 18960 - DNA, 120 bp, Homo sapiens
acacgaggaaaagcaggtattagtttggtctgaaagaggtggtaatccacagatttgcttttgtttcgacagtttctaagcagtggaacaattacctaacagtgcaccaagtaatttgtt

SEQ ID NO: 18961 - DNA, 120 bp, Homo sapiens
gggcgttcatgtgcgccaaggtattctgggctgaaaacagcaattttgaattttcatggcagacccaactcctaagctggctccactctgtcctatcagattttggtggtggtggcagag

SEQ ID NO: 18962 - DNA, 120 bp, Homo sapiens
caccgaccaagctgtcagggtggtacgaaaaggagaggaaacaggagtgctggacatggacccagctctgggtagctgatggtgataacacatcgattttttgtttcccttttgaaaata

SEQ ID NO: 18963 - DNA, 120 bp, Homo sapiens
gctcgtatttagcagggccctctaaatggggactggtgaaaacaaagatgttttgaacggggatccagaatttcgcccttgactctcggcaggtatgaccctgggtgcctgtgagctagg

SEQ ID NO: 18964 - DNA, 120 bp, Homo sapiens
tggcgtgctggcctcctaaaagctcctgacagccatcttaattttgatttctatttaattttctacctcacaaagcaatgtcagggtgagggagtctggtgatacctttagaatatgatt

SEQ ID NO: 18965 - DNA, 120 bp, Homo sapiens
tgccgccttttgaggagcacaatctaacactaacctccaaattccttctcgtaattcagcattcattagtttgacggaacaaaagcaggcattctctattataaagcagaggtcaaaact

SEQ ID NO: 18966 - DNA, 120 bp, Homo sapiens
ttccggcttctcttggaaaacgggaagagcagacaactctggggctactgagtaacagctgcccctttcagatatggaagctctctctggttcatctgcacaacctgtctccccttgggc

SEQ ID NO: 18967 - DNA, 120 bp, Homo sapiens
taccgtgcctgtgtgtgacacatcctgctgttcctgtgttcagcaagagctgaggctcttcctagcagttcttaacgtccctcccagaaatttccctaacagctgctgatccggatgtgt

SEQ ID NO: 18968 - DNA, 120 bp, Homo sapiens
gaccgccatctgggagtcctcagaaacagtgaattgtcagcactgtaaacattttaagcttcggggaggacactgactttttctaaactaatcacccctgccagtcaagatgtgcagtgt

SEQ ID NO: 18969 - DNA, 120 bp, Homo sapiens
gtacggggagaggaagttagctacaaagataaactcatcaaaagcctgtcctacaattctaattgccctctacctgtttgtgaatgatagctgggagcaaccgctgaaaagctttggggg

SEQ ID NO: 18970 - DNA, 120 bp, Homo sapiens
ccccgaggtgctgtcatgtcaagggaatttataacaaaaaaaacttcatttttcattggtcattacttttttccctccaggacaagagagggttattactgtagccttaagttccatctt

SEQ ID NO: 18971 - DNA, 120 bp, Homo sapiens
tgccggtaattacaggaatttgcactaaatggctgaagaattcacagcaaaacttctccccaccacctcttgggtttacccctcccaagggttggagggaaaaaaagaaaagcaaaaaag

SEQ ID NO: 18972 - DNA, 120 bp, Homo sapiens
ttgcgtaaggtctttagttgaattttttctatgagtccagaatcctcagcagaaaaaagctcccaatcagcaaaaagcagttccctctcaggagggagaacccgaggctaacagagtagg

SEQ ID NO: 18973 - DNA, 120 bp, Homo sapiens
tcccgcgcctatgactcctttctaccatcaggtggcagcacataatcccggagaaagccatccagcctagcacagtacccatattgtgtcatgcggccaattccagttgcaggaaattct

SEQ ID NO: 18974 - DNA, 120 bp, Homo sapiens
catcgatcccaatagtcaccttcccagcttcagtccttgaaggcaaatagaaggtccacgtgtgcagtggtctatcaggggctggtcattgctaagactcacattgatggaggtagtgat

SEQ ID NO: 18975 - DNA, 120 bp, Homo sapiens
gtgcgaaggcaaatatcacagggcctttggtgttcagcctgtgacatcctttctgacaacaaatgaagggacaatggagacctccccctgaaacccagactaaaaccaattggcaccatt

SEQ ID NO: 18976 - DNA, 120 bp, Homo sapiens
gttcgttattttagacaggtggggaagtggctgtgagacctctggcttggtagcctgattgcagtcttctgttgtgtgggtgccccagacatgcagcatgcctggcaagtcatgtccttt

SEQ ID NO: 18977 - DNA, 120 bp, Homo sapiens
aaacgtgttgctcaatatttttctatgccagtcttcagccactttacccttttaaaaattctatctctacctaaaggtacaaagaacagaagcaagtttatgaaaaacacagcgaaaaaa

SEQ ID NO: 18978 - DNA, 120 bp, Homo sapiens
tcacgtgtgcaccaccatgcccagccagattatcctttctgagtttgctacacggaggggtaactcatttacctatgtagatccaattccacgtagggaaaaatgagtttctctttaatc

SEQ ID NO: 18979 - DNA, 120 bp, Homo sapiens
caacgtagtgtttatataaacaacgtagtgactactaaaagaacaattcatgcaattcaatttatgtgtagttgaataaaaagctagtaacagcaattctatttaccattagaattgagt

SEQ ID NO: 18980 - DNA, 120 bp, Homo sapiens
acacgcggtttctgagctagccctcataacaatccaaaaaaatggccatcatttccccattttactttgttaaaaaaaaaagagctttcccaaggccacctagctagagcgtggcagagc

SEQ ID NO: 18981 - DNA, 120 bp, Homo sapiens
taacgtgcccttcataatgcaatcattattctcaactactggtttgtcttaagaaatgagattatttccacaatctcatgtttattgaacacttcagtccaactcatcattttactgggc

SEQ ID NO: 18982 - DNA, 120 bp, Homo sapiens
aagcgagacgaagaattcctggtggaactgttttcctagagataacacagacattggagatgtggggctaaatacaacaaagtgatttctcaattagaagaatctctatacagtagggcc

SEQ ID NO: 18983 - DNA, 120 bp, Homo sapiens
ggacgctttggaagaaatgaaactgtcccagcttgtccctagaggcagaagaagctctgagcctgctaaaagttatctattccttctaatgatgctctaatcgaaactcttttttaatcc

SEQ ID NO: 18984 - DNA, 120 bp, Homo sapiens
aagcgtctgtttcttgacaagcctggatgtatttccaatccccaggcccattttcacttcccaaattcgcaattctagaattcttcttactagtgtttaggagattcctttgggggaacc

SEQ ID NO: 18985 - DNA, 120 bp, Homo sapiens
tctcgaacttaccagatttctaatggaatctctggtttgtaatacagtctatgctactaaaacatatttctagaacatcaattagcttatatgtagttggcaaacagaataatgtcagat

SEQ ID NO: 18986 - DNA, 120 bp, Homo sapiens
acccgcatctctgtgtggttcttggtagctttgctgctcagagctccatttctagttgtagcgttgcaatagtttttgtgcatttaattttacttgaggcagcctcatgccatatgaagc

SEQ ID NO: 18987 - DNA, 120 bp, Homo sapiens
aatcggccttaggttccctgcctccagactattctgcctcacctggcctagcagtgtcgctttctgttcattctgttcattctcttcctggttgtttaaccactggagaatccgtaactt

SEQ ID NO: 18988 - DNA, 120 bp, Homo sapiens
ttgcgattggctgaatttgtgggtgggcagggctctccgctgccagtgcctccgtgctccgagggaccacaggtccactacgtgaggggaggcttccctcccacaggaactcacacctgt

SEQ ID NO: 18989 - DNA, 120 bp, Homo sapiens
agccgggaggcccgccccctgcctgggttcctgcaggggaaggcgagggtggctggatagagcgtaccctgagaggtggttgggcaggaggctgggctggtggccagctgcgcagggaga

SEQ ID NO: 18990 - DNA, 120 bp, Homo sapiens
ccacgtgaacagcagtaggtatgagttatatattttttaaattaataatttttaaaagaccctaccatgttctggccactagaaacaaggacttcgcaaggaatgagcactggtgaggag

SEQ ID NO: 18991 - DNA, 120 bp, Homo sapiens
gtccggggcagaagaaaagcagagaagtggaaataggagtgacttcaggggaaagaggagagaagggaaattcccagccctggcatggaaggaaggagtgttctcattattgggccacta

SEQ ID NO: 18992 - DNA, 120 bp, Homo sapiens
taccggaaaggcagtaccaggcaaactgaagggggaagttagccgagacttgggcctaggccagcactgcagggtggagtcaaaggccagactgggcgaggccctaaagtccctggacag

SEQ ID NO: 18993 - DNA, 120 bp, Homo sapiens
ggacgtgttcattcattaccaaagcaccaggggcttccagtctggcaggtgtagctcagcgaaagggaatccaatctgtgttcaagagtcagaaatgtttcctgtctggcagatatgccc

SEQ ID NO: 18994 - DNA, 120 bp, Homo sapiens
catcgttgctgtctgcagcacaaacctggagtgataccagttcccttcttataataacgtaactaatattaatgtagcattttgcacttggcagagtacttttgttatttcatttaatcc

SEQ ID NO: 18995 - DNA, 120 bp, Homo sapiens
ccccgtgtcctgctgatttttctctgcagtgactaacacagtgcatcataatgcatagggaacacttaacgaaagcttgctaagtgatggactaaatgaaaaactgaagaaatgaaaagt

SEQ ID NO: 18996 - DNA, 120 bp, Homo sapiens
ctccgaagaaactcagttgaagagttccaaaaacgcagcatcgttgacctaagtgtgtggtctctatagaacacattttcagccgtagaatgtggcattgctatccatcaagtcgccatc

SEQ ID NO: 18997 - DNA, 120 bp, Homo sapiens
caccgttcttcccttccacatctaagcagtcattaagtcctgccaggtttacctcaggaatagcctcagcccacagtgcctccttgtctaatatctagacaatagatgctagtctctccc

SEQ ID NO: 18998 - DNA, 120 bp, Homo sapiens
tcccgtttgcaatcaatccttccccaactccccaaagttattcccctgtaaccagtatattaaacaagatggatttgggatggctcaaacagaaagcacttgtcctatcttataactatg

SEQ ID NO: 18999 - DNA, 120 bp, Homo sapiens
ggcgtcattatacttgtttgagcaaaatgcctgcagcacagaaaagagttattgctgttgcctgggtgagccatggaagagcccacagagaaagtgacatttgagctaagctcaaatgag

SEQ ID NO: 19000 - DNA, 120 bp, Homo sapiens
gggcgcagtgagctgtagagaatgccagaggaccatgtgccctgggattggcagacggcgagcctggcatgactggaccagatttagaagggccttgaatgccaccctgaggcctttgca

SEQ ID NO: 19001 - DNA, 120 bp, Homo sapiens
tgacggtggagggatggactgagaaactgcttgtgtgacccaaacagaagcccttctccactgagaacaggggcgtcccttcaacaaggacagcaggagctcaccatgtccacgacattt

SEQ ID NO: 19002 - DNA, 120 bp, Homo sapiens
tggcgagcatggcccaggtgttcctggcccagcgggtccggtcaatccaagttgagaaggccacaagcttcttaggaaaggcctagaaggaacagaatttcaagggccatgagcctttgc

SEQ ID NO: 19003 - DNA, 120 bp, Homo sapiens
ctgcgacgtgactgacagcaactcaggctggtcccgtattccagtcccaggagcctcaaaacggactctgcctgggagtcacctgacagctgaccaaggggcagagctgagaagagggcg

SEQ ID NO: 19004 - DNA, 120 bp, Homo sapiens
tgacgctgtgttggacctcctcgatgtgcctgttcaacagcacagcctccaggtcgcagccctttccacagcagacgtggtgacgaggtgaggccagggcaggaacagttttcagggctg

SEQ ID NO: 19005 - DNA, 120 bp, Homo sapiens
gctcgtctctggccagctactcctgcctatcctggctccaagtgacctggcgagccacctgtcagatttatgttcctaaacactgctttacctttgtcattctgattaaaaaaaaaaaaa

SEQ ID NO: 19006 - DNA, 120 bp, Homo sapiens
catcggggccaacccaccttccagccggccctccacttcctctctacccaggttcttgtttacccagactctgccgtactcatacgtgctgcagcgccacggcccaacaaggcccaccac

SEQ ID NO: 19007 - DNA, 120 bp, Homo sapiens
ccacggcccagccgtggcccaccacagcctgccacagcctggtggcccagccagagggagtgctctgctgatggtgaatgaatggatgggcaagtgcctggaccgtcctaacagaggagt

SEQ ID NO: 19008 - DNA, 120 bp, Homo sapiens
acccggggaaagatggcagccagggagcagatggtcaggatgaggagcagaatctcccccaccatgaaggtcacatagtttgtcattagcctgtgacagagagaagacaattgggagagg

SEQ ID NO: 19009 - DNA, 120 bp, Homo sapiens
ggacggggatgggggcaggggccaggggacagcggacagggggcaggggacagtggacaggggccagggggcaggggacagcggacaggggccaggggacagcggacagtggccagggga

SEQ ID NO: 19010 - DNA, 120 bp, Homo sapiens
tcacgtcagtcagcaaggattctgggcacgccctgcctctcctgacacccagaaggtcaccgcttcagagctgactctaccccagccccactaaccacagaacagagctggcgtgggagt

SEQ ID NO: 19011 - DNA, 120 bp, Homo sapiens
gcacgaggctggcaggctgggcaccaaacccagatgcagacatctccgcctcattctctggtcaccggcttgctggctccccagggacacacactgcctactgtccctcaggtcccctgg

SEQ ID NO: 19012 - DNA, 120 bp, Homo sapiens
ggccgaaattccaccccttccagtagaaagcgtgctccaggaccagcagaatgcgtgctttaggaccaggagaccctacgtcacagtggccggcatgactgtccccatttgcatccccac

SEQ ID NO: 19013 - DNA, 120 bp, Homo sapiens
ccccgagctcccggaggcaggaaatatgacaactgcgtcttccctctgtgcagcccttcacgtatcctaatgcgctttcccccacatctcctgcaatcctgacaacaaccgtgtcatgca

SEQ ID NO: 19014 - DNA, 120 bp, Homo sapiens
gagcggacgttatccccatttgacaaaggggcactgagtccacacagctagtcagtgctggggagagatgggaatcaaggagccctcttcccaagggaggtcctccttgccagggtcact

SEQ ID NO: 19015 - DNA, 120 bp, Homo sapiens
ctccgggtaatggcacaggggtgaaaaggcagggactagggagagaggtgagagccccggaggcccccaggacacattttgactcaaaggcaaagcaaacagcaactccaacaggtccca

SEQ ID NO: 19016 - DNA, 120 bp, Homo sapiens
ggacgctgtggggggacagtgggcaggactcacctcccgcagcagctgcatccccttgagctcctcctgctgctgctgggccacggtgacccccaggaccaacgtgtgcaccacacagga

SEQ ID NO: 19017 - DNA, 120 bp, Homo sapiens
ccacggagatgatcacgatggggctgaggctgaggggcagcgtgatgaagaaggagaagacaaagaagacctgccagcccaccgtgtcactagccgcgtgggcacgcgcgaagttcaggc

SEQ ID NO: 19018 - DNA, 120 bp, Homo sapiens
gggcggttatgagcagccacagcacgtagggcagcactctgcgggtgacccggtccgggagcagcccctttttgcagagcacgaagaggatgatgtccaacaccagtccaattccagcca

SEQ ID NO: 19019 - DNA, 120 bp, Homo sapiens
ccacggcgagggaagccagcttgtcgctggagaagaccacagcacacatgaccaccacgtagcagtcaaagagggctgcaaagaccaccagcaccagcagggtctcgtggcgctgccttt

SEQ ID NO: 19020 - DNA, 120 bp, Homo sapiens
ctccggcacgaaagtcagccgcatgaagcgaggcaggcacaggcaggagcccgagttccggaccgagatttcatgggtccggcccaccccgcggtcagggtcggagggcaggctgacgga

SEQ ID NO: 19021 - DNA, 120 bp, Homo sapiens
actcggctgagtactcggccgagtattcgggctcggagaagccctggttcctcggcatactggctggtgtctgctactggccctagagaagtggactgggaacggaggaagagctctgga

SEQ ID NO: 19022 - DNA, 120 bp, Homo sapiens
gaccgggggagggctgagggcctcttcttgtctggggcggaggggaggccacctccagcaggaacgcagagcgggtttccagagcacaggtagcactgatcagctagaactgaaaagggc

SEQ ID NO: 19023 - DNA, 120 bp, Homo sapiens
caccggcacactagccacagtgccagtaacacccatgggcccgatccccagacagcggcagcagctccccttcctgcgccccgccctgcaggcaccgcgcgctgccttcttccctttggt

SEQ ID NO: 19024 - DNA, 120 bp, Homo sapiens
ttccgcggtggggactcccggcgtccctgttgtgcgggtggagaagcgggagcgcagagacatgaggtaacttgctccggccccagctaggaaggggcggaggcccaggctctggccacc

SEQ ID NO: 19025 - DNA, 120 bp, Homo sapiens
gtccggctgtaccaggaaggctcaggaagcttcctttgcttgtcactgcttctctgtagccaagggtgcccttgacctcagggactcagagcgaatcctggagagtcacagctccctgct

SEQ ID NO: 19026 - DNA, 120 bp, Homo sapiens
acacgtgcccacggagcgtgaaacggcatgtgaatgctgagtaattccgaggcctctgcgggacgtcacgtttccaaaagcgcgcgagccctgcccctccggcaagaggcaccatagaaa

SEQ ID NO: 19027 - DNA, 120 bp, Homo sapiens
ctgcggcctgcggggaataggagagagcaggaagctttcagaacaacaagagtggctagaaaaggccccggatgggaggagacgaacagcccagccccacggtctttctcatgggtggaa

SEQ ID NO: 19028 - DNA, 120 bp, Homo sapiens
agccgatgcacctccagaatttttgctgagaccaagggcaatgacagccctagagacagaagggatacaggagaatcagtactggacattgacggaggctgtgcaggggaggtggagaag

SEQ ID NO: 19029 - DNA, 120 bp, Homo sapiens
tgccgtctggggactcaacaggggcacagatggagtggcagatagggctcaatgtgcctgcctggtctctgaggagaaacctctgactgaatgggacccagagtgcagctattaagctgg

SEQ ID NO: 19030 - DNA, 120 bp, Homo sapiens
gggcgtaggcatgagccgctgcctctctgtgcctgttcctcatagggtcacggcaggtgcagagctggaattcaagtcggcgctggggctcagctggagaggatcctggcggcaaagctt

SEQ ID NO: 19031 - DNA, 120 bp, Homo sapiens
ttgcgaattacacatataaatcagggagaggaaaagcaagcggacttcctgcagcccttgggggttgggagtggggtgcgtttcctgcgtccctgacccgggaaggacgctgtttggtgg

SEQ ID NO: 19032 - DNA, 120 bp, Homo sapiens
atgcggaggagggagttgatgtttataagaaggaaaggagaggccaggaggggaggtgacttccctgagtctcacgctgttcaaaggcaggtgaagtcacacatcacgccagcttccctc

SEQ ID NO: 19033 - DNA, 120 bp, Homo sapiens
cttcgcctgaacaagcagtgggagaagattatataaggtaatacagtgtgaaggatgcacagaagtcgagctggcagagagtacgctgtgcctgtggtcggagagtgttgttcatggaag

SEQ ID NO: 19034 - DNA, 120 bp, Homo sapiens
atccgccaggtgtcaggtctgtggcgctgactctcctgccccttcaacatctccagcttgtggccggtccctgtcaccaaaacatcctttcattcactgccacgagactgcgtggctccc

SEQ ID NO: 19035 - DNA, 120 bp, Homo sapiens
ttccgacctcccaacccttctcactgtggactctggctgctagacacagagtgttccaggaggcagagcatgagtgagaggaccccctacagtggaggaaggacttgaagatgaagcaac

SEQ ID NO: 19036 - DNA, 120 bp, Homo sapiens
ggacggcggtgggcagcccaatgtgggcagagagaggatgagatgtgaatttcaaggcatcgttcatgggcatgcaatatgatgggcagtgatgtgcagagcagcaaaaaccgagcagtc

SEQ ID NO: 19037 - DNA, 120 bp, Homo sapiens
atgcgagtaaatcccctagaaacgaagggagagcaggggagggaacagcagtgctgggtaagactcgctcagtcgacagtgacccctgagcattgatgggtgcagaatgccatataagac

SEQ ID NO: 19038 - DNA, 120 bp, Homo sapiens
agacgccgtcaggatccccagtacctggagctctcacccagccaggaccaagccctggcggatggagatggccatgccagagggttgagcttctctaatctgaggaccctggccctggag

SEQ ID NO: 19039 - DNA, 120 bp, Homo sapiens
taccgcagacccctactagatgaggagggtcatccctcccttcctgagctgaggtcagccctctctccctacttctggactcctaaaacccagaagattctgtctaggagtgggctgacc

SEQ ID NO: 19040 - DNA, 120 bp, Homo sapiens
gagcgattcttgtgcaaatgactggccctactaaagctgcctccctcatcctgcctgctgaccctaatccctgaccctgtatctgcctttcctctccaactaagcctggttcccagactt

SEQ ID NO: 19041 - DNA, 120 bp, Homo sapiens
acccgccccagatcagatctctgctggtagtaatcttctaactcggggatcccaggctctattccttttgagtgtgtaacagattagacacactcgagaagattacaataaaatagcaca

SEQ ID NO: 19042 - DNA, 120 bp, Homo sapiens
actcggggcttccaaggtcccattgacttcgaattatgtaagatgctttgaaaagctcaagttcataattataaacattccatccttactattgggatcagagatgaggaacaaaggatc

SEQ ID NO: 19043 - DNA, 120 bp, Homo sapiens
tcacgaggccttgagtttcttctcttgcccaaccccaccccttcctttacgtcatgtaaacactgtaataatggtgaaatgctgcagatcccttcatacagaaggacgctgggatgattc

SEQ ID NO: 19044 - DNA, 120 bp, Homo sapiens
attcgtaagggaagagaatcccatgctgcctgccctcatttcctacccgccatgcttggctgcctgaaggtgtccaggtctctctgcagccaaagcctgtcccctttggaagggctccag

SEQ ID NO: 19045 - DNA, 120 bp, Homo sapiens
gggcgaggctgcagagccaggaatggctgtcctgggagcaaggaggaatggtaggcatggctcccattcaccagaggagctcaaagagccaaggctgcctttgtatttgaaagacattct

SEQ ID NO: 19046 - DNA, 120 bp, Homo sapiens
agccgacacccctttgtgcccagagagcctgcagctctgtgcctctccctctggatccgcctccccctgcccccgcaagttgctcacagcctcggattctgcttcatcagttcttggcag

SEQ ID NO: 19047 - DNA, 120 bp, Homo sapiens
cagcgttttgagctcttacatcttgggcccaagctggaacaaccccagctaagtactaaagatggggagctggagcatccagcaccctagggctggagcccagatggtaccagggcaagg

SEQ ID NO: 19048 - DNA, 120 bp, Homo sapiens
caccgaagctggacttctcagggctagaggacttccgagtcccacttcacccttttccttacagaattcgaatgtcaggcatcaaaggcctgcaaggggtggtgaggaagacggtgaatg

SEQ ID NO: 19049 - DNA, 120 bp, Homo sapiens
gatcgttccatcactgcttttcaatctacagcatgtagaggaggcagagaggtaagcaggccgggatggggcaggacagtagatataatcaaccctccaagggctgcttgggaaccacat

SEQ ID NO: 19050 - DNA, 120 bp, Homo sapiens
gtgcgttaccgaaggaggacagtgttggtgctgggctccctggtgggtaaatctgttggtaataacacacagaaccaagagtctggttacctttgtctccctggaagcagggccaaggag

SEQ ID NO: 19051 - DNA, 120 bp, Homo sapiens
aaacgtgcatgcttgaccagcccgcagccactcagtaagagcttgcagatactgggttttaatcctggatcccctaagcatgggattcattcctgtccctgcaccctcatttttcccctc

SEQ ID NO: 19052 - DNA, 120 bp, Homo sapiens
gagcgctcagaagggctcactactcaagaacgaaggtgtgggcccagtgagacagactgtattcttcacacaagagcaagagagagatgcttctgcctcagtctaggaagccgagattcg

SEQ ID NO: 19053 - DNA, 120 bp, Homo sapiens
caccgtgaaggtccccaggtgggaggctctgtgacctgtacctaaagccctgcattatttaagactttagaagactcggtctggtggttacaatccctgacagtagggcagccctgccct

SEQ ID NO: 19054 - DNA, 120 bp, Homo sapiens
acccggtgcagtaccatcacgggaaacggaattttttttcattttacaagttccttaattcccttaaagacatcctgggagacatataatacaggaatacaaagtaatcccgttaccttg

SEQ ID NO: 19055 - DNA, 120 bp, Homo sapiens
gcacgctccatgaccggcccagcagtctctgcctcgccaagcggctcatgttggagacgtcagtatagtggactgggaaaccaaataccctgggggagaaaaggcagagagggcagggtg

SEQ ID NO: 19056 - DNA, 120 bp, Homo sapiens
gcccggaagccgtctaaccacacagcaggacccggaggaccagcagccacccgaagtgcagggacaggggcactcacacccaccaactcctctgacgcctgcttagttctgccgaatctt

SEQ ID NO: 19057 - DNA, 120 bp, Homo sapiens
acccggcactcagatcaccaaccatgtgccaggcactgtgctggtttctgtgaccttaaaggtagtaaggtcatcactgcctagagtttcacaacccagcagaaataagagtaattttga

SEQ ID NO: 19058 - DNA, 120 bp, Homo sapiens
gctcggcaacgtacacctggagtctgcatgtaacgaacacgtagccctagcatcctccccatcaagagcagggaaggcgaaaaaggagccgaactcctgcctgacttcagaagctgaagg

SEQ ID NO: 19059 - DNA, 120 bp, Homo sapiens
ccccgaaagtcccatttgcatcaaatcagggtgttgaggctgcgaggtctgcctggccctatgctggcttggtttacaaaagacctataaaattggcaccacaagttaaggtcctgtcac

SEQ ID NO: 19060 - DNA, 120 bp, Homo sapiens
ggacgtttgtggaaaacaagtcaggtgggaaaggcagaggacccccgcagcaagcacagcaatcagaacagccacaccgcagccagatgccagcacaacccgggtacctttccatttcag

SEQ ID NO: 19061 - DNA, 120 bp, Homo sapiens
ccacggcccctttgtctctcagccccttcacagcgagttcctgaacattcttcttcccccacaacttcccccagcttgtcagatgccgcgctgcgagctgttcagcatccccagcccact

SEQ ID NO: 19062 - DNA, 120 bp, Homo sapiens
acacgcacccggcccggtaagggctggcggaggaggaaggggcctccatcaggactggggcagtggggtgggggaaggaagaagcgggggggggggtgggtgagcagcagggggcctgac

SEQ ID NO: 19063 - DNA, 120 bp, Homo sapiens
tgacgaaaggggaaggggcagccggagctgggtgggggaggggcctcactagactaggcctgtctggggcgtagggaaagcacccctttccctctgcactcctgccttcctccccaggca

SEQ ID NO: 19064 - DNA, 120 bp, Homo sapiens
tgccgttccctgatggtgggcatttgggctgatttgcttttcactgcagtgaacacccttgcacttacagctctgtacagctgcgtgtttccatgggacggagttccagaagtggtcagg

SEQ ID NO: 19065 - DNA, 120 bp, Homo sapiens
acacggcagtgagggctggagaaggaccaaagagggcaatttaaggagcacagcagaggaagcatctggaaaggatgccaggggactggggagccccgtgccgtctgtggagggagaggc

SEQ ID NO: 19066 - DNA, 120 bp, Homo sapiens
ccccgaggccggagatccttcaggggctcttttcaggaaagcacagcagacgggcggtgagggcagaaaggctgtgggaggaggagcaaactcgcgggagccttcatgagggctcagggt

SEQ ID NO: 19067 - DNA, 120 bp, Homo sapiens
aggcgtgtgaacgctgatatataacacagtcttcaacagatgcttatatgacagcaccaggtactctggcactagggctgaagaggatgcttgtgtgagaaacgagaggctgagtgagag

SEQ ID NO: 19068 - DNA, 120 bp, Homo sapiens
tcacggcccacaaacctaaatcctcactccaccaaacacgatcccaatattctcaccctaagggccccttcttctccgtctcaagttctctgtctgaatggctgaaaaatatctgaccat

SEQ ID NO: 19069 - DNA, 120 bp, Homo sapiens
tcccggtgggaaacgcttgtcaaaaggttttcgttgtgcctgtgctgacctcaaccctcaccccaggcaagtggtgagcacgtgaccaggcagagccaatcagaggcctccctggaacct

SEQ ID NO: 19070 - DNA, 120 bp, Homo sapiens
tatcgatgcgatggaaggatgctaacatggtcgatgtgagtcaggggctgccagctgctgtcttcccgccatgtgggtgagcctgcctgagaacgaagagctcagagatgaagacagagg

SEQ ID NO: 19071 - DNA, 120 bp, Homo sapiens
aagcgttgtagtcactgtctgggcccctggtcttgctgttcctggaggcagggacgtctctgaacttccggggactgtgagctttcactactttggtatgagtctatgacttgtggttga

SEQ ID NO: 19072 - DNA, 120 bp, Homo sapiens
ctgcggggtttccaacactggccttatttcttaccagctgtgtggcctgaggcgaaactgtgcctcagttttctcagctgtcgagtgggagaaagaactttccacctcacagcgctgctg

SEQ ID NO: 19073 - DNA, 120 bp, Homo sapiens
gagcgcctggcacagagaaagtactcaataaatcttaacgatgattactctcagattcaaccagcccgcagatttctctcctttcttgaaatccctggagttcctctaagtggccttcgc

SEQ ID NO: 19074 - DNA, 120 bp, Homo sapiens
gcacggactggccagaaaacaaagtttccagtcagtctctctctcctggtcaggcttgtctgcagtgggagcggggaaggagggcactggagcatgctaatcacagtattcaatgccctg

SEQ ID NO: 19075 - DNA, 120 bp, Homo sapiens
gtccgtgtaactcagaacccttcgcaaatgtggcagttcttggtcatgaatgagcatgctaaacacacatctcagagccagcgccatgatcgatgtttgtgcctctggggtgaccctggc

SEQ ID NO: 19076 - DNA, 120 bp, Homo sapiens
agacggagatgtctatctgtcaactcttccccctcctgtcacaacctctcttggtcataagactggggatggataaggaggagggagagggaggggggtcttggtgccattttccagtga

SEQ ID NO: 19077 - DNA, 120 bp, Homo sapiens
gggcgaactcgcctgtgtctcccggggtcctccagggagtggcgggggagggacactccgaaggcctcctgcccccagaccatggccgttcccaagtattccccaggacacagcccacac

SEQ ID NO: 19078 - DNA, 120 bp, Homo sapiens
tctcgaacatctgcactgagcccccctcccctttcattatagtaagaagagcattagactaggagtcaggagacccaagttccagctctccggttactggctataagagatggtcctccg

SEQ ID NO: 19079 - DNA, 120 bp, Homo sapiens
agacggggcagctaataactggctcagaattaaaaatgaccttgacatttgaaacagaagcagagaggaaagatcaatagggatggtggtgagcagggccgtgaccacaggaaagagaaa

SEQ ID NO: 19080 - DNA, 120 bp, Homo sapiens
aggcgtctgcacctcccttacccccacctccactgcccaccaagcacccttgctgtcctccagacaggttggtggcctgtgatgtgatcagcaagggagatttggcccagaaggccctgc

SEQ ID NO: 19081 - DNA, 120 bp, Homo sapiens
ggccgtctgcagggcacctcccctctgggttggtggctcggttctgcccagcgtgtgtgttgggggacagggtcaggctgcagagacaggaacctgacgtcttcacccccatttccctgg

SEQ ID NO: 19082 - DNA, 120 bp, Homo sapiens
gggcgcctcagcctgatggagtgggcaaggggggacatggagacctctgggaggccagaaaagggacccttctccacctgccacatcctcaaccatgactgctatcactcgctcgcagac

SEQ ID NO: 19083 - DNA, 120 bp, Homo sapiens
aatcgtcacaaccccctggggtcagtgtaatttaaaccctgttctgttgctctccaagtctgagctcttaagctctggtctatggaatagaaagaatcaggatccgacaccaaatgagct

SEQ ID NO: 19084 - DNA, 120 bp, Homo sapiens
ggccgccacgctgaggcagttcagagcgatcctccgtgggccacagaggagttccggagtgcagggatctcctccccaaaccaaggcagggcctcagcctggcctccagcacaacccagg

SEQ ID NO: 19085 - DNA, 120 bp, Homo sapiens
tcccgggcactacagccacccacaatgatgtcctgcccctgaagccccacttctgtgctctggggcgcttctgagatgccacctccttcaagaagccttccctgatgaccttagttggtt

SEQ ID NO: 19086 - DNA, 120 bp, Homo sapiens
cttcgttagctgggcgcatcctaaacacaccgtgtcccctcaaagccagcacagggcatggcttacaggaaatgctcagcacatctctggaaaatggaagcgaatacggtgggaaagtgc

SEQ ID NO: 19087 - DNA, 120 bp, Homo sapiens
taacgagctgaaactacagcgggagggatttcaggtggaagcaaaacaacctgttgacacgagatttgttcaactcaacagattgctaagtgtcgctgagaagcctcccacctcccagga

SEQ ID NO: 19088 - DNA, 120 bp, Homo sapiens
aatcggcactttcctcatctgaccaagattctgcaaaagacacaggaaggtggacgaggcttcttagagcacttcctgcagtgctagtccacgtgagccacccaaatgatgaaaacagac

SEQ ID NO: 19089 - DNA, 120 bp, Homo sapiens
tcccgctcctctaaggctgtaacgcacatgatctcactccatcctcacaaccacctgtaagcagaatccacgcacactcccatgttacaggtgaggaaactgaggcccagggaatcgagt

SEQ ID NO: 19090 - DNA, 120 bp, Homo sapiens
tgccgctgggaggtgtcagagtgcagctccctgtgactcgagggcctcaagctgccttgacactggctcatgtggaagcaagtcctacccatccacaggtggcggcacaccacgtacaca

SEQ ID NO: 19091 - DNA, 120 bp, Homo sapiens
cctcgtcttgcccacacacttagccaagtggaggcaggctcggatacagacataaatctcaggctgacacttcatggatctcagatttggtcatgttcttagggaaaaatcgtcagagag

SEQ ID NO: 19092 - DNA, 120 bp, Homo sapiens
tgacgggctctctgctcacatactaatattcaaacaaaagtagaagctattccccgagggccgcagcatggggaatggcattggggtagatgctctggccctacctgctggaggccagag

SEQ ID NO: 19093 - DNA, 120 bp, Homo sapiens
gcacggggtggggaggatacgagcaccaagtccaggaccccaggccagcaagttggaggcagcaggaagtaccctgggagaggcatgtgactggcacgtgaatggccctccaggcctcag

SEQ ID NO: 19094 - DNA, 120 bp, Homo sapiens
tcccgtacccagcactaagagctctcagagcttaaactcctctttcagactgcaattctaaggtttgggttctaatgctgacatttcgggcccaaagatggggagagggtggtctgtttt

SEQ ID NO: 19095 - DNA, 120 bp, Homo sapiens
ctgcgcgtggggcaggggccgggctaggggcaggatcccagcggaaggtcatctgcagccctggctaatgggatatcctggtggaaagcaagtggggatctaattagggtaaaatccagg

SEQ ID NO: 19096 - DNA, 120 bp, Homo sapiens
gaacgattcccacaagcccaggatgcggctcggagagtccacctcaaatcggcctccttgtcagcttttctcccccagggcccttcctggcttccttcctccaccttccctggcctcagg

SEQ ID NO: 19097 - DNA, 120 bp, Homo sapiens
tgccgtgcggccaccgtatcccagtgtccatggctccccgtcagctccagctctgcctctcttctcatccccttcgttctctttccctctccttgcccctggctcttcagcccacgtgtc

SEQ ID NO: 19098 - DNA, 120 bp, Homo sapiens
tggcgtcaccctgctgttctcggtgtgcctcgtttctttgttctcctcctccgggagtgggaagagctgggctctgggctcccgggggtaggctgggtggcaaagggtgaacctgaaatg

SEQ ID NO: 19099 - DNA, 120 bp, Homo sapiens
ccacggaggaggggactgcgtcccagcccagccaggagacctccttgttaaccctcagccccactgtccccagcctggctcatccccaggagctggtccagaaggaagctcgaacatctc

SEQ ID NO: 19100 - DNA, 120 bp, Homo sapiens
tcccgcctggctccctcacagccaacatttgtgccaggcccttgggccagagcgattcctgggccgcctgcctcctcgctgcgtggcctccttctcagcaggcccagggcatattccttt

SEQ ID NO: 19101 - DNA, 120 bp, Homo sapiens
acacgagcaaggccaaggagggcagggtcctcaccagggcagctccctgctgtttctggctgggaagcagaggacctgctgcttcttgtcggcacccatggccaataggttttgtggagg

SEQ ID NO: 19102 - DNA, 120 bp, Homo sapiens
ccacggggcctcgtctgaaggaaaggaaacaggcctgggattgggaggagctgtggggaggacttccagacgcttcagacgtggagcccaggctgaatctcctcagtgagggccatgggt

SEQ ID NO: 19103 - DNA, 120 bp, Homo sapiens
ccacgccatggtggtggagacagtgtggctcacgcgctgaggcctgaacaaaaagcctgatgggtacaggtgcccttcaggccggaaggtggggggcggggcggacagctgccccagtcc

SEQ ID NO: 19104 - DNA, 120 bp, Homo sapiens
tcccgggctccagcacaggctgctctcctggggagaacggcagcaccttcggcctgtaccgtttaagccaggggccccgccagggtgtgcccgcagccacgcttgtgctctgaggactct

SEQ ID NO: 19105 - DNA, 120 bp, Homo sapiens
gcccgtgccactacccctggcgtcaggcctatgaactctgcctggcagtgtggccatggctgtaggccaagctttggacaggtgtttctgccacctggttgaggacttgctggggctgac

SEQ ID NO: 19106 - DNA, 120 bp, Homo sapiens
ctgcgtggtaacggactcgttttgagccagcagtgagctgggtcccagggggctgtaaggcctctgtatgtttgccgtgactcttgaactcaaggacacacccctgggttcctcgggtcc

SEQ ID NO: 19107 - DNA, 120 bp, Homo sapiens
gtccgtgccacatatgtcattctcatcaactcgttggcgctgctgtccacttcctcccaggcctagctcagactcactagacgatttcagaatctgcagaatcttcttcctcttctccca

SEQ ID NO: 19108 - DNA, 120 bp, Homo sapiens
ccccgtgagactccaaagacgaccctgtcttagccactccagcccctatgggccaagaatgctccagacccactgtcctgtaggtttccctttcttgtcacagcttccttacctgtatct

SEQ ID NO: 19109 - DNA, 120 bp, Homo sapiens
ccccgagccttgttcagaattcctccctgggagggctgctgctggctcctcctcatgcttcctgctctccctaccttcacctccttggggtgaccagccattgcatttctctccccgata

SEQ ID NO: 19110 - DNA, 120 bp, Homo sapiens
tctcggtcacgtcatggcatattctgcttctaactttcctttctcacaagtggagtccgtaccacagctgctggccacgtaggccttgtacagatgatgctgatgaggaggtgtagggag

SEQ ID NO: 19111 - DNA, 120 bp, Homo sapiens
tggcgcacatgcagtctgagaaaccttctgtgcacagcaacattcctgacatgctgacaatcacctctgaatctggctggagtttgttccttctgtttacttgataggcacaggccagac

SEQ ID NO: 19112 - DNA, 120 bp, Homo sapiens
caccgcactgtgcaaatgcacctcgtctcaaaagcacagatgggctttatgttcagagaggcaggcccttctccatggagactgctgaacactccgctcaacgcgaaccagtctagaata

SEQ ID NO: 19113 - DNA, 120 bp, Homo sapiens
atacgcggcacagtgggagacttggggagggggaggcatcacagttggcaccctgagattacaggaaacctgagaaacacctagaaatctgcaaaggtagagcaactagtcaggtggctc

SEQ ID NO: 19114 - DNA, 120 bp, Homo sapiens
attcgcctggagaagcaagggaagctctgcaatgtgctactcagtgttttaaggtttcctgatataaggagtggaatcttgttgtagtacaagctgtaacaaaggcttgagtccagcaca

SEQ ID NO: 19115 - DNA, 120 bp, Homo sapiens
acccgagaaagctctgcatcatgttccaagaaaagtgttcagaaattacaaaatcagagggttcatgaccccagcaaactagcttgttttagtccaacattcatttttcatttgaggagg

SEQ ID NO: 19116 - DNA, 120 bp, Homo sapiens
tggcggaaaactaagcatattgggatcacagcacaatgtttctgagactaaaaggaacatggatcagtcaagacttctgatgactgacactaaccgtgattttccaggggacagtcaatt

SEQ ID NO: 19117 - DNA, 120 bp, Homo sapiens
acacggggatccttcaccagctctgcatctgagcacagaggcagggacgcacatgctgtggcagagagaactggccaggagaccagctgcacggagagaaaggcagtgtctttagtagga

SEQ ID NO: 19118 - DNA, 120 bp, Homo sapiens
acacgcacacgcaactacaacttggagctaagctgttatcatggtaacagaatggaagacactttagtctccatttctatctccctgactcatggacacctgccaggtagcagatggcct

SEQ ID NO: 19119 - DNA, 120 bp, Homo sapiens
tgccgtgtatttaaattaaacaaagtggtctctttgctgccgattttcagaggccctctcagagaaacaaaaaacaatgatgggagagagttgctgcaagtctgaaatttaggcaaccgt

SEQ ID NO: 19120 - DNA, 120 bp, Homo sapiens
ggacgtgaaacgagggagaggtgatggggctatctgatgctgcactgtctgtcctgctgtgagagttggaaataaccgcctcacacgacaagagttaagactattgggagttaggactgg

SEQ ID NO: 19121 - DNA, 120 bp, Homo sapiens
ttacgaaagggagagggtgagtaaacacttggagaacataatttttattactgcaagggacagacagggactagaaataaatgggcaccgagaaatctcttaaggagactcccaactcag

SEQ ID NO: 19122 - DNA, 120 bp, Homo sapiens
gagcgctgaacactggctctggcagcgggaaggaattagagcgcttctgcttttgcacctgctttgcagttaggaagcaagctctcttccttgccagacttccctttggggcaggacact

SEQ ID NO: 19123 - DNA, 120 bp, Homo sapiens
gtgcgatggttggggagggatggggcaatcctaacaggctgaaattgtatccgaggtcaaaagaccagtatgtaatttcttagaactgtttctaagacatctccctacttccacagtttt

SEQ ID NO: 19124 - DNA, 120 bp, Homo sapiens
cttcgtgacatgtgaattggtcacaccagcctcttgatgaactgaaattcctttcatctattcaggggaacttggcagtttggtctaccttcagatgcaatgctttagtgtgacaataaa

SEQ ID NO: 19125 - DNA, 120 bp, Homo sapiens
ttacgttatagctcttttagacttgccattttttgggtcccgagttcctgtcccgtacccaggaagactgaggtatgtggaaaagtggagggtaagcaaggcaaagaggaactttattga

SEQ ID NO: 19126 - DNA, 120 bp, Homo sapiens
gttcgagtttggctgagtttagggcttttgtgggtcttaaaggggaggaagcgcatgctgacaggttcatgggtggccatgggtaggcttggaaaaagcaccacaagttcccactccagt

SEQ ID NO: 19127 - DNA, 120 bp, Homo sapiens
gcccgagctcggcctcagcctcgctctgacactggagcaggtgttgggagcagggagacgccaggcagcgggagcagggagatgccaggcagcgggagcagacacctccaagcctgcagg

SEQ ID NO: 19128 - DNA, 120 bp, Homo sapiens
atccgataaaattaatgaaggggtagtctcaacatccttacttccacaaatcacgttacttatatttttcccttcaaaaagaaaaaaaacttagctcttttctctcaattgtttgctttg

SEQ ID NO: 19129 - DNA, 120 bp, Homo sapiens
taccgcccgactttgttctttatctaactgattccttcttcttggaagaactcattcttgatccttcccacgagacatctgaaattattctgtatacactggtcaagttgaaactgaata

SEQ ID NO: 19130 - DNA, 120 bp, Homo sapiens
taacgccattaacagtgaatacgaacccctctatcaagacactaagatgaaaagataaacaggtaatatttgttgagatgataagacagaagaaacttgtgattttaaccccactcaaat

SEQ ID NO: 19131 - DNA, 120 bp, Homo sapiens
caacggcttgctaagagttattttccctttgtaaagcaaattgagtgggggtggctccagagctcggaaattctcttgggaggtggcaggggttggttggtctccaggggctctggttgc

SEQ ID NO: 19132 - DNA, 120 bp, Homo sapiens
tgacgagcaactcttcctagggcactgagggctataagcaagttattcctttaagtctatttcagggaagtgtttttattatttccacggtatttcatccctactgcaaccaaaggcaat

SEQ ID NO: 19133 - DNA, 120 bp, Homo sapiens
agacgagccaagcagcctgcttttgcacatcaaaggaagctgtcacactgctcaactgacgatgctggttaggtgtggaagaaaatatttcaaacacaagtcatctcgtggaaggctagc

SEQ ID NO: 19134 - DNA, 120 bp, Homo sapiens
ggtcggttttaacttgctttcctgccggggccctggaggtctgtggagtgtaatgagcctcctgctgagcctcttctcagtctctctcagccactgtatttctccctgcgcatttccttt

SEQ ID NO: 19135 - DNA, 120 bp, Homo sapiens
tccgtggtaactgccacagtggcagtgcctctgccaggcctgcccctgggcagccacatcacccaccccgaagggcctccaggtttttcccagaatccaagctagagctttgctgcttcc

SEQ ID NO: 19136 - DNA, 120 bp, Homo sapiens
ccacgggctttgcagggttctggtgagcggctattctcatcccttgacatgtccttgagggccttacactccccacctgagcttcccggggttccagtctcctcctcagcctctctgtat

SEQ ID NO: 19137 - DNA, 120 bp, Homo sapiens
gaacggggtaatcacccaggaccatgaagatggtaacgctggatactgcaagtgacagagtttgcagcctgtcatagcccaccctggcccaggagaaaaggctctactccacccccagcc

SEQ ID NO: 19138 - DNA, 120 bp, Homo sapiens
ccccgcctcctgcctccccctgttgctcacccccgaggccaagccatgtcactcaggggttcagcagttccagccaaatggggaggagtccctgaagcacacatcccttgggcagagact

SEQ ID NO: 19139 - DNA, 120 bp, Homo sapiens
aaccggtcctgctgcagcgtctcaccttcttgagtttcttggttttgacctccacctcctgctgcagggatgtgtaggtgccccggagctccatagtctcctcgtcccggagcatcatct

SEQ ID NO: 19140 - DNA, 120 bp, Homo sapiens
tcccgctcacgacgtttctaggccaaggacgggcagtgtggctcaaaggagcagtgcatactcgggagggccaggaaagctcaggggactggctcactctgcctgtctcgggacctggct

SEQ ID NO: 19141 - DNA, 120 bp, Homo sapiens
aggcgttagtcacacagatggaggcacatcacactgccttccaagctgcctcaccctctccccaagtagtataatggttgattggtaagaccaacaaactgtggctcttgatgatttagg

SEQ ID NO: 19142 - DNA, 120 bp, Homo sapiens
tcacgtcctctcgcccaccagctagcagtgcccctgccaaagggaagaccctgggctagtagacctgtgggacccagggtggcatgtctgagattctcagcactgtaattccagagatcc

SEQ ID NO: 19143 - DNA, 120 bp, Homo sapiens
ttacggccctgcacctcccagacatgagctgcaggccacactctccaaggggacctggcacctggaggccctacctgctcggcaatctcctgcctcttcagttccaacatcttctgctgt

SEQ ID NO: 19144 - DNA, 120 bp, Homo sapiens
gttcgttggtgtgatccatgatgttcctgcccccgatgaggagcttgctctccatggcctggggacacagaggggttgggaggtgggctttgcaaagggtccacaacattgctagctgga

SEQ ID NO: 19145 - DNA, 120 bp, Homo sapiens
cctcggggaatctagggcaactggtctgtttgctttgggtacacaggaaaggttggtccaccagggctaggaggaggatgggggtggcaacctaatcctggcaaccaggacccagctggt

SEQ ID NO: 19146 - DNA, 120 bp, Homo sapiens
cgcatggaagaaatggtagctatcattattaccaccactgttgttatttttctgctggcccacctgaagaaaggagaaaccctgcatgtacattagctagtgctatagaaatagctcagc

SEQ ID NO: 19147 - DNA, 120 bp, Homo sapiens
taacggccctgcctctaatatcttgcttctctcaggatgtccctaaaggttccaggcccctgatcctttccttgaggaaacagctcagcataactcttcctgggctcaaagaagtgaatt

SEQ ID NO: 19148 - DNA, 120 bp, Homo sapiens
caacgcattacagttttgcagaatgaaaaggctctggagatctgttgcacaatggtgtgatacacttaacacctactgaactgtacacattaaaaatggttaagatggcaaatttaatgt

SEQ ID NO: 19149 - DNA, 120 bp, Homo sapiens
caccgctcaacaaaacccaaaaaactaacactcgacccagttctctaaaagagcatttgatcacagacggcccctcctgttccaggtgttagctactgttaaccagtggttgtgaatcaa

SEQ ID NO: 19150 - DNA, 120 bp, Homo sapiens
acacgatgtttggaaacaccaatcataaatgaagacttgaggtcaaacagacttatggtcaccatacttgcagcagaatttgctggggggttgatatatgttcatcaagtaaacagaaac

SEQ ID NO: 19151 - DNA, 120 bp, Homo sapiens
agacgtgggtttgagccagattgtgcagagcctggtagtccatgctaaggattcgaattccatggaaggtttgagcagggatgtgacatggttagattcaatttttaaaagatggttggc

SEQ ID NO: 19152 - DNA, 120 bp, Homo sapiens
gagcgattatatgtgaaaatacctgtcagtgactgtgacagtgagcctttaattttttttttgaggtgatctttttagtgccaaatacatcagacaatcctgagccaagagacagagttc

SEQ ID NO: 19153 - DNA, 120 bp, Homo sapiens
gggcgtgtttgagaaatgtgtgcttaactttaattgtgttaatcgcttaactctggttaacatatgggctgagtcttgctgagtcatttcctcagacgttgtgggcaaggcttaaaacca

SEQ ID NO: 19154 - DNA, 120 bp, Homo sapiens
cttcgtgggggagagaatacagtacacatagctcaggaactactgatgcactgccttccattttagtggcagtttgaatttaagaatttctagtttgtcttaagcttttctgtaatctct

SEQ ID NO: 19155 - DNA, 120 bp, Homo sapiens
tctcgttgttactactggtaaaactattgggctattgccattgtactgggcttcccaccattgtgttgcctatgagctcaagccacagccactgactatgttgtagctgtcaccaggatc

SEQ ID NO: 19156 - DNA, 120 bp, Homo sapiens
attcgagctcaagtgttatgaagaaaactaaaaatggatgtagataagatttgactgaatagaatcggagggtttctaggcagttagttgatcaatataaataaagggagattacaatgg

SEQ ID NO: 19157 - DNA, 120 bp, Homo sapiens
caccgctgaacaagtctttaatgcagttaaaagtgtcctattctcggggtggcagggaggggggcaggccacaaaggacatgagtgttaggaaaagaagaaagcacagggaattaaggca

SEQ ID NO: 19158 - DNA, 120 bp, Homo sapiens
ttacgtataaagttgctaacccccaagacctgaagggaaaagtcttttgaagctgccagttttttgatcattcaacaagaagacctgaacactgagaatcctttttctggattggttcca

SEQ ID NO: 19159 - DNA, 120 bp, Homo sapiens
ccccggaggtgaggaggtacaggggaaagcttagacaacacccccaacacacacatagtgggggccaggcccttcctgtgcgtcttgaaccgcccgccaccctgccacacacacacacac

SEQ ID NO: 19160 - DNA, 120 bp, Homo sapiens
acacgcctaccccacatgtacacattttatggagcccccagccatcagagtaaaccatttcccatttgattggcagaaattttgtaagttgtgcctgaaggagaaaggaaggaggtactc

SEQ ID NO: 19161 - DNA, 120 bp, Homo sapiens
gcccggacacagccccttctgcctcctggaagctgggctgcccctcctgctcccctggaaaccgttgctggggttggcgcctccaggcccagacccctcccaactcccaacacctctgcc

SEQ ID NO: 19162 - DNA, 120 bp, Homo sapiens
agccgtcacccctgtaactgggaggatgagggggcgtggggagggggtgtcaaggagctgcttctctgagatggggttgggggtttctggggactcccccctctccttcgaggtcccctt

SEQ ID NO: 19163 - DNA, 120 bp, Homo sapiens
cttcgaggtcccctgaacaaggcagtgggtggaaaggaagggctgcccttgggagaggcagtaatcagctgctctaagccctgtcattctcctgacctgagcgacccgtggctctggggg

SEQ ID NO: 19164 - DNA, 120 bp, Homo sapiens
tcccgtccgggccctctccactgccccagtagggcccttcttgcagggcctaggccctgactgggaagcacagctccagcatctcctgctcaataaagtctcccttcgccaccacacccc

SEQ ID NO: 19165 - DNA, 120 bp, Homo sapiens
ctccgggtccccagacatactccagtcagtgcctcaaacttgcctagtctctggtacatctctgcccacctccccaggggcctaagggctcctggagggcaggggctggtctgggctcat

SEQ ID NO: 19166 - DNA, 120 bp, Homo sapiens
gaacgaggggccccgtcgggagtcacagccctgagaggctcacagccagccccacagccccaggccccagctggcagcccgcctgtcccttgagctttgctgacctggacagggattgtg

SEQ ID NO: 19167 - DNA, 120 bp, Homo sapiens
gggcggtcttggtgaggacgtcactatctgttctttctgccccttctaatgtcctgtcttccttcccctcatcctctgtcctcctcccccttcccaggggagtacgccgagggcgtcagt

SEQ ID NO: 19168 - DNA, 120 bp, Homo sapiens
gtccgggggctcctagctcttcctcccatctctctggcgcccctgcgtgcctgtgtacggtggtggtcttggaggggtggtggtcttggggggcgcggccccagccccatcttttcgcgg

SEQ ID NO: 19169 - DNA, 120 bp, Homo sapiens
gtccgcccgcacgggggaggggaggaggaggcggaggcggaggcagaggcccctaggagggcgaaggccggcgggttaacgaggaggcgctgagtgcacggctgggctccacgctgattt

SEQ ID NO: 19170 - DNA, 120 bp, Homo sapiens
tggcgctcgggcgggcgggggtggccggctgcggaccgcggagagagccgaggggaaggccgtggagggaggaggacggcgactcgcgccgggtggggctgaaggcactgcggggtgact

SEQ ID NO: 19171 - DNA, 120 bp, Homo sapiens
actcggtctccaggctgcggcgctctgctccgggagtcagggagacctggcctggccccgtactgtcccccgtcccagcccccgcccctggccctgcgggaggggccaggcgtcttccct

SEQ ID NO: 19172 - DNA, 120 bp, Homo sapiens
atgcgcctctggcccaactaggatgtttccattttacagacgggaaatccgaagcccagagagattaaataatttgcccaaggtcacacagctggctagtggcagggtgggattcagcca

SEQ ID NO: 19173 - DNA, 120 bp, Homo sapiens
tgtcgcactccaaagcctgagcttttacccacgttctttactgagtgtgtgctgtggggcaggcatggagaagggtggtcagcaatcccctgccacagccctcaggtgcttggggctgga

SEQ ID NO: 19174 - DNA, 120 bp, Homo sapiens
gagcgaggcagccatgtgctctgagggcaaggacaaggaggaggggcaggtcaggatggagcaggtccttagagccgtgggggacctcaggttccatacagggggaggcaggagaggaag

SEQ ID NO: 19175 - DNA, 120 bp, Homo sapiens
agccgcccctgggctggcggggaggaaaaggcttccagggtccagagcatcactccctggagggctcccttccttcctcccgcagtaatgaccggcgctgggcttcaggctgccgcggag

SEQ ID NO: 19176 - DNA, 120 bp, Homo sapiens
ctacgaaactaactgtgtgctgttgaggggcaggaaggaattaacaataggaagagattttatttcccttctgaaattttttgtttttccttgaaccttgacatttctgaatgtttcaaa

SEQ ID NO: 19177 - DNA, 120 bp, Homo sapiens
tggcggtgagggccatggggctgtgtgtgcaccctgttaaaagcccagggtggactcccaggagcaacgcacccacctgcgcccactctattggctgacctgagcttgctgtcaaactct

SEQ ID NO: 19178 - DNA, 120 bp, Homo sapiens
ctccgagggagtgcactctttctattcatttggctactgacagataccaaaaattgatttatatccatggtaactgtcacccaggggaactgtgaaaaacaagaaatcttttcttccatt

SEQ ID NO: 19179 - DNA, 120 bp, Homo sapiens
ctccggctggccctggctcatctccttgaggaggaagtgtgtgtcctctcctgcacgcctctccttcctggggagccctggctcacagctggagccagcaggcctggaggctgcagaccc

SEQ ID NO: 19180 - DNA, 120 bp, Homo sapiens
agacgggaggggggcctagatctgaggcctctcttccgagagtgtgtcagtgggggccatgtttttggttccagaatgagagtttgtaaacgctgccacctttcccctcagcctggctca

SEQ ID NO: 19181 - DNA, 120 bp, Homo sapiens
agacgtctcagaggtctctgaaagtcggagcgggtggtgtcatgacagaaagagaagctgtgggagcggcagccccagggctgtggtgggtgggatgagtctgcccagctccttgggagc

SEQ ID NO: 19182 - DNA, 120 bp, Homo sapiens
gggcgtggagctgcacgctccctgtggactgtgcgaggcccgggtggttggggttttgtgcttgggactgaacttctttactgggccagccctagctagcttttgttccctttccacttg

SEQ ID NO: 19183 - DNA, 120 bp, Homo sapiens
ccccggtcactatggaacctctgtagccatagcattaatgggaggaggggacaacggttacttaccccgggtcgccccattccctgggctgggaaacggaggctgagaggggagaagcca

SEQ ID NO: 19184 - DNA, 120 bp, Homo sapiens
tagcgccttagtgtccagagcagtgctgggtgtgatggggcctcggtgaattgtgccttgggggtcaggtgctcagtggtgtctgccctgtccacacttgtgctggacttcctgattctg

SEQ ID NO: 19185 - DNA, 120 bp, Homo sapiens
ctgcgctcacgttagtcaggcttgtttgtccatagcagctttggccacctcctcttgggcgggcacctaggagatcctgcactagaccctggggcctgaagggtcgaaggtgtagaccct

SEQ ID NO: 19186 - DNA, 120 bp, Homo sapiens
tggcgagccatggaatggctccagatttcctttccatactgctggtgtcctgggaccagggggaacctgggctgccttggcatgttgacctctgaccactgaggaggctacggtgggaaa

SEQ ID NO: 19187 - DNA, 120 bp, Homo sapiens
tcccgtaacctcaggcggctcgagtcttctttttagcctcctagagagtgatcactttggggaaactgaagcagcaatgaccattctgacagcctagggtaagaaatagggccgagatct

SEQ ID NO: 19188 - DNA, 120 bp, Homo sapiens
tttcgggtgtgaaagtggcatctgctgtgacttagaaaggccatgttggcaacctcagagtggcatggaccgtgtagatggaggtggggctgctgcaggaatccggggagaaggcaaagg

SEQ ID NO: 19189 - DNA, 120 bp, Homo sapiens
gggcggggcgggatgaatggcagggctaagccacggggtagatgtgggctgaagatgggggagctgagaccatgccggggttcctggcttcagccactggacagatactggcacccttct

SEQ ID NO: 19190 - DNA, 120 bp, Homo sapiens
agacgtttgggttggagccgggaggggctcttgctggaaacagggctttgctgctcctgctccacccacctccttggggcctgcggaggagcctgagcggtggtgggttttctgtgaggt

SEQ ID NO: 19191 - DNA, 120 bp, Homo sapiens
gttcgcacagggtggggcggggctgccacgtgcaggaaggcaggggccctgatcggcatggcctgtcttggcctcagtcctttctgctgtggggtcgctagagaaggggagggcaagagg

SEQ ID NO: 19192 - DNA, 120 bp, Homo sapiens
ctgcgccaagtcctctgaggccaaatcccttgctcagagcaggtgtgtgtgtgtgtgtgtgtgtgtgtgttgggggggcgcagagcgggggaggctgcagctcagggccccaggggcaaa

SEQ ID NO: 19193 - DNA, 120 bp, Homo sapiens
agccgaggcataagcattggggtttttggcatcctgtgctcacctcaggcagcctgggacctccatgagctcatagaagccaagggcaactgtgtggactttgatgctccacttcccctc

SEQ ID NO: 19194 - DNA, 120 bp, Homo sapiens
ccccgcccgcctccaatcctcttagtgccgttgggcagtggttaagcagtggtgggttacaatggcaaaggcctagtgggcgagctccccaggtcaggggtgccctggagcattcgctta

SEQ ID NO: 19195 - DNA, 120 bp, Homo sapiens
cagcggaaagacaggccaaatgcctgggcatagtgctctggggttcataaaccagcccaggcacactgtgtcttgttttgacattgccctgcagctacaagcatttattcagcacctgca

SEQ ID NO: 19196 - DNA, 120 bp, Homo sapiens
caccgtgggagcatggtctggcacaggtctctgctggatatgcatttttaagtgttccccaaattcacttctttctggctctggggagaggggatgtttggggccagaggcgggagcccc

SEQ ID NO: 19197 - DNA, 120 bp, Homo sapiens
ccccgggactctagtatagagaatgtctctaaataagatagtgaatgaagaaggcaggttgcttttcctttgcattagaaaattgagttaggtagcaggaaagctatcccccccagtttg

SEQ ID NO: 19198 - DNA, 120 bp, Homo sapiens
ctacgctcaggaaggcaatgctttcatgggaagaggcttcttattcaaacttcttcataggaaaacaagctaaaaactgggcagtggagagccatttcattattaagaggagaactcaag

SEQ ID NO: 19199 - DNA, 120 bp, Homo sapiens
ccacggtacttacctcacagagccattgtgaggattgtcaattaatacttggtaagtgcttgacccaaggtaggtactcaaaaacatgcagtttcagccaggtgtggtgactcaacgcct

SEQ ID NO: 19200 - DNA, 120 bp, Homo sapiens
ttgcgttggtttattcctgaatggtctggaaataattgcctatgatgcacttagagccctctgaatctggtgttctttttgccccccacccccaccctgtgctcaatccactgctgcctc

SEQ ID NO: 19201 - DNA, 120 bp, Homo sapiens
tctcggctctcaaacacaatgattcccactgtctgcaggagggagaggggcttttatttaaccatttcctatttttgggcatctaggttgttgccaatttcgaaattttccaaatagaaa

SEQ ID NO: 19202 - DNA, 120 bp, Homo sapiens
caacgaaaacaacaccatgggtgtcaggatgtctccaaaacaggcaggacttagagctgcctcttgtactagctggagactggccactggggctgtgtgcagcgcctgctgcctatcaca

SEQ ID NO: 19203 - DNA, 120 bp, Homo sapiens
gcccgatgccccagagtgcatcattaataaacttccccgatctgtttatttgaagcagaactcaggcgagacacaaagccgaatcagtgcctgcaggcgagctgcgttaggcatcaagac

SEQ ID NO: 19204 - DNA, 120 bp, Homo sapiens
agacgttgcttcatttgtcacagtgctgagctggcccagtaaacaagggtgccacgtgggaaggctttcttttcccttcgggtcatccatttaacagagtgaaaaactcatctggaggat

SEQ ID NO: 19205 - DNA, 120 bp, Homo sapiens
tgccgataagagaagactaccgtacccaccattcagctttaataattatcaatattttattctttttacatctatccctccaccacacacttatttttaagggagcacattaaagcaaat

SEQ ID NO: 19206 - DNA, 120 bp, Homo sapiens
atacgtacttcagtatggatgtctaacagacaagaatttttaatagaaacatgaccatcatgtcatgatcatcatacctcccaaaattaacactattgaaaatataatttaatatccagt

SEQ ID NO: 19207 - DNA, 120 bp, Homo sapiens
ctccgaagtggtcactgaaattgcaaattattctttgtaaagttcacctattttttcttgtgaactttgtaaagttcacaagattctgatccacagtgtttttggaccccatctttgcat

SEQ ID NO: 19208 - DNA, 120 bp, Homo sapiens
ctgcggccctgggtaccagcacctagttactggccttggggcttcacaggggtcttcttctgatcctgcttctgacatcaaaaactgtcaaaagaaaattcagggtgcttttcttaatat

SEQ ID NO: 19209 - DNA, 120 bp, Homo sapiens
tcacgaaggttatagtaaggtttataaagcctagaaaaggaaattcatacagcttaattctcactggttagaatgagtgggttagtttagtcattactgatttgctgcaatgtgctgagt

SEQ ID NO: 19210 - DNA, 120 bp, Homo sapiens
ttacgaatgttatcacatttcagttcaatctttctgattctcttctgatggactgctgctctgcttgtatatgtgtctttagtttggtgcctctcatcttttagttatgctgactctaga

SEQ ID NO: 19211 - DNA, 120 bp, Homo sapiens
cacgtgaacgagggagggagggaaggttgggtggaagcaccctgggtgccatggagcctaaggaagtttcagcaaggccctaaggggttctggagccaaagtcagtcatcagaggagtcc

SEQ ID NO: 19212 - DNA, 120 bp, Homo sapiens
ttccgcctcttgttacttacaagctgagccatgaggaccaggtcacaggacctctttggactgcagtttccctctctgtaggcagggatggtaactcctgccctgtttccctaaccactg

SEQ ID NO: 19213 - DNA, 120 bp, Homo sapiens
tttcgaaggtgcctggttgtgtgtctttacctgataggtgaagaagaggttgcttctggcaccgcttactgtctccttgctggagatgggaaaggcttcctcaaggctctcgcagtctcc

SEQ ID NO: 19214 - DNA, 120 bp, Homo sapiens
ttccgtgagtcccccagaagtacagctaccatgtcactctccagagtcagctatggcctcaggtctggagttctaccacttactagctgggccactttgggattgagggaaagttctggc

SEQ ID NO: 19215 - DNA, 120 bp, Homo sapiens
aggcgattctgatggcccccaacacctcccagcctagctgcagagaagcctgtgtctccatgtgggaggaaagaagctctctagctgagacccacagcactgcatgtccttcctctgtct

SEQ ID NO: 19216 - DNA, 120 bp, Homo sapiens
taacgcttcctggctgtgacagcaccttagtgaattattactcatttcccccagattctctgtgcatttcacacagaggcagaattataaattaaaacaggctgtcactgactttgaaca

SEQ ID NO: 19217 - DNA, 120 bp, Homo sapiens
ggccggcctgaggtgggagatgcacagtacgtcactccctccttacccttttaggaggcagagggagagaactgagcctggatcatgggtattgttagcacaacagcactggaatccgga

SEQ ID NO: 19218 - DNA, 120 bp, Homo sapiens
taacgggagaggaggcaggcaaaagagcaagacaggccagtggacaattgatgtggcaattaaaacccctaagggaggaaggagagctgaggatttccatgattgtaaactcatcagggc

SEQ ID NO: 19219 - DNA, 120 bp, Homo sapiens
agtcggaacaaagacccctgtggattaggctgcaactgggaaatcaccactaaggccaattgctgagcaaaaggttggcctgcaggattgggtctaatggtatcaactcatcctctgatc

SEQ ID NO: 19220 - DNA, 120 bp, Homo sapiens
actcggaacatgatacccaaaagtatggccccttggcatgctgagtcctttgaattgaaggaccttggaagggcctcagaagcaagttctgtctgaccttctcttcccctcctgtctctc

SEQ ID NO: 19221 - DNA, 120 bp, Homo sapiens
tctcgcccctctttctcccttgaagtgagttgtagaaaccagaagtcctcttccccaaaatcagtcataggaactagcacccctctcccctggagcaagccataaaactagaatggttat

SEQ ID NO: 19222 - DNA, 120 bp, Homo sapiens
gtccgtcaccactggatcatcccctttctgtcccatccccttctgcaatggctcactcttcatcaaaccaaacaaagacattgggtcttcatttctgaaggctcccaagtaacgtaaaac

SEQ ID NO: 19223 - DNA, 120 bp, Homo sapiens
acccggaaagtctccagagagccttcagattacttcacaagtatttaaaaattatttccattttaaggaaatggatactgaacatcatggatgaggtgttatgaatgtaatttatgagaa

SEQ ID NO: 19224 - DNA, 120 bp, Homo sapiens
ggccgtttctgtgggatccctccttcagtccagtctgcctccagcttgaggcctgagtcttgagcagggctggagttggggcattcatccagggcccccacttcagagctcccgggattt

SEQ ID NO: 19225 - DNA, 120 bp, Homo sapiens
atgcgaatgcaagcctctgagccaagcaaaatgctgacacccaagcccaaaggctccatttcagccataaatctctggccaagtcaagccactgtgctgaaactttatacagtagggtga

SEQ ID NO: 19226 - DNA, 120 bp, Homo sapiens
ggtcggagaatacctgagcaccttgaggcatcagtttcatgctgaggagcctcttcaaagttcattaccatctttattcagcggttattcacatttgaggaacgcattctggttgaggac

SEQ ID NO: 19227 - DNA, 120 bp, Homo sapiens
aaacggcatgggcatatctccgaagtcaatcatcatgaatgaagccatttaagagtggggcccgcgactcctctgtgcggatgaataagcaggcagagtggatcgtatgcagaggagact

SEQ ID NO: 19228 - DNA, 120 bp, Homo sapiens
ttacgacccgctttgcagtcccagcacccttcatggaatgtcttgctttgcaaaaagaaacagataataaccacacggaggagaaatgctagccctgcagcctgttatttaaaaagtctg

SEQ ID NO: 19229 - DNA, 120 bp, Homo sapiens
gctcgacatagcttgccctctccactttgtgattacatgctcggggaggtcgcatgttctccccatcacagaacttgtcaggaaaagcaatggccaggagctactggtggctcttgacct

SEQ ID NO: 19230 - DNA, 120 bp, Homo sapiens
ccacgttcatcccagggcagctgtggcgaaacagtgtcgttggttctgtaagtcctagcttccaaaggggagattggctccaatctgttctctaagacaacggacatcctctgctggtac

SEQ ID NO: 19231 - DNA, 120 bp, Homo sapiens
ggccgcctttggtgagccttagtttagctccaagtgccaatgcttgactgtgcagagaaagtaatactgagtgttgacttgagagatcggggtagaaaagagagtcttggtactcatttc

SEQ ID NO: 19232 - DNA, 120 bp, Homo sapiens
ctccgatccccttgtagaaaagttcttaacaatcctagccctaccaagtacacaggtttttgtgagacttaaataagagatataactgggatttgtcaactactagcactatccagacac

SEQ ID NO: 19233 - DNA, 120 bp, Homo sapiens
tgtcggagcttcttaaaaactgattcttggctcttccgccaccactgccaagatctccaagctgagctgctatacaatggcagtagattacactaatttgttttattttatttgacatac

SEQ ID NO: 19234 - DNA, 120 bp, Homo sapiens
aaacgcagctggggcctcgtctcctggcaaacacgtgggtggaggtggatgccattttgaattaagtccagatacctgatggaggcactcaagaccctccacaatctacccccagctgac

SEQ ID NO: 19235 - DNA, 120 bp, Homo sapiens
acccgtctccattattcattagcactgcccatcatgatttcttgcagaaatctctctggcaggtacagcagcacctgggcagggagagttgagactaaaccatcacagtatctgggtaag

SEQ ID NO: 19236 - DNA, 120 bp, Homo sapiens
agacgcggacagagagtccacgcagaacaggcctactggcatgtggtgcttttgtcagatggggaaattattttgagcagcacagcaaggagtggctttaggagggaaaaaaaaaatctc

SEQ ID NO: 19237 - DNA, 120 bp, Homo sapiens
tctcgtgtttattataactcagtccaagatgattgccccaatgtgcaaaatagaataaaattggtcctggacttctgagcacgcataaaagataagaacatggagtcaggccccatcctt

SEQ ID NO: 19238 - DNA, 120 bp, Homo sapiens
acacggcgtaggtggcagaatccgcctctcccgccatcttttcccagaatccctccctccactaagggaatccttcaatctccaggtccacacactggagaacattcctgaacagtctcg

SEQ ID NO: 19239 - DNA, 120 bp, Homo sapiens
gcccgccggacgaggctgcatctccaggccctcccagaccacactagagggaggcagctgtcgccatcctcattgttcccctgaagtgagtggctaagcccctgctagctctatgtagag

SEQ ID NO: 19240 - DNA, 120 bp, Homo sapiens
gatcggcgaccccctggggccaatctccctttggtcctggcctctcagtcaaaggtttggaaaatgtggctggaaatttaagacagcctagagcacagctggctcccactgagtgaacag

SEQ ID NO: 19241 - DNA, 120 bp, Homo sapiens
cagcgctgaggccccgataaaggctcattcatctctgggagcttcatgcttggaagactctgagtgcctgaagaggaattgtgcaaactgccatcacaataaacagagagagagagcatg

SEQ ID NO: 19242 - DNA, 120 bp, Homo sapiens
aggcggcaaatgagaacggtgacatcgagtctcacaactgcaatgaagtgaaagtctcttggtcctcccgtgtggggctgcttcggacagatggggcagggacagtggggcagagactca

SEQ ID NO: 19243 - DNA, 120 bp, Homo sapiens
cagcgctgcctatgggcgggagtggtcaggagactccctctagaacaacttaggatgctgggaccaccagggtttgttgctcactttacagatgaggagacacaagctgcggctcagacc

SEQ ID NO: 19244 - DNA, 120 bp, Homo sapiens
gagcgcattctaggttctaggcactgcactaagctctgaagatcaaaccaaggcctagtttctggcctggatgatcctacagtacagtagggacataaaattaccacaatcattttaaac

SEQ ID NO: 19245 - DNA, 120 bp, Homo sapiens
ctgcgcggtgccaggcatgtccagcccctctgcagtttgaggtaacccagcctggaacataaaggggtgagttgtgctagctgctccctcaagtcattcccaggcctagaatccttgggt

SEQ ID NO: 19246 - DNA, 120 bp, Homo sapiens
actcgtgtgtgtgtgtgtgtgtgtgtgtgtgtgtgtgcatgcatgtgtatgctgcacatagtctcttagttcctcactattagacctcagaagggactattttgtttgtttcatgtattt

SEQ ID NO: 19247 - DNA, 120 bp, Homo sapiens
tatcgctcacctgcgatagcagactgtgctttatgatgctttcacccaagatgctagcatgttctctactcaaaaaaataataattctcctaagacatctaacatttggcatctggaaga

SEQ ID NO: 19248 - DNA, 120 bp, Homo sapiens
agccggggtggacttaggaagtgagccagctccctcctgcctaccccagctctgctccctgctccttccctgcctgcttcgtgctgcaggaggctgaaggggatgaagtgcatcctgcct

SEQ ID NO: 19249 - DNA, 120 bp, Homo sapiens
tcccgtggcactgcacggtatgttcccgagtcaaggtctcttcccctctcaagacaaccttctctacaaaactcttctccctttggattctagcaatcacgccttccccactgaggactg

SEQ ID NO: 19250 - DNA, 120 bp, Homo sapiens
tttcgtcttttcttcttggtccctggaagatgctgtcaggaggtttcagtgtaattaattatgctggcacatccaatgaatggagctatgatttagcaagtctacttgagatgctgataa

SEQ ID NO: 19251 - DNA, 120 bp, Homo sapiens
gaacgttttacagaactcctatgttgagatccccctccctttgcggccgcctttttcccatgtcagttctctgctcaggaatagactatagccatgtagggatcaaatgaaataacttat

SEQ ID NO: 19252 - DNA, 120 bp, Homo sapiens
gctcgtggaactaatacagacaaactagattcacacttggttcagggtcactgcatatggcagtgcaggctgtgtcctgcacaggatgccacatctaaggtatttgcatcatcactgcta

SEQ ID NO: 19253 - DNA, 120 bp, Homo sapiens
ctgcgtaccactcccttggttggcaatacctggctccctccctaccaccggcctatgctcagcctcaattcattgctcaaatagaaacagaaccttggtctaggtcagcatggtgcttgc

SEQ ID NO: 19254 - DNA, 120 bp, Homo sapiens
cagcgtctcccaagcgtgcccagtcatggagatcatcaaggtgtgcattattaaaaagatgcccaggctcctttcttggtgattctaattcagtgtgtatttttattttaatagaaaggg

SEQ ID NO: 19255 - DNA, 120 bp, Homo sapiens
tagcgtgtgcaggtatgcccatctgtggacggaggggaacagtgatacataagccctgctatgagaagaccaggtgcccatggtcatgtgtggaggcttttctgtcatggaaacttctag

SEQ ID NO: 19256 - DNA, 120 bp, Homo sapiens
tttcggcttcatctctcacagaagcatcctcaacacatccctggtttcccctgatagattaaaagaagcttatttttcaaaaatgtagctgagatagaaaggcttaaggagaacaggggt

SEQ ID NO: 19257 - DNA, 120 bp, Homo sapiens
cagcgaaagctttctgtacttgcttgtacaatccctttcagtccctccttctctcatgcttttcagtgaatattaagtctgaaatctggaagaaaagagcctttctaccttccaggcaac

SEQ ID NO: 19258 - DNA, 120 bp, Homo sapiens
aatcgaaaggtagtttttaggtttagcaattgtgatctgtttgtggttcaggtttgggacttggcactttgtaagaagaagaatgaccacccagtggctttagttaccactctctagtcc

SEQ ID NO: 19259 - DNA, 120 bp, Homo sapiens
cctcgttgtggggcagcagctgggcaatgtaccttccagagggctgcaggtgcctgtgcaccgagacggccagtgtgcagtgctcactgctgctcctcatccacggactcaggatggtgt

SEQ ID NO: 19260 - DNA, 120 bp, Homo sapiens
aaacgaatctgcagatgtgttcaggtaagaccagcagtagctctgtggcaagacttagagacaaatggcatcaaaatcagagatactggaggccattatctccttctctgcatgcaccca

SEQ ID NO: 19261 - DNA, 120 bp, Homo sapiens
gttcgaaccttagctcccctacttcctacttctgtgtcctagagccttcgatttttcatctgcaaaacaggaataaaaacatctatttcaaaagactcttgttccttcccttactagttg

SEQ ID NO: 19262 - DNA, 120 bp, Homo sapiens
ctgcgagaaacctacattcatggggattactgtcagtgtaaaagcacaccaccattatattgttccaggcattccttctgatacattaattttacttgctcacttctgctttgaagtttt

SEQ ID NO: 19263 - DNA, 120 bp, Homo sapiens
aagcgacttctggttaaaatcaggatgaagcataagaccgtgtctgagctggatcgagaacgtgaaccctctgtacttgttgggaagcttcagcatggcatataagaaaagtgatctaca

SEQ ID NO: 19264 - DNA, 120 bp, Homo sapiens
ctccgaatatgctacttctctgaacctccacgagctcatctgtaaaatggggacagcatagaagggtccttgttaagactaaagatgtctctgaaactgaggtacacattgtaaagcacc

SEQ ID NO: 19265 - DNA, 120 bp, Homo sapiens
caccgtgcaatatgaattaaaatggcagagcaccaaccaaaggtgcctgggtaaagaagctagggaattgggggatatggacatagagtgatcatgtttattctctttccaacaaaggcc

SEQ ID NO: 19266 - DNA, 120 bp, Homo sapiens
tcacggtggctaaagaggagacaatgatttgttgtctgactctccagctacgatggggctgtaactaatgaggttattctggttacaaaggaagcattcagccccttaatgaaaaactct

SEQ ID NO: 19267 - DNA, 120 bp, Homo sapiens
ctgcgggccatgcatgtgtcctgttccgggaggagaagggagagctaactacaaggctgaaaaaacgtgagcttccagtgttcatctgctcctctcctgtccactgtccactcaagccag

SEQ ID NO: 19268 - DNA, 120 bp, Homo sapiens
gtccgtgaggccttactggtgaaggagtccctggccagcacagcccatgcaatgggaagagagtggaccaggagaacactgccccaaaaatgctccttaaaggactggaaaagggacaga

SEQ ID NO: 19269 - DNA, 120 bp, Homo sapiens
gaacgttggggccagggtaagatgacttagcaaacaaggaagtctgattccatttatagaggacagatgtgtggctatatttattttatctaaaagagaaaagaaaacctttgctaataa

SEQ ID NO: 19270 - DNA, 120 bp, Homo sapiens
atccggtttgaaacaagtgaaaagaaaggaatattgttctgcccatgagtgtgtgtctgtgtctgtgtgtgtgatcagcggtcactccaattacatttttcttctattccagttttctta

SEQ ID NO: 19271 - DNA, 120 bp, Homo sapiens
taacgagatgaacttcagggtggccactgaaccctgtgggccataaatgccggacttgaagcctgcactagcacatttcactctgcagtggtgcagagcagggacaatggcagcactttt

SEQ ID NO: 19272 - DNA, 120 bp, Homo sapiens
ggtcgtccgtctccatcttactgacagcctgtcctcatctatgaggacacctcctacccttcctcacctagggaacttgctctccagaaacagtggcaaacccatacacatgtaggtgtc

SEQ ID NO: 19273 - DNA, 120 bp, Homo sapiens
tcccgcaaagtctgcacttgcagttcaaaaggtgactcaggtccctgctactcctgggatacagttcacttgagaggtgttcagggacccttttaagaacatggcaaacttttggggtag

SEQ ID NO: 19274 - DNA, 120 bp, Homo sapiens
tctcgatattctaaatggccacacttcatactacaacaatgtacaagctctacaagtgaggcaggaaaggacctgggcccagagagggaaaggcagggcaaagctgggggcaggacagga

SEQ ID NO: 19275 - DNA, 120 bp, Homo sapiens
cttcgctatcttgaaggttctgatatgacctataaagttgggcctgggatgccctaggtgaggactgagtcagaggacacatcaccaagatctaagtctgaatctcagtgggtgtacggc

SEQ ID NO: 19276 - DNA, 120 bp, Homo sapiens
tatcgggcttgccactcacttaaaatatgacaatatgattgtgattttgtattggggttattttcctgctaaaaatgcttttctgtctccagttatcttgacttgatgtctaactactgg

SEQ ID NO: 19277 - DNA, 120 bp, Homo sapiens
tgacgctgggcctgactgtcctcacttgttgaatggtgatgtctgtgataccaatcagtcgtacaatcttttcccatatgtctatggccatatgtcttattcatcaagtgaccttaatat

SEQ ID NO: 19278 - DNA, 120 bp, Homo sapiens
ttccgaatttgcataaccatgccttttgtgaacacagcttcctgttcatcctgagaaatagtattccaattgtcaatctgaaggaggtgatggcacatgaccatgaccatttctttagga

SEQ ID NO: 19279 - DNA, 120 bp, Homo sapiens
ccacgccactgattaatgagtccttcacatacagtgtggagggcatttctcctggttgcagaagtctttctgaatgtcacctcttcagggaacaccagacgggagctggtcagacgtact

SEQ ID NO: 19280 - DNA, 120 bp, Homo sapiens
acacggcaattctcttacagctggcctttagagagatctacacgtaaagctacatttcattaaatggaaccccagaaattagcattcttaaaacactgtcagtccttaaagattgtaccc

SEQ ID NO: 19281 - DNA, 120 bp, Homo sapiens
gctcgagggattcatcagaatgtcccaaatgtaggccttcagagtcatgagggaccttggagacctctgagaggaagggaaaggctggagaatgatggggatcatcaaagaatgcacagt

SEQ ID NO: 19282 - DNA, 120 bp, Homo sapiens
ccacggggttgagcgtcactgggagacagagggctcagaaagacttcttttgcatatagggagctgagggaatgccctggagcactatgaatcccaaactgaaactcacagagtccttat

SEQ ID NO: 19283 - DNA, 120 bp, Homo sapiens
tatcggctgcgatgagacaggaaagggaaggagtctttcattatccaggtgagattccatgtaaaataatcaggagaaggagaaggcatgtttgttggtgattccaaggagctatgacct

SEQ ID NO: 19284 - DNA, 120 bp, Homo sapiens
catcgggaagatgagggggaaaaaattgagccaccagtagactgagttgacctcaggaccctgatgtacattttctatcaagggcagacagatctaagaggtctgaatgttctgaccaag

SEQ ID NO: 19285 - DNA, 120 bp, Homo sapiens
tgccgtgggagagcagaccatgagcaaataacacagataaacagtatcagggagaggtaaatgctgtgatgacagaggaaagcagaaagggggctagagagagagcaggaaaggcctttc

SEQ ID NO: 19286 - DNA, 120 bp, Homo sapiens
atgcgtgtattcattttcccgggcccttagtgaaataggcattttggaatctgtttgggacatcagtcactcaggctctcaagaagagacagaccccagctggacatgttctttatagta

SEQ ID NO: 19287 - DNA, 120 bp, Homo sapiens
tggcgccatctggcctggcatcttgtgtcctgtcaacagggatgtcaaacaggcaagatgaaaggacataactccaaggaacattgtttgtcttctagccccagtctggggaagtcgtga

SEQ ID NO: 19288 - DNA, 120 bp, Homo sapiens
gtccgggtgacagttggtgcctagaacagtctttgctatttcttgtcttagtgagtcttctggggagcatcctaggagtttcaaatgaaggtggatatcggctggagtatcccaagaggc

SEQ ID NO: 19289 - DNA, 120 bp, Homo sapiens
ccacgtcgctggctctgcttgcagtgagcatgcccatcctctttgtgaaagtggcaaacgggacaataaacagatttagcagagctggagctctaaaaagcccaatccacatcttctatc

SEQ ID NO: 19290 - DNA, 120 bp, Homo sapiens
aaacgggggcccagtaaatggtaattaaacaacttcagggagagctgatggctttttgagaaataaacctccccagggaatccacctcaggaaatctactcagtatactttcttggtata

SEQ ID NO: 19291 - DNA, 120 bp, Homo sapiens
ccacgtaattcagaccaaagaaatctgtcattgctgcaactccatcaacatgagcttctgaacaacctagcccattaggcagcagatgtgggcagagaatgggccagaagagatgaagct

SEQ ID NO: 19292 - DNA, 120 bp, Homo sapiens
ttacgcaagtccactctcacgcttggggtattcttcacagtcaaggtgtggaaactgaatagaggggtttagccatatccgcctctgtttagagagaaaaataacattgggctgtcaggg

SEQ ID NO: 19293 - DNA, 120 bp, Homo sapiens
ttccgattgctctatgtttcatccaatccatcacatggcaattgtctttttatcctactaaggagaaataaattgactgcaccagggttgattcattcatgtagaataaacattgtctcg

SEQ ID NO: 19294 - DNA, 120 bp, Homo sapiens
gtgcgtcatgcctcataaaagacgctgttctccatttccttacatgtgtatatgggctctgcctcaatgtcccttacaggaggcatttttagggaacaaacaacttaggctgagaataaa

SEQ ID NO: 19295 - DNA, 120 bp, Homo sapiens
gcccgcagttagaacattttcagaacagtaatctcatcttctaagaactagctactgaatgtaaagatatgtttccaagtgaaagttaaaagtggctgcctgttgccactggccccacag

SEQ ID NO: 19296 - DNA, 120 bp, Homo sapiens
tctcggtcctactgcatgttgcccaagactattaccaagcaagtttgtgtatactttaggcttatcacaggatatgttcagaggaccaattatttagaatcagactataggtctgcattt

SEQ ID NO: 19297 - DNA, 120 bp, Homo sapiens
tgccgagaagtttaacgttgacttggctctggcttgctgaagacagagtgtttgtgtagtggatgttttagtgaggctcttggctgtaaatactttcaggaaaacttgttttctattatt

SEQ ID NO: 19298 - DNA, 120 bp, Homo sapiens
taacgtaatctaggagaaaaatcattggtcaatttccaggacctgggcatagcctagtattccccactgaccaccatcacctttccagccctagaatgtaggaagaccctactgagaaag

SEQ ID NO: 19299 - DNA, 120 bp, Homo sapiens
ctacgatgtgcacaaaatgactgaagggatgagtgggtgcatcacccaggaaacagagtttcaattagtggagaagcaacatgggtgaaggagaaaagaaacggatcctgtgtccttcca

SEQ ID NO: 19300 - DNA, 120 bp, Homo sapiens
gggcgctgaattggatgacctcgcagtttctcccgcctctaggattctgtaataggattctgtaataggcaccgttctcagttgtaccttttagccaagtgtccttagttgtctgtgtgt

SEQ ID NO: 19301 - DNA, 120 bp, Homo sapiens
tgtcgtgtacaggaccacgggggtgggatttagcaaatataggactctggcctaaaggcaggaaacatccggaggaggcgaatgtgcatgtctgtggagttagaactgggctcgaattta

SEQ ID NO: 19302 - DNA, 120 bp, Homo sapiens
tgacgggcgggagaagagcagtttaaacaatcaaaggagcattgaggctggactaaagttagtgggattctctagtccataggcaagagcatgaagggtggtatgaccgatgtcaacaaa

SEQ ID NO: 19303 - DNA, 120 bp, Homo sapiens
agtcgaagcagaaaacccacacagtatgcaggcaagaaacaggactgatgccagggagtgtcagtcagcagaagtcaattctacccagcattctttgactccaaagacacaagatccttt

SEQ ID NO: 19304 - DNA, 120 bp, Homo sapiens
ctgcgtggtactaaagggctactgtccacacatagcctatgcctgcatggcagcccaggacacacgatcctgacccagagaatgagaatccctcccccaagcagttttcttggattctaa

SEQ ID NO: 19305 - DNA, 120 bp, Homo sapiens
ggccgctggttgatcctaattctctagaatgatgtaaaaccttaattagctctgaaagttgttacttgggatgacctcctccccagcactctgcactgtggaggggtgacaacttgggaa

SEQ ID NO: 19306 - DNA, 120 bp, Homo sapiens
ttccgaaagacattgagagtgaacaaaggttaaaacacagagcttttctttaaaggagaatgggcaatgagctgaaagtttaagactgaaaggcttggcagagagacaagaattgaggct

SEQ ID NO: 19307 - DNA, 120 bp, Homo sapiens
ggccgatgtgtttttgaaaagaggaccacaggagtgagatactggctgtccagtattctcagtggcttggggtgaagaaagagggtaggctacaggttatgggtctgtgtttttccctgg

SEQ ID NO: 19308 - DNA, 120 bp, Homo sapiens
ggccgccttttgcgttccttttggctcctccaagctcttctgcccggtctgggcgggaaccgagggcggaggctgccgtcttgcgcaccctcaagctatctctccgctgcgggaaggctt

SEQ ID NO: 19309 - DNA, 120 bp, Homo sapiens
cttcggactgtctgcctgctgaacttctgggcgtgaatcccagcccccgcgctgcgcaagtttgcagcgtccttgctctcaccggcgcctcggctcctcagagttcgcaggcactggagc

SEQ ID NO: 19310 - DNA, 120 bp, Homo sapiens
gagcggccccggcggcagcagctgagggcgttcagggcaggggcgcccgaaatcttgccgccccctcctcacccatcatcagcgcccgcggctttgggtggccgaccagagggcggccgg

SEQ ID NO: 19311 - DNA, 120 bp, Homo sapiens
cctcggtgccccgcgaccctccgaacagaggcggcgggaggtaccagctgctaccaccgctgccgcccccagagccgctggatcgcatctgcctgggcgcccgccacttgcagctggctg

SEQ ID NO: 19312 - DNA, 120 bp, Homo sapiens
tcacgaggccacatggtaccaagctgaggcaaggtggaatgtgaataaagattaaaagaatgagtttcataaagttcttgaatgtggaaactggaagagagaacactgacatcatctttt

SEQ ID NO: 19313 - DNA, 120 bp, Homo sapiens
gaacggaagcagtgtagagaagtaaggagccagagactccctctgctccgcacagagcctggattcagggctggctgcagccaagggaacacagactggagattaagcaggcctaaagtt

SEQ ID NO: 19314 - DNA, 120 bp, Homo sapiens
ctgcgataacaggcgtgagccaccgcgcctgccctccagcactagacattcttactcgatggggctagagctgagtctaggaatctacatttctaacaagcttcagtggtgatgcccggt

SEQ ID NO: 19315 - DNA, 120 bp, Homo sapiens
gtacggttccacgcaattcaggcattctattacattttaagtgtctgtgtgcatgtccatttagtaaaagctccccaaatttgatgaacaaccctcaatcattttatctggctaggatca

SEQ ID NO: 19316 - DNA, 120 bp, Homo sapiens
aagcgcacggccctgggagacaggcgtgctcattcagagtgggcgaacacatgcgcttactcatggatgcagctctcatttgccctcggggagacggaagcctgcgtcaaggagctccag

SEQ ID NO: 19317 - DNA, 120 bp, Homo sapiens
gcccggatatgagcctgtcactggggccttgttgcggatgactgtgccctggcctgcgtgtgtcatgccaggtgaagtcagagaggggacaataagtgtcccctgtacccagggtttggc

SEQ ID NO: 19318 - DNA, 120 bp, Homo sapiens
ctgcgaccgtctcatgacccagcagactacaaacaacttgcagtgaaatgtaataaaagagtccagagggagtggagcatgatgtacaccccagccctacagaagtgacagcccagcccc

SEQ ID NO: 19319 - DNA, 120 bp, Homo sapiens
ctgcggctgcatcaggctctaaacagagcaggtgctgccacctcctggccccactcaggctgagccaccgcagtctccagatgcatttggaatctcaaattgggaattctggagattcgg

SEQ ID NO: 19320 - DNA, 120 bp, Homo sapiens
cctcgaaaacaccccagagaccatctaactcttcccaccccatgtgcagaagaggaaactgagctccctcgatgttggcagttttcccccacgtccgactgtgtggcagagccagaggca

SEQ ID NO: 19321 - DNA, 120 bp, Homo sapiens
gagcgggagctggggtttgtggtgagatctgagcaaggagagaggcttggctgctactcggtcctgtgccagcttgcctcctccatgcctaacctttgaagatgaaccgagacccacctt

SEQ ID NO: 19322 - DNA, 120 bp, Homo sapiens
ccacgaatacatcacttcaaatagtagtctccatagcagacaagcatcacgtggaaaagagaccctacttccttgaaacaaaaccaccttgagtgtgcagattctttgttgctgttgttc

SEQ ID NO: 19323 - DNA, 120 bp, Homo sapiens
ccacgctcctgtcctgccatcactgctatcctctgcccagggtggtgaccaggtcgcatcagcagggacagacccacatttctgggcacaggcatgggaggattagggtcagacacacac

SEQ ID NO: 19324 - DNA, 120 bp, Homo sapiens
acacgctgtgacatcttgggatgaggcaagtcggcagctgtcctctttcagggctggcacaagcaactcagccagaacctccctccacccccgatgcagctaccaagtcatcccagtgtg

SEQ ID NO: 19325 - DNA, 120 bp, Homo sapiens
ctccgtttagaatttgagttcaccacagattatgtataaaaatcaacattaacaataatgataactaatattttgatagtgattagtatttgccaggcactattacaaatattttatata

SEQ ID NO: 19326 - DNA, 120 bp, Homo sapiens
ttacgttttttaaaaactttcatcttatcaagagctattttcatggaaatggagtttcactgaacaagaatattgtaatctgccaacaaggtcgaagtaccctaagcttctcccgtcaag

SEQ ID NO: 19327 - DNA, 120 bp, Homo sapiens
agacggagtctatttctcaccccttgagtctgggctggcctgtgacttgctttggaatgccatgcaagtgacagctcaccagttttgagcatagccctcaagagactttatagcttcagt

SEQ ID NO: 19328 - DNA, 120 bp, Homo sapiens
tcacgctcatgcctaccaaggtttcagatagatgcccttttaatcccctgaaagattcaaggaagccccagctactggtcctggggcagttagggctgtgttgtgagccagtgccttgtt

SEQ ID NO: 19329 - DNA, 120 bp, Homo sapiens
ccacgtgtgcacattcacttaacatgaattgtgacaccctgtggggtgggtgagtaaatggttgctagaaagtctgagtacattttgggcaggcaggctgtgggtggcggccagctcacc

SEQ ID NO: 19330 - DNA, 120 bp, Homo sapiens
ctgcgactgggtctccttcgatgctgtgcccgacttggcctgggctctgtctggggaagggtcttgggaatttgcctgtgggcaccgacactgcctccacccaacggcactgggaccctg

SEQ ID NO: 19331 - DNA, 120 bp, Homo sapiens
agccgaggcgtctacagtttcatcaccccagctaaggtccagatacagatgtggctccttggttttcatttaaaacttccttctaaagcacctggaccaaggtctgaacacatcatcctt

SEQ ID NO: 19332 - DNA, 120 bp, Homo sapiens
acacgtcccttcctggctgccccttgtattctttctgcttttattcttggtcatgtccccaccatttgacatccatctgtcagtcaggcaagcgagggaggatgctctgggagggaggaa

SEQ ID NO: 19333 - DNA, 120 bp, Homo sapiens
gagcgatttcttcacacaccacagtgcttgtgtgcaccacacattccctttgataaacagagctgagagcttcctgcatcttccccttcattccccaggtgggagggagtgatgtcctag

SEQ ID NO: 19334 - DNA, 120 bp, Homo sapiens
tagcgggctgacttttcttgcctcagccttagtatttgcctcgtgcagttggagagcctcagctatggccctgcattgagaggtggtctgaaggaccattgtgggtggacgaccagcctt

SEQ ID NO: 19335 - DNA, 120 bp, Homo sapiens
tcccggcacaagatctcttgcccctttgtctctcaggtcccaaatagccaccttctttctctcactcctccccactcttttttttttttttttttttttgagatgaagtctcgctgtgtc

SEQ ID NO: 19336 - DNA, 120 bp, Homo sapiens
caccgaagttaggcggtagctcggaaaccccttctctttgctcacatctctgctgagcctctcttgatggagacctcctgagcctggcttcactctgccggttccacctgggtggaatgc

SEQ ID NO: 19337 - DNA, 120 bp, Homo sapiens
atgcgtgtgtggaaacaggtgacgggttaagcccttaggaaggtttctggtccgtggcctctgtcccccaccagctcacgaggccattctgggcataacgcatccactctatccgcctcc

SEQ ID NO: 19338 - DNA, 120 bp, Homo sapiens
aggcgctgctgagcagctgcacgcaagtcccatggtcaccaggaaacatctttcacaatgtcagacttaaaaggcctcagtagtccctggagagacatagagctaaaaattccagaacat

SEQ ID NO: 19339 - DNA, 120 bp, Homo sapiens
agccgcggacacatgttcctgggattgcaacaactttcttttctcctatccctactccccccacccgcctctctccttgacaaaaatcacaggaatgggatgtagaacaggcagttaggg

SEQ ID NO: 19340 - DNA, 120 bp, Homo sapiens
ccacgggtctcaaaagcacaagtaatgtgtttctctgagtggcactgggcccgtgtctgcacattctgcctctatgtgagtcattgttcaccttgttcagagcaaatctactctgtatga

SEQ ID NO: 19341 - DNA, 120 bp, Homo sapiens
acacgttgcatactagggccatacatcccggcctcctctcaaggggcctgtgttgggcctgacgcctctctctccaagaggttatgtgttcatctctctgctgagccaggggctgtgtct

SEQ ID NO: 19342 - DNA, 120 bp, Homo sapiens
agacgctgggcacagtgtcctacaaatagttgcttaatgagcctggatgatggattggcccttcctctctccccgtcctgcactgagaatccttttatcttggcagtctcatgaagccaa

SEQ ID NO: 19343 - DNA, 120 bp, Homo sapiens
gcccggtctcccacgttggatagaaaggatggtactgttagggaaagggatgagtttgggtggcgaatgttgtgactgtagccaagagctattcctgggtgtctagtgaatgtcctgaaa

SEQ ID NO: 19344 - DNA, 120 bp, Homo sapiens
gggcgtagacttgctgggggcttcattccttcccagtctagtagcttctgtgctgcctctgactgcctctcacctcgccacctgcccttcccttgtcctcaagcgcagctcaggaagata

SEQ ID NO: 19345 - DNA, 120 bp, Homo sapiens
tatcgttatcagcacatcaaatcctctgcttccttcctgggctgagggagggccccttattacacagatccatcttgaagaacaatttcaatttgcccaaagtttctccaaactatagtc

SEQ ID NO: 19346 - DNA, 120 bp, Homo sapiens
tgccggcctggcctgccgcctcaacccctacctgtcatgtgcttggcaagtctgactcaagtccttttttccactgcctaccccacccgtcaaattgcagttgcaacctctcatttttct

SEQ ID NO: 19347 - DNA, 120 bp, Homo sapiens
aatcgctgccgagccctggaggagggaggaactgtgcatggggaaggaggcggaagctacacaggaaaccctcactgcatgtttgtcactgctggcacccactgcagcagctagcagaca

SEQ ID NO: 19348 - DNA, 120 bp, Homo sapiens
taccgtgcaggggcaagggcatgccgtctagagggctgcagtgtcaccaggctacagctggggtcatgctgcctggcgccatgctgtgccttgatttcctgattgctaattagagggcac

SEQ ID NO: 19349 - DNA, 120 bp, Homo sapiens
tggcgccagcaatggggccacttgcctgcagagtttttcctcccccgatctcttgcacaaggtggtatttaaaaaatcactcatgccaagaccttcaggtctgaatgcaccacctctccc

SEQ ID NO: 19350 - DNA, 120 bp, Homo sapiens
ctacggtaggctatgaccccaggccctgtgctgacccaaaagcacttcccgctgttctccaaacctttctctccagaccaaagacacaggctccccatggttccccagcactgccagctg

SEQ ID NO: 19351 - DNA, 120 bp, Homo sapiens
acacgcagtgcctccttccttgttcgtgagcactcagtgcagggcaactgacagcaattaggacggggagacacgaagcctccccccgccgcaggaattgctactgcagatcttcccttc

SEQ ID NO: 19352 - DNA, 120 bp, Homo sapiens
catcgtccacagggctgtagtattttgatgctgtagtccaataactgtattttctgtccatattaggccgagagtaggggcgtcctccagggttgtataaaccatcagtagccaattcat

SEQ ID NO: 19353 - DNA, 120 bp, Homo sapiens
ctacgtgggcaaaacgttgagtcatccgcatatctgccctctgaacacacgaaaatatccccactgtgcatcctgagtaacatttgtgccaggttcccaggcaaacttcctcctgagctt

SEQ ID NO: 19354 - DNA, 120 bp, Homo sapiens
ggccgaatcatccactctcagagcttaaaggaaaaaaaagaggaaggaagcagtgagacttgatttgtaacagccctaactatggagctggaagatctgggttcagatggcagcctgggt

SEQ ID NO: 19355 - DNA, 120 bp, Homo sapiens
agccgtaaaatggagatgataatattaactgctgctgctgatcttttgacaattgagataatgtatttttcaagggcctaccatatactaagagctaacatttttgagtgtttacatttt

SEQ ID NO: 19356 - DNA, 120 bp, Homo sapiens
tatcggatactcttccaaaccatttacacatttgttaactcatttcatctttataacaccctacgataatcccaaggcacaattatctttattttataagtgaagaaactaagccacaat

SEQ ID NO: 19357 - DNA, 120 bp, Homo sapiens
ccccgcttctttccctcctcaatgtgatctcaaggtttaatcctcactcacattttgtgctttcagtgctttgtttctcaaagatctcatccactttcacagcttcaagctccaactcct

SEQ ID NO: 19358 - DNA, 120 bp, Homo sapiens
tcccgaacttgaaaaactagggctgacttttctcttagatgtcatgccccattcccaactccccggatacctctgtccctggaggtcctgcagtcagctgtactctttctttcaaagcaa

SEQ ID NO: 19359 - DNA, 120 bp, Homo sapiens
cgccactgacttcccaacaggataaaggaagccttctcctggaatctgagtgtaatgtgggctggattcaggttagccaaatccaggggaaggcagggtttgaagcctctgggtttggca

SEQ ID NO: 19360 - DNA, 120 bp, Homo sapiens
cagcggagtaaagaagattctcctttaccctgtgccccggtgcctcatctccactctgtgccttctcaagctggtggcaggctgaaccaaatgcccccacgttggtaagtgtcacccaca

SEQ ID NO: 19361 - DNA, 120 bp, Homo sapiens
aaacgtgcaggtgttaaccaacagacacgccacgaggacacagagggaggcgacagattctggcctggggattcgaggaaagcttcacaaaggaggaagagatgaaccaggcctgagagc

SEQ ID NO: 19362 - DNA, 120 bp, Homo sapiens
ggtcgctatgtacctcaagtgactcaccaactcggaacaaaacacttccctttacacggttgaagggacatgagctttggaatccaaaagatctggccacttactaaacatgtggcctta

SEQ ID NO: 19363 - DNA, 120 bp, Homo sapiens
aaccgcaaatatatcatcacaaaagcaactagctagtggttgcttagcatgtgggagacactcgggaagtactgggtgtctccttctcttccttccttccttctttgggcctccatttcc

SEQ ID NO: 19364 - DNA, 120 bp, Homo sapiens
acacgtgattttcccaagacaaggtgcctttaggctctgtgcaagagtgaagcttcagtggagagccagggatagagctgaagctaacagggagaggagagaagggagagaagagagggc

SEQ ID NO: 19365 - DNA, 120 bp, Homo sapiens
ccacggtatcctcttaagatgtcaccttagataacagttcatccaggaagccttcctgattttctttggcttggttgggtaccttgctttatattccctatatgaatgcttttcctacta

SEQ ID NO: 19366 - DNA, 120 bp, Homo sapiens
tggcgaggtgtttgaaaaggcagctttcctggacctttctcatggactcaagctgcccctccaccttccaccatctccactgctcccattctgcactctgctcgccaacacccctcccca

SEQ ID NO: 19367 - DNA, 120 bp, Homo sapiens
tagcgtagcacttgctttatctctgctagcaggttttaagggtcttatgaacaggactcctaacttgcacttttttctcctgcagagctcagtaccatgcactgcacatagtaggagctt

SEQ ID NO: 19368 - DNA, 120 bp, Homo sapiens
gtgcgaggcagtgctaggctctggaaggggatggttggccctgctctggcgtgtgcagtttgaggttctgggcagagactggagactcagatttgtgattctctgcagagatgacattca

SEQ ID NO: 19369 - DNA, 120 bp, Homo sapiens
cagcgaaacccctcaccccttcagccatgtgaggacacagcgaggagatggccacctctgagccaggaagtggttcctcagccaacactgaatctgcctggatcttggacttcccagact

SEQ ID NO: 19370 - DNA, 120 bp, Homo sapiens
tggcgtttttgttgtagcagcccaaacaggctaagacaatcttcctaagcacattctttacctgaaaatatgtgtccttcaggggcacggcgatggccaccactgcttctcaggcacaga

SEQ ID NO: 19371 - DNA, 120 bp, Homo sapiens
agacgggcagagggtgtgggccaggctgggcctgagtcacacggaataatttcgtctcttgctcctctgaagcattcctgggggatggggtggggtggggtggggctgagtcatttgagc

SEQ ID NO: 19372 - DNA, 120 bp, Homo sapiens
ggtcgtatccacactagactgtgtgggagcaaggactggctctagttttgctcattgtcggatctttggcattgaatccatttaaaatggaagactgaatgaacacattaatgaatggct

SEQ ID NO: 19373 - DNA, 120 bp, Homo sapiens
aatcgcattgttccacaactctctcttccactgaacccaatatggggggtatcttttgtgtctgtcagcctggccttgattttgcatccttatgggctgctgatccacattccagctctc

SEQ ID NO: 19374 - DNA, 120 bp, Homo sapiens
attcgaagtggacgaggtgggaaagtggcagaagtgagtgctgtcctgaggaccccagacagatgaaagatgcagtccaggctgagtaaggggagaagtcagagtccagtagagccagaa

SEQ ID NO: 19375 - DNA, 120 bp, Homo sapiens
agccgttgtccaaggaagctgcaggcaggagacagtggacgtgcttgagaaactttaacttgggagtcacaagactgggatacagtcttggctctactagttactcatgcaacccctctg

SEQ ID NO: 19376 - DNA, 120 bp, Homo sapiens
aagcgttctgtgtgtcacttcctttttctatctgtaaatactgcctgctcacgttgccaagtgtagctctctgaacctctcctggttctgaggactgcctaattcatgaatcattatttg

SEQ ID NO: 19377 - DNA, 120 bp, Homo sapiens
acacgacaaacaagatctagtgacagatctcgcaacccccataattctgaagcagtgattagcttaaacaataatttcagatatcgtaacaaatgcagtgatatgaaatgtaactttgat

SEQ ID NO: 19378 - DNA, 120 bp, Homo sapiens
agtcgcagatgctgctaaaatgtctgaggcctgttgactacattcagaagagcaggagatactcaatttcagtggaaggttagtgaaaataaggatataaattttttccccattcaagtt

SEQ ID NO: 19379 - DNA, 120 bp, Homo sapiens
cttcgaattctctccacagccccaccgcccctgttgtaaatccatcagcacagtatgctagccattcgggtcattactgctaattatagctgttgttagtatttgcttcaggcacagctg

SEQ ID NO: 19380 - DNA, 120 bp, Homo sapiens
tagcgagggaaacgtgtctgcacagcttttctccctggatggaagccgagtgcctctggcctggagcctgtccctcaacctgtccctccaccagggaaagctgcaaaagggagtctgtgg

SEQ ID NO: 19381 - DNA, 120 bp, Homo sapiens
ggccggcagagcttcagagagccattctggggtaagcagcttatttttccctccctgcaatggcttgttttcagactcattcacagaatgccccagaggctatgagaccaaggaaagggt

SEQ ID NO: 19382 - DNA, 120 bp, Homo sapiens
gctcgtgtgcctccctacttctcaggaaggaaactgcctgtcatcattgtttgcaatttctcagacaccacacagtggtgccaggtccctgttgggtggcccaccgtttgaagggctcct

SEQ ID NO: 19383 - DNA, 120 bp, Homo sapiens
ggtcggatgagcccagacagagccaagaaggtcagggctggcagagacctcaggggacatgtgaccctcctgcctcatcgccaggtgaggagctggaagccgggtcccagtgggtcaggc

SEQ ID NO: 19384 - DNA, 120 bp, Homo sapiens
tgacggggtggggagaggacagacattcagcctgccagatcctgatttcctcattggtaaaatgggaaaatgatcatctgtccctcaaaggttggcaggaggccttcatctcttactaag

SEQ ID NO: 19385 - DNA, 120 bp, Homo sapiens
cctcgataagacgatgctactgcagaggtccgtagaagtctattaatatcaatttttatcatttttagagtcatacttacattttgaggggacgatcattagacaatgggccacgcatga

SEQ ID NO: 19386 - DNA, 120 bp, Homo sapiens
aaccgaacaatgaagctttattcacttcttgtttggctcattatgttaactttttattatgcaaaactgccaattcaattgcacaatgagaaaaaatatatttggaacaattcacaagcg

SEQ ID NO: 19387 - DNA, 120 bp, Homo sapiens
tctcgtgatcttcccagatcctcattgacagctaatttgtccatccaggaattttcagtgacctctacttgagtgctttggaaaacaggagcagcgagggctccttggctacacaggaag

SEQ ID NO: 19388 - DNA, 120 bp, Homo sapiens
tggcggggagcactaagcagtttcaaacttccatgcataaggttcacttggggagtttgttaaacagtgcagattcccgggcctctccctagaaattctgatttagtaaatttgggttgg

SEQ ID NO: 19389 - DNA, 120 bp, Homo sapiens
tcccggggatcctgtcttgaggctccttgggcttgccctggttgtggctggctcactatttagaaagggcaaccctctcttcatatgctgccagggggtcatctggccttcaaacgctca

SEQ ID NO: 19390 - DNA, 120 bp, Homo sapiens
gcacggactctggggcccaggctgtgagcctcagtgttaagtcaggacctgcgtaacagagggaatagattctagggaaggtattagctttctctgcctgcccatccccgttagccacgc

SEQ ID NO: 19391 - DNA, 120 bp, Homo sapiens
agacgcatcacctcatctgcccgagtgactcgattttcttgtttatcaggcagcatcactgtacctgctttaaatggcctcacaagggcattgtgagaatcaaatgagataatgtacatg

SEQ ID NO: 19392 - DNA, 120 bp, Homo sapiens
gtgcgcgctgtactaatacacaagtctctcatctggttgtgaaatctagaattgatacgttgctctgtgaatgtgcccatcaatcttcaacatggtgcttgctactcccactgtcccttc

SEQ ID NO: 19393 - DNA, 120 bp, Homo sapiens
atccgaggctgctgtgcactgtgccgtatcaccctgccctccccatccttccacttcaccagactgaactgggctgggcaccttccccatctgataatgatcctcatcatctgttgcctc

SEQ ID NO: 19394 - DNA, 120 bp, Homo sapiens
ggccgcttttttgcctggaccttcccgtttccagaccaaaaactttctgaggtcctgcgtttgaggattactttcagctgtaaaagaaatccagccacaatggcttcaccaaatagaggt

SEQ ID NO: 19395 - DNA, 120 bp, Homo sapiens
ccacggctggtgaaactgctctcagaagtcatagaggactcaggtggtgccttcctccaccaccacagggctcttatcctcagcccatggcttcccgcctcagtgtcaagttggctgaag

SEQ ID NO: 19396 - DNA, 120 bp, Homo sapiens
gtccgttactccaggtcagaaaaggagccgccttttaaaagcatcccaggaagccccacccagagacttctgcttccgtgccattggtcaaactaaggtcatgtggctgcacctatctgt

SEQ ID NO: 19397 - DNA, 120 bp, Homo sapiens
ttgcgtggacactgttgcagcctcaaacagaattagaattctgatagtatgagtggaggggggagatactgaattaagcaaataactggtgtatcatccctaattccttaggcccagctc

SEQ ID NO: 19398 - DNA, 120 bp, Homo sapiens
actcgggggcaggagggttaagccttgattccaaaggccactttcctgccatgtctatttctagtcccaagttagcagatgacttgtaagtaagcaagtcagttaagttttctaggcttc

SEQ ID NO: 19399 - DNA, 120 bp, Homo sapiens
gggcgacctctaaattatctagactctaactcagaaaaaagaaggaccaaagtctagagattgttcgagaaattctgatttaattgatctgagatgacatccagagatgatttgttagcc

SEQ ID NO: 19400 - DNA, 120 bp, Homo sapiens
gatcggcccatatgatttttggcatataactcgaaaggaatttatacagttgaatgacactgctatcaccaaagtccttgcattcctttgtccttatgtgaaaaaggtttctgagctgag

SEQ ID NO: 19401 - DNA, 120 bp, Homo sapiens
taacgattattcacccatgaatataggaactaactgggatgaagaaggaagcgtcatttccttaaaagatgcatttcaaattaattattctttatgctttcttgttacctattacaattt

SEQ ID NO: 19402 - DNA, 120 bp, Homo sapiens
attcgtcttatacacatagttttgttgggaagaagtatgatagagtgaagggtgatacataaaagactttgaaccgtaaaaatatattctgctaaaattctgtacgggaagtagaagaga

SEQ ID NO: 19403 - DNA, 120 bp, Homo sapiens
ccacgttaatgacaggacagttatggccaagaaaaagtgagcaagttgcttgatgtaaactagcaggtgaatggcaacgctgcactagaaccctaggcttgcaagctcccgcctcaaggc

SEQ ID NO: 19404 - DNA, 120 bp, Homo sapiens
aaacgcacagtgattctctcacatagagggctgcaaagccctgcctagagaatacaaactgctattattaagaccccaaacccaagatccaagtgtaggttctctctagtgggtaagcct

SEQ ID NO: 19405 - DNA, 120 bp, Homo sapiens
ccccgggtaaccgtgatgctgaccagctttaggaaccactgtcaatgaaagcagacatagtacaaggtctaggaagccccaggttacgtgtatataggaagaaatatatcaggtgaagcc

SEQ ID NO: 19406 - DNA, 120 bp, Homo sapiens
tggcgttgggagtctgcacacagaatgtggaacttggaacgcacgctggaacctggcactgttgcttccttctttgtacagatgacccttgcagtctgaccaggcagcttgaatccaaag

SEQ ID NO: 19407 - DNA, 120 bp, Homo sapiens
acccggggccatgacgggggttatccttgcacactcagaatctcagttaagttggcacatggtagcctttagctctggggcgggctcaccttaacaggtatgcatggtgacccaggcagc

SEQ ID NO: 19408 - DNA, 120 bp, Homo sapiens
tggcggatcatggtctcctttccctctatgtgagttgcacgtgaagccaaatctgaaggttgtttaataagaaaccagcacaagcaaaattcaccagatggtctttaagagagccacacc

SEQ ID NO: 19409 - DNA, 120 bp, Homo sapiens
ccacggtgtcggcgtggactctgcagtcagactgacggaattcagatcctggttctgcacttaccatttgtacgactttggcaaagcagtatacccctcaagccctcagtttcttcatct

SEQ ID NO: 19410 - DNA, 120 bp, Homo sapiens
agacgtttaacacaatgttaggcatggttaatcttcatgtctggtagttattattatcatcatgaccactactactattattgtcctcgtctcctctgatttaggcctcactcttcatca

SEQ ID NO: 19411 - DNA, 120 bp, Homo sapiens
aagcgtgtgcccatgtaatgtgtctagcagatgtaacttctcgtctgtctgggatggagattatgagcccacatgggcctgtgacttgagcaaaacaacaaaacaaaccaagaaatgtga

SEQ ID NO: 19412 - DNA, 120 bp, Homo sapiens
aaacgcacatgcctgtccttatacgagggctcagacacttctaccctgctgaagcaggtggatgctctaagtggcacccactccgcctgtgctggggacagcagaaggggccctccaagc

SEQ ID NO: 19413 - DNA, 120 bp, Homo sapiens
actcggctctcgtgaacccttcacgactggggcctccccgctaaaacagcctcattcccacttaacagctttggctcatgctgttgtcttggctataatgcttccctccacttaataaat

SEQ ID NO: 19414 - DNA, 120 bp, Homo sapiens
attcggtgtttgtttttccagttatttttgcttcctctaggaaacttctttgaaaatgagactctccttccctagcaggggctgggtgcagataggtgttcatttaacgtggattgattg

SEQ ID NO: 19415 - DNA, 120 bp, Homo sapiens
aaacggcaatgtctggcttaatgaatattacgaggcaaatatcctgtaaccaccatccagatcaagagaacattaccagcatcccagaagcctctccatatgacctttgggaagcagaca

SEQ ID NO: 19416 - DNA, 120 bp, Homo sapiens
agccgcagggagttcttggtgggcaaaatatgtctgtcaacctggagccctgcccagaccctgaagcaactgttcttcattccagctgggatttgtaagcaaatatgaggtcagatgtgt

SEQ ID NO: 19417 - DNA, 120 bp, Homo sapiens
aaacgtgggcctccagacacttagagattgcagactgaggaaggaggagaaggggctttccagagcttggagcacagggcaacttacagggcccaggaagtgggtgagaaaatgtagaga

SEQ ID NO: 19418 - DNA, 120 bp, Homo sapiens
ttgcgtggttaggaaacaatcggagatggaaaggctcaaaaagcaaggaagaagtccaaagaagaagtgggaagataacaacagaggacattaaaaagaaaaaaaaaagtagatgaaatc

SEQ ID NO: 19419 - DNA, 120 bp, Homo sapiens
tatcgtaaaaaccttgttctctctcgcctcctctgtcatccccacatccccacactgctaccaagccctgtggattccatcatccaaatctccctgaaacccactgcctcctcttcatgt

SEQ ID NO: 19420 - DNA, 120 bp, Homo sapiens
tctcgggggtgatgcaaattagtaactcacagatggcctgtttactctctgccctttgtgatgggggagtagtggtggtggtggtggtggtggtgttctctctctctctttgcttctctc

SEQ ID NO: 19421 - DNA, 120 bp, Homo sapiens
agacggcagcttccaagattacagagattacattataaaaacatttagcagaagcaaatggtgctgttctggatagacaaaccaatagatactctctacaaagtttacaaggttgtttgg

SEQ ID NO: 19422 - DNA, 120 bp, Homo sapiens
acccgggaccataactggatacagtatacagcagatgctctagaaatttgtgtttattcccttcattacatcctcgctcccagaaccactgcttgcctagacagtgccttcatcttttgc

SEQ ID NO: 19423 - DNA, 120 bp, Homo sapiens
caccgaggaagacagcaatcccgtcctaaggttttgcacatctgagccagagggaccccctgggaccgggtctcagggctgagttttggaggagtgggagacactcagggtgcggcttga

SEQ ID NO: 19424 - DNA, 120 bp, Homo sapiens
ggtcggcagatggcatttctggcaggcgcctagcatggaaggtgtgagaggaagagggaggttggggacagtggacatccttgggggtggtggggaaggaatcagggctgggaacctgcc

SEQ ID NO: 19425 - DNA, 120 bp, Homo sapiens
ccacgttcacccagcggctcagccaagtctttttaaggagtggaatgggaaatgccgtttactggcttgctgttggcccagtatttattgttttacatttttgccctggaatttccattg

SEQ ID NO: 19426 - DNA, 120 bp, Homo sapiens
aggcgagggttatatgcccgcctctgcgatgctggctaatgtgctcacagcgccccagctatgagtagcatgggtcgggggagtgcacagagcctgtcaatgtggcttcactcctgcggc

SEQ ID NO: 19427 - DNA, 120 bp, Homo sapiens
tggcggactcagagctattccaggagtaggctgggctggccccacgaggggcagaaagccagcgcctatagatgcagctctcttctacccatctgtcctctcgagcccccactgcagccg

SEQ ID NO: 19428 - DNA, 120 bp, Homo sapiens
caacgtttggatagaacatcagagctcggttggtgcctgggcagtcatgaccgtgggcatgggcagggcagcatggtgacgtggggctgggctcaggatcaaatgagacaggcctgaaat

SEQ ID NO: 19429 - DNA, 120 bp, Homo sapiens
ttccggcagcaccgatgccctggctcagaaccttttgcttgttgctccccaggggtggtcaaggccagggagcagctccaagccttcctggcaaggctagctgtggagccggaagcgggg

SEQ ID NO: 19430 - DNA, 120 bp, Homo sapiens
ccccgctgctcagtcctgctcagtcccatgtggagggaaaactccgaatcctagagtggcctgaagtctcccaagtggggagcaaggagcaggcaaattggtgccctttctactgaaata

SEQ ID NO: 19431 - DNA, 120 bp, Homo sapiens
ttgcgctaaggggcattagaagatcatcctctgccaggaatgcatagatgctttttctctgcagactctgccctgagctgatttgacctgattgactggagaggcagggattgtggagca

SEQ ID NO: 19432 - DNA, 120 bp, Homo sapiens
gagcgggaggagcatagtgggagggggctgggagaggcagagggagaaggaaagctcaaagtccagaattttagaaccggaggaggagaaggaaggaccctgtaggatccagcaccccat

SEQ ID NO: 19433 - DNA, 120 bp, Homo sapiens
gcccggacaagcaggcaagtctccgattccatcccagcccagcaccgcccaccgtcttattcaggcaaagagagttgactgtcttggcagcaaaatgaaaccttttgatttacgaggaat

SEQ ID NO: 19434 - DNA, 120 bp, Homo sapiens
attcgtttttcattaaggatgacatgcagagagtacatatcaggatgaaaaataggtcctggcctggggctccacagcctcatgatcttgagtgagcaggagagccaggagcacccactt

SEQ ID NO: 19435 - DNA, 120 bp, Homo sapiens
gaacgggaggaaggagagctaacaccttcggagcacttactgtcatcttcattgtctcccgtaattctcactaggtactcttgctccagagttacagatgagaaaactgaggctcagaga

SEQ ID NO: 19436 - DNA, 120 bp, Homo sapiens
agacgggacccacgctgcagacgttcactccagatggatgctgaaagacagaggagccctgaggcctggcaaggagaaccgtaggctttggtggtcagccaggcccggctggagggtggc

SEQ ID NO: 19437 - DNA, 120 bp, Homo sapiens
ctccgagcaacttggcatctgtatgagaaaacccagtcagccctcatctcagatgcaggtgcaacacatatggccgtcaagctgggcagacctgagtttgaatcctgagcctaccgctcg

SEQ ID NO: 19438 - DNA, 120 bp, Homo sapiens
tcacgtggttagcaaatagagtcagggtcagaatttgaaccctggtctgcgtgcgcctgcagcccaccaatatgagtcttaatgaacaaagtacctaccatacagtagacccttaacaaa

SEQ ID NO: 19439 - DNA, 120 bp, Homo sapiens
gttcgagtcctttctttctcccctaaatgcacagattttcacagtgccctctgagatttgctttagagcttgcccacatggagttttcagaaagtcaggagaaagcgaggtggtgggtgc

SEQ ID NO: 19440 - DNA, 120 bp, Homo sapiens
ccccgatccagggacccctccctccccccgctcagccttccttccttttagggtttggcaaaggctgcttcactcgaggcctctcatggagctggaaacaatgcgagtttattttggcac

SEQ ID NO: 19441 - DNA, 120 bp, Homo sapiens
gcacggcaaagagggcccgattccccttctctggacgcctctgtgggaagaggactagagaatgtggcccaggccgctgtcagttcccgttactctccccagcacgtccacggccgagtc

SEQ ID NO: 19442 - DNA, 120 bp, Homo sapiens
ccacgctcccccacaaaaagaagttgaaccaaggacatggtgctgccgttaaactgaatactcttagcagatctcttctcagtcctgtggggacatcctcacctgggtatttggctacct

SEQ ID NO: 19443 - DNA, 120 bp, Homo sapiens
atacgataagcagggcccatggccagtgtggtgatggaagtcatagacactcagagtggcaagggactgtcactgtcctctgatcccagcccctacctggcttagattcagattcagcca

SEQ ID NO: 19444 - DNA, 120 bp, Homo sapiens
caacgttctttttggaaaggccttactttcccatctttacaaatgtggaaactgtggctcagagaggtcaagtagttggctcaagatcatgacgtgagtaggtcagtggtagcgctagga

SEQ ID NO: 19445 - DNA, 120 bp, Homo sapiens
aggcggtgacctgttgggtgtcggtgaggggagcccatgggctgcaaaaggcacattggggtctccctcttcccattcacacttcaccctccagtcaccccagcttggcccagggccagg

SEQ ID NO: 19446 - DNA, 120 bp, Homo sapiens
aggcgctgatcagtcatcagtagtgccgcgatcacagttttcagagctccttccctgccttagccttcttgatccctcaacagctccttgcaggagggaggtagggcaagctttgtctta

SEQ ID NO: 19447 - DNA, 120 bp, Homo sapiens
gatcgcttgattgaattattgagaccttatttccctgagcctccatcaggtgatccttatatctgtcctggaacactagaccacccagaaacaggtgcagcaacccgggccagcccaggc

SEQ ID NO: 19448 - DNA, 120 bp, Homo sapiens
ggccgctcattctgctcctcctcttgcctctcctcctccagggaactctttgaataagaggacaccagatcatgcctgcagttccagcccagggtgaggttgaaacacttatgcttccta

SEQ ID NO: 19449 - DNA, 120 bp, Homo sapiens
aaccgagcctcacaatcggcctgacactggctatttaaaactctgtcctggcctctggggcctttcggaaccaggactgtttgtcctgccaagagcaaagccccacccgctgtggcctgg

SEQ ID NO: 19450 - DNA, 120 bp, Homo sapiens
ggtcgggaatgccaggaggaggaattggtgaagcaaagaaaaggcaaaagcccactgagaggtctaatgagccccaggtgcacacacttgtgttgtgtgtggctttcttcaggccctggg

SEQ ID NO: 19451 - DNA, 120 bp, Homo sapiens
ttccgtgaccttgcccaggtccttccttagtttcctcaccagtgtggtgagaataacaaagatctcttctcaaaccgtctccctgggagttaagagattcccccatatctggtgatccca

SEQ ID NO: 19452 - DNA, 120 bp, Homo sapiens
cctcgcctgtgacaaacttcctgattctgaactgtacaatggctctcagtgctggcaccttcttgggaggagcaggaagtgggggtggcggggggacctcaccttagtgaagacctactg

SEQ ID NO: 19453 - DNA, 120 bp, Homo sapiens
tgtcgttgtgcctcatgacatttaccgactccttcggaagcaggtgctgctgttcccactgtgcagatgtgtgaggctgattcctacctcgtagctcctcagactcagggctacaccttg

SEQ ID NO: 19454 - DNA, 120 bp, Homo sapiens
acacgcatacacacacaccacaccacacacacacacacacacacacacacacagtgtccgcctgggctgggtgggctacaggctgtaggcagaagaaagcagagtgcctcagaaatatct

SEQ ID NO: 19455 - DNA, 120 bp, Homo sapiens
gcccgccccagtcaattctcccacaataggctactgtcctttaagcatgtccaagagctactgctggtctctgtcccgcagggccctgacttcccccgactcaggccagctgtctccagc

SEQ ID NO: 19456 - DNA, 120 bp, Homo sapiens
gcccgagggaaacagctggaaccaaatgactgcagtgcctgccgctaaatgaccaggccttccaaaataaacaaaggaaagtcaagggaaccaggactgccagcatcaacgagggagtcg

SEQ ID NO: 19457 - DNA, 120 bp, Homo sapiens
tggcgggggtggccagggcagtgacagggactactctaagaaaagtccctcagccaaagggtagacattggggaataggatggagggcagggaactcccccgctattcccacatccacac

SEQ ID NO: 19458 - DNA, 120 bp, Homo sapiens
actcgtttgtcagcaattggccgtttttttctgggtcagtaggtgtctgtactgcattggagcagtagacctggcctggaccaactccagatgctcgtaggtgcacgatgctgtctcggg

SEQ ID NO: 19459 - DNA, 120 bp, Homo sapiens
gtacgaagaataataaacattttattcccaggtccaatcccacacagggttgcagatgaggaggaggcaggctgggagtcgtgggccattcagcctcaggtgggaggaggggcaggcctt

SEQ ID NO: 19460 - DNA, 120 bp, Homo sapiens
gcacgggctggaaatcctgcaacaccaaccctaactcacagctatttggaattcggttcctaagcatttactctgccgttgctgcaaatgaactgtgtgctggtgcatgtgtttgggccc

SEQ ID NO: 19461 - DNA, 120 bp, Homo sapiens
ccccgtggagtatgggggaggcaagggaatggaaagcagcggtcaggtggctgaaatgagccatctctcactatgcaccagacttacccatttattagttcacttaaccctcatcacaac

SEQ ID NO: 19462 - DNA, 120 bp, Homo sapiens
tcccggctgagtcacctggcctggatgtccatttcatatcctctctgttactcattgaccgagaatatgacttaaatccctgtgggcaatagccactaggctcatgaggaaatggataat

SEQ ID NO: 19463 - DNA, 120 bp, Homo sapiens
tgacgcagaagctaaaagcctcaattacccttcatgaccgaagcgtggaacttttctagagagagaaatttttgcctcataaattgcacttgtgagaaatcagtgcacgcaggctggtga

SEQ ID NO: 19464 - DNA, 120 bp, Homo sapiens
agccggcgggggtcacctcagctcccacctgccgggaaagcctttggaaggagcacccggggttggccagagcaggattaggccagggcaggcagcataaagagccaagtttaggtaaac

SEQ ID NO: 19465 - DNA, 120 bp, Homo sapiens
ggacggcagaggggctttcaaacatcctgttgcttgggctccaatcccagagaatctgatgtcattgttctgggtggagcatgagccctggactttaaaagctgcccaggtgattctcat

SEQ ID NO: 19466 - DNA, 120 bp, Homo sapiens
ccacgtggggatctcactagttttctgctcaccactgtcagctttggaagttgaggcaatacctgttggcccagcaaaccagcatctgtccttgcccctttcacatgcattcatttctca

SEQ ID NO: 19467 - DNA, 120 bp, Homo sapiens
tctcggccatatggctgtctctagttctgtcccatgggaagctctgccttgactcttggccttttggccaccagaaaaggccatttgtgaagagtcccctctgggctgctgcttctgggc

SEQ ID NO: 19468 - DNA, 120 bp, Homo sapiens
tgtcgctcagcagcaggcctcagggctcttctcaggcacccacccctggctctctcgcagtgcagtgagagctgcagcagggggtccttgtgaggtttgcatggggagggattcaggcct

SEQ ID NO: 19469 - DNA, 120 bp, Homo sapiens
attcggagaggctgccaggagtgctgcttgtaaggcttatttttatagggcttagcatgggccccaagaagcatccggcataggccagtatcctgaagtgttccaccacatgcccaaggt

SEQ ID NO: 19470 - DNA, 120 bp, Homo sapiens
agccggtagtgctgctgctgtctatctggaattccagtttcttagcttggagatggcaaagtcctcactgccccacctgacctcagcccagccaatcctgtatttcaggaattttcccct

SEQ ID NO: 19471 - DNA, 120 bp, Homo sapiens
cctcggacatcatgcctctggggatcagtttctgcataaccagacttatggttataataaccaatgtacaactccaactagttggaaagtcacaacaaaaaggagggactggatatttat

SEQ ID NO: 19472 - DNA, 120 bp, Homo sapiens
atccgggggctcagctattgaggtctgttgaggtcttcctcagcagctccaggagtacatggttcttgcagtatggcacccacaaactcagaaggagagactgcctggggaagcttctca

SEQ ID NO: 19473 - DNA, 120 bp, Homo sapiens
ccccgggggaaacaaggggaggtggcttgtttggaggtgcagtgtaatcatacttcttggagccaagaggaggtgtgtgtgggatggattgggaatgagtgtgagggccaggtgggcccc

SEQ ID NO: 19474 - DNA, 120 bp, Homo sapiens
gagcggagagcccacagtaaggctcagggtgtctctcttcactggggtttctagatctttggctgtgggtcaccacaccctgaggtgcaccacagcctgttccccctcaaatcaggctca

SEQ ID NO: 19475 - DNA, 120 bp, Homo sapiens
ccccgaggggctctttgaggggacaaagaccttgttgcccatgtccaatcctgttccctctttaaatccaaggcccaggagcagaatggagcccctgaaattaagggttgtggaacagca

SEQ ID NO: 19476 - DNA, 120 bp, Homo sapiens
cctcgcgttttatggaggagataagagtatggactatctggctggcttttgcagcacagccaggttttccaagagtggcatgagagagagaatggaaagagagaggaaaaagtagagtgg

SEQ ID NO: 19477 - DNA, 120 bp, Homo sapiens
gctcgagagccttccagccaccgcatggtgcagggaaacccttgctaccctcatttatcccccgtcagggagggcctcagtgccgagtgcggcggaggatggatccctcccactgccgca

SEQ ID NO: 19478 - DNA, 120 bp, Homo sapiens
tgccggttgaggtgaactgtttccacctggagggagctaaggaaagaaagaagcctgtacacaaagtcatacattcacacaaacaaatggcgtgcttccaaacaaaattcccagtcgagg

SEQ ID NO: 19479 - DNA, 120 bp, Homo sapiens
aatcgtgccagtagcggccaagtctgcacagaatgaagtcccaggatacccagaagagacagaaaaaagtcgggtacagtccaacttgctcacccagtttcaaggttgccggcttcttca

SEQ ID NO: 19480 - DNA, 120 bp, Homo sapiens
tgtcgtgccagggggtgaaagggaggtttccccaaaacaagaacgttttggcagctgctgagaaatccccttaacattcctatcctggagtccagtagccaggagcagctggtgctccca

SEQ ID NO: 19481 - DNA, 120 bp, Homo sapiens
ccccgccttgcctggtggtgaaaccaggctgataggctcaatcgtccaaagtgtactgcagtcctcataggggccaccaaaattgtaactgaaatgcagttcagtcactcgccacttgca

SEQ ID NO: 19482 - DNA, 120 bp, Homo sapiens
ggtcgagctggcaccgtcacgggcagagctaggttgtaaagtgagcattgcttcaagatactctccagttgggagagagttccctctcagtcacactttaggatgtaaattgactgttgt

SEQ ID NO: 19483 - DNA, 120 bp, Homo sapiens
tttcgcttagaaaaatggggatactgcgttacagaggaggggtcaggagtggcttccccgggtagttgggctggggtgatgcactgtgattccccacgtgctgtcccatcgcttactccc

SEQ ID NO: 19484 - DNA, 120 bp, Homo sapiens
caccgtcgcttcagcttcctccctcccctccgcagacctccgcctcctcctggctgcaccagagtgtctgccccctcggatgagcccaccttcggcccatggggagggcctggagtcagg

SEQ ID NO: 19485 - DNA, 120 bp, Homo sapiens
gcccgagcaggacaggtctgaggcaccctcttcctcccgcaggcctctctctggaacgcctacccaactccatcgcctcccgcttccgcctgacagagagggaggaggaagtgatcacct

SEQ ID NO: 19486 - DNA, 120 bp, Homo sapiens
gatcgctcaggtgttcctgcaggaattggagaaggtgagctggaaataacaccgtggtaggagctgctctctattgagcacctatgtctatggatcccactaaacccataggtcacctgt

SEQ ID NO: 19487 - DNA, 120 bp, Homo sapiens
atccgctaggatgtttaatagatgagctttaggagattgaatcatttgctcaccatttctttccctggcaggggtggagtctgcctgggtcttgcagttggacatccttccctgctctcg

SEQ ID NO: 19488 - DNA, 120 bp, Homo sapiens
tttcggcagggtgtctcccaggagccaagtgcgggcctcctgcagcctcccaaaagcggtgacttgggcagtaactaccctggaagggtgcggatggctggggtgggaggacccctggtg

SEQ ID NO: 19489 - DNA, 120 bp, Homo sapiens
gagcgagccatgaagtttgcgtttggagaatttcacctttggtaccaggtggccctctccatggtggcttgtgggaaggtaaggcccagggggcgctaggggttgcacactcacccgcag

SEQ ID NO: 19490 - DNA, 120 bp, Homo sapiens
caccgtccctgccttgggctgcctgtgggccgccttccttggtcttcatctgccagctggatgcccctctgaggcagagcctggcagaatcccccagggtattgcctcatagcgcccagc

SEQ ID NO: 19491 - DNA, 120 bp, Homo sapiens
gcccgagtcacacgttggtcactcaacccctggtgcctgacttgtcactccctctccccacacagggctcagcagctggcgcccagtgacccccaggtcatcctctatgtctcgctgcag

SEQ ID NO: 19492 - DNA, 120 bp, Homo sapiens
cctcgtccgacaggtgggttgtccgtgttcctaacccccgggtcctcgggggctgctgatcttctcctggaaacccagcttaccagctgtgtgaccctctgcaagtgactttgcctccct

SEQ ID NO: 19493 - DNA, 120 bp, Homo sapiens
agccgtggtgggtacacaggaagggcgtgttctccgccctcactccccctacaacatttcagtggactgagatgttgatgagtgaccacctgtcactcatttatttgtgtcctcgccttc

SEQ ID NO: 19494 - DNA, 120 bp, Homo sapiens
acccgccttttccccaggggtgctgagagaatgctggtgtgtccaggactccccacctcaggtccttcagagcctcctttactttcctgtggcgcctcagcctgcaggctggcgctctgg

SEQ ID NO: 19495 - DNA, 120 bp, Homo sapiens
tgccgatgcccccacctgactgcctggggattgcagacaagcctttggctctcacagtggagctctccttgccggaaccacccaggaaatgggctgagctccaggccggcggagggaagc

SEQ ID NO: 19496 - DNA, 120 bp, Homo sapiens
gcccgaagaagcccatgtatttgctgtcaggtggagggcagccctgcctgctggggatggtgctgtgtcccccataccagcctggggaagccctaccttctgaggagcgggccacagcag

SEQ ID NO: 19497 - DNA, 120 bp, Homo sapiens
taccggaggacaccactgaggccgagccagcatagaacccaggcctctctgatccacagcccacggggtctaggtaccccgctcccctgacccttttggagttggggccctgagagcatg

SEQ ID NO: 19498 - DNA, 120 bp, Homo sapiens
agccggggcttggtcttatggtcacttcggcgggctgcatttctcctgcctctggggcaagccaggctctgccctgcgtcagcctggctcctcctctcgtcacagttactctcagtgctg

SEQ ID NO: 19499 - DNA, 120 bp, Homo sapiens
tcccggtgcctgtgtctgtcctgacctgacctgaattgtcactctgtttctgaggcattctgtctccctctccaggttcttctgtctcaaccattttctccccaacggccctgatgtcat

SEQ ID NO: 19500 - DNA, 120 bp, Homo sapiens
tgtcgtcggtggcttcgctcccttcctcttgcactgcccctccccctgtgactccctccatcctcctccacctctaggctgcgcccccaccctgtccccactcctcactcctgaccccag

SEQ ID NO: 19501 - DNA, 120 bp, Homo sapiens
gcacggggcacctctgtgcccctccaggagcatccctcccctcccaggaataccaactttatttttagttccctgtaaaagaaccagtgcttttcttgctaatctagtgaacgataaacc

SEQ ID NO: 19502 - DNA, 120 bp, Homo sapiens
tggcgggccaggccagcggagccagtggagcctagggcccagtttccttggagacctcattttggcagcctcagggagttgagaactcgagaactccctgaatggactgtaagctagagt

SEQ ID NO: 19503 - DNA, 120 bp, Homo sapiens
ggccggcacagtgatggctgtggatttggatacgtagcccaggataatcaggtctgctctagcagagtcaccagcacaggagcagccttagggccaccgacaagccgagccagtggcccc

SEQ ID NO: 19504 - DNA, 120 bp, Homo sapiens
cctcgtatgctccttgacctatccacaaagtaaggtgcccggggagaactccgggcctggcactggtgcccacagcctgcacagaggccaggctggagaccaacacagaagccaggcaga

SEQ ID NO: 19505 - DNA, 120 bp, Homo sapiens
ccccgcgagaagggtggaaggctgggtctgaggtttggcaaggagcaggactcttaaaaagagactcatggggttcctgcagggatggaacgctgacatggagtcagtcacaggagctaa

SEQ ID NO: 19506 - DNA, 120 bp, Homo sapiens
taacgcagctcccaggcctgagagcacgtgccttcaggctggaaggaaggttctgtcctattccttagttttctggctttggggcttgaagagggaaacgcacactttaaaagtgtttgt

SEQ ID NO: 19507 - DNA, 120 bp, Homo sapiens
cctcgttttgtagcagagaaactgcagctcagagaggtgagtcctcttgccctaaggtgccagctgggaagtggcagagccaggagccacaccccaacctcaccccagagcctctgagca

SEQ ID NO: 19508 - DNA, 120 bp, Homo sapiens
caccgcgtgaacatgttcagaggggagggcctcgtcagccctgggtatgtagctggcagattctttatcccagggccaggccttcctggccctccaccctccagcctgccgtaagtttct

SEQ ID NO: 19509 - DNA, 120 bp, Homo sapiens
gtccgtgcagtccatgctagggggatcccggtttctgcccttgggacctgataggcaagccaggtggtcgttagttctatgttccaagatgggtgcagggcatcctaagaattgagagag

SEQ ID NO: 19510 - DNA, 120 bp, Homo sapiens
acccgtgtgcagggtcaggaaaggcattttggggatgcagtgaggaagaaaaatacttgtccagaaatcccctcttctgaaaatcctggggcaaattccaccctcttcattctctaccaa

SEQ ID NO: 19511 - DNA, 120 bp, Homo sapiens
taccgtggtcttgctcatcagtgatactgagaagaaagggcctcactactcaccactggtgagaaccgggaggtgctgccgtctggccctcggtggttcaaactcttcgcaggctgccca

SEQ ID NO: 19512 - DNA, 120 bp, Homo sapiens
ccccgctgaggtcctgcctccaggtgggaccagctcttcttctcaaccattctaagggccactccccacactggtcttacctcagaggactttaggttttcaggtcgaaagaaattctga

SEQ ID NO: 19513 - DNA, 120 bp, Homo sapiens
ctccgagaacagcatctgaatgctttgaatgtggcgctgcatcagggtcaggcagtgtagtattaggagaccagtttgggtgcatgtagcagatccaaaatagcagtgtcttgcacaagg

SEQ ID NO: 19514 - DNA, 120 bp, Homo sapiens
cagcgactcttctgtccctagggtatcactgtcgtccatgtggtccaggatggctctctgccacattcacattccaaggcaaacgatttacaaggaagaaaggcacccccttccctataa

SEQ ID NO: 19515 - DNA, 120 bp, Homo sapiens
aaccgccacggccaggaaaggaacatgagaaggtgtcctagttctttcattctgagcatgagagaattccagggtaatttgcaccccctgagccctctcccctcccctggctgccatcat

SEQ ID NO: 19516 - DNA, 120 bp, Homo sapiens
aaccgcctcccccacctgacccaggctaagaatacaatcagcatccccccgccaaaccctgcctaatgactccaccagctgcagcaaatttgcaggaagggaaaaagatgccttgatcat

SEQ ID NO: 19517 - DNA, 120 bp, Homo sapiens
aaacggggcagagtacctgcctctagggggctatgaggctcactggtgtctctctaagacaaagaggcttggacaggccagcagttagctaccaccactattattttttactattatcac

SEQ ID NO: 19518 - DNA, 120 bp, Homo sapiens
aaccgctttaaatgacaggatgtttcccttgccaaaagcagaggagcagcctggaaatctaatcaagtcctagccaaacgtcaaaggaagctgaagcctttattattgctattaatgagg

SEQ ID NO: 19519 - DNA, 120 bp, Homo sapiens
cctcgggaggctgctggttggggttcagccaccttgagaacatcaagctcagttcccctcccctgatttcactgccaccaacaaccttctggttgtcttcagcttccatgaaaattttct

SEQ ID NO: 19520 - DNA, 120 bp, Homo sapiens
ccacgcccgtatggtgaatgcttagaagttaacactacatcttctgttgcctgggagtttggttagcatgactcagcgttcctgagaatgcctgaccccgtgggctccgacaaacatgtt

SEQ ID NO: 19521 - DNA, 120 bp, Homo sapiens
ctacgggaggtgatttgcagcccaggcagtggcagtactagtcctctcctacccaccgctccaacttctccttctagccccttgactcccctgggtgggcccattttcttacaggcagaa

SEQ ID NO: 19522 - DNA, 120 bp, Homo sapiens
gtccggactgtccttataattcacaggtcactgacctttctttgttcctccaatgactgctatctttgtagctcttcttccatctgctgccttgggttttctcccgtggatgttaaggtt

SEQ ID NO: 19523 - DNA, 120 bp, Homo sapiens
gtccgagcgaggacaggcagctcatggccaagaagcatccccagggctggagcctcctctcctcggaatgctcccatccagcactagagtgtccagaatcaccagccttatcagcgaaat

SEQ ID NO: 19524 - DNA, 120 bp, Homo sapiens
atgcggggagataggagtaaagaagcaattccaagccctttgttttgccttgtattatcttgttttctctttaccaccctgagagtggtcatggttcctattttactggggagtctgagc

SEQ ID NO: 19525 - DNA, 120 bp, Homo sapiens
agccgccagaggagagggcactccaggcagagggaactgcagtaggggatctgggaacagcatgaatgtggcagcttcatcttcttgagcctacaagggatgtcccatttacatttatga

SEQ ID NO: 19526 - DNA, 120 bp, Homo sapiens
ctgcggagggagaatctggggtagataggccaccatggagttgtgggactaaaatcactgagagcctcaggaaggagtccaggcattcccatcctcccttaagctgcatccttcaggggt

SEQ ID NO: 19527 - DNA, 120 bp, Homo sapiens
agccgatggccagcagactgtgggctgagaaatgaagatctccactgggtaaagtaaagctttcactctttgctcctaggcacttgcagggaaatgctgctgctttgtcttcactgaaag

SEQ ID NO: 19528 - DNA, 120 bp, Homo sapiens
gtacgggaaggactttgaggaagcgtaagtacaaagtctccatggtgcccttgtcatgtgctagagcctctcatgaaaaaaggcatccatccttaaaaatcacatcagtgcagacacggc

SEQ ID NO: 19529 - DNA, 120 bp, Homo sapiens
cagcgccccctcgccactcagcagctcctttctgatgggcacatgggtgttggggccagagccggtcaggtgctccctcttgctccagaggtcttcctctgtcaaagggaataggctgct

SEQ ID NO: 19530 - DNA, 120 bp, Homo sapiens
tgccgatgtgtttttgatgaacttatgaacagagcagctctcacccaaacacattctttggctgaaaataggggagtgaacccggcattaatgctaactccttgagccactctctgcctt

SEQ ID NO: 19531 - DNA, 120 bp, Homo sapiens
ttccgggcctcaggtaacttgtctgcagaaagcggggagagaatgtggagtagattacctctcggctccttgcattttccttgttgatcccaggggcttctgccatagcaagggtctggg

SEQ ID NO: 19532 - DNA, 120 bp, Homo sapiens
caccggatagctgagccttcctcttccaggaagtctgccttgacttttgggggtaaactcctgttacaagccagggttctctgtttatttcccacgagatttgcctggtatcaccagagt

SEQ ID NO: 19533 - DNA, 120 bp, Homo sapiens
gctcgttcagtgcccgggtcagaaagcccccatcagctgggacacttctctaagggaaaaggagaaggggaacatagagttaagggagcagactcgcccatttcctgccgtcaaggtcaa

SEQ ID NO: 19534 - DNA, 120 bp, Homo sapiens
ccacgccacttggagtaaaagctgagccttagcctgcatggccctaagcacttggagctaagctcctatcgctgttcttgccactcacttccctatggccatatcggccccatgctgttc

SEQ ID NO: 19535 - DNA, 120 bp, Homo sapiens
cctcggggcttttacactcactgttccctctgcctagaaggtcacttcccgacacccccatgacccgcctgctccctcaccttcctcgggcctttatttaaatgccaccatggccgagca

SEQ ID NO: 19536 - DNA, 120 bp, Homo sapiens
actcgccatcattctttgggtgcttagctcccttgattttccacaagcacctgtcactctctaacgtattggttattttcgtttatttgtatgtcgtctgcctccccagcgggaatgtaa

SEQ ID NO: 19537 - DNA, 120 bp, Homo sapiens
taacgtttagtatcaaggaatccatgaattaaactggcaaaagacagatcaacaggaagaaacatttgtttgtatgcatacaggagcttacaaaagaagtagcacaataaatgatttaag

SEQ ID NO: 19538 - DNA, 120 bp, Homo sapiens
atgcgtgttcatgcagatatgagtgttctttccattttcttcagtggccataaaaagttcccccagagtggggatttatgtaggtttattcttgatctccttcctgggagtaaaagctgc

SEQ ID NO: 19539 - DNA, 120 bp, Homo sapiens
agacgatggacagcacagctctgttagtttcatgtttttcctgagaataatgggatgaattaaagcattttaagcaggagtgctgcaggattagatttttatttgctgaacttggggtgc

SEQ ID NO: 19540 - DNA, 120 bp, Homo sapiens
agacgtgccagttagaactcaaagataagctctgaacatccttgtgagtcatctatgtatagatggtcattatggaccagtgagtggatgagattgcataaggcaaaaatgtacaagaag

SEQ ID NO: 19541 - DNA, 120 bp, Homo sapiens
acccgatttctactcactaaatgccaatagtactctcatccccagttgtgtgctctgcccccaaatcatgacacaaaaaatttcttcaggccaggcacagtggctcaagtctgtaatccc

SEQ ID NO: 19542 - DNA, 120 bp, Homo sapiens
attcggttcttccatatgccatcagggctcctgtgctcgtggccctaggacagcgacctgcagcccaagagaaaccatcctcctgttggacttctgggcccaattgcgaatggttcctta

SEQ ID NO: 19543 - DNA, 120 bp, Homo sapiens
caccgagaacaaagatacaagcaaaaacgtggaaagctctgaagcaatttattattaacatcagtagagcccagtagcaatgaaacaacacattgtggccaggcacggtggctcacgcct

SEQ ID NO: 19544 - DNA, 120 bp, Homo sapiens
ccacgcccggccgtacagtgagaatttgaacccagttctgtatgactcctgaatcctcttaatttccacactacatcagtattcaacagtcaggactgcctacacaggctgcttgatgga

SEQ ID NO: 19545 - DNA, 120 bp, Homo sapiens
ccccggctgcacccacctgcccgccagcctttctcagttgcatcatccttactggctgcaactgcaatatattcgcctgtagccctgtgggggctactacagaacacaaacagagccctg

SEQ ID NO: 19546 - DNA, 120 bp, Homo sapiens
acacgcaggcagacccatcaatacccaaggaataccttagtcacagaataggaataggcaaatgcatattgatcagaaaatgtacctgacatgcaaacccagaacaggtgagtttgatgt

SEQ ID NO: 19547 - DNA, 120 bp, Homo sapiens
ggacggaggaaagctggaaccctgaggttaagactgagattgggctggagtccggagagtctgggctgagggtagaattcccacttattatgggatccagtgggacccttcatagaagag

SEQ ID NO: 19548 - DNA, 120 bp, Homo sapiens
agacgccactgaagacctagtgctgggttggacctatggggagacccagaggttcataactctgtctctgccctcaaggagtttagcatccagggatttaggtggtatttgggtcacttt

SEQ ID NO: 19549 - DNA, 120 bp, Homo sapiens
aaacgtggtgatgagccccactgtggccagcactgtgccaagcgatctttaaaggtggtggttttagccttacaaccacctgggtggccagtatcttcattctcactctgcagtggagag

SEQ ID NO: 19550 - DNA, 120 bp, Homo sapiens
cctcgtaagccagtggggaagaagtctggcggcaaggtagctggcagcttaggaagcacctgggctgcttgctaaggagtgggactttcttccagaagctacagggggcccagtacagta

SEQ ID NO: 19551 - DNA, 120 bp, Homo sapiens
ctgcgcctggccaaagcaagcattttaataacccattttaaaattttagacccaagtcagtgacccctgtattaatttcggtaatcaaaagttggctaaattgagccagctgagtgagac

SEQ ID NO: 19552 - DNA, 120 bp, Homo sapiens
catcgtgacaaagggagagcaggtgaaggcactgacggggtttgggatttaggcagacctgaggttgatttctggcttagccatttactagtcatgaaacattgaaaacatcatttaatc

SEQ ID NO: 19553 - DNA, 120 bp, Homo sapiens
ctacgggtcatcaactttctcttgcatgattgcacgagtactatattcaaagtgactagcacaccagtggtgcttggtagggactagctaaaatatcctcattccgacctgggagccaca

SEQ ID NO: 19554 - DNA, 120 bp, Homo sapiens
tggcgcacatctgcctggccccttcctgtggagcaacactgcccttcagtggctaaacagtgaatgacaggtgtgccggctgctcccacccagccctgcattccacacgtcagaagagtt

SEQ ID NO: 19555 - DNA, 120 bp, Homo sapiens
tgccgcatgtacttttcacaaagttggagccctaccttggccagcaggtgacaggtcccactgtccccaggacagggcgaactcaaggccagtggattctgaatcttgggctgggaagaa

SEQ ID NO: 19556 - DNA, 120 bp, Homo sapiens
aaccgaggcagactcgagaattagcagactctggctcaggcaggacaatagagcagcgggaaatttctttcaagggcttttgttgctgttgttgagatggaatcttgctgtgtcacccag

SEQ ID NO: 19557 - DNA, 120 bp, Homo sapiens
ctccgccccctgaaagtattccaggatctctgagggaggttttgggagggggccaaggtcctgcaattgggtgggtggggctccaagccattgttctttgcacattcatgccaatgtgac

SEQ ID NO: 19558 - DNA, 120 bp, Homo sapiens
agacgacttgggagtcatccttgtttttgatgagctatataaccctatggccagcagagggaagtactgcatttcagagcgacaatttgagatctatgaaagaatttcaatcgagaataa

SEQ ID NO: 19559 - DNA, 120 bp, Homo sapiens
tagcgtctgagtcttccatccctgaagcaccagcagctctgactagaggtcctgtctcccagctgtggccccagctctccctgatggtgacagttgcgacttccaaacttgctcctcccc

SEQ ID NO: 19560 - DNA, 120 bp, Homo sapiens
cagcgtacatttgcctcatgggtgccattggacttcctttgtgagccatgttttctttcaccttgtcccaatccacagttaaccaaatcttggcccaaattatgtgctggctggtgttgg

SEQ ID NO: 19561 - DNA, 120 bp, Homo sapiens
aaccgtctctgccaaacagtttctttcacagggcccagatgatctcatcacagaggctgcattctctggtatctgttccaagcacagactcacttctcattacctttgcaaataatagtc

SEQ ID NO: 19562 - DNA, 120 bp, Homo sapiens
tgacgaccagaaggaagctgctaggctgggccaggattctaaatgctgaggaggtaattcagagccacgaaaagttgcaccatatgctttggggttgccggctgcttctgtgcatgggga

SEQ ID NO: 19563 - DNA, 120 bp, Homo sapiens
ggacggggtttagtgccagtctgcaaaaccctcctcgctgcggtatgccctgggtgtgggcctggggggccacgttttctctccctgaaggagaatctgctgggggccacggttctccaa

SEQ ID NO: 19564 - DNA, 120 bp, Homo sapiens
aggcgtccccaaaacctgcccttgataacatcaggcctggccaaatagtatttctttaaaaaaattttttttgtttcattttattggataaagattaagaaagcgccagcagtgactgag

SEQ ID NO: 19565 - DNA, 120 bp, Homo sapiens
ccacgcccggcggccccgcggcctggagagggtccccggcgcgggcggacgggcggtctacctggaggcgctggtctcggccagccggttgttcatgatgcccagcgcgcccacgccgcc

SEQ ID NO: 19566 - DNA, 120 bp, Homo sapiens
gcggcagctcagcttgcgcagcatccagttgagcacctgcttgatgaggatggagatgacgttgaagagcgagtaaatgcagcacacgccgagcaggatgaagaggaagttgcccaggcg

SEQ ID NO: 19567 - DNA, 120 bp, Homo sapiens
ttccggtaggcggcgtgctggctgctcaccaggtccccgaagccgatggtgctgaaggtgacgaagcagaagtagagcgagtccacgtagtcccagccctccacgctggtgtacatggcc

SEQ ID NO: 19568 - DNA, 120 bp, Homo sapiens
ggccgaggcgcagcaggacagcagcacggcgaacaggcccaggatgagcagcacgtggtacaccgagggcttccagcccgccaggctgtcggcctccgagagcgcggagccgcggcggaa

SEQ ID NO: 19569 - DNA, 120 bp, Homo sapiens
tggcgggcagcaggccgctgcggcgcagctggcgctcccggcaggcgcgcatgatgaaggccagcagcgagatgatgcgctccaggaagaggttgaagaacaggatggtcccagcgcagc

SEQ ID NO: 19570 - DNA, 120 bp, Homo sapiens
agccgaacagcccgtaggcgatgaggaaggccttcccgcccaccgtcgcgggggtggtcatgccgaaacctgtggagacagggcagggtcagcgcggtcctggccgcgcaggtggtcctc

SEQ ID NO: 19571 - DNA, 120 bp, Homo sapiens
ctccgcctcaaaataaacaaacaaaaataataattttgcctcaggttcctctttttaggttgacatatctgttaatctaccttttgtgagttgacttgtcagaaggggacggggaagttt

SEQ ID NO: 19572 - DNA, 120 bp, Homo sapiens
atccgcaataacaaactcctggttagaaaagcatgacgtattgtttacttgagcatgaattgattgttgaatccaaaccaaacgggtgtatttattgtaaggatgtactttacattcata

SEQ ID NO: 19573 - DNA, 120 bp, Homo sapiens
tagcgtatgttatttgtttcttgaggttgagtttaagagacttgtaaaaataaaacgtatacatttcacctcccgttatggagaggattccagggtattcaagaaagatgggcatttgat

SEQ ID NO: 19574 - DNA, 120 bp, Homo sapiens
tgccgagcacagcattaggcattatggatcctggatacaaccatgaacaggacaaagcaaagaggcaattgtagactccaagtggaaaggggacggagaggatgcgggtcaggctaggct

SEQ ID NO: 19575 - DNA, 120 bp, Homo sapiens
aaccgaaaccagaaggacaaataagcttagacagattatagtgagagtgggaagctggttcaggaagaggaaggtctgcaaattgtgggtaggatgaaaggaggaggagggagcattgga

SEQ ID NO: 19576 - DNA, 120 bp, Homo sapiens
aagcggtaactaactctacaatgaaggaaaggaaaagttatatctgaaatacaggagatcccctaaggcaactctcttagcagtaccatgccctctaatcaaatgcaatggaaaactaca

SEQ ID NO: 19577 - DNA, 120 bp, Homo sapiens
ccacggccagctgaagtacttgctgaaggcaaaaagagtacagaatgggtagtggtagttataaagaagttataaagaaggtagttataaataccacatagtatgtaagttataggattt

SEQ ID NO: 19578 - DNA, 120 bp, Homo sapiens
tcacgtgttttgcatccttttttggggcaagggttagtacacttttggtcataaacaggatagtcatatcctattaggtggaagtatgacctggctaattgttttatttttagtagagac

SEQ ID NO: 19579 - DNA, 120 bp, Homo sapiens
gcccgcagccatggggtagatggctaatgggactatgcagatctgatcagtgtaatgtcaagatccaaataaacaccaaatttgtacagagtgaaggtactgagagttaaatttcccctt

SEQ ID NO: 19580 - DNA, 120 bp, Homo sapiens
cttcgttgtatgtttcctcctgtccttttaaagcatgggagcaatgatgataagaattggcagttggaatgaggaaagagagcggctgagggtctctgctgtttcctttcctgcacaact

SEQ ID NO: 19581 - DNA, 120 bp, Homo sapiens
ccacgcccatctttgaactaaaaactctaaattctacatcctcagagcaaagtgcagaattggaaaaattatgggaatccttcatggcatgtggctcttccatccgggggcctcaggaaa

SEQ ID NO: 19582 - DNA, 120 bp, Homo sapiens
cagcgtcacaaactcaggccctcgtttcctgcctggatggggcttttcttctgaatatttgagagtgagtaaaataaaaaattgtcaccaggcttagtctgctcactcctttgtggggag

SEQ ID NO: 19583 - DNA, 120 bp, Homo sapiens
atgcgttttgggtcttttcccagaggtttcaatgagggatcgtgtgtctcagaggtgaaaataaaaaacaaaaataaaaaacatttgagttctgcaaaaccacagtggattggaaactat

SEQ ID NO: 19584 - DNA, 120 bp, Homo sapiens
aaccgtacataaatagtagaaaacagactgcatcttgttgctatggcaacgccctacttatattacattaagctgattcatgtcttttctcacctcactgttaataaattatattggctg

SEQ ID NO: 19585 - DNA, 120 bp, Homo sapiens
gtacgtgtggggtggcagaattgggacttgaacaaattcccacgtcttgagttctactctcaagatgcagatgtagatctatatttatgtatgcatttatgtatattcaaagttaaaaaa

SEQ ID NO: 19586 - DNA, 120 bp, Homo sapiens
agccgtgctcactagtggggagatcttttgcttatttcccctggggtcctaagagataagaggtcatgccagtgctgggccagtttcctgcaaggctccacagtatccaggaggggcctc

SEQ ID NO: 19587 - DNA, 120 bp, Homo sapiens
ctccgggaggagggcagcggcctgaggcacctcctcacacctccacttctgctgttgtcagagagcttcctggcttccttttgtgatcagctggtcctggaaaggctgcagcagatggct

SEQ ID NO: 19588 - DNA, 120 bp, Homo sapiens
atgcgcagagctttagagggtcctgggtgcaaacccaggcgtgaccaagccaagagcagctgcatctaatgtggcatgtggagccaacattaggctttacccacacacccattccgacct

SEQ ID NO: 19589 - DNA, 120 bp, Homo sapiens
agccgatggcgcagttcagaacagatggccaagagaaacactagggaaaagccctcccaaccagctgtagtgtcccttttccagcctcctaacctaacagcttcagagctgacatgaagc

SEQ ID NO: 19590 - DNA, 120 bp, Homo sapiens
tggcgtttattctcagggcaagcacaagccctgatagttccattcttagcagtcctagctattgggaaacttggtttctaaaccaaacaatgcttgcagcgggcaaaagtctgccacacc

SEQ ID NO: 19591 - DNA, 120 bp, Homo sapiens
agacgaaaccaaatttttgcttaggataaccccttgatatttgtcagtgggtggtctggataaaattacaaagaaggcccacatactatagttataagtatttaaatgtataaataagtt

SEQ ID NO: 19592 - DNA, 120 bp, Homo sapiens
aaacggttaaaattcttaacaacctcaaaggccaggtttgaatttcaactgcatgaactcctcagagttctgagtcagaacatggtgtcctgcggggagctcctggccctggaatccccg

SEQ ID NO: 19593 - DNA, 120 bp, Homo sapiens
ccccgtccttcacagccaagctctgaacacacttctgcccactgcagccacttggcttaggaggctgcacacaggcaccaaggattgggaaagagggtagaccaggccctggcagtaggc

SEQ ID NO: 19594 - DNA, 120 bp, Homo sapiens
gaccgtagggccacaaagcttaaaatattactctctggtctagaaggtggggaggaaggtaagctctgggcaggcaaactcaaagcatccttggccagctggacacctcagcatataggc

SEQ ID NO: 19595 - DNA, 120 bp, Homo sapiens
catcggtccctggattgccctggctgtatttgactaggatccatgtctcataccatcatttctccagtagctcacacagtccctagcagataatgcacttaataagcgttaaatgaactg

SEQ ID NO: 19596 - DNA, 120 bp, Homo sapiens
ccccgcttataataatacaacacaattccagtctggtctagctgtgtctgctttcttagaggccttcttctggcccccagcctgcctcactttgcatatctcctgctgtcaacacttcct

SEQ ID NO: 19597 - DNA, 120 bp, Homo sapiens
ctccggactccacccctttaggctgtgcacctgtctcagggccaggggtttcctggagcaccgcagcccattccctgttttctaccactctgtcacagtgagctattctttgcggtggac

SEQ ID NO: 19598 - DNA, 120 bp, Homo sapiens
caccgggcagtggtcggctccctggcatttacttcccctgatgctggtgctcatccagttttagttttaggctggctccaggctatgggtcctgctcctcagtcctaggactaataattt

SEQ ID NO: 19599 - DNA, 120 bp, Homo sapiens
tgtcgcccgggctggagtgcactggcacaatctcagccttctcatctcttaaaaaaacacacacattaaaaaaaccccaaaaaggcccttattctttaatttgtaattttgtaggggaca

SEQ ID NO: 19600 - DNA, 120 bp, Homo sapiens
tgccgtcagtgccatgatagagggatgcatatagagcctggagaacacagtgagaacaaggtagtgtttgagtggaattttgaagggtattccatgcattttcctattgcatacatttcc

SEQ ID NO: 19601 - DNA, 120 bp, Homo sapiens
aaacgtgggaaatttatcctttgagtaccactgagcacttggtattatatttgcttctgaggcagcttttcatatttacagttaatccagtgacatttttggctgtgcttttagaagaga

SEQ ID NO: 19602 - DNA, 120 bp, Homo sapiens
acacgcaaatttacaattttctggcagacgacaaacagcaacaaacattcaagcctacattttcagaggtttactctgtattaaccaggtcaccatacagtgcagaataagatagaattg

SEQ ID NO: 19603 - DNA, 120 bp, Homo sapiens
ccacgggtgatgggctgatatgctggggtatgcagttgcgggaagagcctgccaggtgttccttcacttgtccttgttagcccacactacaagaagtcctcagaacctgtcctcactttc

SEQ ID NO: 19604 - DNA, 120 bp, Homo sapiens
gtacggagaggcaaccccacacactaacagaaagtaagcaccagggctgctggagaagagaggagagtacagttcacagtgtatatttaatgctgctgagcagctgggcatcagggattg

SEQ ID NO: 19605 - DNA, 120 bp, Homo sapiens
agccggtgaacaaatcccagaagctcatctcaggactgctggctacctttcaggctaatgacctatagctgagggcttgcatctatttgcagatgtacttagattttaaaaggaagtctg

SEQ ID NO: 19606 - DNA, 120 bp, Homo sapiens
acacgtattttattattccactgataaaacgtacctatagtcaaaatcatagatagaaagttaaatcatagtttccaggggctggggaaagggggaaatgaagagttattgcttaacagg

SEQ ID NO: 19607 - DNA, 120 bp, Homo sapiens
tgccgtaaggagtgtcatagtctcataaacagataatgagaaattgtgtaaatgtaatactgggtatttacccaaatctctcagacttgaaaaaaatcattaatctttgtactacaatct

SEQ ID NO: 19608 - DNA, 120 bp, Homo sapiens
attcgtgatacacatttccatttagctttccgaaatggccctaggtccttgcccaaaattgtttattttatattttttaaaataagttttttatataattttttaatttatgtatttgtt

SEQ ID NO: 19609 - DNA, 120 bp, Homo sapiens
ctacggtcatagcaccctgaacatgcctgatctcatctaagtggatagtgctctaaagtgttctataaggatagtttataaacggctttttttccttcttgaaaacacaatgacagttca

SEQ ID NO: 19610 - DNA, 120 bp, Homo sapiens
ttacgactcaactataagctctatatggagttgcagcttttgaaatagagcattaattggaagcaattattcaattatagcagctgtggctatgctgtatcctgaatatttaccaagaaa

SEQ ID NO: 19611 - DNA, 120 bp, Homo sapiens
acccggatggttcccgtcttagtccccttttctgccccagggctcaacttaatcttgcacagcctcctatatgagagctggcaagctctattctccatcactatccctccatggtgcata

SEQ ID NO: 19612 - DNA, 120 bp, Homo sapiens
atacgaacaacacaagcaaaactttattcttgctcatgctgtgtgaccacaattgattcatattatgcttaggtatgcagagaaaatggagcctcccctttatgacagatctagtcttcc

SEQ ID NO: 19613 - DNA, 120 bp, Homo sapiens
tttcggaaatgcttgtttgttctgagttgtcttctccctctcgcctcccaagatggcttctaggtgtgtgcctttaagggaagggcagggaaccttgatctgcatcatgcggggcctgat

SEQ ID NO: 19614 - DNA, 120 bp, Homo sapiens
agacgctccctgaatttttttcaaactggagctaagcaatctggttcttctctggaggcaaaactgtgagatggaaggctcagtgcagtgggcaactatgcttgctgccctgtagaagtt

SEQ ID NO: 19615 - DNA, 120 bp, Homo sapiens
tcacgctgacatggcagaagcagaactctgtgatatttgggtaagagtgttttagcgatgttcagcaaataatgtgtagggaatgaaaaatgcattatataataacaaggtaaacattca

SEQ ID NO: 19616 - DNA, 120 bp, Homo sapiens
tttcgttttacaaagaatcatgacagacttaatcctgcttaacaactgaattttgtttctcaaccattaaaaaatatttgtggacataggagatgcaaatcatttagatgtgcttatgtg

SEQ ID NO: 19617 - DNA, 120 bp, Homo sapiens
ccacgattttaagaggcattatttctagcacattacaaccaatcttcattctctatcttcccaaaagtagagggatacaatgggcagtccatttttcaggaaaatgcttagatttgtgat

SEQ ID NO: 19618 - DNA, 120 bp, Homo sapiens
cttcggacaaactacagttctgtgttaacaaatgttggtgctgctctgcatggatttcatgacgttatgaaaggtaggccttgaaaaagaacgtaagcttaaaacctttgccccactttc

SEQ ID NO: 19619 - DNA, 120 bp, Homo sapiens
cttcgatctgcctgaataagatttaaacaaacactgccaagggtaatagaccccagataaaggcttattagcatttggcttatgttgagtgcacagctcactgccttctgcttttcccat

SEQ ID NO: 19620 - DNA, 120 bp, Homo sapiens
atacgttacactgactttaggcaggtgtgtgaattgtacaaaaccagacatgctattcagaggccttttgcaaaatacgttgcgcttcttagagcccaagcacaaaggaattgaggaaac

SEQ ID NO: 19621 - DNA, 120 bp, Homo sapiens
ggccgaggggaaccttttatttcatatgcttcttagcgtgtgattctgagtcctgactaatctacaactttgcaattgcttctaggttttttttccctttcttttccttttagagactgt

SEQ ID NO: 19622 - DNA, 120 bp, Homo sapiens
agacgggcaggagcaatctattaaggactattggaaatagtccaggtgcctggatgattcattgtttttagttaacaattagtgaccaattactaattgcacagagaataatttttaaaa

SEQ ID NO: 19623 - DNA, 120 bp, Homo sapiens
caccggatcagttaactaagaacaaaatgtcattcacatacatcttgctgagatggtgaagaatattctccctttcttcggctttcctatatttctttaggagacctcttgtactgtggt

SEQ ID NO: 19624 - DNA, 120 bp, Homo sapiens
agacgttgcctgtgaagggctttctgggaggaacaggtacatatctagaccaaccctacttgtaatgcaggaacaaaacaaaactgaaattacatagatgctgccccttgaatactcttg

SEQ ID NO: 19625 - DNA, 120 bp, Homo sapiens
tctcggagacccaataggcttctaacagaccaaggctctggacagggtgtggccccctttcctatgagaggattaggagggaaggaaagggaaagaaggtgctgcatgaaattgatctta

SEQ ID NO: 19626 - DNA, 120 bp, Homo sapiens
aagcgtaatgccctttttccagcaggctgctccacacgatcctttgcttacagaggggcccattcagcagagaacaagtgccaggcaaataaatgactaatcactccccttccagatgaa

SEQ ID NO: 19627 - DNA, 120 bp, Homo sapiens
agacggagcctcaatctttattaacttcagagtggggaaattacaccctactggcatgcactctttttcttaaaatcatgagcaacataagttaatgtccctgtcattagaaaaccatga

SEQ ID NO: 19628 - DNA, 120 bp, Homo sapiens
tctcgtggggtggcccagtcttgtgagctcatagttacctatggattatcccaacattggttttcttcttcaccctcctccatgtcttctgccttttcgttcctacttcactccactccc

SEQ ID NO: 19629 - DNA, 120 bp, Homo sapiens
gaccgtgtctgcatgattatgagctatgtgtgtgacccaacaactggggacaccactgtgtccccctgaaaagaacaaagatgtgcaagttgtccccaaatcatacagtgctaacatctc

SEQ ID NO: 19630 - DNA, 120 bp, Homo sapiens
tctcgtgctgaggccgttgcaaggtggtcaactcctgcacatggtatccatcctgaattacaattacctacttccttgactgtttttctcacttgtgagcaaactgaggacaaagagtat

SEQ ID NO: 19631 - DNA, 120 bp, Homo sapiens
atacggctttctctcagatgcattcagaacccagagattagggggagtgaaggaaacccatgtttaactcttggcttgctttgagtggatgcaatggccctcttttctcatcctcttcct

SEQ ID NO: 19632 - DNA, 120 bp, Homo sapiens
atccgaaggcctgctgctgataatatctgtcacattgaattatgccttctgggcatgatgtggcatgcagacagagaggccagtcattaccctagggctaataaggcccttatcaaaagg

SEQ ID NO: 19633 - DNA, 120 bp, Homo sapiens
aggcggtactgaattttgcatgtggggctgacagtctgtaagaatactgctcttgttttcaggaaatgagaattctttcggcaaaaggagaagctgatttgcagaagtgctgagcatgcc

SEQ ID NO: 19634 - DNA, 120 bp, Homo sapiens
tcacgtaaagcaagagaaacactaaaatgggagagacaaatttgggaatcctacatttgtcgttgtcaaagtttaagaatcacttttgagaagttccttaagagatggattgggagggcg

SEQ ID NO: 19635 - DNA, 120 bp, Homo sapiens
gtccgaggagacttttatgcagggaggaggggccccaaaggccttctggaaaacacttcttcagattgatagagaaacccatggtgaagaaaaacgggctaaggacagcaccatgggaat

SEQ ID NO: 19636 - DNA, 120 bp, Homo sapiens
aatcggaggagccagggaagaagatggagtaggggccatcagagagatatgaggagagtggaacatgcagtgaaatcgaccatccacctaagaaaccatacaaaggacaggcgaaaacaa

SEQ ID NO: 19637 - DNA, 120 bp, Homo sapiens
tcacgtacttgacctaggcttcccttttccaccatggtagcagaaagggcatgggattgagagctttaagtacgcgctctttgcttactgtcttataccttgagcatgtcacttctctca

SEQ ID NO: 19638 - DNA, 120 bp, Homo sapiens
caccgtgcccagccaccggtgtggctctttaacaacctttgcttgtcccgataggtcacctttggctcttcagagatgcagggacacacgatgggcttctggttaaccaaactgaattat

SEQ ID NO: 19639 - DNA, 120 bp, Homo sapiens
tgacggacagcctatttttgccaatatcacactgccaggtactgacgttttactttttaaaaagataaggttgttgtggtaagtacaggatagaccacttgaaaaattaagcccagttct

SEQ ID NO: 19640 - DNA, 120 bp, Homo sapiens
gcacgttatccaatctttttgtatcctattctctaccataaataaaatggaagtgatgtatttgtacgttatgtgttaaaggtgttatggtgtctcaaaagcactttgggctcttaagag

SEQ ID NO: 19641 - DNA, 120 bp, Homo sapiens
aagcgaaattaaagtatcatatcataggttagttttgtagaattgtagaattacgaatgccttttgtttccctggccaaattgtgccctggagttccaggagaacaatgtgtagagcatg

SEQ ID NO: 19642 - DNA, 120 bp, Homo sapiens
ggacgtgcaggtggagagatctagagctacagcccaggctgggcttttgggggcattgtggggcagaccacaccagtcacggggaggccagtggggcagcgagaacatctcctcccttca

SEQ ID NO: 19643 - DNA, 120 bp, Homo sapiens
ggtcgggaatggggcgatctggctaccaatgggagtgatgttccagcacaggacggtggctgggcctgcttctgcacaggctggaccctgactcctctgtgtgcccccagcagcatagtg

SEQ ID NO: 19644 - DNA, 120 bp, Homo sapiens
gcccggtgctcctgagccgctgccgttcctctccttacattccccctgcgaaagttgtcagaatcaatatggagtgactttgtgttaaaaaaaaaaataacccttggctgggcatggtgg

SEQ ID NO: 19645 - DNA, 120 bp, Homo sapiens
tcccgatgtctccccaactcctcccaccctggggaagtcagtgatcacccctttgttcctgtttgtctggggattggggcgtctgcccctgggggaattggggctggtggtggcagtgat

SEQ ID NO: 19646 - DNA, 120 bp, Homo sapiens
gcacggtgccataccagtgtggtgctatgcaaatttaggtcctattattttagttcaaaagcttgggtttgaaaagtgaggtcccagggtaacaattggttttgtttagagaggcacagt

SEQ ID NO: 19647 - DNA, 120 bp, Homo sapiens
aagcgagtcagcagcccttcctgggacttcagtgccccagtttttgtcattctcaaacatgagtctatcccaaaccaccagagaatgagggacttgaatgcagggctatagcatcaggtt

SEQ ID NO: 19648 - DNA, 120 bp, Homo sapiens
tgacgaggccagatgtatactttggtaagaagtagcctggcaagggtgtggaggctgcctgagctggcggcagggcccagccagaagggataagatcagggcccagtggaggaggggaga

SEQ ID NO: 19649 - DNA, 120 bp, Homo sapiens
cctcgaagcacctttggggtttcccaagttgatgtaaaaaggaaatgattaccctcgagaaggcaggggagttcttcggccagtcctgcgtgcctttggcatgtgatcttagcaagtcat

SEQ ID NO: 19650 - DNA, 120 bp, Homo sapiens
gcccgtcctcagtggccatggctgctgttttaggattctcatccatcaagtgggaaggatgcgtttgtctccactgcgtgaaagggaggttgtaggacagccagaactttgatccctagg

SEQ ID NO: 19651 - DNA, 120 bp, Homo sapiens
acccgctcacgtgttcagggaaatgtgcagtctacagcgcccattcccatctctactctcctttcccacatgacaccccagcgggaggcaaacggacgccattatcacctccgttttata

SEQ ID NO: 19652 - DNA, 120 bp, Homo sapiens
gaccgagaggaggaaggtgacttgttggaggtcacacagctggttgggtggaagcaggtgtatgtgacttagcacgtcagagctccaccttcaccaggactgccatgttcagccactgct

SEQ ID NO: 19653 - DNA, 120 bp, Homo sapiens
caccgcgcctggctgaggaggaaaatatgtgagcagaggagccatggataggctatgagcacctcggcaaagcagtctcgaagctagaattcagatgaaagggttttgagcagctgaaat

SEQ ID NO: 19654 - DNA, 120 bp, Homo sapiens
cagcgcttgagccaaattctgtttgatactaataaaggagatggggcagctgggggtagacccgctgccagcatcagggcaggacatagaagaccccatgtcagatacagtgccgctgct

SEQ ID NO: 19655 - DNA, 120 bp, Homo sapiens
gctcggcaggaccagaggtggtgcattttgcttgagaaagcaggcatattagcctcagtagaatagcaacaaaaaggccaaggcagtcggatcacctcaggtcaggagttcgagaccagc

SEQ ID NO: 19656 - DNA, 120 bp, Homo sapiens
tcacgacatgttcctttgatgaactctgtgagttccaccccttttgggcagtcaatcccatatgctgcagagaggtctgtctgggcagctcagatgtggtttggggctgtttgggggcag

SEQ ID NO: 19657 - DNA, 120 bp, Homo sapiens
atacggaatatttttgtcaccccagaaaattccctccacttacaggtcctggcaattactcatctaatttctgtccacatagctctatcttctttagagggtcatatcaatgggcccatg

SEQ ID NO: 19658 - DNA, 120 bp, Homo sapiens
taacgttttctttgttgatctgtggtgtttacagattaactatgtaactcataagagttagatcctgaatagtttgtgtgtaagttgcacatgtcagcatctgggagggatgccagggag

SEQ ID NO: 19659 - DNA, 120 bp, Homo sapiens
ccccgcctccccccagaaaagaattcttaaagttctacagccttagagtgttaagtaattttactgtctgggaactcagatgcactgcttctttctgacctatgtaggtactttcttttc

SEQ ID NO: 19660 - DNA, 120 bp, Homo sapiens
gggcgttggactgtgaattcctgatgcctctgggtaaactctggaggaaattctgtttcattacttgcactcagccctcctattttgtactaaggtattcttgaatacaagtgcaccggc

SEQ ID NO: 19661 - DNA, 120 bp, Homo sapiens
ttacgcataaaaagaaaggctctcttccttccaagaatgctgaacacctttgaagtctctgttgctgcctcatcttttagatacaatcattgattatgtatttttggcatcgtcctgaac

SEQ ID NO: 19662 - DNA, 120 bp, Homo sapiens
gaccgatactcatcgtttgctttcagcaccttaattttgctttgttcatttttgtaaagtaagggcaaatggccaccggaatgtacagtgattaaagaagcaaactctgtcaaagatggt

SEQ ID NO: 19663 - DNA, 120 bp, Homo sapiens
aaacgtctgttgtgcaccgatcccaccctcccctcgtgttaccatctccatttccttcccctttccttgtgtcctcttctttgctgtgtcctggcccctcaaaacttgaccttgcctctc

SEQ ID NO: 19664 - DNA, 120 bp, Homo sapiens
ttccgcagggtgggtatgggagaaaaaaagttggcctagctgccctcttcttcctccatcctctcaggccctattcagttcttaggctctgtgggctaaaggggaatacccctgggttca

SEQ ID NO: 19665 - DNA, 120 bp, Homo sapiens
gctcgaccttttccctagtagtgtgcccagagcttcccagactttccacccaaggaacacaatgccttaagtgtcgctgctctcaccacttgtgaaccgaattccttgatgctgactgag

SEQ ID NO: 19666 - DNA, 120 bp, Homo sapiens
gtccgcagggtgatggtctctgaggcaccatgcctcctgcaccactgaacaccctggtcccttctgcttgctggccctgcctattccaatggatgtccctttccccagctgtcccaccct

SEQ ID NO: 19667 - DNA, 120 bp, Homo sapiens
ctacgcaaggaacacatcctgatttttctttgggaactccctccactgtatcaggccttggtttcttggagggcaggcagtagaggagtgtttctgaagcacttctcatgcttctcagtg

SEQ ID NO: 19668 - DNA, 120 bp, Homo sapiens
gtgcggtgggggtgaaggagttgtggggtagtggggcggcccacttcctcatcccatcaaattggggcccttctgtcacttcctggccacctgtttaaacctccctgtgggaggaaagca

SEQ ID NO: 19669 - DNA, 120 bp, Homo sapiens
gcacgaggctgtgttgtccaaatgtgtgtactgaaaccacagaggctgtgatcctgtctgggaaccagtgccctcaggcaggggtttggtcaggctctttttaagactataggctcagga

SEQ ID NO: 19670 - DNA, 120 bp, Homo sapiens
atgcgagattctccaggaggcatgaagagggagaggcaagatggtgagcagggtggggaggccctggccaaccctgccgggtcccctgagagaatgaggggtcagggcaaggactgtcaa

SEQ ID NO: 19671 - DNA, 120 bp, Homo sapiens
ccacgggctacaggggactgatctggcctcgaaggaggtcagtgtagacacattcctgtctaagcatttctgcagaaatgaagaaaagggcatttctgcaaagaagtgttgttcccggac

SEQ ID NO: 19672 - DNA, 120 bp, Homo sapiens
ctccgattctcagggctggggtagccggagctgccacctatattcccccagcgcaggaagcaacagaggggagcagtgttccagcgccacacagctcttggggcagtgctgcactctggg

SEQ ID NO: 19673 - DNA, 120 bp, Homo sapiens
agtcgtggtatctggccagactcctctgtgaccttcccagtgagcaagatccccgactccctccagttatccccacctagcacctcctaaggcactccacactccagtccagagccaggg

SEQ ID NO: 19674 - DNA, 120 bp, Homo sapiens
cctcgtggtggccaagggccctgccttctcttgaggattccctctcctgcctcctgcagtgagggccaggctgtgagcctgacagctcccatttgctgggtgaccttgaacaagtcacgc

SEQ ID NO: 19675 - DNA, 120 bp, Homo sapiens
gtgcgtttgtgtggcaggtgtgttgtgcgctgtatgtgtatggtacgtactgtgtatagtgtatgtgttgtatgtgctgtgtgtgtgttgtatgtgcatgatgggtggtgtatgtgtggt

SEQ ID NO: 19676 - DNA, 120 bp, Homo sapiens
gagcgaaggtagcgggtgccagagatacgaactgcagaaggcgcagaggcctaaaagcatctgtatatgattctcccaaaccagctctgtgcaactttcaaggacatccccgggctcagt

SEQ ID NO: 19677 - DNA, 120 bp, Homo sapiens
actcgtggctctataacagtcaccctctgctggccctgggtcccaaagtagcctcttgttgtggcctgtttgggctttggtttgtggggatggagtttcctcaagaaccttaaaacagga

SEQ ID NO: 19678 - DNA, 120 bp, Homo sapiens
agacgataagggccgtatttgttacacagaactgccactttctggcgtctgtctagagatctcttttctgtatgaaattacatcggagagcccagcccaaattccagcttggaaactgat

SEQ ID NO: 19679 - DNA, 120 bp, Homo sapiens
cctcgtttataaacatggccacgcctccacccttgcagggacattctggcatggggcactgggaaacagaagccctacgcccggcccttcgaggtggagaaaacatggggcaaagggaag

SEQ ID NO: 19680 - DNA, 120 bp, Homo sapiens
acccgggtgtgagaacctgggggtgacccagtagggtcagactcgcagtgactgggcactgcagacagtcatggcctgggtgcaggtggaggtgcagctctgccatcagggtagcgctta

SEQ ID NO: 19681 - DNA, 120 bp, Homo sapiens
ccccggaaaacattcatgaccccagctcttcatttaactgctttaaaatttcttatatttttagcctctttcccaaggggaggaggcttctatgaaatcagacttcctttttgtttttgg

SEQ ID NO: 19682 - DNA, 120 bp, Homo sapiens
tcccggctgctcagacctgcgtgggcaagaggattgttgcagaaatgacactacatagtagtgtcgtctatctgcatgtggccaaggacagcagggcctataaaagtgagaccagtgaga

SEQ ID NO: 19683 - DNA, 120 bp, Homo sapiens
atccggttgggtggtgggatggtcgacaaattttgttcttcattttatttgagatggtttgtgcagtgcaaaactcaaacaccatgacgaggctgtgtctgtttgggtcaagcacaaagt

SEQ ID NO: 19684 - DNA, 120 bp, Homo sapiens
gggcgctgaatgcggtgcccattcagtaggtcaccctccaacatccccacctgcagcctgtctacatcctgctcatagacagtcggtgacggggaactcactctcttacaggcagcctct

SEQ ID NO: 19685 - DNA, 120 bp, Homo sapiens
ccacgcaattgcatttctgatgccagggcttcaggcttgccaaggagcttcactttcttccatctggttcatcctgtgtcctgtgatcatctttctggatcctgacacttgctttctttt

SEQ ID NO: 19686 - DNA, 120 bp, Homo sapiens
cagcgacccaagaaccagcacgaacccactgagatctccaggttcccgcatgcccctctccttcctgcccacaaggacatcctggagaccttggctgatgtctcctgacatctagacgcc

SEQ ID NO: 19687 - DNA, 120 bp, Homo sapiens
aggcgtcttccatcaacccaggcttccagccagatggagaccaaggccgctggttcagcttgggctcagagggcctgtagtggctttttgcagtcacccctttctcatctcagtgctcac

SEQ ID NO: 19688 - DNA, 120 bp, Homo sapiens
tcacgggactcactgggatccctgctgagacatggaatgccttctgtctgtccccagtccccttgtccttccccactaaggggtgagctcccttctgagtctccaagggcctgcaggcct

SEQ ID NO: 19689 - DNA, 120 bp, Homo sapiens
caccggcctctccaagttttgaggcttcttgacagagagttggcacacacagccagagagctccccaagctccccaaagcacctcctcactctccccttatgcttcttgtcctgaaatct

SEQ ID NO: 19690 - DNA, 120 bp, Homo sapiens
catcgtcttatttttggcacctctgttccctctgggccctcctgcccctgctccgagacccggccaccctatgactcactccaggctggctggttggcttcccatccatctctgcccgtc

SEQ ID NO: 19691 - DNA, 120 bp, Homo sapiens
cgtcgtatcttttccagggtctctctgcacctgtgccctcctccttggctggtttgtgatgctgtcaggccagtgattctgaacattctctctccagcttcctgccagcatcctcccctt

SEQ ID NO: 19692 - DNA, 120 bp, Homo sapiens
cctcgcattaactgcagcggttgaaaaactgattattctaaaccccagcgctcacttgctcaacactttcccctcgcctaggtaattagatctcccaggacttcaagaggatgctggcgg

SEQ ID NO: 19693 - DNA, 120 bp, Homo sapiens
tcacgccagaagcgaatctcactcacgtgtccttgaggctggcaaggaggtggcaggggcatgtcttcactagcttagatcatagcccctctgggcttagggctgtctccctgggacctg

SEQ ID NO: 19694 - DNA, 120 bp, Homo sapiens
ggacgcggctttctacattagggacagagggaacgacagggaagcctggccagggcgtgtataaggaggcggtggagaggttgctgttggctttggccagggttagattctctgatgtct

SEQ ID NO: 19695 - DNA, 120 bp, Homo sapiens
ttacgaccgacgtgccttagtggagcgacatcggcacacaggcagaaacaggctgaggaaagaaccatcaccccagtctcacccttcagccacaacatggggtacattctagatgtttcc

SEQ ID NO: 19696 - DNA, 120 bp, Homo sapiens
cttcgtggaggtgttgccattgtcaggacatacgatgctaaacccactttttcaacatcacattatttcttgagcctcatccacgtggctttgcattctctgtaacaatctttttccata

SEQ ID NO: 19697 - DNA, 120 bp, Homo sapiens
gcacgtggagaagctaaaaggtacttagttactttcctaatgtggggcacttaggaattacttgtcttcttttcccctttagtgtcacatagagacgtggttgaaaaatctgggactgtg

SEQ ID NO: 19698 - DNA, 120 bp, Homo sapiens
ctgcgcaagatgcctccctctctgggcctcagcttcttaacctatataatgatgatgatgataatgataatagtaatagtaataataataatgatgatggtctccacttccaggggtttc

SEQ ID NO: 19699 - DNA, 120 bp, Homo sapiens
taacgcccacttcttaacgcccactgagcatcgggcttgggggacagacacatcagtacagcagtgagcgtgtccctcattacagtccgcttgctgtcctgttcatgtccccactttaca

SEQ ID NO: 19700 - DNA, 120 bp, Homo sapiens
aagcgaaagcttcagttctgaggactgaagtggttttcccatgtcagagtgttctgggctgaatcatgctcccccaaatccatatgttgaagtcctaaccctcagtaccttaaaattgtg

SEQ ID NO: 19701 - DNA, 120 bp, Homo sapiens
tgccgtgaagcctcagcagggagcctggctgctgttagtgttcaatgcatgttaattattctctagtatcacagctataactagcatcgtggctagtaactagtagcacagctagactgg

SEQ ID NO: 19702 - DNA, 120 bp, Homo sapiens
aggcgggagcagtttacaatccacctttgcacctccctttcctgggaatctatagggagctttggagagtaaggggatctggaaggggttcctccttcctccccctggctacactgaggc

SEQ ID NO: 19703 - DNA, 120 bp, Homo sapiens
ggccggccctgtccccatctgcccacctgtcctgtgtgtagccacatcacacagacactgcccctgagaaagcatatgggagagatctgggtctcttcccagaagagtacatgtggccca

SEQ ID NO: 19704 - DNA, 120 bp, Homo sapiens
gttcgctcacagtaaatgagagccagggtagttttgggactcaggcctctgcatggtgggtctgcctaatgctctgcctaaagtgaggccccgtggaaatgctgcccttacaacccatct

SEQ ID NO: 19705 - DNA, 120 bp, Homo sapiens
ttacgggaagcacctagtgagccaagcagcatcgctcacgggacatgaagactccctagtcttgctggaatcaccgggaagcccttcagtcagctgccgggcaggatctttatctatctg

SEQ ID NO: 19706 - DNA, 120 bp, Homo sapiens
tcccgtgctctccctgccaccccgtggcctgcagaattatttgcccagcagactctaccaccccagcctatgaccatcgatagcatgcattgattaacatgtaggtttattttattgatg

SEQ ID NO: 19707 - DNA, 120 bp, Homo sapiens
caacgtctcccttgaagccacacagagagttcccagcagagaataataacagtaatgctgaaataacacctaccatgtgccaggcactaagtgctttgcacatattactttaatgcttac

SEQ ID NO: 19708 - DNA, 120 bp, Homo sapiens
cagcgaccctatgaaagaggcactgttatgacctcatgttacagatgaagaaactgaggcacagttagataactggtccaacgtcccacagctggataagaagtggtgccaggatttgca

SEQ ID NO: 19709 - DNA, 120 bp, Homo sapiens
ggacggtcccagctcatgcctagcaccctggtgtaattactaacggtgccgtggtttggctggtagaatctttagccatgttatatttcaggtggttctgaatcctaccttctctcctca

SEQ ID NO: 19710 - DNA, 120 bp, Homo sapiens
acccgtgccctctggttgagcatgtgaccaggtctgatctatcagcccactccatctttaagctgcagggattggctcaggaatggccatgtgactataagtggcccagtgagagcgtag

SEQ ID NO: 19711 - DNA, 120 bp, Homo sapiens
gggcggggcttatgaggaaaggcctggctgccgcattgaccgggatgggaggatgttaacccgaagctgccggagcccccatgtgctaaaacccgcctgaaaatgaagccaacacagagg

SEQ ID NO: 19712 - DNA, 120 bp, Homo sapiens
cagcggaagtgaaagtaggagagggaaggacagagtcctcttgacagcatttgaggtcctggagccagccgtgccggaggccagacctatccctggagttttcagttgcacaaaccagaa

SEQ ID NO: 19713 - DNA, 120 bp, Homo sapiens
cagcgcaacgctgggctcagggaactggagccatctgctccatgggtgacacagggtgtcctgtgtctgtccccaagcctgcagccttctgtctcatgaaaggaggggcactgggacatc

SEQ ID NO: 19714 - DNA, 120 bp, Homo sapiens
ttccgtgaatatttcttgagctcccaggcaatgcatcaggtgttggagacatggtggagaataacacagagctcctgcctctaggcctcccggaccacctggcactagtcgcccatcttt

SEQ ID NO: 19715 - DNA, 120 bp, Homo sapiens
caccgccagtgtcttgtctgactgcctaattctttcaaggggatggggcccatgcatgtttttaaaagaaacactagagtataataacaatgataataaacaccactctgtaggtgtcta

SEQ ID NO: 19716 - DNA, 120 bp, Homo sapiens
tctcgcagtgtcccttgaagagaaagacactcaggaatggaactcaggtttctgggattttaatgtccttggctgaaacagtgtggaaggaaagggaacagtagaggtaagaagataaag

SEQ ID NO: 19717 - DNA, 120 bp, Homo sapiens
aggcgttaattagaatggaacagaaccaacagtggaagaggaaaggagtggagcttagatgggggtagaggctgcccttggcctcacagcctcacaggggggcaggtttacccaacaggt

SEQ ID NO: 19718 - DNA, 120 bp, Homo sapiens
agccgtgccctgggtgagcgctgattccctgtggcctcaaaccccatttgtcactttcagagatctttttgcctaaaattagctgaacttgaatgggaaggctaatttatgcgtggcctg

SEQ ID NO: 19719 - DNA, 120 bp, Homo sapiens
actcgtcagcagattaggggtagggggtgtcgggaatggtcaaactgagtccctgtgtctggagctggcacagcccagaccacggagcttttaaactggggctggggctgtgccaaggat

SEQ ID NO: 19720 - DNA, 120 bp, Homo sapiens
ggccgtgcttggctcaggtctgagcatggggctgagttcaaagcctgctctgacctgaactgtggcagtgacctcgagccctcatatccccctccataaaatggggtaacagcacccgtt

SEQ ID NO: 19721 - DNA, 120 bp, Homo sapiens
ttccggagaacgtgcccactttttcccgagtgatgatactcatcatgaaaacaatgacaagagctgacatttattgagcacttcgatgctgggcacttgacctgattttattcaatattc

SEQ ID NO: 19722 - DNA, 120 bp, Homo sapiens
acccgtgtgtcagggactgttctaagctacttcattttgtcctcccccagccctgtgaggtagtcactattactatccatgatttacagatgaagaaacgggggcacaaagagtttgagt

SEQ ID NO: 19723 - DNA, 120 bp, Homo sapiens
agacgaaaaggcccaaaggcacacggctggcaggtggcagagcaatagagatgtcattattgtttccattttacagatgagaaaacagagttctttacttttcacctgaagcctcacttc

SEQ ID NO: 19724 - DNA, 120 bp, Homo sapiens
taccgggtcctcatctgtgccaggcatgaggttgggcatgggatgtacagagagagcagatagggttcctgtctcagctaggcaatactccctctagcagtacagagcgggctcccagga

SEQ ID NO: 19725 - DNA, 120 bp, Homo sapiens
agccggaaatggccctgcaaggttgctggaacttggccgtgagctgctcaacttcccagctctggggagcctttctggtgggagtggtaggtggttttcttaactagggtccacaaccct

SEQ ID NO: 19726 - DNA, 120 bp, Homo sapiens
ttgcgtgtggttggctgattttctgagagaggggccacagtgcccatcagcttctccccagggactggggctgagagacatttaagaattcctgatttgaggcaatctcccagtccccaa

SEQ ID NO: 19727 - DNA, 120 bp, Homo sapiens
cagcgtcctcatgtgccaacctgatggtggaggggagcacggaccattctgccagggataagtgagcacaagaagctgggacccagaagtctccaagcaaagccgatgcccattttacgg

SEQ ID NO: 19728 - DNA, 120 bp, Homo sapiens
gaccgagaaagcagttggactatggaatgacatgggaagcgaggaatattagggtgacacctgcctttcaaagcagaaactggccaaccagatggtaggaataacttatgccaaatgcat

SEQ ID NO: 19729 - DNA, 120 bp, Homo sapiens
ggccggacacgtgccacactttataggcatcaaaccagcaaatccacatatgaaccccaggaaggagcttctattggtatcccctttcacagatgagcaaatggaggctttgcaaggtta

SEQ ID NO: 19730 - DNA, 120 bp, Homo sapiens
ttgcgcggggtcacgtaattgttggattggagcccaggcaggctgctttcagagcccctgctctggatcacagtgttacacagtggcccctcaggcagtggaacacactgcagcatgtgg

SEQ ID NO: 19731 - DNA, 120 bp, Homo sapiens
ggccggtgtcttctgccacacccagtgctgggtcccactgaggatccttatggtccagcctttgtacttttctcctttgcctattctccattcgtccctgaaacctggaggtcagggcca

SEQ ID NO: 19732 - DNA, 120 bp, Homo sapiens
tgccgctgcctacctcaaactcatcctctgcgtccgctctcctggccccagagctgccccactggcagccccaagccccagaccccagaccccagaccctggaaccccatgccctgtgcg

SEQ ID NO: 19733 - DNA, 120 bp, Homo sapiens
ctgcggagacgaacagaatccacccggcaccttgaacagatggtgccacttctaaaaataatgccgcaccacactccccagcgcagccgagtcctcgcgacagaagggggtgcgggtggg

SEQ ID NO: 19734 - DNA, 120 bp, Homo sapiens
ctgcgcggggacagatgcgaatgcagcctcccaggggacacaggcccaggggaccctagccttgatgaagctgcacagagccaagggtttgatgctgaggctccaagccccccaaataaa

SEQ ID NO: 19735 - DNA, 120 bp, Homo sapiens
acacggcagggtatagcttggctccctccattcccacagtctatggcccccacagcagccctagctccacaccatagcatgaccaagattgctatctggaatgccctctcctctcttctc

SEQ ID NO: 19736 - DNA, 120 bp, Homo sapiens
agtcgttctctggccttagttgtcacttctctgaaatggagacaatcacagcccctccctcccagggttgttgggaggaaaatgtgagttaatgcagggcacagggctcagcccagagcc

SEQ ID NO: 19737 - DNA, 120 bp, Homo sapiens
cagcgagagaaactagaaactgggatgacagtgatttctagatggggaaatggaggccctcaggtggaaggctctggtgcaaggccatggagcaggtgctggcagagctgggctcaggcc

SEQ ID NO: 19738 - DNA, 120 bp, Homo sapiens
gaacgtttaagagttcaagtgccaaagtgctttcaaggctccaggagaccccaaacctcagactctggaggtattcatgtccagcagcctctccttgtccccagcaatcagcaatggccc

SEQ ID NO: 19739 - DNA, 120 bp, Homo sapiens
aaccggaggaaacgaggtaacatttttggcggggagatggccaatgttgtaatggcattggaggagcagcggcagtcacagagatgagcgtgagagcagcaaagttttataaccaccccc

SEQ ID NO: 19740 - DNA, 120 bp, Homo sapiens
tcccgctctcccctgatcccaggaaggtacccttatttaagccgaggtgcagggaggtgggatgactggccaaggtcacagagccagggaatggcccgaccaggatttgcattaggccct

SEQ ID NO: 19741 - DNA, 120 bp, Homo sapiens
cctcgacactcaataggctcctggatctggaaggagcactaatggggctgccccttggtggagatgccagggaagtgggaggcggggttctgggggagatggaaagacagggccaccctg

SEQ ID NO: 19742 - DNA, 120 bp, Homo sapiens
gtgcgaggccagggcccttagtggggcacagtacaggggccatggctggcccagcgggctgggtgtgaggggtgggaagcagatggcagccccttcctgtttggaagaagtcaaggatga

SEQ ID NO: 19743 - DNA, 120 bp, Homo sapiens
ggccgcatcacctgctgttaggaacggccctgggccagagggctggcggctacccaatgttgatttgctgacgcatggcaggccccagggaggagcggccaccagcccagccctctccta

SEQ ID NO: 19744 - DNA, 120 bp, Homo sapiens
agacggtgctgggaccagggtgaggccagtgaggcgctgaaggagtgaaatgaaaggcaggtctcgtcttgggttcctatcagtgccaagtcctgcttcctctgccatctgtctgccttg

SEQ ID NO: 19745 - DNA, 120 bp, Homo sapiens
tgacgtactcatgggcccacttgctccaccccaccccaatcaaagggcagagactgaaaactgacaaagagatttcaaacacacttcggtagttttgtggatgatgaagccgttaagaga

SEQ ID NO: 19746 - DNA, 120 bp, Homo sapiens
taacgtctccacacgagctgagtaatgaatttcagggcaaattgttcatttcttatttccactcatctcgcaaacttttgctgtggatcgacttcgatgtgtaatgcagtgtggatggag

SEQ ID NO: 19747 - DNA, 120 bp, Homo sapiens
acacgtcatctcatccgatccacatcacatccctatgaggcaggtattcttattatctctattttatagaaaagaaaactaaggcaagtaacttgcccaaggtcactcagaacacagcgg

SEQ ID NO: 19748 - DNA, 120 bp, Homo sapiens
aagcgtggctcagggcccgtgcaaagagccctggaagctccagaagccagcgtcaggccccctgagggggtcagggaattctccatgcttttgggcacacttaggctgcagacttccagg

SEQ ID NO: 19749 - DNA, 120 bp, Homo sapiens
ccacgtgctccatctacaaaaatatcccaggccagcagcccctttcaccctgagaaagtgggttccaagagagggtggacttgagcaggtatgagaggaggggcagtccttcctgggcta

SEQ ID NO: 19750 - DNA, 120 bp, Homo sapiens
gctcgcgccttggttgcctggcaaccatgcaggatgtcactcacaccaagctcagatttcaggagcccagacccaggtgagggtgtcagtatataataatagaacagcgcagcccccgtg

SEQ ID NO: 19751 - DNA, 120 bp, Homo sapiens
cagcgctgggcagggcctgagtggtcctgtggtcattttgcagatgggaaaacagacctgggagggaaaaggaatcacttgaagtgacccagggagttatcaaggaaggcagggctgtct

SEQ ID NO: 19752 - DNA, 120 bp, Homo sapiens
gaccggagccacgcagccaccctggcagacctgactaggtgccttgcttggctcccactgccctcagaacaaggttcaaaatccttagcctgacacacacgcctgcctgcttcttcaggc

SEQ ID NO: 19753 - DNA, 120 bp, Homo sapiens
acccgttccttgtaaccttccctcctgccataataagcaccttgtaaggttccacacttccaggcttttgcccaggcagttcccctgccataaatgccctcccatgggcaaaggcaaatg

SEQ ID NO: 19754 - DNA, 120 bp, Homo sapiens
gagcgggctgacctgtctctgtgtccctggcccagcatgtccatggctcatggtgaaccctcatgcattcagtgtccccatgtcaccaccccacgtctgaaacgtatcatcacagcttgg

SEQ ID NO: 19755 - DNA, 120 bp, Homo sapiens
gtccgaattaaccacttccagtttcagcctgggcttctgcactgaacagactcagaggaaggacggttaagagagggaggaggtgagcgggcgtcagcacgaggggtggccacactgaac

SEQ ID NO: 19756 - DNA, 120 bp, Homo sapiens
ctgcgctcatgacaagagactttattgtgtaggaaatcaagtagcacatgggggaggtgggggacttgtcctgcaggggtcatgtcagagctcccccaccctctgggctactattgctct

SEQ ID NO: 19757 - DNA, 120 bp, Homo sapiens
gcacggattggggttaggcagatctgtgctctgattccagctctactacttgccacatggccttagacaggtcactgccttgctctgggactcagtttcttcatctttgtgatgagggat

SEQ ID NO: 19758 - DNA, 120 bp, Homo sapiens
tgtcggggccgacaaaactgctgccatttctggagtcagaccctgcacacacattgcttcttatttcaggccaactggtaggataggtgtgacagtccccattttacagatgacgaggct

SEQ ID NO: 19759 - DNA, 120 bp, Homo sapiens
tggcgtaggtcccagggcagggaggactcctaagggaacctgtcttatttcgccttccctccaatccttccttcctgtcaacctacctgtgtccctacctatctaacaactaatccacat

SEQ ID NO: 19760 - DNA, 120 bp, Homo sapiens
tgccgacaccaccccgagcactgagagcagaaggcaatcctggctcctggccctgagtggctggaatcccttcctgaggggcagcctggatttccaaaccagaatatcctgagtctgatg

SEQ ID NO: 19761 - DNA, 120 bp, Homo sapiens
gagcgatctacctggaagcctcttactggggaattctctgcgggcttaattctaggatctcagctgctctgtcccctgcctggccaccaaggagatgtttttcaaaacaaagtgaggtgg

SEQ ID NO: 19762 - DNA, 120 bp, Homo sapiens
ccacgggaggttttaataattctatggtaggaaatttccatggtgatggaaaagacccactggctggcctccaaacgccttccggaaaaaacttccaaaaagaaactgtgggactggccc

SEQ ID NO: 19763 - DNA, 120 bp, Homo sapiens
ccacggaaggacttgggggccggtgcattggcgtcagcccccggcacagggccgggcacccagaggcccagggatcaaggcggtccagggataaaggggtctcccctcgagggattcatg

SEQ ID NO: 19764 - DNA, 120 bp, Homo sapiens
caacgactaggcctctctgagtccatctctgctgtgacaggcagcattggcggggtgctgtctaaggtctgaagcatcgtgatggtgctggccctggctttgggtttcccaaggtccctg

SEQ ID NO: 19765 - DNA, 120 bp, Homo sapiens
tcccgtgggcacaggctcctcgggtgagattctagaagggacaggctgaggggtctgcatgcaggtgaggatcctggggatgccctcagtgtctccccgtacccccacagccacctcact

SEQ ID NO: 19766 - DNA, 120 bp, Homo sapiens
ggccgcgggggtctctgtggcattttgagctctccatgacccacctgctgctgccaccacccctctgcctgtatgagttcctcacggcctgtccccaggcttcccatgctgcgttttcac

SEQ ID NO: 19767 - DNA, 120 bp, Homo sapiens
gcacgtcccagccctgtccctgccctgcctcacatcctgcagggcccccatggccctgggggttgagccgtaactctgaggctgtagctgaattgcgcagtgcaccagtacattgcctcc

SEQ ID NO: 19768 - DNA, 120 bp, Homo sapiens
tcacgtctgcgcagattccttcacagtgctgagcctcagtttcctcagctgtgaaatgggctgaagctgtttcctttgcactggaaaagtgagaataagaaggccctgggcacagtgcct

SEQ ID NO: 19769 - DNA, 120 bp, Homo sapiens
tgacgcagaccccctctgtgaaaggggctggttgagggctcagtctgggtcttgtgtgccttcaggaaggggtgtgagaggagggagacagaggcaaggggcaggggacaagaggtgagg

SEQ ID NO: 19770 - DNA, 120 bp, Homo sapiens
tgtcgggaaggtttattatccctattttacagctgtggaaactgaggctcagagaggtgaggttgccgagctggtgggtgacagggctgggagctttgcccctgagctctgtgctgggcg

SEQ ID NO: 19771 - DNA, 120 bp, Homo sapiens
ttgcgggagctcagggcaagccagggcacacccaggcacagcctcctctcgccttggcagtcccgcagcaggctcctctcctgcgcccgctccctccgcttctccctgcctccgtatgga

SEQ ID NO: 19772 - DNA, 120 bp, Homo sapiens
tgacgcgggagtggagtggggagagagcctgtccatctgcctactcacctctgcagagaatcgcaaagcctggggtctgaggtctggatgttttgtgcggtgggggcttcctggctctgg

SEQ ID NO: 19773 - DNA, 120 bp, Homo sapiens
tcccggctcaggttggggcttcctggctctggctcagggctgtccctgagtaaagactgtgctcttgggagtcaggaagggttgctctgggagggtgctgtgtgccagaaccctgtgaga

SEQ ID NO: 19774 - DNA, 120 bp, Homo sapiens
gagcggatgtgggggccagggcatcatgaaactcagccagcgccattgcgacatggggccgaggggtggtaagtgaggacaggaggccacaagtgggcatggaggcacccaagtcaggtg

SEQ ID NO: 19775 - DNA, 120 bp, Homo sapiens
tgccgggactcaggcatctcccctcagccagtggccaggtcagcatgcttccatcgcactcatacaacatcattctgctgcccaggaggctttgtgggtgcccgctcatcgagcataaga

SEQ ID NO: 19776 - DNA, 120 bp, Homo sapiens
gagcgactcagtttctctgtctgtagaatggggatttcaccatcaagtgcctagaactgttgcagggatttaatgagatgacaatctgtttttcaaacagcagccaggtgtgtgtgcgtg

SEQ ID NO: 19777 - DNA, 120 bp, Homo sapiens
gtgcgtgtgtgtgtgtgtgtgtgtgtgtgtgtgtgtgtgtctcagccctgcataagatgctcctatgtcaggatcagccccaaattccacagggtgatctacaaagcaccaaaagatcag

SEQ ID NO: 19778 - DNA, 120 bp, Homo sapiens
cctcgccccaaacagccatgaggctccctcaggtctctgctgaaaggccaccttcttaggaaagtcttccctgacctgattcaaaacaaccctcttcatctcccttcatctgctttattt

SEQ ID NO: 19779 - DNA, 120 bp, Homo sapiens
tgacgatccactcatttatgtctttgtttatggtctctctccacctgctcgaatgcaagctccacagggcagtgaacagatctgttgtgttcagtgtggtatccccactgcctggcacac

SEQ ID NO: 19780 - DNA, 120 bp, Homo sapiens
cagcgtttgctaaatgagtgaaagctccccgcccctttaggtaaggctggttgctttcattctatggaggacttgcatatgccttttgccagtggttcccaaatgtgtctgttcataacc

SEQ ID NO: 19781 - DNA, 120 bp, Homo sapiens
caccgtgagcctccagcctctagcctccagcctcatccctccaacccattatcctcactaggatcactgtccttgcaggatgctcttaaagggccaatctggccacatcactcctcaact

SEQ ID NO: 19782 - DNA, 120 bp, Homo sapiens
agccgggccacctctcctgccaagcgctggccaccccggcctggtgccttctgccctgcactactggtggtggcctcagtgcctgctcaagtggtgcctttgcctagagcacccctccct

SEQ ID NO: 19783 - DNA, 120 bp, Homo sapiens
cctcgtggggccctcttgaggttgccccctgacagccccgacaacaggccagggcttcccctgggctcctgcatccccctggcttcctccagcctggctgttattacactgacttacaat

SEQ ID NO: 19784 - DNA, 120 bp, Homo sapiens
tcacggtcaaaccagctggctcagtgcccatggacaggtcactgtgtatcaatgaccctcaatttcctcatctgtaaaatgggaataataactgctagagggatattgtaatcaaataag

SEQ ID NO: 19785 - DNA, 120 bp, Homo sapiens
cagcgtcctcatctgggacgtggggataacagggctatgggcgtcctcactgagatgatacgtgcaaagcagttagctgggtgaatgctagctggattactattatttacttgggtcccc

SEQ ID NO: 19786 - DNA, 120 bp, Homo sapiens
ctgcgcctgagctgggggaacgcagaggagggcagcgggacagcacaggagggtgccagcatttcaggctctgcatacaacgtaagccacagcagcttctctgaccttcagtctggaggg

SEQ ID NO: 19787 - DNA, 120 bp, Homo sapiens
cagcgggctggtttcctgatgccagggagagggctggtggggccagtctgggctcctggcggtctgggccacgggcagcagctgcgtccctggccgcctctgtctcctttccaactttgg

SEQ ID NO: 19788 - DNA, 120 bp, Homo sapiens
atacgggctggccctcccccaacgcctgtgtgaggctgtggcgggcacttaggatccagtatccctctgtcctcatcggaagtcccttaaggggcaagctctccctagcacccacagagc

SEQ ID NO: 19789 - DNA, 120 bp, Homo sapiens
gggcgggtgtgtgcacgcagcatccgcagaggtgctgcatctgtgtgcctgtggccgtcttcttatgtgtgcaactgacattcacctgtgggcacattccagcatgccatgtgcctgcca

SEQ ID NO: 19790 - DNA, 120 bp, Homo sapiens
gcacgggcaggcacgcagatggcattcagagccccacatgtgtgtgcctgttgttttcacacctgagccagccctcaggtgggtacacacatttctggctgttgcagggcactgtgtgca

SEQ ID NO: 19791 - DNA, 120 bp, Homo sapiens
tcccgtgttagtgctacatgcatgtgtgggcaagctgcatgcacaggtgtgtatgtgtgtactgcattcgtgtgtgtgctgtgttttgcacgtgagcatgtggtgttcaggaacgtgggt

SEQ ID NO: 19792 - DNA, 120 bp, Homo sapiens
tgacgcactacttatgggtactatatttgtatctgtgcatatgtgtgaatttgtgggcatgcatatgccctgatgtgaatgggactagggtgtgaaggtggctaaataatggtggccatc

SEQ ID NO: 19793 - DNA, 120 bp, Homo sapiens
caacgaagttaacaggcggaggcccccaaggcctgcgctccaagccccctcctactgcacacgtcaaaggagaatttctccggatggcgcccgctgatcctggaaataccccaaacgtca

SEQ ID NO: 19794 - DNA, 120 bp, Homo sapiens
cagcgattcggagagcaatgcaggagaggagggagccccttccacgctgggctcagggcatgcagcgtcgcactaagaccctctgccggctggtcgggcttgcctgctcacttacccttc

SEQ ID NO: 19795 - DNA, 120 bp, Homo sapiens
ggtcgagccaggctgggcctctgcatggagggcccgagacccccagggcccttgcctgattggggcaggccagtccagagcacccccccaacccccaacccccaacctgggtgagcagag

SEQ ID NO: 19796 - DNA, 120 bp, Homo sapiens
agccgtggtgtggaatagctacttggctagaaaggggttgctgctgtccgcaacccaccctcagggagtcctgaggccccctgctgcattttcccatcctgaccctgcagggggcaggga

SEQ ID NO: 19797 - DNA, 120 bp, Homo sapiens
tgccgactccaccacccagcatgactgctgcaaaatggcctggccacccgttcctgccaccctcctggccatggaggggacccaggaacacgtccctgccaccacatgacccggctggcc

SEQ ID NO: 19798 - DNA, 120 bp, Homo sapiens
ggacgcttcacaggggcctcctcctgcctctttcctgggactctgaccagggtgggcaacgggcaccctccagtcctcttggtctccctgggaccggctcagagagaagagaaccttgtc

SEQ ID NO: 19799 - DNA, 120 bp, Homo sapiens
tgccggaatctacctgagaccctgggcatccgcttgtccgaggcccccctgtcctagtccccagcatccagccgtcccccacaacacgcggaccctcacactagtgtctccctcagcggc

SEQ ID NO: 19800 - DNA, 120 bp, Homo sapiens
cggcggctcccagtgcagcctcggctgctgccagataaacaagccctgctcccaccccccctccacgctgccaccgccaccaccatcagcactgagaaaaatcaaatgaaatgaaacaaa

SEQ ID NO: 19801 - DNA, 120 bp, Homo sapiens
gggcgctttttattttttattttctcatgctgggggatgccggtacttacttggctatgaaaatcaccaccaatcctgcacggtttcccggcgggcagccccgtaatcgcggtgcggcag

SEQ ID NO: 19802 - DNA, 120 bp, Homo sapiens
tgccgcggctgagcccagccagcgtgcccgggcccctctgcagactgtaccatcctgcccgagcgggtggggggcggggggcggaggcgccggcgccggttctaggagagcatctcgccg

SEQ ID NO: 19803 - DNA, 120 bp, Homo sapiens
tctcgggggaggcagaggccgcccctgccgctgccggaggctgggggatgggggcgggaggagggagggagggagggacacagggagggccggttctggagggggcacgggggaggagag

SEQ ID NO: 19804 - DNA, 120 bp, Homo sapiens
gggcggggggggtgtgtggaccgaaccaccacgctgttgtttgcggttttaattcctcccgtgggatcatgaggaaccgaagctggcagagtcccaggaatatgcccgctccccagaagc

SEQ ID NO: 19805 - DNA, 120 bp, Homo sapiens
gcacggagagggtagggctgggctgtgctggagggaagggggtcctgagagtggtggtggggagaacgggagcagagaggggaggattttgctcaaatggccccaagtcgtcccttgctt

SEQ ID NO: 19806 - DNA, 120 bp, Homo sapiens
ggtcgcaaatggggagaagtcgactcaacacattttaaacacatctgtgtttccagggccagtggagctgagcccgcagcagctctctgctgccctgaagcgctacccctgcgacccgcc

SEQ ID NO: 19807 - DNA, 120 bp, Homo sapiens
gtgcgaccccacctgccctcgggggggtgtggtggtgggggctggcttggcagaagggcctgcctcaagaaggtgcccaccagcaggggtgtctgcatgtctgtacacccacctaatctt

SEQ ID NO: 19808 - DNA, 120 bp, Homo sapiens
ggccgactgtgggctgactgacacttccacgggaacccagggaccccgggtgaggagtcggtagggttggaagcccctagccagctgctcacctcttcctgcctaatctctgccagactt

SEQ ID NO: 19809 - DNA, 120 bp, Homo sapiens
caccgggggcgaggggcttctctagaattctgaagccttggcctccactgccctgccccctccaggaggggtaccctgcttggagggagggcactgaaggtggaaggaccttcaggacca

SEQ ID NO: 19810 - DNA, 120 bp, Homo sapiens
aggcggccccgggaggcagttccaggcagaagctgcctctttcccctgcccccacctcctgcccacctctgagctgcccgcccgagcgtcccgagctgccgctccatccctgggctggca

SEQ ID NO: 19811 - DNA, 120 bp, Homo sapiens
tctcgttaagctgaaagtctgcactgcaccaaaatcagaacccggccgtgcagaggggccacgggagggagacagttgggagcgcctgaggtgggtctcccaccagtaggccatgctgag

SEQ ID NO: 19812 - DNA, 120 bp, Homo sapiens
gcccgcagggtggcctcaacgcagggaggatgctgcgaagctacgatgtcaagggccgggtggtcattcaaggccttggcctccactggggcaagggtgtgagtcagaggccaggcaagg

SEQ ID NO: 19813 - DNA, 120 bp, Homo sapiens
tctcgaccccacaccaatagcccaagactgggggcttccaaagcagcctcatctctgcttcatcttgcgggtgcagatgggaactctacccctcttaggggtgtagttggggggattcca

SEQ ID NO: 19814 - DNA, 120 bp, Homo sapiens
ctccggccaggctgggctgtggtgaagataaactgagatattcattctgagatcatgagtaataactaatgttcatggaacaccaactgtgcactaggccctgtctaaacacttggcaca

SEQ ID NO: 19815 - DNA, 120 bp, Homo sapiens
ctccgggcactgtgctgaacttgacacacagagtggtcctcagccatactgtggatttgccctgtttgtttcctgcctttggggtcccctgaattagctaagcacatcactcaccgtctg

SEQ ID NO: 19816 - DNA, 120 bp, Homo sapiens
ggccgaggcgggagtgaataatgaaggtgcaatgtgcaatgtccgggcctttcaaggggctattgaggacttggctaatgagggaacagagcaagaaagagagaagagtcacagctggga

SEQ ID NO: 19817 - DNA, 120 bp, Homo sapiens
tgacgcatggcagcatggcagggcaggctggcatctgatggtacgtgagaggcgttggagttctaggagtggagaactcagttcctgtgtcccctgcccctaccccacctctgacatctc

SEQ ID NO: 19818 - DNA, 120 bp, Homo sapiens
cctcgtcccatgaatgttatagttccaaaagaagattccaagagggacaagagaacaaatattgtttgggtgtttactgtatgtgtggcactgagccaggcactcagcagtcacttgttc

SEQ ID NO: 19819 - DNA, 120 bp, Homo sapiens
tctcgatcttgtcagctgagtctagaggacctgtctgtcagaaaaagactcatataaccaatcccttgggggctgatcaataatacccataggctggcagcaaccttcttctgttgctgc

SEQ ID NO: 19820 - DNA, 120 bp, Homo sapiens
tcccggtgcaaccaattccctgcattaaatttcttctgtttgaaatacctggagtggattctattttcctgattggctccctgcccctccatccctattctccagctaagtctgctccac

SEQ ID NO: 19821 - DNA, 120 bp, Homo sapiens
caccggtggctattaagccagcagctcctcccatcctcctccccaacagtgggggcatgctccttgccagaattgtctgcctttagctcaaccctggctccaggctgatcttgtctcccc

SEQ ID NO: 19822 - DNA, 120 bp, Homo sapiens
aaacgttcccttcccctcccctctcccctacagattctagtgtgtatgacttttcattttggaactgtcccaggatgtccctgatctcttccactgtgaattgattttgtggccagagcc

SEQ ID NO: 19823 - DNA, 120 bp, Homo sapiens
acacggctgcttagatagaccacattttccagccttctctgcagctaggtgtagccatgtgactaaatcctcatctgaatggaagatgagtagaaataatatgtgtcacttctaggactt

SEQ ID NO: 19824 - DNA, 120 bp, Homo sapiens
cctcgtggagtagagcactcttggcaggctagagcagccaatttagaccctagaaaaagttttctaccctgctatttggaggtctctttgttgcagcaacctagcctttattatcctaac

SEQ ID NO: 19825 - DNA, 120 bp, Homo sapiens
gtccgggtttccctagacctctgtgatttctgctgttccccatctctcgcgtgggcttagtcaccaggtcctgacaactctaattctgaaagcctctggaatctgttttgcttctctgcc

SEQ ID NO: 19826 - DNA, 120 bp, Homo sapiens
gctcgagtcctcattgtctgttgcctagactactgcaacagcctcttgatcactggggtcccctccagcccagacattacattgttgggcaaattatttttctaaactcagaactgatgg

SEQ ID NO: 19827 - DNA, 120 bp, Homo sapiens
aaacgtaatacagtgattaagagaatgaactctggagttagagtggctgagtcccagtccttcttactagctgtgtggccttgggcaagcgaataaaactctctgtgcctcatcatttgc

SEQ ID NO: 19828 - DNA, 120 bp, Homo sapiens
taccgaccccctcagctgtctatccacctatctaccttcccatctgtccacccactcatccacccacccatgtatctgtctgtctgcctactatgtctattcatccatgagtccagatgt

SEQ ID NO: 19829 - DNA, 120 bp, Homo sapiens
aagcgctagttatttgagggagaatctgacttctggaaactgtccaaaatctgggccttagagaccccatgtgttcagttctgagcaagataggaaaccttaaaattgtccctcatgtcc

SEQ ID NO: 19830 - DNA, 120 bp, Homo sapiens
atgcgtggcccttaacaagcacttggcatggatggcctcactcccctgcacaatgaccctgtaccgcaaatgctgctaacgtgttcatttcacacatggcgaagctggggctttgcctag

SEQ ID NO: 19831 - DNA, 120 bp, Homo sapiens
ccccgtggatggacctggcaccagaaaaagggcagggccgaggatgtcctgcgcacactcggcagaacgtccttgcaggcatgagcatgcttctcctgcggcctcactccacactccgag

SEQ ID NO: 19832 - DNA, 120 bp, Homo sapiens
gggcggtggcctcctggggaggtggcaacgtgctacagctggatctgggtattggtcatgcatgtagaaacagaggtaaaaattcacccaggagtgcacttgagatttgctcattgtact

SEQ ID NO: 19833 - DNA, 120 bp, Homo sapiens
caacgattgctaaagataagttgaagttttgtaggggaggcacctctcattctcttgggcctcagcttcttgctctgtaaaatgggaataatgagcttgcagctcgtggagatgatgctg

SEQ ID NO: 19834 - DNA, 120 bp, Homo sapiens
taacgcctcctggcaggtggaagttctgagcaccctggtcacagagaggcccaagggattcagaatgcagtgatccaggggctctaatggcagggataggctgaggtcccacccactgac

SEQ ID NO: 19835 - DNA, 120 bp, Homo sapiens
ttccggtcatcctacatcaacagggggagtgtggattacgggccatgtataggcagaggaactgaggctcagaacaggtgacagggctggatggcaggggaacgagactcaagtcctggt

SEQ ID NO: 19836 - DNA, 120 bp, Homo sapiens
aaacgcggaatactctaaaaaccaaagaacacttgtgtaccagctacatgactctgggggagtcattagcctctctgggtctcagtttccctgctccactggaaccgaagctcttatgag

SEQ ID NO: 19837 - DNA, 120 bp, Homo sapiens
tggcgtgtaaggtcagcttggcctggtcccaaccgacacctccggcccttcccacgatacccctgcaaaatgctcagtgcggctcctcccctaccaccctcctctgcttcctcatctttg

SEQ ID NO: 19838 - DNA, 120 bp, Homo sapiens
gtccgcagcccctcctccctgcctccccctccctgtctccctgctcccacgccttgttcttcttcacagaaactttcatgcctgggagtggggcgagaactctctcttctctgatctttt

SEQ ID NO: 19839 - DNA, 120 bp, Homo sapiens
ggccgttttcacatattatatagcaaagttgaatcattgcgacagaagtcatctaacttgcaaggcctgaaatatgtaatctggcctcttacagaaatttgctgacccccgtcatagatt

SEQ ID NO: 19840 - DNA, 120 bp, Homo sapiens
tctcgctgggaaggtaaggtggtaaccaagtgcaccacctacttaggtgtctgcatcacacctctccagagatttattaaggatggagacatgagttttccttccacacttacctccctc

SEQ ID NO: 19841 - DNA, 120 bp, Homo sapiens
ccccgatcccactacagttccaagttcagtgctctgcaaaataaatggtctcagttgccaggaacaagctgtccctgttacagcctgaattgtgtcccccaaattcatatggtgaaatcc

SEQ ID NO: 19842 - DNA, 120 bp, Homo sapiens
agtcgttagggtgggcccttattcaatctgactggtgtctttataagaaaaaatttgagcacagacatattcagaaggtgaggatataggagaagtcagctgtctaggagccaaagagag

SEQ ID NO: 19843 - DNA, 120 bp, Homo sapiens
tgtcgtttaagccctccagtctgtggcactttgttatggcagccctaacatgaatacatgaatacaggctcaaagccagctccctcagaactgcagctccagggacagaaggaagactat

SEQ ID NO: 19844 - DNA, 120 bp, Homo sapiens
tggcgccacagggacagaatcgagttcacctgcttagagctttcctgcagcatgcagcacccctggctgccctacctgagtcccctgggcacggagtccccaaatacactaactcagaag

SEQ ID NO: 19845 - DNA, 120 bp, Homo sapiens
tatcggttttggtgggtcagacattccctctcccctggccctacagctccctgctactacgctgcttttaaaagcagagacttggccacaacggagagagatgaccagagtgggcacggg

SEQ ID NO: 19846 - DNA, 120 bp, Homo sapiens
cttcgggggtaaaagcataaccacccctggccttgagccagatgccagacctggaaccttgctcctctgagcccagagttcctttctgtctctctctacaacactgttttccttctccct

SEQ ID NO: 19847 - DNA, 120 bp, Homo sapiens
ggacgcctgcccagaggctggtggtgcccagctctcacaggtgcaagtcctgcggcctcttgttcagtaagggatttctatgcatacaccagataaggaaactttgagcagattccatct

SEQ ID NO: 19848 - DNA, 120 bp, Homo sapiens
ctccggaggcccctacatgtgtttcctcttgctccactggaggagtgcccggaagtggcagagaggcacgaagccccgccctgagacctgcttttctgcagagcctgggtagtgacggct

SEQ ID NO: 19849 - DNA, 120 bp, Homo sapiens
ccacgactctctgagttttaaaattccaccacctgatgttttccaggcttcccactttagtggagttaccaggcaaccaggactatttcttccactcctttagattcctgtaagggtcca

SEQ ID NO: 19850 - DNA, 120 bp, Homo sapiens
ctccgaggtggtctccaccaacacctactccttgttggacattgtccagcagtcctcacaatggtcagaggagttaggcattctccctattttatagatgaggaaactgaggcagagagg

SEQ ID NO: 19851 - DNA, 120 bp, Homo sapiens
gtgcgtccctgagactgccctttcttcataaaaatcccccagaagccaggtagcagggaaaggctgggtgagaacgcatccttctggggtttcccgcactcggcgtgtcagcctgggctg

SEQ ID NO: 19852 - DNA, 120 bp, Homo sapiens
ccacgccatcagaatgctctgcccatgagctactgactggagactttcacagggaccatttctggtctttataaaaagcccgagggctcagcaggacaagtgaaggtaactattctacag

SEQ ID NO: 19853 - DNA, 120 bp, Homo sapiens
ggtcgagggaaaggggctccttgcctaagttaacgtgtcccccagtggcagcccagaccccttcaaccccagatccagcagcgtgctctgagtaggagagctgccgttagaaggaacaag

SEQ ID NO: 19854 - DNA, 120 bp, Homo sapiens
cctcgcaaagcacaccccagatcgatactcgcctcagagccaaaatcagaaaagcagccagcctcatcgggcaggctattactggaagctgctgaaagtggaaggatacagggatggtgg

SEQ ID NO: 19855 - DNA, 120 bp, Homo sapiens
tggcggccagccctcctgggtaatgcccaataacagcaccaagtacacacaaagcactcctgaggttacaatgctttttctgtccataatccatggaatcctacccaagaggggtgaatg

SEQ ID NO: 19856 - DNA, 120 bp, Homo sapiens
gcacggccacaacaaacagggttttagcttcctactggttgctcttcctgctgatctaggctactgtgtcttcgggttggccacaaaagggggagcaaagaccttccctgcacctgtccc

SEQ ID NO: 19857 - DNA, 120 bp, Homo sapiens
ccacgtggacaagccagagggctccctctgagaattgtttgtgtgtccccttctaggggacaattgtctatccagcacctatgcatgctgggaacttccgcctgcgtcatcccaaatcag

SEQ ID NO: 19858 - DNA, 120 bp, Homo sapiens
tgacggagactgggtgaaggagagttggcagcctgcactttacagctaaggaagcggagactcagagagggatggcagcactcacgagacacccagccacttgccaggctgggaggcgag

SEQ ID NO: 19859 - DNA, 120 bp, Homo sapiens
ccccgggcatctggctgcatgtccggccttcctctttcgggtcacagctgtccgttctcatgggagcaatgttctgaaagttgaaagcaatggaaaatccaaaccaagcaccatcgttta

SEQ ID NO: 19860 - DNA, 120 bp, Homo sapiens
gttcgaggatggctgtgactttttcctggagagcagggacctgatatctgttaaggggcctgacacagccttcaagacaaacttacagatgctgacactaagccctgacactaactagag

SEQ ID NO: 19861 - DNA, 120 bp, Homo sapiens
tgacggagggacagatgcctgggatcaggcgtcaactccagcctcccagaggtagggatgttcaagtctatctgcattcaggttggtgaagctcttcctttttccctctcacctcctcca

SEQ ID NO: 19862 - DNA, 120 bp, Homo sapiens
tttcggctttcatattcaggagttttcaggctttgttaaaagcaaaatgcccaggcccatcccctgtagattcaggatgtggtgcaggctcaggccaggtttgggacttctgcaggtttc

SEQ ID NO: 19863 - DNA, 120 bp, Homo sapiens
taccgaacatggctgagtcagtctcttgagaattcttgctggaaatcagcatttttaaacacctcccagaagattccaatgagtacaggtatgaaaaatgctggcctccagagaaggcaa

SEQ ID NO: 19864 - DNA, 120 bp, Homo sapiens
gcccgatcctggacccccaccggggagaattccagcctctgtatctccccgactgggcagggtcgggctggggagggagggaagcaagcccagccccacctcataaatcatatgccagga

SEQ ID NO: 19865 - DNA, 120 bp, Homo sapiens
aggcgcccctgcctccatatatcccacacattagatgcttcactggtgtcccacaagcgagctttgtgaagccaggctcagggaagaggggtgggcagttaccagaaatgaaacctcagc

SEQ ID NO: 19866 - DNA, 120 bp, Homo sapiens
ctccggggtcgtctggccccacaagtctcctagtgcaggggctggaagcacggctgttattattttttttcttttggaggggaagcatttggccccaggtttgagggcacacaaaaggcc

SEQ ID NO: 19867 - DNA, 120 bp, Homo sapiens
acccgcctggccagaaatagccctgggggaggctgggctgaagccaaggccagaagctgtccaggggacctcgcagaggcctctgccaggggagcaggggacagctcgctgactcccccg

SEQ ID NO: 19868 - DNA, 120 bp, Homo sapiens
agccgtgactggtcagggttcaggtgggcgggctgtgtcctgaactgagggcactcaggtgaggctggaaccccagggttgcacccaccagagagggcgcccttgtgtcattcatctgcc

SEQ ID NO: 19869 - DNA, 120 bp, Homo sapiens
tgtcgaagaaaggaatatgcctgtgcacggtggctgagcaggggtctgccgaccagtaagggcactgagatagagacggaggggagctgatgttagttaggcaccagcagatggggcagt

SEQ ID NO: 19870 - DNA, 120 bp, Homo sapiens
cagcgcctcgaggaggagacgctcctggggtatgcatttgctcagcctaattaacagtgactgtgcccatttggggaacactcactctgtgccggacactgtattaaatgctatttaaca

SEQ ID NO: 19871 - DNA, 120 bp, Homo sapiens
tgtcgactttgggatttgtttgactgtcaaatggcatgactaatatttggggactggaaagtgtccaaggacacttaaggaaatccagtattacaaagggagccaaatatgttgtgatta

SEQ ID NO: 19872 - DNA, 120 bp, Homo sapiens
ctgcgatcatggaagaagacccattgttgcaacattggttaaaaactcatttattcaagtgtttttaaaatgaaattttaaatatccagaggggaaaaaagttgccaaagtttaggcctg

SEQ ID NO: 19873 - DNA, 120 bp, Homo sapiens
aagcgctgtactagtagagttttaacaggtagtttgtttttgcattgtttgcagtgaataacactgatagcctgaaatttaaaagcagtagtaagaagggaagtaagaatttagttgtct

SEQ ID NO: 19874 - DNA, 120 bp, Homo sapiens
aggcgcgggagtccgaggcgccgggtggcggctgcagcagcgggggcgcggcgcccgcgcgccacccgcgcgtcaagcgcgacaaggcggtccacgagcgcggccactggaacaacaagg

SEQ ID NO: 19875 - DNA, 120 bp, Homo sapiens
gttcgtgctgagcgtggccggggagatcattgggctgggcaacgtgtggcgcttcccctacctgtgctacaagaacggaggaggtgaggtgatagtgaggagaaggggagggggcgccaa

SEQ ID NO: 19876 - DNA, 120 bp, Homo sapiens
aaccgcccggtgggggcggggagccaggggcgagcgcgagaccccctcccgcgcctgcgtggagcggaacccgagcggagaacctcgactccaggcacctcgcgtgtgagctcgccccgg

SEQ ID NO: 19877 - DNA, 120 bp, Homo sapiens
gagcgcggcccacctgtgccagtgcgcacgcgcacgtgccaattcgcacctgagggttccacctgccagcgcggggacttgcccgcgttctgtccccagcatgagatgcagaccgaggcc

SEQ ID NO: 19878 - DNA, 120 bp, Homo sapiens
aggcgccctggtgtttcgggcacttggccccttggagcctcagctttcctaactgggaaaacggcctgtggggaagggactcctgatgatcaaagtggtctcagtttttgcgcgcttact

SEQ ID NO: 19879 - DNA, 120 bp, Homo sapiens
tgccgagcacctttgaccatatcatctcatctcatcctctcagtcactttcgtaggcaggggtctacccattttgcaggtgaggacactgagggtcagagaagtctcactcgaccaaaaa

SEQ ID NO: 19880 - DNA, 120 bp, Homo sapiens
aggcgaggcattgctctatggtttcctgcctagtctttcgtctgctcttaagcccatttctagggccaatatttggggcccctctggtggaagaattgacaacgaacagtttattttacg

SEQ ID NO: 19881 - DNA, 120 bp, Homo sapiens
ccacgacaaacagcaatactggtttaatgttgatgctctgcatagagatgtagaaggggagagggaaaggacagtgatgagagagtcctttctggtgacagcctctcaaagtcagtttgg

SEQ ID NO: 19882 - DNA, 120 bp, Homo sapiens
cagcgaatccgtaactctcccagctcagggaaggggctccagccttcaggaccccctcctgtcatatcggcaggacagctgggcgggtccatggcaagggatcttataaaacctccttcg

SEQ ID NO: 19883 - DNA, 120 bp, Homo sapiens
tctcgaaggaagagcctgtatctgtatattctctcttctctttgctgtgcccctgcccctccagcaaattcccaaaccccagcgaaggtggctcagaagttggctggcagggaccgggct

SEQ ID NO: 19884 - DNA, 120 bp, Homo sapiens
gtgcgagcagctgccgggagagggagaagggtactgcttggcccaggccctttctttggggacattcatcctgaaggcacaggctgctccaagcctgctctgcactggtaatgaagtggc

SEQ ID NO: 19885 - DNA, 120 bp, Homo sapiens
ggccgctggtgttggcggcttggcaagggagagagagggagtggacttggagacccccaacgtgccctgtgctctcggctgtgaatcctgcctctctgcagatacagcgtttgtaagctg

SEQ ID NO: 19886 - DNA, 120 bp, Homo sapiens
ctgcgtccacttggaaacctgtgcacacctagggtagtccccaggcacaaattgttttaacatcttttttttccatacaggaaattgttgtgccaaaacaaaaagcattcataaaagcag

SEQ ID NO: 19887 - DNA, 120 bp, Homo sapiens
tgtcggtccctgattgcactccctggctccccagggtactggctccactgacactcataatcacacaattccccatctttcccaagacagggcagtggttctgagctctgcctctgacat

SEQ ID NO: 19888 - DNA, 120 bp, Homo sapiens
tggcgtggtgagcaggtgagaaatgcaagctgtaacggtccttgttgacacccttatacccctagaccgtaagttccctgagggtggaacagcctgcttattcatcactgtagcgtggac

SEQ ID NO: 19889 - DNA, 120 bp, Homo sapiens
tgccgtggactctgtcggagtccccccataaatgtggagagtgcaggggactgtacttctttcttcctggagaagtgagagcagactccccaaggcagcggccagctcccttggcggggg

SEQ ID NO: 19890 - DNA, 120 bp, Homo sapiens
cagcgccagcttttagggcggtctccagggccctggcagcactttcctcagtggcaggttaaagaaaggtgatctgtttgccggctccgtgcacgacatgaagatgaggccaccccaggc

SEQ ID NO: 19891 - DNA, 120 bp, Homo sapiens
agccggaagcttcaggtgggagactgtttccttctctccagactcagcagctgtgtgtgagctgcccagagggaacatgtgtgggattccagccactgtccttcgaccatcaggcacagg

SEQ ID NO: 19892 - DNA, 120 bp, Homo sapiens
aagcgagatgggggagggtgtcaggtggtgccgagcacagttctcatcactgccatctcctcccagttccgctccttcctccaagtctcttaataaggaaggatgtagtttccttttgag

SEQ ID NO: 19893 - DNA, 120 bp, Homo sapiens
tggcggggtggtggctgtgcatgggtgcaggagaggttgcctgcacaaggtttgtgtatggacatgcttaggctattccgggacctcatatggccttgagctgcaggctccaggctgtgg

SEQ ID NO: 19894 - DNA, 120 bp, Homo sapiens
gtgcggtttcactttagccataaggagaagactcagtcccttagtgaggccctttgctgctgactgggcgattaagtctgagcgttggagaattctaatgcaggaactgagtttgaggaa

SEQ ID NO: 19895 - DNA, 120 bp, Homo sapiens
ccccggcaacttgcaagtgctgcagatccttacaatctggggagccgctgcctctaccttaccagtggagaacctggggctaagggagggcgggcagcctggccatagttgcatagtgac

SEQ ID NO: 19896 - DNA, 120 bp, Homo sapiens
tctcgattaagatgtagaacattgtgttgttttgagtggtgtcctttcacacatcttccctgaacctcctttttctcgtctctggtagaagtggtagtgatggcagtatgataattatca

SEQ ID NO: 19897 - DNA, 120 bp, Homo sapiens
gctcgctcattcattcactcacccagcaagtgtttactgtgtacctgctatgccaggcaccaggctggggattcttttcaatggcgagtgaaccagaccatggggcttaccatggggtag

SEQ ID NO: 19898 - DNA, 120 bp, Homo sapiens
cagcgagtggcacatgtgaagtctcaagtgggaaggacttggtgaacttgtgcggcaaagtaaaggcagtgattgagaaagatggtggcatgagatcagaagggaagcggcgggggtcag

SEQ ID NO: 19899 - DNA, 120 bp, Homo sapiens
aggcgtcatcgaattttttctaagagtgttggagaaccactacaggttttccagcagggatagcacggtctattttcatccctgcaagctggctgtggctgcttgttgtgaatggactgg

SEQ ID NO: 19900 - DNA, 120 bp, Homo sapiens
acccggcctttggcctggacactgccctctgcagacagccacccctgcccagcggacagtcagagtgtccccccacgctgcccctacaccctccccagctggctcctgttccttgctctc

SEQ ID NO: 19901 - DNA, 120 bp, Homo sapiens
ccccgcctcctcctattgccactttaaaggaagctgcaggattagctgggattttaagaagaatcatgccttttcactgctttggggctctgtttttattcttttcaaagctctaggaca

SEQ ID NO: 19902 - DNA, 120 bp, Homo sapiens
caccgaggcaaggaaaaaaaaaaaaaccacacacacagacagacagacacactcacacagaaacagctgcaaagagccttgaattgatttttttctttcccttccttcattcacccacaa

SEQ ID NO: 19903 - DNA, 120 bp, Homo sapiens
gatcgtgttgtctggaggatggtcattgcaaggccaaggcctgagtggcaccttcttccctccaggccctgctccaaggccttaactcattcagtgctcacaacaaccctatgcagaagg

SEQ ID NO: 19904 - DNA, 120 bp, Homo sapiens
gtgcgaatatcgtccccatttcacagatgagaaaacaaatgtgcatggtgcgtaagccttaagatcatggggggatgctgtcagagcccatcagggtcagggaggagctgggaggggccc

SEQ ID NO: 19905 - DNA, 120 bp, Homo sapiens
cagcggggagagccatcaggagccccacacagaaaacttattctacaggagcaccctataaagtgtttaatggctcaatgaggcataaagcaggagtagagggggactggggaaataaaa

SEQ ID NO: 19906 - DNA, 120 bp, Homo sapiens
gagcgctgtctctgggccctcaagtggcctttgttgcagtctcaagcaagaggagagctgccttggtggcaggactctcccagcggccagggccgatgtctgcattcagagaggaaacta

SEQ ID NO: 19907 - DNA, 120 bp, Homo sapiens
gaacgttcatgagatgcatgcagaatgcctgggcggccaaacaggagagcccctgccccggggccctgaacccaagtacaccgaagccgccatgccgttgggagcacttctcacaccact

SEQ ID NO: 19908 - DNA, 120 bp, Homo sapiens
tagcgggaaccctggcagcaaggaagcttggaaaggagggaagttttgcgacttggtaataccgtctttattaaagcacaaaggccccccaaagtcccagtgattgctgggtgggagggg

SEQ ID NO: 19909 - DNA, 120 bp, Homo sapiens
tggcgggggctggcagtggtgctgcagttaacccttaccaagcccctcctggcacttggcgcctgtgcagcgctgtccccgtgcacatgggtctccctgggaaacgggaagccaccctcc

SEQ ID NO: 19910 - DNA, 120 bp, Homo sapiens
aaacgagtggggaatttattttgtatctactgaatattagctctgtgctaggtgctatggggaacggtaaaagaatgattagctctcaggaactggggaaataagataagatgaggcaca

SEQ ID NO: 19911 - DNA, 120 bp, Homo sapiens
ccccgccacttgccaactgtgtgagttagcgtgggccatccagggctgcttcacctctctgggccgtagtttccccttctgtcagggttaaagcatgacacgtgcagtggcagtggagtg

SEQ ID NO: 19912 - DNA, 120 bp, Homo sapiens
tgtcgttacttgtgaaagaacgagcccaggctgggatgattgagtcgggtgagcctggcagccagggtgggctgcagtggagaaaggtaccccgaggccagcaagtctgggcagctccag

SEQ ID NO: 19913 - DNA, 120 bp, Homo sapiens
agccgcagctggcatgctgcaggggcacccccgcttgctgtcacctgcgggcaatggcccactcaccccagtgcagtcgggattgatgtggagctgggtccccttccagagaacctgcca

SEQ ID NO: 19914 - DNA, 120 bp, Homo sapiens
cagcggcgcaaaaccagtaggagatatagaggaagagctcgagtggaggaattggtgactgtggggacaggccatcagaaggggcaggctgggactctctacacagctgaagctgctatt

SEQ ID NO: 19915 - DNA, 120 bp, Homo sapiens
cttcgtcactggggaagtctcagctctgctctataggcctttcatctgagtgactgaggcccaccccggttatcccacataatctcctggacataaagtcacctgaccatggatgtgaat

SEQ ID NO: 19916 - DNA, 120 bp, Homo sapiens
gctcgctcactatgtctgacaggtggtggatgtctttccccatagctacactgaaggcagaagagtgctgtgattgatgagtaatgtctgccctgggcagaaatgggggttggatgtgca

SEQ ID NO: 19917 - DNA, 120 bp, Homo sapiens
aatcggagccaggtgtcctgtccctctcagtccagtaagttctccacttggcctggtagttaggactcggtgtgagctttgagcactcctttcctgtgtgctggagaccctaagcagctg

SEQ ID NO: 19918 - DNA, 120 bp, Homo sapiens
atgcgcaaagggttggggattcaaaagtgagaaagcagagcaccctgctctcaggaagcttccattccagttgggggagacagacaataaacaatgaatgccacgatatgatctcagata

SEQ ID NO: 19919 - DNA, 120 bp, Homo sapiens
ttccgttctcctcccaaggatgtcttttctattgcttgaagtttagctcccttttggcttctccagggcatggagcacccaggcttgccatttcatttcctggctttgaacaagttccat

SEQ ID NO: 19920 - DNA, 120 bp, Homo sapiens
tgccgtcttcaggccttgctcaggcttatccttctctgagcctcccgtatttagcgctttggtaaaatggggctcaagcaactgacgtgatggattaaggggaggccaactgcccatctg

SEQ ID NO: 19921 - DNA, 120 bp, Homo sapiens
cctcgttccctgctccacacaaaggggccaccggggtcggcctacacacccaaactccccctgcacaggattgaacggctcctcaccgcccgcagcgcaaccctttagcccagtgacact

SEQ ID NO: 19922 - DNA, 120 bp, Homo sapiens
ggccggctgcccagggaagggtttggcaccagagcgagaggctgcagaacatatttccagttgggcttacaggccaagagcctcagccccttcccaccactgttcccactggccctgcct

SEQ ID NO: 19923 - DNA, 120 bp, Homo sapiens
agtcgtctccaccaaagccctctcccaccatggaatccaccagggagggagcatttgaatccctctcccagactcccctttcctcataatggccatactgtattcatcagcttctgtatg

SEQ ID NO: 19924 - DNA, 120 bp, Homo sapiens
agccgaaagaaggagcaagggcgcctagcaacccagaggaggctgagaaagaggtgggaaggaagtgattttcatgtaatcattcacttctacaaaagccgttgtcaggtacacactgga

SEQ ID NO: 19925 - DNA, 120 bp, Homo sapiens
gtgcgtgtgtctgtgtgtgtgtgggtctgtgtgtgtgtgtgtgtgtggtagctgtctgtttgaaagaaaatgtagaagaaagaaaaggctgtgggttggaagccccaggagggccccaag

SEQ ID NO: 19926 - DNA, 120 bp, Homo sapiens
tgacggttttcacacatcttcttggccaggcgctggaacagcaaggagcctaggagggatgaagtgttggttcttcccatccatctctgttggacccaagctggtagccctaagaggcat

SEQ ID NO: 19927 - DNA, 120 bp, Homo sapiens
tgacgtgggtgcttgtttgcatagtatagttgagaatcgtcagccaccaaaagaaaccagattaaagggatggtaccaggtactccactacacactttacattcattatgtctttctttc

SEQ ID NO: 19928 - DNA, 120 bp, Homo sapiens
aagcgaaagagcagagctccaagctgggtctgctgaccccaaagtttttgcccttttcattaagctcctgcaaggctcaaagcatggagcctggctagagctatcttgtttaacttaggc

SEQ ID NO: 19929 - DNA, 120 bp, Homo sapiens
gttcgtaagcccaaagtgactcctcacgctggccagtgtgtacatttctctaaagtaaatggacaagtgacttcctctccctgggtgttagtttattcatctataaaagggagataataa

SEQ ID NO: 19930 - DNA, 120 bp, Homo sapiens
aaccgtgtggacgaggtgagtttaatacctgtaaagcactttccatctggtatgtcataggtactaataaaagttagttggtgtcattgtgatcatcagcatgactatcatcatacaccc

SEQ ID NO: 19931 - DNA, 120 bp, Homo sapiens
tttcgtggcaggatgggttaatgctgcatttgtcaaagacctaaggcattaccacagcaaacacaagccaattcgaggacatagagatggatttaattggtcggtcagctgatgctggct

SEQ ID NO: 19932 - DNA, 120 bp, Homo sapiens
gctcgtaggaaagcatcccacagacttctggaattcagaaagtctctgtgatccacagccagggtccctgagtaattcctaccctcacagagccacagggattgctgcagtcacctgttc

SEQ ID NO: 19933 - DNA, 120 bp, Homo sapiens
tgacgcactagacccctccaggctgcagtgtgtgctagtgacccctgctggccaagtgggacactgcaggctgcctctactagacactgccaataaccagagaaggggaaaggagctttg

SEQ ID NO: 19934 - DNA, 120 bp, Homo sapiens
atacgcttctggacaggagtaagttcacagggagatgctgttctgattctgacctcctgttcctagccgtcttccagccagttagagttcttcagtgtggcagtgagcaagtctgcccac

SEQ ID NO: 19935 - DNA, 120 bp, Homo sapiens
cctcggttagccactggtagaatggcaaagaaatgagacccagagagggaatgtgatttgcccaagattcccctagaactctgtattcccatctcataatcagtcccctgcaccatctca

SEQ ID NO: 19936 - DNA, 120 bp, Homo sapiens
agccgttaaaaagcaaatgagcttgggcccctcattacccattagggagaaaagtcagcctttgttgccaactctggccacttctctctcatttttaaataatgcccactttgtgaggga

SEQ ID NO: 19937 - DNA, 120 bp, Homo sapiens
cagcgtggctcaagtgtcagagccacttcacaggaaaccatatggcaggatgtgccatggactgagtgctggggaagtactgcaggcaggaataagaactgtttatggagcacctgctgc

SEQ ID NO: 19938 - DNA, 120 bp, Homo sapiens
ctgcgttccagggtcgtgcctgcattacctcatcagagcctcacaacaaatctaagaggtaattgtcattaatcccatttttcataggagaaaactagagttcagaactgtaaataatgt

SEQ ID NO: 19939 - DNA, 120 bp, Homo sapiens
gaccgggcacatgggacaggctgcgggttttgctctgtgtacctacaatgacacaggccccttgtgccacaccctacttggcatcttcccggccatgccccaagcccctatcttgctcca

SEQ ID NO: 19940 - DNA, 120 bp, Homo sapiens
ctccgggccacagagctccccgtaacatttatgggccagcattccaggggccttgagcttgccgcttgtctctgggagctcgtcatggttgttgaaggaagaagggagcaaacaagccag

SEQ ID NO: 19941 - DNA, 120 bp, Homo sapiens
ccccgcccagcctattccttcctatctcagtaagtgacaccgctgtccaaccacttcctttattcggcaaatattgatggagcatcatctatggccctgccctcggggagctcgcactct

SEQ ID NO: 19942 - DNA, 120 bp, Homo sapiens
tctcgccagaggagacaagaacacggacattttggaaagtaaaattatgcagtgtgacagaagatgataaattatctggctaaaaataaggtagggaagaggtataggaagggtcagaat

SEQ ID NO: 19943 - DNA, 120 bp, Homo sapiens
gggcggcggtggctgtcccaagaggagcatccaggcacagagatcggtgtgtgcaaaggcccttgggtgggcgcttatctgcagtgttcccaggcagctaggaggccagggttgctgatg

SEQ ID NO: 19944 - DNA, 120 bp, Homo sapiens
ccccgaggccagtgcagatgtgcaatgaggatgagtgagggttctcagcaggaaagggacctgctctgattcctgttttaataaggcccctcgggctgctggcaggggcttgggtggaag

SEQ ID NO: 19945 - DNA, 120 bp, Homo sapiens
attcgggatctgattctgggtatattttgaaggtaaaccagcagggtttcctggtggattgacagagagaggagttgaggatgactgaggtttggggccaacttgtcaagcgagaaaacc

SEQ ID NO: 19946 - DNA, 120 bp, Homo sapiens
ccccgcattcaatccaccggtgagtctcattggctcttcctcctttaaacctctcaagtccactcactccctccaccccagccactgctttgacctcccatcatcccctggactgctgtt

SEQ ID NO: 19947 - DNA, 120 bp, Homo sapiens
ctccgccaacgtgccttcccctcaacccctgtggtggggcggttcatgcctgttagcactcatggcagacctgagccagagcccaccactgtcagggaacttcccttctgcctgagagtt

SEQ ID NO: 19948 - DNA, 120 bp, Homo sapiens
catcgttcagcagggagaggaaggaggccccagggtcggcaaaggctgggcctttgaagaagttcatagctcagcgtggtctctggcatctcaaaggtgtggatctgaatcatggctcta

SEQ ID NO: 19949 - DNA, 120 bp, Homo sapiens
ctgcgctggttttcattgctcctctttggacgaaggacttcatcacagcctttgtgtgtctgttttgatgggtttgaggactctcgcccgaaccattgtttgccagatctctctaaattt

SEQ ID NO: 19950 - DNA, 120 bp, Homo sapiens
ttccgttttcaaaggatctagaagcggcagtgagccagggacaggagcaaagatccccagttagcagctcaggtgtgagaccattcgctaatcattcattaattcactaagcaaaatctt

SEQ ID NO: 19951 - DNA, 120 bp, Homo sapiens
gggcggcatgcagagagcagcatctgggagagaggaaactgtgagtggaaattcctcggcaggacacagcaacagggggctgaagtgcagaaaggagaccggggtgacaggagggttttg

SEQ ID NO: 19952 - DNA, 120 bp, Homo sapiens
agtcggggagaggcacgacagagctcagacagttgggcagggccagtgatgggtcaaggcgcacgggcatggaggaggacagaaccacaggggagtcagtttctgccttgggcactgcag

SEQ ID NO: 19953 - DNA, 120 bp, Homo sapiens
caacgtgccacagccagacacttggccatgcgtctcctgttcccagggaagccattccaggcaacccataaccatagcccagcccaggactgagtcctctggccagatggggcctcagcc

SEQ ID NO: 19954 - DNA, 120 bp, Homo sapiens
cagcgttcaaaacagcagctgcaaaaacatctcctcgctgccttagcctgacccacagcctctcccagcatgcagcccccggcagactctcaacggaggttcaaacctgctgagattgaa

SEQ ID NO: 19955 - DNA, 120 bp, Homo sapiens
gaacgtggacagcttaaaggaggtctggcgcccacagaacaaattccctcatgttccaggcatttctgcctttatgttccctaatcctgggaatttaacccaggcaaggacaggaggaca

SEQ ID NO: 19956 - DNA, 120 bp, Homo sapiens
gcccgggcctggccacccccaagcctggctttgtggcctctgttacactagaataggcatcacagcttatcccaccagaaacttccaaaaaatccagactcccacgcccatcccttactt

SEQ ID NO: 19957 - DNA, 120 bp, Homo sapiens
gcccgttccaaatctcccagagaattctgtatttttaacaagcttccttgtgaccaggaaccacagcaagcctcagcaaaggacagaagaaaaacctggggctctggaagtagaaggccc

SEQ ID NO: 19958 - DNA, 120 bp, Homo sapiens
actcgcttaacctctctgagcctccctctcctcatctttcaggggagattgaatataacactgatccctccatccgttgcaaggaatctttacaaggtatgccaagttcccagcacatag

SEQ ID NO: 19959 - DNA, 120 bp, Homo sapiens
acccgtcttgtggatgtgtagacagaaaacacgggctcataatagctccccagataatttccagggccagcaagctgctccttgtccttgctcagatgagcgtgctggaatctctcaggc

SEQ ID NO: 19960 - DNA, 120 bp, Homo sapiens
ggccgcgactgagggtgtcaggcacatgctctgcccagcagatgcagaagcaggagggaaagatcctcccagtgtccctggctcccatgtgggtgggggagaagctgactcccccattct

SEQ ID NO: 19961 - DNA, 120 bp, Homo sapiens
ttacggagaggaaacaagccccaaagtgggtcagcactgccctggacactaacccatttccagtccctcctgcccacaggcccgctggccatgggactatcatcttgcattctctcccat

SEQ ID NO: 19962 - DNA, 120 bp, Homo sapiens
gctcgggcctttgaccctgttttctacctcttgccagtctagggagaaggaggcttgaacactcaagtacagaccatgggggctgcaggggagggccttctggtttgcgttggatgttct

SEQ ID NO: 19963 - DNA, 120 bp, Homo sapiens
caccgtcctgacttgatttgcagtggggctgatgtggggataggggagcaatgtggtggtcaaaacagtacaggctttaggaccaccagatgcagttccaaacccagcttccccagttcc

SEQ ID NO: 19964 - DNA, 120 bp, Homo sapiens
ccccgtaatcagtagcagcgatgcctattattctagtgcaacagaggccacaagctaggcttgggatgcagccagacctgggcaggaatcctggctctgccctcctggctgtgtgatttg

SEQ ID NO: 19965 - DNA, 120 bp, Homo sapiens
ttacgtgcatcgtgcatcgatgtttgaaacagagcctcggcagaacaagctgtcaccagtgcaagccgttcacggtgataatcgagaacgatgtgtgaacttactcaccacatgtctatt

SEQ ID NO: 19966 - DNA, 120 bp, Homo sapiens
tctcgctgcgtgtggggccctcaatccagcagggaggcagacgcacgagctccaggctcaccaacaaggggactgacgatcccagtacaggttctcacccgctccatgatccaggaccct

SEQ ID NO: 19967 - DNA, 120 bp, Homo sapiens
tggcgagcttcccagctatttgtgacccagcagctctccttccacagctgctggaaattgagccatggaggccacttgatctagacagctattgctcaagagttcctgtgcccacatctc

SEQ ID NO: 19968 - DNA, 120 bp, Homo sapiens
ccacggatgggtggccagaggcagagggagaaagccaggaggggcctgcagagagtggccccacggcaggcctgaggggttagaagggacacctacaggtcctgagggccagggagccta

SEQ ID NO: 19969 - DNA, 120 bp, Homo sapiens
gtgcgtacatgcacacgttaacacttatgtagaatttcagttttcaaagtgttttctcagtcgaagcttgtgacagccctgggaacttcaagtgaaggtaattttattgttattattggt

SEQ ID NO: 19970 - DNA, 120 bp, Homo sapiens
gatcgagacttacaagagagcgtgggaaggcacggctgtgaggctggggagaaaagggccgtagcatcttgtaaccttacctgagctctggccagagattaacatctccttggttatgcg

SEQ ID NO: 19971 - DNA, 120 bp, Homo sapiens
gcacgacctcacctcacagctcagggaggaaggtgcaggggatggggccctaatttaatctgggctctccatctgtgacttgccctgtgctaggtgctttacctgcattgatctcagtta

SEQ ID NO: 19972 - DNA, 120 bp, Homo sapiens
gagcggactcagtgccagcaagctgcgcacctaaaaatagttaaatggtaaatcctatgttacatatcttttacctccattttttaaataactatatgtgagtgaatcagctaagaagaa

SEQ ID NO: 19973 - DNA, 120 bp, Homo sapiens
ttgcggcttttgggatacagcagtgagctaagttgctaccacgctacagctgacattttgtgggcgagatagtaaacaagggatattaaaatatcagacggtggtacgtgctataaaaga

SEQ ID NO: 19974 - DNA, 120 bp, Homo sapiens
aagcgaaaggatggagaatggcttggaggaaggtgggagagctccttctgatgggcgtcatttcagtttcacagatgaggcatgggaggctcgagtgctccccaagggtcacacatctag

SEQ ID NO: 19975 - DNA, 120 bp, Homo sapiens
ccacgccgtgaccacaccagggaacggtgttgtctcttggctcacaccctgaggcacgcacttcaaccctctgagggcctcaaagctgagtcccagggtaggagcggggtcttcctttcc

SEQ ID NO: 19976 - DNA, 120 bp, Homo sapiens
ggccgccggcttctggaggcgcagatggatcgtgtgtccagcaggtggcgccgcggcccgactcgggcgccccagcagaaccagcctgccagttgagtctgtgccaggctggagagcggg

SEQ ID NO: 19977 - DNA, 120 bp, Homo sapiens
gggcgcgggcagtaggtacctgaagcgaggctcggccggaggcttcgggcagagatgtgctgctgtcagtcgggcaggccagctttagcggctcagccctgcaggtcacttccagttatg

SEQ ID NO: 19978 - DNA, 120 bp, Homo sapiens
ttccgcccactgtgagcttccccctctgaatgcaaccgggttgtccaccccttcctccaggctgcgggaaaacggcatgagcccacaccttcatccctttgagaggtgacagcgtgctgg

SEQ ID NO: 19979 - DNA, 120 bp, Homo sapiens
gcacgcttccggtgggaggacgtctgtttacagctcggggaagctatgacagcacaatgtggtgtggacacatgcgggaacgtggctggctgcccccacgggctgccagagctattttcc

SEQ ID NO: 19980 - DNA, 120 bp, Homo sapiens
agacggggagcctgcatgtctggcctcgagccctgaccagcctccggcctccaagcgcctcctgaggcatctgcccttcacccccaggccacgccccaccctgtgtccactacattcttg

SEQ ID NO: 19981 - DNA, 120 bp, Homo sapiens
gggcgctcatctaatagtgatgaccgtggcgggccgtacggagcagccactgctatcacgctggctgcaggagcagctgctagagcagcggtggtgtgccctgtgtccccaaagcagccg

SEQ ID NO: 19982 - DNA, 120 bp, Homo sapiens
ccacggcctcaacctcactctctgccgcgtctcgggagcctgtgagcacccagtggaaggcgcagccgggactcgtgaagccggccccaaatgcattgggttcatttgtgcagggttggc

SEQ ID NO: 19983 - DNA, 120 bp, Homo sapiens
caccgtaccacctgcacctcgcccaccaccacccatgggaaaatgcggagaggaggcaggcagtccccagagcctgcctccaggagcctcccggagcccgccaccctgggagctgccaca

SEQ ID NO: 19984 - DNA, 120 bp, Homo sapiens
gaccggtcacttggaaggcagatccattatctaagagggaacacacagctaagtgcggaagaaggtggtgggtgttgttatagcaactggcgagtctttttgtgtcctcatagccaagaa

SEQ ID NO: 19985 - DNA, 120 bp, Homo sapiens
ccccgtctctctgccctatcctggccagggagccccgacttccataccctgggctgggaacagcagggggccaggcaggtgcctccccgctgaggctgggggagagagatgctcagaggc

SEQ ID NO: 19986 - DNA, 120 bp, Homo sapiens
caccgtccaagcccaaggtctggcagctccacgaaggaacagcctggccctcgtggactccgggagaagagcctgccaatggctaacagcataaccatccaagctgagaaaccaagtcac

SEQ ID NO: 19987 - DNA, 120 bp, Homo sapiens
gagcgaatgcctgattggaatgtgtttaagaaaaatgggagggaggaactggagaaactgaggacggacagctctttggaagagttttgctgcaaaagggagagtggtggtttgtggctt

SEQ ID NO: 19988 - DNA, 120 bp, Homo sapiens
gtacgcttgatgagaatgatccagaggaggtaaaaaatgatgctgtggcaagagggacaatcgctggagagatgtccttgagcaaatgaaaggggcagggtctagggcacaagtacagat

SEQ ID NO: 19989 - DNA, 120 bp, Homo sapiens
aagcgtgtgggtggagatgctggtgggcggggaggtgtgtggtggggtctcaggacattctgattgcttccattatctcagtgaataggaagcagacaggacaggagaggaggcattaag

SEQ ID NO: 19990 - DNA, 120 bp, Homo sapiens
aaacggtccctagcagagctggagagagaatgactagggaggcagagtataattgctaggcagcattgagagtgctctcaacattcaaggtcatgactcaagtgaacacagtcaaaatgg

SEQ ID NO: 19991 - DNA, 120 bp, Homo sapiens
catcgataataaatgaggaaataaagaacctgggaacatgtaattcagattaaaagctcaagaccaggggcaaaattagaaagcagagggagggagaaagaaggagagggggagagagta

SEQ ID NO: 19992 - DNA, 120 bp, Homo sapiens
gggcgaaggtcggaggcagcggcatgctggcccttgtgcagcggggcaaggtctggggcaccgagcggcctcacgcacctggctggaggctcaactgtcctgaggccgggcagccactgc

SEQ ID NO: 19993 - DNA, 120 bp, Homo sapiens
aagcgggagcaattttgtttaagacatcgccctctggtggccatgtgcaaggtggcctggagagacagccctgggagggctgtggccccagctaaggcaggaggagggctcaatcagcca

SEQ ID NO: 19994 - DNA, 120 bp, Homo sapiens
taccgtggtagtacagctgagcggcctgatttcagcatttttaaacaaagcctccagatggactttgtctgcctgctggggagggctgggcagctgctgcactcagggactttcctctaa

SEQ ID NO: 19995 - DNA, 120 bp, Homo sapiens
tggcgcacacacttgggcggggagacccacggtcctaggcaggcagggatccgaagcatcatgaggaaggcagagatccaaagcatcatgcaggaggcagagttaagcagggtggagcga

SEQ ID NO: 19996 - DNA, 120 bp, Homo sapiens
gaccgagcaagtgcttctccgaggaggtaacatttaagctgaggcctgaatggaaaaatggagccagccacaccacagtctggggaggtgctcccagaggaggggactgcaagtgcaaag

SEQ ID NO: 19997 - DNA, 120 bp, Homo sapiens
caccggagaagggggaggtcaggatttcagcgggtgcctctcaggcagggcctgtgtctgtggcaggaataatctatattttacaccatgtgcgctcggaggaggctgcttcaagcctgc

SEQ ID NO: 19998 - DNA, 120 bp, Homo sapiens
agccgctccctctgctgtggtggggactaatgataccactcgtctgtgcacagccgctttattattacttattggcccacatgatcctccaccaggaggaactgttaggcttatttaatg

SEQ ID NO: 19999 - DNA, 120 bp, Homo sapiens
actcgacttcactctaagtgcaaccagaagggtgttacaaggagtgagaggtctggtttccatggggacaggatgccagtgaaaagggactgaagtggaggaggaacagagacagggagg

SEQ ID NO: 20000 - DNA, 120 bp, Homo sapiens
agacggctgatggtgcagtttctggcctgagtcactggatgttttgcaactgaggccaacactgaccaccagacactgtccccttcttcctcactaacaagctactattttgttcaggat

SEQ ID NO: 20001 - DNA, 120 bp, Homo sapiens
agccggtgtggagcactgctctagtttgacatggcaactgctagggaatggaggactgtggatttttttgtgtgcagggtccagggctgccaaatgtctgcaatgcataggacagtctgc

SEQ ID NO: 20002 - DNA, 120 bp, Homo sapiens
ggtcgaagtcaagaagggtggcccttctgctcctggccagcagttggttgaggcaaaggcatgtgatgcctcatggggggatctgtgcctgtgtggggtgtccagaactgtcttcctgca

SEQ ID NO: 20003 - DNA, 120 bp, Homo sapiens
ccacgctgagcatgcaggagcttacagctggaagcgggtgtgcagcgcgcctcctgcatgacttctggtggcatgagataataacttgtaactttgagttgagagtatcagtgacctgat

SEQ ID NO: 20004 - DNA, 120 bp, Homo sapiens
tcacgcacattcaattggccaccgcttctagcctccagagggcaggaaactgccaccctaccatgtgccaggaagtagaagtcatgggacatgtgtgaccaggcctaataactaccctct

SEQ ID NO: 20005 - DNA, 120 bp, Homo sapiens
tggcgagtgctcagtatctggctgttactgtacatggctaccaaagttaaactatttgtacaaaaactggatggaagagcctgtgacaggcgtgtagaaagcataagcagccagtaggta

SEQ ID NO: 20006 - DNA, 120 bp, Homo sapiens
ctccgtttgctgggtggagctcacagtacccactcaggtgggcactctatccctgtttgctgggtgcggagactgaggagtgctaggaagcagcacacctagagccaggaggagcatgag

SEQ ID NO: 20007 - DNA, 120 bp, Homo sapiens
ggtcgagtcttgcctctcctctaggagaaaatattttgacctgagccttggtttcctctgtaggatcgagagaaacaaggttattatgaggattacatgaggtaattcatggaaagcgct

SEQ ID NO: 20008 - DNA, 120 bp, Homo sapiens
cagcggtggaaggcacagcaggcagtgtaggcattcacacatttgcgctgcttgccctccagtcccacagggaagtccccctggatgcagtggttgctttacaggagggggattgagttg

SEQ ID NO: 20009 - DNA, 120 bp, Homo sapiens
gctcgctacaaaaattatacggggaaatgagctgggttaagaggagtcaaggattggcagtcttggcacatccagcacgaggtgtgttggggcatgagaggtccgtggagtggtctgccc

SEQ ID NO: 20010 - DNA, 120 bp, Homo sapiens
gtgcgcaggctgctgcctcgcgggccgggggggcgcgcacgtgtgggtgtgcatgtgtgtgcgtgtgcttgtgtgtgtgcgagtgcattgtgtgcctgcgcactcgggggaagaggcgtg

SEQ ID NO: 20011 - DNA, 120 bp, Homo sapiens
ccacgcggggaggaggccgcattgtgaaggtcccaggggccgcctgcggagtgtggggcgggtacgctgaggcgcgggtggctgtttacgcgtggcgttgccgggagggagtgtgagtgt

SEQ ID NO: 20012 - DNA, 120 bp, Homo sapiens
tcacggtgaatgggtattctctcctgttctgggcgactctattaggagctgacaaaaacgggcgtacagccacggaaggcccgtgacagcacacggcgggaggctcccacgcagctcaca

SEQ ID NO: 20013 - DNA, 120 bp, Homo sapiens
acacgagggaggtgtgagactcagatgtgtggtttccattcagcagccacgccgggcggcgggctgtgtgggtgcgtggcgggctgggggtgtggcacaggtgtgaaagggatgtgtctg

SEQ ID NO: 20014 - DNA, 120 bp, Homo sapiens
agacgggcctcctgatggcttccagcgcagacggggatttagtggagggggtgtgtagggaggtgggcatggggtgtgacagcccatgaggcaggcggccactatggaaatggcggggag

SEQ ID NO: 20015 - DNA, 120 bp, Homo sapiens
ttacggtgtatgttaaggtgtgactggtgctgctggaggaatacccggatgaggaagtgtgcatgtgtgcctgtgcacactcatcagccagctgtaacttcacttctgatgcacacgtca

SEQ ID NO: 20016 - DNA, 120 bp, Homo sapiens
tagcgtcctagtatgatgtgtgtatgtgcatgtaggagtgtgtatgtgcatgtaggagtgtgcacaggacatttcccacgcagctggcccatgaagacacaggcactttgtgtccagatg

SEQ ID NO: 20017 - DNA, 120 bp, Homo sapiens
cctcgcacattcctgtgcatgtcatgggaaggctcagttcagggagggtacattttctccacagtcagtctagggatgaagaaaggccctaggtggtgtgcacagaaaaacatgtccatc

SEQ ID NO: 20018 - DNA, 120 bp, Homo sapiens
tcacgccgtaaatcctctttggaaaaaggcgacattcaataaataaacatcaattgattggtctgctatttctttgtgtgacagtcataaaccagaactggccagcaacgtcctcatgga

SEQ ID NO: 20019 - DNA, 120 bp, Homo sapiens
tcccggctcctctctcccgtgcatgctcttcatgacgcacttcttaccccctgcttggagggcatgtgcgtgtgtctagcagtgtgtctctttcttacacacctttgtgtggaagccctt

SEQ ID NO: 20020 - DNA, 120 bp, Homo sapiens
ctgcggactgtgcgcagggtcacctcactgaaccctgaccagagccctgtgtggcaggtactatttttattttacacttaaggaaagggagacacatggaggttaagcagcatgtccaag

SEQ ID NO: 20021 - DNA, 120 bp, Homo sapiens
aagcgttcagtgatttgtcaagtcactggagtgagaggctggaaaaaagcgaggagctctggagaagatgtaaatttgggagcctttagcatagagaaaatagatgcagcctgtggaatg

SEQ ID NO: 20022 - DNA, 120 bp, Homo sapiens
tgacgggagggcctcttaccccttggaggcacaggccctggtttttaggaggcagaagaattcaaaaacacacgttgctctcctttctactctgggccaggcactatgttaggtgctggg

SEQ ID NO: 20023 - DNA, 120 bp, Homo sapiens
caccgtggaaaatggcagcatggttcctccaaaattaccagcagaatatgacccagcaatcccacttctgggtacatacatacccaaaagaatggaagcagggtctggagtagatatctg

SEQ ID NO: 20024 - DNA, 120 bp, Homo sapiens
caccgccacgggcacagcagcgttattcacaacagctgagaggtgtctttgagagagctttgcccaggctatgttcccacggaagcccaactgagcccacatctttctttcctccactgc

SEQ ID NO: 20025 - DNA, 120 bp, Homo sapiens
ccacgtacccacaaaggtactgagaaagaagctcagttgggcctgctggacacagagaactcctcagtgtgtcctgtattttgctggcagctgtggcttccctgacagtctctgcagtcc

SEQ ID NO: 20026 - DNA, 120 bp, Homo sapiens
agccgtttctcccagccttggtggccggcaggagtgggactgggagcgggtccagagctggaacatctacagagggtggtgcagggcgcaaaagcaacgtagagcaattcacacgctccc

SEQ ID NO: 20027 - DNA, 120 bp, Homo sapiens
cctcgccaccaccccacatggagccatatgcccaagagactttctagtgcctgttgtttttttagggcattgggaaatttttagctgcaaatactggtaataagactgtctcaaatagac

SEQ ID NO: 20028 - DNA, 120 bp, Homo sapiens
gaacgatagagagccacagaataaaatctgctagccaaaccgagtttgctggaaggttcttagctcgttctcggagggaactcccgtggaaggctgtgtcctggggacagtgtgggaggc

SEQ ID NO: 20029 - DNA, 120 bp, Homo sapiens
gctcggtaccatgaggtccatgggaggggccccgggctggggggccgctttatcttcttatgccacacagcctggattactacgtctctgtctctgccgctgtctgtgtctctctccaca

SEQ ID NO: 20030 - DNA, 120 bp, Homo sapiens
tcccgtgggtcttggcaccagcggccactgatgttcttttgggggacaagattgctgtgcttgcccaccctccctgtaggccagggctaaaccttcctgtgtcctaggcccgcacaagtg

SEQ ID NO: 20031 - DNA, 120 bp, Homo sapiens
tggcgtgactgcccaccacgattgtttctcaaccatccagtatcaggcagacagcaaaaaacgggcttttctcctaaagggctttgttccatgtgcatgaacctattcggagttccatgt

SEQ ID NO: 20032 - DNA, 120 bp, Homo sapiens
taccgaagcttactgccctccagccttggcatccaggcaagcagatctcattctgcagccgccactgtgccaggtgctttgctgagccctgggctccgactttgactgtctagtatagaa

SEQ ID NO: 20033 - DNA, 120 bp, Homo sapiens
atgcggcagcctgactttgagcactgtgcaggggcatggtgtgtctgcataatcggaagcctcgaagggtggccgtgatgggtcaggaatgttcaagagtccagctagtatcatgggcca

SEQ ID NO: 20034 - DNA, 120 bp, Homo sapiens
gaacgagcctgggaaaggaaaacttggaattctgggaactctgcacaaggactggggtattttcaaacacggatcaaatgtctgtgaactccaagaattgggagctcgtctgcattggga

SEQ ID NO: 20035 - DNA, 120 bp, Homo sapiens
ggacgagtgttccagggccttagcgctctcctccagcagcagtgggcaagggccacactgtgagggaagacttctgtgttccacagttatgaagaactcacttctagatattctgctgtt

SEQ ID NO: 20036 - DNA, 120 bp, Homo sapiens
ggccgaagtggagccctggcatcagtgcctttttaaagttccctagtgatcctgtgtgcagccagaggagacatggggctgccagctgtggcgggaggatccccaccacactcaggaacc

SEQ ID NO: 20037 - DNA, 120 bp, Homo sapiens
aaccgcaggaaggctctgtgtaacgggatggtgtgcaagtgccagccttgcaggcgctgctcccaggtcaacccacctgcctgctggggcccacacagccttctcagggacatgactgtt

SEQ ID NO: 20038 - DNA, 120 bp, Homo sapiens
tttcgtccaagcccaccaccagatttctcattgtgccaccatttgtgttttggggacccatcacctgattctgcagggacctgggcctggaggtgccagtccatcttcaggatcagtcat

SEQ ID NO: 20039 - DNA, 120 bp, Homo sapiens
tggcgcctcaaggatcagcgcagcttgagccatccttgaagtggtttcacagaggttggggaagggggaacagagagccagagagagagcctgcctccaggagagaattacagcaagccc

SEQ ID NO: 20040 - DNA, 120 bp, Homo sapiens
tgtcgtctcacccagcaagcctgattttcttcctccatgaacagtggaactttttgcagttaaagtaagcttttaagaaaagagcttcgtaggaaaaaaaaaaaaagaggagagccactt

SEQ ID NO: 20041 - DNA, 120 bp, Homo sapiens
gaacgcctcaccatccccttccaggtacaaaaagccaaggactgggaggcctccccgtcctatggctgtgaatgatctattgctgaaagcgcaaacaggagatgtggggagagcacatcc

SEQ ID NO: 20042 - DNA, 120 bp, Homo sapiens
gagcgctggctgcccaaggacggaagggacaagcagccaccctcgctcccctaaaggagctgctgccagcaggttcaggatgagggaatgtgcctaagaggacaagcttgtaacagtaaa

SEQ ID NO: 20043 - DNA, 120 bp, Homo sapiens
tcccgtggctgatggtgtgcatgaggcactggtgtcccggcgacaataactggttgttccatcacgaatgtagatggaggaacacgccctccaggaaggcctggtgtagattctgcagac

SEQ ID NO: 20044 - DNA, 120 bp, Homo sapiens
atgcgcacacaggtgtgtcctggcactaaatcccgaggaatgccaccccaagaacagaaaggtctcagtgcatagatggctgctgaagccctgggtgcaagttacaccacagagagtgtg

SEQ ID NO: 20045 - DNA, 120 bp, Homo sapiens
acccgggtggatacaccattcacaggaaaggtgcagaaagagaaacccatgaaggagacttctagagtcctgggattcccttaaaacgatctgtaactccctgtcttcccaggaagatgg

SEQ ID NO: 20046 - DNA, 120 bp, Homo sapiens
aaccgcctgtactgttctgttccttcaatccagttggcgtatggtagcgggcacagcacacccatcccaacatcccagggcctccctgctcagtgtggtcctcaaaccagcagcgccagg

SEQ ID NO: 20047 - DNA, 120 bp, Homo sapiens
acacgtccctgcagggcaagctgccctttcaaaggaaccaccataagagatgtttgcatagccctgatcttcagctctttttctaaacctgcatagtaagttccaagccatatttctaac

SEQ ID NO: 20048 - DNA, 120 bp, Homo sapiens
aatcgtctcagcagaatttatgaacaagtccttcattgcttcactgaattgcaatgtcatccttatcatgtgttaaagttcccttttcactcaagcccagtctatttctggatttctgct

SEQ ID NO: 20049 - DNA, 120 bp, Homo sapiens
ctcgctttctaaaaaatgtacagatggcaaaaagtccaagatcacagcttgttggcctggaaaacagtttgtttccctcaacaaaagccatttccttctcttctgtttgctgatggtccc

SEQ ID NO: 20050 - DNA, 120 bp, Homo sapiens
ccacggccactcagcacaacatgttttcgtccccccgactaccactgcactgagttaccttagagcgaggaaggatgtctccctttgtggctctctgcatcatccaagcacaagctcggc

SEQ ID NO: 20051 - DNA, 120 bp, Homo sapiens
tttcgactcagaatttttttttaagctgttactacatgctttataatgtaaccaactaaaaggctgctaacggtgcagcatttttgaagtaatgcattctcaggatttcatatttagaag

SEQ ID NO: 20052 - DNA, 120 bp, Homo sapiens
ctacggttcttggcatctagcaagatgatcttccttttgtatcacgctgcgggatgacgatctgggtttcagaaagcggtaagtggctggttccgtggggttagcgatcacattgccacg

SEQ ID NO: 20053 - DNA, 120 bp, Homo sapiens
caccgccggacacggtttaataggaaaaaaatctcctatactgtatattcagaaccaaatgaagagaaatgtcaaaggagtcggaaacaatatgtcaaattaggtaaattcctgacctga

SEQ ID NO: 20054 - DNA, 120 bp, Homo sapiens
ccacgtccttaagatcacctttatctgagttagaaaacagatgacagagaccatgttttggctaatatatatgcttctgtcatacacctgctgaccggcagagtccctggaaggcagcag

SEQ ID NO: 20055 - DNA, 120 bp, Homo sapiens
atccgggtacagaccacagctgctacgtcttagctgtgtgaccttgcaaacgtctccaccgctatgatccttggtttcctcatcagtgaaagccgccatcggggccagggtatttactga

SEQ ID NO: 20056 - DNA, 120 bp, Homo sapiens
aaacgccgaatgtcctcacctgtaggtgggagtgaaataatgtgcacacatggacatagaaggtggaatgacagacactggaggcgtggaaggatgggggatgggggattgagagatgac

SEQ ID NO: 20057 - DNA, 120 bp, Homo sapiens
ccacgcaatatatccatgtaacaaagctgcacttgtacccatacatttatatgaataataataataaaaaagaaagcctgcttcaggatgccggggttcctggtgcagtgtccatccatc

SEQ ID NO: 20058 - DNA, 120 bp, Homo sapiens
gggcggggcatggaaggggaaggctgcacaacggactgacccttcacaagactggcgctggaactttacatttttgtgcaccatgttaacaaaagttattttgactttactgaagtaaag

SEQ ID NO: 20059 - DNA, 120 bp, Homo sapiens
caccggccagggagactggggaagaggagcctgtgagaacgcctgggatggtgaggatggagctgaggccagcgggaatgagcacgtcctcctgactctccttcagggagaaaacaagcc

SEQ ID NO: 20060 - DNA, 120 bp, Homo sapiens
atgcggccatggctcctgagttttctaacatggcagctctgcacagcgtccttcctacatttctggctgccttcaagctgttcgtggctcctgggcaggtggcagtcccccctgcactgc

SEQ ID NO: 20061 - DNA, 120 bp, Homo sapiens
aggcggtccccattcaccctgccacgatcttcccttctccaccctgccctcccttttctctctggttctgggggcctcatccacacagaacacttaagacaccctggtgtgatccctggg

SEQ ID NO: 20062 - DNA, 120 bp, Homo sapiens
ttccgtctccctctgcgtccactccctccagaggcatgcacgccatccttcttgtcctctgccactcccgtagggagcctccctctcgtctactggggctggttccctggccttccagcc

SEQ ID NO: 20063 - DNA, 120 bp, Homo sapiens
ggacggggtctaggaagctggtccctggggtggctcccagactcctgaacctgcgcaaacaagtgactcagccctgttctcgattgctgatggagccacctgaggtcacaagtgggtcat

SEQ ID NO: 20064 - DNA, 120 bp, Homo sapiens
ctgcgtgtcttgtctctcccctagaaaaacccccagccttctcctgtgtgtctagaggtccaactccagtgttatcacaggatggcataatcagggtctactacagacccctgctggact

SEQ ID NO: 20065 - DNA, 120 bp, Homo sapiens
ccacggagacttgtaagcacagggtctctggtccagcccaacgcaaatgggcacaggtatgatcatttccatcaagtggctgtctacagacttgggaaagaaaacctcaggctcccttga

SEQ ID NO: 20066 - DNA, 120 bp, Homo sapiens
ccacggtaacacctatttgagctcctcagctgctgtctccaaggtgacgcccagaaaccgtgattggagcgggcttctccttccacacctgtggtccctggggtggctcccagactcctg

SEQ ID NO: 20067 - DNA, 120 bp, Homo sapiens
actcggggacctggtgttgaaaatgagtcaaatggggacagatgctctctcttcccaagtccacgtgagatttcacgcggggaggagccacagcgtctggtattaagtaaaggaaaactc

SEQ ID NO: 20068 - DNA, 120 bp, Homo sapiens
actcggagcattctaggacaagtgttgaaagtaatccaaaacaaatataaaacaacttgcaacgcccctcactggatctgactaacacgggcagggctggtttaatatttttccataaaa

SEQ ID NO: 20069 - DNA, 120 bp, Homo sapiens
aggcgcctgacactcagaggaccattcgaattaaatccgagtcattctcaactgagggttacgcatcgcagtctgttgacattgttccatccttgatcattccccagagagagagagacc

SEQ ID NO: 20070 - DNA, 120 bp, Homo sapiens
tcacgtgagctagactcaacgctcttgtaaaaggaggaagagggtgtttaaagaaatggaagggtttaaacagctgctcacagctttataaaggatagcatgcctctcccacccagcctg

SEQ ID NO: 20071 - DNA, 120 bp, Homo sapiens
catcgctgtaggcccccaaacatgggagacacgatatgccagttgtaggtcaatgggttttcagtgacaaggacaaggagaaggttgcttatgaatgcgtgtgggtgggaggtgcacggt

SEQ ID NO: 20072 - DNA, 120 bp, Homo sapiens
gggcggaccacatgcagcggcgagactcagtgcagccgggacactggcacatgtgcctgttgctccgaacgaggacaaggggccccactgcgggccccagagaatgcatccaaccttctg

SEQ ID NO: 20073 - DNA, 120 bp, Homo sapiens
taccgggcagagtcaccaaatcttcgcgcaccacctgtattattatttacctaatatacttcttaattacacactcatgttccctcgcccccttaaattgatgtatttatcaaagacact

SEQ ID NO: 20074 - DNA, 120 bp, Homo sapiens
tagcgcatcactcatgtgtctacccctgggcagtgattctagactatagtgtccatcagagttgcctaagggcttgctaaacactgactgctggtcccaccctggagccggagagtgtgc

SEQ ID NO: 20075 - DNA, 120 bp, Homo sapiens
cctcgtcagtaagagggagacaacagtctcacctcctggcagcgctgtgaggacaagtcagataaggtatgaacatgtaaacacagtgttgagcacatgctgggtgctcagtacttgtgt

SEQ ID NO: 20076 - DNA, 120 bp, Homo sapiens
tgccgggctggctctggactgggacagcatgacggggacttgttaaagagtgcacctgctctcatcttgctgccttaagttgcacccacaacatgtggacttgggggagggaccctgaga

SEQ ID NO: 20077 - DNA, 120 bp, Homo sapiens
gcacgaggccttgagttcagtatgatgcagactagactcagccttccatttctagagggagatgtcgttacaaggagactcaggctcgccactgttgggccttccctgtctctcacctct

SEQ ID NO: 20078 - DNA, 120 bp, Homo sapiens
ggtcgccacccaagttcaaggctcagagaggtctggttgacactgccacacagcacacagcaagtccctcccagcctggcggcccaaagtcctccccacactccctgacttcgccctgca

SEQ ID NO: 20079 - DNA, 120 bp, Homo sapiens
cttcgcacagcagcctcaggtcgttcagaaatcacacacatcacagtatactgctcccctgctcacagccctccctccagtggcttccaacatcccagagcagcctctgttcctcctcct

SEQ ID NO: 20080 - DNA, 120 bp, Homo sapiens
tggcgacctgagagcaccctgctagcccctgcccccgggcctttgcactgactgttcccagctctagactccctctgccacccagacctttgcaagaatgggtccaaatgactgccacag

SEQ ID NO: 20081 - DNA, 120 bp, Homo sapiens
cttcgtgtctaatagatgcctggcgttgtgtatggtttgttacacacactctctcaggggtcctcagcagcagcagcagcagcagcagcacccccaggggctgttagaaatgcacattct

SEQ ID NO: 20082 - DNA, 120 bp, Homo sapiens
ctgcgctatctcatttcatctccacggccacagagcaaccttgttattatcatggtcctcattttacaaacgagcaactgagccacatggaggtttttgttttgttcaacagaggcaaat

SEQ ID NO: 20083 - DNA, 120 bp, Homo sapiens
atccgagacttacatcaaataaactcaacaggctttcatcaaaggtagagcattcactatgcttaatagtgaatgaagaaggaagaggaggaggcaaggggacgaagggaatgagttggg

SEQ ID NO: 20084 - DNA, 120 bp, Homo sapiens
tctcggttatgaagatacagaggtgtttcatgctggctggcacaaacctctgccctgagcccccaccctaggacccccaagactgccccaagatccagcaagcacagggttaacatgagt

SEQ ID NO: 20085 - DNA, 120 bp, Homo sapiens
ggccgaactgcctcaaccatccacctctgttcttaagcccatcagcacccaccacaaggcggacgctgacatccaagaggcagctcagtttaaattaagaagttgagttatcatctctaa

SEQ ID NO: 20086 - DNA, 120 bp, Homo sapiens
caacggagcagagagggctccctgcaatgcaacttcagcacagagattgtgaaaaccacccgcaggcgaagggagggcagggcagccaacttgaccgtttctaacccactcacccaccac

SEQ ID NO: 20087 - DNA, 120 bp, Homo sapiens
cttcgaactaggacaacctcactacttaaccaacaaagccccccaagtctgagactcagacattaaaaacttctattttcaattatttgtcttctttctgtatattgatcaaattaccac

SEQ ID NO: 20088 - DNA, 120 bp, Homo sapiens
atgcgtatgcacgtacagacacattctttaagaaatgtattaccagaactggtaggaactcttctcagcacgttacccacttgaaaacactagagagaaaccatagccagtctgtgtagc

SEQ ID NO: 20089 - DNA, 120 bp, Homo sapiens
tgccgggttttaaaagtccatatctctgtgtttttaacgtgcagctccctggatcatagataccttgatgaagacagagaagaaattttacacctgtgtgagggttgggtgattactgga

SEQ ID NO: 20090 - DNA, 120 bp, Homo sapiens
cttcgggtttctcatccatctaggggattttccttaattgtcgggtttgattttaaatgaatgcctgtacaaccggaaatcaactccagtacaaaaaataaagtcatgtggaatttttga

SEQ ID NO: 20091 - DNA, 120 bp, Homo sapiens
atacggtaggatccatatctgagttgttataatgaaaaaagaattcctgcttcttaaatttaaaaattataaagtatacattttagctttgttaacattgctcagcctaacattaaaacg

SEQ ID NO: 20092 - DNA, 120 bp, Homo sapiens
aagcggccccgccccagatggcacatgataacgaccagaggagaagcaggggccatgctcccctgtcacctggggtgactttctggggaagacttacttgggtgtgcctgtgggtttcca

SEQ ID NO: 20093 - DNA, 120 bp, Homo sapiens
gtccgtctgcattgaccaggtgagggaggtcctggtagggaatgctctgcggggtccgcctgggggaactttcctctggcatgctggaagggtcttcaggtcctagaaggaaaagtgaca

SEQ ID NO: 20094 - DNA, 120 bp, Homo sapiens
ctgcgcgcgaccggcttcgcggcgacagggtgcggcgtctgcgccgccactttatccctgggccggctcggcggcgggggcggcccgaggtgggtggggacgcgcgggacccggcgggcg

SEQ ID NO: 20095 - DNA, 120 bp, Homo sapiens
cggcgggcggcgcggggaggcggcgcccggggcccacgtgtgcccggcccgcggggaggagcgggggcgccgcccgccgacccagccacgcactcctctcctccgcgcctcgtggacagc

SEQ ID NO: 20096 - DNA, 120 bp, Homo sapiens
agccgcgccccggggtggccgcccgaggactgtcagggaggcctgaactgagctgggttcatgggagcctcagcgcgggaggacacaccacacccacgggcacacgcgcgcacacagacc

SEQ ID NO: 20097 - DNA, 120 bp, Homo sapiens
acacgtacacagacaactcgcgcagggccgcacactcaccacacgtgtacacatgtgcactcccaaagtcactacactgcacgcagggacatacagacacacatcccagagataccacat

SEQ ID NO: 20098 - DNA, 120 bp, Homo sapiens
caccggttttaaaattaaacgtgtggcaaaagtgcgtaacctgaatctaagcaggaaaaatcattagacaagcccaaatagaataactctataaaataactggtctgcacttttcaaaaa

SEQ ID NO: 20099 - DNA, 120 bp, Homo sapiens
ggacggcgttaggacttaggcaaattttaatatgggttgtatatacaataatagttttgttactgatgttaaatgtctcaattttggtaattacaccatagatatataaaagaatatacc

SEQ ID NO: 20100 - DNA, 120 bp, Homo sapiens
actcgacgtctgccatctgtctgcactgacacccacagagaggtccactgtccttggttcttggttgtgtgagggctccctatgtgcctgtctgcatgggcccccttggttcagtggctc

SEQ ID NO: 20101 - DNA, 120 bp, Homo sapiens
cctcgctgttcagccacactatgaagtcgttgctgcccactgggttctggctgcctccctgtgacccttctcagcaagggagacagccattccttctctccttagatcccacaagcctcc

SEQ ID NO: 20102 - DNA, 120 bp, Homo sapiens
tgtcgcccaaatgtttcatgcatgccagtaacgcgtggctttcctgaaagggcctggacttctggaatggaacgtgttaagaggagaccatttcctccattccctccttgttttccaccg

SEQ ID NO: 20103 - DNA, 120 bp, Homo sapiens
gaacggattagaggaacaaagtctcctaaaggaaatacatgatgaaggaggatggaaagaagcagctgatactttttaaaaaaatcactccacagacaacatcatgcagcagcagaactg

SEQ ID NO: 20104 - DNA, 120 bp, Homo sapiens
cttcgtgctgcggcaggctgttttggggattgaatgaagttgcttgtttttcatttaagagccagggtttatctaatgaggaaactgcttaagccaagttacagacttggctcaagacaa

SEQ ID NO: 20105 - DNA, 120 bp, Homo sapiens
agacgtgtattcctccttcaaaaggtacgaatgatatggagtgggagtgggtgtgtggaaaaaaaaatggtttctgtgtcaataaaaagctgcccagagtctagtcacaataaaagggag

SEQ ID NO: 20106 - DNA, 120 bp, Homo sapiens
ctccgtgtgccctaacccaactccagtgactcgcatttgacctctttgcttccacttgctggtcttctggaggagctgtaatacaaaccagcctagtaacatttctcctggatctcacaa

SEQ ID NO: 20107 - DNA, 120 bp, Homo sapiens
tctcgctaccacagtgccacattgaaagagggcccaggaacagcagagctgtgccgttaaccgaggccagtgtgtcccctccttggaaacgctgcagctcaaacttggcactgtaatggg

SEQ ID NO: 20108 - DNA, 120 bp, Homo sapiens
agtcggataagagagaaggcagctaaaagcctcctgagttagtttatagcctcagtccctggattcaaactgagacaggaaacaggtcagtttatatcagcaaagagaaaaaaagacttt

SEQ ID NO: 20109 - DNA, 120 bp, Homo sapiens
caacgtgtcaggcactgggctaggtactagggatgcaatatggaaaacgacaggccagtgagcaagataggaaagcaggtgatggtgaaaataccacctgactgatgcagtgataggcaa

SEQ ID NO: 20110 - DNA, 120 bp, Homo sapiens
agacggaacaagggaaatacgtgcaaggtatagcagtggctcaggaagggattaactctgggagacatgatgtcttatggtggttttgaaggagaaatagaagtctccttgaagggacgg

SEQ ID NO: 20111 - DNA, 120 bp, Homo sapiens
agccgccagaggctcatgttccattctgcagcagggcattgagtaatgggagccagagtttggaagaagtgatttgctctgcactgaaaggcagagagagcagctaggtgcgtgcagcag

SEQ ID NO: 20112 - DNA, 120 bp, Homo sapiens
gctcgtgtttgggacctggctgacacgagatgcattcaggaagggctgtgccccatggcctgcatgtgggcagtgagtggtgctagagggagagcctagggaggggcagggagagccaca

SEQ ID NO: 20113 - DNA, 120 bp, Homo sapiens
ggacggcagctttgcagctgtgcctggagatgttgcagcttggcttgggacaggggaggctgttgaatgagattctacaggcagagacagtaatcactgctgcttccctgggcagcagga

SEQ ID NO: 20114 - DNA, 120 bp, Homo sapiens
aaccgtggggaaacaggccagccttgtcacacaggaccaaaaggtggaaaggatgggaattgacgaaagaccgccacagggtgagatgaggacatgatggccagttaggatatggtgtct

SEQ ID NO: 20115 - DNA, 120 bp, Homo sapiens
tctcggaatggtccaggaagatgtagcaggtggtcctagctatcacgtgttagaaacttgggaacagtgcttttgagttctttagtttcaccttttcctagattcacttgctttttagtc

SEQ ID NO: 20116 - DNA, 120 bp, Homo sapiens
cccgcccccagcctgctcctgctgaagccaggccagcatgaagtcctcaggaaggctgggatgagcctcccatctcatttctgaggggtctgagccccatggcctggggaagagcaacgg

SEQ ID NO: 20117 - DNA, 120 bp, Homo sapiens
gtccgagagtcagcaaaagccccaacctgagcttcagcacctaccaatgcctggttctggagagccaggtgtgcccctaagtggtagtgcccacctcactcccctgccccaatcccttct

SEQ ID NO: 20118 - DNA, 120 bp, Homo sapiens
catcggagggggctgaataaattacagcagctcctccctgtggaaaggaactaggaggacattctttatatgttgagttagaagaatctccaagatatgctgtcaaggaagaatacagaa

SEQ ID NO: 20119 - DNA, 120 bp, Homo sapiens
tagcgtatgctaccatttgtgtttaaaaggggggtaggaagtgactaatagactacatcaggaaaaggtgtagcaatttcccataaaactagacatacacttaccctacacccagctatt

SEQ ID NO: 20120 - DNA, 120 bp, Homo sapiens
caccggtgtaaggcaggcgcttccggaaagggaacaggaggcagggggcaggtgtcgaggtaggttttcacggtacacgcctttggcaattttgcatcaaaaaactaagtgtatgcacat

SEQ ID NO: 20121 - DNA, 120 bp, Homo sapiens
ccccgcatgcacggggggacacacgccttcctccctgcctgccgggacttcaacctcgcttgctgggaagtcgcgcactttcgtcgcgacttcccaagtcgtgctgggtgtgacttggaa

SEQ ID NO: 20122 - DNA, 120 bp, Homo sapiens
tctcggatccctgggctaggcctggccacgcccccatggggggaggggcagcgcggcgggggcggagcctgggcccgaaacgccacgggcgcgactctgtgcgcgtccgcccacacgggg

SEQ ID NO: 20123 - DNA, 120 bp, Homo sapiens
gggcgctgtgtcctcgcaagctcccgcggggtgcctcgcggccctggaacgctgtggttttcgaggggaaaagtgagagtggctggtcctgcctccgctgccgcttggccctgagatccc

SEQ ID NO: 20124 - DNA, 120 bp, Homo sapiens
ccacgggataggccccagtccacccagccggggccccccccttcccctcgtctcgctctccttggcagttcggacttcgggtcagtcccacactcgcgcccggctgtccctgctgcgctc

SEQ ID NO: 20125 - DNA, 120 bp, Homo sapiens
ctccggccccctctctgcacacctggcacacggctcctccctggcggcatgtgggtatttgggttgggcgagcctctccctcccgattcccgagttccgagtgggtcccggcggaccagc

SEQ ID NO: 20126 - DNA, 120 bp, Homo sapiens
cagcgctattctggaggggcagtgcctcagaggcaggtcgcttcgagtggggatttgtgcgctctggcgcggaggaggggggtgggaagccggctcttgccctcctcacccggtggggag

SEQ ID NO: 20127 - DNA, 120 bp, Homo sapiens
gagcgagcagggccaacggtgcgctgagagcgctcagggcgtccccaacagcatgacccgacccagggacgaagctctgggggacgggaccacttgcgatgacagctaaaggagcacagg

SEQ ID NO: 20128 - DNA, 120 bp, Homo sapiens
gggcggccggcatggagaggcggggccggcattcctgcgggcctgccgggagggtggggaacctgggatttagccatgggacctgtggaagggttttgggtcggggtcctgaccgtctag

SEQ ID NO: 20129 - DNA, 120 bp, Homo sapiens
gaccgaagaggctggtggacctggtggctgaggcctaggccaggcagggatcgcggtggggaggtcacagtaggtgtggtccctcctccccccacccctcaggcctaagtcactcaggcc

SEQ ID NO: 20130 - DNA, 120 bp, Homo sapiens
tcacggtggcaccgggacctccacccactacatacacacgcgcgcgcgcagccccgtgaaaacctgcgccgtgtgccccagacctgcagcccgcatcccgccgtgtcccccgttccctgc

SEQ ID NO: 20131 - DNA, 120 bp, Homo sapiens
atgcggctccagtgtaagtgcagcgtgccgtgtgcggcgtcccagcccgcaccccgcaccccaccatgtccctctgggtgcggggtccgcatgcccgcgccctccccgcagctgccggcg

SEQ ID NO: 20132 - DNA, 120 bp, Homo sapiens
tcacgcggcgctgacggcgctgatctgcgtgctggcggcgtgacggtgacggtgacggcgggtgacggagcgggcaatcggcaggcgcccatcggcccatcttatcgcggcggcccagcc

SEQ ID NO: 20133 - DNA, 120 bp, Homo sapiens
agccgccgcccgctgcgcgccgcccattgatcgcgccgggcccctgcccgggggtcagcgcgggccgggccggcctgacagccgcatccgtcgccgagacgcgcgctgatggccgcccag

SEQ ID NO: 20134 - DNA, 120 bp, Homo sapiens
aatcgtgaaagcgtctgtctcaggctgctcgaaaatggacagttcataaatgagatctttaatcatttaataacctgcagggatagtttatgagggtgtcggcttggattgcagagtaca

SEQ ID NO: 20135 - DNA, 120 bp, Homo sapiens
tatcgcctgggccagcgggaacaaagccacgagtcctgagagaaagcctgaggagaggccctcctgacagagccaagacagccccagcccagagttggcctggcaagtcactgtcctaga

SEQ ID NO: 20136 - DNA, 120 bp, Homo sapiens
gttcgaatggcggcagcaagggtgaactagctctgagtggcagtcctggctctgctgcttactctccacatagccacaggaccctcgttcttggagcctccaacactggctattgcgaag

SEQ ID NO: 20137 - DNA, 120 bp, Homo sapiens
gtacgtagaggaccctagagggtacctatgaagcacacaaagctatgaatacagtaataacaacagcaatgggaaggatgggagggcccgttattgccaatacctcacaaatcctaatga

SEQ ID NO: 20138 - DNA, 120 bp, Homo sapiens
gctcggtgagatgcaccaaattgctcaagtcattcagtaggcaaatggtgtctctggccctgaacacatctgtgctgggctgccttttttggcaggacacatggggttttggacccaaca

SEQ ID NO: 20139 - DNA, 120 bp, Homo sapiens
tcccgcagtaagaatgggccagttttccaagaattgcctgggactgtttctgcttctgcctccgttcagtgaatgccttggcttcaacctggcagtcacccttgcaagtcacctggcaag

SEQ ID NO: 20140 - DNA, 120 bp, Homo sapiens
ttacgtggcgatgaggcccccggccattgacaccatctcctaggtaacatatacaattgctactatgaaccataactgcttcagtaatttgccaatgctggttacaaagggagatctgtg

SEQ ID NO: 20141 - DNA, 120 bp, Homo sapiens
atgcggtaagagatgctggcaggcccaggctgggcctccagccacaggagagcagcagaagtgccaggaaaggcccaggagaggccctgactgctccaaaggaaaggtcctgctcacaaa

SEQ ID NO: 20142 - DNA, 120 bp, Homo sapiens
agacgagagatgccaggctctgcaggtatgggctgggctgggttccctactgtggagggagggaagcctattagcagagctccccagcagggggcaccatctgtccaaggctgagccctt

SEQ ID NO: 20143 - DNA, 120 bp, Homo sapiens
tcacggacggggattcagagtagctacaagatgctgccacatggacttgaatcacgcattcgattcctaattgcaagtgaaagaaaccgcctgagggggaagggctgttgctatactgca

SEQ ID NO: 20144 - DNA, 120 bp, Homo sapiens
cggaatgtgtgggacctgacagacacaggggaatccaggctctgcgaacctctgctgagcctcgtctcctctctccataatggagatgaaggcgcctcccattcacaagtgtagttattg

SEQ ID NO: 20145 - DNA, 120 bp, Homo sapiens
gaacgcatataactatttcaggaagtgtttggacccaagatgaagaactgctcttcaagaagcaaccgtggcctggctagacttgggcaatggcatgaccctgtgggtattgcccccacc

SEQ ID NO: 20146 - DNA, 120 bp, Homo sapiens
caccgcctttctgcgagggcctgcaaaacggggcccttgtccacgtgtgtgggtcagtgctgtagccaggaggaaggcctgagacagtgtgtctgtgactctctgctgtttgattgtgtg

SEQ ID NO: 20147 - DNA, 120 bp, Homo sapiens
tggcggtgtgaacttggtcaagtcaagtagcctccgtaggtctcagcccccttgtctgtaagttatttccatgccatagcattgtgatgaggatgaccatgggaagcacctgggatgttg

SEQ ID NO: 20148 - DNA, 120 bp, Homo sapiens
ggtcgatgcagctttgtgcttcttgcctttccatgccatgtgggagccacgggtggcatgttgcattcagttagtgaccaggctgcatcttcagagcccaggcatccctgtcaccatcta

SEQ ID NO: 20149 - DNA, 120 bp, Homo sapiens
caccgctgcctggtaacggggctttggcaagtcaggctcttggcatctccatttttaacagggcacttgtaaccaggacatcctcatgagcacagcagagaactgttcccgggctctcat

SEQ ID NO: 20150 - DNA, 120 bp, Homo sapiens
taccgtaaggacatgctgctctctctctccctctcattgaggcatagagtagttgtttggagagcacgttaaccaactgttggtaagaacagctgtgtgtatcctgtctgctttgaggtt

SEQ ID NO: 20151 - DNA, 120 bp, Homo sapiens
aaccggggcacagccctccctctatgctgctcagtgccatcattttcccctcccatgacatacgacagcagggagttgagtggtttgtttcatctcttcttaagaaaaagttaaatttat

SEQ ID NO: 20152 - DNA, 120 bp, Homo sapiens
ccccgaccttccttgtaactcatgtgctcatcctgttaactggtttaatatatggcaccactatttcattaaacaacatacaggaataattagttcagccacgatgcctcagaacaaaag

SEQ ID NO: 20153 - DNA, 120 bp, Homo sapiens
agacgttctggcaggctgggggttagagttttccaagcagagccagtaaccctttggtaccaggcctcaatagggcagcaagggccccgcagaagcagtgcgtgctgctggctgggggac

SEQ ID NO: 20154 - DNA, 120 bp, Homo sapiens
ggacgacagccagcattcccaggaggtctgtggctgtctgctgccaggccaggagaacccgtgggttttcttccttcatacacacggtgtgctcacatgcagtgcgtccccagacttgta

SEQ ID NO: 20155 - DNA, 120 bp, Homo sapiens
ctccgccccgctgctggagctcagacgctcactctggcctttcctaccctcagcgtgtgcttggtgctgctgcatgccaggcacactgtgagaactgtggacatgctcagggatcagcac

SEQ ID NO: 20156 - DNA, 120 bp, Homo sapiens
tggcgtcctcttcctgtcattacagtttgctccgatttgctctgtgcccagagtctttttccccatcagtcctctttccacccgggctaccactggagtcgttctgacctttgtacttca

SEQ ID NO: 20157 - DNA, 120 bp, Homo sapiens
tcacggtattcatctgccggcagaggagagttccagctccttggcctgaccctcgggctttgcactgcctggctcctgcctcagctgcagccatttgtgctcacgtaccattctctcgcc

SEQ ID NO: 20158 - DNA, 120 bp, Homo sapiens
cgccggctgctgaccagttgggccctctgcaggcctcagggcctttgcccccttcagccttctgctccagctgctccgtccatccacaggcctggcacagatgtcccctcctctctgagg

SEQ ID NO: 20159 - DNA, 120 bp, Homo sapiens
ggccgtcagcctgccctggcccagcacttgctggtggtgagactgcatgaagcttgcatggcgccctcccgtgatggactgctgtgaggcaaggggggttagaaagggttcagccaatgc

SEQ ID NO: 20160 - DNA, 120 bp, Homo sapiens
gcccggaacatagttgttgctcgactagtggcaagtgctgtcctttgcaaagttttgctgggacaactttctcatagactgtgttccagctggttttttaactgaggtggactgagtgac

SEQ ID NO: 20161 - DNA, 120 bp, Homo sapiens
acccgttcctgctccagcacatgatgctcttctccctgcacccttcacccaggacagcagaaggtacaggacccttggttctctctcctaattaatggcagagacccagttagaaatggc

SEQ ID NO: 20162 - DNA, 120 bp, Homo sapiens
tggcgggcccctccctaacctctccacagccatttgtaagtccagcgagactgcggactgctgtccctggtggccctggttgcaagcagctccctttgtaacaaagtcagtgtcacctat

SEQ ID NO: 20163 - DNA, 120 bp, Homo sapiens
tcccggaagctttctcactgttgctaatccttctgaagggcctgggtcagctcactgcctttggagccctcggttttcatctgataaaatgggggtaacaatcctgtcttgaaggactgt

SEQ ID NO: 20164 - DNA, 120 bp, Homo sapiens
aggcgttgggagtgggctgccagccccttccctcatctgcctgcaccgcatgagcctgacacgtgccggagtccaggcctgaaaacccaaggggctgggccccctgagctccatgcccgt

SEQ ID NO: 20165 - DNA, 120 bp, Homo sapiens
ccacggtggcattaccacttccaatttttcaagaaagcctggatatctgtatttttacatgaaatcttcccattctcagttgggccacaatgtgtggtctctgtgttggcaccaggtcct

SEQ ID NO: 20166 - DNA, 120 bp, Homo sapiens
tgccgtctcttcctcctgctgcagccttcaagaggaggccatcgccctgtttctcccaaaggcactgtgaggctcagaggagctagatgactggcccaccagaccctgaagttcccaatg

SEQ ID NO: 20167 - DNA, 120 bp, Homo sapiens
acacgatgagccctgaggttgtggatattgttatgttcccataaataacaggccctcagacaatgggctgtgaggctgtgtgttcctctggggtttgaaatgaaactggctttcttctct

SEQ ID NO: 20168 - DNA, 120 bp, Homo sapiens
cttcggaggcagccagacctgtgttggaatcctggctagaatgctaccctttctgaaaatcccagtttcctcatcagtaaggtgggttatcttgaggactttccctcctagctttttaaa

SEQ ID NO: 20169 - DNA, 120 bp, Homo sapiens
ctccgtgttgtcttgtctgctttgtttgtgcgccgagccgactgagggttcctcctggtgctgctgctgtgcctgcaccctcagcacatgtccccgaggaacaaggacattctcctgcag

SEQ ID NO: 20170 - DNA, 120 bp, Homo sapiens
caacgcagttaccactggagaaatgtgacattgatgccacattgtctaggatacagtccattttcagattccccaactgtcgcaatagtgtcttaggaagttttccatgcttgaggagtc

SEQ ID NO: 20171 - DNA, 120 bp, Homo sapiens
ctgcgctcagtgctgccaccaatagttttacaacactgatgtttttgaagagcccaggttggttgtttcccagtgcactctttgggtctgtctgatatttcttcatgactgggttcaggc

SEQ ID NO: 20172 - DNA, 120 bp, Homo sapiens
ctgcgcttctcaaccccactaggtggctcctggggcgctctgggccttcagggagaatggggattctctgggcagctgggtccagggaaggtacccacagggaagttggggaatagcagg

SEQ ID NO: 20173 - DNA, 120 bp, Homo sapiens
acacgaggagtccctcagcccctgccctcaagtttgagaaccacatacttcccagaaagtggaggctagcatggtgagggcaccctgcagagccatctgccatcccctgcacccacagac

SEQ ID NO: 20174 - DNA, 120 bp, Homo sapiens
aaacgttcctttatttggtctccagacagacgcagaggcctcccttttatcccagtaatcggtgcattatgctttaatttgcaaatggcattaaaaatattaacaggggcaggtttcgat

SEQ ID NO: 20175 - DNA, 120 bp, Homo sapiens
agccgtgtgtgtgtgtgtgtgtgtgtgtcccgtgtgcacgtggtgggtggggaacaggcagttaattaaatacaccaacagcagagcaaagcccccgagctgcaaggataccagcgatgg

SEQ ID NO: 20176 - DNA, 120 bp, Homo sapiens
tggcgactggcccagccacccttcgtcaaccttggcccagacccaggcagcagggctggagcagcagtcaagggcaacagctgagagccatggggaagtggggttcccagttcagtcccc

SEQ ID NO: 20177 - DNA, 120 bp, Homo sapiens
gaacgtgagagagagtgtggccccggtgagcgtggcctccgcggctgctgcaggctgcgggtgccagggcggcttgtctgcactgtgaatcaggacagccctctgcctaggagccgactc

SEQ ID NO: 20178 - DNA, 120 bp, Homo sapiens
tgccgctgcctgagcagacacttcctgggactgcagtggcccctctccctggggcctgaccccactgtgtgctgtgccccgaccccactgtgtgctgtgccccacggcctcctcacccta

SEQ ID NO: 20179 - DNA, 120 bp, Homo sapiens
ctccgcccaggaaactggcagcagctttgagcccacaccaggctccctgctagcctgctggtcccccaggggagggcagcccaagaagggagcagacctccaggagggcttcagtcagca

SEQ ID NO: 20180 - DNA, 120 bp, Homo sapiens
ggcgcgcggcgcctgggttctcatcaccacgggcccagtgctcaccgtgcgcggggctgtaggagacgcgcgcccgcgcgtgagcggggttggcatagtaggggttgccctgcgagtcga

SEQ ID NO: 20181 - DNA, 120 bp, Homo sapiens
agacgtccacctcgtctggaggcagcagctgcgcgggttccatgtagttgtgcgccaggcccgggtggtgtgagtcggggtgctgcgcattcagcacggccgggtgcgccatccagcgcg

SEQ ID NO: 20182 - DNA, 120 bp, Homo sapiens
gctcgggcgccacctccatggccggcggcggcggctcagggtctgggtgcagacggcaacggccctgcgcgaggaagggggagtgaggcgtgccgccagcgcctgacaccccccaaagtc

SEQ ID NO: 20183 - DNA, 120 bp, Homo sapiens
ccacgaggtgtcccgcacgccacggagccccagcccagatccggcgagaaagagcaccagtcccgggtgggaggaaagcccaaggctcaaaacgaaaggaaggcgggggagggggttcag

SEQ ID NO: 20184 - DNA, 120 bp, Homo sapiens
ccacgcacactcacgtggtgacccgcggctccagaatcacacacccgtgcacatggggtcacgcccggggacgggtcccgacaccagtgaccccaacaaacgcacagagcagcacttcag

SEQ ID NO: 20185 - DNA, 120 bp, Homo sapiens
ccccgcccggtagacaaacacatgaacacagactcaaaagttggagacaggcgcccgggcacccagtgtggcacttgatcccagcgacacgcacacacccacacttggcgccagatacac

SEQ ID NO: 20186 - DNA, 120 bp, Homo sapiens
ccccgaaaacatgcacacgcagccccctgagcgcagtactaagcggcacaatcaggacctctcaacaaagcacaccaaagcagtcgcccgcagcctggccccccgccctaagtcccccca

SEQ ID NO: 20187 - DNA, 120 bp, Homo sapiens
gagcgccccaggcccccagccggctctcaaaccccaaacttacacacgcagccgtggggaggggagggactcggcctctgagagtgaaggagttccggcgggagccccgagggcgacggg

SEQ ID NO: 20188 - DNA, 120 bp, Homo sapiens
gcacgtccggaggctggcggggcttacagggtaggagctgggggtagagtgcgcctcggcctcgggccctcccggctccggcccctcggcatcctccggccgccctggcgccagctgccg

SEQ ID NO: 20189 - DNA, 120 bp, Homo sapiens
aagcgggggccgcgcacgcctaagaagcccaagccagccaatcaacgccgcgcgcctcccagcctccgcctcccattggctgcgtccgcaattcccgaaccgctggactccgggactgac

SEQ ID NO: 20190 - DNA, 120 bp, Homo sapiens
acccgcgggccggcccccctcagccggcgggccccctccctgcgcgctcctggcggcccctgctgccaacgcgccccaccactaagggaccctcaccccaaggcccgacccctgcagccc

SEQ ID NO: 20191 - DNA, 120 bp, Homo sapiens
ttgcgaacactccgggatccctcgatgctctgggcctccctagcagtaactaaccaccaactgccccctccccaggagcccgggccgcacaccctctggatggcctctccccgagaccct

SEQ ID NO: 20192 - DNA, 120 bp, Homo sapiens
ccccgccacgctccttcaccgctgaacgtggtcagtccgagcgcagttacctacccagaccgttccctcccctagctcgggcgctgtctgggtggactgggggttgggatggttcggacg

SEQ ID NO: 20193 - DNA, 120 bp, Homo sapiens
cagcggcggaacagcaggagccgagaggggcagagaggggcaggaactacagggctctagagggcacctgggcctcggacacgcggccgctcagggctgtgcttgacccagtggaggtgg

SEQ ID NO: 20194 - DNA, 120 bp, Homo sapiens
gcccggccggtggctccagaaagggggagggggcacccctccccgggcgtggccttcgcaggccaacgggcccaattgcctggggcgaggccgtggagacccggactggcgccggcgcca

SEQ ID NO: 20195 - DNA, 120 bp, Homo sapiens
agacgcccccgggcaagaggtggcattttttttcctccggggggggtccccgaggtggcctctggtgagggggaggcggtggtctgaggtctccgtcttctaagtcacctggaagtgctc

SEQ ID NO: 20196 - DNA, 120 bp, Homo sapiens
gcccggagatcggctctatggttcgtgtgggccgggcgcacaagtcttcctccctcccattgtacagactggggagacggaggctcgaagggagccccgggccgaggagggaggtccagg

SEQ ID NO: 20197 - DNA, 120 bp, Homo sapiens
tgccgagtactggggggactcaacagcgtcctccagccctcttccctgttgggcccgaggctcccggggtagatgtccagagggcccccaggtgggtcgggggcaggaggagggctgggg

SEQ ID NO: 20198 - DNA, 120 bp, Homo sapiens
tcccggccacccccgggagagtgggggaggggcggcgggattgacagtcggtaattgggtaactggaggcggcttctccggccgggcggccccgccaccgcgacgccgagcccctgacgt

SEQ ID NO: 20199 - DNA, 120 bp, Homo sapiens
acccgattcgccaggaaatgaactttttaataatccgaggagggaggaaagccctcggtcccctcggctccgggggcgcccggctgggcccagctccgcgggcgcgcccccgtcaccccc

SEQ ID NO: 20200 - DNA, 120 bp, Homo sapiens
cagcgccaaggggccgcgggctcaggctgaggcctcctcctgcctaggcgtctggcgtccgtttgtctgtccgaggcctcagcgcaggtaaagcgcggggctggggggcgcagagctcca

SEQ ID NO: 20201 - DNA, 120 bp, Homo sapiens
cagcgcgtctcgtgcccttgggggacccgcctgcccgagccgcctgctaagcctcccgctcccctccacgctggagcgcgcggagcccggtctgctcggaactccactctgcgggagcgg

SEQ ID NO: 20202 - DNA, 120 bp, Homo sapiens
cctcggcctgggaatgtccctgggaccccacaggacctgacccggagccaccactagaagccggagctcccaggccagggctgcgggaatggccccgggtcctctgcccagggcctgcag

SEQ ID NO: 20203 - DNA, 120 bp, Homo sapiens
cagcgggcgactttggccgctgcagagaccgagatacgcggggtaacagcccgttccggagccggtcatcaggcgccaagccccgctgggctcctcgcagccgcgggacctttctccgcc

SEQ ID NO: 20204 - DNA, 120 bp, Homo sapiens
tcccgaggctgagtttcctgaacgggaagctgccggcccgcggggcagccgggagcagccagggcgtgaggacgtgggttcccgtcacccccggcttggaacagcagcgccgcaacaacc

SEQ ID NO: 20205 - DNA, 120 bp, Homo sapiens
aaccgctggcgttcatcgagcctctcagcagccctgcgaggcgatcccggggagaatcccacgccacagccgaggaaactgaggcaggcagggtgacacacagcccagtagtggcgggcg

SEQ ID NO: 20206 - DNA, 120 bp, Homo sapiens
gggcgcccaggctgccaccgcgctgaggaccggcccctctgccagccgggaggtgcgcgtggcctaggcgggggcgccctctggcggccgcgggttccaatccctgccggcctcgcaggc

SEQ ID NO: 20207 - DNA, 120 bp, Homo sapiens
gatcgggggacagtcagcaaaattatggactggatgttggtcaacagtactaattaactggccagttaatagtattaactaactaatggacaattacattacccattctttgaggaagaa

SEQ ID NO: 20208 - DNA, 120 bp, Homo sapiens
gaacgtgctgttctaccagatttttggcaacattacatttcctgaatttgatcattgtattatgattatgtaagagaatacccttgctctcaggctacacacatgctcaactattcaagg

SEQ ID NO: 20209 - DNA, 120 bp, Homo sapiens
caacgtctgcaacttaacctccaatgattcagcagaaataattacacacacacacacgcacacacacacacacacagttattcctcgagcccccgcccccccgcatctccgactatctgc

SEQ ID NO: 20210 - DNA, 120 bp, Homo sapiens
acacgctgtgcctgtcatcacattccacagtcctcaagcaccagctgtgctcatctcctccaccaggcctcacccacctgactacaataagtgcctggtactagtgcctaccctggggca

SEQ ID NO: 20211 - DNA, 120 bp, Homo sapiens
ccacggagcctgtcagggagcagagagtgggagtggggagaacggtgctgacagggccaggtcagtggtttctgctcccaacaaggaatcaccaagggggaggtggggagggagagggga

SEQ ID NO: 20212 - DNA, 120 bp, Homo sapiens
ttccggcaaggatgagcacaggcaggggtcttttggccatggcgtcctgccctgggctcactgtgaggatcagtgctcaagctggtgaaatattaccaaggacacaaatgacaagcagga

SEQ ID NO: 20213 - DNA, 120 bp, Homo sapiens
agacggtaccttggtgatggagaagtccagccgaacatagatgataacggtgaagaacaggatgtagaaggccgccaccaccagcaggggctcctgcagcatgagcaccttgttgaacgt

SEQ ID NO: 20214 - DNA, 120 bp, Homo sapiens
agccggaatatacttcaggcagggccttgttaccagagacaatgtgtagcagttaaggccagagccttccactccacaccacccaggaattgctatggctgttctgtgaccttggccaag

SEQ ID NO: 20215 - DNA, 120 bp, Homo sapiens
acccgtcaacttgttgacttctttttgatgtattactttgccttctctgtgtatctgagttccagatgatgaattggttccacctaacagtaacagagttcttatgtaattttgcttgta

SEQ ID NO: 20216 - DNA, 120 bp, Homo sapiens
aatcgatggttcactaaatctgttgggcagcagtaaagtccagtgaacctgctctcccatgtcaccccatctgctgttgccagagtgccctagtgcgtgacggggtagaggggaggaact

SEQ ID NO: 20217 - DNA, 120 bp, Homo sapiens
tcccgatcctgtttagtctacatgtgtggactttgtttattgtatctgggcaagggagcatttagtgccctagcctgccgagaggcagtggagtcattagaaataaatttgtcttttttg

SEQ ID NO: 20218 - DNA, 120 bp, Homo sapiens
gttcgtccggctctgtttgagtgcctgttacggatctagggcagtaagtatacccagccttgctcttaaatctagcatggcagtgaatgaggtgaccagcttagagctgggcggtagtac

SEQ ID NO: 20219 - DNA, 120 bp, Homo sapiens
attcgtgagtcatcacctcacttccctatatttccattgctctcagaaagttcccagagtacctaagttttatttatagttcaaattttacacacttacctacatgtgaccactacttgg

SEQ ID NO: 20220 - DNA, 120 bp, Homo sapiens
agccgtttccctccctgaatagaccgtggcctgtgctaaatgctcgtatgtgctgggatctgtttctggtctctccagtctgttctggtgatgtccatgccatgttcccttatctggact

SEQ ID NO: 20221 - DNA, 120 bp, Homo sapiens
gatcggagtgtgtggccagggtggagaagcatacagcgctggatgctctcagcagaggcctttggcccagagcttctgtagaagcaggcagggagcctgcacttcccgccttccaccacc

SEQ ID NO: 20222 - DNA, 120 bp, Homo sapiens
ctacggctgagtgtggcagttgccaggaacgggccctgcaagccaggctgtgaccctgctgctccattctcctgctctctgggttccttggtgctaggaggagccttctggatgccttcc

SEQ ID NO: 20223 - DNA, 120 bp, Homo sapiens
tgacgcataaaaaatgctgatgcccacatctcttcaaaccgtcttgcagccccaggcccccattctccttgctgcagcaactggagccgctggtgctcccaggcagggccaccgcacctc

SEQ ID NO: 20224 - DNA, 120 bp, Homo sapiens
ctacgagagagcagggccacagcaggtcacccagccacaaggacagtcactcagccccagcatgaggagctcaaatcccagtgccaggctcattgcctgtccctgtagcccaagttttct

SEQ ID NO: 20225 - DNA, 120 bp, Homo sapiens
gaacgcaccaggatggcgactggcatgaaacaaggactcaaaaagcattcgttacttattttcctcccaaaatgtgagtgccatgaagataggccatgtgtcctttttcatacctgtact

SEQ ID NO: 20226 - DNA, 120 bp, Homo sapiens
tcccgaggctgggcacagaaaaggtacagagaagtgatttttagaaaggaaatctctgttttccaaatatatatctgggggtcgacacagacccctttagcagagccacaggtgccaagc

SEQ ID NO: 20227 - DNA, 120 bp, Homo sapiens
gcacggagaacagggtggaaaggaagagccaagctatgctgaggcagaaagcagggacatttgcatggtttgaccttggtgctgagattttatcatcacaaattaagccttacacaagtc

SEQ ID NO: 20228 - DNA, 120 bp, Homo sapiens
tggcgaggtcggggagggcaagccctgtccccaagacagaacatgaatgtgcactgggtgctgggctcggggcatcagctcaggcccatggaggcggaacgccgggcaaacgccgaagag

SEQ ID NO: 20229 - DNA, 120 bp, Homo sapiens
acacgcatcgaggcgaggcgggaagagtcccgggctgcggcggccgaggtgggggcaggggtcggggttcccctccaggtgctggcggtacctgcgagcggatgcgctgggcggcagcgg

SEQ ID NO: 20230 - DNA, 120 bp, Homo sapiens
gaccgcggcggcaactcccgtaccggatccacagccacctgggcgaagagactccaagactgagaggagcgtccgccggtgcagggagggccgcaggcccagccactcagctacgtttgg

SEQ ID NO: 20231 - DNA, 120 bp, Homo sapiens
tggcggttgctaggagacgcgagggcgtgcggcctgggggcggggctccgcggggcggggctttccccctcagccactgcgcgcagtttgtcaaatggctacatccaggttcagaaacca

SEQ ID NO: 20232 - DNA, 120 bp, Homo sapiens
ttgcggagaaaagctgaaaaccacctcagtgggcatctgtgggggatgacaaagcaccttatagttcatccccagggagcacagagcagcctctggagcagtgtctgcaaagaaaccaca

SEQ ID NO: 20233 - DNA, 120 bp, Homo sapiens
tggcgccctttccactgtgcttttcatgtcaagttgaatgagctacgatttgcacactgtaaaattcagatgtacacagtcatgcaaccactacaccatgaagatagagtatttcaatca

SEQ ID NO: 20234 - DNA, 120 bp, Homo sapiens
tcccggacctttaaaagacactttaaacaatatactatttgaaatggctcaaacaatactgaactgacttcagaaaatcatttctttgccacagccctgactctctcccacacagacaca

SEQ ID NO: 20235 - DNA, 120 bp, Homo sapiens
acacgcccatccccccagctcatacaaaagaacgcaaggagacctctgagtttgctcactttgaaccttaaacaaaaaccttgtggatgcaaccagaattatttcagaggtgcctggtaa

SEQ ID NO: 20236 - DNA, 120 bp, Homo sapiens
caccgcagggcagacagacaggcctgacagcaaaccattatcaacccttacttccctgagctgtaggggagtggaggccggcaacggctcccagcaagacatttaaaagctttcttttca

SEQ ID NO: 20237 - DNA, 120 bp, Homo sapiens
gtccgctcatcctcgtttgctgagtcctagctgatttgatggacaccaggttgtctccagtttctcactgtaataaacaatgatgcagtgaacatcctgtgcacagtggctttcgaaggt

SEQ ID NO: 20238 - DNA, 120 bp, Homo sapiens
ggccgccacccccaaggccctcctgggcttcggatcccgcgccaacccctcgcccaggtctcggagcgaactctccgcgccaggcgggcggggcggagggaggagggagttgagagtgga

SEQ ID NO: 20239 - DNA, 120 bp, Homo sapiens
ggacggccgggagtgggaggaaaagcgcagacgccaggaacgccccgtgagtgaggagaggagagcgtgggagtcacgcggagaagccagacccagacgccgaccgggcactggtggcgc

SEQ ID NO: 20240 - DNA, 120 bp, Homo sapiens
tgccggggtcccgggggttcctggaccccctaccccaggcccctccaaagcaactggggtaaaccagacgcactgtgaggccagcgcagctgctggacacggtccccggcgccgctccaa

SEQ ID NO: 20241 - DNA, 120 bp, Homo sapiens
gaccgcgaccgctaagcccctcctttcgagaaactctggggccgcccctggaagtggcggggcgaagggaccggaggagggaccggaggagcgaggcgcgcggcgcagcgatggagccgg

SEQ ID NO: 20242 - DNA, 120 bp, Homo sapiens
gcacgggcgcggaggccggcatggagggcgcgggaggtgacccgtaccggcgacctgcgcggcgcacgcagtggctgctgagcgccctggcgcaccactacgggctggaccgcggcgtgg

SEQ ID NO: 20243 - DNA, 120 bp, Homo sapiens
gaacgagatcgtggtgctggccaccggcctggaccagtacctgcaggaggtcttccaccacctggactgccgcggcgccggccgtctgccccgcgccgacttccgagcgctctgcgctgt

SEQ ID NO: 20244 - DNA, 120 bp, Homo sapiens
ctgcgcgcggagggggccaccacggccgggcaggcagcaggtgacgggaactccagagatgtgacccccggggatgcggccgctgagttggccacggacggggactcagataccgatgaa

SEQ ID NO: 20245 - DNA, 120 bp, Homo sapiens
aggcgcgcctggcgctgcgcgccgagccgccggagctcaccttccgccagttccacgcgcgcctctgtggctacttcggcacccgtgcggggccccggctgccccgcggcgctctcagcg

SEQ ID NO: 20246 - DNA, 120 bp, Homo sapiens
catcgagacgcagatccgcctgcgccgtccgcgccgccgccgccgcccgccctgcgcgcctggccccgacagcggtcctgactgtgagcgcgttgcgcggctggaggaggagaatagcag

SEQ ID NO: 20247 - DNA, 120 bp, Homo sapiens
ttgcgcgagttggtggaggacctgcgcgccgcgctgcagagcagtgatgcgcgctgcctagcactgcaggtgcgcgccggccacgaagggagggtggtaacgcccgggagagggctcgaa

SEQ ID NO: 20248 - DNA, 120 bp, Homo sapiens
caccgccacatcatcgcgtcttgcccctttaacctaggaattgcacctgtctgggtagtctcacatattccctttcaacaagcatctttctctctccttcctgccaggcttctgggaggt

SEQ ID NO: 20249 - DNA, 120 bp, Homo sapiens
tcccggaagccacgggaagagtgtgtaagcgagggaggaatctgatgtccaatcctttctctttaggccaagtcaaatgcgtgctgagaactggccattgggcttggcagcccagtgccg

SEQ ID NO: 20250 - DNA, 120 bp, Homo sapiens
tgacggggaccaagacatgattggggcagcatgtgtagtaggcacagtgctttcaagttttctgtcaagtagggcagagtaagggtggtagctgggaaagtcatatggtcagaggatgtt

SEQ ID NO: 20251 - DNA, 120 bp, Homo sapiens
caacggcagctgggccgggtcattccagagcctgccttccaagcttcccttgtgcctggcatgtgggcctggagcctcccgcctgagtgcagaccccacctctcccgcggtgcggctcca

SEQ ID NO: 20252 - DNA, 120 bp, Homo sapiens
tgtcgttgctgtccgtgcaggaagctgtgcctggagcaggctttctaagacacatgcaagtgctaggaggtggagtgtggggatccagtccaccccaggcagcctgtgccaggaaacatt

SEQ ID NO: 20253 - DNA, 120 bp, Homo sapiens
agccgctgaagtcccttacctgctgacatacctcctctgccaagaagctcactgccttccacagcacatccatcattcttcatcagcagttcctgcgagaaagttgttcctcccagtgag

SEQ ID NO: 20254 - DNA, 120 bp, Homo sapiens
aatcgcctccctttgattaccaactcccatctttgctgtctcaccccagttaaacacctccctatggggccatataaccaggtacctgcctctacccttgagtcttggagacagtgacct

SEQ ID NO: 20255 - DNA, 120 bp, Homo sapiens
tcacgcggtctcacattgaagcaagaatccccacccgggggttttcacactggttgctgctaagcaacgtgcccattctcggcttgcactgggggaccctgaatgcaggattttatgaat

SEQ ID NO: 20256 - DNA, 120 bp, Homo sapiens
acacgaaattccagggttagccctggctttaggcaaagcctgatccagcagctcaactgatgttactaagggtcctgtttcttttgccgtcatctttgggctctatctgcagcccccaag

SEQ ID NO: 20257 - DNA, 120 bp, Homo sapiens
ctccggacggccccctcagaggcacaacttcccgcttcgtcggtcatcatgctccgcgccctcaggcagtcagcgaaacgccggaaacgcctgcagacgcctgcagacgctccttgtgtt

SEQ ID NO: 20258 - DNA, 120 bp, Homo sapiens
acccgtgcagccctgggccactcacggtggccagggtggggttatgctgatgagcacggggaggccccgcgggcggcggcggtgctcgcagccgaggtgccggcggggagctggccatgg

SEQ ID NO: 20259 - DNA, 120 bp, Homo sapiens
aggcgctgcagggggccccggcgcccgtgccccgtttgggctgtgcgcgctgccggctggctcccctcttgggctcgcgggccctccaagtgccaagtccacctgacggagcccgggccg

SEQ ID NO: 20260 - DNA, 120 bp, Homo sapiens
gcccgcgcccctcacctgcccagactctccgcgggggctcaccccagtcacgcggatcagccgcgggaggctccctgcctgcccctcctgggtgctgcagggcttccacctgcgcagtga

SEQ ID NO: 20261 - DNA, 120 bp, Homo sapiens
acacggagagtcaccgaagtctcctgtcaatggccagcaaggaactgaggcctcctgccaacagccacgactcacatctcaaaagcgtctcctccagcccaggccaagtcctctgatgct

SEQ ID NO: 20262 - DNA, 120 bp, Homo sapiens
ctacgcacatatgtctgtggcagattctcgcagtcctccacgctacccactgagctgtcacagggagcgctgtggcaggcttgtatgtttaccagtaaccattggagccctgacaataat

SEQ ID NO: 20263 - DNA, 120 bp, Homo sapiens
actcgtggatgcagagatacaggggtcaggggagtgcatactttttcaggccctggggtgggggtgaggggatagggtgcaggggcccagatagtcaaaaggcaaggaggtgctgggagg

SEQ ID NO: 20264 - DNA, 120 bp, Homo sapiens
caccgcttgtggcccaggctccaagtcccccatgcatgcctacagtcccatcagacttcccttacaaaatacaaatttaaagataaaattgttatgaatttcaagacagcagccacagag

SEQ ID NO: 20265 - DNA, 120 bp, Homo sapiens
aggcggagaggggcagtcatcctacaaggtttcaaaaaataggagaatcgaacatttatgcatagacttcacatcttccactctcctttagccttttttctataagagcttctttgggat

SEQ ID NO: 20266 - DNA, 120 bp, Homo sapiens
ccacggcaaaaaatgtcctgtaatttcacactgtttccactgggtggcaaatgctgtccctgagaggaaaaatgaatggtaaacggttccaaagcgcctccaagcatgagctccgggagt

SEQ ID NO: 20267 - DNA, 120 bp, Homo sapiens
ctccgaatgaacccctgccccctcacggcccctgccgtgggtatttgccacatcttcccatcatctgtgctattacctgtgttaaaacacacacacacacacacacacacacacacacac

SEQ ID NO: 20268 - DNA, 120 bp, Homo sapiens
acacgtatacatttagaagaagagaagcctttatttcctgtaaaaggtgccagcctacaaggtggccatctgcaggctgggaagtgtgccaatggccgagcactttgaaagaggaggggt

SEQ ID NO: 20269 - DNA, 120 bp, Homo sapiens
agtcgtctgaatcctttagcttcaaaccagcctgagtttgagtgcttgccgtagcagaaactatccttaccacaggtgggaaggaaaggaccagtttctagcagtgtcgggccactcctc

SEQ ID NO: 20270 - DNA, 120 bp, Homo sapiens
tttcgaacatccctaagggaggcattcacaaaagctgtcccaagcagctggaagaaaacagcttccgagatgaccaggaggactgggcggcgccgagcccagaacgctcctggcgcagca

SEQ ID NO: 20271 - DNA, 120 bp, Homo sapiens
caccgttggcgttggccgattgctgctggtggggggcgggggtgcaggccccagtctctatgcaaatcagggatcagaagatcggaatttccaccaatcagcgggaagcctcggccctgt

SEQ ID NO: 20272 - DNA, 120 bp, Homo sapiens
cagcgccacgccacaggcttttcccctggtttcgggaggggtggggagccaggtggggctcccgcccagaccctttcccgaggtccgccctctccgccttttctctaaattcctcttttg

SEQ ID NO: 20273 - DNA, 120 bp, Homo sapiens
ttccggttgagaggcgggggttggcccgtagttgtacactcagtcaccctgcactgtggaggcgggggcctcccttgtggactgatttgcgtgggatttggttgttttattaagagattt

SEQ ID NO: 20274 - DNA, 120 bp, Homo sapiens
tgccgtgatgctgcaggatgcatcaggttgaaggaacttggaaacagatttctcagtgggcaaatcctagactccagcacagccgacctagagctggaaagacccttgagagggtgtcac

SEQ ID NO: 20275 - DNA, 120 bp, Homo sapiens
cctcggtgcccagcctggcccaaagtggacattcagtacatttgttaagtctctttacaaggcccatgtgttcctttcagagtcagcaaataagaaaagtaaacatcatggtatggtttg

SEQ ID NO: 20276 - DNA, 120 bp, Homo sapiens
tggcggttgaatggaatttgcaacaaatgcaattcgtagttattctttttctcctcagtacacacacagtgtttcttaatggcaataaagtttactttcctggccattagcagacttcat

SEQ ID NO: 20277 - DNA, 120 bp, Homo sapiens
catcgcatttaagcctgatggaactcaactgattttggctgccggaagcagattactggtaggattttgtcttagtttcctcttaaagtgcttccctaacctccctcttgtgagtactct

SEQ ID NO: 20278 - DNA, 120 bp, Homo sapiens
aaacgggttgagacgccttgcatggtacatgatttgctcagctttcattgttgtctaaggatttgtcatgtttccagatcttggtctgtgatgtcttcattgcacctccatcttccattt

SEQ ID NO: 20279 - DNA, 120 bp, Homo sapiens
aagcgttcaaaaccaacctggccaaaagtgagtccccatctctacaaataagaaaacagtgggtgaggagaaggagaattaattctttaggagtaggagaattaatttctgtgctttttg

SEQ ID NO: 20280 - DNA, 120 bp, Homo sapiens
gtacgttctgattcctgatgtcctgtcctggaataactgaaaatctgggctaaaaatgctaaaatgcattcagaatatggtgattttatcctgagagagttaatactacttctctacctt

SEQ ID NO: 20281 - DNA, 120 bp, Homo sapiens
ttgcggttctacttcttgtgcaatttgtcgtcattactggtttaggtggctgtagctgtcctccctgaggggctgaacaccttgaggagttcatcctggccacggtcccgtgccagcatt

SEQ ID NO: 20282 - DNA, 120 bp, Homo sapiens
ggtcgggcctgtctgaactggctacacggctgggaaggggatgggcagaaggcaagggataggaagaaatgtgagtttgcaagaaaaggcagaagtgtagctaaagccataggacagggg

SEQ ID NO: 20283 - DNA, 120 bp, Homo sapiens
tgccgtctacctttagatgccagcacctgcaccccattacacacagacacacgcatccccacaccagagtacccaagaggaggagactgtatatgccaaacaggacacattcacatgggg

SEQ ID NO: 20284 - DNA, 120 bp, Homo sapiens
attcgctgcaggcatggtgaattagaaaagccttctcatgagcccccactccacccataaccaccctcctccccactgcctccatccctttacagacaggagcaagccaggcaagaagcc

SEQ ID NO: 20285 - DNA, 120 bp, Homo sapiens
gagcgggttacaaccagcagagaacattgtgagaactctgctttgagcagtgtctgcctagcacagtgaggaagggatggctacagattccatgactcacgttgggaactggaaggagct

SEQ ID NO: 20286 - DNA, 120 bp, Homo sapiens
gtccgtgtgtgaaagggaatggcagcatgctccattttccaaggtggggaggcaagaatgtcccctcttcaaagaagaattatgcctcgagggcaggagccccatagaaacagagtggga

SEQ ID NO: 20287 - DNA, 120 bp, Homo sapiens
atgcgggcgtctgagcagagcactccctgggaggaaggagtcagacacattcccggacaggaggccagatgtagacattcactgaactgtctgctcaacccccctgctccaagaagttcc

SEQ ID NO: 20288 - DNA, 120 bp, Homo sapiens
agccggacccaacacccaagttaaggcaaagagctctggactggtaatgaatgatgtcaaagctgctggcagccaattgtttgtggtttttcttggttcgtatatttgttttaccacata

SEQ ID NO: 20289 - DNA, 120 bp, Homo sapiens
tgccgtgagctctgtgagatgctccatctacccttatgacaaactccctcttctacttaagcttcggttgctttttattacctgcagtggcacatgctgacatatgactcatccagtatc

SEQ ID NO: 20290 - DNA, 120 bp, Homo sapiens
aagcggtaaacaaaagtcatcacactgaagatggtaaaaagaaaaacacagtctggattcacaatggcatactacttctgctaaccaagcccagcaactgtcacctctcttgctgtgaaa

SEQ ID NO: 20291 - DNA, 120 bp, Homo sapiens
cctcgactgggcagagaattgtcagcaacaggtaaagagtcacaggggccagctttaggagaaaggtgctaactaagtgccttttcatcacactgctttatctctcacctcatcagaggc

SEQ ID NO: 20292 - DNA, 120 bp, Homo sapiens
acacgctttgcgttcttcctgcctggccagagttgaatctcatcacttaccgagtgccccgtgaggacttgagtgaggcacttcccttctccagcttatttcaccatctgtcgaatgaag

SEQ ID NO: 20293 - DNA, 120 bp, Homo sapiens
aaccggcccaccaataatctgtcaaaaataactccctcaaaattggccaaacaccttattttttaacataaactgacagctagacaacaacaacaacatcaccactttactgtctcttct

SEQ ID NO: 20294 - DNA, 120 bp, Homo sapiens
aggcgtgtcattaatgctaattgttgtggctgccaaggaaaccttcacacagtttgcaaacaggctatgcacacacagtatgcaagggagctccagagacctcaacagagatgacaggga

SEQ ID NO: 20295 - DNA, 120 bp, Homo sapiens
ccccgccaagagacagtggagatcaagtgaaaatgtggcactccaggaaatgtccatttccacactgcagcagcagcaaacgagtgttagctttatttgttacctggacccagctcccca

SEQ ID NO: 20296 - DNA, 120 bp, Homo sapiens
acacgatcccattacattttcgccacagctctatgagggagtctactgttacccccattttaaagatgcatgattaatggtgtaagcacaggagctgccattttttcgatattactacca

SEQ ID NO: 20297 - DNA, 120 bp, Homo sapiens
gcgggagaccccaagtcctcttcattaagtgctgagaatgtcttgaaacattttccttccctgagttgcccttaaagaataacaccaccaggctggatgcagtggctcacgcctgtaatt

SEQ ID NO: 20298 - DNA, 120 bp, Homo sapiens
agccgtaccagtgaaggcagttgaacatattatacaaccagtgcctatgagattatgtggaaatccacatatgtgttatacttacaggcatacctttttaaagacaagtttgggtttaaa

SEQ ID NO: 20299 - DNA, 120 bp, Homo sapiens
tggcggcagattcttgcctctcaaaagcattatgtattcatttcaaaagcaaaattaattttggttcagtttagctttttttcctgatcctttagaatttcaacgtgccttcttgaaaat

SEQ ID NO: 20300 - DNA, 120 bp, Homo sapiens
agccgtctttcttggccaacactgctctcaccagtctatcatggtcttctttcaatgtctgctttattataaccagagatgatagaaggagggtgggatcactgtcccgaagacttgggg

SEQ ID NO: 20301 - DNA, 120 bp, Homo sapiens
gggcgtatatttttaaaaacttctatgagctatgcctccttagccttccctctccacccacattcctcaggttgaggttcctggggcagagctggaaggcctagtctgtctcatgctcct

SEQ ID NO: 20302 - DNA, 120 bp, Homo sapiens
ggccgcctggcctccactccactttgccccatgtgcatacagtaaggttggcttcttcatctgctaagccactattattgcatgtaacaggcatccaccaagggcttttaagaaagggag

SEQ ID NO: 20303 - DNA, 120 bp, Homo sapiens
ttacgtctgatccctaaggtcataacaccaaggatgtggatgcttgtttgctgacatttactcaccattccaccatgctgcttcctggaaatgtgttataatattctatatgcccaccaa

SEQ ID NO: 20304 - DNA, 120 bp, Homo sapiens
gaacgctgacccttaagaaaacgtgactgcatattgagaatacagaataaacagaaggcagcaagtaaagtactcttacataaaatgcagcaaggatgtacaagttgcccaaggaaggtt

SEQ ID NO: 20305 - DNA, 120 bp, Homo sapiens
ctccgatagtgatgatagattatcactgattcggatacagatgcttcacaggggctctgtttatataagttaccacatacccacaagtaccctctgattctagtattaacttcattagca

SEQ ID NO: 20306 - DNA, 120 bp, Homo sapiens
acacgggtgcatctacatgatgaaatcccaggtagaggcgtctcctccctaggtctccacgtgaggacttaggaatttcttctcatagaacagtcttgtcctctttaattttcttgggaa

SEQ ID NO: 20307 - DNA, 120 bp, Homo sapiens
taacgacggttagcagattgcattttcagttctcaaaatgcaaatagtctcagtgcttcccttttccaagataatagggtgcccttgcatactcttctgagaatggctgccctaattgta

SEQ ID NO: 20308 - DNA, 120 bp, Homo sapiens
gcacgtgatatagaatctgagttaaactgtcttcctaaaaaataaagaagttgcttatctcgcataacagaaagctcagaggcaagggagactttgattaattcagtggctaagcaagtt

SEQ ID NO: 20309 - DNA, 120 bp, Homo sapiens
acacgtacacacacacatacacacacacacaccccaacgtgaatctgttttgttttaccatggcctagtcccaacccccttcccagttatgtggtagccttgacaacaaatagcccacaa

SEQ ID NO: 20310 - DNA, 120 bp, Homo sapiens
ggccgtgtgcatggatactattgtggattcccaggtctgtgtacatgcaaaggaaagagcttacaaagccctggctctcaactatggctaactttgaggctttgtgaaagcagaaagtta

SEQ ID NO: 20311 - DNA, 120 bp, Homo sapiens
agtcggtctctgtcctccctccccactccagaagtcccggtgtggagctgaaagttccaatcctctattcacgtggttggtttctctggcaaccggctccatcctggagctatctaggga

SEQ ID NO: 20312 - DNA, 120 bp, Homo sapiens
ccacggcggagaccaaatgtatattctttattatgtcacaatttgtaaaaaggtagctttgttctgacttatgagaagaatactacatgaccttcaactaaggataaaatgttagagaca

SEQ ID NO: 20313 - DNA, 120 bp, Homo sapiens
ctgcggctttattcactcacacttcctgcaactatgctaaacactaggggggtgagggaaggggagacttactccattctcttgtatctacaactcctataattgaaacggacattcaac

SEQ ID NO: 20314 - DNA, 120 bp, Homo sapiens
ccccgcttctcctgccactgccactgctaccaccgttgctattgccacaatactgttcagagaccggggcaatgcagaagagaaaaaagaaacaaaaagaggagaaaaagaggtacaatt

SEQ ID NO: 20315 - DNA, 120 bp, Homo sapiens
atacgatggattagacgcctgtgattaggttatactatatgatactgtcagctttaaggagggcagagaatcctcagtgagactgacttatttgttgaacccttaaaagacactcagctc

SEQ ID NO: 20316 - DNA, 120 bp, Homo sapiens
atgcgtgagaaattttccagacttaaaagttagacagggccacagggcaaggatctgagagctgtctctagttacagagagaagaccccagccaacagccagcagggaattggagacttc

SEQ ID NO: 20317 - DNA, 120 bp, Homo sapiens
tcacgcaattactacagtcaataattcatttttttcttaaaaaaaaaatttacactttctgttcctcccattcaacagccacatcttctcatgtaacacccatcacatccctgagacatc

SEQ ID NO: 20318 - DNA, 120 bp, Homo sapiens
atacgatctagaaggggagacaggtacaccaacacaaaaaactattagctaggcacagtggcttgtgcctcccgagtcaccagaggctgaagtgggaggagcaagtacttgagccctgga

SEQ ID NO: 20319 - DNA, 120 bp, Homo sapiens
tctcgctcaaaacccaatatgctcctaaatgtctaaaatctaactcctctgcctggcagtcaggcagaaacaaagaactgtgtcatcaagttctggctctagctcatttattcactgtgt

SEQ ID NO: 20320 - DNA, 120 bp, Homo sapiens
aaacgcagggtgcagaaatcttttccttttcctcatctggaatgtggagattttcatcaggagagagggcctgcagcacagggtacagagctccagacttgtggtcaggaggcctggctt

SEQ ID NO: 20321 - DNA, 120 bp, Homo sapiens
atgcgtgaagtgctttccatctcgctggggtttggtttctgcttcttaagtggttccaagttgggccgcttgtatttatgctcaggagagaggtcacatggctgaattgtggctgtccta

SEQ ID NO: 20322 - DNA, 120 bp, Homo sapiens
aatcggttcatccatgaacaaactctagaattccttttatctcccaatcaccaagaattcgatcctttatttagtcctgaaactcggaaactaatcttttatttatctctgctgtaatcc

SEQ ID NO: 20323 - DNA, 120 bp, Homo sapiens
gaacgagccacaggcaagctccctaatcacaaaaccacaggagagggcaggaaaatggggctggcatgatgttaggcaaggcaagctggttgaaacaatttcccaggctcccttgaatgc

SEQ ID NO: 20324 - DNA, 120 bp, Homo sapiens
gatcgttgacaaagaatcattgctgcttggagtgtgctgagcagcttcagatggccatccttctgccggttttgccctcccaccaccgtggatcatggccaatgtggcaggcatgtgcta

SEQ ID NO: 20325 - DNA, 120 bp, Homo sapiens
aggcgccatgcacaaaacaccagaatgatttgtcatctgaaaagctaaaaacatcttgatgggtggagaaatcttgatgagtcgatcatggaagattatgcaaatccctctgcctttggt

SEQ ID NO: 20326 - DNA, 120 bp, Homo sapiens
catcgccccaattatctatgcaacggctcctcaatgctggccttacaacagaggcggcagctgtctccgcttattacacctccccgccccctgccatggccggcactgactctgcctctg

SEQ ID NO: 20327 - DNA, 120 bp, Homo sapiens
tgacgctgaggatacgcactgcacacgccctgccagatgccaaaggaagccattcttctggaagaagactttctcctgaaagcctcctggaggcaaagttctggcagaacgaggcaattt

SEQ ID NO: 20328 - DNA, 120 bp, Homo sapiens
aggcggaaggaaggcaattagagcgggtaaggatgggggatgctttctcttttcttcactgctggcgaaatatgggccaggtcacgccactggcagatgctgctggctgtgagtgtgcag

SEQ ID NO: 20329 - DNA, 120 bp, Homo sapiens
catcgactccagatgggtttcttgccagcatctctggcaaccagggcaggagaggtgcatgtgcctgttcttcccaggggctgtgggtgccacagggcaatgcctatagcaggcaggtct

SEQ ID NO: 20330 - DNA, 120 bp, Homo sapiens
cttcgccagggcctctgaccaccttggcctctgaagcaattaactggtttccctgctctgttcactggtcagttctgagtagcatgagatggcagaattctcagaggtcacctggctcat

SEQ ID NO: 20331 - DNA, 120 bp, Homo sapiens
ggccggttagccttgtgcctgcccagccctgccttgaggagatgatggagggaggggcagaatgtcttccagggaagcaggggatgcagactgctaagaagatgcacaagtctgtcagtg

SEQ ID NO: 20332 - DNA, 120 bp, Homo sapiens
gcccggggcctaacacagagtagccacaaatgtttcctaaagcgagtgaaatggacttgcaggcagtgggagtagcatgggcaaaggcatggaggcatgatcagcatggggctttgcaga

SEQ ID NO: 20333 - DNA, 120 bp, Homo sapiens
tgtcgctggggagaaatatgcaaggaaggatgggagaggtcagcgcctccaccaagcaggacagactcccacagcttttcctaataaacaagtttccagggccctttgaattcttccaga

SEQ ID NO: 20334 - DNA, 120 bp, Homo sapiens
gaacgttagcattcacattgaggggaggaacatcacgcacagtgaccacgtgggcccagatcctcagaaaggggagttaaaagctcaggcaggaaacagaactgggaggcgggctggcac

SEQ ID NO: 20335 - DNA, 120 bp, Homo sapiens
caccggaattagggttgctgacaactatcatcattgagtacctgctgtttgccagacaccgtgctaggcccaacccataaggcaagctcagagaggtgaattgccttgtctgaggtcaca

SEQ ID NO: 20336 - DNA, 120 bp, Homo sapiens
gttcgttggttccaagcttttgttcttctagattccactgtgatttggggccatacaatgtggaggggccaacccaacaagaggagtcctttcccagaggagaagacacaagctgcatct

SEQ ID NO: 20337 - DNA, 120 bp, Homo sapiens
cagcggaaaatgaggtgccagccctgacttgtatggcagcgagaggcaaagcacaatcaggaggcatggggcgtggctggcagcacaggtctccacaggccagcagcacccactgcgtgg

SEQ ID NO: 20338 - DNA, 120 bp, Homo sapiens
caccgctgtcagccctatggctttctcctccaaggcagattcttccagcagaaggctgagctgccccaggggaaagagccagcgaagagccactcacctcccaggctgagggtgattgat

SEQ ID NO: 20339 - DNA, 120 bp, Homo sapiens
cagcggttgcagggatcaaaatctgctccccaccctgaccttgctggatccagaaaatcctgatttcctacttcacttcatgacacatatgcaaacactgagatgttttgcgggggggga

SEQ ID NO: 20340 - DNA, 120 bp, Homo sapiens
taacgggccctttgtttttctgcatgactaaacctgtagcaaggatgaaccagagtaaaaccatggagacgtaaattctgaatgcattcagtcatgtggtcagcaagtataatgagtaaa

SEQ ID NO: 20341 - DNA, 120 bp, Homo sapiens
taacggaatgacaaatcctacatgcacatgaggcccctgttctaatatttcagagacctacctgaaaagagctatcggcccagtggtttcttttagaaggccgtttgtgtggcaccaaaa

SEQ ID NO: 20342 - DNA, 120 bp, Homo sapiens
cgacttgcatggctgctgattcaaagcttaagtgagccgttctggcaagtgctcaacagggcaccagtggctctggtgctcccatagcctgctaacctctctggttccaggtgtttatct

SEQ ID NO: 20343 - DNA, 120 bp, Homo sapiens
cctcgaacccaaaataaaagtttaaaaaaggtgaagtgtggaaaacgtgctacccaccactttttgttgttttaatggaaaagttgatcctaagagtgtaggctgcccccctggaaactg

SEQ ID NO: 20344 - DNA, 120 bp, Homo sapiens
acccggggaatcagagtgcacagtttcactaaagcccacagagcagtaaaaagaaaagaaagtgaaaatgaaaacaaaaggccctttttggcctgagggtgaggtgaggtggaagaatgg

SEQ ID NO: 20345 - DNA, 120 bp, Homo sapiens
caacggcactgacagaatagaaatggcatgtggcgtgtatagcagagagagcttcagaacagcctccttcagctttggcaaggtatggcacagatccacagcaattctaagtctccttga

SEQ ID NO: 20346 - DNA, 120 bp, Homo sapiens
tagcgggtagatacagggtatagggagtacagtccaaagccagggactatggcattgacagtaccatggggagccaaggcacaggtccagacaacagggatataatgcctgagacaagag

SEQ ID NO: 20347 - DNA, 120 bp, Homo sapiens
cctcgcctctaagtgaagcttggaaaatatgatctggctgtggctactgagactttgaggccattttagcaccattgtctttattttccttatcagtcttcaagcttatttaatgttttg

SEQ ID NO: 20348 - DNA, 120 bp, Homo sapiens
agtcggccagctgggaccacggtggccattactggaagtgtgatcatctgccctctctcctcagtgcccttggaatatgtgctcttctgtctggcttcaatttctcttacttctttgtgt

SEQ ID NO: 20349 - DNA, 120 bp, Homo sapiens
ctccgttggggtcctgcctgcttttggagcattagaatctccttttttgcaagcctctgtctcccatcatttaacacccagctgtgtctctctgcccactgaccagaatcttttcgcagt

SEQ ID NO: 20350 - DNA, 120 bp, Homo sapiens
cttcggaggcatggcgtaagactcaaatgactaatatagggatagttcaggggcagatacacggttggaaagcacactagaaatatcagtagaatctgaattttcccctacctgcctcct

SEQ ID NO: 20351 - DNA, 120 bp, Homo sapiens
ggcggctgctgcgaggatgctgcctgggcggctgtgctgggtgccgctcctgctggcgctgggcgtggggagcggcagcggcggtggcggggacagccggcagcgccgcctcctcgcggc

SEQ ID NO: 20352 - DNA, 120 bp, Homo sapiens
aagcggcaaggacctaggctcaagctggatttgcccaccctcccttgccgcagcttctttggcctctgtgcgccctggattcccgaagtcagttccctgcgcagcggaccagagaggtcc

SEQ ID NO: 20353 - DNA, 120 bp, Homo sapiens
acccgcggacgtcaactcaacccctgggcggggtccgggggctgagcagaaggcgaggtctggggagtacggacaactttgagggctgtctgtgccggggtgggagcgcagtgggtgagt

SEQ ID NO: 20354 - DNA, 120 bp, Homo sapiens
tttcgagctctggcccagggacggctagagcagggcgctggcgcgccgtggggacaagcaggtgtctgctcctgcctgggggaaggatcagcggcggtgctttcaaggagggagccgagc

SEQ ID NO: 20355 - DNA, 120 bp, Homo sapiens
gctcggggatggagtggaaacttgtaggctccagggaaggccccgctgacactcctcaagctcccccagggcgtctctgactccccggggaacgtgtaccctccgggtaggcggcggggt

SEQ ID NO: 20356 - DNA, 120 bp, Homo sapiens
gtccggaagaagcgcgggatgtgaggctccccgctgcctttcctactccgctctgactaccgaggaccgaggagcctaacctggcaccactcccctgcccaccctgttcctttgaagagc

SEQ ID NO: 20357 - DNA, 120 bp, Homo sapiens
ccccgcgcctcccgcccggaaggaagctagatccaagcgaacgcctggctctgtcaggcgagcctggaagccggcgaaccccggactttgacagctgcctgggagcgtcgggagctctgg

SEQ ID NO: 20358 - DNA, 120 bp, Homo sapiens
ggccgggtctgaaacaggaggtcacgtgcttgcagggggtggggaggcgagggaagagcagagctggtggggaacagtggtgggctcaggggaggctgtggcagatcctagctggggcgc

SEQ ID NO: 20359 - DNA, 120 bp, Homo sapiens
ctgcgctgttcataagtagggcttgcgtttggtttgtggactgtggccaaatccgccaggtgacaatgaggggtacttggtccccaaatcctgcctggcaatcatcagagggcggagggg

SEQ ID NO: 20360 - DNA, 120 bp, Homo sapiens
ttccgagatgcaatgctgacagttagctcttaaccaaatatattttctctggtggtaagaacgccagacagcaaataaaatttagaatgtctggttacatttgaattccagataaacaat

SEQ ID NO: 20361 - DNA, 120 bp, Homo sapiens
attcgttacttgtctaaaattcaaacttaactgggcttcctatattctgcctggtaactcaacctggtgagaacctatggcagtggccaacttgcctaacttacaagacattgattggta

SEQ ID NO: 20362 - DNA, 120 bp, Homo sapiens
atccgtcatctaattagagcttcacaatgaagcctgacctgacctggtatccatgaccaccatgtgttcattatcatgagaacaatgaggccctctgacttccaatccaccctcttcaca

SEQ ID NO: 20363 - DNA, 120 bp, Homo sapiens
tttcgttagctgtatgctaatgcattttatttattgactcttaccttgaatgttctctctgatctcaccttctgaaagccagtcattccatttgcttcctgagtaataagggcatatatt

SEQ ID NO: 20364 - DNA, 120 bp, Homo sapiens
aaacgatcagcattcaaccaccatgtaagagagttcctgaaatatttgtaaacttaaaaaaattatttagataaatacataaaccagacagacaaagagacagaaagataaaagaattac

SEQ ID NO: 20365 - DNA, 120 bp, Homo sapiens
ggacgcatgacacagaagagaacagtatgattcagctgttttgcatgaaggttaaattattatgcagccaacaggactactgagaagcaggacttgtgtcttcagtgtccaaattctgtc

SEQ ID NO: 20366 - DNA, 120 bp, Homo sapiens
aggcgattataatcctgagtcattaattcaataatttatatagagaaaatattattagctggtagagaagtggtgacaaaagtaattctgaaaggcataatttgggaatctggaaacagc

SEQ ID NO: 20367 - DNA, 120 bp, Homo sapiens
acacgtcattctaatatggacgttatatctttctccttgccaccctaagcttaaaacctttcctcggatgatttgtgctgagacagaaataatttcataaattgaaaagggtattatttt

SEQ ID NO: 20368 - DNA, 120 bp, Homo sapiens
tgacggagaaattcaggaggcaggagaagaggaaaacagactggagaaaagccagtatccaagttggcagaaaaaacagatacttttaaaaaactgagacagctaatattcattcttaag

SEQ ID NO: 20369 - DNA, 120 bp, Homo sapiens
tatcgtgtgtggaaatgaagaaaatggctaggcaaacctacagtaggcagaacacaaatagctggtgggcaaaggtgagatgatccatgaattgaattgatccaaaggaaacagactttt

SEQ ID NO: 20370 - DNA, 120 bp, Homo sapiens
cctcgagcatttccagaatgattggaaagaaggatttctattacaaacaaaaggatttgagtcaatgttattttcatctctgcagactctaggatttaatctgggctagcaggcccttcc

SEQ ID NO: 20371 - DNA, 120 bp, Homo sapiens
gcacggagaaaatatttcagagaagggtcttactgggataaattcgtatatttcttggaactctggtagcccatgaacgacagcatatgttagtgttaaccttgtgttacatttctgaac

SEQ ID NO: 20372 - DNA, 120 bp, Homo sapiens
cagcgctgaaaataaccagagatgactgaattcttggaacacatttttcctactgttttattagaaaaacatttccaccctaatcaatctctgtgttttacctcaagcatatatttgatg

SEQ ID NO: 20373 - DNA, 120 bp, Homo sapiens
tgacgttggagaagtttcagtgcacatgcaatggaatcctataaagtctcatttgctttgctctctgctctcaggaggaaaagggacatgtactaaatgaaaccacaagagcagggagat

SEQ ID NO: 20374 - DNA, 120 bp, Homo sapiens
gcccgtgtgctggtattttccctgcattaatgctttcagcatcctcctcactcatttagatgttctagttatatattttttcccatatcccatctattgtgttttcttccctctttagat

SEQ ID NO: 20375 - DNA, 120 bp, Homo sapiens
tgacggctgaggcacataatctaaaatgtgtgctcagataaatggtgaaaacagaacatctgaaaacacgaaagtattcctggctgacttatgattcaaataggatcttctttgtcccaa

SEQ ID NO: 20376 - DNA, 120 bp, Homo sapiens
tcacgagaaagagaaatgtaaaactgcaagctgtaggccccagaagctaattaaatggttggtcctttgtaatcaccttctctacagtgaaggaagctgaatagcaaggtcaagagatta

SEQ ID NO: 20377 - DNA, 120 bp, Homo sapiens
tgacggaagaagagttgctttctttgcctaggacttccagattataaaaataacactgtaggttgcatctgagccaggccagcactccactgggtctcttgctgcagctgggaatgacga

SEQ ID NO: 20378 - DNA, 120 bp, Homo sapiens
agtcgagggaagctggagccaaagagtagacatgggcccgccagcatatttggaagcttcatgaaagatgaactaatcttgttctccatttaaacagttatagtagaacagtagacatca

SEQ ID NO: 20379 - DNA, 120 bp, Homo sapiens
taacgtacacattcccattctttccatccatcattcattcttgccgtttgacagttgtgcatggcatgtgattgcttcagcctgaaacacaaagctttgtaagtcagcataaaataaaca

SEQ ID NO: 20380 - DNA, 120 bp, Homo sapiens
gttcgctttccatatagaaaatatctatttggctctctctcctatagttaaggaggatttggaaatctgatccagtgcagggcgatgtcggtctgggaaggaagactgtgagccctctct

SEQ ID NO: 20381 - DNA, 120 bp, Homo sapiens
attcgaaagcagtggggaagtgatgttggacctatcacagcattgctaacagacagcctattacagtatttaataaaaacagaaacagcatgcctatcataggctaataaatcctacctc

SEQ ID NO: 20382 - DNA, 120 bp, Homo sapiens
gcacgctttaaaacagtatgaagcagctttaacggagctccagataactaatttcaagcatggctgtctagcgtgcctgtcactcctattgtccttccaaactctttcagacattttgag

SEQ ID NO: 20383 - DNA, 120 bp, Homo sapiens
taccggtggctatttggaggactgcaccggatcgctgtcattaaaaattaagcgtggcttttgaggaagatgtgacaactaccggaggtaggatttgcatgtaaaacaaaggaatctgtt

SEQ ID NO: 20384 - DNA, 120 bp, Homo sapiens
tggcgtgaggatcgtgaattgcagccaggtgcggagtgagaagcagcaagaggagggagaggggagtgggagacgctctgcttagagcaaaacacagtggacagtattatgttttatggc

SEQ ID NO: 20385 - DNA, 120 bp, Homo sapiens
actcgggagaaagcacgacatggttagtgaatgacaaggaacagtgcgcagaagtgaatgagcccagtttggaaagataggttgcaataataatgagaagactcttttgggtcaaatgaa

SEQ ID NO: 20386 - DNA, 120 bp, Homo sapiens
gttcgtcagccgttggcaaagcttctgcccttgaggctgggcccactttcttagactttgaggagagattgaacatggaaatcacggctgcaccagtctcctgtctagaaaaaacatcta

SEQ ID NO: 20387 - DNA, 120 bp, Homo sapiens
gcccgggcatttttatagcactgaaaagaaaaaaatatctgaccactttgtttattttggaggaaaattacagagagattttgaaggttccagcctactttttctgtttgaggattttaa

SEQ ID NO: 20388 - DNA, 120 bp, Homo sapiens
tcccgagagctttgtgctttggtaagcaatgtgggctgattattgcctcatgcttttctgaaacagctgtctgtctgcttttagagctctattctagggggattgcaggagccacagaag

SEQ ID NO: 20389 - DNA, 120 bp, Homo sapiens
atccgaaagagcagtggtatagttttttctattgtctttttcgttgttgtttttgttttttggttttttttttttttttggtttcagaaagttggtggttggttgaggcaaatagagaaa

SEQ ID NO: 20390 - DNA, 120 bp, Homo sapiens
gcacgttactgtttggcctggatttgtccactggctcaggactagccagttaggctctccctccctgtagcaccaacaccctccaacccgactcctggcacctggccactgggcgtttcc

SEQ ID NO: 20391 - DNA, 120 bp, Homo sapiens
ccccgtgccttctggagcacggcagaagtatcattttggaacaattgacagtgtctgtctctaaccaaaagcattcagctgctgtagctaacatctagcaatactgagaagaaaacaggg

SEQ ID NO: 20392 - DNA, 120 bp, Homo sapiens
agtcggggccacttgttacggattggttttctgctaacactaacagaggctttcccttttccaattctcaatttctttgaaaatgtcacactatctggctgagtaaataaccctttgaat

SEQ ID NO: 20393 - DNA, 120 bp, Homo sapiens
acccgtacacatctggccacaaaaatattctgtgctgagagtatagtaggacagaacagtctgttggtttgtgtgtttcccagtcttgtaagtagtaaacactatatacatgtttgctat

SEQ ID NO: 20394 - DNA, 120 bp, Homo sapiens
agacgtgaacaagacataatgcttatcaggggaacttacatacaaagacaacttggaaaagaaacaacatgcattttgctgcttttaaactgttcacttagagaataaaactatctacca

SEQ ID NO: 20395 - DNA, 120 bp, Homo sapiens
gaccggtctattacttctgaattctcatgctcactgctcgtgtaacccaggacaaatcagtgctaccctctaggaccagtaattaaagtgattaggttagactgaaaagtttccttttga

SEQ ID NO: 20396 - DNA, 120 bp, Homo sapiens
tcacgttacacaatagttaactgtcttcatctttttgtaattcttaattttcaagttatgaagatcccacaactaagaattgttgtggtttaagcctcaactcagatgataaaaatctta

SEQ ID NO: 20397 - DNA, 120 bp, Homo sapiens
agacgtagaacagaattcacacagacctttgttattccaagctcctatttatgaatggtgattaatagcaataattctgtctctcttctctctgtgaaatgctaacacttgctaaaggca

SEQ ID NO: 20398 - DNA, 120 bp, Homo sapiens
taacggagacaaggtcacatgggaccataagccagtacgttttttggtagctacccagaaaggaagtttacaaatgttcctcccattcataacgggaagaaaaagtcaaacagctatcag

SEQ ID NO: 20399 - DNA, 120 bp, Homo sapiens
aagcgttttatgagaagctatttacacagctatttgtccattcagccagagtgacagtaactgctcacaatggtaggggttctcccctgccaagaaagcaaaaacaataacaaaacactt

SEQ ID NO: 20400 - DNA, 120 bp, Homo sapiens
aaacgacactcattttacgtaggtcactggacctcaaactgttgttgcttgctgtcccagccaattcaagagtgaaggaagatgtaaccagacatacatatctccctttctccctgttca

SEQ ID NO: 20401 - DNA, 120 bp, Homo sapiens
tctcgtgcttcttgttagctttttaagtcaggggaatgtaaggatgatgtcaaatagccacgattcttcttttaaactcagggcttcaaaaatcctacctggttttctaagtttaccaac

SEQ ID NO: 20402 - DNA, 120 bp, Homo sapiens
ggtcgcaggagaagaacccagaataggccaacctgtaacacacacccattcactgagctgcgggtggtgggaccgactgagctgtaacatgcccctgttcgccaagctgcaggtggcagg

SEQ ID NO: 20403 - DNA, 120 bp, Homo sapiens
ccccggatgagagctgtaacaccccttgggactctgccattactgacatctctgagttttcgggcaccacccacattcccctcatctagacaacgacacccaatgcagaagctgctggca

SEQ ID NO: 20404 - DNA, 120 bp, Homo sapiens
cagcgggcgcaggatccaggccaaggcacaagccgagcacagcctgccaggctgagtgggcggagtgagctcggtggaatgaggccccaggcagaggacacagcacccacagagatttcc

SEQ ID NO: 20405 - DNA, 120 bp, Homo sapiens
ttccggctggtgaagcagcaccaaaggaatccttacactgcaaccctccctcctgctcactgagcaacggggaaaaaaagccagtgtgccatttcctcccgcttgctgaactacaaaagc

SEQ ID NO: 20406 - DNA, 120 bp, Homo sapiens
tggcggaagataacagggttaaatagttactgactaccctctatgttctggcaaccattctaagaaaaggagataaaacagtgaacaaaggcaaagtctctgccctcaagaagcttttct

SEQ ID NO: 20407 - DNA, 120 bp, Homo sapiens
ggccgacaaggcttttctggggagatacatgtcagctaaaagctgaagcatgagatggctccagccatgcaatgtagagaaagggggaagagctgggcatcaagagacccacttgctgtg

SEQ ID NO: 20408 - DNA, 120 bp, Homo sapiens
ttacgaacgaggtcaggttagagatagaatctgaggagttatcagtatgtaggtggaatttaaaaccatggaactagggccaggcacagtggctcatgcctataatcccagcactttggg

SEQ ID NO: 20409 - DNA, 120 bp, Homo sapiens
agacgaaatttggggtggggaggcaacaaaggaaatcagcgtgatgggaaaataatgtagttaaggacaaagtgcataagtattagtcatagaatttaacaatacttctcattaatcaca

SEQ ID NO: 20410 - DNA, 120 bp, Homo sapiens
gctcgcgcctgtaatctcagctaatctgaagggtggggcacgagaattgcttgaatttaggaggtggagattgcagtgagccgatatcccatctctgtactggagcctgggcgacagagt

SEQ ID NO: 20411 - DNA, 120 bp, Homo sapiens
gaccgtgagaaagaaaaaagaaaaaaaagaaaaggaaggaaggaaaggaaggagaaattaagctattctacaagtgtgtgaaaaagttggaagaacgatgttttaatagccctgaatcaa

SEQ ID NO: 20412 - DNA, 120 bp, Homo sapiens
gagcgggagatgaggaaaagagggacccaaaaatgaaactgaaaaacactccagctaatcaagaacttgaaattgcttgcaatttgtgactatgttaaacaacatctaaacaaagtcaag

SEQ ID NO: 20413 - DNA, 120 bp, Homo sapiens
tcccgtattatgtggacatttctttgctgattttgcattgttctccagcttactattgtgatatttatttcaggagctcttaacctagcttttccaatttctagctattatcattcacct

SEQ ID NO: 20414 - DNA, 120 bp, Homo sapiens
tcacgataaaatattagaaaaaaattccaattattaactacatcatccattaaagtatgctggtcttcaatagctggtcgttatgtccatggctttatctccaacaaagacagcctctgt

SEQ ID NO: 20415 - DNA, 120 bp, Homo sapiens
tagcggtgaattaagaacagctttgattttctgttccatttgtttctattccaagacccttataattaagactgttggaagcatgatgtcacagctcccagtgttatctagtgccagcaa

SEQ ID NO: 20416 - DNA, 120 bp, Homo sapiens
gatcgttccaagcagactttttccccatgtcatcatagtcagtttccagggatgagtgggacagtcaagtttttataactgctttcctttagtattataatctttttcattcttctcaaa

SEQ ID NO: 20417 - DNA, 120 bp, Homo sapiens
ggtcgttgtaacagctaagtcatcatggctgatagaatacatgtcctactgccctaaaactctggaggatccttttgagcatgaacattacagtgttctggaagcccagagactctccac

SEQ ID NO: 20418 - DNA, 120 bp, Homo sapiens
gtgcgtgcatgtacgtgtgtgtgtgaattcagctttgcgtagataatcctaaaggtatctataaaagcctgaaagtatgttctgaaatagattttaccttctttttttccaaacgtgtta

SEQ ID NO: 20419 - DNA, 120 bp, Homo sapiens
ttccggaagtggaatgaggaataggtgggagtggctacaggaagcagggttgaaagtaattcacatattgtatcatttgtgtaaagctgctgagttgctcttttggaggtgccatttggg

SEQ ID NO: 20420 - DNA, 120 bp, Homo sapiens
gggcgagtaggctgtgagagcctctaagtcttgcagctccttcaccagtgtctcggagcccagcactttgggtcttgccactgtttttgtcagggagctgtcaatctggagtggccactt

SEQ ID NO: 20421 - DNA, 120 bp, Homo sapiens
ccccgcaggaaagcttggcagggtgcctggcacaggctgcttacttgagtggggctgctgtcctttgcctgtccctcctgctttccttgaatgaaagtcttgaaaaaaagagaaactgct

SEQ ID NO: 20422 - DNA, 120 bp, Homo sapiens
ccacgagagcatgtgcttgccgacagccgcccacctggctcctgtcaccaaaacgacatctgcttctcagtagcaccaggcagcccgcagggggctagactggcctgggctcaaatccac

SEQ ID NO: 20423 - DNA, 120 bp, Homo sapiens
gagcggttcccttcgagaagaagatgaaatggcatttacggagtcttggggttgccgaagagagacatcttttactcggtaattctgcataaggctctccccaacagtgaaagcttttgc

SEQ ID NO: 20424 - DNA, 120 bp, Homo sapiens
atacgagggatgttttggggctaggaagtacttgaacgtggagggaaagaagtgacattcagaactaagctgcctggctttatgtctaaaatgtaagcatggcagacagccaaaataggc

SEQ ID NO: 20425 - DNA, 120 bp, Homo sapiens
ggtcgaatggccagctttgaagctgggaaagtccctgcagagtacgttttcaaaaggagagaagggtgggtgtagcctttcactctctggagaaagacaaatcacattttagcatgtgtg

SEQ ID NO: 20426 - DNA, 120 bp, Homo sapiens
gaacgtgaaaagtgtgtgcgtgtgtgtatgcacatgtgtgtgtatgcgtgtgatagtgtagatctaataaaataccttcagggtgtaatcttattgtcacatatgcagacttttctcatg

SEQ ID NO: 20427 - DNA, 120 bp, Homo sapiens
tgtcgctgacttcacttctatttgctgtagcagggggatttccagctcagttgcttctgagcaggctatgttttgccagtcacccttgtagcactttgtcctgtcttcttcactttagtt

SEQ ID NO: 20428 - DNA, 120 bp, Homo sapiens
ctgcgggaccgcggaggcggctgggcggggctggagcctgtgaccgcgcccgctgcgcgcatgcccaaggccccagcgcttctgcagggcagtggcaccggtaggcactcggaggcgcgg

SEQ ID NO: 20429 - DNA, 120 bp, Homo sapiens
acccggattccctctctcgacccaggcgcatgagacggatggtttcttcccaggactctgccttcactgggacgcacacatggaagacagtggactgggacagagttcacctgtcaactg

SEQ ID NO: 20430 - DNA, 120 bp, Homo sapiens
actcgaccctgctccagcccttcaaggccagctgccttttgatgggaacagggagttagcatgtgtggtgacctgagctagaacaaccaaaggacgcagctttcagattgatcttttctt

SEQ ID NO: 20431 - DNA, 120 bp, Homo sapiens
ggccgtattactttggcatcaggaggcctgcgttccaattctggctctgctacttatgggctatgtgtcctccagcaatgcagtaatgtcctctgaacctgtttccttatctgtaaaatg

SEQ ID NO: 20432 - DNA, 120 bp, Homo sapiens
caacgtgcaccttgctttccataccaggctgagctgaggggtggggtaagggtgggcagtaaccatcagagaggcatgaaggtttcccaggtgggatcagctgatggctgctggctcact

SEQ ID NO: 20433 - DNA, 120 bp, Homo sapiens
aaacgggcccagatccgccctcttataaggcctgccagccaagtggcagtgacggatttggcttagctggctccctcctctgtccacttgctccaatctgcagctctgcaggtcaccatc

SEQ ID NO: 20434 - DNA, 120 bp, Homo sapiens
gaacgtcagcctaagctagggtagcgaacttgccagggagaaccaagaaaactagatgtacagggctgtatacaaaacactttttggaatgtctgcaccatagccaaggcagagttagga

SEQ ID NO: 20435 - DNA, 120 bp, Homo sapiens
agtcgccacagagagaaaaggctaacatctctaacagaagaagctacactacaagtgggctcagagatgaccagaatgcgtcctgggctcggggtggccagtggcagggcccacccctgg

SEQ ID NO: 20436 - DNA, 120 bp, Homo sapiens
cttcgactacaacttctctacctgaatttgtttgtgggggaaactaatactgccagactctacttggaaacactttagaggtgagggagcaatcagatcctaagccactgaaagagaagt

SEQ ID NO: 20437 - DNA, 120 bp, Homo sapiens
cagcgctcagaattctaagtcagaatggaatgttccgaaggatgaggaggctgcagctgtgtggacattagtattttctctgctttccacatttccgagaacgccttctaggccgaagct

SEQ ID NO: 20438 - DNA, 120 bp, Homo sapiens
tgccgtttcattggccacaaggattacctgaagaaaaacaaaagaacatcaaattctacagagaaaaccccagtaagcctcagtctatttctatgggagataggtaatgtttttaaagag

SEQ ID NO: 20439 - DNA, 120 bp, Homo sapiens
cctcgtagcaaaattgccaagtcgcttacactacaagactccagaacagttggcttaggaccatcaaagaggccagaatcccttggaaggcgatcaaaagattctgggaaatagaactga

SEQ ID NO: 20440 - DNA, 120 bp, Homo sapiens
gcccgttttcagttcccatttgattacctctgcagccctgagctctctgggtgcaggggatgagaaggcagagatatgttgctgtgctgagagagttttgtgggatctcattcccaacct

SEQ ID NO: 20441 - DNA, 120 bp, Homo sapiens
tgacgttaatagtgacattggcttaatgcctatcatacagcaggcaccttcaaaaaagtcatcccatttaatcctcacaacaacaaatcctcacaacaatgcagtgagacagatgagaca

SEQ ID NO: 20442 - DNA, 120 bp, Homo sapiens
tagcgcaagcagactaatatagcccactccctaggatgactgccgggagccagacagcctaaaaccagtgactgactgatatgagaatcaaaaggttaacctccttgcctcaagatggaa

SEQ ID NO: 20443 - DNA, 120 bp, Homo sapiens
gtacgctgtaaatcacatgcacctgagtctcagtgttagctagctgtggcaggaaggccagcagcaggtgatgggcaaggggaacagtgtcaggaaggtcccacaaaaggcaacatgagg

SEQ ID NO: 20444 - DNA, 120 bp, Homo sapiens
gatcgaggatctctagacccagctctgacacaattctgatatgtaccaggacaaggcagaactgcagaaactacagacacaagctaattacactcaactcaacctcaactagagtgtaga

SEQ ID NO: 20445 - DNA, 120 bp, Homo sapiens
agccgtgtttcagtaatttaatttggtgccatttcctagcacaagtttaggttgtgtgcaccctacagatgccaacatctgctcgctctactgcagctgttccaaaaggatgatctggga

SEQ ID NO: 20446 - DNA, 120 bp, Homo sapiens
gatcgagagagacagagggagacagaagcacagctgaggagaaggcaaggtgatgacagaagcagagattggaatgataagctttgaagataaaggaaggagccacaagccaaagaatac

SEQ ID NO: 20447 - DNA, 120 bp, Homo sapiens
caccgccactcaaagctgagaaaggcaaggaagtgccttctccccctcagagcctccacaaagaaccagccctgctaacaccttgattttagccccattagactcatttagaacttctga

SEQ ID NO: 20448 - DNA, 120 bp, Homo sapiens
cagcgtgactctatctctattttgcacataaggaaagtgaagcaaagacaggttaagccacttaccacttgccacagtcacactgaaattggtaatgtgagaattccaacctaggtggcc

SEQ ID NO: 20449 - DNA, 120 bp, Homo sapiens
tttcgttaatggtgtaaaagctacaaaatacttaaggacaattgcacagctgcctggctggctttcagaaattttcactatgtctctatgagaattcaaactctagttgttggaagctgt

SEQ ID NO: 20450 - DNA, 120 bp, Homo sapiens
atacgtatacacatgaagttctgtaactgacatacaggattacagcaaagactggcaacacagatggcctatggaggggttattactgaaatgggcagagaggatggctttcccttcata

SEQ ID NO: 20451 - DNA, 120 bp, Homo sapiens
acacgtttggggtaactcaggtgctctctttctcactctacattctcctgtggggtcagccagccatcctgtcttggacattgctaaatcaggtgacctcggacagcctcaaaatggtga

SEQ ID NO: 20452 - DNA, 120 bp, Homo sapiens
attcggccttcatggtggcaatatgccagctagaaaagaggtatgtgccgagtaaagcccttctctttatggcatttggctccctccccatctccttgccaattaaacccattcaactag

SEQ ID NO: 20453 - DNA, 120 bp, Homo sapiens
aaacgaacaaacaaaaacaacaacaacaaaatgcagtaccatttacaaccactccaaggaaaataaggtacttggatattcatttgatatggtttgaatgtttgtgtccctccaaaattc

SEQ ID NO: 20454 - DNA, 120 bp, Homo sapiens
gagcgtgggcgggggggggggggtggaggaggaggagagaaggagtgggaggagtggagaaggagggggaggaggagaaggataaaaggttacaagtggttgttactaggaatgggggag

SEQ ID NO: 20455 - DNA, 120 bp, Homo sapiens
tgccgctcaccaagcaaccttcctcatgagctatgcccccaccttcctgaactgtctcttgctcctgtttgatactgtcatgctgcacgaagcttacacttgctatctctcacttccctc

SEQ ID NO: 20456 - DNA, 120 bp, Homo sapiens
catcgacccagaaagttccttctgtcagtagcagttcacccccccatgcccccaacccttggcctccctgccttcccatctccactcccaaccctcactgctctgattctatcaccattg

SEQ ID NO: 20457 - DNA, 120 bp, Homo sapiens
ggacggctggtacttggtactttctcacaatccaaattagtaaacttgaaaactcaaaccaatttttgcttttagaattaaattcttgttgagtttttcaatcttgtactacaaagcctt

SEQ ID NO: 20458 - DNA, 120 bp, Homo sapiens
aaccgggctccatttcagttgtggcaacccgaaacagggcttggagatgctcatctgttaatggctgactcaaagtgtgttggtttcgagtcaaatatgaaaaagccttttcacagattt

SEQ ID NO: 20459 - DNA, 120 bp, Homo sapiens
agacgacagatcaccatttgatacctatcaggatcaaatattttttcatcttccttattttgctgttttagctcatcaacaacttctctgagggcaggaaagtctgttagatttttttcc

SEQ ID NO: 20460 - DNA, 120 bp, Homo sapiens
atgcgtaagggattttattacaaatgatgatcttgaattctcctgaaatatctacaaaaactgatagctatagtttcctatggttttagagaaaacagaaggctaaaatgtcccaacaag

SEQ ID NO: 20461 - DNA, 120 bp, Homo sapiens
attcgctaatttgtctattggcatctcctagaacagaagaagacaatgaattatcttcacctgtcagagatgacagtatgagccatcaggcagtacctctgtggcacagagaggaccatg

SEQ ID NO: 20462 - DNA, 120 bp, Homo sapiens
gagcgatactccgtccccctgccaaaaaaaaattacaaaatacaaatgcacacacaacaaccacagcatcttcagcagcccaggttctggactgtatatactacaagatgctctagcata

SEQ ID NO: 20463 - DNA, 120 bp, Homo sapiens
ctacgaaacagcctgtattttgcaggtgcaatggatgatgatcctaagataaagacagaagaattttatttccttctgaatgatcctcatcaacattcccagcacactgcaagaattatt

SEQ ID NO: 20464 - DNA, 120 bp, Homo sapiens
tttcgttaacggagatacttaaatcctgacctaggaaggtttcccttgcatatttacctatcaagactgtcagttacggtgatttccaaaagggattttccaaaagggaatctgtgttca

SEQ ID NO: 20465 - DNA, 120 bp, Homo sapiens
tcacgatgataaatatccagcaacagacctaacaaaacataatacaacacttcctataaaatgagtaaagaatgccatctcattaggcagatacgaacttaggtttcctctatttcaatt

SEQ ID NO: 20466 - DNA, 120 bp, Homo sapiens
cttcgaaatgaatcacactttctgaaattcttattctacatattataatactaggtcattatctctgcatctgttaaacagagcatgacgttggttaaacagggttagtgctgcaagata

SEQ ID NO: 20467 - DNA, 120 bp, Homo sapiens
aaccgtggagtccctgccaactaattctatttgcaacactgcattctccaataactgcactttttcatatagatttatcctcaaaataaaatgttatcttgaaaaaatattattttaaac

SEQ ID NO: 20468 - DNA, 120 bp, Homo sapiens
aatcgagtttttagtgagagcaacatgatcagatttgtattttcaaaagaccactctgacttcaatgttaagaattcattcatgcatagtgtcatgcacctgtggtcccagctactcggg

SEQ ID NO: 20469 - DNA, 120 bp, Homo sapiens
acacggcagtggacaacagacaaattccctatctgtgaggatcttacatacaatatacaaatcataaataagataatagtgctgtaagaatattggaacagggtgagaatgaaagggtag

SEQ ID NO: 20470 - DNA, 120 bp, Homo sapiens
gatcgaaagaaagagaagcaagccatgtaaatacctgggagaagagcatttgaagcaaaggaacagcaagtgcaaaggccctaaaacaaaaatgtgcctgccatgtttaaggagcagtaa

SEQ ID NO: 20471 - DNA, 120 bp, Homo sapiens
tgccggctcagattctgtaaattctgtgagctttcccatatcattccaataaggtcttttaagggtctgcttctgtgattggcaacctgagaaccctgcttggtacaacaagggttcctg

SEQ ID NO: 20472 - DNA, 120 bp, Homo sapiens
gaacgtgaactggcatgagtagctgaaaaggatgcagaacttatcccagtccaggagaacatcatctgtaaggcctctccagaactctgcttggcctaactcaaggggagattccaaagg

SEQ ID NO: 20473 - DNA, 120 bp, Homo sapiens
ggccgtagtcgtgagagctgcagatggaggtagagccagccaacagacaagttggcaggatgcactaaaaattggagctgggcctcagaagtgggttatgctggccaaatatcatctgtc

SEQ ID NO: 20474 - DNA, 120 bp, Homo sapiens
agccgtggaggaggggattgtttgaggatgcagtaattgcaaagaatagagtgaactctttggtcagcctgggtttgaatcctagctccatcactgatgttgtgtggttgattttcttac

SEQ ID NO: 20475 - DNA, 120 bp, Homo sapiens
tcccggcttcaagtgatctgctcacctcggcctcccaaactgttggactgtgccttgccataatcttttctttgttatatgattcctttagtaattgagcatagattctttgtcttttct

SEQ ID NO: 20476 - DNA, 120 bp, Homo sapiens
gtacgtactttaataaaaatgcatctgtttttaattaacagagaattcttgaattggaaagttctttggaaaaaagcttacaagaaaacaaaaatcagtcaaaagatttggctgttcatc

SEQ ID NO: 20477 - DNA, 120 bp, Homo sapiens
ttgcggggttcagccctgttgcttctctcacaagttgttgagtgcttgcagcttttccaaatgcagagtgcaagctaccaatggatctactattttgggacctggaggatggcggccccc

SEQ ID NO: 20478 - DNA, 120 bp, Homo sapiens
cctcgatctttctgccccagccaccttagtgtctgggaccataggtgcacgccaccatgtctggcttaatttcttagacctcatcctaaactgtaacaagaaacaactccaaaatagtct

SEQ ID NO: 20479 - DNA, 120 bp, Homo sapiens
gcacgagttgggaagtctgttccacgtccagctgaaggtgtgaatgactgcagtcaagccaactaaatgattggagactgatcttaagggagggagggtattatctatgcctttcaagga

SEQ ID NO: 20480 - DNA, 120 bp, Homo sapiens
aagcgtctcttaggaggttcatgactggacccatccccaggctctaccacagggaaggtgatcttgggcgaatctctgaaacggggcttttgcctgtggtgtgtaatgtgtgaaaaagcc

SEQ ID NO: 20481 - DNA, 120 bp, Homo sapiens
gtccgtcaattctcccagaatgcctggcagggatgcagctggctgccttcctgtgcccatggcagacataactatcaacacgtctcagtgatctattgccacaatcaatgcaagccaccc

SEQ ID NO: 20482 - DNA, 120 bp, Homo sapiens
tcgttcttcggctacgcagttctggagcatttccacgacaacacgcgctggtgagtgcccgcccgactccgcgaccctggcccgcgcggccaccgccccggcccccaggccagcgccgcc

SEQ ID NO: 20483 - DNA, 120 bp, Homo sapiens
cgccgccgcctttccggtctcttccacgccgccgtcccgagggggcgatttaaatgtctccgttgcgcgcggctcggccgccgggggacggcgggagaagggaggacgccgtccggggcc

SEQ ID NO: 20484 - DNA, 120 bp, Homo sapiens
gcccgctaaggtcggggtcggcgcctggaggcgggcgggggcgtccgggtgcctccctggggtcccagcccagagcgtggggggagagccgctagagttgtctcctccgccgcccagcta

SEQ ID NO: 20485 - DNA, 120 bp, Homo sapiens
actcggcttcactctctgaatcgaaaagtaacttggctcctctgcctccgggcggccgccgctggcccagcgagcctcctgaacctcgcagggcctggaggagtcggggcactggagctg

SEQ ID NO: 20486 - DNA, 120 bp, Homo sapiens
ccccggttttggggaacccctgaggaaggagtatagcctctccagcgccgctgcgcggggtggggctccccaggggcagggtgtctgggatccactggggcgcactggagcccagagccc

SEQ ID NO: 20487 - DNA, 120 bp, Homo sapiens
ccccggcgcccccccccccccccagctcctacaagaccctgggtggaagtggagcggagaagctcctaggatatagggaagaggaaggtgagggagcacttcccagtgacaccgccggtg

SEQ ID NO: 20488 - DNA, 120 bp, Homo sapiens
attcgacccggagaccttcaccagaagccttaagagagagacgtgtttctatagtggccaaggggtccagttgtcccctgagtccggaggggtgggcctaagaagggggcagctctcccc

SEQ ID NO: 20489 - DNA, 120 bp, Homo sapiens
catcgaggacagtcactaatagtgattgagtcagtcactatttagcccagtcgaatctgagctttaagcgttcagaaaacacggttattttcttcagtttgatagctcgtagtttcaagt

SEQ ID NO: 20490 - DNA, 120 bp, Homo sapiens
tagcgtagaaaagccctccttcctgatgctcttgctagtgctgggtggaaagattccctttcaactcaacatgtgtgaagcacatgaactgaagcactcttcctgcttagcatggcaggg

SEQ ID NO: 20491 - DNA, 120 bp, Homo sapiens
agccgggaaaccaagcattgagcaacagaatggttcttaggcagaagtgagcctcatccctcagtgctgggacagattacagccttccttcactgccgctttcattcagcgcagggactg

SEQ ID NO: 20492 - DNA, 120 bp, Homo sapiens
tgccgatacttagaaaataataagtcttttccgcccccttcctgtctttaatccagtgccccaagccccctggtgactttaccttgaacttcctgtataacgccaggtagaaaagcctca

SEQ ID NO: 20493 - DNA, 120 bp, Homo sapiens
actcgaggctctaacacaacagcaagctctttatcttgctttgttggtcttccccatccgcttatcagatggaaactcggcattcctcagagacccttcagtgtttctcagttgcttctg

SEQ ID NO: 20494 - DNA, 120 bp, Homo sapiens
tggcggggagcaggcacccccagcctgtgtttgtatttcctcacctggattacctgtggcccttgcatcagggagagcccagccttgagtgaaactgcctgggagacaggctgggcgctt

SEQ ID NO: 20495 - DNA, 120 bp, Homo sapiens
ctgcggcagtcggcagtgaggaagtggtggagaaacgcagatgtccatttcaaatcacaaggcggcttcagtattccgccgcggggctcagctttcacgtatatgaaaagcttcatttgt

SEQ ID NO: 20496 - DNA, 120 bp, Homo sapiens
ctgcgtttggaaggaaggctatgttttgctttagaaatgtcaacagagctgtagttacgacaaggatcaattaagaaggacgtttcccagagccgcaagacttgagtgaatctgtggggg

SEQ ID NO: 20497 - DNA, 120 bp, Homo sapiens
aggcgaataaaataaaattttcaaaaatcgagaacttcagtgtcctagtctgggtttccctgagcagatcctgagatgagggctcacatgcaagtggttcataaaggatgtgtttccggg

SEQ ID NO: 20498 - DNA, 120 bp, Homo sapiens
agacgcaggacagggcaggactgaaactcaggcagggtccctcagagcgtggcctcagcctgatgctgcaagggggatcagaggtgtgagttacgccaaggtactgttccatctccagct

SEQ ID NO: 20499 - DNA, 120 bp, Homo sapiens
tcccgtaaacaccagtcattggttaagggccacttagggaggaataagtggtagaaagtggtcctaggcactttccacccaggggtgaagtgtagacagtggggcttcaatagcttaagg

SEQ ID NO: 20500 - DNA, 120 bp, Homo sapiens
ccacggttctggctcttggagccaaacgaagactgaagccacagtgtgcatgtaaagggagtccaaggagcattgggtggggcattgaaattgtttgctacagtcggtttaccttcaact

SEQ ID NO: 20501 - DNA, 120 bp, Homo sapiens
taccgcacctgccacacccctgccagactcctctcaatttgagctgtgaggtgacttcatagtaacaggcacaagctcagagcttcttggggacaaaagcccaggagtccctcttcttgt

SEQ ID NO: 20502 - DNA, 120 bp, Homo sapiens
aagcgactaccactgtcaggacagggttcctgccaagtccatgtgcagttgcttctggctggtaccaggtcaccaggccagcctttactgccgctgccaccaggttactgacttattcaa

SEQ ID NO: 20503 - DNA, 120 bp, Homo sapiens
aatcgtaacatgaagaattctataggataaagttggctctgtgggctggctgcctgtcagactgccagcagaacagagcagcctttcactgaaactttgaacttaattatgtgacatttg

SEQ ID NO: 20504 - DNA, 120 bp, Homo sapiens
acccgcccagtggatggaagaccctagggtactgatctcacctgagatgagaaagaacttcacagtgtgaagagctgtacaagggagaactggctcaccaggaggtggtgacccattgga

SEQ ID NO: 20505 - DNA, 120 bp, Homo sapiens
ccccgggctcccaaagatcagtatctgtgagtgccagactgagactagaccctgggaatggcatagctcaccagagccttggtgttcagcctgtggctctctgctcagccccctttttat

SEQ ID NO: 20506 - DNA, 120 bp, Homo sapiens
aaacgtatgagtggccaggagtccctttcttcccacatggccaggatatatctccctgttgcatcagacagacctgatccaaatctctgctacttccttctctgatctgggaaagtcatt

SEQ ID NO: 20507 - DNA, 120 bp, Homo sapiens
ccccgctgcctctccgagtcttgttacactttgtactgcccacagcttcaaacacggggactcagaaaacatttaaagatggaatgaatgaatataaaaagtaaaaagctgagcaaaaat

SEQ ID NO: 20508 - DNA, 120 bp, Homo sapiens
taacgttttgatctttgattttgaatttgtctcagataatgcctacaaaaaggatctcaatgattcattctttttttagccagccagttctccagtcaagttttaaaagacttggaagaa

SEQ ID NO: 20509 - DNA, 120 bp, Homo sapiens
actcgtgggtcaatgcacagctatttctgtatgtaagtaggctgggagaatactctgtcagttcacaaaggccaggggcctgactgcctgagctaggcttccttccccccctccctcctt

SEQ ID NO: 20510 - DNA, 120 bp, Homo sapiens
aatcgcccattgatttttctgggccaggcctttcccctgcagaggcgcagtacctttcaagtcaggagggttgggttagttagttcttgtgccggatgttttctgtttgccctccacatc

SEQ ID NO: 20511 - DNA, 120 bp, Homo sapiens
aggcgtctgcccctggtttatgactgtaaatggatttgctggaggatgttgtcctgtatttcaggggtgctaacagaaaggtagaccttacaaaaaacaaacaaaaagaaatgcagaccg

SEQ ID NO: 20512 - DNA, 120 bp, Homo sapiens
atgcggtcatttaagtcacttaatgcccttgcttccttcaaaacagttctcataaaagattgacttggtttattgctgtactcaggaaatcaaagcagagggcaagccccagatgggatt

SEQ ID NO: 20513 - DNA, 120 bp, Homo sapiens
gaccgagctctaagttaagaggatagtactcttcaggttttacaaactagagaagctcacacctttaagtaacaattttcattgcctttggaacttcagaactgagtcaaggctgcagag

SEQ ID NO: 20514 - DNA, 120 bp, Homo sapiens
ctgcgaaaactgggagaaaattaagagcagggcctgcaagatgtgggagctcagagccttgagggaagcagagccgtggagcttacacagagaaggctgaggggtgagggaataatgaag

SEQ ID NO: 20515 - DNA, 120 bp, Homo sapiens
aaccgacacaatcctgctgtattttctcaatagttgtattttctcagcagtaaggtggaagcagtaaacctatctccttaggagtatgtgagatgaggtttgtgaactatcgggacctac

SEQ ID NO: 20516 - DNA, 120 bp, Homo sapiens
gcccgcatgcctggcggtcccaatggcctggtctggcctgacctgcctttgaaatgagacgcctgaaatgagatggctggtactctatgacaggcacccaaggatccttgaggaagataa

SEQ ID NO: 20517 - DNA, 120 bp, Homo sapiens
actcgtaagtgcacaaaaagaggaattgtgccagaattgctttttgggagaagagataagctccaacagttatcatgtggacttaaatcatttcctgctctggcaattttcccattaatc

SEQ ID NO: 20518 - DNA, 120 bp, Homo sapiens
ctgcggcctcttctcagtgcaccactgatccgcccaggcatggcatgtggtgggacagtcccggctgcattcccaggcaaatactcctgcccctcaaagttgtcagtcctcccctgaggg

SEQ ID NO: 20519 - DNA, 120 bp, Homo sapiens
tgtcgtgagccttggataaacagaaaggatgtgtcactccctccagtgccttagttcagagcaggccagggcacagtattgccctggatctcgtgaagatgggctttgccctggctggcc

SEQ ID NO: 20520 - DNA, 120 bp, Homo sapiens
tggcgagtttaagcaggcggttcttttgtgcctttacatatctcatttcttaacccacgaagttagtcatttccatagtgagcaggggatgtccaagaacctagattcaaagtgattatt

SEQ ID NO: 20521 - DNA, 120 bp, Homo sapiens
agtcgatttgtgcctgagaagatgtttgttttgaagtagtgcttggtgcagggtgggaatacttcatctgctaggttcaggaatgcagatggggactgaccctgtgggtgggtcagttaa

SEQ ID NO: 20522 - DNA, 120 bp, Homo sapiens
tggcgggaacattgttttgcccagacccagttctttgcagcagattcagtcccagtggaactgggctcaccaagcccacgtcccaggtgaccagactgtttctaacttatcagtggtagc

SEQ ID NO: 20523 - DNA, 120 bp, Homo sapiens
ctccgagatcagagaagtcactgtaactatattctcgggacttgcaggacccatcccacaggcctgctgtgctgccactctgccccagctgggcgctccctgaggccacccccacttctg

SEQ ID NO: 20524 - DNA, 120 bp, Homo sapiens
caccgtcctgcaccagccacccctcagccatccgctgtcctggctgtcccttctcttcctcctgctctgccagcagagccacccagcctgaggccagtcagtaagaagtaaactgaagac

SEQ ID NO: 20525 - DNA, 120 bp, Homo sapiens
gaccgactcccaaaagaaatttacagttgagatgcctgtatcaaacaagacctttcaaatagtcttatgtccttagagaaggatttaggtttcaaaatgtgtctataaattaatttttta

SEQ ID NO: 20526 - DNA, 120 bp, Homo sapiens
ggccgtgtccagtacatcctgtacctatggcaggtgtgccagcctgagggaggcagcactcaccttaaagcccaagggctgggctctgggagtgaaatgtgagagctgggccaggccctc

SEQ ID NO: 20527 - DNA, 120 bp, Homo sapiens
ctgcggatgagattgaggccctgaacagcaacgctgaggaactagatgtcatgtatggtggcgtcctagtacaggagcatgtgaccatgggcagcgagcccccccacttcctcgccatct

SEQ ID NO: 20528 - DNA, 120 bp, Homo sapiens
ccccgcacacacttctaagcaccttctctttgggcctggggcctgcttatcatcccctagtttcccagagcttgtccaaggcccaggagctccaaggttggccccctgcctgagtttccc

SEQ ID NO: 20529 - DNA, 120 bp, Homo sapiens
aggcgcccctgggagcccttgcccagcctgaggccttgctctcctataggagagagctgggcaccatggaaaggggcagtcagcatccaccacaaggcttttccaagtgcaaggcactga

SEQ ID NO: 20530 - DNA, 120 bp, Homo sapiens
gcccgtgcctcatccctcaactccagtgacatcttcttgctggtcacagccagcgtctgctacctctggtttgggaaggtacccacagcactgaccacttgattcatgcccagatgtagt

SEQ ID NO: 20531 - DNA, 120 bp, Homo sapiens
ggccgatggggggaatggggaggggaagaagccacagggtcccctctagaacttggggaaagttacaaagtgacaggtggacctgagagtccgcaggtcagagccaggcccaggccgcct

SEQ ID NO: 20532 - DNA, 120 bp, Homo sapiens
tagcgtgagcagctccctcttagcccaaggggagtcccagtggaaaagaagggggctctgatagaatattcccaactactggctgtgtctgaggagcctgagacaagaggaggcagaagg

SEQ ID NO: 20533 - DNA, 120 bp, Homo sapiens
ctccggcctccggcggggaattccactatcccttctaaggctgatgtccctctaaagctgagagggacatctccttaccctctgccagcaccccaccccacaagctgggcatacatcagg

SEQ ID NO: 20534 - DNA, 120 bp, Homo sapiens
tcacggtttttgctattgaaagtaatagcaaaaactttcaatagcaaaaactgtgattacttttgcatcaatctaagagcttctcctcctgtgggagggtcgtggcgaggagactttgag

SEQ ID NO: 20535 - DNA, 120 bp, Homo sapiens
cagcgatacacagctacacagatatggccacacaaatacacagtcacacactagaccaccactcacacaacctcaaagagacaatgagccacacacaatgacacactgccccccaaaatt

SEQ ID NO: 20536 - DNA, 120 bp, Homo sapiens
gcccggatggggcaaggagaattttggtcgttcttggatgctgtttccttccttcgccgcccctccgtgcgagcgggatcgtggagcccagactttcatgaccaggacaagggggtccgc

SEQ ID NO: 20537 - DNA, 120 bp, Homo sapiens
ccgcgaggcggagggaagtctttagacccgtaccgcccgcccacccaccccccgggctagatctcggacaagcctggaaacgcccagggtcgtgcccggcagtcccacccagggagccgc

SEQ ID NO: 20538 - DNA, 120 bp, Homo sapiens
ccgcgggctgagattttcccagtccggagaaggggcagagaggcgggcccggggtggtgtggaggcggccgaaggagctgggggctccctgtccagggcccggaacagctttccaggggt

SEQ ID NO: 20539 - DNA, 120 bp, Homo sapiens
tcccgctcgcgcgggccaggcactcaccgtgcagggtcaggaagtcccggcccgagtccatgcccgacgggcggcgcggcgggaggggcaccgcgggactcacttgagtagcgacagcac

SEQ ID NO: 20540 - DNA, 120 bp, Homo sapiens
caccggcggcctggggtccgagcggagtgcggtgcagggacctgaatggaccgcggtgggaggaggccgggggtggtcccgggacaccgccccgcccccgctgccctgcgcccccgcccc

SEQ ID NO: 20541 - DNA, 120 bp, Homo sapiens
ccacggctatgggtggaaggcgacccatgaacagtttataaggcattaactttctattgtggaaagctagtgtgtacccaatgctggacagatgtcagcaggaaaaactggaaatgggcc

SEQ ID NO: 20542 - DNA, 120 bp, Homo sapiens
gcccgcctgggtttctggggaggtaatccctgcagctggcgggtggcccgcagctggggatgtttgaatggtaggggtacagtgggagcaaagaccagagaaggaggtaaaggaaagaac

SEQ ID NO: 20543 - DNA, 120 bp, Homo sapiens
gtgcggatgcaagagcacctggccaagcgagagcagctgggtaagcgccaccagggtggggcttcggggcccaggccacggccagagccacagccttctgtggatgtgggctggcagctg

SEQ ID NO: 20544 - DNA, 120 bp, Homo sapiens
gagcgggaccaggaccagagactgctctcagatggccaaggcgctccacctgacaatgcctcttcctgttgaggccacttcccttctagggcacaggctcatgcacagggcctggactcc

SEQ ID NO: 20545 - DNA, 120 bp, Homo sapiens
ggccggccagtgggcatgggacagtgctaaggctgctgtgtctatgccaggtggtccctgctgggggcagcagtaccatctacatctccttcacccctatggtgctcagccctgagatcc

SEQ ID NO: 20546 - DNA, 120 bp, Homo sapiens
ctacgccctgggtttcatgagcttggacagcaaggtgagctcttccggcctggggtgggggccgcagccactgctccctcctgggtagcatgctgcctactcagcccagggatcagctgt

SEQ ID NO: 20547 - DNA, 120 bp, Homo sapiens
catcgcctgcaggactttgcggtgggacccctgaaactggacctgcatagctacgtgaggcctgcacagtgagtcagctggggtgccccatctcctttcatccccatggggtgcaccctc

SEQ ID NO: 20548 - DNA, 120 bp, Homo sapiens
ggacgggcatgggtggagaagtcagcagaggagcccagggaaaggctggcccgaggctggatgagcagagtgggggcagccagaaggccccaggcgcccggcttgccccaacaatgccta

SEQ ID NO: 20549 - DNA, 120 bp, Homo sapiens
ctacggcggcagtatggaattccagtgccaggccagtgacctcattcccgagcagccctgctctggggtgagtgtgctgccaccctctggccctgccagcttacctggacctcagatgtc

SEQ ID NO: 20550 - DNA, 120 bp, Homo sapiens
ttccggcttatggtctccaggcccttctccgtttctcaagatggggcgagccaggaccacagagctcctggccctggccagaagcaggagtgtgaggaggagacagcctcagcggacaag

SEQ ID NO: 20551 - DNA, 120 bp, Homo sapiens
cctcgatggcacaccctcacatgtgtacagacagcacccctgcacgccaccctcaggtgcttgtacccagacgcaaactgcatgcctgaccctgccataccctgcatgaacactcggggg

SEQ ID NO: 20552 - DNA, 120 bp, Homo sapiens
agacgttgtgttcacatacatgcatgcacgtgctccataaatgtccccagacttccctttccctcttagtccccactgctgagatgctggtggaggctgatgcattcctgtgagcacctc

SEQ ID NO: 20553 - DNA, 120 bp, Homo sapiens
ctccgtcctcctgtgcaagctcagggtttgtgtcccagctcaggtgagcccatggggttgccataattgtaagacactccaggttctaacgtaaaatttcctcttctgacttattctcag

SEQ ID NO: 20554 - DNA, 120 bp, Homo sapiens
gtgcgcacacccatatctgcacagtgggcttccagggtgtgcagaggcaggctgagggtagacagcgccgccctgtctcctacttcccctcctgcttcagaggccctctttcttcttctc

SEQ ID NO: 20555 - DNA, 120 bp, Homo sapiens
tctcggagggcttccctttatgctgtgctcccttgagctctgccaggtcctagcctcactctgcacatttctgggttgtctcatccatttccagagcctcagtgaacagccatattattt

SEQ ID NO: 20556 - DNA, 120 bp, Homo sapiens
tagcgagggcctgctgtgtactagatgctgtgctaggtgatggtactccccgaggacctcatcatggaggtcagggacacacacggatctgcagaagacagaatggcacccttgacccac

SEQ ID NO: 20557 - DNA, 120 bp, Homo sapiens
ttgcgtttgctcccttcaacgagctaaatggatgggaaggcccagagcacagccagaggttccattccaccagagcttccaaggagacacggcggttagccaccaggcatttaaaagtcc

SEQ ID NO: 20558 - DNA, 120 bp, Homo sapiens
atgcgctaacaatgctcaggcttctggctcctggccagaattatctcccaggctctagagccaaactcaatctgtccaaagtgaactccccatcccctccccaccttgtcctgccccaca

SEQ ID NO: 20559 - DNA, 120 bp, Homo sapiens
ctgcggatgccccctcctaaagttctcccaacactattctcttttcttcatccctacacccatatcttggtttaggacagcagtttctaagcctggcaatagatcagtggcctttttttt

SEQ ID NO: 20560 - DNA, 120 bp, Homo sapiens
aatcgaatgcatgtcctcccataagcaagcgctgtacaattttcagagaggattagtttagccataaaaagactggaacctatgtatgggttggatggatttctgaagggcagctggttc

SEQ ID NO: 20561 - DNA, 120 bp, Homo sapiens
agacgtttcctaaaggtctgcaaagacttccaagttccctgaaaatgagactgggtgagcagggcagggttggtgctggagttggtggagtgcctggcaggggtcctccggctgtcagaa

SEQ ID NO: 20562 - DNA, 120 bp, Homo sapiens
gaacggaacagcccagcatacagggagaagcagttagggcaaaaggcccccatgggctcaggaggagctgatgggattgtggcattattcccagcctctaaggcatttcttgtgcaaaac

SEQ ID NO: 20563 - DNA, 120 bp, Homo sapiens
tgccgctctgctgagtgatcacttaaatagacatacttggaaccaacagaggttgcacgcacgtgaggactcattctccaggctgctgtgtggactggccagctctttcgttcttgccca

SEQ ID NO: 20564 - DNA, 120 bp, Homo sapiens
gcccggcccagttccttagcaattaatctttattaacaacagtaccgctgaagtaggtactgatatgattcccacttcacaaccgaggaaaccaaatcttgcagtggttaaataacttgg

SEQ ID NO: 20565 - DNA, 120 bp, Homo sapiens
ggccgctgtgggtggcgcaggaactgcagaagacaagataggattagggagggccagcaggttgccagaggcccttttccacctgctgggcttagaggggcgggactctgcccgctccct

SEQ ID NO: 20566 - DNA, 120 bp, Homo sapiens
ccccgccctagctgtgcctttgagtgtgtggcaagggattgcagacgggagactgcttgtcaattcagggaagtcagcctctttctgccacttaattcgcccatcagtagagatccgact

SEQ ID NO: 20567 - DNA, 120 bp, Homo sapiens
ccacggttcactgtcacccccattgcacaggtggggaatccaaggcacagaggcgtctgggccagagtcccgggactatccactcattccggggttgtagggcagcatgtgtcaggagct

SEQ ID NO: 20568 - DNA, 120 bp, Homo sapiens
gctcgagcgtgcggggcactaattgcgagtgcagtggccacaggctcccgggcaaagtggtcaggagcccattcccgccacctccgtccgcgcgccccgccctgtcctccagcaagttgg

SEQ ID NO: 20569 - DNA, 120 bp, Homo sapiens
aagcggagcactggggttgtagcaggccgtgggcatgccccttcccctgagtggacctgccatgtggcgctccggggagccgcagaggctgtgggcctggagcccccaggccggggacac

SEQ ID NO: 20570 - DNA, 120 bp, Homo sapiens
cagcgctgccttagacaggcagccgacactggaggccctggtggagcggttggtatctgtggaggcttgtctattgggcttggcaggctggcagccccctgtggctgcccccatgtttat

SEQ ID NO: 20571 - DNA, 120 bp, Homo sapiens
gaacgcttctgtgggactctgtctgtctcatcttgaactcagtgagacacagtttgctgcactgggaagtgattacaaactggactcttagggtggaggaagcatttttcaaagacccag

SEQ ID NO: 20572 - DNA, 120 bp, Homo sapiens
ctccggttctatcactaattctgtgttccaaaacagacacccacccccttgttctgggctttcttttttggtctctcattctctaccagacttacgggtccatcccagccctagaggtgc

SEQ ID NO: 20573 - DNA, 120 bp, Homo sapiens
tcccggcccaggaccaataatggcttcccgccttcggacagccccatgctttcccctggttattctaggcttgctgtacacatgcatgtgcctttttcagattctttctgggactggcag

SEQ ID NO: 20574 - DNA, 120 bp, Homo sapiens
ggacgcatgacctctggaagcgggtgtggaaaggaagcctgtcccactgggcaaatgtgaggccctcttcccaggggaatgttgtctggatgggtctgacctgctggacaatgggccttc

SEQ ID NO: 20575 - DNA, 120 bp, Homo sapiens
actcgaataagattcaggtacaaaaactttgaaatgagaatctggtggtttgagtaatccaccagactgaattatctaagatcacattatccaggttggggggcagaattacccagttaa

SEQ ID NO: 20576 - DNA, 120 bp, Homo sapiens
gctcgctgcttcaatctgtggaatcagccaggagcccagtgaggaagctcagaaccccagtaacagcagagcatctttcagatagctccagagttttcctgcttttctgaggaagctcag

SEQ ID NO: 20577 - DNA, 120 bp, Homo sapiens
atacggaaagtggtcttcattttagcctatttatttttaggcagagagtggatggttatttgtgtgggacttttggtggcgatatataatgaataattaagttaatttctggtatgcata

SEQ ID NO: 20578 - DNA, 120 bp, Homo sapiens
gcccgctggcttcaggctgctgcttctagacagaggtgcactggacgggatagttttatcaagagaatccctaatgtgtcattttaaaccagctgtgctttttattcattctggttgagc

SEQ ID NO: 20579 - DNA, 120 bp, Homo sapiens
gagcgtataggtttacactttaccctttttatacttggaataaatttagttccagcagatctagtagcactccagaaaccaaccccatctgttccccataaaaagaacattttctctgct

SEQ ID NO: 20580 - DNA, 120 bp, Homo sapiens
tgacgagggagtggaggaaagaatgaaaataggatccctttaaagctgtatgaaacagaatggcattgaaatcagtggcaacattggatgctagaggaacttacagcaatgctttcaaga

SEQ ID NO: 20581 - DNA, 120 bp, Homo sapiens
ttgcgggttcctcacctcctggagaatctggtccgaaccaaccacatagtctgtgtaggggcgcaggccggcaagggcagcaggtgaagatggttccacatcctggggaaagaaccgcaa

SEQ ID NO: 20582 - DNA, 120 bp, Homo sapiens
ccccgggctcaacccctggctccagctgcccagctatatgactataaacacattattgaacctctcctagcctcagtttccccacaattaaaagtaagatacacagtacctaatgatagg

SEQ ID NO: 20583 - DNA, 120 bp, Homo sapiens
gtccgtggttgactgaaacgttgtcatgcaacacacacacggagagacacagagaataataaaagcagcagcattccagcagtccaaccaccattccagtagatgatatttctacctttc

SEQ ID NO: 20584 - DNA, 120 bp, Homo sapiens
ccccgcccacacccagacctgccccagtaaactcatccttccgacacaccctgccctgccataccccacactcaccagcacatgccacacctgctcactggccctgcggaagctgcagaa

SEQ ID NO: 20585 - DNA, 120 bp, Homo sapiens
aagcgcacactggcacccagtaggccctggccgccccacatgttgctgggcaccacctccacctcgcgcaccctcatggtcttcatattgaacacctccagcttcacgggcttctccaca

SEQ ID NO: 20586 - DNA, 120 bp, Homo sapiens
tggcgtagacaccagccagacccagcccagagggcacaggacctaggctcttgctgcctcctcatgggaaaggccctgtggctcctgctacataccagcccctccaggtttggattcccc

SEQ ID NO: 20587 - DNA, 120 bp, Homo sapiens
aaccgctgagatcaaggccagtttgcccctggaattaggattcccttctggcagcatcaccaactgagcccctccttatcacctccagaagctgccatggcttccaaagggagtgagtgc

SEQ ID NO: 20588 - DNA, 120 bp, Homo sapiens
gtgcggcccagaaatcagatctgggcctagttggcctggcccagtaggcaagctgctcccaggccccgctgcaggggagctctgggccctgccctctaacccttcaggtgaggggatctt

SEQ ID NO: 20589 - DNA, 120 bp, Homo sapiens
tttcgaaaaccacaggacaggacagttattcaggaatagcttggggacaatgcccctccctaatcagggccacctccaaatcactccacgtcaggtgcctgcctacttccctccccactc

SEQ ID NO: 20590 - DNA, 120 bp, Homo sapiens
ctccgcagctgaaataatctatgctgctgcccactgtacggctccccctgcagaaaccactgcctgccatccagctccctcaggggctcccatcacagcctgccccaaggccctatagtg

SEQ ID NO: 20591 - DNA, 120 bp, Homo sapiens
gctcgctgagggcagcgacttctccaaagtattgggcacgcagcgaggtgccaatatttctagaatgcagcacagctgttcttcagtgttgttaaaggtaagtaggtcatgtcactcctc

SEQ ID NO: 20592 - DNA, 120 bp, Homo sapiens
gtccgacgcccgcatctcctccaggggagctgggaaaccagagatccagcctctgctttgtgcagactcacaaagtggtccttgtatatccctgccctgtctgggcctcagtttccctca

SEQ ID NO: 20593 - DNA, 120 bp, Homo sapiens
caacgaagccttaaagttcctgaacaaggcacgcaaggacagcacttggggccagagcgccatctaccacatggtgcagatctgtctgaatccagacaacgaggttgtgggcggagaggc

SEQ ID NO: 20594 - DNA, 120 bp, Homo sapiens
gggcggaaccctggggaagttacagaaagcctgcaacctctgggttgaagccaggtgagggccacacgggcaggccaccggcctgtgtctgatacccaggtctaacacctgcagctacat

SEQ ID NO: 20595 - DNA, 120 bp, Homo sapiens
cttcgtctctttaattcaacagatcacagagccatgggcgcgttgccttgctctgctgctcccggatggaattcagctgagcagtgggagaagccagggcagttcttaaactgtcctctg

SEQ ID NO: 20596 - DNA, 120 bp, Homo sapiens
ctccgctgttctccattgtgctggggaacctagggactgtcagaaatagaaacggtgacactattctcgccttctgaacattggttaccacagggcaggactcggggggagaaaaagaac

SEQ ID NO: 20597 - DNA, 120 bp, Homo sapiens
tgccggagggacagccatttctccagtctcacagagcaaagtctggctgctgcagaccctggtgaaagctggatcccagttggagttacaaatgagaatggatactcttctctctgatct

SEQ ID NO: 20598 - DNA, 120 bp, Homo sapiens
aggcgtggcagggcgggctggagtggtggtgatcaggtcaggagcaggggggaggaaagaaagcagaccaagaatatagaggcctggacctctttagtttagtgcctggtttccttcttg

SEQ ID NO: 20599 - DNA, 120 bp, Homo sapiens
atgcgggtgttgaaagttgtgtcccaggctgagtcaggaataggcagaggggtgggagcctgcttgtggcagaggagtgaggagtgggaggagagaatttatgaacacttagtggggttc

SEQ ID NO: 20600 - DNA, 120 bp, Homo sapiens
ctacgcatgttaagaaacatttataaggagttatgtgtatttattatgcttaaagattcaactagcctgccttaaggtacgtaatatctctcaaccccaaataccctttcttctctttgt

SEQ ID NO: 20601 - DNA, 120 bp, Homo sapiens
acccgcatgcaaatcagtaacagcacatttcatgttcttggtatatttccctgtgcttgcctctatttctgcagccctcctgctgttttcctgcctgtgtgttcttttattctgttgata

SEQ ID NO: 20602 - DNA, 120 bp, Homo sapiens
ctgcggttccgcgctgcggttgggccattcagtgattggactctgtccagcccctgccaaatgctgtctctttctgtagcaggaaaatgagcttaggatatctttcttatggtgtcttga

SEQ ID NO: 20603 - DNA, 120 bp, Homo sapiens
gaacgggacaatgtgtaacgctgaggcccaggcccagctcagtcttccagctatagcctggcaccttgtagaggagcattctcctgccaccctgagctggatggacagaaaaagtctcca

SEQ ID NO: 20604 - DNA, 120 bp, Homo sapiens
ccccggacttggcttgctttctggccagcctgaggctcatggcctgcagggggcagcagcgggacgcaccgcctaggccaggtctcctggcccggctgcttggctctctctgcagagtct

SEQ ID NO: 20605 - DNA, 120 bp, Homo sapiens
ttgcgcagtgaatgcagcttgggtcgatttgtttttaaatgggtaatgtttgcagttcttttatacaagcccttcacatctggcattcaaagaagataatcagtctagactatcagaccc

SEQ ID NO: 20606 - DNA, 120 bp, Homo sapiens
acccgatagcagcttgtatgaaatttgggcccgactttgcagtaaaagtgcctccctgctccacgccggcgctccctccctctccctccttctcttcttgtgaccttttatctcagcggg

SEQ ID NO: 20607 - DNA, 120 bp, Homo sapiens
tcacgtgatgcaaagctttttttttcccctgtctcctgtctttcccctacgtaactacagtaactcctgctgcttaggttccatttaatttgagatgattgaaggccgaaatcttgttga

SEQ ID NO: 20608 - DNA, 120 bp, Homo sapiens
atacgaagattaaaaaaagtctgtttctagggtgctggtggtatgtttggttcatttttccttggcagtatgttttccttggtggtatgtttggttcatgtttccttggtcaaacaattc

SEQ ID NO: 20609 - DNA, 120 bp, Homo sapiens
aatcggtcctctgctagggaccaaacagccccttttcttttctctttgcacatctgtaaatttctttctttaaaacttgaggctctgacttgggagattttcatgctgggtggccagact

SEQ ID NO: 20610 - DNA, 120 bp, Homo sapiens
ggtcgggtatctgtggtcagttctgtcctccccatctccccgacccaggtcacacaacacagagctgttggacatcctagcagggctttcctctatatttcaagtatgctgctggtttga

SEQ ID NO: 20611 - DNA, 120 bp, Homo sapiens
gggcgagcttgcttcactctgaggccctgccagctcctggaaacgctgctgctctttctgaaaaccctccctgaggacaaccagttaaaacaacaaaaaacatcaatcaaaacttatggg

SEQ ID NO: 20612 - DNA, 120 bp, Homo sapiens
actcgacccacctccttccatccccgctcccagagcctcagttcatagctctttactccctccccatgcctccccattcccatctgcatcgactgtgctggaacctggctcacccccctt

SEQ ID NO: 20613 - DNA, 120 bp, Homo sapiens
aggcggggcctttggggattgagctgtgtttctcttcactgtgtgttgaacttggcaggtgcaggcgcatctcattccaagtcaaactaccacctttcagaaaggagggctgggcctgga

SEQ ID NO: 20614 - DNA, 120 bp, Homo sapiens
gaccgttggaagtgaatattgtccttctccaccacccgtgccaggcctgccactggtcatgactgggaagggaagaaacaggcatttggggctgaaggtcaccctcccgctgacctatca

SEQ ID NO: 20615 - DNA, 120 bp, Homo sapiens
tcccggccagaagttcaagtagccccagcgagtcatctgttgctttagacaaataagtggttgttggccatgctgatgccactttggcacatacctgagtgtgcagagccagtttaagaa

SEQ ID NO: 20616 - DNA, 120 bp, Homo sapiens
tgccggaaatgtctggaaagacaatgagtgcattcaggaagtttttttccccttttcccatggttccctgcagctgtcatgggaactgttgctcccatgcagagaagctgctcaccaagg

SEQ ID NO: 20617 - DNA, 120 bp, Homo sapiens
gaacgcgattattataagcagtcacagcatccctgtcacctgccattaacaacatttacaggcagaatacacatgctattcatccatctgtggatacctgcaggtttattggactgaaag

SEQ ID NO: 20618 - DNA, 120 bp, Homo sapiens
tcccgataaaacttggaggaaccacacattgaggagaagatttccacaagcatagagctaatgcagacaatttgaaaaggattggcttcatgctgtcatgaaattacaattgcaattgac

SEQ ID NO: 20619 - DNA, 120 bp, Homo sapiens
acacgttcatgtgcaaacacaaacacatcccacactccaacaggaagcacagttcccccaagtgcagctgcttaggttaccatagcaacccttgtagccaagttcccagctgaacaagtt

SEQ ID NO: 20620 - DNA, 120 bp, Homo sapiens
gaacggctctgtgcagaaccatggctgctaatacccaagttccaggctgcagataggtactcactttcagcctcgtggttggagggcttgagctgaacagaaaatccccatcttcttcta

SEQ ID NO: 20621 - DNA, 120 bp, Homo sapiens
gcacgtcagctgtatttgaaacaccgagacaccctgagaggaggaaccacctttgcctcatccccctcattgcttgagctccctgagatcccatggccctcttcaggccagacggttttt

SEQ ID NO: 20622 - DNA, 120 bp, Homo sapiens
cagcgtaagactgtcactatccttagcgtcaggcaaagagctagaaggtaggaggtgatttcctcccatgtcaattctcttatccaagctttgaaaggtgaagtttatattttactctat

SEQ ID NO: 20623 - DNA, 120 bp, Homo sapiens
tcccgaattcagacactgacaaccagatctctccaccattgaagatatttcccaaatgcatggatgtgacttctatctcagcaatcccttcaagacctagaagtccacaagtcctctata

SEQ ID NO: 20624 - DNA, 120 bp, Homo sapiens
gatcggtggagtcagcactccttgttaggcctccagaatctcaggctgaatcagaacttatgtttttaacaagatcccaggtggttcacatatatattagagtttgagaaggactgctaa

SEQ ID NO: 20625 - DNA, 120 bp, Homo sapiens
tgtcgcttctccagagagtgaactcatcaactcttgcttctattgtcactagctcctgtgtcaaagtgtggaatgaggcagtctgacagggagagctgagatctcctgcatttggcccag

SEQ ID NO: 20626 - DNA, 120 bp, Homo sapiens
gaacgcagtattatcatcagaggctgtttttgtttcctgccaagcattatgaggtggggaacattctcctaatatagagaagggtgcacacactgggccaccaaaatgatacatgctctg

SEQ ID NO: 20627 - DNA, 120 bp, Homo sapiens
caacgtggtcggggcttctaggggttgagcaggctctgacaggggctgaggaggcagagggagaacattgaagcatgtttttctcccctcggtagccaaaaatgtatggtgctctcaccc

SEQ ID NO: 20628 - DNA, 120 bp, Homo sapiens
atgcgctgcgaatgcccttctggcaggttaattgtgtcacttggctttcctagccctgccctttcatgttatttaggctttagcaggaagcttccatccatcctcttggctctcaatgtg

SEQ ID NO: 20629 - DNA, 120 bp, Homo sapiens
cctcgaggcagaagcagtgggccagagccaaagctgctcagacaggaggaccctggcagtggagccaaagggaagctgccaggagcagctccctggggatggactgtgccccttttatgt

SEQ ID NO: 20630 - DNA, 120 bp, Homo sapiens
tgtcgaaaagtaaaaatagcaataaaaatagcaataacaaagtcctagcaaactaatgtcactcttaaaaattcaggccagatgttgtttcctgaagctggtgtctgtggggaaggttgc

SEQ ID NO: 20631 - DNA, 120 bp, Homo sapiens
ggtcgattaaagtgacaagcctggtaccttcctttaagagcctgctgctgctgagtcctcaatttaattggtctatgtggcatgagttttggaagaataaatatattctccctgatactt

SEQ ID NO: 20632 - DNA, 120 bp, Homo sapiens
ggtcgactgcatgattttgttaaatgtgttaaatttagtaacaccaggaggaaaacattctactagctagtgctgagcagtgcatggttgttacttttgttttcttctcacagtacttgc

SEQ ID NO: 20633 - DNA, 120 bp, Homo sapiens
catcgcccaatgtggcatcatcacagtgtctaagaagtttccttggaggatctgtgcttactttaacagttgccaacacataggccttgtgctaaactctgaccaaatgcaaaacagtaa

SEQ ID NO: 20634 - DNA, 120 bp, Homo sapiens
caccggcagggggacagagaattgagacaggaaaggaaggtagctgctgatgaagggtgctttatcaagcaaaaataactggagcccaatcacttgaaggaagtctggaagccagcagag

SEQ ID NO: 20635 - DNA, 120 bp, Homo sapiens
gaacgtacactgcccgaagagacaaaggaacagggacttctggaagatcttcaattccccataacttccaacccactgcatcgagcagagcaggcttcagtagccagaggattaggacag

SEQ ID NO: 20636 - DNA, 120 bp, Homo sapiens
gttcggaagttggaattggcaagctttatactggagaattaaaaactcaaaacaaacaaaaaaccaaacctatgattcaggaatagcattataatgatttagaggaaaggtggggaggag

SEQ ID NO: 20637 - DNA, 120 bp, Homo sapiens
ctgcgagtattacatttgggtgcagaatttctgagacaattggtttactggctttcttagtagagaataaaagagtgtcacctagacagtgagcatttcatttcaacctttgcatctaga

SEQ ID NO: 20638 - DNA, 120 bp, Homo sapiens
attcgaatatcaagacattccaaaggtctcttgtggaagaaacatagtttggtgttatatatttgggaaaacatctttctatttgagaaaacaagcagattgttattattacagcagtgg

SEQ ID NO: 20639 - DNA, 120 bp, Homo sapiens
aaacgttgactgctgcagtagatgttttatactgtatttgaaagataggaaagtagttagtcttgttaaataactggccgggtgtagcagctcacgcctgtaatgccagcactttgggag

SEQ ID NO: 20640 - DNA, 120 bp, Homo sapiens
gggcggaaaagagatgcagtctgtagatgttccaaagagaaggcccatggcagggttgggtggcattaggagtggtggctggctttactttggtaaacgtgtcctaggccgtatgtgatc

SEQ ID NO: 20641 - DNA, 120 bp, Homo sapiens
agccgatgtgggagcctcctccatctgcatggggagaaggggaggtgctacaggttaaatgcttattaataaatgctctatttgttattaagaagatttcatggcaaagatcaaccactg

SEQ ID NO: 20642 - DNA, 120 bp, Homo sapiens
ccacgagtctgctgccaattttctctgttttctttcctgtgctctgtttttttttacttcaattacacgatttctctggatttttatgttaccttagttttggaagctagagctacaaaa

SEQ ID NO: 20643 - DNA, 120 bp, Homo sapiens
gggcgacagagcaagactcagcctcaaaaaaccccaaaaaacataaacccattgttctctgtgaggtggtgggtcagcatggatccgatcctaggtggtgggaaaacaccctttgcctaa

SEQ ID NO: 20644 - DNA, 120 bp, Homo sapiens
atgcgtaagctctggctgctgagtacaccttgtacagactttggagagatgggagtagggggcatttgctggacttgaatttacacctgtggttgggatccaggacccagactggggagt

SEQ ID NO: 20645 - DNA, 120 bp, Homo sapiens
agccgggggtcccagcctggtgcctagctgctgtgctaggcccccacacacctcctctccctttttgttaagtggcccacatgtgttgtcctccgcttgtgactgagtccctctcccact

SEQ ID NO: 20646 - DNA, 120 bp, Homo sapiens
cttcggaaatagaatccttctcagtcccgtgtttcccgcaggccagtgtctctgctcttctgtttgcttactctagtttttcttttgttctctctggagtccactgcaggcaggctcatg

SEQ ID NO: 20647 - DNA, 120 bp, Homo sapiens
ctgcgtttcttcttctcccaagcctgggaacgttgaagggcccggggcccagcctttccgcctctttgctcttatgtgtgcacctgtgcagcacttgatctcacccagcacacaggtttt

SEQ ID NO: 20648 - DNA, 120 bp, Homo sapiens
aatcgccttctgtactggccactcggtggtttctgtactcagcctggcccttcctccttaaggccagatgtctcagactgactccacatgagtttccacttagatgtctaacaggcatgt

SEQ ID NO: 20649 - DNA, 120 bp, Homo sapiens
ctgcgattcataccccagtttgtcaagaattctgttggctgtatcttcagagtatgttcagaatctacccagcatttactgtgtcccagccacccccatctcacacctggatgaccgcac

SEQ ID NO: 20650 - DNA, 120 bp, Homo sapiens
ctccgctcaaccatgagagttggcttttaatacaatcagatggtttaactctcctccaaacttccagtgagctccccttctatagagacctgtaaggaaggggctgaatgacaggaatcc

SEQ ID NO: 20651 - DNA, 120 bp, Homo sapiens
ccccgctgacctgcctcctctgtgccctccgtgctccaggtacactggccgcctcacttaaccttgaactcaccaggcacatccagcctcagggtctttggattgccttaactccagata

SEQ ID NO: 20652 - DNA, 120 bp, Homo sapiens
agtcgcggagggcaaactctgtgtctactttgcacactcctgaatccagtgactaacgtagtgcctgcctgtggccagcgctcagtgaacatttgttgggtgtatcaattgtgtcaattt

SEQ ID NO: 20653 - DNA, 120 bp, Homo sapiens
gaccgtgagttctgtggagggaacctgacctgcgggagagagggagggagaaagagaacagagagctccagccagctcaccctttggggtgactggaagctgcctagaaggtggttttgc

SEQ ID NO: 20654 - DNA, 120 bp, Homo sapiens
gagcgcctagcagggtgggccttttgagcatgggagtccacagtgtaccccttggagcccagttgcagggagagcaagatggacaggtggtttcatccagaattgggttttgctgtatgg

SEQ ID NO: 20655 - DNA, 120 bp, Homo sapiens
tgccgtgaaagtcccacgagagtgagggaggccgagccttaggcaccagcgttgctggagccaaagggctgggggattccagctggacaggaagtgggcggtagaggccatgcagaggaa

SEQ ID NO: 20656 - DNA, 120 bp, Homo sapiens
tagcggggataactgagggagagctgtgggggaagggggttgcagtcagggagggggtatctaaattccagatttcagaggtggcccgggtgtggctggcagaagtggcatgtgatagga

SEQ ID NO: 20657 - DNA, 120 bp, Homo sapiens
ggccgtggaggtcccagacttgagagctggggagtcaggtggtgtcaggtgtaggggtggcagtggcagcctggatgagtggctgcactcggtggagaggacggccgccaacctctaccg

SEQ ID NO: 20658 - DNA, 120 bp, Homo sapiens
gggcggagttgctgatgggtggacgagtgggcataggcgggggtaacccagctggatggcctgagtctcaagcgagcaaggatttttaaaggcaaatgggaggaaatgagagggggaggt

SEQ ID NO: 20659 - DNA, 120 bp, Homo sapiens
gtgcggcagctcagagcaagaccctaatcttgaccttccaggaggtttaaaccctagtttgattttgacctagatgatggaacgtttgcgtggtacgaactgaaccttcttagtgggaga

SEQ ID NO: 20660 - DNA, 120 bp, Homo sapiens
agacgatggtgagctaagcctgtgggcaggggcccctccttcaaaccccagccacgcagagagggagagtcatgctgaggggctctgacgttcttctcttagtaggaattctgttcactt

SEQ ID NO: 20661 - DNA, 120 bp, Homo sapiens
gttcggtttcagcttatctcataaatataattatgctcttttgttcagctttgaaaaatcctgaccgtagaccattcaggttgtcataccttcaggtttgaactcattgcccagtgctat

SEQ ID NO: 20662 - DNA, 120 bp, Homo sapiens
ccacgccacacaggcatgcttagagcctcccactggacatggagttatgccggccacagcgaatcatgtggcccagcctgaagtcacagagttgtgaaatattttgcccatattgggcaa

SEQ ID NO: 20663 - DNA, 120 bp, Homo sapiens
ggccgaggtacattagttgctttcaggaaagcctcgtggtgccagtcacctctgaattattggcttcttctattagccctgcttgaggaggggaaggacatgactcttacggcctagagc

SEQ ID NO: 20664 - DNA, 120 bp, Homo sapiens
ctccgcgttattaagctgtaaacagtcgtttcaggtcattgaaaatcccggcaaccaaagcttattgttcttaagtatgaaatatcacgtacttatttatttattttttgagatggagtc

SEQ ID NO: 20665 - DNA, 120 bp, Homo sapiens
taccgactaggtgtcagccctgtttaaccccatgttccctcagttacatggtggcattttgtggctgtgaggtctttcctagagatgaacttcatgggaactcactctttgcttgatagt

SEQ ID NO: 20666 - DNA, 120 bp, Homo sapiens
tgacggagcaggtctggtcttgtttttggctggctgaaataccaagtatgcttgctgtgacatttcccccatgaggcagagaagtcccagcagtgagatagagtcccccctccaggacta

SEQ ID NO: 20667 - DNA, 120 bp, Homo sapiens
gtacggaatggtaggaagctgcgggaggggtgggtgctgacaggtgttctcagtgggctcctgcccaaagggtgatgagtcataactctacgttctcttttctcacgaatccgtattttt

SEQ ID NO: 20668 - DNA, 120 bp, Homo sapiens
tcccgtgtggagcaccccaggatctactcccactgactgcaccagtcatttcctgtgtgtgtgcagacatgcacgcatgtgcgagtgaatgctcatatgtaagactgggcctttctcctt

SEQ ID NO: 20669 - DNA, 120 bp, Homo sapiens
taccgtgtttaggaatacctcatacttttggttcgtcctcagcatctcctctttattttccctgctattgtgtggttttatttgtcacaagtattttttttttttctctcctctgcccct

SEQ ID NO: 20670 - DNA, 120 bp, Homo sapiens
cctcggggtcttcaattccagtcactcctgagcttcccactggccagatctccttggcatcaggcaggggcatgtttctgttctcttctgggcctgcacaccgtatgtttggggtttttt

SEQ ID NO: 20671 - DNA, 120 bp, Homo sapiens
ctccgtccccattagctgtgacagcccagtcatatgtctccctctctctgatcagccagcccagggctcctcgtttgaatttggcttcgtaattccttactttacttggcatcccaagaa

SEQ ID NO: 20672 - DNA, 120 bp, Homo sapiens
caccgcatcttgcctctgactttccatctcatgcccatcttgaaaggggacatcactcttgtccttgttgtcccagtgagaagccctgatcagtgctttttgatttacctcccactcagt

SEQ ID NO: 20673 - DNA, 120 bp, Homo sapiens
gggcgccggtgagtggggataagcaggccctcaagtgacaacacaaatttaaacacagagaccacttagttgctgtggtctgttacctggtgtataaagggtgctgcagatgctttggcg

SEQ ID NO: 20674 - DNA, 120 bp, Homo sapiens
gcacgcctgcagaccatcacagctgtgcgtgaagaagactaactcgggttggtagcataggagtcttcacttaagcacttgtgtgacctcgagctgatggactatctagagcaatttgag

SEQ ID NO: 20675 - DNA, 120 bp, Homo sapiens
ccacgcttggacaggagggatctcatgaaagtgttgggtggaggggtcttgtctgctggctctggtggcactgtcttggtagggtttcagatttagaaccagatttcaggtctcctccct

SEQ ID NO: 20676 - DNA, 120 bp, Homo sapiens
atccgatttctctgagctaatttactaggatgatctctacttgcatttaataaaatattcagagacctattgaattccagttgctgtttgccatttgtaatgctgctgagtttgacttag

SEQ ID NO: 20677 - DNA, 120 bp, Homo sapiens
tgtcgcatgggctgttactgaatgtgggtcattaggaaagctttgactcttaacagaattattcactgaagtcttagttacaaaacattactaagaagttatttatttagtcccaaagtg

SEQ ID NO: 20678 - DNA, 120 bp, Homo sapiens
gcacgttggctggccataaatccatttatattcactcctcccccaatagaataaaacttacgctaccttcttggtgtttgttgagcggcgaatcagttccttgtcactgatttaaaataa

SEQ ID NO: 20679 - DNA, 120 bp, Homo sapiens
aagcgttcttttgtttcacaacccatttctccaacggaagaagaacaaagacccatagtcctaaagtgcttgtgtgcagccttgtatgaccacagtaaattgtacatgtaatgaaatatt

SEQ ID NO: 20680 - DNA, 120 bp, Homo sapiens
gttcgtatggttgggtctgtatggttagtggagtctaaatcctacaggcctttctgatcattcacacatgggtggctgtgctactggcccccaccccacctacttcagtttgctgaatat

SEQ ID NO: 20681 - DNA, 120 bp, Homo sapiens
ttacgagtccccctacccccagactcatcctccagtcgttggaactgggaaatgaagtctggtggtggtgagtacattgcgggttgaacccagcgagccagtgaccctctgtgtctaatg

SEQ ID NO: 20682 - DNA, 120 bp, Homo sapiens
actcggcttcttgaggaggtaagtgctccaggggaaggcaaaagagttgtttataattgactggttttcatggatactgattaaagcatgccttatcacctgtttcagtgaggaatcttg

SEQ ID NO: 20683 - DNA, 120 bp, Homo sapiens
tctcggtattctgttgcaattgagaattaagtattatgaaggtctctagaaacagatgagtataatatgtgtatgtgcatgcctggaacaggccagaacatggtgggttcttagtatttg

SEQ ID NO: 20684 - DNA, 120 bp, Homo sapiens
gggcgtgtgactatgatgtggaggacacagaaatcattgttactgttttcagccagtgggaggtcagggttgaagctcagacagaaactgggccagactcgtttcccagaggtttttctg

SEQ ID NO: 20685 - DNA, 120 bp, Homo sapiens
caccgtttttgtgtgtctctcttcccatgtctctaccgctgcacatccagcattctcttcctggtcctgccatccactcctgtttgatcctctgacgtggggaagtcacaaactcatcag

SEQ ID NO: 20686 - DNA, 120 bp, Homo sapiens
gggcggtattttgggggaccgaccttcagcctttgggtgtcactccagttgcagctgtctttggtgttagccacgtggcaggctgccttggttggcaccaccgacttttgaaaatggtta

SEQ ID NO: 20687 - DNA, 120 bp, Homo sapiens
ttccggcacccgctcatcaccccgttcgggtcattgagtcttctgagaggggtcctaatctgtacctttatttttattccaaggcggccaccactcaagctcttggggcctcagcagtga

SEQ ID NO: 20688 - DNA, 120 bp, Homo sapiens
caccgtccatgccctctgtgacccgctcaccctttctgtaaagctcctcgctgtgtagtcaaggccacccattgctcaaggtcctgaaccctcctcttcactgtcctgaaccttcactgt

SEQ ID NO: 20689 - DNA, 120 bp, Homo sapiens
tcccgcccttggccttctatggcatttaactgcgttggttctttcctgcttctcagtcttgtgctgcagggcctgccggggacctttgaagatggccccaactccatccccaggtagtct

SEQ ID NO: 20690 - DNA, 120 bp, Homo sapiens
actcgctaagtctgcatttgctgatggcgtctgtccactatcaggggacgtcttttttcccacagaggcttccctgactttatatgccactccaaattttcctctgtatactggctctgc

SEQ ID NO: 20691 - DNA, 120 bp, Homo sapiens
taacgtctccgttttgaaagttgtttttttcttaaatgaaacctaagtagccttttctaagtaaaaaaacagaaaagcatgtaattgtttttgagagtaactttaaacatttttgtttca

SEQ ID NO: 20692 - DNA, 120 bp, Homo sapiens
tgccgggccctggcaatacaatagcccagccctcaggtggagagacaggttatcaagtgactgcacaaatatcaaaagcagttgcaaataattgtttttagaagcatttttttctttcct

SEQ ID NO: 20693 - DNA, 120 bp, Homo sapiens
gagcgggatttagaattggccgctcgcatcggccagtcgttgttgaagaagaacaagaccctaaccgagaggaacgagctgctggaggagcaggtggaacacatcagggaggaggtaaga

SEQ ID NO: 20694 - DNA, 120 bp, Homo sapiens
ggccgaggcttccagaggggcccgccacaggcctgggagctggaggcatggctgaaggagatgagagaatggagtcctagttggaaggacgctcccgagggcacgaccgcggcctgagcc

SEQ ID NO: 20695 - DNA, 120 bp, Homo sapiens
aaacgttcacctggggactaaaagccaccttcctgcagctcctgctgctgcttgtgtctcttttctttcctcaggccatgtggatgggatggctaagggcgggcatggtcctcactcagt

SEQ ID NO: 20696 - DNA, 120 bp, Homo sapiens
agtcgtacatctgtgtgccatgttgggccagccacagtccttgtcctcagagagtctagactctaacgatgcaggctgatcaagatgctccatgcttggcagaagggcacccaggctaac

SEQ ID NO: 20697 - DNA, 120 bp, Homo sapiens
caacgagcaggggttcctgagtcaggctgggcgtgggcagctggagaaggagccctgttaggaggccagctcgtgtacacagaggaaagtggtgactcacattcatcgttgtagtataat

SEQ ID NO: 20698 - DNA, 120 bp, Homo sapiens
tttcggcttatcttagggtatctaggtttagaaggaatgatgctgattttctggaagggacgtggtgtggacagaggagagcggctgtggagtcagatggggttgctagggcaagaataa

SEQ ID NO: 20699 - DNA, 120 bp, Homo sapiens
ctccgcccctctaaacaccacccagtggaagaattggagcacagcctacttctgccatatgggggatggaaggttagcatccctgtgggccctgctgacactggcaccatcgagcagagt

SEQ ID NO: 20700 - DNA, 120 bp, Homo sapiens
ccccgctgaaattacgtgtgtgtgcgtgctgtggaggagggaaggttgtgagattttgctgtgggtatttggctggagtaccacacatagtgccacaaaggttttctctagtttggccac

SEQ ID NO: 20701 - DNA, 120 bp, Homo sapiens
agacgggcaaggcttccaattatggaggcatagcagggggtcaggagcatcctggatagcaccctgcctgcttccaggagttgcagcacccaggagtggggtcagaacacgagcctgagg

SEQ ID NO: 20702 - DNA, 120 bp, Homo sapiens
attcgtctttacagcctaaaatacaacctcagaactcaggggcttgaaatcacagtgacattttttctcgtgattctgtgagttagatgaatcgtccaaggtgctctcactcccacatct

SEQ ID NO: 20703 - DNA, 120 bp, Homo sapiens
ttacgagagtacaaaatagaagctgtaaagcattttaaggcataacctcagaagtcacatgatgctgcttttgcaagtaagtcacaaagccaagccacattcaaggagtcaggaaataga

SEQ ID NO: 20704 - DNA, 120 bp, Homo sapiens
actcggcttggaggagtttgagtccgtaaattatcttctaccacaatgcacaaatttcctctagttccatagccaagtagtttcttgaacttcatccctctaatggtcttgtcttcccca

SEQ ID NO: 20705 - DNA, 120 bp, Homo sapiens
ccacggagagtatttacaccaaggaaactggaaattgatgctattatatcaggcatgttgtgcctgttttgattcttcctccagaaagctggttgttaacatttaccagcacaccattgc

SEQ ID NO: 20706 - DNA, 120 bp, Homo sapiens
ccccgcagcccaatccttcacaaagagaggtcctgaccttggctgggctatgtttcaagtcacacaaacagttcaaaccacacggctctgcctgcagttgaggcatcttgaacccaattt

SEQ ID NO: 20707 - DNA, 120 bp, Homo sapiens
ctgcggggtgggctattttgttttgcttaagccttcatttttgagcttgctttcctccaagaacccctggcaggtttccggttgttgaaatgcacattcacttcttccaaaggatcatcc

SEQ ID NO: 20708 - DNA, 120 bp, Homo sapiens
acccgccatccccacatacagtagaaccccagccacaggaactcaactgaatatggccttgctaactcacacacaaaccccagcagctgcatccatctctttgaaatgaggctttcatgc

SEQ ID NO: 20709 - DNA, 120 bp, Homo sapiens
gggcggccctcatccattgcctcatccctgcataattttgcaggcccatcctagccccagagtgccatgtggggtaggctgaggttttgagactgcgtggcctccccctctcttttccca

SEQ ID NO: 20710 - DNA, 120 bp, Homo sapiens
ctgcgagcctgctaggaatgcagaatctcaggccccaaccccaacccagacctgctgaatcagaaattctgggtgcggcatccagcagtgtatattaatgaagggagctgaggcacatga

SEQ ID NO: 20711 - DNA, 120 bp, Homo sapiens
gggcggctgacagagatgggagactggggcaacaaggatctccttctgcttctctcatctcaacttatcttttaacctctgcctctctcttcctgtggctgcgaataagctttctttatg

SEQ ID NO: 20712 - DNA, 120 bp, Homo sapiens
tatcgtaaagggtgaaatctgagaggctgaaatctgtttgtctccactccaggtcaccctggaagccgctcattggcccagatggagttcggtgcctctacctgggccgcttaatgtggt

SEQ ID NO: 20713 - DNA, 120 bp, Homo sapiens
tgccgattcaatggggtctcctatgctaggaacaccagccagtcaggtgctggagaaagagatcaagttgagactgtggaatttaggagactgtggctttgagactagttccatagaaca

SEQ ID NO: 20714 - DNA, 120 bp, Homo sapiens
cctcgtccgtctttcactccattttcttagaatcataatgaaacaggcaaacgagacatcagaggaaaacacatccagggtgatggctcccccttcttttctttccttagtgcacagtgc

SEQ ID NO: 20715 - DNA, 120 bp, Homo sapiens
aaccgaattatcaatccccgacatccatggtcaagccttaaattccatcgttatgatgactaagagcttttttcactcaccacaaaccaggtaaacctaaaccactgccacctcaaaatt

SEQ ID NO: 20716 - DNA, 120 bp, Homo sapiens
agacgacaaaaaaaaaaaaaaaaaaaaacatgaatattacaaggattaaaaaagaggaaccagactgaaccaaaacgaagagatctttctttggtcttagctatgggttttaccaagatg

SEQ ID NO: 20717 - DNA, 120 bp, Homo sapiens
gcccgaggggacggggtggtgaatgttcctaatcttccaaggccagcaacaggctgaggttataagtgacagaatcacctagctggcttgcttttgatacttgttctttgatagatgtat

SEQ ID NO: 20718 - DNA, 120 bp, Homo sapiens
cttcgagtcttttcaactaattttcttattttcttcataaacttccaaactcaggatatccaatcaaccctttagagtcaatggcttggtgcctagacagagcaaaatgagaatctccct

SEQ ID NO: 20719 - DNA, 120 bp, Homo sapiens
acacgaaggaacagattccctcttacaaagaagcaccaattacaggataatcccttttttctggagccagattcaaactcaaattattattattttgtttaatttcattgcttgtttctg

SEQ ID NO: 20720 - DNA, 120 bp, Homo sapiens
gttcggggtttgctttcctactgcctttcatgatacctccatgcttgctgtgactaggatccgtcaagcaccctttacttttagaaattcttcccaaacactcaaaattacagaagcaga

SEQ ID NO: 20721 - DNA, 120 bp, Homo sapiens
aagcgtgagccaccgagcccggcacccttgttgtttctttgtgcccatgtatagaaatttctctaggccggatgtatacctaaaaatagaagcgctgatcagggcatctctacattttat

SEQ ID NO: 20722 - DNA, 120 bp, Homo sapiens
atcgtgtggaaccactgcagaactatttccgaaatcaactaagtggagagagccaggaaggctgcatcagaacccagtaaagcttcttgtctggatctgagctggtttgttttgtgcttg

SEQ ID NO: 20723 - DNA, 120 bp, Homo sapiens
cctcgatggtcgtggaaaaggaaagtcaattggcagagcccctgaagccagtcttcaggacaaagaaggagcctagagacagaaatgacagatctctgctttggaaatcacacgtctggc

SEQ ID NO: 20724 - DNA, 120 bp, Homo sapiens
ctacgttaccaggcaggaaggctgagaggagagagactccagctgggttggaaaacagtattttccaaactaccttccagttcctcatttttgaatacaggcatagagttcagacttttt

SEQ ID NO: 20725 - DNA, 120 bp, Homo sapiens
aaacgtgaaaatgctgtattagtcacagagataattctagctttgagcttaagaattttgagcaggtggtatgtttgggagactgctgagtcaacccaatagttgttgattggcaggagt

SEQ ID NO: 20726 - DNA, 120 bp, Homo sapiens
tgtcgtttgaatcacagtatacgctccatcgctgtcatctcagctggatctccattctctcaggcttgctgccaaaagccttttgtgttttgttttgtatcattatgaagtcatgcgttt

SEQ ID NO: 20727 - DNA, 120 bp, Homo sapiens
attcgagtgtttcagtgcttcgcagatgtccttgatgctcatattgttccctattttgccagtgggaactcctaaatcaagttggcttctaatcaaagcttttaaaccctattggtaaag

SEQ ID NO: 20728 - DNA, 120 bp, Homo sapiens
agtcgagccaagttaagaatgttcttatgttgcccagtgtgtttctgatctgatgcaagcaagaaacactgggcttctagaaccaggcaacttgggaactagactcccaagctggactat

SEQ ID NO: 20729 - DNA, 120 bp, Homo sapiens
gtgcgccctacaggccacacaccccacgccctccaccactggctctgctgctggaatgtgagcagaagtgacatctgcctcatccaagcggagcctcttgctcagccacaggaaggccca

SEQ ID NO: 20730 - DNA, 120 bp, Homo sapiens
acccgtcagcccgtgcgccctggtgaatgagaagacacagggagctgcagccacatataacatgagcaagaagtctgtgtttgctgtgataagccactgagttttaggggttgtttgtta

SEQ ID NO: 20731 - DNA, 120 bp, Homo sapiens
aaccgattaagacatgtggtatatagtgacttcatatatagaatctggaaaactatccatttattttcaatcatggaattcaatatgacaagcatcccggagggtctacctatgccagac

SEQ ID NO: 20732 - DNA, 120 bp, Homo sapiens
gtgcgctgtgcagagcaggaacagaggcatctgtgaaaagtgctgagagcctggaggacagagtgactaatgcaatgacagtcttgcatcataggaataacagccacagcaggattttat

SEQ ID NO: 20733 - DNA, 120 bp, Homo sapiens
tctcgtttattctggggacatttgagtaggctgttcgagttaagcaggtggaagatgatgatccctcatcatcattctgagggatgagtgtctgaagactttttggtaaggaagggtctt

SEQ ID NO: 20734 - DNA, 120 bp, Homo sapiens
ccccgaagcctccagaaagtaaaccttcaagagcccatccttccttcctcttttgtttttgctcattatgaaaacttccctgacaaattgaaaaggcttcaggtgagattagcccacagg

SEQ ID NO: 20735 - DNA, 120 bp, Homo sapiens
taacgcacactgcaaagctgtgcttccttgtttcagcctgtgaatcctcaccttgtttcccatctagcctatatttttcaaactaacttggccatagaatcatgtagtatttagggtgga

SEQ ID NO: 20736 - DNA, 120 bp, Homo sapiens
gcacgtcatttaacagatgaggaaatggaagcttgggcagtggaagtatcttgccgaggtcacacagcaagtcagcagcacagcgtgtgtgactccgagcctgctccgctagcccacatt

SEQ ID NO: 20737 - DNA, 120 bp, Homo sapiens
cctcgtttacatcaaaccctcttatggaatcctatggtttgaaaacaaaaaggttgttgaggaccagtgagcccaacccctttgctttataaatgaagagcattgcctgccctaagcccc

SEQ ID NO: 20738 - DNA, 120 bp, Homo sapiens
tgtcgtgggtctggagtgggctccaacagcggcatgttttgatggtgcttcccagtggcacgccagcgatgagcctttgagtagggaaagtaggagcactcgtgactcccttcacgatca

SEQ ID NO: 20739 - DNA, 120 bp, Homo sapiens
attcgatctgcctgcattgctgccctgtggttccccactgtagaagctccccaggtgattctaagtgtagccaagtctgagaaatactgcctaaagcctgttggactgacagcaagggct

SEQ ID NO: 20740 - DNA, 120 bp, Homo sapiens
tggcgcccatgctgagcttggcaacttcaaattcaatagagaagaagtctcttgtatagaaaagggcctgtctgagatgtttctcaaataaatatagattttgcttatgtggctaaagga

SEQ ID NO: 20741 - DNA, 120 bp, Homo sapiens
caacgtctcaccagtgtttagggacctcccctaatccactggtatcagcatgatcagacttgctttttcagaaaaagccttctgtccatagaccaaagggaagtgactcagagaaggggc

SEQ ID NO: 20742 - DNA, 120 bp, Homo sapiens
tcacgcaaggaatgtgtaagcggacaggaccagatttcacttctcactggagaggcaaaaatccaaaaagaggaagctaagaatggtggatgtgttaaaagagaacaaataccaaacaaa

SEQ ID NO: 20743 - DNA, 120 bp, Homo sapiens
atacgtgtctccattagttgccacagctcctctgtattgtgaattctgccaacctctccattctccaggggagggagctatggctttaactagttatgtggcttgtggaagttcccatag

SEQ ID NO: 20744 - DNA, 120 bp, Homo sapiens
tcacgggagactctccctagggcaggggcagagtgaactgagacctgggaacaggcagagaagctgtggccaacgaaggcaccagggaagggctagtctgagtggagagaggggacagca

SEQ ID NO: 20745 - DNA, 120 bp, Homo sapiens
agccggaggtgggggctgagcaatgacgggaacctgtgggcagagttcatttcttcccctaagaggagctgaaccagagtgactaaaggaccgctgagctcccttccaggattcccagtc

SEQ ID NO: 20746 - DNA, 120 bp, Homo sapiens
ccacgctcttacctcccagctctggagctgtgtgacccacaagctcttacctcccagctctggagctatgtgaccccctgaagcaggtctaggtctggcccctccaaaatcttcaacccc

SEQ ID NO: 20747 - DNA, 120 bp, Homo sapiens
gtgcgctggcctccaaggcaggggccaggacaggagttactctccccacctacccacacagctcatgatagggcccaagcagactgctcagactgatgggaaacctcatgagtgcctccc

SEQ ID NO: 20748 - DNA, 120 bp, Homo sapiens
acacggcttagatccagctggccccactcacccaacttctgtcagcctggacacccacggggagcagggcaggaattccacagggcaactgccaccctttcctcaggaaggacaagggtt

SEQ ID NO: 20749 - DNA, 120 bp, Homo sapiens
aggcgccaaaacaactaaagatccaagtgaatataaaacccagtggtgcaactctgagccagaatcctggaccacagcccatgaccacttccaggaaggcaaggcttccttcctctcctg

SEQ ID NO: 20750 - DNA, 120 bp, Homo sapiens
actcgccagggagcttgaggggaagagaacagtcgggtcctggccagtcccaatctgtcttagagaagagaaggatgaccaacacccatgggaaggaatttggagcaggagaccagaagg

SEQ ID NO: 20751 - DNA, 120 bp, Homo sapiens
caccgccacctcttccatccaggaagctcccagccttaggtagatgccgtaagacaagtggaggctgcactgggctggggaggtgtgacacctgggctttcactgtgcccctcccactgc

SEQ ID NO: 20752 - DNA, 120 bp, Homo sapiens
ctgcggcctgggaccttcccctcccggtgctgcagggagctccgcactcacgcatttaggtcactaatgtgcagcgctggggagtgccctctgagcacccgagaaattactttggttatg

SEQ ID NO: 20753 - DNA, 120 bp, Homo sapiens
caccgcacccctccacaaccctctgccacggaaggtgtgcgaatgccccatctcctcctcacaaccctgtggacccatggttaggccgtttctttaagtgaagaaactaagtctcataaa

SEQ ID NO: 20754 - DNA, 120 bp, Homo sapiens
gctcggtcttgctggggtctcacagtcctcgcaggagctaggatctggactagggtccttgagctagtcgctcaccctctctgagcctcactttcctcccaggtaaaacgcatgtcacaa

SEQ ID NO: 20755 - DNA, 120 bp, Homo sapiens
ttgcgcctgccctgcgcccctttattcagggctttgccccgccctgttgcccaatagacaccccttccctccccactccccgcggccaggtctacttgttccttgaggatccaggctccg

SEQ ID NO: 20756 - DNA, 120 bp, Homo sapiens
caccgcgctgcgagaggaaagccagcctgcacctcacctgtcctggttctgcctggctgctgcgatgttctttctctcccactagtctgcaagcccctaggagtcgcagccccctgagcc

SEQ ID NO: 20757 - DNA, 120 bp, Homo sapiens
gatcgccttgacctgtgagactgctatcttcttcagcagatgaccttgaaggtgcctaggagccagttagggcaggtggatttgctttcaccttggctcagcagtgagctgagagttgaa

SEQ ID NO: 20758 - DNA, 120 bp, Homo sapiens
acccgaccacccccagcagcagcctagggacagctgacagagaaaagagaggctgcccagagtctcaggcaagctgcccatggggtatctccctgccctgctgagacccacaatacagct

SEQ ID NO: 20759 - DNA, 120 bp, Homo sapiens
ctccgcaaccttcctaactacccttgaaaccccactctgatgtttccacaccatgcccattgtgcctgtggtgatggattgtcatgcccttggctgcagggacctgccactctcctgcct

SEQ ID NO: 20760 - DNA, 120 bp, Homo sapiens
gcacgttggttccttccttgctcgtggacccagagaggcactaaagcttttctctgcatggtccctatctggtgctgggcctggctctgggaatttcaaattaaaacctgcttgtggtca

SEQ ID NO: 20761 - DNA, 120 bp, Homo sapiens
tcacgggcctcaaaagggtttgtgtgcagctttggacaatgttgatttgttattttacgggtcactctgcattgcccaccattgtcagtacacaaaagaacgtattgagactagatctga

SEQ ID NO: 20762 - DNA, 120 bp, Homo sapiens
agacgtgagaattaaacctaggagagaagtctcaagaaggaagcaaaacttcctcaaactaggcatctgccccagggacagccatgcagcttcccctccaggtgggccatgggggctgac

SEQ ID NO: 20763 - DNA, 120 bp, Homo sapiens
gcacggcccagccacactccttgcccacagcactcacaggctgtccctgccctggtgcatgatgtctctccttggcccctccaactctcagggccatttgagtgcagcccccctccagga

SEQ ID NO: 20764 - DNA, 120 bp, Homo sapiens
ttccggtcacctagtcctctcccttcttgtcaaattacactgggttgctaggtaggaggtgtggagtgggtgcagggttaacctctcagagcatcctaagaaggatctgggggagtttgg

SEQ ID NO: 20765 - DNA, 120 bp, Homo sapiens
ggacggagctgatgccagaggtcaccttaaccagccatgcagagagaggctctctcctccacacctgcccctcagaactcccaggacccctccaccccaggctgcccagctccaagccct

SEQ ID NO: 20766 - DNA, 120 bp, Homo sapiens
aggcgtgtcatcaatgtaaggaaaacctctatcatcagccttgctgtatccaagagaaccactgtaacccatgggaatttctgggggcaccaagatacaatgggcaataatatgacaacc

SEQ ID NO: 20767 - DNA, 120 bp, Homo sapiens
cagcgttggaatgaacgcagtgagttttctgatagaaacgggggtaaataggagctaaatagtcaagtaaggtcagtatagtcagccaaattctgaattaaatgacatttatgccacatg

SEQ ID NO: 20768 - DNA, 120 bp, Homo sapiens
agacgggattaagagggcaattccaaggccaagctgcctgggcgggagccctgcctacccactctctggccacatgtccctgagaacacagcctaacctctctgagcctgatgttctcat

SEQ ID NO: 20769 - DNA, 120 bp, Homo sapiens
ggacgtgatggagcaaacagcactgagctcacaggttggcgagaacatcacataggatcattgtgtcaagagcttaagacagtacctggcacctagcaagatcaaaaaaaagttcaatca

SEQ ID NO: 20770 - DNA, 120 bp, Homo sapiens
atccgagggtttttcctccacctggcatgattagcagaggttctttgggtgaataatgggtgaaccccccagtccctgagttctgggagagggtttggtccagcagaagagctagcaaca

SEQ ID NO: 20771 - DNA, 120 bp, Homo sapiens
agccgctaacaagccagacaattcctcctcctctgggtctccagtcactttccgcccttgcctcaggcctgtccccaccccaagccagggggcgtgagacgctggaagaaaagacttccc

SEQ ID NO: 20772 - DNA, 120 bp, Homo sapiens
ccccgccagggccatgtgtcaatcataccattcaggacacaaacaaagttgatttatctcccctggacagcgctttggaccagaaagctttgggctcagccttgggcgccggagcagtac

SEQ ID NO: 20773 - DNA, 120 bp, Homo sapiens
gtacgcgcaggggaactgctaagccggagcaagattcactcgcggggacccctgcctccccacgctctctcctttctcgccttcccaccatagtcctggacctcagataacggtggatgc

SEQ ID NO: 20774 - DNA, 120 bp, Homo sapiens
agccgctgtccggttagggacgtttacccctgtcgctccggcagattgcaggtcaccaaggcacagaggaaggattaaacaactgagcgcccggggcaccggccatccgcccgcgtcctc

SEQ ID NO: 20775 - DNA, 120 bp, Homo sapiens
ccacggggagcgcaaggcccccgctcccgccccccggccacctcggacgcccagcgcttacctgccccgaggggcgggcactgacagtcctggcctgcccgccgcggctgtttacaccgc

SEQ ID NO: 20776 - DNA, 120 bp, Homo sapiens
caccgcagaggctgtttacacccgctgagcagcacggccgagccggaagaagcctcccgtgcctgtgcgctaacaggctatatttgtaggcggataatatgatctggaggacatgtgcta

SEQ ID NO: 20777 - DNA, 120 bp, Homo sapiens
cttcgtaggggagggcttggcaccctgcgcgctgcagccggccagcgcgagccccggcccagggactatctgcagcctcctacccagggccagacattttcacactggagatcccggagg

SEQ ID NO: 20778 - DNA, 120 bp, Homo sapiens
ttccgagtgctcagcacgctaagctgggaacccagccagacgcaggctttgaaagccatatgaccaagggaatgtaaaagtgttttcgatgttggaagcagcagacatcgaaggtctcaa

SEQ ID NO: 20779 - DNA, 120 bp, Homo sapiens
caccgttacattttatctttttaatatcctaaaatgtatgtgagtttaggttctctttagatactttactaattggccaaatatgttttgctgatagccgacatcgtgaaaatatgacaa

SEQ ID NO: 20780 - DNA, 120 bp, Homo sapiens
ctgcgccacacattctgtccaggctgcattctttggagggacaggttagggtatgcttcctccatcttacttggaactggaacccttctgttctatttcaagccccaatcataaagaaaa

SEQ ID NO: 20781 - DNA, 120 bp, Homo sapiens
aggcggttaaacatacttttggatatgtgaaacataatcatgaaatacttgctctcaggaggtgttgaataggcaagaagtacatgagcagtgtgcacagtcagctggtgtgcattgaac

SEQ ID NO: 20782 - DNA, 120 bp, Homo sapiens
gcacgctcagtgtaagccaaaagcctcttttaaaaaagcaactctcagatttctcaatttgagtttaatactctgggtaactgagacttgggaaatcaaattgctggcacagcgttaagg

SEQ ID NO: 20783 - DNA, 120 bp, Homo sapiens
ttgcgagggacaaatgttcctttgttcttgttgatttgctgaacgtgaattggctcctggggcagcacagatgcctcacaggcggtcaagtgcgacacatttggttcgactgaatcgatg

SEQ ID NO: 20784 - DNA, 120 bp, Homo sapiens
atgcggttgttctctgtaagtgttaattaatttgttgattttgtgaagtaaaattcctaatggttatggaggttatggtttgtccaagttggtgctgattcactggacgcagcagcacga

SEQ ID NO: 20785 - DNA, 120 bp, Homo sapiens
tggcgttttgggcagaggggatacagaggaatagagctatttacttatcaagagctttccaactatggacagtctcctcatcacacttctactaggaggagcagttgtcctcattgtaga

SEQ ID NO: 20786 - DNA, 120 bp, Homo sapiens
aaccgaaacacaaatactcacggaaacacgttacctgtgaaggaatgggctaaaccctaatgacaagatgctaacagtctcccagtaggttagagccagggaacttgaacttctagtcca

SEQ ID NO: 20787 - DNA, 120 bp, Homo sapiens
ccgggtcgggcccttccgccctaaccagccggcgtcacctcctcctggcagtctctcctgctggctggggccccgtggccctgccaccacggctcaggtcaggcccggggcgctgccccg

SEQ ID NO: 20788 - DNA, 120 bp, Homo sapiens
ggacgacgctgtgagcggggtatcttacgagggactcggacggccgggggatgactgccgccgggaccaaggagctgggcggggaccgcagcagccgaggaggcgggagcccccacctgg

SEQ ID NO: 20789 - DNA, 120 bp, Homo sapiens
acccggcgcggggaggaaaagtgggagtcttgacccctccgccccctacgcacccacgcgcacactcaggctcgcctctcgcgccccgcttcccctgcaaggctccgaggccgccgtgcc

SEQ ID NO: 20790 - DNA, 120 bp, Homo sapiens
cctcgccccgccagtcagtcgctctgcgagcctgtggtgcagccccgtgacctcccgggtctgccctgagtcacagaagccagcacacgcggagcgctgtgtgggttcgtggaacttgga

SEQ ID NO: 20791 - DNA, 120 bp, Homo sapiens
aggcgccctgcggccccctgggctgggtgtccacggccggccgcccctcctgtgcgaccttggggaagtcccctttcctccccactcctgagtctcaacaggcctagtagagcatgaagc

SEQ ID NO: 20792 - DNA, 120 bp, Homo sapiens
agccggccgcgtgtgctttgtgcgaaggcctgagaccttggaaagggtggctgaagacttatctgggacagaccccccgggagcgggagggaacttagttcaaacctgtaacaaagaagc

SEQ ID NO: 20793 - DNA, 120 bp, Homo sapiens
ctccggaccttggcccccactccccttcacagccctgttggcctgcgggactgtctgctggggcacttggctccctgagtctacagcacagcctggcagagccaccgccccagcaggtgg

SEQ ID NO: 20794 - DNA, 120 bp, Homo sapiens
tagcggtacattctggaagagctggtatggggccttgtgctgctttcctcttgctgtgtgatcacaggcagtgtgtggcctctctgtaacgtagtgcccctgctggtgaaatatcttacc

SEQ ID NO: 20795 - DNA, 120 bp, Homo sapiens
ctgcgcctccttctcggggttatgtgggactctgagaggaggggtatggtgggttcaaggggctccttcagggatgagcacggtttagaggatctatgggtcccctagagcatgggtgtg

SEQ ID NO: 20796 - DNA, 120 bp, Homo sapiens
tgacgaacagggacaggtggggcaaggccccgagcaggacagatctgatcttatgctaggtgtctctgggcctcactttcatcatctgcacgtgcagctgagggaaggcagtgctgcctg

SEQ ID NO: 20797 - DNA, 120 bp, Homo sapiens
gctcgagcaggaagggaagggctcccacggcttcctccctagagcacagacttcctgttcagccacatctaggggaatagaaaggctgactgagctctgggcagcagaccagtccttccc

SEQ ID NO: 20798 - DNA, 120 bp, Homo sapiens
acccgctgcacacagatacaattccacagtcagggaatgggtgggtccctgtgccacatggacccatctaccattgaacccactggtaaggactccaagttgcacaactctagtggcagc

SEQ ID NO: 20799 - DNA, 120 bp, Homo sapiens
atgcgtgtgcagatcatgtgcccatccacagggacacagacctgcacactactccagggaacacacacgtatgtgaatggcacctgtgattctggagccattgagactcatacccagcca

SEQ ID NO: 20800 - DNA, 120 bp, Homo sapiens
acacgcaggtctgacacaggcctggcccagccccacagctattctgagctgagcctggggctgatgaggtcagggacagccaactcccagcaggccccagctgctgtggcacaggcctag

SEQ ID NO: 20801 - DNA, 120 bp, Homo sapiens
tcccgagggtgacctccctgactggtcagtgtggctttccctagcctggcctgtgaccagcagcatgaggaagtggggattggagtgctgcaacaagtgatttggattttagcagagttc

SEQ ID NO: 20802 - DNA, 120 bp, Homo sapiens
gagcgtttcctcgatgggtctcctgggctgcagtccttctccaacagctctcgttttcctgcctggctgtcatctccgggccctgacactggcaggtgaccgcaggtggccctccgctcc

SEQ ID NO: 20803 - DNA, 120 bp, Homo sapiens
ctgcgcaggccttcaccagtgcccctggtgataagggttccaggggcccaacacctgggctgcttctcctaacactcagcagcaggagataaataagaatagaaggaaggaagaaaagga

SEQ ID NO: 20804 - DNA, 120 bp, Homo sapiens
tgccggctggcagctctgaccataccatcccctgctctccagctctggtgtccagggtgaccagagccgcctctgggcaggaagccaagccagaaagcccaggacatccctgagcgcctg

SEQ ID NO: 20805 - DNA, 120 bp, Homo sapiens
gcccgctctgccccccccccaaactcaaatccagtatatttttcaaatccagcatgacagaatgggaagggcctcctagatcagcagattccagtcccacccccttgtcccagatggaga

SEQ ID NO: 20806 - DNA, 120 bp, Homo sapiens
tcccgcccacccccacctcagtgtccctggggatgcggaaggtgggggcagggagggggagcctgcggcccgatctcccgggaaggagggggcgggccctccaccgcagcgatggcgggg

SEQ ID NO: 20807 - DNA, 120 bp, Homo sapiens
gggcgggcggcgcgggaacctgacaccgaggatgaataaatgatgctcgctgactacccgtggccaaagcccgtggccaccgagcgccggctggcaggggcagtgaccggcggccggccc

SEQ ID NO: 20808 - DNA, 120 bp, Homo sapiens
gcccgttcgtccctgggctccgcaagcggcgcggtggcacgaagatggcggggtggccgggcgcgggtcccctctgcgtgctgggcggcgccgcactcggggtgtgcctcgcgggggttg

SEQ ID NO: 20809 - DNA, 120 bp, Homo sapiens
tgccgggcagctggtggaggtgaggccgcggcacggagggactggggaggctgtcaccctccaggcagggggctgggggagaggggacgcctttttgatccggagcttgtttgatccctt

SEQ ID NO: 20810 - DNA, 120 bp, Homo sapiens
tcccgggcgatgcagccctgccccaagccctgccaggctgtgagagagactcagccccactcttagggtccctggtctgatggaagggcacagtacccgatttctggaacattagtctga

SEQ ID NO: 20811 - DNA, 120 bp, Homo sapiens
tgacgggggagactcaccttgaccttagggattcccagcctgacttggggacacagccctgcccagactgatgggggatactgggcccccatcctccagcctttggtctcactggcaggg

SEQ ID NO: 20812 - DNA, 120 bp, Homo sapiens
agacgagggcattccaagttggagggtgggggcagcaggatgaggagaccctttacagagaagctatgtggagcactaggtccagaggggcaggcagggcaggacctagggactgggaag

SEQ ID NO: 20813 - DNA, 120 bp, Homo sapiens
aaccgggagctttagaaggtttctgctcagggacaagtcatgatgagttctggtttggaaggagggtaaattgggagcaggcacacagtgggagaggtgggaggagctgctgagatagca

SEQ ID NO: 20814 - DNA, 120 bp, Homo sapiens
ctgcggagcctgaaaggggagccaacgagggagctggcagaccagacctagagttctgaattgtgaggccagagggagaaggcccaggagccagggccagggaggagcaggggatggagg

SEQ ID NO: 20815 - DNA, 120 bp, Homo sapiens
gggcggaccagagggagcaggaaaacagaaatgcaagaggcagtgagaggtgcccagggaagtcctgaggggtgggggcttggggacagtgtgggatagagaggacagagccatggggaa

SEQ ID NO: 20816 - DNA, 120 bp, Homo sapiens
ttacgcttgattggaaaaattgatgtggggccgctgagtttaagggcgggggtggtcacccttccatcttgaacccagctctgctcgttgggccaagagtggcttccagagccagctgtg

SEQ ID NO: 20817 - DNA, 120 bp, Homo sapiens
gtccgggaggcagagaggccccagagatagagcagaggtcagggcaggcaggagctgggtgtgtgactttgggcagaggcctgacctcactgggccagaccagctgccagtgtcccctcc

SEQ ID NO: 20818 - DNA, 120 bp, Homo sapiens
tcccgttaagcccagaacctcctccacactggcgacccacctgtgcccagtgagagcccttcggcctcttccaaagaggctcacctcagagggcacgggtgtcggaaggcctggagactt

SEQ ID NO: 20819 - DNA, 120 bp, Homo sapiens
gagcggggtgacctctggcatgccattgcccttctctggatgtcgctttcccatacacggttttataaacttccctgagtgcttcccctctccagccagttcagccaatgtccacggtgc

SEQ ID NO: 20820 - DNA, 120 bp, Homo sapiens
gtccgccagctcattgccttgccccagccagtgtcccctgaggcatttagagtgagaggaaactgaggcccagagatttggcaaggcacgacaaaggaccacccacatagagggttcctc

SEQ ID NO: 20821 - DNA, 120 bp, Homo sapiens
agccgccagcacgtgaggatctgctccagcccttcctggggtccatagtaccagcggagatctcagggtccacctcagcccccagagacaccagaagcacgggccacccacagacgcaaa

SEQ ID NO: 20822 - DNA, 120 bp, Homo sapiens
tgccgcctcactcacagacgcacacacgccgccctatgcccagaaatacatgtgcacgtgcatgctcacaaacacgtccggctcgcgtcccatactgacaggctggacagtctccatgtg

SEQ ID NO: 20823 - DNA, 120 bp, Homo sapiens
gaacgcgcacggacgggcacacacaagtgcacgcgccggccactcgagaatgcgctgccactcgcgcgcgcacgcacagggacgcgcacgcggctccgctaagtggaaccagcagaaccc

SEQ ID NO: 20824 - DNA, 120 bp, Homo sapiens
ggccggccgagccaattggagactccttggccctggaagccctcgctgctgccgccaagagacgcggtcaattaacttctccctgcagccaggctctctgacccggcctgcccgcccctc

SEQ ID NO: 20825 - DNA, 120 bp, Homo sapiens
tctcgccggtgcccgccccatgcccgacccgccttcttcctcccctgcctcctctgggtcctcccgcccttcacagccatgctcggactgcagggccccggccccgccttggcgcgtctg

SEQ ID NO: 20826 - DNA, 120 bp, Homo sapiens
tgccgcggagctgaggagacgtagccttctggggtagggatggagggggtcgtctcaggggacatacccctgcccaggggtctgaggaaacacgaccctgaattaagagggatggggctg

SEQ ID NO: 20827 - DNA, 120 bp, Homo sapiens
ccccgccctggggaggtttcagagaccgccttaacctctgcgggtcacattcacgggaatggctgggctaggcacaccaggctgctcccaagtcagaggacagaggctgagacccctcag

SEQ ID NO: 20828 - DNA, 120 bp, Homo sapiens
acccgcatgatatttcatttcctttcttataatgaggccagtgagtcccggtgggtggcagccagggcccagggtgtgcaggttggagggaagggaaaggacattccaggcagagaacag

SEQ ID NO: 20829 - DNA, 120 bp, Homo sapiens
ctccgagtctggatggagggagctcccagataagcagtggaatgagagggactcccacccccagccagcaccagagtgcccagcccaacccaggccgcatgccaacagttcctccatcct

SEQ ID NO: 20830 - DNA, 120 bp, Homo sapiens
ggccgtgtgggatggaatgactcagggaggaatcctggtcagggcataagaggagaaactagggaacaagaggaagaggagggcgccccctccatctctctgtagggcctgggtcaggga

SEQ ID NO: 20831 - DNA, 120 bp, Homo sapiens
ggacgcatcagagacaacttagtctttcccatccaggttgggcccttggtctcagatgcagatctgtgtaactcccttggcgtcactcctgagatggtgagggggtcagactggaagggg

SEQ ID NO: 20832 - DNA, 120 bp, Homo sapiens
tgtcggggaaggaagtaatgcttaaactcaattctaaatgtccactgggggattatgaggcagctaaagaaggcagagcattcctgggagtggtaactgcctacaaagacatgagagcgg

SEQ ID NO: 20833 - DNA, 120 bp, Homo sapiens
caccgtgggagggctgagcccagcatgagggccgacaccctgaacgggcactgtggtagcctacaagatgtgtcatgggaggaacggggaagaccagaagtcaggtgagatcctccactc

SEQ ID NO: 20834 - DNA, 120 bp, Homo sapiens
gggcgggtgtgccgaagcaggaggacttgagttcaggggatgaggaataagcccctccctctccctaagacttcccaaggactcaaacttttaggagctgctgactagagctctcccttc

SEQ ID NO: 20835 - DNA, 120 bp, Homo sapiens
gtacgcctgctataatgtccatgggaaactgccctctgttcaaaagttaaagagaaaataagacctcgaaatcctagccccctaagaagaggccaaactggccccactttgagcctttcc

SEQ ID NO: 20836 - DNA, 120 bp, Homo sapiens
tgccggggtggagggacttcctgtcgggtgctgccgtggtgggagctgtgttccaagggcacttagcgggtagggcagtcacccggagtctgactcaccctgaagatggagtgataagaa

SEQ ID NO: 20837 - DNA, 120 bp, Homo sapiens
tctcgtcaggctgcagagctcctcactctgggtcccctgcactcaatgtgctgctaggatgacttggtccgagtatccactctatctgctgaccagaccaagagttcctagagggcagac

SEQ ID NO: 20838 - DNA, 120 bp, Homo sapiens
agacgtttgttgtaccagtttgcacccacaggcctgacaccaactacagcaggcacagcactgtggtagaggagtgcacaggagcggggaaatcccagctccatttcatcttggctgtgt

SEQ ID NO: 20839 - DNA, 120 bp, Homo sapiens
cagcggggcacaggcccagaacggtgtgcctctgcagaggtcatgggaagctcccatgcccatcatccttatcagatgttctcagcaatcctgtaagcagacagggcagtgttgtaatac

SEQ ID NO: 20840 - DNA, 120 bp, Homo sapiens
tgacgtcagatgatctgtgcagtgtagacagatctgattccccattcagtgcttcaccaagagtcagcaggaacaggtggtgactaccatccaagaggctgggattagctaagagccact

SEQ ID NO: 20841 - DNA, 120 bp, Homo sapiens
aaacgccaggggtaagagtcctatattacatactcatgattgcaaccatggcaataccatacatacaaatggccaaagacttcacagactcgcactcaaccgtgggtagtattttttcca

SEQ ID NO: 20842 - DNA, 120 bp, Homo sapiens
cagcgtccctctgcagcctgggactctaaccacagtagcaaatgcagcagccaattgtagactaagccctcttaaatcaggatagacatctccattactggggggctaaaaatgtcggtt

SEQ ID NO: 20843 - DNA, 120 bp, Homo sapiens
tcacgaggggagcagcagtgagcaaatcacaaaagcaaatgataaggtccatgcagattggaagacccctcccctggtgggagacagcttcgtgtggcacccagaaaccccttccccatt

SEQ ID NO: 20844 - DNA, 120 bp, Homo sapiens
tttcgctggatccaacagagacagcaagcaaggacctgaaaacctcagtgggtggcccctgtaaatgataccctttcgcctcccacacacaccctagtcccatggccctgtttacatcaa

SEQ ID NO: 20845 - DNA, 120 bp, Homo sapiens
caacggccctcactcaaacctggcaccagatgcatcaacctctatagcatctatgtgacctttcatgtgggtagatttgttcttaaaatggggtgggtcaagggaataagagctaccatt

SEQ ID NO: 20846 - DNA, 120 bp, Homo sapiens
ggtcgcacccacttggccacagcactgggttgctgatttagccatacacatgggcacatggtgtgggatagatcggtacccaatatgtggtggtggatactggggagctggagggccttc

SEQ ID NO: 20847 - DNA, 120 bp, Homo sapiens
aggcgccagctccatggtcaacccctccagtccatctccagcagagagccttgtaaaaggcaaatgttactgatcaaatcactttaaaggtttccctttctcaccagctagccagagaat

SEQ ID NO: 20848 - DNA, 120 bp, Homo sapiens
gaacgtctaattgtgtagcatggcacataagctgcccttttacttggcccctacttctcagctcctactttgtgcttggctagtttgatgacctggatttcctaacacaggtcttcatat

SEQ ID NO: 20849 - DNA, 120 bp, Homo sapiens
attcgctttgaaaggcctaatttaatatgcatatactagaccaaaagactgaatcaagattaatagttacggtgcccatgaacttgggcttttaagaagggtaaggcctccaacatgctt

SEQ ID NO: 20850 - DNA, 120 bp, Homo sapiens
gaacgtaagtgtgtatctttttgcaaatgccaaacacatgtgaaaagaggaaaatatttcctccaaaagtgaataaaatataaacaagaatgaattcatttctactttaatcccttctca

SEQ ID NO: 20851 - DNA, 120 bp, Homo sapiens
ttccgggggggaaaaggaagaaatttaaatgagaagagacatccaaaacaaaagagttttcaggaatgaatgtatgtgtgtgaatattagcagcagaggtctactgcctgtctacaatgg

SEQ ID NO: 20852 - DNA, 120 bp, Homo sapiens
ccacgttaagaaaaatgaacttaatttcaacagtgtaatggtgagccatttaaaaattttaaataggaaactgagatgaaggatttatatttccgaaagattgctctagctactgaatgt

SEQ ID NO: 20853 - DNA, 120 bp, Homo sapiens
aatcggttaagataattacagttgtatagaagtacagaaaaggacaaagcatgaactgcaactcattcaaaagaaaaaaaagtattccaagtaaggagaacagtatgttcaaggacatga

SEQ ID NO: 20854 - DNA, 120 bp, Homo sapiens
atacggaattactttctctatcatacactaaaggctttgttcttagagtaatggagtctctgagatgttactagaggttcctgttaatcacatctatgtttttaaaatactgtagcataa

SEQ ID NO: 20855 - DNA, 120 bp, Homo sapiens
ccacgcccggcctgctgtgccctatttaacatgtagaacaaaatacatctcaggtaccccaagaaatacaactttttaagggacaggcaaaagaagaatgaacaactgagagttacagaa

SEQ ID NO: 20856 - DNA, 120 bp, Homo sapiens
taacgctgagaccagaaaccctggaatcatccttggttcctctctcacatgtcatattagttccatcttcaaaacatatccagtatccatccatttctcactactcttatattaccatct

SEQ ID NO: 20857 - DNA, 120 bp, Homo sapiens
agacgggggagcacccacagagtgtcaggccaaggccttgacccataagaacagaagagggggtgagatacaattccaaggaagcactgaaacttttcgctcagtggagacttggtttac

SEQ ID NO: 20858 - DNA, 120 bp, Homo sapiens
gggcgtatcagtcagcctggaaggccccagagggcctgagtttgttctctgagcaaagtaatgaactctttccctttggtgccaccaccaagggcccaagctgcagcctggtaacttgat

SEQ ID NO: 20859 - DNA, 120 bp, Homo sapiens
aatcgttcactttcacttctgctcagtgcagcctacacggagagagaaagcggggaggggaggcaccctggtgcctggtggccgtgcatgctgcgtagggaaggccgtggtgttctggaa

SEQ ID NO: 20860 - DNA, 120 bp, Homo sapiens
gaccgagctcaccacccccaccctaggatgtctatccaggaaaggggctgaccagtgtgacaaaggcctgccaggaggagcctggctgagctacttttctgccttcctacttgagactca

SEQ ID NO: 20861 - DNA, 120 bp, Homo sapiens
tggcgatgaggttctattttctatgtgcctgctggaggcccatcatggttttcaagtaattatgctggacacagagggaagagaaaacaggaacttattaggagggacagacatagcagg

SEQ ID NO: 20862 - DNA, 120 bp, Homo sapiens
aaccgcccccaggtaatagccgttccctttttgcaaatcctgtccctccagcaagcccacatgtcccacttcgcctagctcaggactgtgttcacaaatatccaatgagtcatggcccag

SEQ ID NO: 20863 - DNA, 120 bp, Homo sapiens
gtccgggaatgggcctacaaaacatccaagcagaagttagactgtcacagggagaagtttctgactgagcaggccccgtgggaattgactgccccgcctgggctgatcaaagagcttgca

SEQ ID NO: 20864 - DNA, 120 bp, Homo sapiens
tttcgaaaaactaaaacgacaaggcacttgggtcatttttcaattataccaatagctacacaagtggtctcatatcactgcgatcagctgggccttccaggcaaacctcttttataaact

SEQ ID NO: 20865 - DNA, 120 bp, Homo sapiens
ggtcgattgagtacagactgtgtactccttaaattttcatggtgaggagtctagactgctaagaaacacctgcaaatcagttgaagttggtatagttacatgttcagtggttcctgagga

SEQ ID NO: 20866 - DNA, 120 bp, Homo sapiens
tatcgaaaactgcagactgagcccagtatgttttattatacttgccatcagtttcttaaccccaagagtttatgaggactcatcatttctgcttgtggtagtactatatgaacctgtgtc

SEQ ID NO: 20867 - DNA, 120 bp, Homo sapiens
gtccgtattctaggctggcagtcaggccatcagcattgaaggtgaaagaatccccctgacttccatttccttatatgccatcttgttagaaacccacaaagtagctagtgtggtctgttt

SEQ ID NO: 20868 - DNA, 120 bp, Homo sapiens
ggacgcttgtaccaagtgccacagaaaggagagagctgactgcctggaagtcagaggcccctcagaggagggaacatttcagcttaatcttcaaggatgaggaataattcactgggcaga

SEQ ID NO: 20869 - DNA, 120 bp, Homo sapiens
agccgcagcacccggccttgtaaacttaaggtcttcacaggtcttttctgagcctgtaccattccctgcacatgtgcagactttctcatttgccctatatatgtggttgcttttgaacat

SEQ ID NO: 20870 - DNA, 120 bp, Homo sapiens
ttccgagaccagagcctcaagcgctctcttgtgcacctgcacttccccacttggcctgagttgtgagtccactgctctggatggtggttgggggtctaagtgctgtccagtccttggtgc

SEQ ID NO: 20871 - DNA, 120 bp, Homo sapiens
gcccgacagccccagcaacttgctgcgcttcatccaggaggtgcacgcacattacctgcatcagcggccgctgcacacgcccatcattgtgcactgcaggtagagggtgggcctgagggt

SEQ ID NO: 20872 - DNA, 120 bp, Homo sapiens
ccccggcctcataaccccttcttggcacagctctggtgtgggccgcacgggagcctttgcactgctctatgcagctgtgcaggaggtggaggctgggaacggaatccctgagctgcctca

SEQ ID NO: 20873 - DNA, 120 bp, Homo sapiens
gtgcggcgcatgcggcagcagagaaagcacatgctgcaggagaaggtgaggatctgggcagatggggctgggatgggccttctgtcccagggtgacgggcccctgcccagctgacctggc

SEQ ID NO: 20874 - DNA, 120 bp, Homo sapiens
acacgtggagcaggtcctgcagcgccatggtgtgcctcctccatgcaaacccttggccagtgcaagcatcagccagaaggtgaggaaggttccgtggaagctgctgggagagccacagcc

SEQ ID NO: 20875 - DNA, 120 bp, Homo sapiens
cctcggtggggatgtgcccatcagctccatccaggccaccattgccaagctcagcattcggcctcctggggggttggagtccccggttgccagcttgccaggccctgcagagcccccagg

SEQ ID NO: 20876 - DNA, 120 bp, Homo sapiens
tcccgccagccagcctcccagagtctaccccaatcccatcttcctccccgccccccctttcctccccactacctgaggctccccagcctaaggaggagccgccagtgcctgaagccccca

SEQ ID NO: 20877 - DNA, 120 bp, Homo sapiens
gctcggggcccccctcctcctccctggaattgctggcctccttgaccccagaggccttctccctggacagctccctgcggggcaaacagcggatgagcaagcataactttctgcaggccc

SEQ ID NO: 20878 - DNA, 120 bp, Homo sapiens
gcccgagatatcttctcacgcagcctttcagtcagggtcatcctcagccgaagtcaccttgctgccatcccggaaagtgaccatggatcaccctggcacacacttgacagcactgacaaa

SEQ ID NO: 20879 - DNA, 120 bp, Homo sapiens
aggcgatagttatgtggctggggaatggtttcagaatgcctatatgcaaggtctagtgacctcaatcccaaaatacacacacacacacacacacacacacacacacacacacacacactc

SEQ ID NO: 20880 - DNA, 120 bp, Homo sapiens
ccccgcccaactccctccctcctatattaggcaatgctaaaaggccactccccaaagggcatttttctcatgtgtggcacacgaaaccatgcctgtgtaacagacgtcaccttcagctgc

SEQ ID NO: 20881 - DNA, 120 bp, Homo sapiens
actcgtgaagaaggtctagcgaggtcagccctcaacataaaaacgctaaaaagcttaggtctctgacataatggtcaccaagcaaaattcactctggtagaactctctgctcttggtcct

SEQ ID NO: 20882 - DNA, 120 bp, Homo sapiens
acccgtccccttccataagttaacagcagcctggtatggctcaggggaaccacctcgctccacaggatttaacctggattaactatgagtcaaggtgccccgtgccgacccaagctacac

SEQ ID NO: 20883 - DNA, 120 bp, Homo sapiens
ttccgttttgtaagctattctatacccttctaataaattatctttttgcttatgttggccaaagttaatttctggtgctttcaaacaaataacattaaaccaataaaatcagaatagaaa

SEQ ID NO: 20884 - DNA, 120 bp, Homo sapiens
cttcggtctgtgctagagggaacctgcccagacacatttcttggcttgactgtactcactgatgaaaacccagactcaaagatgactcctcataagtgtcaagatcagaaacaagaagca

SEQ ID NO: 20885 - DNA, 120 bp, Homo sapiens
gctcgttctacctttccgaaagcagaagcgttaagcgcacatgcaagtttccaatccaggaaccctttattttttttgacatagaatctcactctatcgaccaggctggagtgcagtggg

SEQ ID NO: 20886 - DNA, 120 bp, Homo sapiens
cttcggtggcccgtatggggaactctctctccttacaggaaactctctcccctctgtctttctctttcccaacttgggacccttggtggaaagcatctaagcacagaaacaactgtaggt

SEQ ID NO: 20887 - DNA, 120 bp, Homo sapiens
gtccgtgtgaaagtgtctgactgccaccggtccagatagtcgctgctcacccacaacaactgacatagctacttagatgcctaataggagtctccaaccaactcatgatcgtctcaccaa

SEQ ID NO: 20888 - DNA, 120 bp, Homo sapiens
tgccgtgcacagtgacctccctcctgcaggttaagccagctaagccaacaggctgggaaatggtcaactagcgacccaggaaacaagaacaggagcttcacagtttccaaagcattgttc

SEQ ID NO: 20889 - DNA, 120 bp, Homo sapiens
tagcgccactgacaccgcaccctgggaccaaccaacacacaggcagagaggagtgtgacaccaggtgaaacagccaggctctgggactgagactggtgaaggtcttggctgggggtacaa

SEQ ID NO: 20890 - DNA, 120 bp, Homo sapiens
acccgggcaagaagggccgtgatcctccccgtggggcaatgctcctcagaggcaaaggacatgcccactcagaggccacacaccatgcttggcactggggatcccagaatctcttgccca

SEQ ID NO: 20891 - DNA, 120 bp, Homo sapiens
tagcgtgaggcctgaggtgctggagcgttctgctcagtgtttctgctctgcctacactttcggcaggccctgtatgcctgcacgtcagagaaagaggccttctctttatgcttttcccac

SEQ ID NO: 20892 - DNA, 120 bp, Homo sapiens
actcgtccagctgtaaactgtcgctgcatgttaatcagggccagtcctgcggtgggagcagcttttcagttttcctggtccagcttcaggcttaggcagatgttgtgctcctgactctca

SEQ ID NO: 20893 - DNA, 120 bp, Homo sapiens
ggacgacagagtgagactccgtctctaaaaacaacaacaacaaaaaaaagaacttcatagaaagaaactggaacttaagttacaacgccaaggacaaaatactcattgctttctacatgt

SEQ ID NO: 20894 - DNA, 120 bp, Homo sapiens
tggcgtgaaggacaacaggagatgattttgttgctgctggaaacaggaggcctacttttaaaactaaaaagtacaatattctagcctgcagacgaaagaacactcctaatggacttgttg

SEQ ID NO: 20895 - DNA, 120 bp, Homo sapiens
gctcgcttccaccaagtccgacctggacagaggccttaaacaagttaggaagaacatattgccgcccttcacaggtctcctcctctctctctcaatccctgagctttggtttcctgagat

SEQ ID NO: 20896 - DNA, 120 bp, Homo sapiens
agacgtggccgtaagacaaggaatgctgcaagccaccggaagttggaagagacaaggaacaggattcttccctatataccttggaaggagcatggctttgctggatattggacctgattt

SEQ ID NO: 20897 - DNA, 120 bp, Homo sapiens
agacgacgtgatgcaaaccctggtgtcaccaaactgattgatccattatttgccccatgctcagctccagacagaaattactttctgaacccgcaattcagaatatatgttccagcagag

SEQ ID NO: 20898 - DNA, 120 bp, Homo sapiens
caacggctccttggcagcaaaaatgaaggtctagaggaaaagcaatttacttctgcttatggcaccctgcaaaaacaaacatctctcaggaaagcaagaggtacctaagagtgaatgatg

SEQ ID NO: 20899 - DNA, 120 bp, Homo sapiens
gaccgtgccaggtgatttgacagttatctctctgaagtctccaggttgttagtaagatgatggtaagggcctagttttgagataaggaaactaagcctcagagaagctatgtaatttggc

SEQ ID NO: 20900 - DNA, 120 bp, Homo sapiens
tggcgcaaagtcacaatgaacaagagactgagctgagattcaaatccaggtctctctgaccctgaggtccattctcttttcctttaccccaccttcctttctaaggagtaactttcccct

SEQ ID NO: 20901 - DNA, 120 bp, Homo sapiens
tttcgcacaaagcaacccttgtccttaagaagtctaaacatctttatgggtttttgtggtgtctgatataggtctcaccacttttaaatgaacaacagtgtctgcatttccattaattct

SEQ ID NO: 20902 - DNA, 120 bp, Homo sapiens
tgtcgtgctcgtaattcagcatacttcagctgttccatgtggaagttttggcgttcagtaagcaactgctgcctctgttgttctagctgtaagcaaaggaagtggaagagaaatgacacc

SEQ ID NO: 20903 - DNA, 120 bp, Homo sapiens
tcccgcagtagggctactgctctttgggctcacttggacacatgtaatcccctctatgtttggcaggcctttagatatctaaaaatactttctatggctgtctgagtcttccccaggtaa

SEQ ID NO: 20904 - DNA, 120 bp, Homo sapiens
aaacgagcctctcttgtccttgtaatagttcctcagatgttaacatttcaagttcacccaaccttcctatgtgctctcttttggatgtgatactctcatggttactgtctattttagaac

SEQ ID NO: 20905 - DNA, 120 bp, Homo sapiens
tgacgtggccttagctgcaaagatatgcatttctctatgtggaactttggcagtgccactgcaaatcttagctttcaagtacccaaaattatacttggtgacacattcacggaatatttt

SEQ ID NO: 20906 - DNA, 120 bp, Homo sapiens
ggccgactggggaaaatccctgtgaaattgagtgagaagcatcactggttataggagtagcaactggggtatttccatggacagatggggtgtgggaagacaggccatgaacacagtatg

SEQ ID NO: 20907 - DNA, 120 bp, Homo sapiens
aaacggtatagcttatgtcctggattttggtaactggcttgtagactttccttagggagagggagattttctgaaacaaaacattttgagagaggttgagggttaccaggaacaagcaag

SEQ ID NO: 20908 - DNA, 120 bp, Homo sapiens
ctgcggcagatgcagcagagcttgccaccatgtactggcctcgtcatgcaaataaaataacttttcttgttctagataccttatttttattaaatcaagttgaagactgcattcactttt

SEQ ID NO: 20909 - DNA, 120 bp, Homo sapiens
acacgcacaagaagctgagatttagataattcactttagagagttaacagagtgccttttatttaacatcactggctaacaatccttttgaaagggcaaatcaaacacagaaaaaaggac

SEQ ID NO: 20910 - DNA, 120 bp, Homo sapiens
tgtcgaagtttgatctctagtttcttcatttgtgtctcaaccaagagagctaccagggacttgatctttctttcttccactgcagccaggtgctaagggtacaagatcattcaagctatt

SEQ ID NO: 20911 - DNA, 120 bp, Homo sapiens
taacgtacaatctaaaataactgtctctgaatttctggtccttatagagataaatcaacccttaaaagattaaaggaaatgcctcatgtggtaaactactaccttcaaaagggctatcaa

SEQ ID NO: 20912 - DNA, 120 bp, Homo sapiens
actcggtctgtcccctcactatcctttcctccctaaaacttttctaggggtgggcaggcaggcaggctgctgaggacagcacctgacactcttatacaaagcctctcccttctctttggt

SEQ ID NO: 20913 - DNA, 120 bp, Homo sapiens
agacgtcatccaagaactttcccagcaaactcccagcaccatttttcattcacttttattatgtctgctgaatttatgtgtttatcttgcttctacacaaggcttttttttttttttttt

SEQ ID NO: 20914 - DNA, 120 bp, Homo sapiens
caacgagtagaacagaagtagtttctatgtagtcatacaaaaatgaaactgaacaggactaactgtaggcaaaataatcaaatgggctattttttcctgacacattgagaggattattaa

SEQ ID NO: 20915 - DNA, 120 bp, Homo sapiens
caacgatcaacttgcttagtgtaaatcaatttcaatcaacccctgtccgttaataccttgtgactaaagtatacaatgacatttttcacacctccagaaagagtttcatgctggaagcag

SEQ ID NO: 20916 - DNA, 120 bp, Homo sapiens
tcccgttgtcccagagctaatacccaattaccatgttgccacgaatacaaacctacttttgccattttggaaaacgtatatatgaggtggtttgtagaataaattcaaaggaaatatctg

SEQ ID NO: 20917 - DNA, 120 bp, Homo sapiens
ccacgtcagtatgacaaaagattcttaaggaaaacttttaataacaaagctgtttatagacacagaagaaaatgagaataagagaaacttggactggctacataagttatatattaatta

SEQ ID NO: 20918 - DNA, 120 bp, Homo sapiens
agtcgtgcagcatgagcatttgtacactttcataactcagagggaaacctaggtgttttgagaatgaagatacgagctcctagtaaatagaaggaagagtgactgatgacgagggagtga

SEQ ID NO: 20919 - DNA, 120 bp, Homo sapiens
gtccgaaaaagcttagatagagataaaagaatcaattctgtttggcagaactacaagaaacagttcaggaaggacaggtaagaaataagggttgagaactaagtagggtcctgattatag

SEQ ID NO: 20920 - DNA, 120 bp, Homo sapiens
ctacggtgtaatgagacagactagtgattactctccagggaaggcaaagtaactggaataagaggaagcttctggaggggctggtaatgttgtttattgaaacggatgcttgtgacatag

SEQ ID NO: 20921 - DNA, 120 bp, Homo sapiens
ctgcgggttagagaatgggactgaggagacaggcaaaagattaagggatgctgacctgagtgagcagttgaacattagcaggtgatctaaagcaccatgaagaatttcctggctgaatag

SEQ ID NO: 20922 - DNA, 120 bp, Homo sapiens
agccgaggttgcaggtttgaagactgaggaagggcacaaaggagaaagccctctccacctctagctcctcatttataatgcgagaggccgggcatggtgtctcatgcctgtaatatcagc

SEQ ID NO: 20923 - DNA, 120 bp, Homo sapiens
ccacgataatccttcagatctctaaaacacctaatgacagtattacagtaagaacttgagcagctcagagacaaagagatgcacaaacactccagggtagcagaagacagactaaaaaag

SEQ ID NO: 20924 - DNA, 120 bp, Homo sapiens
catcgggccctgtgcctgcaatgcagctgctctccagaccgtaggtgggatccactttcccagaggctcgtgctgcttcttgtactttcttgacatgagcttcaaccaattccagtggta

SEQ ID NO: 20925 - DNA, 120 bp, Homo sapiens
tcccggacccgagaaaactcctctggttcaagaataaaaatggaacagcaatctaactttgcacaaaaatttgcttcagtgtaaaaccaccaccaggaaacccaacacagtattattgtc

SEQ ID NO: 20926 - DNA, 120 bp, Homo sapiens
ctccgagggaaaaacggatagaacagtagaaagaaaaccacaactatgtggtgctaagaatgttgaggaattaattggataaaaagaatttatttagtggcatactgaagttgctactct

SEQ ID NO: 20927 - DNA, 120 bp, Homo sapiens
gggcgtgctgatggccggcctctaccccaacctcatccaggtgctgcctctgggagggaatggagttcaccaggtcccagcctccttccctgtctgcagctccttgctcagccccacccg

SEQ ID NO: 20928 - DNA, 120 bp, Homo sapiens
acccggcaggggaagttcaagcccaacagcgtcacatataggaccaaatcaggcaacatcctgctgcacaagtcgaccattaacaggtgagggcatgcaggcctggatggggcagctggg

SEQ ID NO: 20929 - DNA, 120 bp, Homo sapiens
acacggttacggagccgatggctgacgtatttcatggcagtcaagtccaatggcagcgtcttcgtccgggactcctctcaggtgcacccgctagctgtgctgctgctgaccgacggggac

SEQ ID NO: 20930 - DNA, 120 bp, Homo sapiens
ggacgtgcacatccgtggtgggtgcctgcaggcctcccgcccaccccgctctgcagctgctcctccggggcctggcctcaccacagttccccaccatcttttccattccctcagatgacg

SEQ ID NO: 20931 - DNA, 120 bp, Homo sapiens
gggcgccgggccaccatctcactgagcgacagtgacctgctgcggctggagggtgactcgcgtaccgtgcggctgctgaaggagctgcggcgggccctgggccgcatggtggagcggagc

SEQ ID NO: 20932 - DNA, 120 bp, Homo sapiens
acacgcacctagagaatgctgaacaggactgagctgcagatggagaggccactggccaaatctgggacagaagcgtgagctgtagccctactccagcaaatcactgagcctctgagcttt

SEQ ID NO: 20933 - DNA, 120 bp, Homo sapiens
catcgggataaagagattagaatggagggtgatgaaggaccagctttgataatatgtgatgtcaggaaataaaggatgaaaggtctcagcacagagacgatgagaagaggcaggcctgat

SEQ ID NO: 20934 - DNA, 120 bp, Homo sapiens
tgacgtctctagtgaataagggaaagaatcagtttagcctggtttctacggggataggggatgaagacactattttgataaacaaattaccacattacaaaagagagtatgccaaatcac

SEQ ID NO: 20935 - DNA, 120 bp, Homo sapiens
tagcgacaagcaggatatcgttaaatggaaaaatcagctaaggaggtactagaaattaagggctggcatccaaagtctaactctgcaaatgtagggtaatgacaatttccacaaataaag

SEQ ID NO: 20936 - DNA, 120 bp, Homo sapiens
gaacgctaaggctggaatcagggaaagtggttctgctaccagctctgctggaaacatgtaggattttggccagaggattcccttttctattgctctaaaatttgaggactaaaccagatg

SEQ ID NO: 20937 - DNA, 120 bp, Homo sapiens
aatcgtaatctacttattttttctgaataggtttttctctctctgtctctacaaatctttctaccaaaataagctgcagatgaagaggccactggccaaatctgggtcagaagcctgagc

SEQ ID NO: 20938 - DNA, 120 bp, Homo sapiens
gagcgaggctccatctcaaaaaaataaaaattaaaaaaaagttcatgtatatacagcaactagtacactacacttcatttatatgattattatagagtgaaatttcactagacacctctc

SEQ ID NO: 20939 - DNA, 120 bp, Homo sapiens
agccgctgctgaataagcaacagggaggacctgctgccagggctccaggcacctcccctctgccctcttattcaaacctattgttttctaaagatcaagaaaagcaaccaactggataaa

SEQ ID NO: 20940 - DNA, 120 bp, Homo sapiens
tttcgtaccatgaatttaaagagtactatcaggctgacctaaaggcccttctcaaataacacaagatgttaaggaatgcagccacagcctccactatcctctcctcctggagcaattctg

SEQ ID NO: 20941 - DNA, 120 bp, Homo sapiens
aaccgtgggtgacctggaaaactggatgacttcagaagtagctcagtgagaggtggcctaatgcccaaagcaaagtaagttatcacatcatgctggaacatgctgagataagctggaaga

SEQ ID NO: 20942 - DNA, 120 bp, Homo sapiens
attcgtgattcaagcaataacagcagaagatactccgtttaaaaattatggcagtagaagataaccaccattctggcacctacctttgttttcttctctgggcttggtgggagctccttg

SEQ ID NO: 20943 - DNA, 120 bp, Homo sapiens
gttcggtggggtggtgatgtcatttcctgtcccactcaccacaggccttccttcttctggcctggctattcctaaggggagagggtgagtgggaattatgctaagcaaacattttacatg

SEQ ID NO: 20944 - DNA, 120 bp, Homo sapiens
caccgcacccggccccttgcctctaggtcctattcctactcactcacctctgcaaagtctctttgaacccctcctgagttctttatattatcataatactctatctctttttagaattta

SEQ ID NO: 20945 - DNA, 120 bp, Homo sapiens
atccgttccatcattaaagctgtcttcaacccaacccaagcggtggtgatctggaatgtcctttgagctaaatattgtgaagttctattccattctgtctgagtttgaagaaagcgcatg

SEQ ID NO: 20946 - DNA, 120 bp, Homo sapiens
aaacgttccaagtgtttagacatacatacataaaggtaaaactatttcagaaaccatattctacattttagaaacatttctcatgttttaactcaagaaaataaatcatgattctccctg

SEQ ID NO: 20947 - DNA, 120 bp, Homo sapiens
catcgaaaatagcacactttttttttttagaaactaatcacattctctgagatataaagatattcaaatttactttattttgttgattccctctccccaggagatgtcagattcccacag

SEQ ID NO: 20948 - DNA, 120 bp, Homo sapiens
tgacgataatgcactaggatctagaaacaactctgtccaaaattaacctttccatagtgtaatttaaaaagaccaatgacttagacatgtggtgcaaatggtatatgaaaaaaggtgcaa

SEQ ID NO: 20949 - DNA, 120 bp, Homo sapiens
cttcggaaagatggagatgactccaaaacagcagctgaaatcaactgaaagacttttgctgactctctgagtttactcttaagtgggcagaagtcaaagagaactttgcctgctcactgg

SEQ ID NO: 20950 - DNA, 120 bp, Homo sapiens
taacgctacctcccaccttttccacccacagccacccaatcccatccaggctgggtaaccagttagctcccttcaccaacaccactaccgacctgaccctcaaatgtaacacgtgaaact

SEQ ID NO: 20951 - DNA, 120 bp, Homo sapiens
cttcgtaggtccaagggggcgccttcttgatatcgtcatgtatagagctatggccaaatgctgtgacatagggtatgcccctccagactcttgacgaggctgttctttctatgtaaacag

SEQ ID NO: 20952 - DNA, 120 bp, Homo sapiens
aggcggctgatgtaaacaaaagagcctgcaacaggcaaacataagcaatgaaagctaatatagtatcttctggtgtgtagaccagctgtctgactttctaatggtgaatgttagcctaca

SEQ ID NO: 20953 - DNA, 120 bp, Homo sapiens
aggcgattagaggattttgccctcagttaaattaaacttctcaaagcagccagtagggaagagaatgaaaacaggattgacccagatctcttgaaaatcctggggcttttcatcaatcct

SEQ ID NO: 20954 - DNA, 120 bp, Homo sapiens
gtccgtagcaaactcaggacccagcactagccttctaccacaaaccacccgattctttgctgctcttttgctcccctggcttggcagacttcgtgtctaaaacgcctagactctgcttct

SEQ ID NO: 20955 - DNA, 120 bp, Homo sapiens
gaccggaatcagaaagtaggccttatttcttcatcagagtctaggaagccgccaggggaaagaggctgtgctttagaaggttaaggcctatgatccaccctgcgtcacccaaagtaaact

SEQ ID NO: 20956 - DNA, 120 bp, Homo sapiens
gatcggacatttttccatgatgaccacattgatgcatttattaaaaatacaaaatgctaataatccaaaccagccctcttcccttttttcccctttgggagcccttgcactgtggtgcat

SEQ ID NO: 20957 - DNA, 120 bp, Homo sapiens
ctgcggcttggacaaggaacagccacagcttttcctgtactcagagcaggcaaagtgccattaaatgcagctggaagccagggcaggggaaggggtgggaagctcctggagagcccccag

SEQ ID NO: 20958 - DNA, 120 bp, Homo sapiens
ggccgagatacctgaggagacaaacctggggcaccactgccacctgatgtcttcctatggccattgcagtggtcacagccccaagccccgtggcagcctggcagcagagtgaaacaagag

SEQ ID NO: 20959 - DNA, 120 bp, Homo sapiens
agtcggtatgttgtaggccaagttgcagtattggtggaagtagtcatttagcagtagatatcctctcttggggagtctgctgcccagccaactgtttgggatgaggaatttgatggcctc

SEQ ID NO: 20960 - DNA, 120 bp, Homo sapiens
acacgcagtacattcctagtgctgcttgccaccctagcctctgctttctttgggaggctttttgtaataggcctattacagaccggtggtaatggagaaaggagtgtgacattttaacct

SEQ ID NO: 20961 - DNA, 120 bp, Homo sapiens
acccgaaaccgtctctcagttgagggccaaggaagttgctgccagtgctgctgcaggggagtgaatcatcctgggcatccacatgcgagacccacccatctgtccacttttacagtaatc

SEQ ID NO: 20962 - DNA, 120 bp, Homo sapiens
tctcgctcttcccaaggaagcgccccaatgcccagccagtaaggctggatttggtgttttttcctcaagtgttactgctcttgggcactttccatatagcatatgtgtttccccatgtgg

SEQ ID NO: 20963 - DNA, 120 bp, Homo sapiens
tcacgtggagaggtttaacatgaaagtgtagtctacaatttcatcgaggcagtatgtgtgtgtaagaaacattcattttgtgacaacaagatgcagtttgcacatgtcatttctgcttcc

SEQ ID NO: 20964 - DNA, 120 bp, Homo sapiens
ccacggagttaggcagataagggtttgaagaatagtatcttccacaagataaccattgacatccctattttgcagatgtgggaactgtggctcagagaagttgcatccataaacatagag

SEQ ID NO: 20965 - DNA, 120 bp, Homo sapiens
tcccgagcctgaagaatgaggcttgtcctctggcctagctgtctgcatcatctcgtgtcctgactggtgcctgtctccgtgtgcctttgggcataagcttcccagggaagttgggggttg

SEQ ID NO: 20966 - DNA, 120 bp, Homo sapiens
tggcgtgttgacctgtagcacctaggagggcaaacgaggtcccgtatcaaccacctagtcatgggccagtgcagctcgtctattcccttgggagtacaagtgcaaatgaagggccctgcc

SEQ ID NO: 20967 - DNA, 120 bp, Homo sapiens
ggccgctgacaccatttctcattcctgcatcctggaagattatcagtcttgtccagttcccagactcagcgaggtcttggcttggcaggggccccgagatggctgtcttcgctatagcct

SEQ ID NO: 20968 - DNA, 120 bp, Homo sapiens
ggtcggcagggcactgtgacaccactcaggaaggggcagtggggccagccttgggactagctcgtacctggaagcctcaggttctaagcagactgccctctcctcccagtaatgggactc

SEQ ID NO: 20969 - DNA, 120 bp, Homo sapiens
ccccgagtggtggtgggtctggccactgccctgtttcccagatgtggttccttgtaggtactagttctggtccaattcttgttctgggcagaggtacccagagaaatagctgatctgggg

SEQ ID NO: 20970 - DNA, 120 bp, Homo sapiens
gttcggcccaaatacagatactcattgagccaaggtggatggggtctcttgcccatcaggacatcccaaccttctgggcacttgacagccttagtaggccttttccctggaggcgggtct

SEQ ID NO: 20971 - DNA, 120 bp, Homo sapiens
gtgcgcaggatcctggacctttttgcctagaggcctggagtgatggagagagatggggaggccatcagttacagtgcagcacaacacctgctccctggtgggtacttgggatcagagagg

SEQ ID NO: 20972 - DNA, 120 bp, Homo sapiens
ttacgcaaaggcaggaagcatgggaggatgtggcatgtttggggagctgcaaatagtttcatgtgggtgtgtgtgggggtgtggcgggtgaggaggctggcaaggcgggctgggccagag

SEQ ID NO: 20973 - DNA, 120 bp, Homo sapiens
aagcgttcccaggaaagaccctggaactcaaacccaggcaagccagctgtagaaaggaagagaataagtgacctttcatccgtttctccatatgacttatgtagatgtttcttttgcaca

SEQ ID NO: 20974 - DNA, 120 bp, Homo sapiens
tggcgtgtgagtagggcagttccaccatctagagacaagagatggtattgcagtgatctcctgtgcctctgggtggggtgggaggagcttcaggccaaaagaagtgactgtgtgcaaggt

SEQ ID NO: 20975 - DNA, 120 bp, Homo sapiens
aggcgtcatagagtcctaatcaaagccagcatccccattgttttacagatggggaggctgaggcctagggaaggaaggtgccccaaggtcaagggatggagcggtagctgagtccagact

SEQ ID NO: 20976 - DNA, 120 bp, Homo sapiens
ggccgaggatcgttccgatggctatatgccttttgccactccatcctgtacataagtggggctggaaccaagaggctgagaacttgtcatcaatttgggatatgctcgggatggtgcccc

SEQ ID NO: 20977 - DNA, 120 bp, Homo sapiens
agccgaggcaaagcacaggaagaggctgtgtacccgcttgcccagcaggcactcattaaggcaggccttgggaactgctctgggcacaggaagcagctgctgcaggcaccttatcgggcc

SEQ ID NO: 20978 - DNA, 120 bp, Homo sapiens
aggcggttctattcccaggcttccctccctggatctcaagggctggcttacctgctggtactgccacctgctaagtggcctgctctggcacagggaggagggcacttttggcagcatcag

SEQ ID NO: 20979 - DNA, 120 bp, Homo sapiens
attcgctgggaaaggcaaaacaacccttgtgcggtggtggcatttgggctgcacctataaggtaggcagtgttccccaggtgggaaggcaggtcaggcagagatactggcttggtggcag

SEQ ID NO: 20980 - DNA, 120 bp, Homo sapiens
tggcgtctgagcagatgagtgacagtatccaggctgggcttcagatcaagtctcttcagtacctaggagatggggaggaagagccagaggccacagtcaaattctgcacaaagataatgc

SEQ ID NO: 20981 - DNA, 120 bp, Homo sapiens
aggcgatcctcccaccataccacggcttggcttccccggctccccttagggagctacccttgggtattgaggtgttgggagccaggcctctcccctttgttggcctaggcactggaacct

SEQ ID NO: 20982 - DNA, 120 bp, Homo sapiens
gggcggcgtgggagccaccactctcaaaataccagctcggatattgtagcttggcagccctgcaggaccctgggggctgaagcttgtctggatggtgctgtggggttgggctgtcaccag

SEQ ID NO: 20983 - DNA, 120 bp, Homo sapiens
gtacgagcagccttcctgctgctggataatcatcagcaaccagtttgtcagcttgtgagcaggacagggctcaaggtccttgactacacagacaagctgctaagaatgctggatcttgga

SEQ ID NO: 20984 - DNA, 120 bp, Homo sapiens
ctgcgatggtagagccatcatctggaaggctgtggctctcctcccagatttgcaagggagagcaatgggatcagggctgactcacccagtgctctagctgagctctccttggggtactca

SEQ ID NO: 20985 - DNA, 120 bp, Homo sapiens
caacggcccaggcccaagaaggccagagcagggctgaaccagggttgtatcttggccctctgggcctagagaaaggtaaggctgggtatggatgcaggattaggggcctcccagtccatc

SEQ ID NO: 20986 - DNA, 120 bp, Homo sapiens
caccgaggaagccagggcctgcgtcgtgccagggagatgaatagaggtgtaaattgtgtggtgagctgccggctctgaggtgaaaatgaaaagtcttcaggcagtggcggcagcaggcgc

SEQ ID NO: 20987 - DNA, 120 bp, Homo sapiens
gcacgttctcatgtcctggcaatgcttccacacactgctggctgtctgggctgtggaaggggatgtgccagggctaggaggaccccaggcccacccaggctcttcaccagtgggaccagc

SEQ ID NO: 20988 - DNA, 120 bp, Homo sapiens
cctcgccttcctccaatgattttccaatatttactggctcattgacatattgcccgggccatggctcctactgtgcagcaaggacctgagagccagcccatggtcaccctgtcttccctc

SEQ ID NO: 20989 - DNA, 120 bp, Homo sapiens
ctccgaggttgcacctggctgggagggaaagggcttgtcctctctgcctgatcactcagggacagagcatatagcttgtcctgcccctcaccttccatccccagcccccactagagtcat

SEQ ID NO: 20990 - DNA, 120 bp, Homo sapiens
tgtcgcagggccacagttttctctccatcctctgtctcccttgatcctctgttctccctgatggctttgagatgaaggcgacggcaaggatggaggatgcagtttccatggcaacggggc

SEQ ID NO: 20991 - DNA, 120 bp, Homo sapiens
agccgggctctccggaggaagcagatgcgcagaacagccgcagagctgcctcccgcctgccaacgagggggctggcagaacaggtggcacagggtggcagcctggtgctgcccagcctag

SEQ ID NO: 20992 - DNA, 120 bp, Homo sapiens
catcgccttgtctaaagtgtgtctctcttaaaagttcctctgccattctcttttaggggtacctatgactgtatttagctcccatacaggtaatccaggataaacccttcctcacaagac

SEQ ID NO: 20993 - DNA, 120 bp, Homo sapiens
tgacggcagatctggtgaaacttttctctaaaagaggccctagtgctcaggctgactgggatgccaacagaggtaggagggctatttcaacccctttcaccagggagtgtagaaactggg

SEQ ID NO: 20994 - DNA, 120 bp, Homo sapiens
caacgccaggctggtgctcagtatctgtcaaaagagagtcatttccagcagaaactggaaggtgcggcccattcctcaggtcatcgcgcgcgcgcccctttcagccccaggcctgatctc

SEQ ID NO: 20995 - DNA, 120 bp, Homo sapiens
gggcgcacctggcccacctagcccaggagtgagccgggatgtgagcctatcgtccgcaagggggcagagtgggaccgcggatgaagtctggtgctgcaggtgggctgtagacaggcaccc

SEQ ID NO: 20996 - DNA, 120 bp, Homo sapiens
acccgctcccctccggcgggacactcttgcagcctcccaggcctttcacagctgcgcttctcagcacgccccaccacccccacctccagattcagtgcctgtctattttgaacaggttct

SEQ ID NO: 20997 - DNA, 120 bp, Homo sapiens
gggcgatgcctcttgtgggttaaaggaacaggctttggcatcagacagacttggttttcgattctgactgccactcaccagcagagcatcttcacctcttggagcctgcctgccacagtg

SEQ ID NO: 20998 - DNA, 120 bp, Homo sapiens
aggcgagtagcaccagggctgaggaggcaggaagcctcccagagcctcgctgtgcatttgggaggcccgcgggtttgattgtgagaccgcacagcagcctttggagggggtatggttttt

SEQ ID NO: 20999 - DNA, 120 bp, Homo sapiens
gcacggggtggtttgtacccaatgaggccatggagggggccttgtgacagtgactgccatgtgacgagagaagcccgtggcctttatggccaacggatgcccagagtgagggcatcctct

SEQ ID NO: 21000 - DNA, 120 bp, Homo sapiens
aaccgacctgctaggaaggatgggagggaagggatagggtaggtgggtgacatgagggtgttggacagggctggatggaagcccgaagtatctctccccactcctgttcccagccacaaa

SEQ ID NO: 21001 - DNA, 120 bp, Homo sapiens
ctacggagattcccttttaacaaagagcatctgaaaaggaagaatgaagctgagggttgggagggacacccctctcctttccctccccagcaggctccaatggccccagcaatgtcgttg

SEQ ID NO: 21002 - DNA, 120 bp, Homo sapiens
tcccgcacacagcccaagtcctgggcgccagcagagaaaggggcctgctgctgggggctggagtcaggagctttgcctttattgtggctggttctcaccacaccctcagagtgtcctcgc

SEQ ID NO: 21003 - DNA, 120 bp, Homo sapiens
ccacgttgcagaggaggaaacaggctcagaaaagtaaagcgacttgcccgtgatcacccagctttttctccccatcaaagccgctccttgaaactctcctgggcgtggacactgcctgag

SEQ ID NO: 21004 - DNA, 120 bp, Homo sapiens
ggacgcctaccggaaggagtgaccctctggtggacagtgctgaggtgtccatggaaggtggggacaggtgctaggagactcgggcccacctcatccagcaggcgtccccctgcaatattg

SEQ ID NO: 21005 - DNA, 120 bp, Homo sapiens
catcggccccatacccactcattagttcttcaaattctcaggcaccccctcagcaggcagccactggcgagggctggggagcacggtccagacctgcctggatgccaggcagctgggtga

SEQ ID NO: 21006 - DNA, 120 bp, Homo sapiens
ttccgagcacctaccagggcctggcctgtggacattgctcagtcactggctcacccaggcactcctcagccctggttaatcccccagccacctgcctactcctgtgcccacctgcggctt

SEQ ID NO: 21007 - DNA, 120 bp, Homo sapiens
tcccgcccagagtggggataagagaaggggatggctctgcggtggccctcctccccgtgggcagggctgctggggacagggtcagatgaggttgggctgacaagcagctgctgagcggtg

SEQ ID NO: 21008 - DNA, 120 bp, Homo sapiens
caacgcggcaccagtgcctaggagccagcgggtgagaggcccacggtcctggctctgcctgtctcagcgcctgctgcctgcctggcacagggcccttgcagcactggttttaatcgatca

SEQ ID NO: 21009 - DNA, 120 bp, Homo sapiens
ttccgcaagcagctcctggaggtgcgggggtggcttccccttgactccaatctcctggaggatgcagcttggctaaaaataacttgaattactgagctcccaccctggcgcagaggaggg

SEQ ID NO: 21010 - DNA, 120 bp, Homo sapiens
ctgcgggggcggcgcctggagggaatgttgccgcagccaggagggggttccctgacaggaagtggagaagagtgagtgtcggcaggtgggaaggagtgcagcttgttgaagggaggctgg

SEQ ID NO: 21011 - DNA, 120 bp, Homo sapiens
tctcgcccattcctccaggctcaggcctgctccctggggacagtgcttcttgagaaaacctggggaagggctggccctgacccctgcacttgcatcactgagggtaagtggcctggctgc

SEQ ID NO: 21012 - DNA, 120 bp, Homo sapiens
cagcgggggtgctcctcccagcacagacaccggatttggaggagactccccctgtagatgctctgggcaggagcctcctccctgccctcccacagggcaccagaatgcaagccgtgttgg

SEQ ID NO: 21013 - DNA, 120 bp, Homo sapiens
aaccgccttggtgcctgcagagggggcaagtcccgtgaccacccttcagagcagagtgggtgttatgcccaggttgggcaggcaggacctgggtctctcgaggtgcagcagggcaggtca

SEQ ID NO: 21014 - DNA, 120 bp, Homo sapiens
tggcggaagggggacaggatggcagtcccttgcatgtgcacggaggcagtggggacatactggtgttggaccaatctgtcctgcagcagggaacaggctgggagctcccagcccccgcca

SEQ ID NO: 21015 - DNA, 120 bp, Homo sapiens
ctacgacttcagcttccctgcccttcactgagcacctctggcgctgagatgctctgtgaggacagcactgaggttatcccccatcacacgtgaggagaccgaggctcagaaagggggact

SEQ ID NO: 21016 - DNA, 120 bp, Homo sapiens
tgacgggaggccccacatcccacatcagcctccctctagactccagtgtgtccaccccactccctcctggggtagggcccatctagctgcttccagccagttgcctggtgcatggtcggt

SEQ ID NO: 21017 - DNA, 120 bp, Homo sapiens
acacgccctgttccttctgcctgggacagtgtacacctcacctgacggagcctaaaggtcactgcctctgggaagccttccaggaccactttagtcaggccaggccctgcacgcttgtct

SEQ ID NO: 21018 - DNA, 120 bp, Homo sapiens
attcggagaccatggtggagccctccccctccctgggtgctctgggacatgtagtgaaagagcccggagtccccacgctcctgtccgaggcaagagctcgttttgtcttggtcaattctc

SEQ ID NO: 21019 - DNA, 120 bp, Homo sapiens
tctcgccattttcagcccaggaaatcaggggaggtctgcatcctaggatgttgagccttttgggcttctgtggctcttctgttttaagaattttgtgacctaattccatgctgacaaatt

SEQ ID NO: 21020 - DNA, 120 bp, Homo sapiens
ttccggcttctgtaattgtcagctaacgctacttttggtcctgctgctggcctagaatctaagttaagggtttccaaaatgtgtcccccaggagttcttgggtagaggcggaagtgaggg

SEQ ID NO: 21021 - DNA, 120 bp, Homo sapiens
atccgtctctatggttgtgttttgtcttcataaaaccccaaaaggaagataacatcacagtcccatttcccagatgaggatgctgaggctattccaggctaaggctgagcagcttgcctc

SEQ ID NO: 21022 - DNA, 120 bp, Homo sapiens
agccgggacttggatccagtttccactctgagccaccgggaatatgggttccttagaaaaaaaactagctgcagggttggggatgtgtgtgtcacatttatctaaacttgtttcctccaa

SEQ ID NO: 21023 - DNA, 120 bp, Homo sapiens
agtcggggtgtggacgctggcctctctgtcccagggaagcgtggttctagtgccaggtcacccaaggacccctgcatcccgccacgcagtgtggtgtctgtgtgtttgagggcccgtctg

SEQ ID NO: 21024 - DNA, 120 bp, Homo sapiens
tcacggtccaaaccaataagatccagcccagaaatagcatatgtttccagcctctgctcctccaagtcatacatcgcctggtgtgatgtgtccctgtgtcagcctgcttcaagactcagg

SEQ ID NO: 21025 - DNA, 120 bp, Homo sapiens
gggcgggggtggctgaggagggagtgtgaggagcacgcagggccacctccaggttgagatttagaggtgaagagccgggtgagcccaggacacagcctcagaaggcaagtggggaccagt

SEQ ID NO: 21026 - DNA, 120 bp, Homo sapiens
tcccgaaggcctccagccccggctgcctgcctgctcccagggtgtgcttcccctgaaaacttggctgctcatctctgaaatgtgggtgatcacagcacccaccttcacgtcgatcacgct

SEQ ID NO: 21027 - DNA, 120 bp, Homo sapiens
tgccgatttctaccctcaaggctgtagcctcgagggaccaggggtagctgagatattaagtgcggatgagtgtttgaggcgggtgtgtgagacacctagcgtgggttcgtgccccttccc

SEQ ID NO: 21028 - DNA, 120 bp, Homo sapiens
ccacggcatgggggcctcagggacggggctgagccaaggctgtaggtccccagtcacagcccagggccccatcacttcccaggctacctccaagaggtagccctgcggcctgttcaggcc

SEQ ID NO: 21029 - DNA, 120 bp, Homo sapiens
attcggccagctgggttttcccgcctcttctccattctgggcccagcgtggagagacatttggggaccagcccacatggcggccagtggaggagccagggtggagtaagcaagcaggaat

SEQ ID NO: 21030 - DNA, 120 bp, Homo sapiens
cagcgggcagcggaaaagggtgcgagggggaagccttatcacaggcttctctgttctcacctcccacggggcctggtcacaaaccggcctcaggcaccaacccacaactggggcaagagg

SEQ ID NO: 21031 - DNA, 120 bp, Homo sapiens
ggacgacagggggattgctctgctgcccagcatgggaggcctccagggtttggctgtcaaagtcccggtcacctcctccagctgagctattaatacccagctacgacccacgcacccttg

SEQ ID NO: 21032 - DNA, 120 bp, Homo sapiens
ggacgccgagttcctcagggagctaaaaatggtttcccatgggggcaggcaagccctcctccctctcttcttgtcagaggagctaaggccaaaggccaggctggcttggaaggggacggg

SEQ ID NO: 21033 - DNA, 120 bp, Homo sapiens
aagcgggtggctgaggattccagttgggagcaggaaggcactcatccagtccaatccccattgctcagaaacccgagagggagggggcttgccagtggcccgttccaggaggggaccaca

SEQ ID NO: 21034 - DNA, 120 bp, Homo sapiens
atccggactttctcctttccctcaggtcttcgtttgggcctccccaggctgcagtggggctggagactgaggactgcctgtcacctcctgccaggaggggcctagaggaaaaaagggggc

SEQ ID NO: 21035 - DNA, 120 bp, Homo sapiens
agacgtttggagcctctggtaggagctgggctgcctaaagcatggccacttatgtttctgtttcatgtgcaaaatcttgtttatccacagcattgtctgagaagggaattactggcagca

SEQ ID NO: 21036 - DNA, 120 bp, Homo sapiens
agccgggggcccacgaaaaaggtgtttccatcccaatgtcctggtcatcacagtgtccgggcccactgaggggcatggaccaagaatgaggaggctgcacgggtgcccttctgcattgac

SEQ ID NO: 21037 - DNA, 120 bp, Homo sapiens
ccccgtgctggaaatcccgacagctgcctggctaatagatcctgggtaccaagccctgaccccgggcagccagcggccgtgtcaggggtccagagaagttgggggaggtgatggctggag

SEQ ID NO: 21038 - DNA, 120 bp, Homo sapiens
tagcgaggccgtcaacaccttctgggttgccaaggcagagtggggtaggggtctgggagaggggtcctgccctggcctggagagagacagtctctggcctggcctggaggtaagggtaga

SEQ ID NO: 21039 - DNA, 120 bp, Homo sapiens
gaccgggttccaaaggagcctctcccgggatgggcccagggtggctgccacctcctacctgctcccttgccccccatgccttcggttctcctaatgtcctaacatccacatgctctcctg

SEQ ID NO: 21040 - DNA, 120 bp, Homo sapiens
caacgcccaaagcaggcctggagcacccctgcctgcccctgctcttaggaaccctccccagcaaggcctggcctgaggccgtgggcctccaccttccttttcctgttcttttctcggtgc

SEQ ID NO: 21041 - DNA, 120 bp, Homo sapiens
acccggctgtgtctctggttcagtctccattctgcctctctgcctctgcagttggactggtgactccctgtcccctctctagctctgcttggctctctcttgtcctgtctctgattatct

SEQ ID NO: 21042 - DNA, 120 bp, Homo sapiens
ccacgcactgggccccatgaagagcttaggggacttgtagtctcagctctggcccagtgccaggggagctcctgtgattcccaggaggcaagcgagggagagacgagacagagggccgcg

SEQ ID NO: 21043 - DNA, 120 bp, Homo sapiens
caacgcccccactatggctgtgtgaccctggatgagtttctgagcctcagtttcctcttcgacagagtggaaccaattccaaggccagcttcagcaggcatcagaaggttaaatgtcaat

SEQ ID NO: 21044 - DNA, 120 bp, Homo sapiens
tggcgctcagtagagtccccgttaccatcactgtggcggttattcttcaggatccccagagccatggccagtcggatgggggctgggtggagcctctgctgcttgtccccatgtgcaccc

SEQ ID NO: 21045 - DNA, 120 bp, Homo sapiens
ctgcgtcccacgcccgtccttcctctgctgggcagtagacgcccccacaacctgggacctgcctgtcttcggagccagtctgaattgtacacagtgatgctcacccaattaattttcact

SEQ ID NO: 21046 - DNA, 120 bp, Homo sapiens
acacgcaggagctataattagttgggaagaggaaagaagagcggagtgtgtgaatcaccagccccagtgacagactgttggagccgagcagaagtttcaagagaagccactgggttgtgg

SEQ ID NO: 21047 - DNA, 120 bp, Homo sapiens
tgtcgtggggatggcgcgctgccgcaggcaggctggggtcctggaacaccaggtccagggatgggcaccttcacccctcaccctgaagagtcttttgccccgcctctccccagaccctgt

SEQ ID NO: 21048 - DNA, 120 bp, Homo sapiens
acccgacaccctatcccagcgttcagcttccctgcagctcctgtctgccctgactgaccccaggacctctcccctccccagtccttgctgacacaagcctgagcagagagactagcactc

SEQ ID NO: 21049 - DNA, 120 bp, Homo sapiens
gtccgtcatcactagctctgctgagccaggccctggccagggctctgaccaccaaggtgaccacaactggaacccactctcacagagcccctatcccaatggggaagcaaccaggtacct

SEQ ID NO: 21050 - DNA, 120 bp, Homo sapiens
cagcggccatcatgctgggaaggaccttaaatgactcagtgtgcctaagctcggggagtggcaggaattggggtcagggttgctagagagtgaggcttcttggaccaggtcattacaatg

SEQ ID NO: 21051 - DNA, 120 bp, Homo sapiens
tgccgggagcaccagtcagtcagtggaccggacagtcagtgaccaaggagtgtggccctgggtttctccctccctccttctcccctggctgaggaccggctgcctgactctctaggggcc

SEQ ID NO: 21052 - DNA, 120 bp, Homo sapiens
gagcgtggcatcattcggcacacagagagctcccttctaaccccagaccaaattagccttccaaattataggctgcgtttcctctaaattggagactgggtgggagaacagaggcccggc

SEQ ID NO: 21053 - DNA, 120 bp, Homo sapiens
caacgaacttagagccagcatggttcagataaggccaacccagagttctgaggtcattttccggggggaagtcattcattcaaaaaacactttctgggtacattctctgtgccaggtaca

SEQ ID NO: 21054 - DNA, 120 bp, Homo sapiens
tcccgcctcggcctgaatggagtctggggtcagggtggactccgtgggtagggccctgggcttctgcaggctgcataacactagctgcccatctgatctgtcctgggaatatggccccag

SEQ ID NO: 21055 - DNA, 120 bp, Homo sapiens
gtgcgcgtgaggagaggcacacagtctgtttcctggatgcctggcctgtcagcctgcacatcctgcctggactgaccaggttgaggacacaagccagcgggtagaggcagggccagacaa

SEQ ID NO: 21056 - DNA, 120 bp, Homo sapiens
gttcggcccctgccacgtgtctggccctgtgatggacactaggccctcagaaatgaattagccatgaacccacaccctgccctcctagaccaggagccctgggtctagacaggcatgggg

SEQ ID NO: 21057 - DNA, 120 bp, Homo sapiens
taccgaagccaccttccacccagcagccagagaaggacctctcaaaatcacccctgacctcctgctccttctgcatggcctgtcacggctccccagtgctggacctatgaggccctgtgt

SEQ ID NO: 21058 - DNA, 120 bp, Homo sapiens
actcgactccctccctccactccagctgccccaaatgctctcgggttttcatggtccctctagccatctggcccttgcccaggtttttctctctgcctggaatatgttctctgtcctttt

SEQ ID NO: 21059 - DNA, 120 bp, Homo sapiens
attcgattggtgtctgcacccactacaaaaagcaggctgtgttctcttggtcactgctctatcccatcacctcaccccctggatgagccctggagcagatgcttaatcaatatatgttca

SEQ ID NO: 21060 - DNA, 120 bp, Homo sapiens
ggccgccaggctgctctagggacccccttggccagtccccacttggctgcctcagccactgcccaaatgccagctggctctttccacccaggggttctgccaggccccttgtctctggtg

SEQ ID NO: 21061 - DNA, 120 bp, Homo sapiens
caacgaatactactataggatatgtcatgtgggacttcagcccagggcaatcacaggccatgacaacttcatctctctgagcccactttctcctccttcgcccagtgcgaaagacaacca

SEQ ID NO: 21062 - DNA, 120 bp, Homo sapiens
ctgcggacctggctgcctggcctgccaaaggcccccagctgctggagctgcatgtgcttcatgggccagggccagtcttgcagacatagctcccagacaggctgggaaaagctgccctcc

SEQ ID NO: 21063 - DNA, 120 bp, Homo sapiens
ttgcgcgggttggaccatgctggccatgacgcctttggcatcatttcacttccctctttagggttggctgagtgccttactgtatgccaggcccctgctggccaatggatgagcccatgt

SEQ ID NO: 21064 - DNA, 120 bp, Homo sapiens
ctccggtactgtgcagcccataggcatcaggagggtcagattaacctcacccgtgtgctttcccaagaggttttgcccccttccctggggctccatgaagtcctgggccttggtccagtg

SEQ ID NO: 21065 - DNA, 120 bp, Homo sapiens
cagcgtccggcacagacattagctgccatggagggtgctccgcctggtggctggccccttctaaatgggccaatcagggctgtgagggctctgaaccctctgtcactggacagagcctgg

SEQ ID NO: 21066 - DNA, 120 bp, Homo sapiens
agccggggagggggtctgcagctcgtaaaagtggcagcggaaacagcccctggctggcccggggcagcattcctggaagtttccactggctgctgtgaaactcatagggccaaaatcatt

SEQ ID NO: 21067 - DNA, 120 bp, Homo sapiens
ttccgatggccccaaactcaaggccgcagcagaggagcctgtttttcctcttctgcctttttttttttcttgaaacttttcacaggaacccaatttgcaaacgtggagatagtgggccca

SEQ ID NO: 21068 - DNA, 120 bp, Homo sapiens
aaacgtgggtgaggtgctgggccaacgtcaatacaagggactccacttagttccatagggggcccatacttcagctcagtaggaatgtgaccactaaatgtgtctaaattatttgaaaag

SEQ ID NO: 21069 - DNA, 120 bp, Homo sapiens
aggcgtgtgctctctccagaggggataggggaggggtgggtctcaggacaggatcagagcagggcccttggaccctgagggagaggcgtgcgatctctcagtggggcggggagctcgcag

SEQ ID NO: 21070 - DNA, 120 bp, Homo sapiens
tgacgcccacgctcctgacctcaggcctagcagctcctgagaattcccatagggggctcaaggaacaaaaagccctccaaagaaaatcttcagttccattgttaggaaatacatgttccc

SEQ ID NO: 21071 - DNA, 120 bp, Homo sapiens
tcccggggttggggaatgacttctttctcccctctcttatcctcctgcctagccagacactagagtctcactggcaactcaaaagcatttctgggacttgagtccagcggtatggggact

SEQ ID NO: 21072 - DNA, 120 bp, Homo sapiens
catcgactcactgctgtgcttcacagaacagctggcaccagtctagcacactcagttaaccaagagccgcacagcagagctcagaggacccaatgaggcatctctccccattttacaagg

SEQ ID NO: 21073 - DNA, 120 bp, Homo sapiens
tagcgaagaaaccagtgatgccccaaacagcaagctcagtgtttactggggcaaggaggggtcatccccacacaggggcaggccagggcaaggatgtgtctgctctttggctggtgacct

SEQ ID NO: 21074 - DNA, 120 bp, Homo sapiens
actcggcctgctgggctctctgatcacagagccctgggcaagagcttctggccttacctttcagggaggtcaagtttggtttgcagaatttcttgatgaagccatccctaactgcaccaa

SEQ ID NO: 21075 - DNA, 120 bp, Homo sapiens
acacgtctctctaatgtgcattcacttttcttatgttcaggccatgggtagtgatgtgcccactctggcttcccagatgttgaaggtctgcgtgaccatctgaaggggaatgccaggcac

SEQ ID NO: 21076 - DNA, 120 bp, Homo sapiens
acacgccaggccgcactccaagggctggagagcagtccagggcgggggagatgggggatgcatgatctcctagcaaaggagggttcttccccacatacctaaaatccatcccagaaaggt

SEQ ID NO: 21077 - DNA, 120 bp, Homo sapiens
ctacgacaccatgaccacagccaccaccatctcttcctcccagtcgaacttttactgtggccagtacctggtattcccaagcaaaatcagataaaagaggttctctcctagaagacagca

SEQ ID NO: 21078 - DNA, 120 bp, Homo sapiens
gagcggcaagagccccaactgcccatgagatgggctctggcagcacatctacagctgactcatcaatgagaggaacattgggaggcgccttccacttaatgccagaaaagaccagccaag

SEQ ID NO: 21079 - DNA, 120 bp, Homo sapiens
cctcgaggccatggaggaaggcagcttttgtctcccagagagacaggcaggttgagaggtgccattcagcctcagacacactggacagcagggagtatgcccacccatgcttccagagtc

SEQ ID NO: 21080 - DNA, 120 bp, Homo sapiens
cttcggctcttcctctcagaggtgctcataacacctctgacgaaaaaagcaagtacaacactggtgaacaccgagcactcaggcgctcagagcacagcacctgcatttacccactgaatc

SEQ ID NO: 21081 - DNA, 120 bp, Homo sapiens
gtgcggtgaccctttgccttagtccacttctgttgctataatggaatatctgagactaagtaattcataatgagcagaaatgtattggctcacagttccagaggctgggaagtccaagat

SEQ ID NO: 21082 - DNA, 120 bp, Homo sapiens
tcacgggctgtgtggcccctgctcatgcagggcctgactgcaggatgagggcagggcatccatcactcagataccctttcaggtggacagtcaccaaggggttaacagaggggtgtgagg

SEQ ID NO: 21083 - DNA, 120 bp, Homo sapiens
cgcacctggcctactttgaattttttaataatgaatatatggcattgctacactaatacgaacaccaaacaacaaaactactttcattgtgaggaaaaacaaagaggaaacagagaaaag

SEQ ID NO: 21084 - DNA, 120 bp, Homo sapiens
gagcgcaggcactgggagccctgcagataagaagtgctagcgctcctttacgagaccaaaccccaggaagttccagggatgaagcgagtgataagctgtgtggatctgcagtcctcccta

SEQ ID NO: 21085 - DNA, 120 bp, Homo sapiens
ccacgcagcccctgctccaggtaccttccacgaaggctcctgttcttctgcctagcagcccagggcactcagaggacagcacagagaacacctgggctctgctgtgggccaaagccaaca

SEQ ID NO: 21086 - DNA, 120 bp, Homo sapiens
cttcggcccctgctaactttccaggctctctcctccctgccctagtgctcctcaaacaccatgatctagacagaaaaggtcctctctttctctatattctttctgctgtcacctgcattg

SEQ ID NO: 21087 - DNA, 120 bp, Homo sapiens
cctcgtcgccttccactcccatctctccctgtccaagtcctccctcctctgcacctgcccacgttccccaggcagctgggcagatgtgccccatccccaagccccagcccttcactcagg

SEQ ID NO: 21088 - DNA, 120 bp, Homo sapiens
aggcgaagggattaaggtaatgaaggaaagctgctctataggagataagctttggagcacagtgaggggtgcagatggacaggagagaagagaaagggtggttcgggtgcagggcacaga

SEQ ID NO: 21089 - DNA, 120 bp, Homo sapiens
atccgcctcaaagggtcaggaggcacatgtcccctcctaggactgagatgagccaaaagagaccccccacagatggggctattgcactaggcccacctgttgtgggagtgaccccacctg

SEQ ID NO: 21090 - DNA, 120 bp, Homo sapiens
ggccgagccctgctcctccatccaatcgcaggggctactctggcaaagctcacactggtggagacaggaagtccccctgcataagcatccagcttggacctgtcctcccacattgcaggc

SEQ ID NO: 21091 - DNA, 120 bp, Homo sapiens
tggcgctgccatgcgattcctggagacagtgattcaatggacccatgggtccctgggaccagtttccaagcagtgtgagaacacatagctggccagtagccacactcaccccatccactc

SEQ ID NO: 21092 - DNA, 120 bp, Homo sapiens
taacgggattccaaagacagggttaggacaaggccagcgccagagacctcagaacccttttgctctgccaaccccgaaattccatctcacatggtggctcctgggccccatcatggtaaa

SEQ ID NO: 21093 - DNA, 120 bp, Homo sapiens
gtgcggctggcccccatctaccactgtatagaagggcactgacaccccaaggagcagcagcagcacaggttggagctgtcctatgtccacctggggtctctttgagaaggatgcaagatt

SEQ ID NO: 21094 - DNA, 120 bp, Homo sapiens
ctgcgttctctccctgagtccactcgcccgcctgccaccctccaccgtcgcaccctgcaaacccacccctctcctgtgctagaacttgctaacaccagtaccatgccctaccaatatcca

SEQ ID NO: 21095 - DNA, 120 bp, Homo sapiens
gggcgtcccttcccccaagttatcaaatccaagggcaatgttgtgagcatcaaggtagacaagggggtggtacccctggaaagggcaaatggtgagaccaccacccaagggctggatggg

SEQ ID NO: 21096 - DNA, 120 bp, Homo sapiens
gagcgctgtgccccatacaagaaggatggagcccactttgccaagtggcatcatgtgctgaagattgggaaacacaccccctcagccctcaccatcattgaaaatgccaacatcagctgg

SEQ ID NO: 21097 - DNA, 120 bp, Homo sapiens
tctcgagctctcagaccaaagccctcatcctggactggtcccactgccactctgaacccaggtgcctcctctgaaggtggagactcacctcacctgccttgcagccagctgggtgctcag

SEQ ID NO: 21098 - DNA, 120 bp, Homo sapiens
gcggcggccgtcagggctcaggatcaccagcaccacgacgtccttgcggtcctccagcaggcgctgctgggccagcaggaagctggcgcgcaagagaccactgacccggtccgtgtgggc

SEQ ID NO: 21099 - DNA, 120 bp, Homo sapiens
cagcgtcttgcggctgccatagaccgaggcccacaggttctcaaagagggttttgccaggcagccagtcgcgttcctccaggcacaggcggagtgcccagcgcccacggcactcctccag

SEQ ID NO: 21100 - DNA, 120 bp, Homo sapiens
ccccgaagctcgttgtacacccagtctgccactgcgctctgcgttttgtcgaagaccacgaaggcatcgtagggcagggcatcctcatctcgcccactttgccgcccccgccagggaagc

SEQ ID NO: 21101 - DNA, 120 bp, Homo sapiens
cagcgagagggcgaaacagtcccaggagagggcctcatccaggcagaggcgcaggtcctgtgcaaagatgctgaggccctggagctggcccggactgccacacttcacccggctgggcag

SEQ ID NO: 21102 - DNA, 120 bp, Homo sapiens
gaccgggcacggcagcctgcacctccagcaggaagtccataaaggccgccccacaggcgcagtgcagagggttggcgcttacatctagtatttgcagggcactcgccaggggcccaaacc

SEQ ID NO: 21103 - DNA, 120 bp, Homo sapiens
gggcgttggcgctaaggttgagctctcgcagctccttggccttggaaaagaagccgggggccacgaagctgatgctgttgcagctgacatccagcctccggagccgggtgccagcaggca

SEQ ID NO: 21104 - DNA, 120 bp, Homo sapiens
ggtcgaggacttccagtttgggcaggaagtggaggctccaccacttaaagaaggccaggtaattgtcacggagacgcagcacctgtaggctcttggggaggttgcgcagggtttggggca

SEQ ID NO: 21105 - DNA, 120 bp, Homo sapiens
aggcggttctgggacaagtccagccagatcaaaccgctcaggccttggaagaagtgcagatagaggtctccctcggcccacatatggcccagtgcattgccgctgaagtccagggcccgc

SEQ ID NO: 21106 - DNA, 120 bp, Homo sapiens
cagcgacgtactgcagagctgctgggacacttggctgtggatgttgttgtgggccaggctgaggtggcgcagggtgcgcaggtgagccacgaagctgaagttgtggcccacgccctgcat

SEQ ID NO: 21107 - DNA, 120 bp, Homo sapiens
tgccgcacaggacgacaggtgtttctggtacccagcaaaagagaggtcatcctgcaggggtgggggtgaatgcagagccataaatgggcacctggggattggctagaggaggcccacgga

SEQ ID NO: 21108 - DNA, 120 bp, Homo sapiens
gcacgccagcttgcagcccttggactcccccagcgcccccatcttcctcccgaagctggcactagcttgctctctgaccctgcacagtgacccctctctgtgggcccaggattgtgtccc

SEQ ID NO: 21109 - DNA, 120 bp, Homo sapiens
tcccggtaagtcctggcttaggattaccttcacagtcccgaagagctcatccttgatgtggccacctccaaactcctttttcactgtggcccgcgtggccgcgtacagcatcttcagccg

SEQ ID NO: 21110 - DNA, 120 bp, Homo sapiens
aaccgtaagaggcctctgggcagggctgcctctcccggaacagacaggtgcctctggaggaactcggtgggctcactgcgctggcacacctggcagagggccagcccggggccaggacgc

SEQ ID NO: 21111 - DNA, 120 bp, Homo sapiens
cctcgtccagcctgatcacagcctccggagccaggctgatgcctggagagcaagaggtacccaggctgcgggcacagggacttgaccctctctcagactccctagggcacggcctgacag

SEQ ID NO: 21112 - DNA, 120 bp, Homo sapiens
tcacgggggagttatcaggcgaccaggcgaggaagagccattcgaagccctgagcattctgtgagtcgaggcggtagagcaggtagcagggctgctgggcgtccagcagtggcagcacgg

SEQ ID NO: 21113 - DNA, 120 bp, Homo sapiens
cagcggcctactggctcctgcgaggcacccagcacgagctgctctgggggcagaggccggatgagcagccgctcccagctcccactgcgcctcccgctgcagacctccagcctcgccgtg

SEQ ID NO: 21114 - DNA, 120 bp, Homo sapiens
agccgccggctgcccctcaccttccctggagcccccaggtcccagaagtgtgaggctgtgtggctgaatgagtgagcaagggaaggcacaaagctgccacctgggggctgcccccctgca

SEQ ID NO: 21115 - DNA, 120 bp, Homo sapiens
cagcgcgtgcacacacccccccacacacacacacgtgcgcagatcaccaacacaaacagccacacaaagacacgcagccgtcagcccctcacggacaccacacccctgggtgctcccttg

SEQ ID NO: 21116 - DNA, 120 bp, Homo sapiens
caccgcacagctgctcagcccacagtccccacgaaactgcctcctgctcgcctcctcccctggggctccagcagaagaaccgcagcagactcccctcaggacaaatgtgctgaggggcag

SEQ ID NO: 21117 - DNA, 120 bp, Homo sapiens
ccccgatgcctggacgccccaacagaccaggccctctgaggcctcggcctcctcacctgcccacccagaactcagacaggatcacagtcacagtgactttgagtagtcacggcctgtgtt

SEQ ID NO: 21118 - DNA, 120 bp, Homo sapiens
catcgggggcctggaccctcctgggcagtcccaggtaccccaacaactgtcatgcagaactgagataaaagtcaatccagagattcctcctgcttaaaatcttcagggacggctgggcac

SEQ ID NO: 21119 - DNA, 120 bp, Homo sapiens
caccgtcctcaatcacaaccttgatgagccgcacagagccagcccgtgccttggcaaagaattccttcagctcttccgtggctataagaacaagaaacatggtgggggatgagtgggcag

SEQ ID NO: 21120 - DNA, 120 bp, Homo sapiens
agacgagtatggggcctgctctgtcccacagggtctggtggctgagctgggaaccaggttaaatacagccccccatgtgactgggaacctgagacagccactgaacacaagctcccaaat

SEQ ID NO: 21121 - DNA, 120 bp, Homo sapiens
aggcgagtggcctgctggctgggataggtctggtgatggggcggggtgggcagggatgggacaacccaccagaagatgggcaggctctggcataagccaggccagccacagtgaatagcc

SEQ ID NO: 21122 - DNA, 120 bp, Homo sapiens
ctccgcctcagaaaaaaaaaaaaaaaagagactccatcttggtcattgggctgtagagctggaaggtgagagccagtgagtgaccaaggaccccagggcagaggtgaggaccatggtgag

SEQ ID NO: 21123 - DNA, 120 bp, Homo sapiens
gaacgtaccaaagctcaagtgctcaggaagtatctattgaattacaaggcaaaccaccttcatgacctcagctttacttgacccttctctgatttactcctactttataatttaggtgaa

SEQ ID NO: 21124 - DNA, 120 bp, Homo sapiens
tcacggaaaatgtaacagctcaaggcgcaatacaaagacaactggaaatgagacatggattgagatctgaggatacgccaagctttaggacccatccctcaggcaaaattgagagggagg

SEQ ID NO: 21125 - DNA, 120 bp, Homo sapiens
ttccgttctaacttcagttttctcatctaaaaaaggggccgaataccattaccctaccaacaggcagccactaagatgactgaatgtagggttacaccaggacattagcattactaataa

SEQ ID NO: 21126 - DNA, 120 bp, Homo sapiens
catcgttgacaatccactcccaccctcaactctgtattcaaggcatactcaagggggcaagaaaactttattgttaggaaattattttatatctaaataccaaacttgggtcacttggtg

SEQ ID NO: 21127 - DNA, 120 bp, Homo sapiens
ctacgaaatccaagagaggtaagttcatgagcaggaagaaaatacaagtgcatgccttcatgagtaagtcaagagtaactgttggtctccaccaaccagctaacataattcttagcatag

SEQ ID NO: 21128 - DNA, 120 bp, Homo sapiens
tgtcgaggtcaagtcaggcctttgacctgggtctctgaccacttggtcaacgccttctgcatcctcccctgcagcacaggcacaccagtcttgggctgtggtcaggggccctcgctgacg

SEQ ID NO: 21129 - DNA, 120 bp, Homo sapiens
gggcgggcccccaccctcctctattacctccagcccacccaagtgaagcccaggggacaccagtgcccatccccctgaagagatttcagccaattagcacgtacagtatttacttaatta

SEQ ID NO: 21130 - DNA, 120 bp, Homo sapiens
actcgggctccatcacatggcttcaacatgcaattaggagctgtcagcgggaggcgacattgtgagagcgctcattcaattttggttccagcatggaggcctagcagctgcctctgcttg

SEQ ID NO: 21131 - DNA, 120 bp, Homo sapiens
tggcggctgctgtgtgtgtgaggtgactgcaggcagcccatagcctaggagagaagagtaagtggggacagaaaggcagtttcctgggctaatggagtccctgactgagcctactcacat

SEQ ID NO: 21132 - DNA, 120 bp, Homo sapiens
aggcggtggcttggctggagtgtctgcgattagggggctgagcactgcaggctcctctgcccccaagttctctgcctgaaatgccaccattagcaggctgtcttgtctctctttagggct

SEQ ID NO: 21133 - DNA, 120 bp, Homo sapiens
cttcgtggccccaggaggccacagactggcaggactgggatgatccctgttatcctcattggattcatggggaaagtggggcttaggtcaaggaaggtggtagagccagtcatggcagtg

SEQ ID NO: 21134 - DNA, 120 bp, Homo sapiens
tgtcggggaggcctggggaggcagtgaatcgtagacctcacccattcccttctctgacaccccccgcccccgatgcctgcaactcactttcttgtggcatagctcagagctccaggccta

SEQ ID NO: 21135 - DNA, 120 bp, Homo sapiens
ggccgcggcaggaggcagactgggtctttctttctgtctgtctgtctagctcctgagtatactggtaatgcacaggtgcacagagttggggcagggctggaagggagccattgtgaaggg

SEQ ID NO: 21136 - DNA, 120 bp, Homo sapiens
cctcggtgcatcccccccactgccagcttgcatggagggaaacagtttaccggggcagcaagttcacccattatggattccttttgcccccagcaaccctgcagtttcctggacatttgc

SEQ ID NO: 21137 - DNA, 120 bp, Homo sapiens
ctccgaagatccttataactccttataatgcaccagtaaagcaaaccaagcatgtaagcatgttcaggcccatctgggagctgaggaagtcatggaatggaatgctctcctgtggagctg

SEQ ID NO: 21138 - DNA, 120 bp, Homo sapiens
aggcgtcctctgttctttagggtacttcgggaagtgttggtgactgttagacaggtgggccagactcggcattgtcttcagcacctgtcctgggaggcagctggccaccagagactggat

SEQ ID NO: 21139 - DNA, 120 bp, Homo sapiens
tcccgctaggggaggccgggcaggcccgactggctggaggcaggtcggcctttgggctgaatgtctggggcttcctgccagagccccatctttccttctttggccctcaggcgccctgac

SEQ ID NO: 21140 - DNA, 120 bp, Homo sapiens
ttccgggtgccccagagcattcaggaccactgaagatagggaatggctattatttcacaaaacttccatttaatagaaagatgtgctacactgtgtgtgtttgcatttcttggggtcctg

SEQ ID NO: 21141 - DNA, 120 bp, Homo sapiens
gaacgagaggctatggagacagtcctgggaactttgctcagtaggtgagcagccgtgagaaggcatgtggcagttcttcactctgcctctcctcttccccatgtgtggaggttcactggg

SEQ ID NO: 21142 - DNA, 120 bp, Homo sapiens
gagcgggccattgggaaactacatcaatgacaaaccagaaaccaagtctgtttacctgccacagatcattttgtgacaaacatcgcccaacacagaacatccaacatgggcatgtggggg

SEQ ID NO: 21143 - DNA, 120 bp, Homo sapiens
gcccgtgttgtagtcaagccatctaccaccgcaagtgcatacaggtggggctttttccgccctgggtcccttccaccattgccctagttctctgcctggaaccagagaaccctgggaatg

SEQ ID NO: 21144 - DNA, 120 bp, Homo sapiens
ccccgatgggcatgcgacactgttcccaatttaagccttatctttggcttcaggtttctggcacagaaggaccttttgggaccagcaacattcaggagcagctcctgccgttcgacctat

SEQ ID NO: 21145 - DNA, 120 bp, Homo sapiens
gaacgatttcacaatcgtttaaagacataggaaccaaaggcatgctttaatgcaagtttacttccacatgctaaatatgctccagcccttccttaaattctgcaacgactgtgttcccag

SEQ ID NO: 21146 - DNA, 120 bp, Homo sapiens
ttgcgtgagggcccgagtgtggtgctccacacagatgtttttatgcaggaagtccttgttcctgaagcctcagaatttgatgagtgggagcctgaaggcacaaccctagaaggccctgtg

SEQ ID NO: 21147 - DNA, 120 bp, Homo sapiens
tgccgtcatccccacttggcaggcattgaccacgcttgacctgagccacaacagcgtctccgagatcgacgagtctgtggtatgctctcagcagcaggtgccaggggtttctctggcccc

SEQ ID NO: 21148 - DNA, 120 bp, Homo sapiens
gagcgagcattcttttcatgttctatccgctggccgttcttctgcggaatgtctgttcacgtcctttgcagtctgttaatgaggtttccaaccttccctcatttttgtaatctgtaagaa

SEQ ID NO: 21149 - DNA, 120 bp, Homo sapiens
tagcgatataaatccttgtcaaatattgcaaacacttttctcatttcatctggttttaatctatcctggtttttaaaaaatgtgtctgtggaagtttaatttttatgtagtcacatctca

SEQ ID NO: 21150 - DNA, 120 bp, Homo sapiens
gcacgaggggggcaggtggagagggtggcccttgaccctgtgagcaggcttccctggggaaggcatttcaaaagaccctcgtgcaggggcttgtttgggtttcttctctgtttcctggca

SEQ ID NO: 21151 - DNA, 120 bp, Homo sapiens
actcggcgcctttccgcatgtcaccctggtggtctgggaaacagtctcactctggcgcctcctctgtggttgttactgagagttctggggccccttcctttgtcctgaggaaagacagga

SEQ ID NO: 21152 - DNA, 120 bp, Homo sapiens
cttcgcaaatgtgcttggtgcctgggcctccctccagccccatctctgcagcagcacaaggttatggccttgtgacactgggacagtttgcagagtccttgtctgtcctcagtactccac

SEQ ID NO: 21153 - DNA, 120 bp, Homo sapiens
ggtcggaccaaatttgtagactgtctacctggacccttgcgtggcacaaggagcagtcagatgctggatccctggagagtggcgagaggctctggccctaggttgcgagtgggaatccca

SEQ ID NO: 21154 - DNA, 120 bp, Homo sapiens
cagcgtggggatggggagcctcctcagggcggtgatggagggcagaatgcccagctcagggtctggcaaccagtaaatggctggggctggctgcagtaggtggggactgactgtgtttct

SEQ ID NO: 21155 - DNA, 120 bp, Homo sapiens
gaccgtggcgtgtgcatggacggcatgagtggcagtgggcagtgtctgtgccgttcaggttttgctgggacagcctgtgaactctgtgctcctggtgcctttgggccccattgtcaaggt

SEQ ID NO: 21156 - DNA, 120 bp, Homo sapiens
ccacggcccgattcctttggcccttgtgggccaatctttatcttcctgcctgtccctctccccagcctgccgctgcactgtgcatggccgctgtgatgagggccttgggggctctggctc

SEQ ID NO: 21157 - DNA, 120 bp, Homo sapiens
ccacgctgtgaggtgcaactgggtgagtagccccgtgctcgtgcccaccctacacacttgtgtacatgtgcacacatcagtaaaggcaccaagggtgggtggaacgggcagaggccagga

SEQ ID NO: 21158 - DNA, 120 bp, Homo sapiens
acccgaggctgtgtgccgtgcaggcaacagctgtgagtgcagcctgggctatgaaggggatggccgtgtgtgtacaggtaagcagatgggcggggacatggaggtgggaggcccccactc

SEQ ID NO: 21159 - DNA, 120 bp, Homo sapiens
ggacgggcatggtggctgcagtgagcacgccaactgtagccaggtaggaacaatggtcacttgtacctgcctgcccgactacgagggtgatggctggagctgccgggcccgcaacccctg

SEQ ID NO: 21160 - DNA, 120 bp, Homo sapiens
caccgcgggggctgcagcgagcacgccaactgcttgagcaccggcctggtgagcaggtgggggaaccgagtagccagggtggggaggcctggcagaacttccgacctctgaagggtgaag

SEQ ID NO: 21161 - DNA, 120 bp, Homo sapiens
gggcgcccactgctctctccaaccccagaacacacggcgctgtgagtgccacgcaggctacgtaggcgatggactgcagtgtctggaggagtcggaaccacctgtggaccgctgcttggg

SEQ ID NO: 21162 - DNA, 120 bp, Homo sapiens
caccgccctgccactcagatgccatgtgcactgacctgcacttccagggtgtgtccccctgcccactcccagtacccatttcattcctcagagccggccagctgaccatgcacccctcca

SEQ ID NO: 21163 - DNA, 120 bp, Homo sapiens
aaacgggctggcgttttccacctccaggccaccagcggcccttatggtctgaacttttcggaggctgaggcggcatgcgaagcacagggagccgtccttgcttcattccctcagctctct

SEQ ID NO: 21164 - DNA, 120 bp, Homo sapiens
tggcggactgtggcaatggtcgggtgggcatagtcagcctgggtgcccgcaagaacctctcagaacgctgggatgcctactgcttccgtgtgcaaggtgtgtccacccgaccaaacccta

SEQ ID NO: 21165 - DNA, 120 bp, Homo sapiens
tgccgatgccgaaatggcttcgtgggtgacgggatcagcacgtgcaatgggaagctgctggatgtgctggctgccactgccaacttctccaccttctatggggtgtgtgggggccaccct

SEQ ID NO: 21166 - DNA, 120 bp, Homo sapiens
gggcggggggtgctgggatccccgaggagggagcctgctcatagttctgtctttccaccgtgccagatgctattgggctatgccaatgccacccagcggggtctcgacttcctggacttc

SEQ ID NO: 21167 - DNA, 120 bp, Homo sapiens
tcacgtataagacactcttcgtccctgtcaatgaaggctttgtggacaacatggtaacccccaagggtgtgggcagagcagagcctgcattggccatctccatctggcccaggccaacag

SEQ ID NO: 21168 - DNA, 120 bp, Homo sapiens
agacgctgagtggcccagacttggagctgcatgcctccaacgccaccctcctaagtgccaacgccagccaggggaagttgcttccggcccactcaggcctcagcctcatcatcagtgacg

SEQ ID NO: 21169 - DNA, 120 bp, Homo sapiens
cctcgctcacagtgggcctgactctggtctccctgcaggccccagggacagttgtggttagccgtatcattgtgtgggacatcatggccttcaatggcatcatccatgctctggccagcc

SEQ ID NO: 21170 - DNA, 120 bp, Homo sapiens
gcccgtgagttgaggaagggggaggcagagcccttcctggcacccccacaacctgtgagcccggggaaggtggtgggacagctcccgccaggtcaacactctccctgtttgtttgtagca

SEQ ID NO: 21171 - DNA, 120 bp, Homo sapiens
tggcgcctgaagccccacctgtggcggcaggcgtgggggctgtgcttgccgctggagcactgcttggcttggtggccggagctctctacctccgtgcccgaggcaagcccatgggctttg

SEQ ID NO: 21172 - DNA, 120 bp, Homo sapiens
tggcgggtccttggatctcgcttgaggcgcctcgccactcacccctctgctgctcccaggcggaagatgatgctgatgacgacttctcaccgtggcaagaagggaccaaccccaccctgg

SEQ ID NO: 21173 - DNA, 120 bp, Homo sapiens
cagcgacaccttttgtgaacccttcgatgtaagcatggaagtgaagaagtgtggcagatgtgggatgggcccaggccctggtcacaccctccaccaccaaccctgctcttctaggactca

SEQ ID NO: 21174 - DNA, 120 bp, Homo sapiens
tgacgaggctggggctgaaagcagaagcatgcacagggaggagaccacttttattgcttgtctgggtggatggggcaggaggggctgagggcctgtcccagacaataaaggtgccctcag

SEQ ID NO: 21175 - DNA, 120 bp, Homo sapiens
cagcggatgtgggccatgtcaccaaggaagggggtcttcatgcagccggtgcagagctggtccatccagaggggtgcctcgtgctgcagcggcgtacggcgtgggtagaaggtgaagtcc

SEQ ID NO: 21176 - DNA, 120 bp, Homo sapiens
ccacgcggtagttgagcaggcagctgagggaggccatgtagaggtcagagaagcgcacgaggcgccttgagaagtaggtggggttgtggaaggtgcggaagatgctgccgaactgcgcat

SEQ ID NO: 21177 - DNA, 120 bp, Homo sapiens
tggcgagggagacacgatgcgctcaaggggtgggcctggggtggtggcttggctgggactcctgccctggccccacctgctcacctcagctcctgccgctctttcatccaggcagccagc

SEQ ID NO: 21178 - DNA, 120 bp, Homo sapiens
cctcgactccgcgtcctgataggtctggggacacaaagtgtgcattgggtgtgtgcacccaggaggctaccgccctggccctcccacagccaccccggcccacacctgcatgcgctccag

SEQ ID NO: 21179 - DNA, 120 bp, Homo sapiens
ccccgtgagcgcctgctgccacgtcagcgagtgcatgtactgctccgtgttgatgatgcggatctcacgctccagctcggggatgatggcgcctgtgcgccagccgtgccgcagcatgag

SEQ ID NO: 21180 - DNA, 120 bp, Homo sapiens
gggcggcagaactgggctcagcgccagttgctgggggcgggggggggggggtttcctggccctcccccactgcagcccagccctgcctccctcaccgccagatcactatagaggtggtcc

SEQ ID NO: 21181 - DNA, 120 bp, Homo sapiens
ggacggaggggtaatgaccataccaagaggaggccaaggagggagcccctatacaggtccagccactcaccttctgaatgtcatagtggaggccacggatggcaaagctggggttgtagt

SEQ ID NO: 21182 - DNA, 120 bp, Homo sapiens
ttccgaatcccttctgggtactgccgggggaaaggggccaggcctaagccaatagccctgccagacctgctggctgggtggccaccccagggggtcaatccagccacctgcccagggcag

SEQ ID NO: 21183 - DNA, 120 bp, Homo sapiens
ccacgactcagccctgagcttaggccaaggtgggtctggccagcctccaagccctgggtttgttggtggcaaggacccccgtctcaccttgtagtgctcgatcaggatgtcacgggcggt

SEQ ID NO: 21184 - DNA, 120 bp, Homo sapiens
tctcggggtgcagtgcgtctgcatactgggccagggtgtagtcgtagtcaaagccgtagacctcaacgtcacgcaggctgatctcgttgttggcgtagatggctgctgggttcaggagac

SEQ ID NO: 21185 - DNA, 120 bp, Homo sapiens
cctcggggggcaggaggtctagaggaaggagatgcagggaggcagtgatggggatgatgatccctgcagcagctatggctcctgagcactctgtggggacctagccctgtgagcctcaga

SEQ ID NO: 21186 - DNA, 120 bp, Homo sapiens
aaacgccccacaatggcacctcttattccagtgctggagatggtcaaacaggcccagagagaagtcacttgcccagggtcacgcagttagggtaaggcagagcccctggctggagctcct

SEQ ID NO: 21187 - DNA, 120 bp, Homo sapiens
gcccgtgactactccaggccctcaccactaagccccatcagacacaaggccatgctagaaccctggcagcagtcactcaactcctcaccgcctagccccagaacagctgcttttgggatg

SEQ ID NO: 21188 - DNA, 120 bp, Homo sapiens
acccgtgcaggaacaccactgtctggccccccacaattcagcgcctcctctgctcctctcagctgccctgccctgccccctggcctcatctctcagcctccctgggattatgtgtgagga

SEQ ID NO: 21189 - DNA, 120 bp, Homo sapiens
aggcgagaggattgcttgaaacccagtagttcaagactggtctaagccatatagcgataccctgtctctgtgaaaacatttttaaaaagaaaaaaaaaattgtaccaacctacagaatta

SEQ ID NO: 21190 - DNA, 120 bp, Homo sapiens
tgccgatgacaaagcaggagctgccaggccagagggccagggaagccccacagtgtgcctggcagctgctgcactcaagaggcagacatctcgctgatgtgctccgtgcccagagcactt

SEQ ID NO: 21191 - DNA, 120 bp, Homo sapiens
tcccggataccaactgtgactgtgactcttggtgcagaagacctgggagggtctgctcggcagtgcagccccttgctggcacagagtcctggttaggtccaggccttcacctctgcccct

SEQ ID NO: 21192 - DNA, 120 bp, Homo sapiens
gggcgacagaagcctgttcccttccataggtggtgtgggtggggggtgggggtggggcagctgagggtgtgtcccactcagcatgtccagcaattgccctcctttctcctcagccctagc

SEQ ID NO: 21193 - DNA, 120 bp, Homo sapiens
aggcggctgagctccccgaaagagtagtctgggtgttgggccttaatcacagccctcatctcactgctgaacaggatgtagccactcatgttgattttccgtttggagccttccttcttt

SEQ ID NO: 21194 - DNA, 120 bp, Homo sapiens
tttcgaagggggcacaaacattcaaatcacagcacatttaaagtcaaatgaaccagctgttgccggctggggcaaagggtatcagtcaggaccaacagtagatatgacaaaaggcctcag

SEQ ID NO: 21195 - DNA, 120 bp, Homo sapiens
atacgcagagaagtcagcagtgaagactgggagttttatggttttattggctccacgtatttacgaaaacctctgtcaaatcactggctgatcactaagcttatagaacagagactgtag

SEQ ID NO: 21196 - DNA, 120 bp, Homo sapiens
acccgctttgttgtttctaattgtgtttacttggattttttctcttcttcattattctagctagcggtccatcttaccaactttttcaaaaaaccaactcctagatttgttaatcttttg

SEQ ID NO: 21197 - DNA, 120 bp, Homo sapiens
ccccgctgacactgctggaaggggaggtagctcttcttctcttggaacccatggaatccaacttcttctataagaaataatcagccatgttcttacatttaaatagactctgtcaccaag

SEQ ID NO: 21198 - DNA, 120 bp, Homo sapiens
acacgtactctatttaactataacaattttaactataactctatttacaacacaagaaatgcaaccactgaatgatctgctacagatagtatatacccaagaaagtcctgcaatgcttat

SEQ ID NO: 21199 - DNA, 120 bp, Homo sapiens
ctacgacaccagcagctgaatgattagaacaggagaacactggttgccagcagtatggaaagaaaggttggggatctccaggaaacagaaagaaggagcaaaagaatcacatttgaaaat

SEQ ID NO: 21200 - DNA, 120 bp, Homo sapiens
cctcgatgtcctctcaatgtccagctgcttgtgtcttcttctgctaatgtgttcctctcaacatccaacctcttatctgtgttcctgcgagggtctccggggtttttataggcacaggat

SEQ ID NO: 21201 - DNA, 120 bp, Homo sapiens
gcacgaaccagcagtgcctgttctcgcctaggtccatgggcacagatctgagggtggagccctagccagaggccacgccctcccttacccagtacttccctgtcccccttccatatcatt

SEQ ID NO: 21202 - DNA, 120 bp, Homo sapiens
ggacgacaacaaacaaacacagctccttccttgcatatttggtcagtgtttgtagtgcaactgaatggggacctccagccgccagtggccccctcgggcgctggctcctcttccctcttt

SEQ ID NO: 21203 - DNA, 120 bp, Homo sapiens
aggcgagagcgggcagagacagcaagaggagcagaggtagaaaggaagggcagagagagggtaaggaacgatgctgcgggatgacctctgcacaccagcggctggcggggccctcccgtc

SEQ ID NO: 21204 - DNA, 120 bp, Homo sapiens
atacgggtagcccaaagcggtgcttctttttcttcacaggcttgaggggggtcagtctgcggaggtcctcctccacgtcggactcctccatctcatcatccgctgagatcaggatctgag

SEQ ID NO: 21205 - DNA, 120 bp, Homo sapiens
agtcgacagacccccttcctctgctaatgctccccacttctcagtccacctccaggggaaccgacctccatcaggacaaactcagcagggatctgcagcctaaggtcaccctggctaaaa

SEQ ID NO: 21206 - DNA, 120 bp, Homo sapiens
cagcgtggctgctctgagccaactctgtaactgctgaagacaaacagcggcactttgctgttctaaggccctggaatgactcagccatgcagctggggcaaacacactcatccgctgccc

SEQ ID NO: 21207 - DNA, 120 bp, Homo sapiens
gcccgcctgcctggctccttagacctctgaataccagggaaaggttggaaccacctaggttgggatcaggaggtccaaagcccacctatgcagggaaacacgaactcctattctagggca

SEQ ID NO: 21208 - DNA, 120 bp, Homo sapiens
ttgcggggcttcctgcctctagtctcggtcccgaccaccacactcccactgctcctcaccgcctgtacgagcacatcccaatgcctcagcctggatcacagggcattgccgatctagctc

SEQ ID NO: 21209 - DNA, 120 bp, Homo sapiens
acacggcttcccctctgtcctactatctattcgtcttctgaaactccctccaggctgtcccagggccctcgttgggttctgcctatgcctcaatcttagaacatattacggtgtcatgac

SEQ ID NO: 21210 - DNA, 120 bp, Homo sapiens
tgacgaaatacttatgtgtccacctgcacctcacccacgtgtctgacagcctctccggggaagacgtttgtctcagcttttctgcagctcccacctgcacacttcctaggcctcccatgc

SEQ ID NO: 21211 - DNA, 120 bp, Homo sapiens
ccacgagctggccctgcacgcagatgtggggtgagtgctgcggggccgccagaacacatatcctggcctcagggctgctattcatggccaccgttcttccctgaggtccaaacccttgaa

SEQ ID NO: 21212 - DNA, 120 bp, Homo sapiens
tgacggtccttgccagctcaccaaacaaggcagaacttccctctcctgtctgtcatctccactgacagaggaactgtcgcaggcaagccactcccatctgctctgccctcctgccctagg

SEQ ID NO: 21213 - DNA, 120 bp, Homo sapiens
cctcgctcatctctggctcagcctcttctcctgccctctggctcgcactgtgactctgcactcaagggaagaacatacacagacatgagaccagagacccccttgggccagcgatacgac

SEQ ID NO: 21214 - DNA, 120 bp, Homo sapiens
cgacggcttgggcccttggagagtcagggaggccctacctcagactcagactcctcgtgggatgcggccctccggtagcggaccttgctcccattcctcgagtcctggttggctcccctt

SEQ ID NO: 21215 - DNA, 120 bp, Homo sapiens
tttcgtcttcccctttctcatgaggaaattgtccactacccaaaacatcaaagcctgtgggaaggaaaagtgcaggttactttgggataaaccatttttcaaagcaaagccgaacagccc

SEQ ID NO: 21216 - DNA, 120 bp, Homo sapiens
tagcgttaatgcttgatgtatccgaaccagacctgatcttcactcccaggtcactgagtggcacctgacagactagtggtgaccagtggattcaccttagcactggtcagctatagtaga

SEQ ID NO: 21217 - DNA, 120 bp, Homo sapiens
ttgcgcgtcacttaactcctttgggtgcccattctataaatgacgatgatgctgtgctggtcccccgactgtggtccatttctgttctgcagctgaggactcaatgactcgcagcttctc

SEQ ID NO: 21218 - DNA, 120 bp, Homo sapiens
gtacggggctaagaaaagccctgccctgagctcatctcccctcaacggagacaaacaattacttaacatttctggaaatatccaaggtactcatagccagctccatgaattggctcccct

SEQ ID NO: 21219 - DNA, 120 bp, Homo sapiens
tcccgaattccatccgctctccctccctcttgtcctctgtggccctctcaaggcaaaggctccactgatactgatccacctggaagaggagcttctgtctgcagacacctggggccagct

SEQ ID NO: 21220 - DNA, 120 bp, Homo sapiens
agccgtgtggaatggcctagcaacaggacaagcacagatgtgcagcagaaagaggggcagggcttgccacctcgttattgaacaccttcgaaaaatgagagctgccccatctctttaacc

SEQ ID NO: 21221 - DNA, 120 bp, Homo sapiens
gaacgaagagtccctgcgggcctgtgtgtgggactgctggtgtcttccattagaaggagcagacattcagccctctctctgtgtctagtgtctcctgcctcctgccaccttccctgccat

SEQ ID NO: 21222 - DNA, 120 bp, Homo sapiens
acacgcaaagccctacaagccaactgatagctgtgtaagtgagctccaggacagcatgtacaggatggtctctcagaggagcacagaggaaaaggggagcaccctctccccaagccagag

SEQ ID NO: 21223 - DNA, 120 bp, Homo sapiens
gagcgcaatatccaatttgaggaaaacgagaagactgaaacaggaagaaagccaccccaaccttccaatcactggttatctcttcctggggccttgagcactaactcaggcttggcatct

SEQ ID NO: 21224 - DNA, 120 bp, Homo sapiens
atacgttttaaatttttttcttacttcaaaataaaatgctcaatcgctgctttgtgatgaagcccaaggtgcctctattttaaagagctcccattcaacttcactcacaatgagctaaat

SEQ ID NO: 21225 - DNA, 120 bp, Homo sapiens
agacgtgcacaaatccagtactgcagctggatccctaaagaaatttcagctgctgccatttaaacaatgggctagatcagggtaggcaaattttttctgtaaaggaccaaagaataaata

SEQ ID NO: 21226 - DNA, 120 bp, Homo sapiens
gtgcgccatatgatctctgtctcaattcctcagccctgccgctagagaatgatgcagtcatagacacagctattccaatcatacacaccgggcctgagggctgtagtgtgccagcccctg

SEQ ID NO: 21227 - DNA, 120 bp, Homo sapiens
ccccgacccatgtgacaggagcatggtggagacagcgtgtgccttcagtatgtcctccaccaccagcaccaggtagccattctcctctgtggtcgaggcacctcttggtcatggctgtct

SEQ ID NO: 21228 - DNA, 120 bp, Homo sapiens
gcccgatttacgtctgaaccttgggtctgtagacacgatggcctgaacaagaggaaatgaaaagttttgaagctacgtatcctccactgaggtgctaggcaagtacttccacaatgattc

SEQ ID NO: 21229 - DNA, 120 bp, Homo sapiens
cagcgagggtgcaggaggagaagggagacagggaaggagaaaatggtagccaagacagtaaaccctactctctgaacaaacaaaggcagtctgcatttgccaggcaaggactgcctatac

SEQ ID NO: 21230 - DNA, 120 bp, Homo sapiens
caacgagcaggtgaagttgtgaggaggtctgtcatctctttgacacatcacagatcccaaacctcaacaacgccagagaatatggagttgaggccaagaggttctgcttgcctgaacagc

SEQ ID NO: 21231 - DNA, 120 bp, Homo sapiens
gagcgagggggcattatcactgtatgtgtgttccatgggggattctgtttgatggaaagaaatacaaattgctgataaacacatatgcaaccttaataacagcaattttgaagatgcaaa

SEQ ID NO: 21232 - DNA, 120 bp, Homo sapiens
aagcgagttgtacaaccacttggtaagtgtggggaagtggatttgcaattctcggctccagaaccacccaggttaaagaagtcattaaactggtaccaagggtagcctcagtgaactaac

SEQ ID NO: 21233 - DNA, 120 bp, Homo sapiens
aggcgctggggacctgtaagtacttgctaatgagggcttgttagtgtacgttcttcctgaatactgatggaagccccaagaataatggggctgtcctggaaggaccctaccctgtgagcc

SEQ ID NO: 21234 - DNA, 120 bp, Homo sapiens
tagcgggcaacgatatgtgtgtgtgtgttttccaccagtccacaaaacacatgaaaagttgcgtcaggttattttggcatatctatcacgattttaaatgtttataaactgtgactcagc

SEQ ID NO: 21235 - DNA, 120 bp, Homo sapiens
catcgatagggaaggggttgatcatatgtgattatgcaatggatgtcaactgtgaagtatacttacaatgcgtgagttttatggtacataaattatacctcaataaaactatttaaaaag

SEQ ID NO: 21236 - DNA, 120 bp, Homo sapiens
aaacggtcaatgtgtaatgtgaacctatttttatacatcaacaaaagatacacacacacacagaaattcagaggcatatacaataaactattaaccatggttagctctctagaggatgga

SEQ ID NO: 21237 - DNA, 120 bp, Homo sapiens
caccgcagaccggaatgagagcctgggaatcacgagctccaggtccggaggtaggagctgggacggcctgtggtcaaattatttttccctctaaggaaaatccctatatcctggagaaat

SEQ ID NO: 21238 - DNA, 120 bp, Homo sapiens
gatcgtgattcagtagttctggggtgggtcccaatagtttgcagcctggattattctgaagcaagtgaataaggaaaacaatctgagactgagtacaggagtcttccctccaacccagac

SEQ ID NO: 21239 - DNA, 120 bp, Homo sapiens
agccgtctcatctcagaggcttgccttcatatggcatttcctcatttcctccccagtctggctacagcctcacctaactcactggtactgctcttgtccaggtcaccaatgaccttccaa

SEQ ID NO: 21240 - DNA, 120 bp, Homo sapiens
cagcgagggggcacaggacagctgcgaattgggacgaacgagcccagagccccgggaaggatcagaacctcgaaggcggcttcaagtcggccccgcagcccgaggtgaccgtgggcggtt

SEQ ID NO: 21241 - DNA, 120 bp, Homo sapiens
ttacgttgcccgagctcgccccctcctcctgagcgcaggtgcccgtgggacatacacccgcccacctgctccggaaagttccctccagaagggagttcccgcgccaccgagacccgggag

SEQ ID NO: 21242 - DNA, 120 bp, Homo sapiens
tatcgaatctgaggatctcagtcaggcaacttccttatttcacagccaaggagatggaggccctgagaagttcctaatggcactctgccagtcagggagtcaggctagggggatccaacc

SEQ ID NO: 21243 - DNA, 120 bp, Homo sapiens
ggtcgagctctggaggctttagtttgcagtaaacttaaaccagctgctgcaaagacatgtctagagacatgtgttgtctgcaatccagaaaaccaatttagggccatcacttggactgga

SEQ ID NO: 21244 - DNA, 120 bp, Homo sapiens
ccccggaacaaagagcaccagacaacttcctaccactagggggcactggggaccacgtcatcttcagacttggattctgaccacagccggcttcagcaccttctctctctcacactgctc

SEQ ID NO: 21245 - DNA, 120 bp, Homo sapiens
aaacgaaggctgctgcttgtcatgaggctctcgtgatgcctgtttgcctgcaggttgtgaatggatttgggaagatgattgagctctttaaagacaaagttctttgggagaatgagatca

SEQ ID NO: 21246 - DNA, 120 bp, Homo sapiens
atgcggcttctgcaggcaggggctgagtggtgggagagaggaagcatatggtggactgttaccattctattcagaatggaggttcagaatggaggtgtcacttggggcggtcaaaagagg

SEQ ID NO: 21247 - DNA, 120 bp, Homo sapiens
taacggagaaatggcggctaaggtggtaaaaggtgatggatggtaactccagggaaggtctggaatcagaactcagaggctcatcacactttcacctgagtcactcgtccacttcccaaa

SEQ ID NO: 21248 - DNA, 120 bp, Homo sapiens
ttacgccccatgtcaggagaggccattgaagcctctttcaaggctgacagcctgtgacttggcacatgaccaggctgtaaccctgggcaatgtgtctagcctggccgaggctctgtatat

SEQ ID NO: 21249 - DNA, 120 bp, Homo sapiens
cctcgccacagcatagctagcacagccttagcccctctgaccctctctgagtacatcgcacttcccctttctctagaggagaaagattggctgaagccagtgtatgcttgcagcccctga

SEQ ID NO: 21250 - DNA, 120 bp, Homo sapiens
cctcggtctgaatctgcgtctgccactgactagctgtgtactctggggcaagtcgcttctcctttctctgagcctcagtttgctcatcaccaaaactggcactaacagcagccctcacct

SEQ ID NO: 21251 - DNA, 120 bp, Homo sapiens
cagcgatagccatgattattcatttccttcttccatggtgaaccacacggagtgggaacaaaggtctggtggctggacctggagctcctcaagggtcagtcctccctctggctgcagtcc

SEQ ID NO: 21252 - DNA, 120 bp, Homo sapiens
acccgatcccaagtgggcaaaggtcacttgaggctcaccttgtttaccctttcctccagtccaaccccagggaagccatggggcatgatgggtggggtgggatgggatcaggacacagaa

SEQ ID NO: 21253 - DNA, 120 bp, Homo sapiens
tgccgtgcattacaactgggcatcagggaggagggacatttgaatggacacaaccagggcaggtagaggtttgggggtggggtgggaaatggcattcaggcccagagaacagcatgctca

SEQ ID NO: 21254 - DNA, 120 bp, Homo sapiens
ttccgcaatctcaaccagggtcctcccacctgaacaacgtggcagcccttctgtcccccatccagcctctcctctgccctgctgtccctctgccccatctatcccgcaggagcccccttg

SEQ ID NO: 21255 - DNA, 120 bp, Homo sapiens
tctcggctgaactgttccttcctctaggaaatcttccctgacccttaggcttgaccctgtagcactaccagccttgccctcttcagtctcatcacaactgtgacttaacagttacttgag

SEQ ID NO: 21256 - DNA, 120 bp, Homo sapiens
attcgccacccgggcctggggatccaggaggacaggccctggatgtagcttttctttcagctgtgttctgcgcctcgaatattatggctggcatgcaggagctgtcagcccatgttccct

SEQ ID NO: 21257 - DNA, 120 bp, Homo sapiens
aggcgacatttaaatggagctggagcaagaggatcagaggaagagggaacagcaggaacaaaggcctggagggaggacctagcagggtgcccaaggtagttctgtgctctagaggacact

SEQ ID NO: 21258 - DNA, 120 bp, Homo sapiens
agtcgggcagattctgccaggggaaggccgtggaggtctacgagggagggacagaggggccatggcccaaccttctctgcctggccttgttgcagagcgtgggaaaacactggtgcagaa

SEQ ID NO: 21259 - DNA, 120 bp, Homo sapiens
agccgaccatgtatcctgagtggaagtcgacgttcgatgcccacatctatgaggggcgcgtcatccagattgtgctaatgcgggcagcagaggagccagtgtctgaggtgaccgtgggtg

SEQ ID NO: 21260 - DNA, 120 bp, Homo sapiens
tgtcggtgctggccgagcgctgcaagaagaacaatggcaaggctgagttctgggtaaggggcgcacgagccgtgccgtgtgtgtgtgtgtgtgtgtctgtgtgtgtgtgcatgcgtgcat

SEQ ID NO: 21261 - DNA, 120 bp, Homo sapiens
gtgcgtgcacacacgcgggcttggtcagtgagcacagctgaagagcaccgggccctgtgctggccaccagtccagccctgtggccaacatgtcctgggtgtgaatcctggctctgcaatt

SEQ ID NO: 21262 - DNA, 120 bp, Homo sapiens
ttccgcatctgttaagggaaggcgctactaaatgtgcctacctcagggtcagttgttcaaatgaaaggagcagctggatgtacagggcttattgcagaacctgacacatagcaggtgcta

SEQ ID NO: 21263 - DNA, 120 bp, Homo sapiens
agacggccaacttccttattgtgactactttttcctttttaattttggaaaggcaggatatgcacatagtaaaacatttttaactgcatgaaagggtgtgtccctgccccaacaccaggc

SEQ ID NO: 21264 - DNA, 120 bp, Homo sapiens
cttcgcatatattctaggccttggcagccattgagggggcaacatagtgatctttaacagcaaggaggtgggagaaggggaggctgacggtctcatctacttacctgctgaaatggagac

SEQ ID NO: 21265 - DNA, 120 bp, Homo sapiens
ctgcgaggggtgagggggctgggatgggagagaggttaacacagggctgtactgacccttggccagtcaggcagggacacagaggggcctctggctgtgctgtctccgctcccccaaggg

SEQ ID NO: 21266 - DNA, 120 bp, Homo sapiens
cctcgagactgtccaatctgcatgaggagccctcggcacagagggaggagcagcgtgtgtgcacgaggatgagtgtgtctgtgtgtctgtctctctccgcatgtgcacacgggtaggggc

SEQ ID NO: 21267 - DNA, 120 bp, Homo sapiens
cagcgggtaggggtggggaatttcccttcccgctctattccccagctatgtgtctgggctgggtgtgggctggaccctttcacttccctaaatgtaataatacccctgggtacagggtgg

SEQ ID NO: 21268 - DNA, 120 bp, Homo sapiens
aggcggggccctgcccacactgggcagacaagtgtctggctaggccttggggggctgccttggccttgggggaccagccatgggggtgggttctgagtttggcctggcccaggctgccct

SEQ ID NO: 21269 - DNA, 120 bp, Homo sapiens
ggacgtgggtaagaactccctgggggtggagggctcccttgccgggttcagaggcagagccagcactgaggtgtagggaagctgctcccttcggcagagctgtccaggaccaccctggga

SEQ ID NO: 21270 - DNA, 120 bp, Homo sapiens
atgcgcagtgaggacgaggccaagttcccaacgatgaaccgccgcggagccatcaaacaggccaaaatccactacatcaagaaccatgagtttatcgccaccttctttgggcaacccacc

SEQ ID NO: 21271 - DNA, 120 bp, Homo sapiens
aaccggccatgcccactggtggtggtgcagggtagtgggggccgatcccggtccccgctcactcactttgcctgggttttgcctttcaggggcctcaacaagcaaggctacaaatgcagg

SEQ ID NO: 21272 - DNA, 120 bp, Homo sapiens
aggcgtaagtgtctccacaggccagtttgtacgtatgtacccatgtgtgctcacgtgtgccagtgcctgtgtgtatgccagtgcctgtgtgcgctcagagagtgtatgcacgtgagtttt

SEQ ID NO: 21273 - DNA, 120 bp, Homo sapiens
ctgcgcatctcttcccagctccgcattcagtgacggggagttggtggatggcaattgggcacagtagagtattcacgcagaaaccagcccaggccatgcaccaggcctcttttcctcgga

SEQ ID NO: 21274 - DNA, 120 bp, Homo sapiens
agccggggaactggttaaatactctcctggcgtggaaagtggtgcagggccaagtgatcggcaaaaagagacattgagagaatcaaagatgcagccagattctaccctgtggttccacag

SEQ ID NO: 21275 - DNA, 120 bp, Homo sapiens
tgccgagaccccaagtccctttaaggcagtggctcccaaattcagcgtgtgttggtaccatgtcaagttctaaccagcgggtctcagccctggctgtcactggaagccgatgccaggctg

SEQ ID NO: 21276 - DNA, 120 bp, Homo sapiens
actcggtgatctgtggagggccgggcatcagtactttgaaagctgcccctgcggtcccacctgcgcagagccagttggggaatctgcattttgcccagtcatcctggtgaagccagaaaa

SEQ ID NO: 21277 - DNA, 120 bp, Homo sapiens
aggcgaagtcacctgcctgtatggcccagtcttggcccgcagaggcccgagcatcccctccacaacctgcgccccgcctgcgcaaggaccacgggcggagggttggtggctagggaagaa

SEQ ID NO: 21278 - DNA, 120 bp, Homo sapiens
gaacggtgcggaaagcacgcggccccagctgggctacagcgccctctggcggccagaaggctcgcgggcgctgaggccgcagaccccaggaggggaggacccccgtggaagggagcgccg

SEQ ID NO: 21279 - DNA, 120 bp, Homo sapiens
cttcgtgtcactactccctggggaaatatttcaataaagaggtactgggtgaccattttggagaggttcagagacgtggaggttacagctagacagccccctggtatttttaggatctcc

SEQ ID NO: 21280 - DNA, 120 bp, Homo sapiens
gcacgtgatcccggacgactgtggtgtcagaggctggggagctggttgtggtttcctgagtgctgaccatcctcccaggcactttatctccttaggctggggcagggggagatacatgca

SEQ ID NO: 21281 - DNA, 120 bp, Homo sapiens
ggtcgtcagattgaatcagcccttcacatagcctcagtgatttaagtcttcagaacttgaacgccagttcctaaatcaggcttcttaagtggggcttagaagattgatatggtttggctg

SEQ ID NO: 21282 - DNA, 120 bp, Homo sapiens
cttcggcagctttcaggcccaggctgtggggcagcggcaggaccccggaccctagggcagccctttcctgtcttgccagctgaaccaggaacaaagggctcattcttcccaaggttgtgc

SEQ ID NO: 21283 - DNA, 120 bp, Homo sapiens
cagcgtgaatacaggccctgggtgtccaacctgggttgccagcaccccctgggcccaactcagaaactttcctcatcttgcccttagggccatgtctgggcaaccccccttctctggagt

SEQ ID NO: 21284 - DNA, 120 bp, Homo sapiens
agacgtagctttgggtcctccctgagcaggggaaggagcctgtagtcagcaacattatgttctgctgtgctgttcctttccccattttctgtgtgttggtgttttcatgattcatactgc

SEQ ID NO: 21285 - DNA, 120 bp, Homo sapiens
atccgtgtgtccgtaaaacccaatccctgagcgtcggtttctggaatcccacccagcgcagtggccaacagccttcaccctcctctcccctcttcctcctcccaaagaggaccagcgagg

SEQ ID NO: 21286 - DNA, 120 bp, Homo sapiens
cctcgcccttgaggtgggaaagcaggacaagctgtttgaagtggttttttcccttcatggcaggacccagatcctgccctacacacacccatcttgggaggggacctttggtgggagcaa

SEQ ID NO: 21287 - DNA, 120 bp, Homo sapiens
tggcgttgttgcacaacttggtgaatatattaaaacccactgaataatatacttcaaataggtgaattgtgtgctatgtgaattatatcacagtgaagctgataaccaacaggtcagggc

SEQ ID NO: 21288 - DNA, 120 bp, Homo sapiens
gcccgaaagactagcaggagcccccaagaagctgcaagtggtccagatcctgcccatttttaacaccagagggcagtgccaggcagcagcaccaaagccatgacaatatcccagagccct

SEQ ID NO: 21289 - DNA, 120 bp, Homo sapiens
cctcgacatccaccccctcccagacacctcccagcactgccaaacccccactcagaacatcctcatatacctgagtctacatgggcagaacaagccacaacccctgagagcaggcaggtg

SEQ ID NO: 21290 - DNA, 120 bp, Homo sapiens
agccgacccaggccctgggatcagcccccctcgtgccatagacttcctctgtccccgggcaagtccctgaccacttgtagtctcattttcccatctttaaaatgggtgaggccatcccag

SEQ ID NO: 21291 - DNA, 120 bp, Homo sapiens
ttacgcctgcctcattctccggcctggggcagaacccaggttccaaaccccccaaggctcttggcccacacaggccttgctcagcatctgccattgcttgaggagtaccccactcacctc

SEQ ID NO: 21292 - DNA, 120 bp, Homo sapiens
ctccgggccctgcctggctctgtgtcggcccttcagctggagcaggtggccggagctggcagagcacacacagctgcagctctgaaaggcaccagccagggtggggcacgggggctgcct

SEQ ID NO: 21293 - DNA, 120 bp, Homo sapiens
ccacgaccttcctctcacccacagaccctccaagtccctcctctcctcctgcctgtacatgcccccaccggcagaggccagacggatctgagtttaaatcctggctcagccacaggggtc

SEQ ID NO: 21294 - DNA, 120 bp, Homo sapiens
tcccgctccccttccctggagcctggtgagctcagtgagcagcaagggctgtttccctggatgtgcgggtcagagctacgtagccacagtgtctgggcgaggggtgaaggtggggagggc

SEQ ID NO: 21295 - DNA, 120 bp, Homo sapiens
gggcggcttgtgcatactgacccgtgatccctcggcccttgaaggtcttggcaatgatggctgttggctggtgcttggcctggccaaaggccttgcacagctcctccacgctgtgtccat

SEQ ID NO: 21296 - DNA, 120 bp, Homo sapiens
ccacgatgatggcatgccaactggggacagggggcagagagtaaggggcaattcccaggggccacaacaccgaggagccttccagggaaaggtctgccttggcagctggggtctgcccag

SEQ ID NO: 21297 - DNA, 120 bp, Homo sapiens
gcccggaggagggaggtgggccaaggaggcctgaggcactctaggcaacaccctggagcaagagggctctggggaggatagagcagagggcacttgaggaccaggcgcttcctgggacag

SEQ ID NO: 21298 - DNA, 120 bp, Homo sapiens
tggcgttataggtgtgagccactgtgcctagccaagggttattttaaatagggtagtcagagaaggcctgacttatggaggacatatgaggcttgagggagtaaagggagcaagccctat

SEQ ID NO: 21299 - DNA, 120 bp, Homo sapiens
tctcgaggcaggaacatatctggcacatttggggaaagacaagagagccaatgggactggagccaggtgagcaatgcagagtgacagatgaggcctggggtagaggggccagataaggta

SEQ ID NO: 21300 - DNA, 120 bp, Homo sapiens
cctcgtgggccactgtcatgatcctggctatgatttgagtgagctcggacactgctggagggttttaagcagaggagtgccatgatctgacttatgttttgcaaggattactctggctgt

SEQ ID NO: 21301 - DNA, 120 bp, Homo sapiens
actcggatcatgacctaggaggatgtcattatgttgctgcacatttgaaccttgacacaactgacaaatcaaacttgcactcattagaatccttactgaatgttactctttgttacttag

SEQ ID NO: 21302 - DNA, 120 bp, Homo sapiens
tgacgtctgttcagagcagcacccaggggttctcttccttagccagtagctttctcagctttctcatggacctaggaactccccagtgcctagatgcagtggagcacatagatagccttg

SEQ ID NO: 21303 - DNA, 120 bp, Homo sapiens
aaacgggatataggacaatctggcactgagtctgctgaaggctgtcctgccactgctacatcttgcccttctctcctaacctcactgccccaggggtggagacagtcatgacactgggca

SEQ ID NO: 21304 - DNA, 120 bp, Homo sapiens
atgcggcacagtcttgtcagagagctgacaatcagctccctgctgctttctcatcttttaaagtccaattaaacatctctggccacagcatgataattgtctgggctccacacagtggaa

SEQ ID NO: 21305 - DNA, 120 bp, Homo sapiens
gaacgtgacctgaggtggcattaggagaccagaaaagaaagaaaagcccttttatcttggaaagatcatgtccccagttccttaaagtgtagaatcattgttcacattgagcaattgccc

SEQ ID NO: 21306 - DNA, 120 bp, Homo sapiens
caacggcagcagcaagcggaccacgcgaacggtgagcagccagagcccgggcacccgctgccaaatccgatcctgtcatggtcctccagccccctcccccttccccgcggcgctggatgg

SEQ ID NO: 21307 - DNA, 120 bp, Homo sapiens
gctcggtgtcgtctacacagagaggggacatgcgtgacagccactccgcgctcccctccaggccctgaatgtcagagttaattctgcatttgtggggtgggggcggccgtggagtgtgtg

SEQ ID NO: 21308 - DNA, 120 bp, Homo sapiens
cctcgtgtcatggagtcctccctgcaggtcactcgggtaagagaccaaggctcacagatgggagctggcttgccagagctagggctcctcaggacccaggtgatgggcttgcttctctga

SEQ ID NO: 21309 - DNA, 120 bp, Homo sapiens
aggcgattttgcaagggaaccctctgtgaacaacagatgctggcccattgatttccttgtgcatctagtcccactttctcaggcatttaggctctgccctgctctggctctctctctctt

SEQ ID NO: 21310 - DNA, 120 bp, Homo sapiens
caccgtatcaggagagtggagactctggaggaagacagatcttggtttggtttctaggtttgatgctgactgactgggtttgggaatgaacaaatgatctcacctcccttggtctggctt

SEQ ID NO: 21311 - DNA, 120 bp, Homo sapiens
gtgcgagggagctctcatttaccagaaggcattagttaactggtcaagaatagttcaagagagtcttacctcccagtgaagtttaaggtttggcagtatctgagcactgggggaatcttt

SEQ ID NO: 21312 - DNA, 120 bp, Homo sapiens
acacggcacacctgttaaatccctgtgttcttccatgattgctgcctttctttgccttatgattttttcccttattgtggcctagtccacggaggttggaaagaggagtgtgcccttccc

SEQ ID NO: 21313 - DNA, 120 bp, Homo sapiens
tagcgctgtgtggaagcctggtgggggcactgggtgagtggtgctgcagcagaaaggcctcctgctgagacgctgaggtcagcattttcagcggcagggagccctgtgactgaaagcaga

SEQ ID NO: 21314 - DNA, 120 bp, Homo sapiens
actcgggttggtgtttgtggccacattgatggcttcatggaagtatgttcccctctgtgcaatgaactagtagggcctgtgtcttggggcctgcaccttttgattgcaggcaccaggccc

SEQ ID NO: 21315 - DNA, 120 bp, Homo sapiens
ggacgacaagccatacggtagttactagcgtccccattttgcaggtgaggcagatgaagctaggaggcgttaacttaaatgactctttgctgagggaataaacccataagatgacaaatg

SEQ ID NO: 21316 - DNA, 120 bp, Homo sapiens
gtccggtggcctggctttgagtccctgctctgtaactttacttcgttgtgaccctcactttcttcattggtcataaagcaggaggtaaaaatttaaatgagatctgtgtgaaagcgtttt

SEQ ID NO: 21317 - DNA, 120 bp, Homo sapiens
ctacgaagctatatacacatgggcggcatcatccttatggctgtctgttgagagagggcctcgaggagaggacttggcttcatcttgccttctaatccctcactgcaaggccctgaatcc

SEQ ID NO: 21318 - DNA, 120 bp, Homo sapiens
ctacgcagaagagtcatacctgccagcacagctatggtgattgtgcttgggaagaagttgaagttgcagaaggaaggtggtagagagggactgaaagagccaaccaggccagagctcgac

SEQ ID NO: 21319 - DNA, 120 bp, Homo sapiens
caccgtgcccggccatgcatcacgattttcaaaggccagcttcctgactgttccttgaactccttgagataggtatttactgtgcttgtgacatgcaaactgcaaataattcttgcctca

SEQ ID NO: 21320 - DNA, 120 bp, Homo sapiens
gcacgtcgggtgctgaagctggggagctggaatcagctggtgtgttctctgtagaactgagaggactagcaccctggggtggaagcagccctgccttctgaaccacagacttgcttgtgt

SEQ ID NO: 21321 - DNA, 120 bp, Homo sapiens
gtccggtggtctctctttccaatgcaggaacagagtgctggaggtagagactgtgattgcttaatgaagatatcagaacttgcacaacccacacatagggctcccatcaaagcagtagtt

SEQ ID NO: 21322 - DNA, 120 bp, Homo sapiens
tcgggagagtggaactgtgccctcccactcgtgctacccacacagcagcctcctccctcactctctccttcatgtatgtgtgtttgaggttctgcttagcactttatttggggaaaataa

SEQ ID NO: 21323 - DNA, 120 bp, Homo sapiens
actcgagttggcaaggactctgggccgaatatttagggcttggctcttgctccctctacctaggtggattatgcagtgagatctcacttgcctttaactcatagttattgcttagctctt

SEQ ID NO: 21324 - DNA, 120 bp, Homo sapiens
tatcgtaaatgagcacaatccctgtaataagtgatttctgtgtattattggtagcttgaaaaatattaagtgttacctccattttttaaatatgaaataaagggctagatcaggacatga

SEQ ID NO: 21325 - DNA, 120 bp, Homo sapiens
gaacgttaactgagggagtcaggagtccttcctgacctcaagaagctcacagttcagttggggatagatggccttgagcttgtgttttagagctctggtcccaggtagtgagctcaaacc

SEQ ID NO: 21326 - DNA, 120 bp, Homo sapiens
aggcgctcaaatgatgtcaccaggatctggtttctctctctccagcctggctccacttcctgtatgttgattccattctcaagaattctcagacacgacctccccttgtaattgcaggat

SEQ ID NO: 21327 - DNA, 120 bp, Homo sapiens
ctacgcctttccaccttccagcaaaagagagtgtgagagtctttgtcccagtccttccagatggagtcttgtttcttcccattgtctcagattgggtcacgcgcacatccggaaccagtt

SEQ ID NO: 21328 - DNA, 120 bp, Homo sapiens
ggacgtgtgcagcactgctgacgtggggccaggtcatgtgcgtcacccctcgacctggggaggagccaactctaccctaagttcctgggctaagaatggaaagagagtcaagtattggtt

SEQ ID NO: 21329 - DNA, 120 bp, Homo sapiens
attcggaccttgaccctaaccttaatggtgattactgttcgaggtttttcaaacacatagtgaataaggacagctggtgcaatggcacgccctccaattggctacgttacacagataaac

SEQ ID NO: 21330 - DNA, 120 bp, Homo sapiens
tttcgggcagtttctgctttttgtgatagctgtgctgttggatctcacacttgctctatcaatctgtatctgtaaccaggagacagaaatcacgtagtaatttgaataactaaagttcaa

SEQ ID NO: 21331 - DNA, 120 bp, Homo sapiens
catcgtcccggggctgagatccagatcttgttgcacagagcttgactgtggttcactgaatggcatagaaattgtttttgtgtcatgaggatggtggggaagtctctctggtcctgtgct

SEQ ID NO: 21332 - DNA, 120 bp, Homo sapiens
atccgccctctagggtgccaagggaagatgtgggagatatctcactggaggcgctccatttagaaactccccgaggtgtaggaggtggggatgctggagaaagtgctggccagtgggtgc

SEQ ID NO: 21333 - DNA, 120 bp, Homo sapiens
aagcgtcacactttgccagttgacaaaggaagaatatttataaggcccacattcgtttcacagaacaagcaaacagggtgtacttggaatggagaggtaatcagtgtataactggtacac

SEQ ID NO: 21334 - DNA, 120 bp, Homo sapiens
atacgtcccttttgtgtgaactcctgtgtgtcataacaactgtctctacctagcaagatgcagctaacttggttacaagtgaagaagttatcaccattccccaaaatgaggagacacaca

SEQ ID NO: 21335 - DNA, 120 bp, Homo sapiens
tttcgagttgtcaccgatggttgaatttagcccaagatggtagctttgcttgtctgattaccttcatgccaacccacattttctctggctgacactaaccaggacagaagcctaggctgg

SEQ ID NO: 21336 - DNA, 120 bp, Homo sapiens
aaacgatagcaaaatgagctggattgggtgggcttttggtagtccccatttgtagatttcagccgctgagcttgtccttatttgcagaaaaaaaaaaaaaaagggaaggacctaggccca

SEQ ID NO: 21337 - DNA, 120 bp, Homo sapiens
atgcgataggatgggaatggccatgggtgtattttgttagtctgatcatccttggctcatttttcgtccttaacctggttcttggtgtccttagtgggtaagcagtcggatccgtgttgc

SEQ ID NO: 21338 - DNA, 120 bp, Homo sapiens
ccacgtgtgaggcaactctgcgtgtctcctagctgctccctgacagcttctctgcatgtgtttggactctgatgtcctctcagtgtgttgcttttggattgaactgtgattctttctgcc

SEQ ID NO: 21339 - DNA, 120 bp, Homo sapiens
ttccgtgtttccaatgcttgccaaacactgttaatttaatgaaaacgttcccccaaagccagttgtgttagtatgtgaacgtgtagaggtggattacaagtgagttaaaggaattccagc

SEQ ID NO: 21340 - DNA, 120 bp, Homo sapiens
tgtcgttttgtgtctattagtacataacctggcccctttaggtcaccacagtgcattataaatacttccaggggagttttagattttactgtgaaggagaaataagcctcaagcacataa

SEQ ID NO: 21341 - DNA, 120 bp, Homo sapiens
aatcgcatttttggaaacactgccttttccagagcagaaagcagagtgcgtttatccatctcggcttcctttctgcatcttcccctaaacctgccctggattgaatgtagtcagttccac

SEQ ID NO: 21342 - DNA, 120 bp, Homo sapiens
ggacgcatactgtcacaggaagtccctatgtagagttggcccaggggccagtgcccgccagagagaggagtgggggctgagcctgggatggggccacataaccctcccctgcctgagccg

SEQ ID NO: 21343 - DNA, 120 bp, Homo sapiens
ctccggcccttccacctcaacgtgagaagtgtctctctcctagtaaacctcagtggccttaggctagggttggacatgtgagggtggtgtctattcctggagaaataacatcgcatttga

SEQ ID NO: 21344 - DNA, 120 bp, Homo sapiens
tggcgcctcatgtctcctaaacccagctaaactgacggaggccatggaaaccactaattttaacagtgccggtgacatcccttatcttttagctttcccaggcaggaaccgttgccccag

SEQ ID NO: 21345 - DNA, 120 bp, Homo sapiens
gatcgtgaggtgcttaaaaaaagaaaagagaaaaagatgggcgggggggcttcccactatcacaaatggggattaaacctgcaactccgtgggaggtacccaaagctggaggataaaaaa

SEQ ID NO: 21346 - DNA, 120 bp, Homo sapiens
acccgagacttctctgcgatttttaactgtcagtgcgggctgtgctcaaacccctagaggctgcacatgacctcctctctactcccccagaaggcctccggtagggctggtttgggtaaa

SEQ ID NO: 21347 - DNA, 120 bp, Homo sapiens
cctcgcagctttgttcctgatttggccagtatttcctgagatcctgtagagtgcccggctctggtccagaggcgaggggtgccaggatgtctcagacacagacagcggccttgtgcttag

SEQ ID NO: 21348 - DNA, 120 bp, Homo sapiens
aggcgttcattatctcatggggtagcccattttgaagcagtgcagaagggcacatattcagtagaggtgcagacccagaggctctgtgagctgcactagagagatgaggaggcatctccc

SEQ ID NO: 21349 - DNA, 120 bp, Homo sapiens
ccccggcgactgacgatgggctggcatgcctccacctccgcccctccgccccctcgccctcccaaccaccaccttccctctctgcctgctactcccctcttactttcccattgatatttt

SEQ ID NO: 21350 - DNA, 120 bp, Homo sapiens
atccgctaagcactgaattaaaacgccctcattttagaaaggctggtcgagaccatgtgattgccttctcacgaggaaatgttagatggtgctgtatgtcttcaagtctgtcagccattt

SEQ ID NO: 21351 - DNA, 120 bp, Homo sapiens
gtgcgaggcagtttcacacacctgatctcatttaacactgaccacaaacctacagcagcctaggactgggaaacggtggttgagttaatgaactcggctgtcaggtgctgtagccacaac

SEQ ID NO: 21352 - DNA, 120 bp, Homo sapiens
ccccggactaggtgagcccagactgaaggctccctgcccctaaatctcagccacctcagcttgtcactcatcagtgcatcaaaatccctgattctgggcacagaatcattagccagatga

SEQ ID NO: 21353 - DNA, 120 bp, Homo sapiens
gctcgcagcaagaagcatccaagcgcttccttttgctctgcgggaattggatgcattctggcccaggtgtttccacacagccgtccagagtggtggcctctggagagaggtgaagcctcc

SEQ ID NO: 21354 - DNA, 120 bp, Homo sapiens
ccacgcctgagattgtctccagagccagggaggggctgttttgttggttttcttcctccaaagccagtgagagaaatacccacggatccagtttagcttaagtgtccaagagaacctcca

SEQ ID NO: 21355 - DNA, 120 bp, Homo sapiens
caacgctaatcaccaagggcatcaacttcagggagggagaaggaggagcaggaggaggaggaggataaagggatgagggcggagatgcctgcctctcctccagaaacgccggcttttatt

SEQ ID NO: 21356 - DNA, 120 bp, Homo sapiens
aaacgccctagaaaaaccatcaaccccagcatttctctgtgctaggcagaaaacaagcagaggaatgtgtgctacaagcaccagcaattttgggggcagtgcctcatggtgtcatgcagg

SEQ ID NO: 21357 - DNA, 120 bp, Homo sapiens
atacgggggaaggaagcagcccaagggcacggaggtggggagcccagaacttactggaggctcgttcgggatgtttggcatgcagccatcaacaatgtggagaacgtggaagggcagctg

SEQ ID NO: 21358 - DNA, 120 bp, Homo sapiens
tcccgagatgcccagagaagaggttgaactttgtcctgaagacaatgatgagtcagaggatgtgacatcagggatgcattttaggaatattaatctggccgactaacgagatgggttgga

SEQ ID NO: 21359 - DNA, 120 bp, Homo sapiens
agccgaagtaaggaaaggtattgctgcctttgaaagcccagagagcccaggacagggtcagagataagcagaagcaggcaacgggaatccagttggaaaggaactgtcgaagctgcaagg

SEQ ID NO: 21360 - DNA, 120 bp, Homo sapiens
tatcgtatagtgttgtatgcactaaatcatgtgcattatattctaagggcaattttagggactgtggcccgacaggctgactttggaattgaaacccctgtaagatgggatctgcctctg

SEQ ID NO: 21361 - DNA, 120 bp, Homo sapiens
gtccggggctcctgactcacgatccagcttccccccaccactcccacccacgtcccctccacttgtttatctggtttgagttcaacaaaaccaagccagctctgagcactgaagcactgc

SEQ ID NO: 21362 - DNA, 120 bp, Homo sapiens
ccacgtgaattaccccactgcagccccgctttccagatcactgtttctaattaaagccctggctgacacatgacgtagctccttgggaagcatcccatcacaccacacactctcccagat

SEQ ID NO: 21363 - DNA, 120 bp, Homo sapiens
caccgccgcccctggggaatgaggtaagacgctaaacaacgtaactcaaaatagactggcttccagctcttacaggagagagggcctgaggatacaggatgagactcaaatatctcagcc

SEQ ID NO: 21364 - DNA, 120 bp, Homo sapiens
cctcgcctccccctgctcagccccaccccccatcaagttcaccatttcccaagacattgcagcttcattcctacctctacgtctcaaggccccaccccactcctctccagttacttaaat

SEQ ID NO: 21365 - DNA, 120 bp, Homo sapiens
ctccgtgaagactttcctgttcacgtgatagaaaccagagagcccaaggaacatgaagtatcaccaactgcgggctgagcggccaactgaagttttatttaacatatcaagtgttgcaga

SEQ ID NO: 21366 - DNA, 120 bp, Homo sapiens
caacgaagtcagaagtgaggtctaaaatgcagtcttgacttagcccaatagcccatcaaagacagcctggccccaggccctctccagtcctttgcttggatctggacaaactcagacatt

SEQ ID NO: 21367 - DNA, 120 bp, Homo sapiens
catcgtctctgctgttagcaactgctccaagtgtgctcagaagtcacctgattggtcagaagcaaccccaccccgctcaggactggagctgaggccctgcaggagaatctagtgcacgtg

SEQ ID NO: 21368 - DNA, 120 bp, Homo sapiens
tcacgcatgagcaggatgtgcagttcctgcagctggtttcagaatgaatcctttgtttccattcacctgcgctttttaacatccgcttaacaactttcaaaagcccaaaggtggcagaat

SEQ ID NO: 21369 - DNA, 120 bp, Homo sapiens
tttcgtacgtgcttggaggcaagccaactaaaagatgtgtttcttaaaccaagtaagctgttaagtaacaaactggtcctgcagatatgaggaaagagagaagggagaaaaaggaaaaac

SEQ ID NO: 21370 - DNA, 120 bp, Homo sapiens
caccgatcctgagagtaatcctcagggaacttattgcacagaagtctctgactcccagtctgtttctcgggaatcgggtctcataaagacatttttgtcctcttcaaactggagggcacc

SEQ ID NO: 21371 - DNA, 120 bp, Homo sapiens
aaccgaccacatgtttgtttccatccctcagaccctagcctagatgtcacttcctccaggaagccctctacagccctcaaaggagagatcgagaactcttctgtgctcctgcaccctctg

SEQ ID NO: 21372 - DNA, 120 bp, Homo sapiens
tcacgtgacactcagggcttccaagcagaaactgcccagctcaggacccacctgaaagcagctctgtctcagccacttccaggaaatccatctggtctctctgcacccaacaccaccttc

SEQ ID NO: 21373 - DNA, 120 bp, Homo sapiens
gcccgcccttctgctaggggatgaccaagcagagtccacaatggcaccttaaggtcacaacagcgcagggcctttaaaacaagccatgacaccagggatggcaaactccaacacctattg

SEQ ID NO: 21374 - DNA, 120 bp, Homo sapiens
ggccgggtaaacaggtgacgcaggccaggtagggagtttaggaccatgaccaagggagagctcaagtcctgccacagaagggcaatcggtgctcatccccagaacaaaagcccagcgctg

SEQ ID NO: 21375 - DNA, 120 bp, Homo sapiens
ccccgcaaccccaacccccgacccctatctctgagaaataaggcagggggtcaggggtggggtagaggcagtgatatcttttgcccacattacttggtaagaactggaagtttacatttc

SEQ ID NO: 21376 - DNA, 120 bp, Homo sapiens
cctcgagcacctcctacgcctgggagatcaaggcttaggagactgcctgcctgttccttcaagacagctctaattgttagaaaggtcttccagacactagacttctataaacgcagccca

SEQ ID NO: 21377 - DNA, 120 bp, Homo sapiens
caacgagaaccttaagtctttttcacaagtgctgctgctaagcacacctctccccagtctacagactggttttcagacataagggcaagactttacactttttcctcattaaatttcagc

SEQ ID NO: 21378 - DNA, 120 bp, Homo sapiens
catcgataacacagatggcaccatgagcacctgccaggaaatgcaacctgctattcaccttctccaaaccccgtctgcaggaaatgatatttatggaggattggctcaaggtggatccat

SEQ ID NO: 21379 - DNA, 120 bp, Homo sapiens
gtccgagcccctgtcccattggaagggaacagccaatttttgcctctgagaatgagggcccagtgttcctagatcttcccattttctaagagctgccagaagtctggatttttacatgaa

SEQ ID NO: 21380 - DNA, 120 bp, Homo sapiens
aatcgcctctggtgccagcaaattgcatggaaggaaccaaggagagggggacacatgaggaacaaagaaggattgctgacacagaccaaccaccaaagactcaataagaaagaggatgtc

SEQ ID NO: 21381 - DNA, 120 bp, Homo sapiens
tcacgcacagatgggcacacgcaatgcatattgattagggctgcactgtttccaaattaccatttaaatcaatggttgagcactctgtaattggaaatgtcaaaatccacatttcctagg

SEQ ID NO: 21382 - DNA, 120 bp, Homo sapiens
ccccgtcccttcctaatagctgtgaaggaaaggactcaatttcaggaggcagcccaaactcaccccctcctgacctcaccaatccttacccggctagacacccttgcctcatctttcttt

SEQ ID NO: 21383 - DNA, 120 bp, Homo sapiens
aggcgaggagtatgatgaatcatcctgaaattctcacctaaactcttctatccaggtagggtgctggtgagtcgtcttgccgagagctaacatttttattgtgcttatcatgtgcttaca

SEQ ID NO: 21384 - DNA, 120 bp, Homo sapiens
aaccgtcctcagtgccttatgtacgttcaccgagtccccacggtgacccaatgaggtaagtattactattcccattttagagatgggaaacttagtgagcccccagggcccactgctggg

SEQ ID NO: 21385 - DNA, 120 bp, Homo sapiens
ttccgcgaaggcagtttgactccaggggccctggccttagcagtgcatacactgcttctgactgcagctagagacgaatgagaaacgggagggtgcgtccctgggtatccccctcacccc

SEQ ID NO: 21386 - DNA, 120 bp, Homo sapiens
aaacgcttgccctgctcccaaacactcgctctactcctagatagtggagctttgcgacagctcggcagagaagcacttcgctctgcccagctgcagccaggcatgacatggtgtctgcaa

SEQ ID NO: 21387 - DNA, 120 bp, Homo sapiens
gggcgtggggagctaggtcaggatgccgcagggaggtaagaggcaaatgggattcgtcactggataaactgggactccgccccagcaccacctggagcctgtgggtggctctgagcccag

SEQ ID NO: 21388 - DNA, 120 bp, Homo sapiens
tctcgcagagctttatttctctccctctaaaatgagagcttagacacgctcaaaacccctgctggctgtagaacgccaggttcttgcagtgaggaagggctagcgtctgccgcggggtgg

SEQ ID NO: 21389 - DNA, 120 bp, Homo sapiens
caccgtgttgctgctgcagtgaccactgctgagggatcctgtccctttctttgctcatttgttgcacttcctgcttcctgcagctgcccctttgtgcaggagacctgatggctatccatg

SEQ ID NO: 21390 - DNA, 120 bp, Homo sapiens
tttcgttcctctgatatcacacagggaggagagaatggaagtttcccagattcaggacattcgctgtatttgactcctatactaactcaatttgtgttttctgtgctttgcaaaagcagt

SEQ ID NO: 21391 - DNA, 120 bp, Homo sapiens
aaacgaatgagctgcttttaaatcaacttacttatcaacatgaaattcaaggagaagaataaatttcatatacattctcttgaaaatttactgtgatggcactaagtccaccaacaagct

SEQ ID NO: 21392 - DNA, 120 bp, Homo sapiens
aagcggttttatagcccttggcttgaaagggcacgggaaaagtaaataagcctctgcttgcttagagcacagccaaagctgattgtatttccctctagttgttaacacctgacaggacaa

SEQ ID NO: 21393 - DNA, 120 bp, Homo sapiens
cttcgggttaaaggttcatggactcctaggctattatttcattaataagattatattaatagatacatctcttatctctcaatgaggtcccaaaaggttttcttgggggagatggaattt

SEQ ID NO: 21394 - DNA, 120 bp, Homo sapiens
cctcggttaacattttaatagctacattttacagagttacttagggaaggaactattcttagggtaatatttgagaaatttgggattattaacagaatttgaattaagaagcctcatcat

SEQ ID NO: 21395 - DNA, 120 bp, Homo sapiens
aagcgtgagccactgcaccgggctgacttaatgtttcttaaggattcatcaactatccaaaatagctgggttggtgtttcattagtgaatgtagcaatcatttattcactcattaagatg

SEQ ID NO: 21396 - DNA, 120 bp, Homo sapiens
ggacgattgttttcttgcctctgggacctcaccagacttggaggtgtggccaaagccatgtgccgtctgaagtttgtgtagaggccctgattgaggtgctgagaataactgcaagctagc

SEQ ID NO: 21397 - DNA, 120 bp, Homo sapiens
gcccggggggcaagacgcattctctctgaccaaggcagccaactccaagcgcagagcaaagtagttgacttcacgctgtgggctggcactgtgggctcttgttgcagtggcagcgtgatg

SEQ ID NO: 21398 - DNA, 120 bp, Homo sapiens
cagcgttacagtgttaagtaaaaagctgagattttaagctgggaatgttgccaaagccctattctctccagtgtttctctctgttcctgagggcttgtcctggtggagttacttatgatt

SEQ ID NO: 21399 - DNA, 120 bp, Homo sapiens
caccgggttttaggcactgtccgtgggcctttccagtatgttaggatgttcagtcttcactaaaagcctgcaaggctagcattatttgcccccattttagagaagaggaagagtgatcct

SEQ ID NO: 21400 - DNA, 120 bp, Homo sapiens
tcacgttgtgagtcatgcctttgtttactgggattggcactacagagacctgtaggacaaagggacttgcaatgtgggggaagtgactggtgaccagtgagcatagatggagaaagttac

SEQ ID NO: 21401 - DNA, 120 bp, Homo sapiens
cctcgtggaaaaggcatgcagccaggaaaccagaggggctctagaggctcgcccctggcttttgcccacccgtgtcagccttggcctcactgaagccactagcttggagaagtgtgagtt

SEQ ID NO: 21402 - DNA, 120 bp, Homo sapiens
tggcggccccctctccacagcactcagggacctgggtctggccagggctgtctcagaagactttgggctgggaagggagatgtcataactctgcccttcttttccaggctgtgaattttt

SEQ ID NO: 21403 - DNA, 120 bp, Homo sapiens
gatcgggattacatggcagaagggctcatatttaactggaagcaggtatgagcaataacatacatcaaattggatctatgtctctttgtaaagggaggccaaggagaacaacaagcagtc

SEQ ID NO: 21404 - DNA, 120 bp, Homo sapiens
tgccggaagctgaacacatattgatcttgcatgtttcagcaacagacatcaaatgtccgactgaaaaactcctactcagctatactgatctggtcacattgatttttaagctgtcactcc

SEQ ID NO: 21405 - DNA, 120 bp, Homo sapiens
ctacgttgatgccccattgagcatccccgacttcctgactcactctctgaacattgactggagccagtatcaggtgaggggcctgactcaagcattgagggcaggataagggagtggtga

SEQ ID NO: 21406 - DNA, 120 bp, Homo sapiens
cctcgtgtgtttgcctgatgggctggcttgtgcactcagatgcctttggccctctgtcctctcagaaaggaggaattgtgtgtccgttcaactatctcctgatttgctcatgtcccagaa

SEQ ID NO: 21407 - DNA, 120 bp, Homo sapiens
gaacgtgactcattcaaagatttgcatccaccagggggttctgtttccagaggacctcatagagtctgctattccagatctgggctttagttacttttacatttttccttttaaatgtgt

SEQ ID NO: 21408 - DNA, 120 bp, Homo sapiens
ctccgtcattgcacaccatggaaggggcctctagtcttactggaaacatctctctacccttagcccacacagtctgaaggctgccagcagctttgcttgccacttgcttcagacagaaca

SEQ ID NO: 21409 - DNA, 120 bp, Homo sapiens
ctgcgacctttcccatgtcctgttcctctgcctggctgccacctctcagcttcctcttgtctggctgacatactgcccttcaggctttggctcgagtgtctgcttcaggaagacttccct

SEQ ID NO: 21410 - DNA, 120 bp, Homo sapiens
tggcgagttggatgcctgcatctatattcccattaaccccctgggcacatccatcatggaattttccactgagctgtagtcactgatttagagatctgcttccctgaaatcctggaggac

SEQ ID NO: 21411 - DNA, 120 bp, Homo sapiens
ccccggctcacagccctgctccttccactgcaggaggaagagccactcatcctctccacagagtgtcctctggaaccggccacaaccctcagaggaccgcttgccttcccagcaggggct

SEQ ID NO: 21412 - DNA, 120 bp, Homo sapiens
tggcggaagccaggtcttccagctcctcttcctcaaaccattctgataactttttcaggatgggtagcagtcccctggaggtccccaaacccaggtgaggagctccaaagcccttgctgt

SEQ ID NO: 21413 - DNA, 120 bp, Homo sapiens
ggtcgggggccagcacctgagctagggtctcaagatggggttcctaagcttgcaggcccagtatttggaggatgggttagtgtttggtaataaagcaagggctgatttgtagagtggttt

SEQ ID NO: 21414 - DNA, 120 bp, Homo sapiens
cctcgaaccctagcataatgcaggggaacccagaagtgccgtggctgttatgtgataggtggggaatagggactgcctccacttgttacctttggcagatcccagcctcctaggcgcacc

SEQ ID NO: 21415 - DNA, 120 bp, Homo sapiens
aaacgatggtgactgcacacctggaaagggagcagctcagccaggatggccatgccagggccgtggctgaagggcgctgcaggaatggtgcctcctgggtgagtttaaagctgagcacag

SEQ ID NO: 21416 - DNA, 120 bp, Homo sapiens
catcgaaagaatcctgtgaattgctttgtgttctaaagttttgagaatgtctagcctttctggagtgaataaagcagcgtgggacttcaggcccttagtgaattccagggaaaaaggggc

SEQ ID NO: 21417 - DNA, 120 bp, Homo sapiens
aagcgggaggcaagtgggcgttccagactgcactgcccacaggggccccatgtgctcacccctgcgtgaactcttcagctcagaacactgcctgagtgctggagctgagcctgtgaaacc

SEQ ID NO: 21418 - DNA, 120 bp, Homo sapiens
caccgccacacgccgtctggccccatgggaggtgtggtggaagtggtggggcagagatggggccagacagacaagcccatgtgccggtgccccgtcccatcctgtgtgtgcatgcctgct

SEQ ID NO: 21419 - DNA, 120 bp, Homo sapiens
ccccgcagggccagaggtggaggctcatctcaggaagctgggcctgggctatcgtgcccgttacgtgagtgccagtgcccgagccatcctggaagaacagggcgggctagcctggctgca

SEQ ID NO: 21420 - DNA, 120 bp, Homo sapiens
ctacgagagtcctcatatgaggaggcccacaaggccctctgcatcctgcctggagtgggcaccaaggtgaggccccagggggtaggagctgccctctctactgacactaagaggagagca

SEQ ID NO: 21421 - DNA, 120 bp, Homo sapiens
tctcgacttctttctcttcaagaacccagggctattgggagagcagcccgtgtcccacccactgtcatccagaagtgaaaagctggggacagtttaggccctagatagtgctgccacagg

SEQ ID NO: 21422 - DNA, 120 bp, Homo sapiens
tcacgtgcccagaacatctcggaagtcgtagatgtctctaatgtcctccgcctgcttccacctggggccttccactgcccccagcatggcccactgccccccgaccacagccagggctcc

SEQ ID NO: 21423 - DNA, 120 bp, Homo sapiens
ccccgccccaccctggggattgctggggtgtctcctttccctcctccttcccccgactccccggcctctccgaaatcaggtttccagcagcctgggcttccagcaacatctcagccacat

SEQ ID NO: 21424 - DNA, 120 bp, Homo sapiens
ttccgtcaccccaaaaagttccctcaagcccttttgtaatcagtcctctccttcccaccccagacaactactgatttttcccccctgtagttttgcctttttcagattgtcatgtaaatg

SEQ ID NO: 21425 - DNA, 120 bp, Homo sapiens
catcgctccactcatttatggcagcatggagatgttccctgctgcacagcagctctaccgccatggcaaggcctaccgtttcctctttggtttttctgccgtttccatcatgtacctggt

SEQ ID NO: 21426 - DNA, 120 bp, Homo sapiens
catcgaatgaaaggacactagtacagcggttccaaaatcccttctggtgattttagcagctgtgatgttggtacctggtgcagaccaggccaaagttctggaaagctccttttgccatct

SEQ ID NO: 21427 - DNA, 120 bp, Homo sapiens
cttcgtccttgcctctactcggtcattctccccatttccatccattaccccttagccattgagactaaaggaaatagggaataaatcaaattacttcatctctaggtcacgggtcaggaa

SEQ ID NO: 21428 - DNA, 120 bp, Homo sapiens
cctcggtttatagggatttacaattcagtagaaacttgttattcatgtgaaacagtgaacataatatctaatgatgtggagcaagtacattaaaaacaggaaggaagagatctgtgatta

SEQ ID NO: 21429 - DNA, 120 bp, Homo sapiens
aagcgcatgtctatgggagacacaagttccagagtgtgctgatgggtggatcagatctgcagtgtgtttcaggagtaggaggggctaagaaatgggtgcgtcccccaacctgatgctagc

SEQ ID NO: 21430 - DNA, 120 bp, Homo sapiens
tttcgggcagggcggggccagggcaggctggggcgagggctcctgctggtactgtgttcgctgctgcacagcaaggccctgccacccaccttcaggccatgcagccatgttccgggagcc

SEQ ID NO: 21431 - DNA, 120 bp, Homo sapiens
catcgacctctctgactctgctgggattggctttcgccacctgccccactggaacacccgctgtcctctggcctcccacacggtaaggtgctgctgccaggtagggacacctgcctggca

SEQ ID NO: 21432 - DNA, 120 bp, Homo sapiens
ctccgcagtccctgtgctctggtggcagctttgatgtgtcctctacctagtctcaaaggggtagccaaggtcctttgtgctgagggcctggacagggtggagctgggaagataagagcca

SEQ ID NO: 21433 - DNA, 120 bp, Homo sapiens
agtcgcatttcctgccccattgctcctccccacgcccactatttttgcagatgcctagcaagccctccattctaattttcagttcccaacccgggaagtagcacaatatcaaggaaaaat

SEQ ID NO: 21434 - DNA, 120 bp, Homo sapiens
tcccgtgtggcctcagactgtgcacctaacccctccaactgaccctcagtttctgaggggtagtagcatagtagaaatgattgtacactaaaggcagtgttgcttctgatctgtagagag

SEQ ID NO: 21435 - DNA, 120 bp, Homo sapiens
ggccggagttacaagcgccaggaatccagacggtgtttggagagggggggcggcgggggagcccggtaattagtgtaaaccctttgtctgcctttgatacccacagcttctccccgctgc

SEQ ID NO: 21436 - DNA, 120 bp, Homo sapiens
ctgcggcttcctccgcctggagcgcgggcggggagggcctgtggggagggcggccagacccctgatccccgcggcccgggaccggggagggcggtatctcccagttccacgtgttagtga

SEQ ID NO: 21437 - DNA, 120 bp, Homo sapiens
tgacggcgcccccaatgtccccaggtccggacaggccgagatgacgccgagccccctgttgctgctcctgctgccgccgctgctgctgggggccttcccgccggccgccgccgcccgagg

SEQ ID NO: 21438 - DNA, 120 bp, Homo sapiens
tggcgcccagcccggccagcctggcctccgccagcgccgcccccttcccgcccggccctgaaccctgccacagtgcccgcctggcacgcgccatgccccgcccctgccgccccgctcgcc

SEQ ID NO: 21439 - DNA, 120 bp, Homo sapiens
caccggggctcccctagctggctggaggggttcccctcatgcgtgcttgctggccaggtgggctttagtcctggctccccaggacatgctcctggtcttgcaaacactttcatactcgta

SEQ ID NO: 21440 - DNA, 120 bp, Homo sapiens
aggcgcctgggaggctgctgtgaaggcagggacgcctcacctgaaataaagtctctgtgtgcagcccggcagtgcctcagctccgcctgcagtgaaggtgaggattctcctgcttcacgt

SEQ ID NO: 21441 - DNA, 120 bp, Homo sapiens
gagcggtccagctcagttccatcccccaaggcgcctccccccaccccttccccccttcctcccttcctcctctaatgagaacacattaaacctttctcaatgccctgatgtgctcctaca

SEQ ID NO: 21442 - DNA, 120 bp, Homo sapiens
gtccgaggatttctaacattataaagagagagaaaatgctttctagacagctcatccaacccctccctggcgctcagcagggatttaagtgtgtctacttctactgaaagtaaatgcacg

SEQ ID NO: 21443 - DNA, 120 bp, Homo sapiens
ctccgaatcttactcttacactgtagacattgtcagaatttggaattgtagaccacacacacatagtttatgctctcggtttataatacctttacattttatttcctcacacatattgcc

SEQ ID NO: 21444 - DNA, 120 bp, Homo sapiens
tcacggagataaaggaaatgtttaacaaagctaggaaagctggaagtccaaattaatttcaggaataatttcatcacttaattcctattttgtttttatactttctcaactgtgtaggaa

SEQ ID NO: 21445 - DNA, 120 bp, Homo sapiens
agtcgtgtggcctacactgcatttcaagtttgtgtgtactccagcacacgttagcccatggtggtgaggcttgctgaaactgaggttccgactgctaggatttgctaggattggcaattc

SEQ ID NO: 21446 - DNA, 120 bp, Homo sapiens
atgcgctgtgtagctaagtagtaagcttacattaaaaacgggattgtagagtgagtttgcctgagaatgcctctccaagaccagcctaggaagtgcaaatccctcccattttgtcctcag

SEQ ID NO: 21447 - DNA, 120 bp, Homo sapiens
cctcggtgtgtgagtcacattgcaattgcctacgatatgcatctgcacggattccttctgcttcagcagggaatttcaagctcctgcctgcctataatgaagaagaaaattagtgcgaca

SEQ ID NO: 21448 - DNA, 120 bp, Homo sapiens
caacgtgtccggatgctgaaaagctggcagccagcaaaacagtagtgcatttggctaattttcttttccaggctttttactgtaaagaaaattggcctccatggattaaaaatatttcaa

SEQ ID NO: 21449 - DNA, 120 bp, Homo sapiens
tgtcgtgggaagtttcctgtgaaaatgtaaacaagctttgtgtttattttaatcactttttcctcctgttttcgggctgtagacaaccccagcccttactcaaattctggtggttagagt

SEQ ID NO: 21450 - DNA, 120 bp, Homo sapiens
gaacgtgtgggaaggcctgctgcttctgagcctgcaggtggacttgaacaggggaaacagctggaaatgacagatgagccagcattcacaaagctttattggccccttgcctctcctgga

SEQ ID NO: 21451 - DNA, 120 bp, Homo sapiens
acccgtttcttcctcactttttttcagttggtttatcataaaaatccttccactatgggtaattctagcttatctttgagtcctgcctgattccactgcccagcactcatcggctgtgta

SEQ ID NO: 21452 - DNA, 120 bp, Homo sapiens
aaacgttacagaagactttctgaaagacttcttgaaatctactgggaattgagcccattttgccctcctccatcctccttcctgctgcatatagagtggtagtaatggtcagtgtgccaa

SEQ ID NO: 21453 - DNA, 120 bp, Homo sapiens
tgacgaaagaattctagacaccagatggccatgaatctatcatactggctagtcccactgctgacttctctgatttcttttacttgaaataaaagtaaactatggagttatagtagcaaa

SEQ ID NO: 21454 - DNA, 120 bp, Homo sapiens
ctgcgagaatgactaaaaataacatggaagaagatttagagctctgcagcgattgaaaaatgcaatatcaaaatataaaatgtggaagaaaagcctcttcttaaagctattgtaacttgc

SEQ ID NO: 21455 - DNA, 120 bp, Homo sapiens
ccacgtagttcaaggattatgtgagataacacgtggccccatgaccactggagcacatgggttaatggagttaggggaatggcctacaactctgcatggccgtcttctttccccaaactc

SEQ ID NO: 21456 - DNA, 120 bp, Homo sapiens
gtacgggagatgacagatgatcactgcacaaggctgtcattcgaggtaaggttgggaagaggggtgacttgattgggctcatgtacatcttaggataatcatgttttcatttgaacacag

SEQ ID NO: 21457 - DNA, 120 bp, Homo sapiens
ggacgccaggcctgtgaaacctgctaaaacaggcctggtgagtatccagggcacagcatgagagaatcaaaaggtggacatccccagtgagtcaggctgacagaaaaggacagctggtca

SEQ ID NO: 21458 - DNA, 120 bp, Homo sapiens
aaccgtgtccctaacttgtcatatactcgaaattaagagtcatgactttgaccaactcagacttcagtaaggtgaccactttctatattggaactcaaagattccattaaaaagacggaa

SEQ ID NO: 21459 - DNA, 120 bp, Homo sapiens
gtgcgcatcaaaaagaactcccctccaacctcctgttagcatttgcctcggttttagctcagcaaaggtaatattcttgtgcaagcagagaaggaaaggtgagtctatatccttttggtg

SEQ ID NO: 21460 - DNA, 120 bp, Homo sapiens
tcacgacttctgtgaggccactataagctcccagagcatcagtagaataactgggccctgttgccatgacagtgtcatctcgagcagcggccgcactcctgcagaacctacagtttgaac

SEQ ID NO: 21461 - DNA, 120 bp, Homo sapiens
ttacgacaactctggggtcttcaggttcatacctgaagtttgtgaactctacagtgaacgtggctcacttgctctctccctctggctccatttcattgagttacttttccagcattaagg

SEQ ID NO: 21462 - DNA, 120 bp, Homo sapiens
ctgcgtctgatctcttgatgccctgggagatgtgaaacacttacaaagagccagtattgactaaagcctggagatttcactttgaaacggatagtgtctggggtgaattaatacagcaca

SEQ ID NO: 21463 - DNA, 120 bp, Homo sapiens
catcgtgagaaggagatagctccatagaggagctgacatttagtgtgggctccagccatgcccagccaaataagcagtattttctggcagccccagtgagagtcatcaccagttcttttg

SEQ ID NO: 21464 - DNA, 120 bp, Homo sapiens
agacgccaatgtttcagaaattatgatcttcaaaggaggagaaatagttcaaccacaaggagagtggtcagaaatttgatatcctttctgtgagagcacaaggagaccccaaactgccaa

SEQ ID NO: 21465 - DNA, 120 bp, Homo sapiens
aggcgttgctgggactgaagtttccagaaatctttgaatggctcatttattttactggggctaaagttgacggggtaattatcagggcaggctgtggatttgattgctgttcgggcaagt

SEQ ID NO: 21466 - DNA, 120 bp, Homo sapiens
gtgcgtatgagtgtgcatacatactgtgtgtatgtgtgtgtgtgagagagagagagagtgaaagagaaagctgaggagtaaggatggtctatctctctttgcttttaaatccaatttttc

SEQ ID NO: 21467 - DNA, 120 bp, Homo sapiens
tttcggtgtgctaaaccctacagtaaggatgaatttctatttcacctgtaactcaagcttccccagtctaacaggattatattaatgggaatagccaaaatatcagagcccccacccctg

SEQ ID NO: 21468 - DNA, 120 bp, Homo sapiens
tctcgccaaccacccccagcaaacccaggcatgctttctgcattcttgctgcactttgactcaccttctgtgcctgttcttgagttcctcaaagacattgctggcatcttctccattttc

SEQ ID NO: 21469 - DNA, 120 bp, Homo sapiens
ctgcgggtgttaaaggtgtgaaattaagacctgacaacaggagccactaacgcaccagctttgaaaggccactaagaggccagccatggtgcctcatgtccatcatcccaacactttggg

SEQ ID NO: 21470 - DNA, 120 bp, Homo sapiens
tcacgttttccagtctagcaaccctggactgatctccacgatggccagtagcagagaccacctgctgtgccctgtgactcccggccacagaaggctgctgcacctgggtcctctctgcct

SEQ ID NO: 21471 - DNA, 120 bp, Homo sapiens
acacgtaagactgggggagcgtgtctgtttctgtggacacactgaggtgcatgactgcacatgaggggtggggctgtctcctggcaccgagtgcccgtctatgctggctgggttttgaga

SEQ ID NO: 21472 - DNA, 120 bp, Homo sapiens
atacgaacagtctgccctcagcagtttcagtttgggaccaagccagctaggaataggcagttgcacaacagctcaaccactggggcctccgctctgagtcacctcctagagcctgccctg

SEQ ID NO: 21473 - DNA, 120 bp, Homo sapiens
tcccggcccgacatacaagttcactttctgcctcctcttccccacacagaagctcccagaggacgggcactgggcgtgtttggcttactccgaattgccagcccccagaacagtgctgag

SEQ ID NO: 21474 - DNA, 120 bp, Homo sapiens
ctgcgtggctgactgtggtgggcggaagtacctgagccttctgcgtctggcagggccgtggcctggctcctctgaagggcacttgctcctgattccagacaactctaaaatgcactgttt

SEQ ID NO: 21475 - DNA, 120 bp, Homo sapiens
accgtgacaccctgtggctgcccctgccgcgacccacctgcgccctccccgtgagcgccccctgcccccaccgcatccccggaaccgcacaccgcaggcgctcggcaaacattctggtgt

SEQ ID NO: 21476 - DNA, 120 bp, Homo sapiens
tcccgacgtcagcacgccccagactgggaagcgccgccgtgcagctgtgcggggggctccggcgccgcagccctcctggtggagcaggaggcgaggagggggctgtacttacccagcagc

SEQ ID NO: 21477 - DNA, 120 bp, Homo sapiens
cagcgaagaccactgcgcaggggggcggaacagggggtactgcttggggaaggccgtctggctccacttgcccgtgaaggtgatgctgtatttggccagggctctggcggaacagatgga

SEQ ID NO: 21478 - DNA, 120 bp, Homo sapiens
ggccggcggcgccgagagtggccaggaggagagcgcagagggccttgcccagggcggcggccgggctggggttttccatcacctgggagcacagaggggagcagccgcgcgctggcaccg

SEQ ID NO: 21479 - DNA, 120 bp, Homo sapiens
cgtcgtggcagcctcggggtggaaagccgagagggctgcggcactttgggctctgaggacggccccgagcacccgcgaccccctccctgctccgcaaagctctcctgcggtgcttccgag

SEQ ID NO: 21480 - DNA, 120 bp, Homo sapiens
cagcggaatggacggcgcggggttagatcgcccgtgcgcctgcgagcgaccaggggtaacgggcaggttttcagtccgagtccctgcagcttgccgggccggtctgggtgcggcctccgg

SEQ ID NO: 21481 - DNA, 120 bp, Homo sapiens
cttcgccgtcgcagggacccggggccttggccgactggctgcccccgggactagacccttaaagctcggtcgcagccagtcctgggggtccctctggaggtgccacaaggttctgggccg

SEQ ID NO: 21482 - DNA, 120 bp, Homo sapiens
ccgcggggaaagtgcaggaggcccgggccctctctgggtgtcccgggggcacgcagtactcacccggcaggagcagcgggagcgcggccggcagcggtcgggtcccagccagagcccgga

SEQ ID NO: 21483 - DNA, 120 bp, Homo sapiens
tagcggtctgcactgtggccagagggcatttgcaagccatccctcctggagggaggtcagagtgggctgagggtctggggtggaacgcgcagggagtcaggaagagccacagaaaggggg

SEQ ID NO: 21484 - DNA, 120 bp, Homo sapiens
tggcggtgctgcccagccaggggctgacatgaacgaaggctgtgcacagcctgacccggagccttccagtcctgagatacagccacctgccgcccagagaaaactgaggccctgccctgc

SEQ ID NO: 21485 - DNA, 120 bp, Homo sapiens
agccgcacagcagcatggagccactgggctgagagcacggggccaagagaacctcccccagacagacaaggcccgtcacccacaggttgaaacagctcctccgacgacagcaccccagac

SEQ ID NO: 21486 - DNA, 120 bp, Homo sapiens
ccacgagccgatacggcaccttggacggcagcatccctgtgagccagggagccaccgcactccacggggcctgcagggccgcatcacagctcagaggacacagcgcaggggctgtgatca

SEQ ID NO: 21487 - DNA, 120 bp, Homo sapiens
atccgtggagccgcacgtttccctgtttgttcagcgagcacatgcacacaacctgtgagctccaggaacccccagaacgccaccttcctggctcctaccacatgtggggtatcagggcta

SEQ ID NO: 21488 - DNA, 120 bp, Homo sapiens
acacgacaccactggagagacagcctcggatgcctctgaggctcctgccagccacgcagacagggcagcccaggagcccccacaccacagacgggcggcaggtcagggtggcacaggagg

SEQ ID NO: 21489 - DNA, 120 bp, Homo sapiens
gcacggtgacacgggcggcagggaagagtggcacgggagggcagggtgacacgggcggcatagcagagtggcatggacgggcagggtgacacgggcggcagggcagggtggcacgggtgg

SEQ ID NO: 21490 - DNA, 120 bp, Homo sapiens
caccgcccacacctctctcagggccatagccccaacgcctccccaaccaaaccaactgggcttccctcagggccatcctcactctccttcaacacccgtgagaactggtaccacctgggg

SEQ ID NO: 21491 - DNA, 120 bp, Homo sapiens
ggccgcccagagagacaactcaaggttaacgtttggctcggcaaagagccaccaagaaatttctggcttcacagggaaaaaaacgaacatttccttgtgggagataccacatggaatgtg

SEQ ID NO: 21492 - DNA, 120 bp, Homo sapiens
ggccggaggggcttctggaaacgatggtcagtgacgcaggtggcaccttgtgggttaccacgacccagtgcgggggagagcagtgggctccggccactgcagctgacaatggaggacccg

SEQ ID NO: 21493 - DNA, 120 bp, Homo sapiens
tcccggcacagagctcttacccacaactaccaacatccagcgaccaccagaggaccctggcgctccacccggcgctccgaccagcgttcccttgggcgatgcagttcaaccacagaaccc

SEQ ID NO: 21494 - DNA, 120 bp, Homo sapiens
acccgtatgacactgcctgctgcctctaccacctcctggccacccctgggccctgggccaggcctgcaccgtcagcaccacctggatggagccctctccagcccccagtggagtgggaaa

SEQ ID NO: 21495 - DNA, 120 bp, Homo sapiens
cagcggactggatggcaccacctacctggaggacatcttcccactcacccaccagtctcctctggaaacacccgcacaggcacacccagaagtaatgcttcacaggttctctaggtatcc

SEQ ID NO: 21496 - DNA, 120 bp, Homo sapiens
atacggtcatgtgtcacttacatggaaaaactctcagaaatgcatcgttaggcgactttgcggtgtgaacatcgtggaatgaactaacaggagccagatggtgtggctgctgcacgcccg

SEQ ID NO: 21497 - DNA, 120 bp, Homo sapiens
gcacggtctgttgttgaccaaaatgtcgttatgtggtgtgtgactgccacgttttctttcttcattcccctggtgatggacatgtgggtggcttctgcctcgtggctgccatgaacacag

SEQ ID NO: 21498 - DNA, 120 bp, Homo sapiens
tctcgtggcctactggggactcaggagccttgtgcctaacgttctgaggaattgcctcgctgctctacacgctgcgccgggcacgttccctggcactgcacgcgtgtcccgctgctccgc

SEQ ID NO: 21499 - DNA, 120 bp, Homo sapiens
tgccgtggcatagctttcggtgttgagtgatcgccgtcctaacgggcacgaggtgatgcctcacgtctgcacttgtgtctcctgagcagtggttggtcgtgtggagcatcttgtcatgtg

SEQ ID NO: 21500 - DNA, 120 bp, Homo sapiens
cagcgctgctgggaaaccttgtaccgccctagggctgggaaacaaccttcctgggtgatggggcccctccatcacgccgaaggccaagccgctgtgtgcgccaccgcatcccaagggctg

SEQ ID NO: 21501 - DNA, 120 bp, Homo sapiens
ccacggggggcggggtgcagatacacaggttctctggagtcagcacagggaacacggggagaacatcttaggcccagccagggccttgtgccagccctccctcccacaccggtggcacag

SEQ ID NO: 21502 - DNA, 120 bp, Homo sapiens
acccgtcttttgggctttcaccgtccctcagtacctgtctgcaaaacacagggcgcttgccagacaagcccagcgctccttgaaacaccgccccatgctgttacccctttcgtttggaaa

SEQ ID NO: 21503 - DNA, 120 bp, Homo sapiens
ccccgtggggtcgatcggttttccaccccattttacagacagggaagctgagcccgggagaagctgtgtaggccccggcctccttgtccaggcctggcctcctgatgaatgtaagtgcgc

SEQ ID NO: 21504 - DNA, 120 bp, Homo sapiens
acccgtgctatggccgcgcccagaggctggcgcctgcttcccagaggctggcgttctggcccctgtgggccctggctgcactctccttccctgagaaggtcaggctgaagcagggtcctt

SEQ ID NO: 21505 - DNA, 120 bp, Homo sapiens
tcccgcccccgtgagccgagtgtgtgtgtgactcaccagagcccgggagcaaggacacaggcagctttcattttcccgagcccagagttagctttctccgcagagctcgggggcaggagc

SEQ ID NO: 21506 - DNA, 120 bp, Homo sapiens
ttccgctctccactgaagggggcgtttacataaagtctgcgtgacccctggtgcctcaaccagcttcctgagcactgcacccagtgctcctgctcagtaagaaccaggcccacaacctct

SEQ ID NO: 21507 - DNA, 120 bp, Homo sapiens
gaacgtcctatgtgggacccaggggcaaacaccagtttggctgccccaggagaagaggccgccctggcccagctccatccatctggagagcaacacagacccaggacccccggcccgcat

SEQ ID NO: 21508 - DNA, 120 bp, Homo sapiens
ggtcgacagatgtgtgtctctatctggcaggcagccccggggacccagcagaaattttgcccctagcctagctctggaatcgacctccaggtatcttgtgaacctgaggcctcctcctct

SEQ ID NO: 21509 - DNA, 120 bp, Homo sapiens
aagcggcccgaggcccaccatgctggctggcagctcccaagggcaggtctgtctgagcctcattactgggagtgacctgggttagacgagaatgggaagaggcccacagcactgtgtttt

SEQ ID NO: 21510 - DNA, 120 bp, Homo sapiens
gagcgtgttgatgagtgtagattttatagtaaagaaccagtcattctagaaagcaacgacttgcttcagcagaacctccaggctctcgtttcagaggtgaggacacgcctatggtgctgt

SEQ ID NO: 21511 - DNA, 120 bp, Homo sapiens
gctcggccccgacagtgctgcccgccaggtgcccttcccgcacgcttgctgcagtcagccctgcaccgctccgccctccgtcctctcaaggtgcgtccctggcagccggagatgcacatg

SEQ ID NO: 21512 - DNA, 120 bp, Homo sapiens
gagcgggggcagtggatgatggccatcgtcagtcacgggacacagggccagggcaattcactcacagggggcttgggcatccctttccagggtccatggcaggcccaccctctcctgccc

SEQ ID NO: 21513 - DNA, 120 bp, Homo sapiens
gggcgccctggatgctaagccaagtcccgatcagctctctgccctggcaggtccctcccctgggaagggggaccagctcccagctctaccacctggaaggtgggagggggttagatctga

SEQ ID NO: 21514 - DNA, 120 bp, Homo sapiens
tcccgactctcagaaccccggggtggggtcattggccagcagacccgccccatgagaagcatggcaggccatgagcctggctggggcacgtctgcaggctggaggtggagggggctccgc

SEQ ID NO: 21515 - DNA, 120 bp, Homo sapiens
ggacggatcgtaggtgggtggggtgcaggagccccctttttacaagctgacgtgagcctctcatcccaatcaccctgtccctgggtctcgagccaaggagccttggactccactgtccca

SEQ ID NO: 21516 - DNA, 120 bp, Homo sapiens
gcccgtcccgtgggatggcgggtatgggaaggccaagaggccacggaggcaggggtcgctgaccgtggagctggagctgttccggggccctggacctgccgggctggggacagcctctgt

SEQ ID NO: 21517 - DNA, 120 bp, Homo sapiens
tgccgggggtgctttggcggctgagcgggtctcttggtgcgacgccgcctcccgcctcccggagccccggcccccaccccggcacacacacaactatttaattttgctctggcaaggaat

SEQ ID NO: 21518 - DNA, 120 bp, Homo sapiens
atgcggggagattgggccgccacaggctgcacagcacattcagaggcctcacaaagccggctgcaatcgactcggcctgccattatccattcagcgggcgtaatgaatgagcgggcgcag

SEQ ID NO: 21519 - DNA, 120 bp, Homo sapiens
acccggcccagataacggctgaaaggagaaaattaaattttgcttttgttgaaacattatgatttatgtatttgtaatgtaggctgtggtgggcgactgggggaagcctgcttcctcagg

SEQ ID NO: 21520 - DNA, 120 bp, Homo sapiens
gcccgccggccactaagcgctcagcccactcctctgtgggcaggaacaactcccccacctgctcatccgcaggaggagccgggggctggcacacggaccccgggcaggcgcggccggccc

SEQ ID NO: 21521 - DNA, 120 bp, Homo sapiens
ggacgctgggcttggctctcggagcaggcagggggcggcttctgtgtggcttggacccaggacctggcattctgatcaccccgtgccctgtctggacctgtaaaaataattaacttctcc

SEQ ID NO: 21522 - DNA, 120 bp, Homo sapiens
acacgtgagaacatcccctgtaatttatagcctagcggtcctgtcccttaatgcagcaatcagcgcgggcttatcacgttgtggaaggtaataaacttgcttcctcccagctcgcgggct

SEQ ID NO: 21523 - DNA, 120 bp, Homo sapiens
gtgcggcaccccctcagagggccgatggctggcgtagaggagtgggcagggggctcccctacaaacggaccaccagggagctgagggcccctcccattacaggacagggcagtgcctggc

SEQ ID NO: 21524 - DNA, 120 bp, Homo sapiens
tggcggcccgaggcccgggtggccgtgtggctgcagggaggccccgccccaggctgtgtggtgagagccaaggacaagcctgggtgacagactgggcccttcccggcgtgctgagggccc

SEQ ID NO: 21525 - DNA, 120 bp, Homo sapiens
gtgcgtgcccagccgaggacccccgagtgcagctgcagtgctggacctcacctcctcacctccgatgctccttcagagcccgaatagccccccgggagctcacatgtgacgccttatcac

SEQ ID NO: 21526 - DNA, 120 bp, Homo sapiens
ggacgggcgcattcccacacagatggaaaaactgaggctcacagaggctaagcagccccagggcaccagtgtcaagccgactcaggggtgtccacccccacactgacccctgcctgcaga

SEQ ID NO: 21527 - DNA, 120 bp, Homo sapiens
tcacggcatacatgctgagcatgggagactcagctgtgccaccatcagggtgtctccctcgggcctctgcgtccccctgaccgccgtcctcctggggcacaacggtgtctccctcgggcc

SEQ ID NO: 21528 - DNA, 120 bp, Homo sapiens
gaccggctgtcctcctgggggacagtgcccatctcagctgccatctgttcccagggtccagcacaacctagatggagccctctcctcccgctcccctgctcccctccagggcccacctga

SEQ ID NO: 21529 - DNA, 120 bp, Homo sapiens
ccccgacaggcagaagcagcctggtctctgctttgagatgctggatccaaccatgcctgaagcaggcaggtcacagcccacttggctgtgtgagcaggcagttgcccgtgatgctttgtg

SEQ ID NO: 21530 - DNA, 120 bp, Homo sapiens
gtgcgggctcctgttaccagcagcacaggggcctggcagtgcctctgtctccctctggagccacatgctctccctttgtgagctggtggcacaccctcctcctgaggcataccagctccc

SEQ ID NO: 21531 - DNA, 120 bp, Homo sapiens
gtgcggctgcaccccaggagcaggaacgtggtggtctcagctcagtcaggcacccatcctggagctcagtgggccaccgaggttggaggtgggctacatcagcacctgacgcctgagggt

SEQ ID NO: 21532 - DNA, 120 bp, Homo sapiens
ccacggtgcctctgacagggcagatttgattgtacccattttccagttggggaatttgggccacagagatgaagtcaggtatggaggtccagagtgcctgcgggaaccaagatctgaact

SEQ ID NO: 21533 - DNA, 120 bp, Homo sapiens
tgacggccagcggcacatggtctctctcctcatgagtcaggagaaggcccttggtccctgcggcagaggcggaatctgctttgggggcagattctttgttctgctggttcatcactgtca

SEQ ID NO: 21534 - DNA, 120 bp, Homo sapiens
ttccgtggggccgggcgcacgtcggtggtgtgggcaccgccgggcccctcctgggaacagacctctcccctcatcgccgaagcacgaggaggttttcgcacgcacagagggtgccgagcc

SEQ ID NO: 21535 - DNA, 120 bp, Homo sapiens
agccgagccacggtaatcttattaagagatttattttacgtctgatgctgcttcctccagtgcggctccatcccccgtggcagctgtgctggcgaacggggcctctgccagctgggggct

SEQ ID NO: 21536 - DNA, 120 bp, Homo sapiens
gctcgccaggcagagagccccatctccgtcctttgcctttctggtggatccctgcctgggctttgcctctgcagccccccgccccacaggttcacacctcgggtcttctccaccgctgcc

SEQ ID NO: 21537 - DNA, 120 bp, Homo sapiens
ccccgaggcagtgatgttgaaggtagaacagacaagacaacttggataaacaactacataaaaattttccttatcttgactttggctccagtccatgagtgagacacagtagaataatat

SEQ ID NO: 21538 - DNA, 120 bp, Homo sapiens
cctcgtgctttttgagtatgtacgtacctcctaaagctaaccagtgagtcatcagcagactacttgatgaagctagtgttgttacttttctctagggtgttcatctcttcccattaagga

SEQ ID NO: 21539 - DNA, 120 bp, Homo sapiens
tcacgagagctcattcttttgagactcatgtctgtgtcatcaacatccaataatattcattaagctcctgcatgccaagtactgctgggtttcgtcccttttaatgagtgtgacgtttaa

SEQ ID NO: 21540 - DNA, 120 bp, Homo sapiens
tgtcggtagtagccattagtgggttcttttatcttgattttgtaaatagttgctcctttacacaatagatgttcatgctccatgattccttgctaattacacttttgtcacttactacag

SEQ ID NO: 21541 - DNA, 120 bp, Homo sapiens
tgacgagaacccagttttttctacaacacagtgttgtgtgtgtggtgctctgttttgtgctgctcttggttaggtttttaaacaatgctttaaaaataagtaattgcacaaaacaacatt

SEQ ID NO: 21542 - DNA, 120 bp, Homo sapiens
actcgggctgtgcacttttaaatcaccttccatgagttggagaaggaacaacttgttttaatccttcttgcttttttcagatttattttcaacatagattcctctggttactgagggcga

SEQ ID NO: 21543 - DNA, 120 bp, Homo sapiens
tcacggaagctgtgcagctctttccaagtgctgcactggtggtttcatcgtgtggcatccacacagcgtgtatgtttcaggccccgaggctccggggctcctgctgcagcctccttgctg

SEQ ID NO: 21544 - DNA, 120 bp, Homo sapiens
tcccgtcaagggaccaacgtcttcattaattcaggatggcacctgctctggagccgactcctggctctgcacttgcaactctgggcaagccacttaacctctgttttcctctgtctaatc

SEQ ID NO: 21545 - DNA, 120 bp, Homo sapiens
gaacgcagaagcctagtagttggtatcaccagtgtctcttcaaaagggccccacaaaaggctgtccattaatttgtttcatacagtaagcgagcttttactgaatactccctctgttagg

SEQ ID NO: 21546 - DNA, 120 bp, Homo sapiens
aaacgcacactcatgcaagaatgtaaaattgtatttcactgaggcccctttataagcagagccatctttgcgaatttcttggggtgttaatgtaaacatatctttagaatatctcatcgg

SEQ ID NO: 21547 - DNA, 120 bp, Homo sapiens
cttcgatgctttctgtaaggtttagtcaccaagaagccagaacttttggtgaaaacagaatttataaaatgaaactgaaccttctcctttcttacaaaataaagatcctgtcagactcca

SEQ ID NO: 21548 - DNA, 120 bp, Homo sapiens
gcacgtaggaggggccgcgccagccgtcctcctggcttctcatcactggcattatttcagaagacagcctttgtcctaacagaagcactgggagcacgtaggaggggccgagccagccgt

SEQ ID NO: 21549 - DNA, 120 bp, Homo sapiens
ttccgcagtgtgaaactggcatgagcttgtagtctatggctgtcaagagctggtgataaaggcagacacagttctccaggtggcccttggtcatctccgcggctctgtccccaccattcc

SEQ ID NO: 21550 - DNA, 120 bp, Homo sapiens
ctccggcccctgcagcttctggcgttcctgagcctgctgtgctgctgctctctgagcttcgcactctgctttgtctgcgtgatctgtccctcccactgcagagcgactctcccctaatgc

SEQ ID NO: 21551 - DNA, 120 bp, Homo sapiens
aaacgtcccctcccgaggggagccctggttggttccccagcctctgttcaactcccctttttgtgcattcccagcaccccgtgcatgcttctggcatgacaggatcaccctggggtggct

SEQ ID NO: 21552 - DNA, 120 bp, Homo sapiens
acacgggctagagaacatatttagaatgtggagtccacaggggatgtttgtgtcatgtcaggatatcctgagggagaacagcaggagcaaaaaaatggacctgccctatttccagcactt

SEQ ID NO: 21553 - DNA, 120 bp, Homo sapiens
cagcgaggttctgttgctttaaatagcccagaaaagtgttgaggacccaactagtcaccttttttggctctgccctagtttcttttatcacattttggaagaactccagtaggccgactt

SEQ ID NO: 21554 - DNA, 120 bp, Homo sapiens
cttcgttctgttaaaaaaaaaaaaagaaaattacataaagcctccccaaaaatgaaagatcagcattctgaaggcaaatctgaaactgtcccctctgcctcctctgagacagccactttt

SEQ ID NO: 21555 - DNA, 120 bp, Homo sapiens
ctccgtgtctgctgtgtgtaacctgcactctccatccctgagctgtgaactgggcctaaaatgtttggcctgactttaatgcccctgttctttccaggcctgtcctctgctgaagtccca

SEQ ID NO: 21556 - DNA, 120 bp, Homo sapiens
catcgtttcctggggaaatgatcagctggagacttgtttcatcaagactgtaccacttctccccctctgaactgtcagccccacgagtcagggctgtgccctccctgttcacgatatagc

SEQ ID NO: 21557 - DNA, 120 bp, Homo sapiens
aaccgcaattacttttgcaccaacctaatatcagcagacggaattggtgtctcccgtcagcatgtatgtgtgttggaaatcacacatgaggcgcgcattcttatcataccatgttcacct

SEQ ID NO: 21558 - DNA, 120 bp, Homo sapiens
atacgaccagccctgaggcacttaccaggttctatactacagcttgctgccagctcagatagttttgacacaatcaagaaatttaggtaagtccacccctactatttcaataagaaaaat

SEQ ID NO: 21559 - DNA, 120 bp, Homo sapiens
atacgttttaagtagcagatttcctttacccatggaaattcaaatcaaacaaacttttcttgaaatattccttttaagttcacactgcacctaaggcttctacccctgctcctttcagag

SEQ ID NO: 21560 - DNA, 120 bp, Homo sapiens
cctcggcagcccaagcttgactacagataaaggcagagccaggcaacttgaagaggaagttctgcttaacttatggaaaagtattcaaacttctacaatagtacacaaatcactggggaa

SEQ ID NO: 21561 - DNA, 120 bp, Homo sapiens
agacgggcagaattccctttgttctaacccagacaggctggcccactggtaaaatgagctgtcaggagaactctttgctttgccagggaaagggttttctaaatccacctagaaatattg

SEQ ID NO: 21562 - DNA, 120 bp, Homo sapiens
ggacgtgatgcatatctattcctctacccttgggtggtttttttattggatggataacacggcaagtcagatttctgtttgtcttttcatgtcagtgctgtgatgaagcctctctgagct

SEQ ID NO: 21563 - DNA, 120 bp, Homo sapiens
tagcgagtggggctgaaggaggctgagctgcagccacccaggaaatgatggatcaataaaagctgcacatgggctgcccgctctgctcttcatagcagaagctgcttctgagggaagaaa

SEQ ID NO: 21564 - DNA, 120 bp, Homo sapiens
gcacgaatctcagagtctctggtgaacatgtcagtgcagccatctggttttctcagaaaaacagtgagctggtaattcccttacataaaaatcatatgaagagcaatgcagaaaggctac

SEQ ID NO: 21565 - DNA, 120 bp, Homo sapiens
attcgactcaggatgaatctaccctacatgcaatagaactgcaacttcagcgacacagagagtcaagttccctggctgactgcgactctaattgttccttcagagatggctaaagcagca

SEQ ID NO: 21566 - DNA, 120 bp, Homo sapiens
gagcggtcctgtcttttgtataatacctgacagtctctacagctctatgactgggaagcatctttttcacattttaatcagatttcccaaagcactgaattacacccagaaccagtgctg

SEQ ID NO: 21567 - DNA, 120 bp, Homo sapiens
ctccgcctctcagacattaacaggaacccttgattactaatgatttgtcaggtgatcaatgctggtgtgaggcaaagcagagggacctgctcaccaccactgcctgctcagggaaggaac

SEQ ID NO: 21568 - DNA, 120 bp, Homo sapiens
cctcgaagcggtcttctgcatcccaccttcagagatgatcaaatgcaaatgctggaagactctccagttggaataggatgaaggctgatttctcaactgcatttcttgttctaagtcaca

SEQ ID NO: 21569 - DNA, 120 bp, Homo sapiens
tgacgataggccaggaacgaggtggactatatttatttacgagaaggaaacctgatagagccagctgcccagtggcagactcagagaaggaaaagcagcccagaagaatgcaagttgagg

SEQ ID NO: 21570 - DNA, 120 bp, Homo sapiens
gagcgttctgacagctacaagggacccccagatgagccattctgggctagtcaaaggtgctcaagagtatctgctaaatatctgctagacacagagctcagaaccaggccctgtgggtgg

SEQ ID NO: 21571 - DNA, 120 bp, Homo sapiens
ctgcgtgaggctactgctgctgctgaggacagtgataaccagagttacagcagcagcggtgatgggcgccaggcactgtctacgcactctctccacattacctcaattcatcccaacaac

SEQ ID NO: 21572 - DNA, 120 bp, Homo sapiens
cagcgctctcaggacttttacagatgaggacacgaggcactagcttgcttgaggtcccacagcaagagagcactagaactaggaccaaacctctgcggtttgtgcttttaacctctgtgt

SEQ ID NO: 21573 - DNA, 120 bp, Homo sapiens
gaccgaaactgagcacctaggagtgccaggcgcaatgggaggcagccagctcatctgaagaaagcactttcccacacttccattattttatttgagagctgccagctgttcaaaggttct

SEQ ID NO: 21574 - DNA, 120 bp, Homo sapiens
ccacgtggcattcagctgtggcatgacacacacctgttcccagaccaggaaggaagacagctgcacgcccactgcacaggccatactgggctccggggatggagggcggccagagctcct

SEQ ID NO: 21575 - DNA, 120 bp, Homo sapiens
tcccggcttctcatcactggcattgtttcagaagacagcctttgtcctaacagaagcactgggagcacgtaggaggggccgcgccagccgtcctcccggcttctcatcactggcattgtt

SEQ ID NO: 21576 - DNA, 120 bp, Homo sapiens
cttcgtccctaggggatacgttccaagaccaccagtggaagctggaaacctcacatagtagcaatacctgcacactgtcttctcgatctgataatcgaagtggctgctaagtggctaatg

SEQ ID NO: 21577 - DNA, 120 bp, Homo sapiens
gagcggttttctaaaacattcatcagactatgtctttcccttgcttaaaagcctttcagtgattaccactgcacctgggttgagagctaaacttcttgccattctctctgatctacccct

SEQ ID NO: 21578 - DNA, 120 bp, Homo sapiens
cctcgcttacctcgtggcccattcctagctctttctcacctcagggccttggccttagctgttttctggaatgctcgtctcctggctctatgctgcctgggccttgaatcattcttcagg

SEQ ID NO: 21579 - DNA, 120 bp, Homo sapiens
caacgccttttgtgggacctagagttgggtctggcacttggtgactgttcaataaatgaaatcttattgagcgacgaatgccagaacgctggcattttcctgagcaatgagtaagcagac

SEQ ID NO: 21580 - DNA, 120 bp, Homo sapiens
aggcgtgttacataagatccattctgtctgagtgaattggttatgggagagagaagaggaagcagaacaagagctggtgggaagcaagtgagtgagaaggaagcttgtgcagcagcctgt

SEQ ID NO: 21581 - DNA, 120 bp, Homo sapiens
gagcggatccgagtgtttcaatgagctaaactagtcagcttcaagctgttccatagacagtaggtgtgaatccaaaatcatttcagacattcagctttataatgtttcttttaagaaaaa

SEQ ID NO: 21582 - DNA, 120 bp, Homo sapiens
cctcgctggtccgtttgtctctaaggctggttggttgtttgcatctgcctgagtagttcgttcatgggagtcagactcggatgaaggtttaacagtcattgaaggatcgtgaccacttcc

SEQ ID NO: 21583 - DNA, 120 bp, Homo sapiens
acgaacccaccttctgaaaagctgtcttttctgtaaagggacatcccgctcccaccccagttgtattagtttgcccaggttgccataacaaaattctacagaccgggtggcttacacaac

SEQ ID NO: 21584 - DNA, 120 bp, Homo sapiens
agacggccgccttctcactgcgtcctcacatggtctttcctctgtgcacacacacatccctgctgtctctgtgcattcaaattttctcttcttatgactccagtcagattggattagggc

SEQ ID NO: 21585 - DNA, 120 bp, Homo sapiens
tttcgaggacattaatttcatttccttcctttgatgcagcatagatcaagtctctctctttctttttctttttaaaagaaaaagggggcttctcctttctcattttattcaaagatacca

SEQ ID NO: 21586 - DNA, 120 bp, Homo sapiens
atccgttatttcaagttataataagccagtgtgattggagttgctcccaagagaagcaggccataatattttcactgtcaccatgatcacagactaagataagaggccaacatgctattt

SEQ ID NO: 21587 - DNA, 120 bp, Homo sapiens
actcgtggtgttaaatacaaggagaacaagtgaaaaacaaactaccttggcccccgccgcagagtacaaaacatccaaccttttctttttccaagccggccacgatgtacgtcaaggatg

SEQ ID NO: 21588 - DNA, 120 bp, Homo sapiens
cagcgcagagcagaaagcatgcccattcgaggtacttgttgtatcatttttaaatcaaggccatctttttctcagtggtaaacgtgaaatgtttttaaaggccagacttagcataaaaat

SEQ ID NO: 21589 - DNA, 120 bp, Homo sapiens
tgacgtggggagtcacttgggcgccatgccttaaaatttggtattttactataattatagccaaattggctattgttaggaaataaaatgcattttgatcttttttgtgtatgtgaatgt

SEQ ID NO: 21590 - DNA, 120 bp, Homo sapiens
gttcgggacctcatgcttgctgaattattcatgccatctttccatcatacatcttttaggggtggaacccattaggctgctattattaagcatgcgggtccaccctgtcctgacacagcc

SEQ ID NO: 21591 - DNA, 120 bp, Homo sapiens
ccacgccttcccctccccacttcttcccttccacctctgctcctgaaggaaaagtggggggaaaaaacccacagggaatttacataagtagcaaaagggagtttctcacattactggagg

SEQ ID NO: 21592 - DNA, 120 bp, Homo sapiens
aagcgattacttccaaggctgaatgagcaaactctttaggcagatggggaagtcttgttgtactcctgattttggggttatttcccttgtctttccatttcttcctgcctcctccaggct

SEQ ID NO: 21593 - DNA, 120 bp, Homo sapiens
gggcgcatatcctgggaaggcactggcctctttttagcatttgcaatttggtttttaaatgttgctgtatagcaggaaggcatgttaagaaaaagcgtgtgagataagatggattttttt

SEQ ID NO: 21594 - DNA, 120 bp, Homo sapiens
gaacgacctgcccgcagttttacgttgcataatggctggatggggtcctttagctgctgaattgctctcttatatcacagctgatcagaaatctggtggttttctctggggaagagtctc

SEQ ID NO: 21595 - DNA, 120 bp, Homo sapiens
agccgcctctgaaatgatgagaggggaacagattctggaattcccgagttccttatttattgctgagaccaaaaggtctgtgtgtggatgcatctctgtgtgtttgtgcttacttacgag

SEQ ID NO: 21596 - DNA, 120 bp, Homo sapiens
tctcggagcaaaaggacttttccaaagaagaacatcatctaccttgtgctcctgtcattttagccacagagagcagaacaaaccataaaaatcaaagctccagtcccccataagctaaga

SEQ ID NO: 21597 - DNA, 120 bp, Homo sapiens
agacgagaccaaaggccaggcttctggtttgagccatgactgggagaataatgtatcttttacctagaaccctggagaaagcagagtttgaggctgaggaaggagagggggaggagataa

SEQ ID NO: 21598 - DNA, 120 bp, Homo sapiens
tctcgcctgccccatccctctttttttaatcagtgagactggattatgattctgcttagaaacaatggtaagccatgtggcccccatatcaaagtaatccccaggcttcagtggcaaata

SEQ ID NO: 21599 - DNA, 120 bp, Homo sapiens
agccgtctccaaggaggccttgaaatggcaaggcttgcaatgtgatctgcagtacaagctcctgcctgggcatctcccagcactgagtattgtgggagatttgtcaaaaagaagggggaa

SEQ ID NO: 21600 - DNA, 120 bp, Homo sapiens
tttcggttttgttagcaaagacaagataagcaaaacaatctctatcaaattcgattaattcttttcttgctattaattcttttcttgctaattcatttagccgtgtttatcatgaaggct

SEQ ID NO: 21601 - DNA, 120 bp, Homo sapiens
agacgttgttgcacaataaggaagcaagtcatcctgatcaaggtcacctgtccgtcacatggcaccttgagagccacttctccttgggagtgggagtgagggctggtctgagtcacttct

SEQ ID NO: 21602 - DNA, 120 bp, Homo sapiens
cctcgctcctgagattgcgtggtggtggcagccagcagctggctttctgctctctgatgccaaactctcttccctgcctggctgcataagagaagacctcctcaccccgcctccccaacc

SEQ ID NO: 21603 - DNA, 120 bp, Homo sapiens
ttccgatccagggaagtataggaagcagtaataaaagtgggaagacctattataagttcgttgcagtcatccaggtaagaggggatactggctgaaaacaaggtttcagctatgtgggcc

SEQ ID NO: 21604 - DNA, 120 bp, Homo sapiens
cagcgggggcagggcatccagaatgctctttggacatcttatattttaagtgcctgtcagacacccaagtagagacgcctgatgtgaagacatgaatatctgcagcttgaggtccttcgt

SEQ ID NO: 21605 - DNA, 120 bp, Homo sapiens
tgacgtaaggaaccaaactttgttttcatgcgaatggtttccatggaaaattaaacaagcaataaagacatacaaaaaggtattgtgcatatcagtaaccagaaaaagtctcttatggga

SEQ ID NO: 21606 - DNA, 120 bp, Homo sapiens
tgtcgagctgtgccaaaaccagatgtttttactagtaattagtattatgataattcacttaactaggaataaaatagggcatgattgtttactgctgcctgtttccccagacatgcagag

SEQ ID NO: 21607 - DNA, 120 bp, Homo sapiens
gaacgaacatagcaacaaaataatttgcccttacattatacaagagttgtaaatagacttttaaacacctccttacatgtggaagtcaaggtggaagattgactgccaaggaattgaaaa

SEQ ID NO: 21608 - DNA, 120 bp, Homo sapiens
tcacgttgtcagccatggcatgagacttccaaaagctattcttggtttctcttctctgtgctgaaccctttccaaggccaagaaattgtgggatgaattgtggtaagatgaaagattctt

SEQ ID NO: 21609 - DNA, 120 bp, Homo sapiens
ggccgacagcacggctgggcttttacatgaatccttaatataaactaagaatcgatggtgggcaatgaacagtgatcatggcagagcacaccccagcaagggagttactctattgtgact

SEQ ID NO: 21610 - DNA, 120 bp, Homo sapiens
gggcggggagtggtggggcacaggggcatgtggcaccctcacacacacaccccagaagagaaactatttgtaactgtcaaatttacaagaagccagccagacgttctacaacataaacca

SEQ ID NO: 21611 - DNA, 120 bp, Homo sapiens
cttcgtagagcataaggtacagccacatttcttcaatagcaggacagaaactgcattttgtccccttaaagataatttttaaaaagagaaactatgagcacttttgcccaaataaaatct

SEQ ID NO: 21612 - DNA, 120 bp, Homo sapiens
catcggtagctgtatctctttgacaccctcctgcattctctgctaccactgccttttcctttacctcactcaggatttctccaagaggctgaacaggagacattagtgtctctgggttat

SEQ ID NO: 21613 - DNA, 120 bp, Homo sapiens
acacgttgaggaatgggaccagtaaaactcagtgtttcttcactacttccttgggtaagtctccccagcggccttagacctgaagatggcaattgcagacttgggaaaacaggtggctga

SEQ ID NO: 21614 - DNA, 120 bp, Homo sapiens
gtccgagccctacagccacaataaaacttacaagctctccttggttctcccatggctgggctggctctgcaccaccttagtgtgtctctgagatcatcatggcctttgaaagaagctcag

SEQ ID NO: 21615 - DNA, 120 bp, Homo sapiens
caacgcttctgtccaattctgggcctaccagtgtcttgaagctagagattcaactctcaagaagccataagtagtagaaaacttgcttctttttgcaccttctggattaaggtcagagca

SEQ ID NO: 21616 - DNA, 120 bp, Homo sapiens
ttacgctatatttttacgaatgttttcatattacaggtatcctgtgaaacttgcttccttaagctcagcaatatgtttttaagatttatcctcatcgatgtaagtaactcgttcactttc

SEQ ID NO: 21617 - DNA, 120 bp, Homo sapiens
tttcggttgttttcagttcttttttacaaacgggcagaatgaacagtcttgcagttgccttgtgtacagtcgagggcctttctctaggcctctttttcagtccattgtttcccctccatc

SEQ ID NO: 21618 - DNA, 120 bp, Homo sapiens
tcccgccaagttcgtgggggaaacccttacagcgctggcccatatcctcccatgggttaagtgtttgctctctgtctccctgggcaaaatgagagaaggtgtggagtagttacttaatta

SEQ ID NO: 21619 - DNA, 120 bp, Homo sapiens
ccccgtctagactccactgcctcctccctacagttcttggcagtatccaaaaggggttagcatttacggagcacagttaaatatagacatctaggaataaaaggcctaattaagaaccag

SEQ ID NO: 21620 - DNA, 120 bp, Homo sapiens
aaacgaaaaagtttgccaaggcgtccatagcagtgccaaagcccaatttggcagggaaatgctgagtcccaagttggggagggggaggtttctcccccacatcaccagggcacactggct

SEQ ID NO: 21621 - DNA, 120 bp, Homo sapiens
attcggaggaaggaaaccacctcaaggcaattggattcgatttcctcctgtgtcagagtctctctctctgatttctctaaactacaaatttaccaggatgagttttagactctgagaaac

SEQ ID NO: 21622 - DNA, 120 bp, Homo sapiens
gctcgggagcaggagaacatgctcatgccgtcagtctgcctttgcccaggagttccacctcccattcaccaattaactttacagttgcatctgcctttcctgccaagctctcccataaag

SEQ ID NO: 21623 - DNA, 120 bp, Homo sapiens
ctacgtgctccacaatgaagaaagatggtcagacattttactttgccttttactaagtgaagatgtgaaagttagatggtcctgtggcgttcacatctttaatcagtcttacttggaact

SEQ ID NO: 21624 - DNA, 120 bp, Homo sapiens
atccgatcagagatgtcttgtttgaaatgggggtaaggacctgcaggcattgcgcctgtatggccttcctgctgaacccctgcggtggccttgggcatttcctcggacaccagaggcttc

SEQ ID NO: 21625 - DNA, 120 bp, Homo sapiens
acccgaggagttcccaaggctgcagagctcagcaggggcagagctgccggcaaagcccagctcccctgacgctccaccagattctggctccctggccccgccccagcgtgctgcctctgc

SEQ ID NO: 21626 - DNA, 120 bp, Homo sapiens
gcacgtcagttagcgcctgcaacaccgcacttaatgaggacaaacaaatgtgctcatcgcattgagttcaagtgcgaatgatgtgatctttctgctcctgcttagcaatcccttctctgg

SEQ ID NO: 21627 - DNA, 120 bp, Homo sapiens
caccgcagagctttaaacatcgacttccagagagcagaggtgggtttactgggaagccctcaaaatcagagctgcagcagttccgattaatctcagttagtctcatcttcaagggagttt

SEQ ID NO: 21628 - DNA, 120 bp, Homo sapiens
tttcgctatcactattatttcatccctggatattgtttggaagcctgtccttctaatcaatgcctagtaagacaggggataggacacttataccacctgagaaatttggaagggctcatg

SEQ ID NO: 21629 - DNA, 120 bp, Homo sapiens
ttccggggagttgccatatgaagcattttagccttgcttaatttcacttcctgttccttggggttttttgatcagtgccccaggtcaagaggccactgtcaacaggctacagttatcacc

SEQ ID NO: 21630 - DNA, 120 bp, Homo sapiens
caccgccctcacttgcagaagctcaaagtgcacagtcaggggacagagtccgtggttagtggagatggggttggggaaggatggaccaccagctctgaaagcagcgtaggcggtacactg

SEQ ID NO: 21631 - DNA, 120 bp, Homo sapiens
ctgcgtagaggaagcgataaagtttctaaaccaggaggctgcttggaagatggggaggatatggcatcaccccagaacatgcttctgagtggaggcttgtttttctctctcccacccctc

SEQ ID NO: 21632 - DNA, 120 bp, Homo sapiens
cttcgaccagggctccctgctaaataccagctcaagtatctttcctggtgataaaatttctaatcagagtaaatgaaccaatgtccttgaaatacagctagggatagaatatttaactgc

SEQ ID NO: 21633 - DNA, 120 bp, Homo sapiens
acacgctggatagggtttggggatgccagcacatcctccctcaggctgccaaggatctccaaccccgcctgggaagcaggagagtcccgcaagatgtcagaacaaaaacacctgaaaagg

SEQ ID NO: 21634 - DNA, 120 bp, Homo sapiens
tcacgttttcacttcccagttcatctaaaaggaaatgaacataaaggtcatgttagctttgttcttctgtaacaacttttaatttcaacaacagctgaagtctcctttacaaagagagca

SEQ ID NO: 21635 - DNA, 120 bp, Homo sapiens
gagcgatcattaacttagagtcaaagaagtgtggattgccatattaaaacgaggtcctaatccgtgtgaaatctgctttcttttagatgtggatggtctgctgagaacgctcacttcaga

SEQ ID NO: 21636 - DNA, 120 bp, Homo sapiens
atccgtctttattttttacatccacaagaagaggaaaacattggtaaggaaaggcaagggagggtgaaacaagagggcttgctccttggcctccttcagtaaaatgtcccagatctaaag

SEQ ID NO: 21637 - DNA, 120 bp, Homo sapiens
cctcggggaggccttccccacctactctatttaaagaagggcccatctttcctgttgctccccagctcagcaccttgcttgcatctttcataatattggccacaatttctcattggtcaa

SEQ ID NO: 21638 - DNA, 120 bp, Homo sapiens
acccgtctgtttgatttttttttttctgtctgtctctctcactagacaaagtacaaaggggcagggatcgtgtctgtcttatttatcgtggtatcccctcagctctgagccagctaccac

SEQ ID NO: 21639 - DNA, 120 bp, Homo sapiens
gcacgtagcacagtatttagtactttaagaaagtgctcaacaaataggtggtgatgatctcatcatcattatctctctcatgtcttttggctgtgtgaatctacaatttggaaaactata

SEQ ID NO: 21640 - DNA, 120 bp, Homo sapiens
aggcgtgagccactgtgcccggcctaaagtagggcttttcttaagccatgagaacagtcacatggccccagataggctcacctctactttcccaagtcagcacctcccttatcagaatct

SEQ ID NO: 21641 - DNA, 120 bp, Homo sapiens
atgcgacatgatatgatgtgatacataattcctatattgttgaaccacgagtttaaaaatctgctacccatggtgcctagcagtttttgttttagctgatgaaatgttattgccatgttc

SEQ ID NO: 21642 - DNA, 120 bp, Homo sapiens
caacgttggttctttctttgttccttttttcagtgaatgacacaattatcttttcattgtaaaatccagaaaactagaagtgatccttaattccctctccctgatagatccaatgattga

SEQ ID NO: 21643 - DNA, 120 bp, Homo sapiens
ccggccacggagaacagcgatcggtccctggaggcgaggacgcgccggtgtggacccgcgtctggagaacgagctgcatcgccaaggctgctgcgggtcgcacctgggcggttgactatt

SEQ ID NO: 21644 - DNA, 120 bp, Homo sapiens
agtcgtggctaagactttcagatcaaccgccccctagtttatcccgacccttgggagacagcggcgtcccgcacggaatgcgcagccgcggcgccgcgctcggttccctagccagccggg

SEQ ID NO: 21645 - DNA, 120 bp, Homo sapiens
ccacgcctggcccctgacacagtggtggggcggtggcggggacctagtgcggtggtgcggaccgaggaccaggcgcttctcgccccgacaaacttgctccggccgcgcgaagttcggatt

SEQ ID NO: 21646 - DNA, 120 bp, Homo sapiens
ttgcgccccgcgcctgcaggagtgtggggagggggaggaagcgggtgggctggggatcagcctccaaacaaggggtgtccccagctcttggagagcgggttctgaccggtttcaaacgcc

SEQ ID NO: 21647 - DNA, 120 bp, Homo sapiens
cagcggctcgacccggctcccttttggcagagccgcagtgcggccgtgaggcttttcccccgcgcctgcgacctggatgggggacgtgggaagatgtcgcggcggaggctccgggtgggt

SEQ ID NO: 21648 - DNA, 120 bp, Homo sapiens
gagcgcgcggccgccgcagacccggtgtctgcgagccggaagaccccccctttcgtttcattcacacggacacctcccctagttagccgtctcccacccaacttctgggcgcagcgtgct

SEQ ID NO: 21649 - DNA, 120 bp, Homo sapiens
ccccgcagaggggctggcgccctggggggcgtggcgtggggagcgtgggctttccagcgtgggcccctcggggaggggggcggggccgagaccccctccaactggaggggccgggaatgg

SEQ ID NO: 21650 - DNA, 120 bp, Homo sapiens
tctcgtaaagcaagcaaccatcagcaagttgttttccaaaaaggagaaaaggccacggggccgactgtcagccttgcctggaagacggaagacatgtcctgcccacttagaccctgggaa

SEQ ID NO: 21651 - DNA, 120 bp, Homo sapiens
aggcgcagctgtctggcagagcacttccatgggacacccacacatggggaggatggcttcgctttgttcttgtgctcaccggccatgacaggggagcctcttctttcccctctcctgaaa

SEQ ID NO: 21652 - DNA, 120 bp, Homo sapiens
aaacgcagcctctgaaattagtagggccatcttgactacaccatactgaggaagccgcattacctgagggagaaataattatctttctgcttacttcaacgttgactttgctgaagagaa

SEQ ID NO: 21653 - DNA, 120 bp, Homo sapiens
gttcggggttaccagtgcctcaggtctctcttctcctcctcctcccacgggccccctatccccaacagctcggtttgtttgtttgtttcctctgaatccctcttttgtcccctgacctca

SEQ ID NO: 21654 - DNA, 120 bp, Homo sapiens
gaacgcaggtgcagcctcggcagtcctccttcccctaggcagtgctgccaggctctctccaagggccctggaatctgtcctcagcacagccttgtctgagcaggaaaaccccaggctaca

SEQ ID NO: 21655 - DNA, 120 bp, Homo sapiens
ggccgtttcaacgctggccatacttgcttccttcctgggcccctctggcagctccgtgcccttccggaaggagggccactttctctaccctcctgtgggaacagaaattggggggatttt

SEQ ID NO: 21656 - DNA, 120 bp, Homo sapiens
ggacgtctggttagggacatgtcaaaaccgctgggaagcttatgttttttaaataaaaatagaacaaattcagttggtgtttccagaaagttcaccctgtggcactctggtgacctccct

SEQ ID NO: 21657 - DNA, 120 bp, Homo sapiens
tagcgaaagctgcccaggaggattcggatacagcacaaagcttgggaagctccaccttatcacatgttgctagtgcactgcctgctgtggcgggaggccgtgtcatttagatgaaaaatc

SEQ ID NO: 21658 - DNA, 120 bp, Homo sapiens
tctcgggcctgctgatgacgctggtgcctatggtgagttggggagaaaaagggagaaacagggtaaaatgggagagtgatggagagagaagatggcttcatggtgtctggaactgcattt

SEQ ID NO: 21659 - DNA, 120 bp, Homo sapiens
aggcggaagagtcagggaaggcctcccaggttactgactcttagcaacagagttagaggccaagaaattaacaagtgaaaggagaggaaggtagggaggatgcacttggcagaaagagat

SEQ ID NO: 21660 - DNA, 120 bp, Homo sapiens
ttccgaaggccatggaatggtgtcaagagtttccataagagactaactaggccaacaccatttctagagcaatcgtagtggcaatagtatggaggctgaagggagcggagaaatggaaga

SEQ ID NO: 21661 - DNA, 120 bp, Homo sapiens
tcccgacgtgagctagcagcaggaagagatgaagcggggtgtcacagtctataaagagaggccaacgataggtggcaacctcgaacatcagcctcaggttctgcctcacgttgtgggctt

SEQ ID NO: 21662 - DNA, 120 bp, Homo sapiens
ttccgactgcactacttggtgaattttgctatctgtttcagttaaattcaacgtgcagaggggagaaaactctttctggatgaatatctattcttttcagaacagagagcctctattgtc

SEQ ID NO: 21663 - DNA, 120 bp, Homo sapiens
atgcgtttttcactggtaatgagagcaaacaaagtgaggggtgagaatacgaggcattatttgggggaatgcagtgtcccaccacgatcttacaaaatggagcatctatacttttgtctc

SEQ ID NO: 21664 - DNA, 120 bp, Homo sapiens
cagcgatgcccacctgtatctcataacgggaaaacacaactcaggcagaattgactgttgaataaataggcattacccggatggaattacaccaagcaaacgatatctgttttaaaaaca

SEQ ID NO: 21665 - DNA, 120 bp, Homo sapiens
cttcgtaatataacatagagtcatacctgtggcactttaatacactgcccattttgagtcaatttctgaattttacaaaccagccaatgctaatataggcaatgtgaacagagaacattg

SEQ ID NO: 21666 - DNA, 120 bp, Homo sapiens
gctcgctgaaatcaaggaagaaactagacactataaaacatcagaaaggggtccctggctccacccccagaagattccataccccggggcctctcctgtaccatgtgttggagaaaacac

SEQ ID NO: 21667 - DNA, 120 bp, Homo sapiens
aaacgccagtgctgccaaaagctctacatatgcatgcactgtgccttctcaggccagtgaattctatgcatgccttgatttatattgtgtctaaaattgcagacactggcaccaaagctt

SEQ ID NO: 21668 - DNA, 120 bp, Homo sapiens
ttacggtttgaatttgaatgagccacatacaagggaagaagataaaaagcctggggcttgagcagggctggaggccagataagagatgcccaatctgaagccagaacccctgaaaagcaa

SEQ ID NO: 21669 - DNA, 120 bp, Homo sapiens
gatcggtatggaatattaaataagtgtgtttgacattttgtaaaaataatatagtggaatacaagcataacatgaagcaaaacacctaaagttgacagattaactagaaaaagaagcaaa

SEQ ID NO: 21670 - DNA, 120 bp, Homo sapiens
aatcggagattcaacaaagcttcaaggttctagaaataagcgcttttgagacaggcgagcaaaaatcaccaatctcattagcttctccaaaggaaacaaataagtcttgtgagctactac

SEQ ID NO: 21671 - DNA, 120 bp, Homo sapiens
gaacgtaatactaaattttgagatggagactgtatttatacagaaacactttgcaagcaaatgtttataaccagcccctactgcttttacaagcacagagatgaatcaaatatacacaaa

SEQ ID NO: 21672 - DNA, 120 bp, Homo sapiens
gaacgtacgtgctatatggtaggcatcattcttgtcactgtgcatgcatgatcccattcagccttaacagttatcctatgaaaagttattatcctcgttttagagatgagaaaactgaga

SEQ ID NO: 21673 - DNA, 120 bp, Homo sapiens
agtcgctagctgttaaaaagcaggtgcaggagttggagtcatgtctgtctgaatttaaagccgttgcttttcctgatatactctgcatatgacatgatgcacagcagaatccttgggaat

SEQ ID NO: 21674 - DNA, 120 bp, Homo sapiens
cttcgtgctcaaagaactctcacagacaacgctagtacacttattagttttctttgtatcctttggttctcacaggccaactgctacaaggcaggtccaacaaatttcctagatgactga

SEQ ID NO: 21675 - DNA, 120 bp, Homo sapiens
ctccgaaatgaaattcgtgtgtacattctctctgcgtgggaccaatttggccagcttactttaaggaaaagctttctgttgtctgcattcttgccaaatttctaaactttcaagggtaag

SEQ ID NO: 21676 - DNA, 120 bp, Homo sapiens
attcgtatttaagagtgaggttctataacacttgattggagtctttgcgtgattgatgggtttggtaattgggacaagacctttgtagggtgatctggcagtaatctaggtttttctttg

SEQ ID NO: 21677 - DNA, 120 bp, Homo sapiens
tcccgggggtctgtctggagacctcagattaaatttctcctcttgaatagaggctgttaatttttcagcattttacttaaccacagggctgtcagggtgtgtgtggtaaaattagccaca

SEQ ID NO: 21678 - DNA, 120 bp, Homo sapiens
tcacggtctattagttttgtactgtaagaatgctttcttttataacacataaccaaaccaatgaaagcacaaaggaatacaattgcacacatgatcttgccgcgaagatggtatggtgtt

SEQ ID NO: 21679 - DNA, 120 bp, Homo sapiens
tgacgcaatggcaaattgcaacatggaaagaagtcctgaatgaaaattttatattacaaaaagatcaaaaactgtccaacaaaatggcaaagaaacaatgtttattttgaagtcttactc

SEQ ID NO: 21680 - DNA, 120 bp, Homo sapiens
tctcgcagtcttaccaagttatttattttcagtttaccaccatacttagaaatagcatgggatctttctcagctcttaattccctttgcccctgggacaagtataaaactatgggggtgc

SEQ ID NO: 21681 - DNA, 120 bp, Homo sapiens
gagcgcagacttaggtcaaaccttcacaaacagtgcctaatttaaaggacacaggcatgaggttctgtccaccagtggtcctaggcttccaggggttgctgaaagtgatcctgaatccct

SEQ ID NO: 21682 - DNA, 120 bp, Homo sapiens
gagcgagacttatctcaaaaaaaaaagtctttaaaatacattctcatagtgttgattcttctcagctctaacctagcacttattcaaaattctttaagagtttcatttgattaaaaaatc

SEQ ID NO: 21683 - DNA, 120 bp, Homo sapiens
ttacgacacacttggggccaatatttcaggcagagtcttgaaagaaactttgctgtgactgacctgcctcagaaaacttagactcccacaccatgctttaatgtacacattgaacctatc

SEQ ID NO: 21684 - DNA, 120 bp, Homo sapiens
ctacgtttgttttctgggagacagcaggcttagttatcagattattccaagataaactgtgtaatatgctcttcttatgatgatctaccttggtatgtgacttttgatttaatttcactt

SEQ ID NO: 21685 - DNA, 120 bp, Homo sapiens
ctacgtgtggcatctttccatgcctaaatatgggatacgtgaaccatgttcattttcctttatagcacagcacttcgtgtgagtgaggcgcgtgtctctccacaatggccgtctacacaa

SEQ ID NO: 21686 - DNA, 120 bp, Homo sapiens
ttccgcctcaggagctagcatggctaagtaccagccatttcctacattccagctggcaggaagggaaaggcttgaagaaaatggggaagggaacaaaagggctcctgctggctcttgtca

SEQ ID NO: 21687 - DNA, 120 bp, Homo sapiens
agacgaggttctctgaaagttgtcactcagtattttcacgtacaccccattggcaaaaatatagtctcatgaccacagatagctgcacagcaaccaggaaatgaagtctttattctgggt

SEQ ID NO: 21688 - DNA, 120 bp, Homo sapiens
caccgcacctggccatgattagcagtttctatcaaatcaagttctcttcagaagacagtttggctcctggcagcctccataaaatctgggacccaagagccccactgagaggtcaggctg

SEQ ID NO: 21689 - DNA, 120 bp, Homo sapiens
tctcgtaatgcagctcggttagcacaggggctgatgtgcaggctgtaggttccgtaacctcctgccatctcaagcatgcacccccagcgccccaaccccacgccgaactctgtggactgt

SEQ ID NO: 21690 - DNA, 120 bp, Homo sapiens
gaccggcctttccctgaaaacaaaaaaaaaaaaaggaaggatgaggaaacagtcatccaaatcattttctgtcctgtcctgtgttcacataaagaatcttgttttacattaaaacatttt

SEQ ID NO: 21691 - DNA, 120 bp, Homo sapiens
aaacgtattgaactgtctctatcctattttaggagagcaaagtcttggcatgttctaattggtgactgatatctgggcttgttgattaggaaaccacagagctggctgaaggtgacctgc

SEQ ID NO: 21692 - DNA, 120 bp, Homo sapiens
ggtcgcatctggatcacggtgtgtacttgtctgtgatgtggctgtgaggcactagaatggggattatggtgtctgggaaattctcctgcctaatatcccctgtccactattccaccctac

SEQ ID NO: 21693 - DNA, 120 bp, Homo sapiens
acacgccagctcgactgagggaggccccttcctctgtgctgctgtaactctcaggctcatgcctccctgtgacggcactcaccctgtgtcttgtttaatcattgattaatccttgtgtgt

SEQ ID NO: 21694 - DNA, 120 bp, Homo sapiens
ctgcggtttatttaatgaatcagtaacaatagcatatgcaaattgaagatttatcatttctattgtttcctctaaagtatacacaacagacatttctttagaagtgacatttcaagattc

SEQ ID NO: 21695 - DNA, 120 bp, Homo sapiens
gttcgaaatttagaaagtagtgatgtcatctctccatcttttcaaagaacacacatctgcctctgtaatcattttgtttattatttttaataacagcaataggccaatgctaagtaatat

SEQ ID NO: 21696 - DNA, 120 bp, Homo sapiens
tcccgttgacctcatgaataccacatttattaaccccggaagacaacagatagctaatgcaacataaatatctgtggctttaaaaatacatattattatgtgtgcagtctacaaacactt

SEQ ID NO: 21697 - DNA, 120 bp, Homo sapiens
ggacgcttttcctactgggggctgtaaagatgataactcagcccttactcttcagtgtttctcattcccgtctcccctacttcggaatgaaacacaatatcttaagcaaacagagcccaa

SEQ ID NO: 21698 - DNA, 120 bp, Homo sapiens
ccccgcccctttggcttgtgctgactagctgtttatattttagtaagggccaccctttaactcggcagcttgatgactataatgggcccagttgtctgcgggctgcggggagctaagtcc

SEQ ID NO: 21699 - DNA, 120 bp, Homo sapiens
aaccgtgggagacaaagggtcagtgtctgacttcacgaacgttaccaacttgaaaaatgagatctattccttagtgtgtgggaggaagacatttaaatctgtagtaccctcaaagcctca

SEQ ID NO: 21700 - DNA, 120 bp, Homo sapiens
tttcgcagcaaaagtcctgtgaaatctgcaaggccatctttttcatgggtccccaaatgtttcacaggcaactgggcaataattgcatttccaggaatgccaaatggagccaaatccttt

SEQ ID NO: 21701 - DNA, 120 bp, Homo sapiens
taacgaaacagcagcaatcagtgatttcttagaaatgtggcccctttaaatacacttcagtgaggctagctcttgtgtttcctggacactctgtgtgttctggacatactggaggcacag

SEQ ID NO: 21702 - DNA, 120 bp, Homo sapiens
agccgtgttggaactgtgacaaggaaggatagtgacaagatctgaaaaaagcagccctcttcccacactcaacacatgcagtaaacccagacatgcagggcaccattgtctgagctgtca

SEQ ID NO: 21703 - DNA, 120 bp, Homo sapiens
tagcggccatctgcacaccgacctggtggtgtctcaagcttccaggtgtggttttgggggcagggtccttgaggaagggggtgctgctgacagtgaggtaacctgaggtcagctctggac

SEQ ID NO: 21704 - DNA, 120 bp, Homo sapiens
ccccggtagatggaaatatcccttctctattctctttcccttagtctttcaaaaactcagtgaggaggaagtgcttgcttctagcttctggcggtaggctacatttcccagcctgtcaga

SEQ ID NO: 21705 - DNA, 120 bp, Homo sapiens
ccacggaggtatgatttcctgttgcaatcactgtttgcaggaattacatgcaaggggagtacaggcaccgggctgctttgctttgggatatgtgcccaaatcctgctctaatgtaatacc

SEQ ID NO: 21706 - DNA, 120 bp, Homo sapiens
ctgcggaagagctagcttccacagacatgtccttggggcattatttggcagaagagattgaattctcatcattttatgctcaagactcacaaccactcagaagtgcagttttctccttga

SEQ ID NO: 21707 - DNA, 120 bp, Homo sapiens
tagcgattctcaaactgtgggcttcatgagcgggttgtgaatcaagttagtgagttgcagccagtttactgaaaaatgaaatagaataggaaatagcagagggcatcgggctaaatgtga

SEQ ID NO: 21708 - DNA, 120 bp, Homo sapiens
ctgcggatctcagtcacaaaagtttggaaactgaatgtagaagtatgcagatcctttatgaccctaggcaggctactgaatgtccttgtggcttagagtcattgtctgtaaaatgaggct

SEQ ID NO: 21709 - DNA, 120 bp, Homo sapiens
ccccgtgccctgtcccaccctcgagcacacagacccctctgctgcccccagctgtgtacttcatatgtggtgcttccaaactgcttctagttggtcttcctccactaacacacatatgtc

SEQ ID NO: 21710 - DNA, 120 bp, Homo sapiens
cagcgttgatcacacagctctggctaatgtctaggcaggctggacacccagtccttcctcatcgcacattgttggaagccatgtgccaagactgcatttgtgctgcaccatcgttggggg

SEQ ID NO: 21711 - DNA, 120 bp, Homo sapiens
ccccgatggaggtcacaggtttgtgggcgagacacctctaactaaacaaacaaatattcctttacgaactgtgacaactgccatgaaggattcaaagggggcagagtgatacataacaaa

SEQ ID NO: 21712 - DNA, 120 bp, Homo sapiens
gagcgggaaccttgcattaagagcgcctcgttgctcatgaagatccattcatttagccatgaactaaaacaaggcggcctccttttctgaacttatctcagaatttcgacctgaggaaac

SEQ ID NO: 21713 - DNA, 120 bp, Homo sapiens
aaacgggtgcacagattcttgaaaagccagaaacagtacagagagaacggaggagaggccacacgtatgccggataaaggtcccaggatgctgctaggagagcactggccattagagtaa

SEQ ID NO: 21714 - DNA, 120 bp, Homo sapiens
ccacgtgggtcctttgaataaatctgtgtgcttttatcacttcaccctgctcaccaatttgaccggattaaaaggcttcataacagtctgcacaactgctaatgatgtaactccgctctt

SEQ ID NO: 21715 - DNA, 120 bp, Homo sapiens
ctccgaggatatgcggattcttaactacacaaagttggtacttagccttggtctattttgtcttgtatcttttttttttttctttcctattcccaggagtctgccttctctgtgaatccc

SEQ ID NO: 21716 - DNA, 120 bp, Homo sapiens
tgtcgtggtttatttattccctgccctttgccatgtggatgggcggatttttaaccttttagtaccataatcctttgtggtaggttcctgtttctctgctatcttgggaactcctgctgt

SEQ ID NO: 21717 - DNA, 120 bp, Homo sapiens
gttcgaccttggtgtttgcatatttataaactcttaaccattaactcttcaagcagaccagctgcagcatgagagctatttgctattcctcagcatcgttttctagtctcacttagcaag

SEQ ID NO: 21718 - DNA, 120 bp, Homo sapiens
gctcgacagaactactgaaattgtaaagaaactcaggcagcctgcacagacctccagctccctgggtctgcctgtaaagagaggacgctggggcagatggagagcagcaggcactcggag

SEQ ID NO: 21719 - DNA, 120 bp, Homo sapiens
ctgcgaatggctttgccacttgcaggttgtaaggcatggtgggggctgggatcaaatcacctccccagctctctgtttctttgtctatacaatggtgatcaaactggatatctccactga

SEQ ID NO: 21720 - DNA, 120 bp, Homo sapiens
gggcgggggtggaggcagcatgagtgggaggtgagcatgttggcaggggccccagggcccgggcagctctctagagaaaggatttcatggctttaaaaccacaggactctgtcacctcca

SEQ ID NO: 21721 - DNA, 120 bp, Homo sapiens
taccgccaaactgaactgaagccccccacacaattggaaagtgatagagaaggtgatggagtttatgcccttgattcaggttgttgggtttaaaactgaagatccacatgaaggggtgac

SEQ ID NO: 21722 - DNA, 120 bp, Homo sapiens
tttcgttgagagagtaccagtgctgtgccatgtggcagggcaaagacgaagagcagtgccaggttccttgactgtgggctttgcttcttcatggctagggatggggagcactggatgcag

SEQ ID NO: 21723 - DNA, 120 bp, Homo sapiens
aggcgttaatttctccatacttagggctttcttttatctctttttattaggtaggggaaaatcccaaatatgtagcaatttctaagactcccttgtgcctcttttaattatttctcttat

SEQ ID NO: 21724 - DNA, 120 bp, Homo sapiens
cttcggtgtagaagccaggaattctttaaggtggtaaaaggagctgtgttttgtgttgtaactttttcctctcttgtgctctcaaactctttgctgtcttctctttctgtgttgccctct

SEQ ID NO: 21725 - DNA, 120 bp, Homo sapiens
cctcggggcctggctgttctgttccttctgcctgggttgctctttgtttcctctttatgtggcgagcttattctcttccttgaagtctcactgcaaatttctcctgcacacagcagtctt

SEQ ID NO: 21726 - DNA, 120 bp, Homo sapiens
taccgtctaacacaggttgcctcttacagctggttaccctccatcatgtccctgctttctttcctccctggtgctcactgtggtctgcttgccatcagctgtgtatttgtgtacttatta

SEQ ID NO: 21727 - DNA, 120 bp, Homo sapiens
caccgtatttggctccttaaacccccctctgcaaagtagttgttggttactttcactttataagatgaagaaactgaggctgaaacagtttaagtcacaaagcttgctgggcacattgta

SEQ ID NO: 21728 - DNA, 120 bp, Homo sapiens
ggacgctctgcactgaattaggcttcctcgtgggtcatgatcagttaagtcctggtaagatcggctttgtgagcttaacgtctttctgctcatcaaatcattttcataaaccttcaaagt

SEQ ID NO: 21729 - DNA, 120 bp, Homo sapiens
tgccgttttttctgcttcagttggcgaagaatcaacatctggttaaatggatctaagattttaatatcttcatttacttacgtggccgttaaatgttgccgagctaaggggggcagggtg

SEQ ID NO: 21730 - DNA, 120 bp, Homo sapiens
cttcggacctgtctgttctgttggactctgtgtgccgtgcagctcccctcacgtttgcaggaggtctgtgtgcttcacagcctcccagcctcccacctgaacatccaaaggcaggttaaa

SEQ ID NO: 21731 - DNA, 120 bp, Homo sapiens
ccacgcctgtggagtggtggaaccacgtgatcagctctgtcctgcagggtttagtcatagggagcacaacccggctttgcctaagtgggaggaagggaatgggcagtgggaaggccgaca

SEQ ID NO: 21732 - DNA, 120 bp, Homo sapiens
cagcgagaaatgagcggtctagggcagtgtttctcgaagcctggtccagggacctaaatcagcatcgcttgggaactcgctagactggccggttctcagaccccaccccagacctggtgt

SEQ ID NO: 21733 - DNA, 120 bp, Homo sapiens
gcacgctcaagtttgaaaaccattggcccagggtgaggcagctcagggaccatgttacaaaatatactttttgtggaggattaaataatgagaggtagaaatagtcttgtaggtaaaaca

SEQ ID NO: 21734 - DNA, 120 bp, Homo sapiens
tgtcggatttaaggcacagctcctgttcagcctgcctgctattctctgagtttatgtaagtttgaggaggtgggtgggagaagatgtaggaggatggaaaatgagcagcttgctttattc

SEQ ID NO: 21735 - DNA, 120 bp, Homo sapiens
ttacggacagagaggcagggtttacagcagcagagccaaggagggctgaggccagcttcctttgctctcccactcattcccagctcgctatttaatttgacatcctggaacatgtgtttc

SEQ ID NO: 21736 - DNA, 120 bp, Homo sapiens
aatcgcactatgtgagagagcgtgtgggtgtgtgtgtatttttggaggtgggtagggaagtggggggtgagcagagttctttcaagctctctcttcacaagatgcaaatgtttttcccct

SEQ ID NO: 21737 - DNA, 120 bp, Homo sapiens
attcggccctactgagcaaggctggcttcccatttgctctcatctttttctccttcagtcactctggaaactagtagttaggagctggaaattgagaagctgccatttaggagtttatgc

SEQ ID NO: 21738 - DNA, 120 bp, Homo sapiens
taacgtttgtttttgttgtccttttccttgaatgtagtcttacgtagagaacttggacagcctgtcattttccaaaacctctgtggctcatcctaggcacaactcatgtctctcctttct

SEQ ID NO: 21739 - DNA, 120 bp, Homo sapiens
aaccgtttcagggctccgaggctgcgccttgtaacttgtgagcactggttctgggcagtcgcctccctgcggttagtggtgcccagcctccagtcgctgtagctcagacatggcctcggg

SEQ ID NO: 21740 - DNA, 120 bp, Homo sapiens
cagcgcttgtctgcccattgttgctgacctgccgcattgtgtgatatggctccatgtgcacatcttccatggatttatcagtcttgacaggagtcttccactttctgccagtgatgaaat

SEQ ID NO: 21741 - DNA, 120 bp, Homo sapiens
cctcgccctagccagtctttaataaatgcttcttggaatgaaagaatgagagcctgcccagaaggtggtcattcccatatctcatcgtgtgccacagcccatttcatttctcacctcacc

SEQ ID NO: 21742 - DNA, 120 bp, Homo sapiens
caacgtactgtgtttcttagttcttaaaaaaaatagtttaaggccataggattacctgtatttttaacttttgtgcccttagaattttatgttagaataaaatctgaaatatagtttctt

SEQ ID NO: 21743 - DNA, 120 bp, Homo sapiens
aaacgtatgaatttcctagtatccctctaggctgctgtgtgttgaatggaattccttctataagacgtgagattaggcagtttgccttaagctagcagaggggactagctattcatttta

SEQ ID NO: 21744 - DNA, 120 bp, Homo sapiens
ggtcggctagttgttttgaagagggtgctaatgggaagcactcaggaggttgtgtgcttctaattggcctcaagttttatagttgaattttcatggatcgttatcatattattattgatg

SEQ ID NO: 21745 - DNA, 120 bp, Homo sapiens
gggcgccccctggtggcctcggctgggccctgccgctgcgcccacggccctcgtgggaggcccctccctaccccggccgccctcgggcccccacggtctactaccccatggggaccggca

SEQ ID NO: 21746 - DNA, 120 bp, Homo sapiens
ctgcgtgggcgcctgcgccacccccccgccctccgcactcgcccccttgtcccagccccgcgtcctggggaggaggcttgggccgcagcccagcacccagaagtgcaacgcgcacgggtg

SEQ ID NO: 21747 - DNA, 120 bp, Homo sapiens
ccacggccatgccctgagcccggggggaccaggggaggacccgggacagtgtagactctcagccacagccatgccctgagcccggggggacccggggaggacctgggacagtgtagactc

SEQ ID NO: 21748 - DNA, 120 bp, Homo sapiens
acccgggacagtgtaaactctcagccacggccatgccctgagcccggggggacccggggaggacccgggacagtgcagactctcagccacagtgatgttttgagtctgggggacccagga

SEQ ID NO: 21749 - DNA, 120 bp, Homo sapiens
aagcgtggccatgtggacgcaggccaggagggtggggcttcgctccggtgcccccaggtcggcccccaggaagccgtccagcttggccttgcaccctcacacacagcctccctcagccaa

SEQ ID NO: 21750 - DNA, 120 bp, Homo sapiens
caccggccccagcactgggcactcagggcccagcccagcaggagaagggaacacgaccactaccatttgaccccaaggcacccagagtgctcaggcagggcctgatcctgctgaggccat

SEQ ID NO: 21751 - DNA, 120 bp, Homo sapiens
cgatctgtaatggactgaacaagcaacagagaaaactcactcccttggcaccagccacgagcacattcttgaagccaaactcatccatccgtactgggagatagatgatcatagaaacat

SEQ ID NO: 21752 - DNA, 120 bp, Homo sapiens
aaacgaaaagtgctttagagttatggaaacttagcttcaaagaagaggcaccaaggatgccgcgcgaaaactcacgaggccacttaacacaggctgcgtgggaaacaggggctccgcgac

SEQ ID NO: 21753 - DNA, 120 bp, Homo sapiens
ctgcgctcagattaacggaaaaagacacccctctagagtccggcagcagcgggcgggcaccggcgccttctccacacaggagaatctcggcgatttacacccccaggctacgcagaaaaa

SEQ ID NO: 21754 - DNA, 120 bp, Homo sapiens
aagcggcttcggaatccgccgcaagtcccctcctcgggtcgccggggaagtctggcctcccgcgtctgggtccccttcgggacgccccaaggccccgtttaccacggcgactccccgcct

SEQ ID NO: 21755 - DNA, 120 bp, Homo sapiens
tctcgcgccaccgaaccacggcgcggggccaccagggcgggcctcgcctcgtgcggaaaagtcgcctcgacgggcggcgcagacggcggaggcagggggacgtagtccacgcgcccagct

SEQ ID NO: 21756 - DNA, 120 bp, Homo sapiens
gctcggagcgcagggccccgcgcccacgaccgcccgcgccctccacgtgccgcgggcaaagctcggagccggtgcgccgaggaatgggcagcgtggacaagagaggagggggcggcggcg

SEQ ID NO: 21757 - DNA, 120 bp, Homo sapiens
gcgcgctccgcccgggctcggtacctgagcgcggccgcgggggtgcggagcgagaagactgccggccgcccaggccccgctcgctcagggcgacgcgcctcagccgcggcggaacaaaac

SEQ ID NO: 21758 - DNA, 120 bp, Homo sapiens
acacggagccagcttcagggccctgctggccagatcgaggacaatttgaaggtccaaataagccatggagatggtgaggagttgcaccagcaggttccagttggcaaaaagtaatagtcc

SEQ ID NO: 21759 - DNA, 120 bp, Homo sapiens
ctgcgagtctgccccttggcctggtgagcagcactgcagtactgacctcgggtgggcgcaacaacacccccagccgccgccaggggtcgcttgccgccatgggccatgcagggaccggac

SEQ ID NO: 21760 - DNA, 120 bp, Homo sapiens
gggcggggcacgggtgccaagaagccgcatggaccgccagggaggctgaggggcgggcaggggcttcagcctgggtggccagtggggtgtccccaagggcatgagggtgcatttgttctt

SEQ ID NO: 21761 - DNA, 120 bp, Homo sapiens
gcacgtttggaggagggggcctggcacagggatggacggccacagcgggccatggccagtcacggctggggcagggactgggccagcctcaggggggcctgggggccactccctccccct

SEQ ID NO: 21762 - DNA, 120 bp, Homo sapiens
ctgcggcacctcctgactggcttcccaggaccatcgcgcccctccctcccgtgggcagcaacccccatctcagccccgagcctgggtaacaatagggtgtaatccctggctgaggggcct

SEQ ID NO: 21763 - DNA, 120 bp, Homo sapiens
ttccgtggcccacttcacagacgagaaaccgaggcccacagaccagtggccattggccgggggagacgggccaagcacagggtgtgggccccctctcctgcttggggttgaggatatggg

SEQ ID NO: 21764 - DNA, 120 bp, Homo sapiens
cctcgagcctccagagctcaccagctgccctatgggcagcacggcccgcctcggcctccccgctgcccacaggcatgtccggccgcaggactcccacctctctttgccgggtcagctctg

SEQ ID NO: 21765 - DNA, 120 bp, Homo sapiens
aggcggctgccaggtcctcctcctcactcagccctgccggtctggccttctggctcctctgacagctgcccagggccctgtcccctgctggggcctctctgagccaagccgggagcctgc

SEQ ID NO: 21766 - DNA, 120 bp, Homo sapiens
gcccggagaaggccgtgcagggcggctgaacgtgtcagggcacctggccgggcctggggccgcgccgaggacaccggccaccaggcagcgtcctgggccgggagcctctctcccaggaca

SEQ ID NO: 21767 - DNA, 120 bp, Homo sapiens
ctgcgaggccgggcgggggccctggcactggcctgcctggtaaacatgacctgagctgggcacgcagccgtggcctggacttccgcagccccggaccccctgcacatccacgcagtcgcc

SEQ ID NO: 21768 - DNA, 120 bp, Homo sapiens
ctccgtgggagtcctcatacacagtcatggaggcagcgctcggctctgcccttcccacagctcagggcagggctcagaaacacccccccgacgtgccccattggaaggaggggtgagggt

SEQ ID NO: 21769 - DNA, 120 bp, Homo sapiens
agacgaggtcgtgagggtgaggccctggtctgctgggattagtgtccttgcgggaaggcagcaggccgggagagcactttggaggaactgacccgccagcaccctgatggcggacttggc

SEQ ID NO: 21770 - DNA, 120 bp, Homo sapiens
tggcgcctccagaacccagagaaacacgtgtctgtggtgcaagccatctggtcccaggcaggatgagaccccgccgtccgaggggctgtccagcctggtgcccacccactgcccagctcc

SEQ ID NO: 21771 - DNA, 120 bp, Homo sapiens
tcccgaggggagtgcagggctcagcccacatggagaagctaggtctgtggggcacccccacccctctaaggccacctaggagtggaacctgcagctgcctccctgggctggtcaagaccc

SEQ ID NO: 21772 - DNA, 120 bp, Homo sapiens
ggccggtggggctgcccctccaagctcactcccatgcccccatgctctctccaggggccgccagccaccaggctggatggaagagggggtgggggcgagggagataggccaggacaagct

SEQ ID NO: 21773 - DNA, 120 bp, Homo sapiens
gcccgagcgttccctgccaggcacccctctgcagcccccaccctgccctacccagcctgagccccgggagagagttcacccagcctgcaggcagacccagatcaccctcccatggactca

SEQ ID NO: 21774 - DNA, 120 bp, Homo sapiens
tttcggtccccaaggtccatgccagtgagggtcgctgcaagcccacgtggttgccggaggtccctcctccagcccatcactccactttctgggaaggacccccggaggcctggggactaa

SEQ ID NO: 21775 - DNA, 120 bp, Homo sapiens
ccccggcgccgcgccggactgccctggtgggctgagcgcacatcccttgtctctcttagggagctctgtgaggggcaggaccgggccagcagccgctcaggaagctggagcacgtgaggg

SEQ ID NO: 21776 - DNA, 120 bp, Homo sapiens
ggacgaggtccaaggaggggcttctgcccgagcccaggccttccttggggtgtgctccagtagcaggtgcgcgtgccacctgtgccgtgggttggaggggtggaacgtgtacgtcctggc

SEQ ID NO: 21777 - DNA, 120 bp, Homo sapiens
ccccggaagcgtcaggaacaacaggaaaggcagccggggcacagggacttcccacactcgtaagcagggtgaccctgcacccaccccagctggctctccttagccctccagctccgggag

SEQ ID NO: 21778 - DNA, 120 bp, Homo sapiens
agtcgacagtcggatgcttctccagctaagtggtccctagaacagacgggtacactgaggcaaagtgtcctgggaggggcgagagggtgacaggccctgggaggacattgtgggcatctg

SEQ ID NO: 21779 - DNA, 120 bp, Homo sapiens
ccccgaccatggcggggtggaccgacccctgccgcagggccagggggccaggctgatggcagtagcccaggggtgtgggcaggcaaagctctcacccatggttggttgggctgggtgcat

SEQ ID NO: 21780 - DNA, 120 bp, Homo sapiens
catcgggcagatgacttaatcaacaggcgggctttgtccctggacacccgccccctgcccggatcctccgcctggtcacacgcctcccacccccacccggctcctagcagcctgcagccg

SEQ ID NO: 21781 - DNA, 120 bp, Homo sapiens
cgaccccggcaggctcggcactgcgcaggagaggtgcagactccaggacacaagaggtccccttaccacgagtcagggcagagggcagaaggcagggcttctctgttcctctgccccttc

SEQ ID NO: 21782 - DNA, 120 bp, Homo sapiens
gggcggcacagacactgagtgagtgagatgcgtgtgtctggtgcgaggtgtgcatgtgagtgagggcagccgtgtgtgtgcccgcctgggagcccgtgagcctgtgaaaacccacacaga

SEQ ID NO: 21783 - DNA, 120 bp, Homo sapiens
gcccgggtggacctctgaggaatgccggcactgaggcctgcaccaggagcgacagcctctccgaaaggtcactgcaggccatagcacatgccgtccgggtccccgagctgtgggtcacta

SEQ ID NO: 21784 - DNA, 120 bp, Homo sapiens
tagcggaggtctctcccactcctaagaggcctggtcctggttggagcacctcaccccttccccacgccccctcgggtgggggtcccggggtgggggtcccagggtgggggtgaccttaac

SEQ ID NO: 21785 - DNA, 120 bp, Homo sapiens
acacgcactggccactcaaagagcacgcaagctgccattcggagggcagagatgcctggcctgaagtgcacatgcctccacctgggatccccagacagcaccatgtttcctgggccctga

SEQ ID NO: 21786 - DNA, 120 bp, Homo sapiens
catcgtgtcctcggaggaaacctgggtcccactgaacagagagagaaactccagcgcctctgcctcggcctcggtctcctcacctgtggacgggcggccgggctggggaggggccgggcc

SEQ ID NO: 21787 - DNA, 120 bp, Homo sapiens
gagcggccgccgccaaggcacaaacgacacagcttgtcttcacccaccgggtgccgcggggcttccaaacgcctgcatgaggaacgtggccgggcgggagcctgcggtggccgtgaatgg

SEQ ID NO: 21788 - DNA, 120 bp, Homo sapiens
agccgccccggccccggggccgggataaagggccccagtcatgccgccctggcccgggcaagtgtgctaagttgaggctataaattacccgcggccaggccagcgccaccgcagggcggg

SEQ ID NO: 21789 - DNA, 120 bp, Homo sapiens
gggcgggcggggcgccgggagggggctctggctctgtaaatcggccctttcaccactggaggccgcgcacgaaagaaaaactttgttttattaaagcaacatcagggctgtggccgccgg

SEQ ID NO: 21790 - DNA, 120 bp, Homo sapiens
ggccgagaggcgccggcagcgaggctgggcaggcgagggctcctgccgcacccggctcggagaaaggccccttcaggaatggctgtctctggcctctggccgcggggccgggccgggggc

SEQ ID NO: 21791 - DNA, 120 bp, Homo sapiens
gctcggtgctgcacccccgacccacaggcccaccctgaccctggccccagagccctctgggcagcctcgcccttgcccccagaccccacagtacgagctggcctgtgctcatccaggagg

SEQ ID NO: 21792 - DNA, 120 bp, Homo sapiens
ggtcgtggcctggagcgggcgtccgggccatccacctccacagtcaagagccaagtcgtcccttcaggggctgggctgggtgccaggatggttgggggcagaggaggagaaagaagagag

SEQ ID NO: 21793 - DNA, 120 bp, Homo sapiens
ccccgctgggctcaggccccgctcagcagagcaggcattcggctctgggggactgcaaacacaggccagccctcaggtgcagccctggagaacggcgagtcggaaggaggggcgtgggtc

SEQ ID NO: 21794 - DNA, 120 bp, Homo sapiens
ctgcgcccggccaatatttagacaatttaagtgaaactgaatgaaaaccaggcagctggcgtctgtccctctcatggccataggcgatagggccctgcagaccccaagggcaggtgattg

SEQ ID NO: 21795 - DNA, 120 bp, Homo sapiens
ggccgagtgtgagcctggctggcctcctgagcctgctcccacccacatcttgcccccacaggggatcccccaccctctgttcctgttcctgtagggcctccctgagcacggccctctgcc

SEQ ID NO: 21796 - DNA, 120 bp, Homo sapiens
ctgcggcctgaggctggtaccgccccgtaaggtgtccatcctcccctccctcctcctctcctcggggcaggcctgagcccccacctccagccctgcgaggggtgcgggcaagatgggtgc

SEQ ID NO: 21797 - DNA, 120 bp, Homo sapiens
tggcgccagagcaggggccagcaggacatgatggcctgggactcaggtactgaggcaggtggcggggggctgctatggggctgggggcatcttctgacttctccttggaaggtgtggctg

SEQ ID NO: 21798 - DNA, 120 bp, Homo sapiens
gggcggtcagggctgggttcacattgtgtgtctctgggcgccgaaacccacctctctccagagacccctctgcctgcctctccccactggggctgccttgtccctggccccagtgcagct

SEQ ID NO: 21799 - DNA, 120 bp, Homo sapiens
actcgatgtttggggacagtttcttgtccccagggtccctgggccacaaaaagctgcagggtcaatccagagaccccaaagccctggcctcctgcccagcccacttcacactgccacccc

SEQ ID NO: 21800 - DNA, 120 bp, Homo sapiens
ccacgcagaggaagctcccctgactcaggctagcctcgtcccctgccctctgctcaggcttgtcccctgccctctgctcctgggagatggcagtgggcaggcgttctgcaggcaaagccc

SEQ ID NO: 21801 - DNA, 120 bp, Homo sapiens
tggcgggcctgggtgtggacccccctctgtccaggcctccctagaggagcaagccctgcaccacctcagccctgggctccacctcagccctgttgtgtcacgtgactgcgccctggaggg

SEQ ID NO: 21802 - DNA, 120 bp, Homo sapiens
caacggagcaggcacagagtggggagaagggaggagggaggagggaggagggcgtggagcacagggcactagtgctgcagcctagtgggcaccagggagctttggttctgacctggaggt

SEQ ID NO: 21803 - DNA, 120 bp, Homo sapiens
tgccggtgtggggtggggcaggatgtgggggatcccctggctgccgtgggcacaggggacaggaggccacccaggacagcaaggtccctgtggggactggggctggggtcaaacgtgagg

SEQ ID NO: 21804 - DNA, 120 bp, Homo sapiens
gcccgcagggcaggcgagtgccaggcgtgaggaggctgctggggccatggcggaggcccagaggatggcccaggcctgcaacgcctcctgctgagtcccggcaaccctcccaaggccaca

SEQ ID NO: 21805 - DNA, 120 bp, Homo sapiens
agtcgaggagggaggggaggggcagggacgtgcccccccttctaggcctgggaccctgtcttccatctggactgcctgtagaggcaggggccctgtgggcggctgcgaaagcagggttca

SEQ ID NO: 21806 - DNA, 120 bp, Homo sapiens
gttcgggccttagtgacccgcgctcagccacagccacagggcccttcagcaggtcgcccgaggcccctcccccacctcctctccagtccagggtccgaggacgggtctccggccatcccc

SEQ ID NO: 21807 - DNA, 120 bp, Homo sapiens
ccccgcctcaggggtcagcacagaagctccagccagagcctggtccctgccctcttcagaccagggctgtagggggatgtcctgccactggcaggggtcggccgcctgccctcaccctcc

SEQ ID NO: 21808 - DNA, 120 bp, Homo sapiens
ctccggcgggcgcggctggaatgtttgcctttgctgtttgccgggggaagggggggtggggtgagcgcggccccccggggagccctgtcccgtccagctgggtccgcgaggccagtcggc

SEQ ID NO: 21809 - DNA, 120 bp, Homo sapiens
ggccgtggaggggaccctccggctccgacggggagttccagggccggcggtggcacaaagggtgcttcctgcccgcggtggtccctcgtctgctccggcccctgcggccccgactgggag

SEQ ID NO: 21810 - DNA, 120 bp, Homo sapiens
gctcgagccagtgccagcccttgttccctggacagccggtgagcgctggaggtgttatctctgacaggagcagaatggactcgtcgcgcccgaagcaggtgtcggcgcctgggatggggc

SEQ ID NO: 21811 - DNA, 120 bp, Homo sapiens
acccgctgcaaacctggcggggccgtcccaggagacgcagagattagcacgactcttgtccctgtccctccccagctgatctgccccagatatgggcaggggccggaatggtggggccgg

SEQ ID NO: 21812 - DNA, 120 bp, Homo sapiens
agccgcctccagagagagatgggctctcgaggttgggtcagggccgagcagggcagctggttctctggtgttggtctcccatttgccgggtggggcccacccctgcagcatctgagtctg

SEQ ID NO: 21813 - DNA, 120 bp, Homo sapiens
cagcgagatctgggtgagggtgggggccgagagggaggcacgttcgggctggctcacccagctgttctcacaccggcctccctctgggcatgcgggcccagaccatccccaggggctgtc

SEQ ID NO: 21814 - DNA, 120 bp, Homo sapiens
gcccgccacggcctctacccagggtcctcaggtcccacctcccacccccgctgcccgcactggccatgcacttctgctctgagacccgactcagctgtggccctctctgggaagcccttt

SEQ ID NO: 21815 - DNA, 120 bp, Homo sapiens
ccccgtggctctgtgcataggggtgcgggcagctgccggaccacagcccatgtctgttctgacccctcatggctcagtgtgggtgatggggtggtaggccctgggacaggggtgagggga

SEQ ID NO: 21816 - DNA, 120 bp, Homo sapiens
ggacggtggctctgggctctagggctcctaaactcactgctgggcttgtggccctctcctccgggcctgttctccatgcctaggtggacagcccccaggccctgcgcgatcctctggtgc

SEQ ID NO: 21817 - DNA, 120 bp, Homo sapiens
gtgcggctcagccgagcccccagcctcacctgtcgctgggaaggcagcttcaacttcttcctggccttcctgcctccattctcctccattcagcctgggctgcttcctgaaccccacgtc

SEQ ID NO: 21818 - DNA, 120 bp, Homo sapiens
cctcggagagaggccccccgggccatgtcctggctcatgggaaggatgggggtgttgggtgtgcctgtgacggaggtttttgacacggttgtgtgaggctctgctggagctgttctgcag

SEQ ID NO: 21819 - DNA, 120 bp, Homo sapiens
ccccgtgtccaactccagaccttggggatttacccgaagcccccaggctatccacctgcctgccctttcctccctatccagccatgtgcacatgggggcctcaccaaagcagctgaagct

SEQ ID NO: 21820 - DNA, 120 bp, Homo sapiens
ggccgatattctcaagaaccccaccctacctgggccgcctacagacactggcctgagcgcatcagacggacagagctttggttttaggaagatgcctcttgggccaagtcggaggatggg

SEQ ID NO: 21821 - DNA, 120 bp, Homo sapiens
tgtcggggtgggccacagggtcagggcagaggctgtggccctggggtgtcaggctatgtgaaggcaggccacttctgagcagggggggaccttggtggtccgtggcccagtgtgggggcc

SEQ ID NO: 21822 - DNA, 120 bp, Homo sapiens
caacgtaggtcacccaaggcacagggatgcccctcccactgcagtccaagggagcattggtgcatgggatgagtagaccccacatgggcaggttgccccctgaggtccttggaggggtag

SEQ ID NO: 21823 - DNA, 120 bp, Homo sapiens
ttccgtgcccagccaagaccctatctctaaaataaataaataacccaggggacctctgagctctgcccattcccatagccgccagcactccctgtggggcagccccacctgcagatctgg

SEQ ID NO: 21824 - DNA, 120 bp, Homo sapiens
atgcgccctgcacctcacatcctggacagtggggctccctcctcaccctcaacctgctcctcccatggtgtccccaagcttcctgccctcactgccacccttgcttcagagaccacagtc

SEQ ID NO: 21825 - DNA, 120 bp, Homo sapiens
tcccgaagctgagcttcttcacctgtcttctgactcacttatctccccgagccccggagatacaaggatcacaggcaggggccttctcctgagctggccagagctgggcaggacacttgg

SEQ ID NO: 21826 - DNA, 120 bp, Homo sapiens
gcacgcagcttttgtgggctagcctggaaactcggctatcctggacaccacactggcaacaggttgtctggagccaggtcggggcatgtggggcctgagccaaggctgtcagctgaagcc

SEQ ID NO: 21827 - DNA, 120 bp, Homo sapiens
acacgtgagagcacatgcacacgtgaccatgtgagcacacaggcacgggttcgggccccaggctgtgctgccacctgaagcccctgccctggctgtggatgcccatttggctgggcacag

SEQ ID NO: 21828 - DNA, 120 bp, Homo sapiens
aggcggcggccttggcacagggagcctgcccagccttgctctgacccagttttccatgcccaggcaggcgggtggcactggtgtagtggctcccagagcttctctttggcaacaccaatc

SEQ ID NO: 21829 - DNA, 120 bp, Homo sapiens
cagcggtttcacaccctagaaccagtgccttctgcctgtggtccctaggcacacagctgccgctgcctgaatgcgctctgcctgccctgccttctgcctccagatgaacggacctgtcat

SEQ ID NO: 21830 - DNA, 120 bp, Homo sapiens
gagcgatccctgtggccctccactctagacctgcaggctgcttccttgcccactcctgggggtcagtcatggcctggctgtagaccagatccttgaggggtgaatctggggataagcctc

SEQ ID NO: 21831 - DNA, 120 bp, Homo sapiens
aggcgcagggagcaaaggctgctgggagcagggaggggagctgggcgggcggaagggcggccgtgggaagccagccctggcctggctggcctgataagctgcccctttgatccacactga

SEQ ID NO: 21832 - DNA, 120 bp, Homo sapiens
ccccgggcctgggacccaaggctctggtcaacccgccctcccgagtgtgcgctgccctgcccctccggccctgacagtgaccggtccttgctcagctgcaagctgggtgggtgcagtctg

SEQ ID NO: 21833 - DNA, 120 bp, Homo sapiens
tgccgtctctcctgactccccaccaccctctttgctgtcctcccttctgctatcctccctctcttgtcctcccgtttttcccatctctgctgtccccacctctgtcgtcctcctcctgct

SEQ ID NO: 21834 - DNA, 120 bp, Homo sapiens
tgccgtcctccctctgctctcctcccctctgctggctcaagagcagggtttcccaaccatgagctgcatgaactctagcttctaaaatgctctggctacaaactcacctttcaggtcagg

SEQ ID NO: 21835 - DNA, 120 bp, Homo sapiens
gcccgtttcctgggcaggcaagggtttaactcaaccccattcagggaagcacgtgtgggcgcaggcctggtggaagtggccttacaagggactctgcatccctaatgcccccacttgccc

SEQ ID NO: 21836 - DNA, 120 bp, Homo sapiens
ggacgcctggtgacagtggcaggatggggaggcccacatgggcctgaaggctgaggcctgcagggcagtggggggaccaggccaacaggcaggcagtgccagcatccacaccaaggcagg

SEQ ID NO: 21837 - DNA, 120 bp, Homo sapiens
gctcgaagcgcgggccgggagcgccccctagcgctggctgggcagtgtccctgctacaaacccaaggcccctctcctgtcagggctctggtggacctctggtgggcacagtgggatcctg

SEQ ID NO: 21838 - DNA, 120 bp, Homo sapiens
caccgggagaacagtggcccatgaaggtgctggtgggccagccccctcctcctcagcgtgcttccttagcgaccccagatggcagggcacagtccctgaagctgccccaccaggggctcc

SEQ ID NO: 21839 - DNA, 120 bp, Homo sapiens
caacgacacacacacacacacacgatgcctttctctcactgccttaaaaaccctttgtcttcagggttcattagtttgactctgacgtgacttgctgtgaatttatttggatttatccta

SEQ ID NO: 21840 - DNA, 120 bp, Homo sapiens
ccccggaacatcagataacacagatggttgacacttgctatagcacaggctgtggggctctatacaatgttttctactattttctctctgttgttcaaacaggtaatttctatcatttta

SEQ ID NO: 21841 - DNA, 120 bp, Homo sapiens
tgacggcttctgtccccagctctccaaggaacccccagtcaaggccgttcggggtgatggggatcattgctccacgtccctcacgagcacaggtgtcatctgtgcccaggccctgctggg

SEQ ID NO: 21842 - DNA, 120 bp, Homo sapiens
agacgttaagagctgagcacaccacaggaaaggagggaggatgctgtgtgagagccatgctgtcaggagcaagcttgctgctcctgtgctgccctggccctggccttgcttgcccatggt

SEQ ID NO: 21843 - DNA, 120 bp, Homo sapiens
ctgcggggccaccatggcaaccgggggtgtctgagtggtaggggcgacagccggaggtgtggtgggtgtcagaggcgaggtgggcgccgcaggcgtgggtgtggcagggctcaggccgct

SEQ ID NO: 21844 - DNA, 120 bp, Homo sapiens
gggcgcccgctgcttgaactgcgctggcaacgtggggctcggggcgctgggctcctctggtgggcggctggcttcccgggaagatggggctgcaagtagaccggggcctggtgagggggc

SEQ ID NO: 21845 - DNA, 120 bp, Homo sapiens
actcgcagataagatgtctggactctggccagctgctggcctgcagcaggtccccataccgtaggcactgctgggaagacaggaaggctgtatcctcaagccccttgggcccaggacctg

SEQ ID NO: 21846 - DNA, 120 bp, Homo sapiens
ctccgtctgggaggggatggctctcagctcccctcccgcctacccagcaacaagagctgggtcacctggcagaaaaccctttcgaacccaatccccttcctgccgtgtcccctggggccg

SEQ ID NO: 21847 - DNA, 120 bp, Homo sapiens
ggacgggcagggtggggcaaagcagctggtttatgtcttggagctcaagctgaacagcggggcatctgcccccagcagattctggctgaggcagaagggggacaacagagatgcaggagt

SEQ ID NO: 21848 - DNA, 120 bp, Homo sapiens
aaccgcagccctggcagcgcccgtgggcaaggtcatgtcctggcaggcagcttggctggttccaggctggggccagcagactcacctgggggcgtctcggagctggggatgtaggaggag

SEQ ID NO: 21849 - DNA, 120 bp, Homo sapiens
aggcgggaaccacgctgggcgtggagggaaggtagctcgtggagggcagcgcaggctcattgttcagggacccaagtttctggaacacagagtttaaggttccttccagaagaggccatg

SEQ ID NO: 21850 - DNA, 120 bp, Homo sapiens
ttccggcatgtgctaacacatggcccgacccggagctccactgccacaggctgtggccccccgagctagagcaggaaggcgggggccactctcccgagctccctgggctagacaacggga

SEQ ID NO: 21851 - DNA, 120 bp, Homo sapiens
tccggggcccagattcgcacttgccgggcgcccccgggggccactggctgcacggcgctctttaaggccaacagccctgagttcacgggactgaaatcggcacagagaggccgaggacct

SEQ ID NO: 21852 - DNA, 120 bp, Homo sapiens
ggtcggggctccgcgcaagcggttctccggtctccgaggacaccgagaggcggagaggaggaccctgggttgggggtgggtagccgggagggaccgagcaggctggtgcccaccctgacg

SEQ ID NO: 21853 - DNA, 120 bp, Homo sapiens
gcccgaggatcggggagaggctgggccagggaaaagccgggcgagggcggatcccccgagccgatcccccagaccagctctctccgggcggtgcgaccccacactggaccccactcgccc

SEQ ID NO: 21854 - DNA, 120 bp, Homo sapiens
gcccgcggtcggaggccaagcgtttgcatgcgcagctccccgcgcctcgcgagcatcgagcagctccctcaggatcgctcctgacctgctgagctccagccacagatttcccacttcctc

SEQ ID NO: 21855 - DNA, 120 bp, Homo sapiens
tcccgccggccttgcgctctggaggtctcgccccggcgccgcctcctccaggcagtcctctagactgcatccgccatgggcctggacgctgctcccgggggcagcccccggccagggcca

SEQ ID NO: 21856 - DNA, 120 bp, Homo sapiens
acccgattcctggagcgtcctaggttcctctaaacccgcggccagcgcagtctcgggtttccatgacgacgacgtcggatggggaacccgggcggggtcgggtcggagcgcatgcgcgtt

SEQ ID NO: 21857 - DNA, 120 bp, Homo sapiens
ttgcgcgccggacgcggaacgtctgccggtgtccccgcgctgctggtcccggggtccctgaaccgcggtaagggcggtggtgcgggcgtccgaatgggcgttttctagatacggggcgcg

SEQ ID NO: 21858 - DNA, 120 bp, Homo sapiens
tcggtgctaatttatgaggggaagacagccggcgccgcggggggtgcgcgcgcctggcacagccggggcggtcgcagagggcggccccttcagcgtctttgggtgcccttcccctcagag

SEQ ID NO: 21859 - DNA, 120 bp, Homo sapiens
tgccggggtgagggggttcgctcccattttacagatgaggcgcttgaggccgcgtagggaggacgcgactcccccaaggtcacggcagccgaaatgcggctggaagcggtgtggggcctc

SEQ ID NO: 21860 - DNA, 120 bp, Homo sapiens
tcccggacgctggccaggaagggctcttgctggggccctgggaagagggggtcctggagcccgaggctggaacgtgggacaccccccttcctcctcccccctcccccctcccccgcgcgg

SEQ ID NO: 21861 - DNA, 120 bp, Homo sapiens
ctgcggggcagctccctgccaggatctgcccaccttggcttcagtaggccagcgtgggcagagtccttcccggcccggccatcccgagggtgtcctgccgtgtttggaagctcagagacc

SEQ ID NO: 21862 - DNA, 120 bp, Homo sapiens
acccgccgaggctcattccaggcggtgggggtgggtggggtggctgtcttcaccgcaggaagcttggaaatagggagaagtagaaagcacccgagatgaccccggctcctccaccaggag

SEQ ID NO: 21863 - DNA, 120 bp, Homo sapiens
gagcgcggccgggcgcggcgtccctagcgggcttcgccggggtggcgtctctggggcctggggacccccgccgcgccgctgacccgcgccctctgcccccagcgctgtgcttcgccgtga

SEQ ID NO: 21864 - DNA, 120 bp, Homo sapiens
agccgctcgctgctgctgacgtgcctggtgccggccgcgctgctgggcctgcgctactactacagccgcaaggtgatccgcgcctacctggagtgcgcgctgcacacggacatggcggac

SEQ ID NO: 21865 - DNA, 120 bp, Homo sapiens
catcgagcagtactacatgaagccgcccggtgagtcccgctcccgccgctccccgacctccgccccagacagccctcgggggcacgcactccagcgacctcagggcaggcctgggcgagg

SEQ ID NO: 21866 - DNA, 120 bp, Homo sapiens
ggccggcgtgggtgggcctgagccggggcccctgtgacctgagccttctgggtgaccgaggcctccggtgtcagcggggctgggggaggcacggccggttcctcccgctgagtgacctga

SEQ ID NO: 21867 - DNA, 120 bp, Homo sapiens
ctgcgacgcagtggctccaccgttccctgctgtggatgcgtctccctggcgcctgctgcggtggggcaagggccgctgggctctgtgggtcccatctggtgtgccttgcggggatggggt

SEQ ID NO: 21868 - DNA, 120 bp, Homo sapiens
attcgtttgcatctctaccaaacaaaaatcctttgccactcctcagtcttccacaggttagcaggggctttggtcatgggtaaatataatagtactccctcccttcagcgtcaaatgacc

SEQ ID NO: 21869 - DNA, 120 bp, Homo sapiens
agtcgtttggatagtttttcttaatatttttaaggagagaaataagaatgttctaaggcaaatattgtaatctgatcgagtcaaagatatttcctattcattcttcacttgtttcacgtt

SEQ ID NO: 21870 - DNA, 120 bp, Homo sapiens
aagcgattttctcctattagtattaaaaaatattttaggttttggacagtatcttttctgactgtttttaaactttagaagtaacagtcagatgctaaagattatttcttttagatgtag

SEQ ID NO: 21871 - DNA, 120 bp, Homo sapiens
ctgcgggggaggctggtggagctcacggggtgcggggagcccagctcacccagaggcatcaactcggcctgggaccctggccaggcccacgtgcacctgcctggcagtgcagggcacccg

SEQ ID NO: 21872 - DNA, 120 bp, Homo sapiens
ccacggactcacccatcccgtgcaggccgcagaggctgcttccaaatataggacactttgatttgggtaaatccttacgagtggaatgaccaggtgaaggggcaggaatattttttgtct

SEQ ID NO: 21873 - DNA, 120 bp, Homo sapiens
tgccgcccaactgccctgccacagctgatgcctacacacgtgactttccccacgtggtgccaacactgagcaccccagccttggcatgtctgctcctgccgttcccaagcccagcaaatc

SEQ ID NO: 21874 - DNA, 120 bp, Homo sapiens
taacgtcggcagggacagccatttcctctggacagaggaggagcctgaagaaggagggggctgctgggtgcagcggtaacagccccaccagtcgggaggtctgcctggaggtggcctgaa

SEQ ID NO: 21875 - DNA, 120 bp, Homo sapiens
caacgtctcccacgctgtctcccatgcacaggtgcagggaaaggggtcccaggctgccgctctgtgactaccccagtgcctggaagctcagcctccccaccgccaacaggagtgagcgcc

SEQ ID NO: 21876 - DNA, 120 bp, Homo sapiens
tgacgttcaacagagagttgagtgtggcataagaacaatggcttctaccagcaggttgagaccgaggccaggccaaggctggccgattgcccacgggtaggtcagatcgctgatggccat

SEQ ID NO: 21877 - DNA, 120 bp, Homo sapiens
tggcgtgggagggggaatgggtggacagagagagccaaggggccccatacagagatgtcacaggtagaaaaaccaatgaggtactgcccaagggaaccggctgggcttggaagggccaaa

SEQ ID NO: 21878 - DNA, 120 bp, Homo sapiens
caccgagagcatgagcctgggtccttctgggtcagccattcctggggccatgtggatgggtgtcttcctttgcttcctgctgctataacagagtaccacagtctaggtaatttataatga

SEQ ID NO: 21879 - DNA, 120 bp, Homo sapiens
catcgcatgggcaagagagaggggaagggggccatgctcaccctttataaggaccccactgcagcaataacaaacccactcttgcaataacatcaatccgctcaggagggcaaagccttc

SEQ ID NO: 21880 - DNA, 120 bp, Homo sapiens
agccgagaagtgagctggtgcccagcgggtccatccctgtggtgaggaagggaacagtacgggtgagatacagccacagctcaagtcacagaaagacagggagccatgagaagcagaggc

SEQ ID NO: 21881 - DNA, 120 bp, Homo sapiens
caacgtcacttcagcatgttcacccggatgtctaaaagtccagccaccttctgcagctgccagacactcccgcaccggctgcctgaatgttgcttcctgccactctcttacagaaggcag

SEQ ID NO: 21882 - DNA, 120 bp, Homo sapiens
cttcggtttgaactactatgaaatgtcattctctggtaaagaaaggcagtgcaattctaaacagtcacatcaataccaaaggctgcccagcctgtgtcttcagctgtgtcacagttaggc

SEQ ID NO: 21883 - DNA, 120 bp, Homo sapiens
acacgtctgaattcagcaattggatagagcagaagagggaagtttactgaacttataattttaattccaattactatggaaaagaaagaccatagcaaagcccaaatgaatctgatgcag

SEQ ID NO: 21884 - DNA, 120 bp, Homo sapiens
ctccgaggagctggggtctcctcagctacagaacagggtctcgaactcttggcctcccaaagtgtgatccttcagaggatcacaatgtgcctggtgagacaggcaggttgcaggccccaa

SEQ ID NO: 21885 - DNA, 120 bp, Homo sapiens
agtcgtcatggtgacccctccatgatcccgtagctaccctgacactcctgtctgttggccctctccagctttgtcctctcgtgaggatgcaacgctgctcactgatggcccccaggagat

SEQ ID NO: 21886 - DNA, 120 bp, Homo sapiens
agccgggggccatgggggcaggtgcagcagagcaggacacgaccacacctgccccctggccccagagcagctgctgacgtccacggctcaccaggtccttcaagaagtcagctcctctgg

SEQ ID NO: 21887 - DNA, 120 bp, Homo sapiens
ggacggcctcacccctctcctgctgtggggcaggggccaggccagggctgggccaggggccaggcatcgccttggggtgctcacctggctccttgcttcccctattaagtccaagcacaa

SEQ ID NO: 21888 - DNA, 120 bp, Homo sapiens
agccgagcagtggtggggaggggtgggggccataatctggtccctcctggcccagccctgcctggccaagatctggactctggggacacagtgaagcccaggcctagacacagcccagct

SEQ ID NO: 21889 - DNA, 120 bp, Homo sapiens
cttcgtaattacataagcaatacatgtgcaccctaaaaaaatgaggaaatgcagattagcgaagagtgcctgcacgtgtgctcctgcccccggcacacgagcgggaggagctcctgtcgc

SEQ ID NO: 21890 - DNA, 120 bp, Homo sapiens
tctcgtctcgcaccttgcaggcgcttttgctgctttaaaaagctctctgaacagaagccaccacaactggcgagtctcagagaggtgggtgaagtcagctgaggacggcatcctggtctc

SEQ ID NO: 21891 - DNA, 120 bp, Homo sapiens
ctccggctgcagcatcaccgcggttgaaacccgcttcctcttgctttcggctcagtgaaggtgggaggagatgcttggctttcgagaaggggctgttccccctggaattttcctggtccc

SEQ ID NO: 21892 - DNA, 120 bp, Homo sapiens
aaacgaccccttgagaatgcttcctggagccactggggagcaagtggctggcaccttctcaccttcttgggctcacggggaggccccatccccttctaggctccccgaggaggggccaat

SEQ ID NO: 21893 - DNA, 120 bp, Homo sapiens
ccccgcttccaccccttgacgggctccctgatgctgccaggagcagggagtagggccggaagtggccctgagtcccctctctctccacctcagacactgctgtgtgcctcactgagacct

SEQ ID NO: 21894 - DNA, 120 bp, Homo sapiens
gagcgggaactgagagctgcacctcaaggggcagcactacaggcctggactctgcccagctccttctcctggagcccccctcggaatggcagcctgccacacttgccgatgcccatccca

SEQ ID NO: 21895 - DNA, 120 bp, Homo sapiens
acacgcctggctggtggaggacatgaaccctgcctgggtgggccccagcgtctgtgccctgggaggctgaggctggacagccaccagccagtccatggtgctgcactgggccaaggagct

SEQ ID NO: 21896 - DNA, 120 bp, Homo sapiens
ggccgggctgcagggcaggagttgcagggagagtcagggatgtgagtgtctcaatgggccaggctccagcacgtcctcccaggccttgctgccttccagccctcagtgccacctcctttc

SEQ ID NO: 21897 - DNA, 120 bp, Homo sapiens
gcacgtcccccaaccaggctcctcagtcacatccaggtgctctgggacacagcatggggggctgggaggacaccatgctgcagagcctgagaggcacaggctgaaccctgggatgggtcc

SEQ ID NO: 21898 - DNA, 120 bp, Homo sapiens
aggcggccggagagctgggttggaagggatggcccagccatgaagcgaacaggaatgccacagacatggagatgcccaccttgaaggcagctgtgggactcagtgagacccagctggcaa

SEQ ID NO: 21899 - DNA, 120 bp, Homo sapiens
catcggtggggccacggggcaggtctagcacctctcctccgtggcactttcctcctccaggctccagggcccccagcacctgtcccctgggcagaaggtctttctaacctgagctcctgg

SEQ ID NO: 21900 - DNA, 120 bp, Homo sapiens
atccggccagaaaagttgtcctggccacacacagggccctaatgctgctgagttcccaccgcagcagggccaggcccagagccagggctggggtgcagccagcttggccactttgcagga

SEQ ID NO: 21901 - DNA, 120 bp, Homo sapiens
ccacggtgacacagtgatagactcccccctgttggaggagcatgtgtcaggccccacctcccatggccgcaaggattcagcaagaccctgtgggaagagtacaccaagaacattccggaa

SEQ ID NO: 21902 - DNA, 120 bp, Homo sapiens
cctcgtcatcacttgataaaactttgcagcatgccgtttgccgttgtgttggaaatgcctctgagtgcttggtgtactgggaagaaaacctcggccagggtatttttagcggcagcttcc

SEQ ID NO: 21903 - DNA, 120 bp, Homo sapiens
ctccgcaccccctgcccccgctctcccagcctctgctcccccaagtgtcccgtgcggtttctcacttccagcccggctacccaccccacgcatcctgcccgggatggtccctcttcctgg

SEQ ID NO: 21904 - DNA, 120 bp, Homo sapiens
acccgaccctgacaacgccaccacagggggccagcaggtgacaaagccttggtctactgaggacaggccactctgtccaatgcccagcggggccagccagcttctgctgccccgtggctc

SEQ ID NO: 21905 - DNA, 120 bp, Homo sapiens
gagcggaactggctgaccagcagcgtgcaccgctgggggtccttccgcccatccaggctgtccagctccgcggccacctggttcagctcctcgtcggcatagtagaaccgggcaagcagc

SEQ ID NO: 21906 - DNA, 120 bp, Homo sapiens
ctgcggatccgacctctgcaggagagaggggccagggccatgagtgggtggggaactggaggggatgcctcggttggttgccttgtccccaggccatgtgtgggctcagcctgggacctt

SEQ ID NO: 21907 - DNA, 120 bp, Homo sapiens
agccggctcttttatcagctttccacaccaggatctagagggaaacaactaaagctgaggctcaggctgccagctcaacccctgattcaagggtccccagggcccctgcatttcacccca

SEQ ID NO: 21908 - DNA, 120 bp, Homo sapiens
tgacgccagctgggaaggtgttgcctggtgtggcacctgggacagcctgcacatcaactctgcccacccggcctggctgcagaccagggctcggtgctgagcccccagtcccacctaccc

SEQ ID NO: 21909 - DNA, 120 bp, Homo sapiens
gaacgccctgcccgccccaagggcacagccccccacctctccaagcccttcaaagcaaactgccaggaaaggctggcagctttacgttcaattcacatcaataagtactttacccagagg

SEQ ID NO: 21910 - DNA, 120 bp, Homo sapiens
agacgcaacaggagccacgtgggaagggaatttagacggtcggcactgggcacagacgcccgggtgggctccaggttcttggccgcctgtcccctctgattagcatctgcaaagtgggct

SEQ ID NO: 21911 - DNA, 120 bp, Homo sapiens
ggacgcagagaacccgcttagcctggacaagcccttagcacctcgcgtctcgccgtcaggggtgacagtggtggacgcaggtgatgagcataacgttgtgcattcccgccgccgcgccct

SEQ ID NO: 21912 - DNA, 120 bp, Homo sapiens
cctcgtcaaggcgcccacggcctccgagcgggtgactgggaatggcgggggctgtgttccgcgataccgcgataaaacccccacgtcgccgcggcaaagtcgcgagagtaccgtggaccc

SEQ ID NO: 21913 - DNA, 120 bp, Homo sapiens
ccccggaagaggcggcgcggagggacagtggaggcgggggcggggcccagcaggggcggcgcagcctcagccacagagccggggtgtcccgggcgcacgcgggggtcactccctaggcgt

SEQ ID NO: 21914 - DNA, 120 bp, Homo sapiens
ccccgcacgcggaagtgggggagggaggtggaggggggcggtccaggctgaagggcgagcagtggagctgggccaccccgcaggcagtgggcagcgggcagcgtggggagagaggggcca

SEQ ID NO: 21915 - DNA, 120 bp, Homo sapiens
atgcggcggggggacggggagggggcaggggaggcgcgggcggcaggggtcagggtctccacatctccccgggtgggccacgcggggttcgagagcgcagtgcgcggaggccacaggcag

SEQ ID NO: 21916 - DNA, 120 bp, Homo sapiens
aaccgggacagcaggggacaagggcgtgaggaggggccgcgcggcgcctgtcactcgagcctggagcgctgcctctgggcccgcacgtgcactcacaaagggcgtgtcccccccaactac

SEQ ID NO: 21917 - DNA, 120 bp, Homo sapiens
gcacgcagcaggggcctctcagtgcacgcagggtaataagggtaacaacaacgccagcctccccagggtctgcgccagtcacccaggcccaccttcccacctgcagaaatgcccccggcc

SEQ ID NO: 21918 - DNA, 120 bp, Homo sapiens
tcccgctccggcctgggtggaacagctcgccccactcatgctggaagacggccagcactggctgggcctgggttctgtgcctggagctgggctacacggggaggacgtctcccaggccct

SEQ ID NO: 21919 - DNA, 120 bp, Homo sapiens
gctcgccctcagctggactttgggttttcaagctctgagagtcacccctgataccagaaggccccaactggaccacctgcagaataaattctgaaggaaaagggagcacacaagcacgca

SEQ ID NO: 21920 - DNA, 120 bp, Homo sapiens
gcacggcccctgccccctaagggcaaggtgaaggctgacccatgtgacctgctcgtaggaagccagggcaagatacagccggcctcactgtgaactcaggtggcccagcgcagctccccc

SEQ ID NO: 21921 - DNA, 120 bp, Homo sapiens
cagcgcagccagtgaaggaaggaccctgaggctgaatgtggatgtccccaggaggccacctctcaaagagacttctggggggagtgcgacgcagaattacagcacccagttattccagca

SEQ ID NO: 21922 - DNA, 120 bp, Homo sapiens
tgccgattcatcctgtgcagagccaccccaggggtgccccagttacaggggcagggaagcactgccacctccatctcacacaggcggctggggctagggcaggagtcccggtgcccacat

SEQ ID NO: 21923 - DNA, 120 bp, Homo sapiens
gcccgggtcgcagggacacaccctcccggccgggcagcactcagaagctgtcctaaccacagggtgctttcactctgacaccagacggtgctacctgccccaccccaggccctccccctc

SEQ ID NO: 21924 - DNA, 120 bp, Homo sapiens
ttgcggtcccctcgccgccccgcaccgcagtccaccccaagaacctctatgacccccggggctcaggtgcagagcagaggccacagttccacaggagcctcttcatccatcagcagcaaa

SEQ ID NO: 21925 - DNA, 120 bp, Homo sapiens
cctcgggggtcccagtggtagcgggggtcccggcccaagacctgggctgcgtcctctcctcgagcctctcatgagaaagacctttcaaacaaaaccagttcacttggccctcccagcgct

SEQ ID NO: 21926 - DNA, 120 bp, Homo sapiens
ccccgtgtgcgtggtggtggccagcctgagggatttgggtcgggcagctcacgacgaccctgaggctttgtcatgctgcagtctctgctgtcaagagacacagaggaagaaatcccggtc

SEQ ID NO: 21927 - DNA, 120 bp, Homo sapiens
tgccggctgtggagggacagtggtagcagcttttaaaatcctctccctggcgctggaggagggacttgctcagctgggtccccagtgagcatggagctctgctgccaccgctcccctcat

SEQ ID NO: 21928 - DNA, 120 bp, Homo sapiens
caccgcacagacagcgctgcagctgggagctcgtttcaacctggagacagccctgctgggtgggcggggcccctcctccccaactcctcccaaggtcagctgctccagggcttggatcag

SEQ ID NO: 21929 - DNA, 120 bp, Homo sapiens
agtcggccaggcaagccggcaccgcccccgccatcagacaccatctcccgccccgcccgctgcaggagcagaaggtgctggaaggccatgtcctgcagcctctgcttggctatggtcccc

SEQ ID NO: 21930 - DNA, 120 bp, Homo sapiens
cagcggcaaaaactagcagaacatcctcaagccaggactgcatgtgaggaagacagcgccagcatcactgtttcatagtcggatccacaaagcccggggaagtggccggcagaagacaac

SEQ ID NO: 21931 - DNA, 120 bp, Homo sapiens
acacggaagccacacagcagagagcgggcagggaacgcggtagacagtcgcacaacaacactcacacagatgccaagaaaaaggcttagaagggaatattaaaaaccgtagcagctgtac

SEQ ID NO: 21932 - DNA, 120 bp, Homo sapiens
gtgcgtttgtgctctatttacccacccacatctaatgatacaccagtgctggaatttaagctcactctgctctcagtcagcctctcactgcatgaaaaccagggcagcactgacccatcc

SEQ ID NO: 21933 - DNA, 120 bp, Homo sapiens
acccggtcagctaacaccagcatggtcttcacaggacgtgcctaccacccatccagcaccctcagaaacaggatccccatttgggagtctccatgaggctggcgtgccattatccgtgtt

SEQ ID NO: 21934 - DNA, 120 bp, Homo sapiens
ccccgtggccgcctgatgacccctctgggctgtggcccaagcctgtgtggccccagctgccttctcctcagctaccagggctgccctgagccccagctcctcacagatgcccccacactt

SEQ ID NO: 21935 - DNA, 120 bp, Homo sapiens
cagcgtcgggtctgcagagggatctgagatgggcaaaggactagtgggaccttgtcactgccactcaagtgggggcgtgggaagcagtgcgtggaaccttccattgagagaaagatgcag

SEQ ID NO: 21936 - DNA, 120 bp, Homo sapiens
gcgtgagccactgtgcctggcctgccttgtggtttctatcctcagtctcttggcttggtttgaccttacgcatgccagggagtgtgctcacggagaacccctttctcctctgtcttgtaa

SEQ ID NO: 21937 - DNA, 120 bp, Homo sapiens
actcggccaggctgcccaggtgaccctgtgctgaagtggcctatggggctttcctggccccctggcctccaggcctcaaggccacagattcctgtctgacccttgctccaacctgccctc

SEQ ID NO: 21938 - DNA, 120 bp, Homo sapiens
ccccgcaccgagaagtggaggtgacagccccccccatttaatgggggctggccctatggacactgtggaggtgatgccatgtgacttccaggctgggcctcaggatcaccttgccactct

SEQ ID NO: 21939 - DNA, 120 bp, Homo sapiens
catcggggagaaagcctggagggggcctgcctgacagctgcaccagccggggtggaccaaaggccgcagatggttcagctggctgacccttcccaactgaagctccgcccagttgggccc

SEQ ID NO: 21940 - DNA, 120 bp, Homo sapiens
ccacgcccacactgcaccacaccgcaccgcacccctgccatactggtggcctggcctgctgggaccctcccgaggagaggggctgaattcagagagagcagggacttagggtgagcctgt

SEQ ID NO: 21941 - DNA, 120 bp, Homo sapiens
ccacgccagagactcagctagaggggatcagaggagagtgaaaggaccctgaggctggggtggggtgtgggtggtctctcttccatggcccagccttccaagaagcaaaggtttcccgca

SEQ ID NO: 21942 - DNA, 120 bp, Homo sapiens
ttgcgggtttaatggcttctgatctggtgttctccaagccagcagcatcactgtctcttcccttgccccgaatcatcaggaccgcactggcgcaggaacgcacctccaggcagccttgct

SEQ ID NO: 21943 - DNA, 120 bp, Homo sapiens
agccggggcccagggcaggctcccgggcagtgacggtcctggctgtgccagaggctcatgctcgctttgttctgggaggcctggtctccagggcctgttttcagcaccagggcttcaagc

SEQ ID NO: 21944 - DNA, 120 bp, Homo sapiens
aagcggcctttcttctggcctccttagagagaggctcctgctggcctctgtgtccatgcacagccaggctggtccctaaagcagcccctaaaaggacagcctggcgtggtggctcacgcc

SEQ ID NO: 21945 - DNA, 120 bp, Homo sapiens
cagcgtcacagcctctttccctaactgtgcagctaaacccactcacagaacatgccaggtgctcctcctggagacacccccgggagcccctgccctcctgctctgtccttgtcctgccag

SEQ ID NO: 21946 - DNA, 120 bp, Homo sapiens
catcgcagcctggaaattccccacaacgacagtcacttgggttcagcccctgcttcccagggcacccccagccgagactcctctgcatccctgactcttcctgcactgaacgtgttcggg

SEQ ID NO: 21947 - DNA, 120 bp, Homo sapiens
gggcgtccctggctctgaaatatcatgactcattccctgtgctaagctgccagtgggccttgtccgtccagaagaccgcatccttcagttctagggcgttttcttgttatttctctctct

SEQ ID NO: 21948 - DNA, 120 bp, Homo sapiens
aatcgttccctgattttcttagcgttttcccctactttctatagcttcatctttttctactcagggagatttcctcaactttaccttccgtctcctgtttatgtttttagttctgtcatc

SEQ ID NO: 21949 - DNA, 120 bp, Homo sapiens
acccggccgatgcctggatttcaatctcagttgcctggctcaagagatgtgccctaattgcagtgccagcctggctccacacaccatgcttaggagttaggccttgataaggagccaggg

SEQ ID NO: 21950 - DNA, 120 bp, Homo sapiens
ctgcggcaaatgtttcggaaagatggcctggcagtagggtagacgggcacccagggacaggagacccagcatgagcaggcatggtaatggtgcacaggaggatgacacggcacagcactg

SEQ ID NO: 21951 - DNA, 120 bp, Homo sapiens
gagcgttcctgtcgtttccgccacctggatccctctcacctgtgtctgttttgcaactccatctcgttatgctacttcagtacgttccatggtgtggtctctggaagcagcacctgggaa

SEQ ID NO: 21952 - DNA, 120 bp, Homo sapiens
atacgtaaattggagggcctagcaggctgtgcttaacgagccctctgtgggggagcctgatacaggctcatgcttgagaagcactctcctaatctaagccactagcacccagcagtgggt

SEQ ID NO: 21953 - DNA, 120 bp, Homo sapiens
atgcgtcgctgacgctgagtttaccgtggtcggcctcgcttctcagtgaagtccaagggcctcgcagcctctgcatctggtgatttctctgcctttcctcaaagcttctgcttggctgcc

SEQ ID NO: 21954 - DNA, 120 bp, Homo sapiens
tcccgattcaccattcacctggtcccagcaacagaagtctcagctggacacacaacatgctttagagtgagtggctcttgtcttctcaactccggacggcgacagtgaaattgtgggaag

SEQ ID NO: 21955 - DNA, 120 bp, Homo sapiens
actcgcacctcctcccagcagttagcacggtaccttgccaaggtggcaggagccaggaagaagagtaggaggtggcataataattacaattgcaggctttgggatcaggaagtcctacat

SEQ ID NO: 21956 - DNA, 120 bp, Homo sapiens
atgcgacaagaatgcttacttcctaagatgaatataggattaaggatgtcattgcgtgaaatagtaagcaaataacctagggacaggaaggaccagtacattattgagctcagctttgtt

SEQ ID NO: 21957 - DNA, 120 bp, Homo sapiens
ccccgagatctccttggaagcagaacccatagaactcgtggaaactggtaagattgccagggacactacaactgtggggtgttaaagtggagagagaacactgtaccagggtgagctagt

SEQ ID NO: 21958 - DNA, 120 bp, Homo sapiens
tagcgcaaatgagatagcccaccttttctatctgaaactgcatccccaattgctggaccttgtaaagtacttcgctttcctcttctgtttttcattaggacatgaaatcacccaagaagg

SEQ ID NO: 21959 - DNA, 120 bp, Homo sapiens
tttcgttataggacacagcagtaaagggccctctagcctgctctcttgactggaataatgggaactcatttctccccatcatagtgacacaggaaataagccttgccatgtctaggtgca

SEQ ID NO: 21960 - DNA, 120 bp, Homo sapiens
ccccggcctgggagcttttgtgatttaggagaatgcgtatttactgcaagtctcactcacagatgggccttactcaggtggtcatgtatcctgggtagtaagtcaagcactttgagtacc

SEQ ID NO: 21961 - DNA, 120 bp, Homo sapiens
taccgaacacacagggcctatttctcttctgccgtacacttcctcccctacctctgcctgttgtattcagggttcacacactcagtttcgcttacggagtgggtgggggtgtgggcagct

SEQ ID NO: 21962 - DNA, 120 bp, Homo sapiens
cttcgcagagcctctttcctgccttgtcaccttacccataggctctgctctttagtgactccctccgcggccccagcccttcctcctggcagcttccaatgatgtattactggcagtgtt

SEQ ID NO: 21963 - DNA, 120 bp, Homo sapiens
tcccgtaagtggaccaaattatgtttttatgacaggccttgttgtgggtcctgaagagaacagctgtattgtacaggctgccctgtaccccatggattaattatccattctgagccctgg

SEQ ID NO: 21964 - DNA, 120 bp, Homo sapiens
gctcggagactggtacttgttggcacagtgaacttctgtttggttatgtataaaaaatttagatttgtactagggttttggaagtgaatggcttctgaggtagaagtcctattttattta

SEQ ID NO: 21965 - DNA, 120 bp, Homo sapiens
gcacgagccccatcgtacttggtcagtgtttatttccttccttccttctccttccctcctctctctctttctttcttattttcatagtcttagttgcgcatgacttttgtcctaattagt

SEQ ID NO: 21966 - DNA, 120 bp, Homo sapiens
aggcggcttggatctaggatgaggagtgttttaccatggcagtgtttgaaattctgtcttaagtcttctttctttgttgtatttcacaggaggtttctttgcatattcttctcccagttg

SEQ ID NO: 21967 - DNA, 120 bp, Homo sapiens
ctgcgctactgtctttgcttcttcgggctctttcagatcttttcagtgattgcctcatgagtgccacggagaaagagcctgcaaagtaatgcaggctttcccagtttctgcagttgccag

SEQ ID NO: 21968 - DNA, 120 bp, Homo sapiens
tttcgcaatttgtcttttattcttgctgaactcttcttactagtgtgtctgattgtgtctaccccaggtgagtgtatttgttttctttccctgaaggcacttaagattatgggccagtgt

SEQ ID NO: 21969 - DNA, 120 bp, Homo sapiens
actcggcccctcccgcatgtcccgctttcctgctgtaattctcttcctagcacttatttctaacatactatgtattttacttactcatttggtttgctttcttcttcattagaatataaa

SEQ ID NO: 21970 - DNA, 120 bp, Homo sapiens
ttccgactccagccctgctcttgtattttagcctgcctctgcccttgggaacaggcttctgctgtttgccctggtccagaggccagcggaagtgcctatggttccctgcagtgcgtcttg

SEQ ID NO: 21971 - DNA, 120 bp, Homo sapiens
ctgcgttggaggaggatctcatttcccagcccccggcttgtcttggtaatggatagtttgtcagatgagccattctctcctcaccagaaacagtgaccttgggaacagcagaggtgtagt

SEQ ID NO: 21972 - DNA, 120 bp, Homo sapiens
attcggaccagctgttgctttgtaggtcagcctctttgttggagctggcctttaaaaaaataacatgatttaccttccattaagattcactctttttttacttaaaaaatgttcactacc

SEQ ID NO: 21973 - DNA, 120 bp, Homo sapiens
atccgtagtttctcttttttattgagtaattttacagataaaccaatttatgcattcaccaattaattgatggatgtttgtgttgttcccacgtttgggctattttgaaaaaagctgcta

SEQ ID NO: 21974 - DNA, 120 bp, Homo sapiens
cttcggggtctcataaaatgagttagaatgtgttcctgtttcttctcctttctggaagactgtgttagaattggtattatcatctcttccttaaacgttattggttcttgctttctgttt

SEQ ID NO: 21975 - DNA, 120 bp, Homo sapiens
gtgcgtgctcgtgtgggcctgtagaggggagtctctctctacttcctccttggcaaggtctccgatggtggcatcttctcagttcccccctctagcctgactcttgggcagctctgtgct

SEQ ID NO: 21976 - DNA, 120 bp, Homo sapiens
tcacggccttgggggcagctttcccagcgagcccacctctgcccggtggcagccagactctgccttgtatctgcaggggtctgaccggccccgtgtcttgtgctggtcctggcctgtgtg

SEQ ID NO: 21977 - DNA, 120 bp, Homo sapiens
acacgcctttctccaggacaaggagaaaggcatgtttccttcctctctgctagtggattagctggagacttgggtgcaggtctcctgggaatgagtgggaacattcgttttggggctttc

SEQ ID NO: 21978 - DNA, 120 bp, Homo sapiens
ctccggcagcctggtcacttcggctctctgatggcccagagataggattttatcaattgtcctgctctgtctctggtcagggctctggtcagggctcagagtgcacggctctcctgcagc

SEQ ID NO: 21979 - DNA, 120 bp, Homo sapiens
tgacgacactagtaaggttgaagtggaaactccgagcaccgaaagggacagcagggatctgcagctctcgtggccttggggtggagatgcagggagtacagcttcccagagacttggtag

SEQ ID NO: 21980 - DNA, 120 bp, Homo sapiens
attcgaatagataaaatccccccaaatgagcagctcacagtaaaaaaagtcataaaacacaaggttcatgacagcacagttaaaagccagcagaagcagtagacagaatcacataacaaa

SEQ ID NO: 21981 - DNA, 120 bp, Homo sapiens
aaacgtatcagatttcccaagtaagatgttgaaaaatccttctctggttatagtataatgacagctacagaacatcaaagaaaaagtgatctcaaacacaaaacacaggactttgttgaa

SEQ ID NO: 21982 - DNA, 120 bp, Homo sapiens
atgcgcagttaatcagcattttgccactctgacttcattatgccttctttttcttccactttctcttccctctttttgatgcagtattttagtatgggtcccagacaatgtgctttttgt

SEQ ID NO: 21983 - DNA, 120 bp, Homo sapiens
tgacggtaatagtaatttcttaccgactaatgccagccaatctctttttatggttgggttattccaatcaggacccaaaaatcttcacaaattcatagccacattattacactgccatcc

SEQ ID NO: 21984 - DNA, 120 bp, Homo sapiens
actcggtgtctcagggcagtaattctcaacagttttggacttaggcccctttatacttaaaaatttaggaccccgaagtgtgcttttttatgcagacttacatcagtacttgctgtattg

SEQ ID NO: 21985 - DNA, 120 bp, Homo sapiens
cctcgcagtcctacagtagatttagactgactattgggcctgattgggaggctttgggggagaagccttgtcccgtgccccagaagactagagactgctggagtgcagagaacacagtgt

SEQ ID NO: 21986 - DNA, 120 bp, Homo sapiens
gagcgtccagcatcggggtacccacgatggtccaaggccctgagacgtcccattgggattcactggaggcctctgggacgccttcctgagttttcagggtactctccaccccaggctctt

SEQ ID NO: 21987 - DNA, 120 bp, Homo sapiens
cctcgagggaccacctcctggtgctttctacgctgcacccattttacagagcagctcacagatgtgtgttgaggctcactggctggctggttgttgaagggacagcaatagttgacctat

SEQ ID NO: 21988 - DNA, 120 bp, Homo sapiens
tcccgtagcaggtccaaaccgggggcctgtgctggggcagccgttctgctggagaccagggcacctgcctttacatgcttgttatttgtccatatattgacaaggcacgtgtgctggatt

SEQ ID NO: 21989 - DNA, 120 bp, Homo sapiens
cagcgagtgtcctgatggagttggtctctcctctgctcccgtgcaggcccacagctcactctagacactggactgcaggacccatccacgaggtggctgctgggtgctgctcctgacata

SEQ ID NO: 21990 - DNA, 120 bp, Homo sapiens
cctcgtggcctgctgtgttggcattagggggtcctctgacacccactcattgcctccacagcaggcagtgagtgaattccattctttgtgttttctctttcctgtctccctgtctctcct

SEQ ID NO: 21991 - DNA, 120 bp, Homo sapiens
acacggtattcttaggtacacaatttactacaacagggctcccgcttgcctctgctgagtgttcccaggtgtcttcaggttggtgaagctcatcctcaggcagtggccttgagtagggcc

SEQ ID NO: 21992 - DNA, 120 bp, Homo sapiens
gggcggctgctgacatcatgctttcttagatcttcactttttgtacatctgtaaatgctccggccctctctcacccttgcttgtgcatcagtttcctgcatcagcagacggtgttctgtg

SEQ ID NO: 21993 - DNA, 120 bp, Homo sapiens
aatcgagactcagaatgctttcccatgccctgaagcacctctctgtacaaacatgtggagcctgctgtggctgggggctgtcctcactctccagtcacatccgctattctgtgccaggat

SEQ ID NO: 21994 - DNA, 120 bp, Homo sapiens
ctgcgtttcctttaacctaatctttcccttcctcctgagtgtagattaccaaaggttgactttcccaggcctttccctgaacacacccagccttcattcctagaccacccagtcccagtg

SEQ ID NO: 21995 - DNA, 120 bp, Homo sapiens
ccccgctgtgtgccctcagggatacagttgggatccgagatagccaaggctgtcatagagcaggtccctagagagagactcctaagtgacatgtctgtgaacaaacacacttgaaagcac

SEQ ID NO: 21996 - DNA, 120 bp, Homo sapiens
atgcgagtaaaacgtgcctcatgctaccatggaaattccccagtggtagaaagaaatggagtgtttattaaaggttctgaaaaattgtcccgtgttgagggctgcagggaaatggagact

SEQ ID NO: 21997 - DNA, 120 bp, Homo sapiens
ccccggagcaggtcccaggtctctccaggcaacggctcacccatcctggtgcccccaccatcctctgtgtgccaggcagagcaggcagcaggagacagaaagctcccaaggagctgcatc

SEQ ID NO: 21998 - DNA, 120 bp, Homo sapiens
attcggacgatgaggccacaggatttcctggtggacaggatgcaggtaggagaaagaggtgaagacctgcgctgtgtgcctggaggtgggactggagaccagttctggatggtgagtctg

SEQ ID NO: 21999 - DNA, 120 bp, Homo sapiens
caccggccacccaggtgagaggtctggaactggggactgctgttcatggacagagcctgtgtgagggccctgcaggggtgagtagatgggatgggggcccgagctgtggaaccaggaagg

SEQ ID NO: 22000 - DNA, 120 bp, Homo sapiens
cttcgaggcaggtcaggggagacaaggcccagggcacccccacccaggcaccggtttgcaggagaatgaggtggggacagcaggtcctagaactctggagattgcacgaaagctggaaaa

SEQ ID NO: 22001 - DNA, 120 bp, Homo sapiens
gcacgacgaactttcctcacttgtttttttttccaggtgtgaggaagagaacgttcctttgttcgtgggatgatagggcagagagtgaagcaggtcaggccatgaccacggcaacagtag

SEQ ID NO: 22002 - DNA, 120 bp, Homo sapiens
ccccgggactccagccgctgcctcttctggctgcggtggtggctggggaaaggcccaggcccgggcctcgccctatggggaagctgcctgcccaggcccccagtacctgccctgctctcc

SEQ ID NO: 22003 - DNA, 120 bp, Homo sapiens
ttccggacacacatggggatgctaggccaaaacccgtaagagccggccggcctccaggaggggcaggggtcttcccctacacaggggtcccggctcagggccgctgcccttccccgcagc

SEQ ID NO: 22004 - DNA, 120 bp, Homo sapiens
ccccgggaccttgggaaatcatcctgctctttgtcctgacctgagccaatgcatttgccttgtcgagcccttaggagcagaaaagcgtaggcgagcagctggcagccaccatcgcatttg

SEQ ID NO: 22005 - DNA, 120 bp, Homo sapiens
tcccggaaggcaagaggaggcagagaaaattccagaacccatttaagcgtctgggaccctgaggtaaccatgagctactggcaggccgggggacacagcgggtacagaaggggtctctgg

SEQ ID NO: 22006 - DNA, 120 bp, Homo sapiens
tttcgtgaggaagtattcgggctgtgcggcgccgcgaccctggcaggacgctgctgtcccgccagcgaaagcggggcgcgctcagggctgcgggcagcgggggtgcagcggggagagcca

SEQ ID NO: 22007 - DNA, 120 bp, Homo sapiens
gggcgcggaggaggggctggtatgggaccctccgggtgggcgcggccccgcggggccttgcggccacaccgccaccgtgcccagcggccccatcagcgcatattcaggatgaaccccgga

SEQ ID NO: 22008 - DNA, 120 bp, Homo sapiens
acacgcgcccagaaccgtctggtgacccagtgatgaaagctcgaatcttataggatccgtattcatttcccgtgggctcaagcccagcctccgcgggcggcgcgggccctcgcggcgagt

SEQ ID NO: 22009 - DNA, 120 bp, Homo sapiens
ccacgaggaggcggtgtggacccgcggccccagaccaggcctcaggcagaaggcgagcgcgagcgccccgcccagcccctccccgtcccgcaacccgcgccccgaccagcgcccccagca

SEQ ID NO: 22010 - DNA, 120 bp, Homo sapiens
cctcgctctcgagcagtctccacgtttgtctcagaggagacccactttgctccccagcgtgggcccctgagcgctgggggaagttggttggtttgttaatgacagagtctcgctctgttg

SEQ ID NO: 22011 - DNA, 120 bp, Homo sapiens
ggacgagaaggtgtaaggatgtgaaaagcacctggtactgtacctggcacagcaggtactccaggagggctgagggtgtgcacatccctgactgggcctcacaccatcacaggccagacc

SEQ ID NO: 22012 - DNA, 120 bp, Homo sapiens
ctgcgtcagcacctacccccccactcccctgccgcctcttcagtgtgatgggaaagtccccacccttggggtcctgagtcttctgctgttcccgccagctctgggctgggtggggcagct

SEQ ID NO: 22013 - DNA, 120 bp, Homo sapiens
ggccgggaggaggggcagtgcaggctgggggctcagagacagggctactgggccagagccattctgagctacttggtgggccccagtatcaccgccgatagaaccccaccctccacaggc

SEQ ID NO: 22014 - DNA, 120 bp, Homo sapiens
gttcgcacataagagcccatgtcatcggggagagggtggcactttggggaggggtgttctcagggccgtagcaggggcctttagggctgccagcatggtttaggggacccacaagtgtgg

SEQ ID NO: 22015 - DNA, 120 bp, Homo sapiens
ccacggtggaggctgcaccctgttccccctgtttggctgaggtgccctgcacagaggtgctttgcatttctgggtgatcattctctaggcgcctggtccgtccacactgtctgcagtgac

SEQ ID NO: 22016 - DNA, 120 bp, Homo sapiens
ctccgtcaactctgagcttggcatctgaggccagccctgtacaccctgccctgtagtcaggccctggcggggccgcaccgacgtttggctttgctccactcccctcccggtctctgcccc

SEQ ID NO: 22017 - DNA, 120 bp, Homo sapiens
attcgaaagtaataagagaacttttacccaccataagtggggtaataggggaagaatgggggaaaaaagggagtagggttggaatagaattaaggagaggtagtccagaccaattttgac

SEQ ID NO: 22018 - DNA, 120 bp, Homo sapiens
cagcgtgcacatattccttccctattctttcaacagtatacaaaagtcgttactactttggcctagattccatgttggctagcttggcccacaattcagaacaggtttaaataagcttcc

SEQ ID NO: 22019 - DNA, 120 bp, Homo sapiens
tgccgcttccactagatgtctccgaacttccatcactgcctctttgtgcttagtgttcagtaaagcttcccatagggctttggctgtggtgtcactgcaggaaaatcacaaaaagagctt

SEQ ID NO: 22020 - DNA, 120 bp, Homo sapiens
attcgagattaaatacttgtccaagaaacaaagcaatcagcaatgagcatttcattcaaaaattactcaacagacttcctaattagtaggcttcctactaaatgaaaatcaggaattatg

SEQ ID NO: 22021 - DNA, 120 bp, Homo sapiens
aaccgttgataacagcacgaagcactgcattatatgcaaggtctcatctgggctcacttctccaatagccctctgtctcacccaacatgctatgtccaaattataaatgagggcagtgtt

SEQ ID NO: 22022 - DNA, 120 bp, Homo sapiens
ttccggaagatctctgccatgtagccaagtatacacatttgtagtaacgttttaaaaactgaatacaaagaaacaaggatgacttctgtccctttctaaagactttttcctccaattaaa

SEQ ID NO: 22023 - DNA, 120 bp, Homo sapiens
gcacggggaggggcagtggaaggagagcataaaagaaggtgcagccacactctgggggttctgcattccttgccaagtcatgtcaactttgatatgtaggtgacaggaagccaaggagca

SEQ ID NO: 22024 - DNA, 120 bp, Homo sapiens
caacgcaacccagaactttcagagtagaatgtcactaccctcctcttttccatgagaatatgtatctggctaattcatctctaaaatcacagtaagttaggtaacgttgtggttgcccca

SEQ ID NO: 22025 - DNA, 120 bp, Homo sapiens
ggccgggttcccccatcacctctgggcccagagaaggtcaggggagtcagggttgcctgctaaatagtcctggcagcccttttgtttgtaagctccagttgaaggccacaagaatcaaaa

SEQ ID NO: 22026 - DNA, 120 bp, Homo sapiens
ctgcggcctgccccgagggccctgtcttatgctccacctcggaggccagcaggaatttcagtatttctgtgaaaactgctttaggttatttctcctcttattccaatcagtttgccaaag

SEQ ID NO: 22027 - DNA, 120 bp, Homo sapiens
agccggtccctcagcaacctagaagggatgggatagaactgttatctgagtgtcagatagaaaatatacgagcagggaggggtttcttggcacttttggcaaacattggacttctgcctg

SEQ ID NO: 22028 - DNA, 120 bp, Homo sapiens
ttgcgtcatccctgaagtccccctggaagcccagcccatgtccatccagccttatggggagttcatttaccttcaggggcagtggtgttttcagaattttccctgccctggtcggcatgg

SEQ ID NO: 22029 - DNA, 120 bp, Homo sapiens
tcccgctctttgtccttcgaagaacactcaaagctcgatttatttttttaaatgatctgcttctaatagtggatctctcaaagggccgtgctgaggaatagcgacaggaggaacagtagt

SEQ ID NO: 22030 - DNA, 120 bp, Homo sapiens
gtacgacgtgcttaaaatcctgcttttcttttttgtttctgggctgaactgaatacaataccacttttcttgagcagcatggctgaaaaattactgacactgcaggagtgatgaatcatt

SEQ ID NO: 22031 - DNA, 120 bp, Homo sapiens
ttgcggtttcatttcactttggcgaattggacattgggttcctgccaaaactaccagaacgatttccccttaaaaaacatttacagaactttccacagtaagtattccacagagggcaat

SEQ ID NO: 22032 - DNA, 120 bp, Homo sapiens
aatcgcaagccaaggagcccattcccggacaaccacccatttgactcacccctagttcggttgctccggccagagtccactgggctgattgctggctgcccgtcctctgccgaggacacg

SEQ ID NO: 22033 - DNA, 120 bp, Homo sapiens
ggccgtagtgggaggcacctttacagctgtaacagaaccagcggggaggtgaagaagagctttggctctgctgccattcctcagtcagccctcttcaaatacaattgaagaatgtataat

SEQ ID NO: 22034 - DNA, 120 bp, Homo sapiens
tgccgctatatcctctcttcccttttcacacatcggtactcaatatacatttgccaaccaagtgaattcataatttgagattttttaaagacgcccactgcattctcttaaagcaatctc

SEQ ID NO: 22035 - DNA, 120 bp, Homo sapiens
gaacgtaaatataaagctcctcccagattccatatttaactgttcatgcaaacagaatcaccctcaccacaaagccacaggagtgagttcagcattgctatcctctagtggcagcttggt

SEQ ID NO: 22036 - DNA, 120 bp, Homo sapiens
tctcgaggctcagaagaccaaggttggagctgatctaggtccatattttgccatgaacatgaacactgccactcggcaagtcattgcagcgcacaggctaggttttggtcaggaaatggt

SEQ ID NO: 22037 - DNA, 120 bp, Homo sapiens
ccccgcctccccagaaaagatagtgaggctttacttgagtgtgctccaactcaacctcaaggtgccatgccaccttgtaagaaagcttgttaaaaataagtgttattagcctggctgaca

SEQ ID NO: 22038 - DNA, 120 bp, Homo sapiens
catcgacacagtgctgatttaagtatcctcacttattggggtcaaacatttgtctttagtaaaataagggcactgtatttgattctaaaaataaatggcaggagagctgggaatggtggc

SEQ ID NO: 22039 - DNA, 120 bp, Homo sapiens
atgcgttctgtgatttcaggattctctagtgagtgggtggaggtaacaaccaagttaggataccattagcaactgaatcaacttcagcaaatggctctctaaaactacactgacttggca

SEQ ID NO: 22040 - DNA, 120 bp, Homo sapiens
cagcgtctgagctgggcatgaactcaggaacacaagagtgcattgctgttagagagaaaggaaaatccaggagggtctgtgcatctggaaaaacaaggaatacagggcaagcttccccca

SEQ ID NO: 22041 - DNA, 120 bp, Homo sapiens
gctcggataaagggtggaggaagcccagcagatcccccaagctctgcctgcttttgggatcctatggcccagagtagggaagagaaggcctccatctcggacatgcaggcatcacccatc

SEQ ID NO: 22042 - DNA, 120 bp, Homo sapiens
aagcgtgctaaactggcccagcagccctatttactgttccaaatgatagtttttcaagctttggtgacaaccacagccagcccctaacctttccgctggtgccacttaccatccctgaaa

SEQ ID NO: 22043 - DNA, 120 bp, Homo sapiens
acccgtttctgcctcattcctctaagcacttcaagatccagcttaaacccccaactcctctggaagccttccctgatcaatttcaccaacatggacaatctctacctcctctcaacttac

SEQ ID NO: 22044 - DNA, 120 bp, Homo sapiens
catcggggaacagctgcacagaattctctcacaaagcatacacagcaattggaagcttctaagaaagtcagataaatgtggaaacaccatcctggtaatggtgattcctggcaaagtatg

SEQ ID NO: 22045 - DNA, 120 bp, Homo sapiens
gtccgttcagttattcagcaaaaatgttgcctttgatttatgtacttgtagaagagaaaatttttaagtggtataaggaccttccttcaattaggctataaaactgaaagtaaacaaatg

SEQ ID NO: 22046 - DNA, 120 bp, Homo sapiens
attcgtgacagcagccctaggaaaccaacatagcaacgaagaaggatagcgcatgggaatgggtgggcagggaagaatatcatggcactggatttcaaagatcccaacctcagcatccat

SEQ ID NO: 22047 - DNA, 120 bp, Homo sapiens
gcacgggctaccactacatagtcatgggtggtagcactatctaatgtgaccagacaagcttttctgatctgaactctatgaactctatttaaagtctctgttttcatttgcccactgact

SEQ ID NO: 22048 - DNA, 120 bp, Homo sapiens
tcccgtctggttaggttcataaggaggaatacatttttgcaaatgttccaaacacaaggcacacacagcaacacttttcatatgattgctagaagtcattcacattagtctataatcctt

SEQ ID NO: 22049 - DNA, 120 bp, Homo sapiens
cttcgtatcccataggtttcaaaagcatcaaaaataaaaataacatggatatatacattttatacatagggttctttttttactgatactatacctgttttcaggtatagagactgtctc

SEQ ID NO: 22050 - DNA, 120 bp, Homo sapiens
atacggccagtgatggggaattagaagcattaggctccacttctggcccctttgctaattcctgtgtgaccttgggcaggtcagttaaaatctctgtgttgcagtgctacatttacatga

SEQ ID NO: 22051 - DNA, 120 bp, Homo sapiens
ggtcggcactccaaaaataataactactgaggacaatgcctgcaattcagagtggaaatcaaagagggatctcagagactgcacatctattactcctttttttttttttttttttttttt

SEQ ID NO: 22052 - DNA, 120 bp, Homo sapiens
cctcggtcgagcaaaaacaaaacttcattgtcttgaaaaaattagcatgcacctccttccacacatcactgtggtaagaagaacacaatgaggataaagtggccagggttgaaaagccct

SEQ ID NO: 22053 - DNA, 120 bp, Homo sapiens
tgtcgcccacttaccagctgttcatatctcatgactgcaaacacagtggagaagccaagtcagaggcataatcaagagttatttaggtcaggtgtagtggctcatgcctgtaatcccagc

SEQ ID NO: 22054 - DNA, 120 bp, Homo sapiens
ttacgtattaaaaacaagaacgactgtcaggaaggcgaggaagcactgcctaacagagcatggcagtggtggaaaagcagaccagggagcccacaaggagacaatgatagagaagtcttt

SEQ ID NO: 22055 - DNA, 120 bp, Homo sapiens
ggccgagatgcttacagaggaaggatggacctctgtataagctctgtagccttctcagtaaaaagtaaacagaaaaaaatggggggagagaaggaatgaagaaagtgagtctatggcctt

SEQ ID NO: 22056 - DNA, 120 bp, Homo sapiens
cctcgccttctatggtccccacctccctggagccctggagctggactcattctgactttgccaggaaagggctagctatgaactctgacttccccctccagagagtgtccatgtcaatgt

SEQ ID NO: 22057 - DNA, 120 bp, Homo sapiens
agacgtcaacaattcagtattatttttggagctctgaacctgaaagtagaagttttgttaaagcaccaaccaaattttaaaaaataaaattaagcaaataaaataaagcagagaaagcta

SEQ ID NO: 22058 - DNA, 120 bp, Homo sapiens
ccacgtatgcctcaaatcctatgacagcaggtgccaccaagacaaagctttctctatacaggacaaagctccagacaaaggctcattcattcatgctacagtgtaggaaactgcattcca

SEQ ID NO: 22059 - DNA, 120 bp, Homo sapiens
tcccggattttgtagcacatccagtgctacaaattgatccaaactcttaaattcaaatcttccaaaagaaaaaaggaaaggaaaagcagctcacccccacctggtagagccctgacaggc

SEQ ID NO: 22060 - DNA, 120 bp, Homo sapiens
caacgtggcactatatttcctttataaagctccttcctacatatctcacacaacacacaagaaagtcataaccaaattatttaagaagaatttctcaaaacactaagacaaaagccgtct

SEQ ID NO: 22061 - DNA, 120 bp, Homo sapiens
taacgtggaaggtaatcttgttcccttactgctgacatgtagctttctgcctggggttttatctttaactccctggtaatccaaacggagcaggaaaacctcagacaatagagcctcttt

SEQ ID NO: 22062 - DNA, 120 bp, Homo sapiens
ggtcggcaccgaacaaccatcattaaatggtttctggcgcaaagtggcaggcttgggtaagctgaaatgtttatgacaccaaaataaagatgttccacactgctgaaaccggggagtcac

SEQ ID NO: 22063 - DNA, 120 bp, Homo sapiens
tcacgcagagaacaactgaaatggaattacacaccaaggtttacttaactagcacgactttaactcgtgtctgcctgatacacttaccaaagagaagtggcagaaacccagggtggacaa

SEQ ID NO: 22064 - DNA, 120 bp, Homo sapiens
cttcgctctttatcaaattgccactgagccaagagaaaactatgtccagcatttcataacacaggaagtggggaagcagattagatattgggctctgcagtcaccacaaaataagcagtg

SEQ ID NO: 22065 - DNA, 120 bp, Homo sapiens
gctcgtaaaagtcacttttttccctagacgaaagcttaaccattggtgagttttggggtttggtttctgtttttcagtatgatcggctaaacctctccaggaaaataatggaatatgtaa

SEQ ID NO: 22066 - DNA, 120 bp, Homo sapiens
tctcgtgggctgtttaagaggagtttactgattcagactgcaggcccctcctgctacacacacacaccacccccgtgtctaggctgtctggaatgtgtttctctggttatcaccacctcc

SEQ ID NO: 22067 - DNA, 120 bp, Homo sapiens
tcacgtatgttctctgaacactaagcatctttaacattaggaacaggatttaaagcagggggtatctattgtgttatcagtcttgagttagcacagattgtaaaatgcacccctttctta

SEQ ID NO: 22068 - DNA, 120 bp, Homo sapiens
aaccggtcattgggatgcctgggttcaagccaagattgccctccggcatgaatctcaacttcctttttttggtaaaatgtggcagagacacaggtgaccttcaagatccctcaaacttac

SEQ ID NO: 22069 - DNA, 120 bp, Homo sapiens
tggcgccattttcccagccaggcagccctttttcaagacttgccggatattgttgctcttactgcagcttctgaaaaaagggccagttattccagtggcacaacagaaaggtccacaacg

SEQ ID NO: 22070 - DNA, 120 bp, Homo sapiens
ttccgatcacctcagttgcttttgaggggggattttcatttacaaaccctattcagaggctttttggatgccttctgtcctggtgcaatgaagcaggctgcctttttttccaccaaatgt

SEQ ID NO: 22071 - DNA, 120 bp, Homo sapiens
attcgggacataaaggacatcatttgcctgccttattatctcatttttcagtgaagctgacaggacagctgcctgttattacagggcacaccaggaaatgtttagctgccaaacagaaaa

SEQ ID NO: 22072 - DNA, 120 bp, Homo sapiens
gaacgagtgagggattaacagccctgttcatgccacacaaatagaattcttgcacctggtagtcacgcagttagatttattatttcatagggtatgttacttaaatcccatttacaaaga

SEQ ID NO: 22073 - DNA, 120 bp, Homo sapiens
ccacgcactgcaacctgagcaaaccacttcgctggttaaagacacatctagttggtctctttccactcacagatggaatacttgggtttttttggtaggaagacagtttttggagtctaa

SEQ ID NO: 22074 - DNA, 120 bp, Homo sapiens
actcggcacatttcttcatttctcacttgagtgcccttctttagtctcctttcaactgcccactttatatcggcttcattacaccaccgctccatttgtaatgtaaattgggaaactcgg

SEQ ID NO: 22075 - DNA, 120 bp, Homo sapiens
ctacgaaagaataccgagaggtattcaaaacgtattaacacaaatcaatggcagcaataaaagcaaaatctccttagcaacataatcttgattgcaaaaggagaactgagagcatttagc

SEQ ID NO: 22076 - DNA, 120 bp, Homo sapiens
atacgcatttgtctggaagaatccagcacaaagcctaaaagagagattttgaagaaatccaaaattaactcacagggaacagttactctttttttcaaaagtacacaattggctacatta

SEQ ID NO: 22077 - DNA, 120 bp, Homo sapiens
tatcgtgtgcttttggctcagcaacattgtatcacaccgctttgcaaactgaaattacaacaccctgcatgcttcacatgagttagagggtgttttttgtttgttttgttttttggattt

SEQ ID NO: 22078 - DNA, 120 bp, Homo sapiens
tcacgtttttctggtcaggatgaaaaatgtgaataaaataataaaaattcagaaaataagttatcaattctttaaaaactacagtatgatgactcaaggaaacaagactaactcacaaaa

SEQ ID NO: 22079 - DNA, 120 bp, Homo sapiens
aggcgttgtgccaagggatgtcaggcttaactcacttaatgctcacaaccatcctgtgagaagagggtcattattatttccatggtcagagagaaggtggattcacatccaggacctcct

SEQ ID NO: 22080 - DNA, 120 bp, Homo sapiens
catcgtcttattacgatcagtgtttgtctcataatctccatgcccctctgcttgaggacagaggcgacaaaacttgtgtatgactggcattttgcaagctggttacacattaataaaagg

SEQ ID NO: 22081 - DNA, 120 bp, Homo sapiens
tcacggtttcccaagcccaagtagagcctggcatactataggcacaccatgggtgctccctgagtacatgaacataaagatgatccacaggtgggtgaacaatactgggggcaggtgaaa

SEQ ID NO: 22082 - DNA, 120 bp, Homo sapiens
cctcgaggcaatactgccagagcccctcctgcttagagtgtccaggcttctacatggggagacagcgcaccccccagacactcccgcccactcctttctggctcgctgagtgacgccagt

SEQ ID NO: 22083 - DNA, 120 bp, Homo sapiens
ccacgccaggctccaggaccagcagagcgggtctgcgcggacagaggcactgggctgcgcccgtagcgcaccccaccaagaggaaggcgtgcctagtggggaggcggggctccaggggcc

SEQ ID NO: 22084 - DNA, 120 bp, Homo sapiens
ggccgggcacacgcagacacactcctgctctctctacgcacgttctcacactctcattcacaccgcactcaccctgtgcacatccccagtttctcgtattcctcacattcacacattcat

SEQ ID NO: 22085 - DNA, 120 bp, Homo sapiens
cctcggagcggcttctccagcgtctcatttcttctgcctcccttgccctcgcccaggtgtgggacgcgggcgagtgaggacagacttacaaccgtcctcggccgcgcagcacagggttcc

SEQ ID NO: 22086 - DNA, 120 bp, Homo sapiens
tcccgcgccctgtccctatgccccggggacacagggcaggaggctgaaaaagggactcagcgttagaaactatggttggaattctccccctgccacttgctatgtggccttggccagttt

SEQ ID NO: 22087 - DNA, 120 bp, Homo sapiens
taccgttgtctcggagcctccgtttcctatctgaaataaggaatcattcattcaacaaatattaattgccatcctaatatatgtcacctctggtctggacatttggcatacactggtgaa

SEQ ID NO: 22088 - DNA, 120 bp, Homo sapiens
ccccgctgcttcttctcagagggccgaattgaactcttgcaactgtggtgagcacaaaggcgaattcaggtttctcaaaagcccatccgttctgaataaacaccagggagaagcaagatt

SEQ ID NO: 22089 - DNA, 120 bp, Homo sapiens
agccggggctttaatgagattcttttaactcccccaagctcgtttgcaggttatagccttatctggggacccacgttttccaccctggctacacatcctgtgaacaattgcctctccaga

SEQ ID NO: 22090 - DNA, 120 bp, Homo sapiens
gagcgagcgccccatttctgctgaatacacttctcagttcatccaaggctggcgggcttttgatggccacaatgcaagttacgcccaaagagtgtctctttggtcagatcgacaacgctt

SEQ ID NO: 22091 - DNA, 120 bp, Homo sapiens
tcacgtttgcaagttaaacgggcagaaacccggctgaaactcccacgccagacgccagggacgtttccctccgccctgctcagagcaaaactggggaatgggtctgggcggggggaggaa

SEQ ID NO: 22092 - DNA, 120 bp, Homo sapiens
aagcggttcttttcaatttttgggtattcagaaagggttgcctggttacagagaatggggaaatctcgggctatatcgggtaagatgtgccacagacagcaatatcacaatgccactcgg

SEQ ID NO: 22093 - DNA, 120 bp, Homo sapiens
taacgatgcactttcaataaaacattcatagacttgttcacgctttgataatgacctcattaaagggagctgggggcaagtaagtcctgtctcctgtttgtgttcggctaacaaaaccca

SEQ ID NO: 22094 - DNA, 120 bp, Homo sapiens
catcgctttggaaactaatatgaaatcaatgtaagaggagcaaataaatccgaggcggccccgccaactccccggctgtcccgccctgcctgcagcctccatttggagctggagaaccat

SEQ ID NO: 22095 - DNA, 120 bp, Homo sapiens
gaacgggtcagaactctggggcctgttgaataagcaatgctaagtccctgccctttacttgtcctgactttgcccatgaaagcaaacaggaagaaagagaagtgagacaggaatgtgggg

SEQ ID NO: 22096 - DNA, 120 bp, Homo sapiens
aatcgagagacaagaaggccatgcctctgctgttctttctagaatagctttgattttttttttgtaagttgagggtaagggtggagtgccttggccaggaggaggtacaaagaacaattt

SEQ ID NO: 22097 - DNA, 120 bp, Homo sapiens
acccgactgcttaatacagaataaatccttccacgtggctcctggagttgtggcaattagagctcattataggctcataagagctctcattttggggattacttaatggacgatgaaatt

SEQ ID NO: 22098 - DNA, 120 bp, Homo sapiens
tatcggacagaatcactgagaaataaaattgtgtggcggctcagacaccatgggcacacgccaatggtctgtctgttccctctcaggaaaagaaagctgaacttggggtctcctgctggt

SEQ ID NO: 22099 - DNA, 120 bp, Homo sapiens
ccccgggggcatggagggtaggcttcctttgaggaggggataggcaggtagggccagataggggctggactcagaagagaaggagggagagagactggcagacactgagagatccaaaga

SEQ ID NO: 22100 - DNA, 120 bp, Homo sapiens
gtgcgatttctaggactttagcataggagctcttcctctgaacacatcccaaactgctgggaacattgtgactcaaaccatcagcccaaaacagactgtggataacctgggacctaaccc

SEQ ID NO: 22101 - DNA, 120 bp, Homo sapiens
tctcgggcagtaaggggtgtgcaagacttccatggaccagagagagttcccttacaaagccacttctgccaatcagaggcaagattccctggatggctgaatcctcttcatcctttttag

SEQ ID NO: 22102 - DNA, 120 bp, Homo sapiens
gagcgaaggtctatctaatccctgctgcgtctttaggagggcttggtgtttgaggtcctccctccaaaatcttcaggatggagtttgtaggattgccctggaatgccatggtgttactac

SEQ ID NO: 22103 - DNA, 120 bp, Homo sapiens
ctgcggaagtgggaggtgccgatcagaaagggaaacaaggaagggtcgttggtctgagtggccccaggagggccccaagtacaaagacacttcagaccttgtcgaacatcagcatgaaaa

SEQ ID NO: 22104 - DNA, 120 bp, Homo sapiens
tgacggtttcttagctgggaggcctcacagttctgcgccggacagtcctgaactaaccacctgaatgacctctgccaagtccaaaagctgtggacaggggtaggtgtaaccgtggccaga

SEQ ID NO: 22105 - DNA, 120 bp, Homo sapiens
ctgcgctcagggactggacgactgccagtccgtcgcccgcacaatcctgctccaaaccgcaggcctcacacttcaccgcgccgcagccacccctaccacagaggagctggaaacactgag

SEQ ID NO: 22106 - DNA, 120 bp, Homo sapiens
gtacgctttgcggtggggcgtggggaagagttgggctgcggccagggtagcgagagggggtgggatggaggatgcagcgctgtgatttctcagtaaagcgtggagaaagagggggaggag

SEQ ID NO: 22107 - DNA, 120 bp, Homo sapiens
ggccggcctccccgggaaattaacaaaacctacactttgcaaagtctcccccatccccctcccccgagttcttccccgccgcgcgcccgcccctcctcgcggcttctgttgtgactcggg

SEQ ID NO: 22108 - DNA, 120 bp, Homo sapiens
tcccgagggtgcggagctgccgaggagcctgagccgagcggtactccgcagcatcacgtgccagggtggggggctataaaatacccgagccggggcgccgggcgggggacgtgaggacca

SEQ ID NO: 22109 - DNA, 120 bp, Homo sapiens
ctccggggacccctttgttcccagcccagacgccaacacctctgcgtccccaagggcttgactgcccgtgtctgcgcggctcccagggcagagcttagaacactagaggagaggggtcgc

SEQ ID NO: 22110 - DNA, 120 bp, Homo sapiens
cgccgcgaactgccggggcttccagccacccacccctctcgacatgtcgcgctccttctatgtcgactcgctcatcatcaaggacacctcacggcctgcgccctcgctgcctgaaccgca

SEQ ID NO: 22111 - DNA, 120 bp, Homo sapiens
ccccgggccggatttcttcatcccgcttggcatgccgcccccattggtgatgtccgtgtccggccccggctgcccgtcccgcaagagcggcgcgttctgcgtgtgccctctctgcgtcac

SEQ ID NO: 22112 - DNA, 120 bp, Homo sapiens
cttcgcacctgcactcctctcgggggtctgtgggcgccggcagcgggggcgcaggggccggggttaccggggccggaggcagtggggtggcaggggccgcaggggcactgcctctgctta

SEQ ID NO: 22113 - DNA, 120 bp, Homo sapiens
cttcggctcctggggacgcgcagttttgcccgcgggtgaaccatgcgcatcatcaccaccacccgccgcagcaccaccatcaccatcatcagccccagcagcctggctcggccgcggcgg

SEQ ID NO: 22114 - DNA, 120 bp, Homo sapiens
cggcggcagcagcagcagcggcggcggcggccgcggcggccttggggcacccgcagcaccacgcacctgtctgcaccgccaccacctacaacgtggcggacccgcggagattccactgcc

SEQ ID NO: 22115 - DNA, 120 bp, Homo sapiens
tgccgcccttcggtactggacactgcttttcttcaagctgagccctatgttttcctgaacccttgctgtatctttgttgagccttctaaatcccaaacccaggaaggccccaggggctcc

SEQ ID NO: 22116 - DNA, 120 bp, Homo sapiens
gatcggaagtgtatgctgtgtgcttaggaaagtaactagtttcagattaatgaagcagtgacaatttcaatctgcttaaaggcggaggttggcactgcccaggcctgagcgtggggagct

SEQ ID NO: 22117 - DNA, 120 bp, Homo sapiens
gctcgccaggctgggctttatattgtccccttttctgaagagcagacaaagatggatagagagacattgaaaagcaaggggagtatttcaaacagtctcataaagcaggctgtcacttta

SEQ ID NO: 22118 - DNA, 120 bp, Homo sapiens
tggcgaaagtaattctaggcaactacttggtttctgaagttcaaggagaaaccacccacagcaggtgcagagaaaaaaaggcaggtgggagttgctcccgatgggaaagagctccctgcc

SEQ ID NO: 22119 - DNA, 120 bp, Homo sapiens
agccggctccaaggagcagaagccagcttggtctcagtttgctgcgaagggatggagcagggtgagaagctctgcctgccccagaccttgaaggattataatggaaatttttgagagtgt

SEQ ID NO: 22120 - DNA, 120 bp, Homo sapiens
atacgaaggagagggagtgcatgcttttggagacttccttcacaaaccctaatttagattgtttggggtcaagcagcagccagccaccttcctcctttcctccttaattaattaataaga

SEQ ID NO: 22121 - DNA, 120 bp, Homo sapiens
atccgcccccacccccaccctttgttctcctggccgttttccccatccagtctcccctggccatggctcaatcctcctagctctccggggaaagaggaggatgctaaagctgccattcct

SEQ ID NO: 22122 - DNA, 120 bp, Homo sapiens
gtgcgcctatatagggcctggcccgcggtggaatggacgcggctgcagctggaatcgcatcactccctcctcccctcccccagcactgacatacgagccccagtgtcctgaggatgactc

SEQ ID NO: 22123 - DNA, 120 bp, Homo sapiens
cagcgtcggaccttcaagtggaacctcaggcttgttaaggagtggcctggaactgcaccagattttaggggtgcctggggaggcttagagatgggagacgccctgacttggttcctttcc

SEQ ID NO: 22124 - DNA, 120 bp, Homo sapiens
atgcggactcgcccagggtggacttagttctgaggtggcctcttgctccctctagtggtttagaaatcactgcaggcgggttaaagacgggtctggtttttctccgaggaggaatccgca

SEQ ID NO: 22125 - DNA, 120 bp, Homo sapiens
ctgcgcagtgaagtcaattcatgactacgtttttgagcaatccaataattaaccaaatgcacacacaataaggactttggaccgtcttgtggatccttggaggaccttgggttcatttta

SEQ ID NO: 22126 - DNA, 120 bp, Homo sapiens
tagcgagggagggggtatccaaaagccagatccagagggttccagtcctaccagtctgtcccaggctctaaggagtgtatggcccaccgggctgggctggaccaggaaacaagctcttgt

SEQ ID NO: 22127 - DNA, 120 bp, Homo sapiens
ctgcgttgttaggaaccctctgcttctacttcctgaagagcaagccccccaaacccagaagagaggctgcaccttgagatccagccagcaaggtgggtgcggagtcctggggagggaact

SEQ ID NO: 22128 - DNA, 120 bp, Homo sapiens
tctcgatctttttagagaattcctccttttccaggactagtgccgttctgaattctgagcgtgcaaagagactccttagagctagcttccgagcctcagctggggcagaccagaggccag

SEQ ID NO: 22129 - DNA, 120 bp, Homo sapiens
gggcgtctctctgtctgcggggaccccccacatctgtgcgtcacctccaccacctccgggcaaaggacccttcctcgctggacccagggaggcggctattccagatgcagccaagggtta

SEQ ID NO: 22130 - DNA, 120 bp, Homo sapiens
caccgttttcttttgcaaaccaccaaacgggcccttcattttcaaattgtgaagccagaaacatcccccgttcccttgccccgcccatcaccatttgaaaaaaagaattcacaagtttaa

SEQ ID NO: 22131 - DNA, 120 bp, Homo sapiens
aaacgtgattttcacaactaacggctttgataactgttaaattcgtacggcttctagggcaaacggacctgaattcttcaaggaaagtagaattggcggtggagctggggggcagaggag

SEQ ID NO: 22132 - DNA, 120 bp, Homo sapiens
aagcgccctcaaagccaaaggtgtggcgctcggagctgtggccgccctcgcccgggagtcggggccaggagaacgggccctggaggcagggcagggcacggcgagattttgcttttgttt

SEQ ID NO: 22133 - DNA, 120 bp, Homo sapiens
ttacgaggccttctttttgaaagtcagctaatcgactgcacctttttatacccttgccctcaatttcatgtcgcctgctggcctagacgcgcaaggcggaggacagaactgtcacagtcc

SEQ ID NO: 22134 - DNA, 120 bp, Homo sapiens
tctcggcccggctcaattcgggagttgggcctccttcctctcggctcgcagcctccccgactcccactttggggagaaaacccacattcttaaccccttgataatccctcaaggaaaaaa

SEQ ID NO: 22135 - DNA, 120 bp, Homo sapiens
atccgggcgcgggttgagatctgcgcagagctgcccaggccagtgcatgtcgctcctctcctccgggtacatatggtggcctggtcccctccccccaccccccacacggtgcccagtgag

SEQ ID NO: 22136 - DNA, 120 bp, Homo sapiens
acccgcagcccgcctcaggagggcaaggtttctagccccctgcggctccgggaccacccaggacccggggcgtcgtgggaccgatctcgaaggatcttagaacgacactgggagagcgcg

SEQ ID NO: 22137 - DNA, 120 bp, Homo sapiens
aagcgagactgaaatttgagcttcgaagatgaacttagagttttcactcttgggttttacttaccaattgtgaattaaaatccgtatcatctggcaccactgcactccagcctgggtgac

SEQ ID NO: 22138 - DNA, 120 bp, Homo sapiens
agacggcatgcccgagggctataagaaatggaagatgtggaattcttgagcacagatgtgctttgtgttttcttcagtctgtgtccttgcctccattcttattccatgtgggtttttttt

SEQ ID NO: 22139 - DNA, 120 bp, Homo sapiens
gcccgtgccatcttgggatattttatggttacacataagagtctgaaatatggaattggaatcagacatcctctgtctatttgagtgtttggaggggtgaatctagtggggcttggtgga

SEQ ID NO: 22140 - DNA, 120 bp, Homo sapiens
taacggatttttgtgtagaaatggtcattgttcatctaagctgctactgttgcttctctcagttgtcgggatgagactgtcctttctgactgcatcctattcagagcgtgcttccttttg

SEQ ID NO: 22141 - DNA, 120 bp, Homo sapiens
cagcggacaaggagaatccatggggcggttataagagctgccccccaatttcaaatatttatatctaagctttctttattttcctgcctatttcccaacaagggatgaggagcttaggga

SEQ ID NO: 22142 - DNA, 120 bp, Homo sapiens
gtacgattttcagtaacacagacgtgcagtaagaggcagtgttggctgttagtgtcttttatgagccaagtcttttcctggcttggctatccgtggtgagactgacaccccgggaaatgt

SEQ ID NO: 22143 - DNA, 120 bp, Homo sapiens
ttacgtatgtctcctcccaacatgaagctaattgctgtgctctcgggcatgtttagctcttggtagagtggctttcctaacaaatagggagcagtgagcccagcctgaagtttttattta

SEQ ID NO: 22144 - DNA, 120 bp, Homo sapiens
ccccgaaggcaagaggatcccaggggctggcccagcacggagctggtagacagcgcgctcacaccagggagggctgcaccctcctttctcccgtctgtgttttctttcccttgcaagtgt

SEQ ID NO: 22145 - DNA, 120 bp, Homo sapiens
attcgacaaaagcaattatgctaatttccttccctgtgggctcaattccttttttgacacgatgacttggaggagtcattatgattactccaaacaggaaagacactcgcccagctgtcc

SEQ ID NO: 22146 - DNA, 120 bp, Homo sapiens
gtccgcccgcagagagctggctacggtgcagaaagctgaggaggcgtctggagtttttgggtgttaatgattctgcctgcccacaggtcgggtcttggggtctggagcgtttgggaaggt

SEQ ID NO: 22147 - DNA, 120 bp, Homo sapiens
agccggtcccaacctgtcatgaaagttgcagtgaagatgctaaaacgtaagtgctccttcctggggattttttgagcacggggattttttgagcatggggatattaagggaatttctcaa

SEQ ID NO: 22148 - DNA, 120 bp, Homo sapiens
ccacggccagatccagtgaaaaacaagctctcatgtctgaactgaagataatgactcacctggggccacatttgaacattgtaaacttgctgggagcctgcaccaagtcaggtgggctca

SEQ ID NO: 22149 - DNA, 120 bp, Homo sapiens
taacggcttttgtccccataggccccatttacatcatcacagagtattgcttctatggagatttggtcaactatttgcataagaatagggatagcttcctgagccaccacccagagaagc

SEQ ID NO: 22150 - DNA, 120 bp, Homo sapiens
ctgcggttccaagttccattcacttctcattgccaaatgggtgaacttccaagcgcttttaaaagattagccagtgagagttatcggaaccagtacttcctctcccctcccatattgtta

SEQ ID NO: 22151 - DNA, 120 bp, Homo sapiens
gcacgagatgtcagaggaacctgagtcatgctcaggcccaagccctgttggcaggcagaccactgctttctggccttccgtgactatctgaaaaaaatcgtgaatggctagagctactct

SEQ ID NO: 22152 - DNA, 120 bp, Homo sapiens
cctcgaaaaccctgggacccttccagatgggactaactggggaaagtggacaagttacaaacaaagaaactcaaaggaaagtcattggcactgatctctaagatgctatcacatgtgatt

SEQ ID NO: 22153 - DNA, 120 bp, Homo sapiens
aagcgagagagagaaagagagaggtgccacacacttctaaacagtcagatcttacaagaagtcacttactattgcgaggacagcaccagaaggatggtgctaaattgttcgtaagaaatc

SEQ ID NO: 22154 - DNA, 120 bp, Homo sapiens
atccgcctcactcccatagacactggagaagggattcacaaagaaaaggaaacaggaaaagcctgggatttctactgcatgtcaggaaagtgaccatgaaactgagtcgtggagccttct

SEQ ID NO: 22155 - DNA, 120 bp, Homo sapiens
ctccgtcttggttgcaactgcaggtgttactcaataattcccttgcaagcccagtgctggaagcagcaaaagtcctccataattggtgtctcttattgggtccgttgccttctctccctt

SEQ ID NO: 22156 - DNA, 120 bp, Homo sapiens
atacggtccttgagcagacacaaaagagaatattctggagctgcattttccaaagtatgtttcttagatgctggatcctcaaggtgttcctccctgtgtccgcgcaagcttgggaaatgc

SEQ ID NO: 22157 - DNA, 120 bp, Homo sapiens
ttccgcgccctcgttgagattcacactgcctgtgagtagagtaaatgctttgagatctggagaaagaaacctgtttgtttttctttaaccctcacatccccaactcatctggccatggaa

SEQ ID NO: 22158 - DNA, 120 bp, Homo sapiens
aaacggggcaagaactccagttaggccctggcctctcttggtaattgtgccctttttccaccccctctgcagcacccccttcccgttgccatggcaacgccccagagagtaaggaccagg

SEQ ID NO: 22159 - DNA, 120 bp, Homo sapiens
acacgcagtaggtaatgtttgcaaaatttgattgattgagggtttggggggtttcatttgggccatctgcaggtgggctgggtagcagaagaaggcctcccatggtttgcttctatgtat

SEQ ID NO: 22160 - DNA, 120 bp, Homo sapiens
agacggtgggagagtgcaggtctgggagctcacacagctttggcactgcctgttttttttttcgttttgtttttgtttaatgctacaataataaatatttcacaaattaggaatggtgaa

SEQ ID NO: 22161 - DNA, 120 bp, Homo sapiens
aaacgttttgatttcttggtatgtcagggttcaggggtaaatttttctttccataaaatgtctggtcatgttgcttgttataattttttttttttttttggtaacaaataatttcctttt

SEQ ID NO: 22162 - DNA, 120 bp, Homo sapiens
agccgcacagtatgggttctgtcttctggctggctgaaaaggcttctcaggctctgaaagtaccaattcttcaggcatgagtgctggtggaggattatcttttaaatcagctggttctta

SEQ ID NO: 22163 - DNA, 120 bp, Homo sapiens
ttgcgtatgtgtgtgtgtgacaggccaacattagtatagtatctgccatgtgctgagaactttatgcaaatcttgtatataattgccatctatctatagatatgtatagatatatatata

SEQ ID NO: 22164 - DNA, 120 bp, Homo sapiens
gctcgcggcgcctgggattttctctgcgttctgctcctactgcttcgcgtccagacaggtgggacaccgcggctggcaccccgaccgtgcgactactcggcgaagcctgtgcctgggagg

SEQ ID NO: 22165 - DNA, 120 bp, Homo sapiens
acccgccagggtgcatccggagagaggactgcgggccctcagtgcccgtgcgttccagcctccggggagactccaggtggccctcggactctccggcgccctgcctcgctcacctgcgcg

SEQ ID NO: 22166 - DNA, 120 bp, Homo sapiens
ggacgcgaatccggggttcttcgggaatggggacagcaagagggggttaggcgtgagcgaggctgcaggctccgtgcgagtttggggtggcttttgtgccgacgttgcgcggggggcgga

SEQ ID NO: 22167 - DNA, 120 bp, Homo sapiens
aggcggggggctcaggggtttgcaccgagcgccttctcttgccgtgcgaggcgcggccgcagcttccttttgttaaaagttgcgtgtgtgtgaccggcgcccgggaggacctgcctgcag

SEQ ID NO: 22168 - DNA, 120 bp, Homo sapiens
ctccgccgcgctgagggcaaagttagagagccctttctctgctctgcggctactgccttccaaccgcaggcgctctttgtgcccagagctggggaccgacccgctgccgcctctgctcgc

SEQ ID NO: 22169 - DNA, 120 bp, Homo sapiens
tcgcggcgccacccgtggagaccaatcgaaggctgcggcgtttccccgcctccgggttaggcttttgcgctgggagtgcgcggcgtggggctgttgtggggccggactcccgcgagcctg

SEQ ID NO: 22170 - DNA, 120 bp, Homo sapiens
tggcgacagggacaacttgggcagggcgtgtggaaagcagccgctaggttgcagactttttgctttcgtacatcccgtgctcgcccctttctgccgcggcgccgtttcattcctgccgcg

SEQ ID NO: 22171 - DNA, 120 bp, Homo sapiens
gcgcgccccggggcggctggaggctgtgtttgccgcctgctccgggaaggcaagggacagcgtgctgggactctgcgttccctgactccaaccgcctagcacgccggccagagtgcccgg

SEQ ID NO: 22172 - DNA, 120 bp, Homo sapiens
tggcgggttctgaaagcccctagttcccggtgtctgcgacctgtattcgcaggtcctgttttcttcggaaatttttgagattcgtgaccgcccgcctccccgcccccgggacttctatac

SEQ ID NO: 22173 - DNA, 120 bp, Homo sapiens
tggcgtggaactttctgcaaatcctactcagttcttaaagctataacagaaatccaggtatatccgcgcgggaactgggtcttaggtgaaggatttgcaggttgctggagccccttggtc

SEQ ID NO: 22174 - DNA, 120 bp, Homo sapiens
cttcgccttccttttccttgaatacacatagaaacacatacacgtgcaaacacatatacaaagtcttcctggctcagctctcccctacaccctttcatggtccttctgggcagcacaggc

SEQ ID NO: 22175 - DNA, 120 bp, Homo sapiens
gcacgtgtgtcacctcttgatgttttatttcattagcattatgtctttgtctgcacaaggctgtgagctcccccatgagcatctagttctggttacacagtacatgcgtgatgaaaggta

SEQ ID NO: 22176 - DNA, 120 bp, Homo sapiens
tgacgacggtgcattgagctccccatagtagaacagggacatttttgagattctctgttgcatggcttcctttggttcatgtgggtgattcagagttgatttagtctccccactgctggg

SEQ ID NO: 22177 - DNA, 120 bp, Homo sapiens
gggcgattactgggatccttccatcatggttttcatccagtttattcctatggggatataaaagtgtgtcagaaacagtataatatacaaatcattagcttttttattacgaattgtggt

SEQ ID NO: 22178 - DNA, 120 bp, Homo sapiens
aagcgtttgtgctaataatgtgatgcttaataatgagatgtctgtcacaggaagggaaatggcaatggggaaacaatgatgttgggccgagtttaaatgtcatgcttttaaaaaaacctt

SEQ ID NO: 22179 - DNA, 120 bp, Homo sapiens
caccgaagtcacttatgtgtgctaaaggtgttgcaaagcagagatggtttttttctttcctgtttcattggtgatttcagggtgcttttgcacttttcagaagggtcctggatctggaag

SEQ ID NO: 22180 - DNA, 120 bp, Homo sapiens
acacgtgccaaactgcccaattactccttgcctgtcattaaagtgtgcagctaaacactgggtttgagaatacatcatcgcaactgtctaaacacaagcccaagtgtattcaagagcccc

SEQ ID NO: 22181 - DNA, 120 bp, Homo sapiens
gcccgccctcctctgccttgcctgcatggctcattgcctgtgagggaacagtgagaaaggctttgttttgaaagaagcctggccagatagatgacactagccaagtaccctggcagtcct

SEQ ID NO: 22182 - DNA, 120 bp, Homo sapiens
ctgcgaagagtaacctagcctatctggtcagcataggttaagttatgacacagtaataagcaactctagatttgtggtggctgaacccgacaaaggcagatttcccaaaatactcgttgt

SEQ ID NO: 22183 - DNA, 120 bp, Homo sapiens
agccgttccaggtgcccagcccctaagtgccatctggcacccacatcttgagatctgccgcttctgtgtgtgatccagacagctacagctcacttccatgtggcaacacaagtgtattga

SEQ ID NO: 22184 - DNA, 120 bp, Homo sapiens
ctgcggtatcacacccagcagctgacatgggggattacttttctattctgtcaccctttggcacagacgcctctgctcagtgctaatgacaatcactagcttgtgctttgaacaaggaga

SEQ ID NO: 22185 - DNA, 120 bp, Homo sapiens
cagcgtataaaaatacaggttattttcccacaaactgtgtcctaatgttgcattaagcagcacacttagttttccattattaggactcagacatttgtttcctatcccatgaaagaacta

SEQ ID NO: 22186 - DNA, 120 bp, Homo sapiens
aaacgttttcctttctgtttaaactcattgtaattccattaacaagagtctgaaatgagccctgagcaaaagagaaaacatgactcaacttttagaacccctgaaaatgctatgtaaacc

SEQ ID NO: 22187 - DNA, 120 bp, Homo sapiens
cctcgtttatgcaggtgttaccccattcttcctagtggtgttttttttttaggcacaagccattgttttaagggtgagctcatggtcaaaacaatgcatcttacataactgtggctatca

SEQ ID NO: 22188 - DNA, 120 bp, Homo sapiens
aagcgttcttatttatggtgagctcacagtcaaataatcagccttaaaaccagccagtgaatcatgctgccatggtggcaggaagatgacgacagggtcgacgttttgaatcctccagag

SEQ ID NO: 22189 - DNA, 120 bp, Homo sapiens
aaacgtttgtgagggaaaacaaaaagaccttaccaggaaggaataatggacataggctactattatgccaagtgtgttaccatgaaccatggagtagctcaataaatattatccgagttg

SEQ ID NO: 22190 - DNA, 120 bp, Homo sapiens
ttgcggggtgagagtgggttggggacagggggaagaacaaaagggtaaaatccttcctgaaactttgacaccacacacagcttcacattgaacctcccgcattcagtctcagacatatca

SEQ ID NO: 22191 - DNA, 120 bp, Homo sapiens
acacggcagggagccttgagctgaatgtcctttctttgtggtattctgaataaaggatcagcctgggagacaaggagccagagctgcatcatttccttcctggggcttggccaggagaca

SEQ ID NO: 22192 - DNA, 120 bp, Homo sapiens
acacgtaacggtctggaaggaactctcattaggagtcagaaacagcacaacgaactctactttagcccaactcgaagaacacgcaaccttctaaaaccagaaaccccgtctgaacccttt

SEQ ID NO: 22193 - DNA, 120 bp, Homo sapiens
taacgttagtcttcctttctatcaatccgaattccacacttaaggcttggcttgggacccacgtcctaaacaaagcctcttggatagactcagccctgcaaatccttcccatcttcaaca

SEQ ID NO: 22194 - DNA, 120 bp, Homo sapiens
cctcgaacacttacattgcctggtttatcttctagttttacagaagtgtcagctccccaggtactgctacttctttgaggatggggccatttcttgaacgtctttgttctaaacccatgg

SEQ ID NO: 22195 - DNA, 120 bp, Homo sapiens
acccgcagcagggggcatgataaatgctttttaaatgaatgaaaaagaggatcaggtcaacactgggagaagacacagacacattcttgggtcacaagcctcttccaggatatgcctaga

SEQ ID NO: 22196 - DNA, 120 bp, Homo sapiens
gtccgaggtcctttttctgttgtcgaaatgaaaatcaaatgcggctacttcctgctggtggaaagaacaacacttgaaaatctgagcagcacctctcatgtgatgtccaggagttggggg

SEQ ID NO: 22197 - DNA, 120 bp, Homo sapiens
ccccgagtcaggctggagaatctgggctgtgctaccggtttgcactccaatctctatcagctttaaaagttctgcttcctcactggagtacacggtggtgtctgtgtcatcggagtgata

SEQ ID NO: 22198 - DNA, 120 bp, Homo sapiens
atccggactggtagccgcttgtctggtttgagccttcagatgccacagactccctgcttttgctgggcaccattccactgcagaagaaatggcaaacaaaggagttggcagagagaagac

SEQ ID NO: 22199 - DNA, 120 bp, Homo sapiens
gaccgcagccccgtatctctcccagttgttaatcagcatagcaggtttacagggacaaggtctattttcaggtactcgcatgaattagtagttgcagataagtcctcttactcaggtcca

SEQ ID NO: 22200 - DNA, 120 bp, Homo sapiens
tctcgagttatgcaaaggccccaactgatggaacatgtttatggcctcgcagattgacaaatttgtatacagtgacaggcgccaaagggccacttgcatgatattcaaggaaattgggat

SEQ ID NO: 22201 - DNA, 120 bp, Homo sapiens
acacggggataatttaaatgcagatgtctttgtaaaactcgtctctttattctggaaattagcaaactgtggcattccagctattgcagctgcagggcttggaattcttaaaggcaatgc

SEQ ID NO: 22202 - DNA, 120 bp, Homo sapiens
cagcgtgggctacagatgggaggaagcacacctacccaggccctcttccaggagcattccccattatgttaacctcagggctaaggttatgtggaagtgggatgcaacagccttagacaa

SEQ ID NO: 22203 - DNA, 120 bp, Homo sapiens
tcccgagatggccttgaagtcaccctcccccgggggatgttaggccatatacagtacctgattcctgctgtgttgtcataatggaatttggggtcacatacttcctcctcctccatacag

SEQ ID NO: 22204 - DNA, 120 bp, Homo sapiens
tatcggaagaacaatgtagtctttgccatcctgaaacaataaacacagaagactgttgttatggcttcagttcttcaagtgccttttcattaaaaacaaagggcacagggacttcttggc

SEQ ID NO: 22205 - DNA, 120 bp, Homo sapiens
ttacgaagactcttcgagtgcctctacgtcagtgtcttctccaatgtcatgattcacgtcgtgcagtactgttttggacttgtctattatgtccttgttggcctaactgtgctgagccaa

SEQ ID NO: 22206 - DNA, 120 bp, Homo sapiens
atgcgctctcggggcttgtgctgtgctaagcattatgagacatgcagaagtaagagacaggcccaatgcattttgcatttcaggagatgagactcaagtcgattttaaaaggccgggcgt

SEQ ID NO: 22207 - DNA, 120 bp, Homo sapiens
agtcgcttggggtgatgggaatgagtttatagtgctgaggttaacctgaccttgcagccttagtatctgtcagtctagaccccgtaggtctgtaatgaccattgtctctaaacccagggc

SEQ ID NO: 22208 - DNA, 120 bp, Homo sapiens
tagcgatttccaacaatctgtgagtgagcttcctcctcaggttagattttggtatgagtgccccgtgaaagtcgtctctctgttgctgtagctcaacctaaggcctctgactagaggagt

SEQ ID NO: 22209 - DNA, 120 bp, Homo sapiens
tgacgatctttctcaattcatgaattattgattggctccagccacttagctagcatctctctgattcctctgaacttattcctcccaggcatgtctgtggtggcattctgccagccagta

SEQ ID NO: 22210 - DNA, 120 bp, Homo sapiens
gagcgcttggtgactgctagcttttagcgtgttcttgtttgttggcgttacctgcctctcccggagtttcctctactggctgcgtctcaacttctgccttccctcctgcgtagatagtca

SEQ ID NO: 22211 - DNA, 120 bp, Homo sapiens
aaccgtgttcaaatagggcaaacctgagctacaaccaatccagctgtttctgtccctcaattatgttttctgtaagtcactttattttttccgaccactcggcaagactggagcctctct

SEQ ID NO: 22212 - DNA, 120 bp, Homo sapiens
aaacgctgttaagtttaatttgtctaaggtttttcttttaacacaccccaaactgtaagtggaggcatcctacttacacagtaatagaagaatgcataaagcaataacatgaaggaacaa

SEQ ID NO: 22213 - DNA, 120 bp, Homo sapiens
taacgccatgtgttggggaaaagttctgagagtggaagcttgaataggttttggaagtatgagtaggagtttacaaggagagaatggaagaaggggaattacggacagaataacatggac

SEQ ID NO: 22214 - DNA, 120 bp, Homo sapiens
gtccgcaagcattgtcagatgtcccctgggagacaaaatcgccctggttgagaaccgcttgtctagcccatttcctgggagtggtggttcccttctctggaactcagacgttgagaagag

SEQ ID NO: 22215 - DNA, 120 bp, Homo sapiens
gtgcgtctttggagacagaaatctctcctctctgttaagctaaaacctgccatctctaactttttagttctgcctcttaggaccgtatggattggatagattcacttaaaaactttccca

SEQ ID NO: 22216 - DNA, 120 bp, Homo sapiens
ccccgtccttcctggtccctcacgggattgttttagagccaagtcagcaaacttcttgtagttgccatgtatttgcaggctaccaatctctgatgcataatcttcctttccttccctccc

SEQ ID NO: 22217 - DNA, 120 bp, Homo sapiens
taacgttggacttgtcattaactccttcatgcgaagagcttactgcttttttgaagctttgtcacatttacagcgtaatgacagccaagacactggtttgtctttttcattaggccactt

SEQ ID NO: 22218 - DNA, 120 bp, Homo sapiens
cagcgtaggacgatctgtgttaacagctgtattaaacttgtcttagctggaaccaactctctataccctgctgaggtttgtgggtcttactctgtccttcagagtgttaatgaaattttt

SEQ ID NO: 22219 - DNA, 120 bp, Homo sapiens
tcacgagttcagccagagaatgtttgcttggaactgacactggagtgttcaactagacagacttaataacccacactgtgggatgggtaaaagaagttgctcaggttgtctttaaaggat

SEQ ID NO: 22220 - DNA, 120 bp, Homo sapiens
gtccggggcttggtctgtttctcaatagttctcttggggtctctgccaagctctgtcgtgctgtctggaggttcccccatttcccatctctgtcttgctctgtctcactcacacgcatcc

SEQ ID NO: 22221 - DNA, 120 bp, Homo sapiens
gctcgccgggtgagggacagaggcgcagaggcagaaaacaaggtctcgactggaagccccccaccagctcccgccctcagcagctctggctccgagcctcaacgtgctctgcaaagccaa

SEQ ID NO: 22222 - DNA, 120 bp, Homo sapiens
cagcgtggagcccccccagggtctgctggctgcccccgctcagctccaccacgctgagcgacgcctgcccggttgctgctgctggagaaactttgggctgccatgaaacaaaaagggaat

SEQ ID NO: 22223 - DNA, 120 bp, Homo sapiens
atccgtaacagcctgggactccctgggtggaacgtgcgtccctcccagcgcagatgcaggcttgtccctgaatcacagcccggtgacgcagccattataattagactcaacctgactctt

SEQ ID NO: 22224 - DNA, 120 bp, Homo sapiens
ccacgaaatctcagggatgtggccccaggacaggctcaatatcttttcatttaatttgtgttgagtggaagcacagccaccctccgggagacagccaggcaggcagctcctgccctgggg

SEQ ID NO: 22225 - DNA, 120 bp, Homo sapiens
aagcggcgcctgccctctgtacacccttgtccctggcccctcgaacccggccagctcccccactgcagaaatgctcccaggaggcctgactcactccaaggtgtgaatggcatcaggtga

SEQ ID NO: 22226 - DNA, 120 bp, Homo sapiens
ccccgtggaggccacccaagcaagacgtctctagtggtagaatcgggcaccggccacaggttcccctcacaggagttctgggcactggtgctgggggaacacaggatggacggctctggg

SEQ ID NO: 22227 - DNA, 120 bp, Homo sapiens
actcgccacgacagccccgaggcctgagttgacccatcagctctgccgggacacgtctgtaccagcatggcccaggccctgcccacctcctggtctaggaacccagccactgctcttgac

SEQ ID NO: 22228 - DNA, 120 bp, Homo sapiens
ggacgaggttcctttcaaatagcagacagcaggttggaagggggcctggccccaccccagtacacacaaaaaaggctgcacgtcccgcctgggaggcagtcgagacacacaagctgtttc

SEQ ID NO: 22229 - DNA, 120 bp, Homo sapiens
tttcgggccttttccttcgctcccgtaaccagcaagccctggtccctgaggatggcgctgcctcacccaagtgaaacccacagggtcctcgccagatgcacaggccagctctgtccccac

SEQ ID NO: 22230 - DNA, 120 bp, Homo sapiens
ccacgcctgtccctgaggctgccacctgcatcctgctctcccaccgcttggctctcctcatctggaaggaagcccccttgggggctgcccagcctggccagttagaattggccctgtaaa

SEQ ID NO: 22231 - DNA, 120 bp, Homo sapiens
ctacgccagagtgtgcaccctcccccaggacgtgcatcagcatggtccatgggctctgccccgaccacagcagtggggcagagtgagcttacagggcagcccctgtcccgccaggaacac

SEQ ID NO: 22232 - DNA, 120 bp, Homo sapiens
gctcggggcctcgaaaagggccgggctgggggcgctgctgggcacggtccttgctcctctgccccaggctcctgtgcagggctgcgtgggtggccgtgtggctgcaggggcgctgctgcg

SEQ ID NO: 22233 - DNA, 120 bp, Homo sapiens
tcccgcttcctacctcctagagcctgcttcatcacaaactccatggcgattgctctgcttccacagtggctcctccaggggtcagaactcacacgcaagtatggccgggagcgagtgttc

SEQ ID NO: 22234 - DNA, 120 bp, Homo sapiens
gagcgggtacccttcagggcgggctcctgtggcttctgaccagggaggcttgggtgaccctatccctgacggcactgcagtcagtgtgccccccacatggcccgcgtagaagagatcggg

SEQ ID NO: 22235 - DNA, 120 bp, Homo sapiens
acacgtggggacggggacagagcacccccgccccgggggcgtgcatggggtggggtggggcgctctggtcccctcttgggaagccgctttctgaaatcacagcagccgcagtgagccccc

SEQ ID NO: 22236 - DNA, 120 bp, Homo sapiens
ccccggttttgcggggtctctcctatcggggaaccccaggtccctggagagacactgtttgacggttcacccctcgccctccgcagaggaaggagactcgcgcggggactgggagggcgg

SEQ ID NO: 22237 - DNA, 120 bp, Homo sapiens
cggcgggcggggagcgcccctcggaggctttgccgcagcgccgattctcctccaaacttctcccctggctcccgcggcgcggggaaggagggcacggccgggccccgcagacccgcaggg

SEQ ID NO: 22238 - DNA, 120 bp, Homo sapiens
acgccagaggctgcacgcgtgacaaggcagcaacgcagtgactcagccccacagtgctcacgccccacacaacacccatcttaatggcagagccatggcaaaacagctgccagcaccagg

SEQ ID NO: 22239 - DNA, 120 bp, Homo sapiens
gaacgaaaggagaaagcctcgcccccagctcacacaatcaaggaagcctcagccccaacatttaggcaaaccacagatctttcggaagatggcccagaggagctccttctgagataggga

SEQ ID NO: 22240 - DNA, 120 bp, Homo sapiens
gagcggcttcttcaacaagacagacagcacagacgtggcaggatggccagcacaggcatccctctggagaggaagaacaatgccagcacagggctccaagagggcagcacgccagccaca

SEQ ID NO: 22241 - DNA, 120 bp, Homo sapiens
gctcggcacacacgcggtcagtacgggctcccacaggcagcacagggctccgagagggcagcacaccagccacggacggaaggtgctcggcatgcacgcggtcagtatgggctcacacag

SEQ ID NO: 22242 - DNA, 120 bp, Homo sapiens
cagcgagaggaaggcaagtcgaggaaaggcaggcattttcccagaggaagcccaagttctgataagccagcctcatcgacaggagaaaaaatgcaaactaaggccatgggcacccaggac

SEQ ID NO: 22243 - DNA, 120 bp, Homo sapiens
acccgccatgccccaggacagcaaagtgcagagccgtggcatccaagagtgcaaggggacgcccagggttagatgcagacgctctccaaccacagcgccctgcagaccccagtcctagag

SEQ ID NO: 22244 - DNA, 120 bp, Homo sapiens
ggacgcctgctccgcggaccagcaagctgaacaggctgtccacgtggtgcagacaggatggctcaccataaacaagggaaagaaacggacacacatgccacccatggccgaccagagaaa

SEQ ID NO: 22245 - DNA, 120 bp, Homo sapiens
aaccgcgtcagcatcccagcagctgagctggcatgccgttaacgtgagaaccacatcggcatcccagcagttgagctggcgtgccgttaacatgagaactacattggcgtcccagcagcc

SEQ ID NO: 22246 - DNA, 120 bp, Homo sapiens
agccgaggtggcaagccattaacgtgagaaccacactggcatctcagcagccgagccggcgagccgttaacgtgagaatcacatctgtgtcctggcaaccgagccaggcatgtcattaac

SEQ ID NO: 22247 - DNA, 120 bp, Homo sapiens
tcacgacagtatcagtgcctgtgcgtgacccacaccccagggagcccgtcctgccatggctggcaccttccaggcaccctagccctggcccaaccaggaaaccagggatgtggggccggg

SEQ ID NO: 22248 - DNA, 120 bp, Homo sapiens
gcacgcagggctgaggacctgctggggactgaagcattcacactgccagtcaccccagcacccctatgcagcccccacagacgtgcagacccaacccatcctgctcctaccctgatctta

SEQ ID NO: 22249 - DNA, 120 bp, Homo sapiens
ccccgtgctcctgcctctgctctctacagagcagccaccgtcaccctctgctcatcccactccacacccctgaaggccacgacccctgcagccccagagccaaggccagtaccaccaccc

SEQ ID NO: 22250 - DNA, 120 bp, Homo sapiens
ccacggaacccacactcagggtctcccccacgctgccagagcttgcgctcccagccacactggcctcccttcctccctgcctcaggacccctcacaagctgcttctgcggccaggatgcc

SEQ ID NO: 22251 - DNA, 120 bp, Homo sapiens
gaccgccccttctgctcacctcccaaggaaccaactctgcccacaccacctaaacgtgcacccttctcctgggactcattctctccctggctcttcgagccacccaaccacctgccatgg

SEQ ID NO: 22252 - DNA, 120 bp, Homo sapiens
tggcgagtcactgagcccccgatgcctgcacacagcagagcgtgtagccgactcaattccactgacaatgaaggcatggtgtgagagccggtcgggacctgccacagctcaggctgggcc

SEQ ID NO: 22253 - DNA, 120 bp, Homo sapiens
ccacgctagaatcgactcacagaccggacccacctgcgtgtccccagcacagcccagcactgcccccacctgcacccagctgaggggccctcccactcccccagctctgccggccctggc

SEQ ID NO: 22254 - DNA, 120 bp, Homo sapiens
aggcgctggagggccgcagaggggcctgggccagctgccaggtgtggcatcaaggaagggccaggtgggacccccaggcagagaagcatgggcagagccaggggcccgcaggcagtcagg

SEQ ID NO: 22255 - DNA, 120 bp, Homo sapiens
agccgctatatccaagcagcttacaccccacagtccaccctccctcactcagcacagggctcccccagctcagcacagggacacctaccctcagccctcagcagtacagagccccccgct

SEQ ID NO: 22256 - DNA, 120 bp, Homo sapiens
gcacgggatgcccccatcccactaagtgcagtcccccctccactaagcacagggccccttccacgacgctcagggccctgctcagtgcaggggtcccccctcagctcagaacccccttgc

SEQ ID NO: 22257 - DNA, 120 bp, Homo sapiens
gctcgccctccatttctggacacatgcccctcctgctgccctctctgctaacctgctgccccacccctacctgtcccttcaggcctgcgctagccggcctgcgggaacagctcctcctgg

SEQ ID NO: 22258 - DNA, 120 bp, Homo sapiens
ggacgacagatctcacgcggctacaggtgccctccccacaggcttccttctgtgggactccctgcctcagtctcccctgctgctcccggcctctcctctcccctctctccctgcctgggg

SEQ ID NO: 22259 - DNA, 120 bp, Homo sapiens
agacgcaggggtcactagtgtcaccaccccctcaccggccaggccacagctctgaggcctccccgagtgctcgacttcccctcgtcacctggcacaggagttctggagggcatcggcacg

SEQ ID NO: 22260 - DNA, 120 bp, Homo sapiens
agccgccctctgaggcacaggtcttgtttcccctttgcagacacagcctgaggctcagcagggtcaggccaggtctccggccagtcagcgtgggctccggtgacaccaacacgacatccc

SEQ ID NO: 22261 - DNA, 120 bp, Homo sapiens
ccccgcagtcactcacacagaccactctgcccctagaactctccgaaagcaccaccccaacccaccggcctctcttcctgtcctgacaaacggaccatggagtcgttgtgccatcttcct

SEQ ID NO: 22262 - DNA, 120 bp, Homo sapiens
ctgcggcctctcttctccttgccaggaccccagagcccctgacaaggacggacagcagcactcctccaccctgctcaacaccgctcatggaaggccaccacgctccaccccacagggacc

SEQ ID NO: 22263 - DNA, 120 bp, Homo sapiens
agacgctcctccacccctgctaaacaccactcacggaaggccaccacgctctaccccgtgctgccactggagacaggcaggatgggagcccggctctctggctgcccgcagctccacgag

SEQ ID NO: 22264 - DNA, 120 bp, Homo sapiens
agacgatgcaggtggcccaccgggacagtgggaagctcactgggcgtcagcgtgggcctctcacagaactactgtcagagagctgcccgcgcttcccgctaagaccaacacagcttgaga

SEQ ID NO: 22265 - DNA, 120 bp, Homo sapiens
tgccgggcatgtttcacagccatgcagctgggttaggaggcatcaagccggcctctgctgggttagatggcaccaagccggccttcacaggacgttacctttacagagctctgtgagcaa

SEQ ID NO: 22266 - DNA, 120 bp, Homo sapiens
gtacgtaacagggacgcatccctgaaaagactgtcaccagacagtccctttacatacgtcagaaatccagagaaggcgttaaatggttcattacctttaatgcatactctctgccactcc

SEQ ID NO: 22267 - DNA, 120 bp, Homo sapiens
acacgctctcgctggccttcgtgggtggcctcccactagcctaccagcagacctcggccttcgcccggcagccccgcgatgagctggagcgcgtgcgtgtcagctgcaccatcatcttcc

SEQ ID NO: 22268 - DNA, 120 bp, Homo sapiens
ccacggcgctgctgcaccaggcggagacgctgcagccctcggtgtggtttggcggccgggagcatgtgctcatgttcgccaagctggcgctgtacccctgtgccagcctgctggccttcg

SEQ ID NO: 22269 - DNA, 120 bp, Homo sapiens
gatcgccgtgccctgcgccttcctgttgctgcgcctgctcgtgggcctggccctggccaccctgcgggtcctgcggggcctcgcccggcccgaacaccccccgccagcccccacgggcca

SEQ ID NO: 22270 - DNA, 120 bp, Homo sapiens
ggacgacccacagtcccagctcctccctgccccctgctagcagccacagagcccactcccagccgtcctcaccagagatggaccagggaggacaggatgctgggcaggggaagccaagtc

SEQ ID NO: 22271 - DNA, 120 bp, Homo sapiens
tcacgggcaggccgcagtggttcttgcgtggcctggttttattttcattgtgaaatatcatgctcttatttcagtcctcaaattgttctccactttttgcggagagaggagtttcacagg

SEQ ID NO: 22272 - DNA, 120 bp, Homo sapiens
ggacggcctgcatccagcactgtccagctcaaggggctcagtggggagagggatgggtgcccacccctgaggagaggaccaggcccccacagggcagagggctcaccatccagagccctg

SEQ ID NO: 22273 - DNA, 120 bp, Homo sapiens
ctgcgcccacccgggacacggggtaacactgccacccgcacaccagtctccagtgggatgagggctgtgacaccaacatgtgtcaccaatgggatgagggcgggtcccgctccgtcactg

SEQ ID NO: 22274 - DNA, 120 bp, Homo sapiens
ccacgccccacgcttgggtctcctggcggggagggtgccctccttcccataccgctgctggcccctcttccacgggtgctgcccaggagggcccttttgccccctccgaagggggagggg

SEQ ID NO: 22275 - DNA, 120 bp, Homo sapiens
acccggagtctggcctcaagtcgggagctgcctcagccacacatgcacactccccacctctggggaagcccctggcatccccaggcagcaggcatggctgtgccatgctctgacgtgaca

SEQ ID NO: 22276 - DNA, 120 bp, Homo sapiens
tggcgggccaggccaccttgtgcagccctgggggtcagaacaaccatgccgtttccaccacagacgacatccccgtgtgaggggacagtctcctctgcggaccctgacctgagtggaccc

SEQ ID NO: 22277 - DNA, 120 bp, Homo sapiens
cagcgtccctggccaggacacagtaagtgtcaaacgtccagaactccggtcctgtccctcgctccctccagaggctgggctgtggtccccctgtccctcgctccctccagaggctgggct

SEQ ID NO: 22278 - DNA, 120 bp, Homo sapiens
cctcgctccctccagaggctgggctgtagtccccggggcccgcctgcttgccgcgggggaagatgagagccagccctgggagcacccgggcccagaacagggaagggctgtcctcacccc

SEQ ID NO: 22279 - DNA, 120 bp, Homo sapiens
acacgcgcaccgggacggcagggcccggcctggctctccaggaggctgggactctgggccacagcatgagaagggctagggccaggggcccaggccagccctgcttagccacacctgctg

SEQ ID NO: 22280 - DNA, 120 bp, Homo sapiens
agccggccatggggaccccagctgaggtcccgctcgcatcaggcacagcccctgggtcgcagccatcgcgcggcactatggagatgctgtccgcacctcccaggtgaggaagcccgcagc

SEQ ID NO: 22281 - DNA, 120 bp, Homo sapiens
gagcggccccacggcgcacaggccccggccgccccacgaaggcacgtcccgcgagcagggctgggaccccgccctccactcccccgaaagcgccggtgccacctccgctcaggctcccgc

SEQ ID NO: 22282 - DNA, 120 bp, Homo sapiens
ccacggggcagaggcagggctgcagccgggtaggcatcgggcccgggcgctcaccgtcgcacaggaagccggccagcccccagatgaagtcggagcagaggtggcagaaggtgggcttgg

SEQ ID NO: 22283 - DNA, 120 bp, Homo sapiens
ggacgcttgctcaggcttctctcctctgcaggctggccaggttgaggggctgccttttttccccaggtgctgatccaagcctccctctggaataagctgtatccaccggcttctcgtgag

SEQ ID NO: 22284 - DNA, 120 bp, Homo sapiens
tcccgcattctcgatgtcgttgatgtcggcatttcctgttaaatcagcaagatctttcctcctcttccagaagttcctgcgagtcactcctctgtgttaattgccatgggtgttgctgga

SEQ ID NO: 22285 - DNA, 120 bp, Homo sapiens
ggacgtctggaaggaagtggccgggaagggcatggtggaggccgctgacccgctgacgtctccacagccaaacgtccccctgccgggccccaaagtgcccactgcctctccagtgccagc

SEQ ID NO: 22286 - DNA, 120 bp, Homo sapiens
aagcggaggcggggtgggagcccttgtggttaaggaattttggcttagcaccttttacaaaaccgtgtgctgccttggaaggggatctaccagcttcccgtgaatccgtcccactgtgtg

SEQ ID NO: 22287 - DNA, 120 bp, Homo sapiens
tgacgtggaccaggctggcacaagccctctgcaggtccacctgttggcagcgccacactccctcccgaggcaaagctactggccccttctagcttccagagctgatttccagaggccgca

SEQ ID NO: 22288 - DNA, 120 bp, Homo sapiens
gtgcggtaaggtggcagacgtggagacaacttcctgcaaagaagatacattacatttcccaagagaagggggcacagcacacagggccacggagtggagggagccccagttcatgggggc

SEQ ID NO: 22289 - DNA, 120 bp, Homo sapiens
gtacgtaacctctgcacattctggaaagcagaataaaagtgctggggcttaggttggcaagcattctggcttgggggctaaacgaaacatgcactgacctaatttaaacacacacataca

SEQ ID NO: 22290 - DNA, 120 bp, Homo sapiens
cttcgcttcgggtgtgtattcccactacgggcacagaaagcgttcatattttattaatattatgccacagatgatgttactgtccaacattacatgtcaggaaggcaaaagatttacaat

SEQ ID NO: 22291 - DNA, 120 bp, Homo sapiens
catcgtgaagccatcttgagaggccactgatgaatatgtgggaacctgacagctgtggaattttatttctagactttaactaggcacagaaaggaaaaggaaatctccttgctggcaaca

SEQ ID NO: 22292 - DNA, 120 bp, Homo sapiens
aatcgtcagcacaaagagctttcacagtcactctgttccacaatgtaatattctgcttgtttggctgctgagtgttttaaaatttcatttctaagaataatagcaaagactttcaagggg

SEQ ID NO: 22293 - DNA, 120 bp, Homo sapiens
acccgacttttctttttcaccacgacttaaaaccattcattacgtgagttttctgggctttgatggtacatggttcaaggccaggtgcagcaacagccagctaattcaagcatagtgaac

SEQ ID NO: 22294 - DNA, 120 bp, Homo sapiens
acacggaggtcagctgcaaacatttacgttgtgcaacatcgtgttcctctcattccagccccattcctttccaataagagcacatttagcacaaagcaatccacctaaagactccataaa

SEQ ID NO: 22295 - DNA, 120 bp, Homo sapiens
gatcgaggaattctcagatttctgccaaggcaccctcccttggactggaggtcagcctggtacagtaatcggagccaaactgtggactggactcaaggaattaagttcagcacttcaaat

SEQ ID NO: 22296 - DNA, 120 bp, Homo sapiens
caacgctcccaggaactggagatagaaccttttaaaggtcagatggggtgtagaacaatgaagggttgaggcggatgaagatgggtggttgatatttatatgtaacagactggtaagaag

SEQ ID NO: 22297 - DNA, 120 bp, Homo sapiens
caacgacacttatagggcattcatactgggaagaaacagagaagaatgtgctttagtcctttttatgtcaacatgcagcaatggctcattgcctcaaaacacacgtccccaaaagagacc

SEQ ID NO: 22298 - DNA, 120 bp, Homo sapiens
atacgccaatgaaaggatcctgtatccactctccacaattacttctctgtgtttcacaggaagccagcggaaaatgaacctcagtgtagaagtcaagtctggatttgggagtgtatatgc

SEQ ID NO: 22299 - DNA, 120 bp, Homo sapiens
ctacgaataatatatgctaaattctaatcatccctgccacctatgtcgcctcaacacacaatacacacaaatgcactttaaagtatttcccagtggtgttgctttggttttaagtattgt

SEQ ID NO: 22300 - DNA, 120 bp, Homo sapiens
tgccgacttctttccgtctttgcagtgagtcccctcttgtctccccttgatcacatctcctactctgtctgcctctgtgctcacgtctgtggcatgttccaccctgcagccagagtgtgc

SEQ ID NO: 22301 - DNA, 120 bp, Homo sapiens
atccgatcatggagggtgaagcccagagttaatgtaacacccaatttccccgcaagtcctcaatccattctcaagtgctgagtctgagctcatgcccacagttaagagaggccctcccct

SEQ ID NO: 22302 - DNA, 120 bp, Homo sapiens
tctcggcactgtctcagactgcctgcccacctgctccggctctctccagcatggctggctccctgctgttaacctgaacaagcccaatacatggtcataccaggtcgctgcacctgtgct

SEQ ID NO: 22303 - DNA, 120 bp, Homo sapiens
cagcgtatataaaaaagaacaccccccgccaccacacacaaaaagatacctagctttccattctcttcgtagcagttataacttgacaaacacatacacacattgtgtatttgttaacgg

SEQ ID NO: 22304 - DNA, 120 bp, Homo sapiens
acacgtccactattgttttacacattgtctgtggcagagtccaagaggtgcaacagagacctaatggcccacaaagctcaaaatatttattgcctaatcatttacagcaaaggtttgcca

SEQ ID NO: 22305 - DNA, 120 bp, Homo sapiens
tggcgccttacctagcatgcagtaggcactcagagaacatttgtaaataaaagaaagtgacagggtgggggagaatgaagggagaagagcatatgaatgcaagagatactggagggaaaa

SEQ ID NO: 22306 - DNA, 120 bp, Homo sapiens
tggcgactgggtttaggtgccagcgaagagagcaggaattgcacaataggagcttttcaaatgtggctgtgttccttggccaaaggatgagattctaatcatcaaaccataaacacaagc

SEQ ID NO: 22307 - DNA, 120 bp, Homo sapiens
aaacggccaaaggccattcttaaaagcagatccaaattaggggaggattaaatgtatatagacttgagtttttcatagcattcactggaaggaacatcagcagcctcacaactgttagaa

SEQ ID NO: 22308 - DNA, 120 bp, Homo sapiens
tcccgctctgggtgtggacattcattgattaaacgtttatttcaggcagcggggattctctggtgaacaagagacaaggtccttgcttttgtggagcttgcactgaagtagaggagacag

SEQ ID NO: 22309 - DNA, 120 bp, Homo sapiens
aaacgaaaataattttaggtaataatttcaatgaaaaataacaccgtaatggaatagaaatagggcatgaggggaagagaacagtgccaggaaaggccttagagaagctggcatgtgacc

SEQ ID NO: 22310 - DNA, 120 bp, Homo sapiens
gagcgaagagcaagtgcagcagccctgggtaaggacaagctttgggtgtttcagaatagaaagaagccagtgtagccagagcatggagaggggagggaaaggtgggataaaatgaggctg

SEQ ID NO: 22311 - DNA, 120 bp, Homo sapiens
atccgggttcagaccacataaggactggttggccaaggaaggagatgaattgtattctaagttcgatagaaagcagtggaggaagagtccaaagggcgaagggactcgagttcaccttcg

SEQ ID NO: 22312 - DNA, 120 bp, Homo sapiens
tatcgccgaggatgtattctgctcctgacaacactcacattgctccaacctaggacctctcagcccagaacagagctcagaagcccagcacaccccaacgaaggcatcctttagagtgtg

SEQ ID NO: 22313 - DNA, 120 bp, Homo sapiens
atccgtgcaaggaaaaggcagaggcagaggcagaggcaacattttggaaacactgaaccctgtggccagtacccattttcctctgagaaaatatttcaatccacaaacctcctttaggcc

SEQ ID NO: 22314 - DNA, 120 bp, Homo sapiens
ccacgcagtcatacccagagttgtttatgagccgctctgcttacttagctttgtggtggggcactgactggcatctcagcaggctggagtagaagggaagaggaggccttgccacctgac

SEQ ID NO: 22315 - DNA, 120 bp, Homo sapiens
gcacgcaagtgctcacagaccgataagctgcttttctatgactttttcccctttttgaggttgttctggatgaatgtcattacctgagaaactggcccatacaagtaacataagtgaaga

SEQ ID NO: 22316 - DNA, 120 bp, Homo sapiens
catcgaaagggaacagctgccacccagctccagtcaactgtttccatgcaggaatgtggggccaatgctgtaagatctcctgatttgtctacagaaactggaaatccagatttttttgtg

SEQ ID NO: 22317 - DNA, 120 bp, Homo sapiens
aaccgtgggatctcgaccaggaggaaaagcatgcatttagaggtgtcactcactctgagtatgtgtgagcaggcctctttgcacaagggatgctcattttgtgtgaaaagttagagacga

SEQ ID NO: 22318 - DNA, 120 bp, Homo sapiens
gatcggcagcctgacttgtcctttgtggcgactgagaagcacctgaggcatagagcaggagagaaagcttttatacctactactgttcccccactgcctccactgcaccaaagaaaatta

SEQ ID NO: 22319 - DNA, 120 bp, Homo sapiens
ccccgtgcggtagcagcgtatcattaagggatagtaatcaccatggtaaccaaggataatctgctatgagcaaatggaaaaagaaagaaaagcattgggtcagggcttgctacaaccaca

SEQ ID NO: 22320 - DNA, 120 bp, Homo sapiens
tcccgatttaaagtaatatggaaaagaaatatattttctagactggcagctggacgaaattttagaatcattacgtcctaaaagtgaaaggaatcttacagaatgactaagggccgcaat

SEQ ID NO: 22321 - DNA, 120 bp, Homo sapiens
gatcgggtaaatattcaggccagagacaccactgtggtggtggagggaatgggtgcaggggtgggtgtggaagtggggccgggctctgaaagacagggcagcagcatctgcagctgcagc

SEQ ID NO: 22322 - DNA, 120 bp, Homo sapiens
gatcgtgtgccttctcaaagagagctgagaatgcagattttttataggaagtatctcaattttgactactaattaaagctaatttaaagcatgttaactaaaacacatctgtgaactccc

SEQ ID NO: 22323 - DNA, 120 bp, Homo sapiens
atgcgtgtcacacagtcaattcatgagcaagtcaggcctctgggttctggactcccagtgctgtgctccttccctcctagaatgtgatggtgacactccaccttagctccaagggcctca

SEQ ID NO: 22324 - DNA, 120 bp, Homo sapiens
tctcggtgagatctcagcttcacattctcctcatctgcaaaggaaggagggtggtacccgtgcagacctgagtagtacattgtgctgtcttctgtagacaacagtaactgccctgcatga

SEQ ID NO: 22325 - DNA, 120 bp, Homo sapiens
ttgcgcctgaggtaagcacctcactggcctcatttgagccccagccaccacatccccggggcacataacagcatgtgtgcagggtttctagatgatatgaccctagcttctgctttttaa

SEQ ID NO: 22326 - DNA, 120 bp, Homo sapiens
caccgttcaagctgctgcgtaggaacttgcaagaaagggtatttggtggattcttaaaggggacagaaaaagaaaatttaaagagtcgttccagtacagtagccattcaaagaaaagggt

SEQ ID NO: 22327 - DNA, 120 bp, Homo sapiens
acacgagttgcttaacctctccaagttttagtttcctcaactgtaaaatgaggataataataaaatcaaccacctcagccagatagagtggctcccacctgtaatcccaatactttagga

SEQ ID NO: 22328 - DNA, 120 bp, Homo sapiens
tcccgtctctacaaaaaaaaatagaataaaataaaattatcttggcatggtagtgcacacttgtagtctcagctacttaggagtctgaggcaggcgggccacttgagcccatgagttcaa

SEQ ID NO: 22329 - DNA, 120 bp, Homo sapiens
tagcgaagggcttacgtgactacctaatatctttctaagtcttggtgacagggataactattcggtaggattactgatattattaagtccatctagaaagttgctttaaattgagtgagg

SEQ ID NO: 22330 - DNA, 120 bp, Homo sapiens
tttcggtgggttgcagggaggaagcaaagactgtttgaggtcagcacaatactgtcaatacccaagttggaaagttatgctgtttttacttagtctcgtcttgttcttagtaattgcttc

SEQ ID NO: 22331 - DNA, 120 bp, Homo sapiens
atacgatgctcaccagcttagcagcatccaaggctgtgagccagggggaggcccttatgctgaaattttgcccttgctttgtctgtatttcctctgtgaaaatggagaaatggtttagaa

SEQ ID NO: 22332 - DNA, 120 bp, Homo sapiens
acacgctgagttccaaatgcagatttccaaatcccaaatcagagattattcatctttacatctcaaataggtattactgagaaaaaaaagattttgcagtgcttttctcctttttcttac

SEQ ID NO: 22333 - DNA, 120 bp, Homo sapiens
ccacgcttgctgctcaatctctgcagctgcagaaagcagccctgcattgtctttgtcagatctgggcgcccaatgaaacccaggaaaccatccattcctccccacccctctcagctagtc

SEQ ID NO: 22334 - DNA, 120 bp, Homo sapiens
gagcggcctgttattccataactaatattctgcattcctgatcccattactacgcttaccaccccaccaaatacatgctgtatcatcatctgcaaattctttcagggacaggaaaagcac

SEQ ID NO: 22335 - DNA, 120 bp, Homo sapiens
ggacgtagaagtcaaactgaataatgtctctactaaaattagaataagtcaactctaatatgatctagaaccctcacctgaatattctgaaatttgtaaaaggattcaagataacaacac

SEQ ID NO: 22336 - DNA, 120 bp, Homo sapiens
taccgcctcatcctctggcagtcacactgatcctgggctcagaactaacacacccacatacagcttctgtggacagacaccacagtcttactgctctctgcacaccttactgtcatattc

SEQ ID NO: 22337 - DNA, 120 bp, Homo sapiens
ggccgcctaggctcagtgctgtggcttccttattctctctcctgagccacctaccatgttctggggcagcattttgcttccccaaagcagatatcaagagaagccagggctgggtgagca

SEQ ID NO: 22338 - DNA, 120 bp, Homo sapiens
atccggatccattttacagatagctgtaagtcacctgatgtgaatgtttggggaatggcattgggtggggccaggacaaaagcagatgcaagactgaagccccagaggcgcagaagagga

SEQ ID NO: 22339 - DNA, 120 bp, Homo sapiens
tcacggcaggtgtgatcgatcacactgaccagacaaggccctcctgccactggatatatccttacagggctctggcacacaaccctgtcttccagcagtggcagcttgcctacttcttat

SEQ ID NO: 22340 - DNA, 120 bp, Homo sapiens
gaacggccactgtgatttgtcgattgccttaacgtggcattttacagaaccatctggcaaacacgcagacacagatggcatattccagttccctggagggctgggcacagcccctggatg

SEQ ID NO: 22341 - DNA, 120 bp, Homo sapiens
ggtcggtgactaaatgaccgcagcctcctggagggcagggcgctgactcctgcaggtagtatgtgaggctcgccccaccctgctcctgggtagagtgaaaggcgagtgcctgtgaggcag

SEQ ID NO: 22342 - DNA, 120 bp, Homo sapiens
gtccgcctcccgccatggcacctcatttgcctttcgcactgacagactaagacatggctgtttactggaggcatagaggtttctcactgcccagaccagccacacagcaggtagtcttca

SEQ ID NO: 22343 - DNA, 120 bp, Homo sapiens
gaacgagatgaagtgaaggccatgtggcggcagcatgtgccttgacaacaggcatcagagagacagctgcagaaacgctggcccctttcatcgctgatgcggcctcagctccatctggcc

SEQ ID NO: 22344 - DNA, 120 bp, Homo sapiens
aaacgaaaaacacacttgacaaccaaattttgtgttgtcgggagatgattcaatgccagttgctgagacaggggcagaagcaaaggaggcagggagacaagaggaggaagagggactctg

SEQ ID NO: 22345 - DNA, 120 bp, Homo sapiens
ccacgcccgccgctcggaactgccccaggatgaggctctgctcactctctgccagcgccaggaggagttcgtaggcttcgatgcactgctcgctgaaacaaagcacatggggcctcagcc

SEQ ID NO: 22346 - DNA, 120 bp, Homo sapiens
cagcggacaccttcaatgtggcgccggtttctgtgcaggaggcagctcaggtgctgtctcggcctcactctccacacaggcaaggaaaccacccatgaatattcccagggcagggccagt

SEQ ID NO: 22347 - DNA, 120 bp, Homo sapiens
tgtcgtcccttcagtgaccacctgaaaggaccatgtgattcccttgtggtaggccactccaggtagtcccgctgagccggcaccctggtgtccacacccttgtgctgtcccccatctgca

SEQ ID NO: 22348 - DNA, 120 bp, Homo sapiens
ccccggagcaggccagctgtcgtgtcttcaagattctcaggcagccctatggagaggtccacatggtgagtaatgactaaggcctccagccaacagccaggtgagtgagccttcttagag

SEQ ID NO: 22349 - DNA, 120 bp, Homo sapiens
ctccggagccggtcccgctcttcccggatggcattcatggtggccttagtccggttcagttcttcctctttgctgcacagcatggcagtcaggctctcattctcttccctcagcccagcc

SEQ ID NO: 22350 - DNA, 120 bp, Homo sapiens
caccgagacctctcttcagccaggttgggatacaggtcccggccaagcaccccctcaatctcctcgactgtctgtaaaacacagccccaaagaaaagtcaagtaagttaccttggagaaa

SEQ ID NO: 22351 - DNA, 120 bp, Homo sapiens
cagcgataagataggtcacattaccatttccagcttttagtgccacatccaaattcagatggtgcaaatgaggttcagtctcaagatgtgaaagacaaaaataaacctcattgacacaga

SEQ ID NO: 22352 - DNA, 120 bp, Homo sapiens
taccggaaaggatgataacaacaaataggggtggcaggcaatcgcgcttccctagatccaggctctctggcctacatagcaaaggcaaaatcacatgcggaaggaggggctataaggatt

SEQ ID NO: 22353 - DNA, 120 bp, Homo sapiens
aagcgtttgttgaagggaacagtaaaggaagccagctccaagaccacacacagatcacacttggtgtgaagacagcaatggacctcgtgagggggtcgatcaatatccatgctgcaacag

SEQ ID NO: 22354 - DNA, 120 bp, Homo sapiens
gctcggaaggggtgaccagtgttccttaatggcacccagcatcgggaatgtagaacctctaccagcacatacaggcagaaagcaaattataacaaccaggacacagtgagtttcactaat

SEQ ID NO: 22355 - DNA, 120 bp, Homo sapiens
cttcgtatgacaggcaggttaaactttctcagtgtcgccactcccctttaatgcatttccaattgcatgtgaaatttatcacccatctgtgggctctgggcctcctgagatcaccaggac

SEQ ID NO: 22356 - DNA, 120 bp, Homo sapiens
tttcgattgtttacttgtgcctcggttggcacatagtgtctttcactggagtcatgctgggagtcacttctattggtgatatacctatgggtgagataccgtaagtaatgggaaatatct

SEQ ID NO: 22357 - DNA, 120 bp, Homo sapiens
tctcgtgccacatacagaaatggtatcacccatataaggcagttcagcttgttcatgtctttggtggtgtcattatttgagattaaagggttttggtatcttctttctgagctacttgat

SEQ ID NO: 22358 - DNA, 120 bp, Homo sapiens
aggcgggaccacgtaggctgaggtgcatgcagtgaccttcaagtttctgagttgggggtgggctcacaagggttggatgttatatagaaatgaaatcaataggccaggggcagtggctca

SEQ ID NO: 22359 - DNA, 120 bp, Homo sapiens
gagcgagactccgtctccaaagaaaaaaaaagaaagaaatgaaatcaatagaagagcatcctgcaaggacaggtgttaagtgtgaaccaaggaccatgactaatctagtgccgtgttatc

SEQ ID NO: 22360 - DNA, 120 bp, Homo sapiens
gtccgagtgtaaataatatataaaaccacaagacacacagaacaggagtaaggccctctttgtgggaccaataatagaaaccacatgtagtaagctaaattgccaaatctaaaaacaatg

SEQ ID NO: 22361 - DNA, 120 bp, Homo sapiens
caccgccagacaaagctccatgacctggctccactccaggagaggccacagagagggcttcataccattcttggaaagcattcaactaccacatgcagcctcatctcacaccgaaaaaaa

SEQ ID NO: 22362 - DNA, 120 bp, Homo sapiens
tcacgttgcagacagcttcactataatgttaacattcttggttgttacacacacatttgacaaaaaatgcaagcctctagatatagccacgtttattgtacaatgccaatattgtgttca

SEQ ID NO: 22363 - DNA, 120 bp, Homo sapiens
ggacgaaaaacagacaaaaacaaaatccaccttgctccagctctttaagctgccctcctgcctactaatacctttcattctcatccagttctgatgtttctttacctgtcatttacttta

SEQ ID NO: 22364 - DNA, 120 bp, Homo sapiens
cagcgttccttctttcccaagtgtacttgttttttttgtgtgcgttttaaaattctattctgcaaagcttgctttcccatgaaacccagactgttttctacaggattttgataagccaaa

SEQ ID NO: 22365 - DNA, 120 bp, Homo sapiens
acacgcaatgccattgctgctcctatttgcctctttcctagggtctctgcaactttctgcgaaccctctacacacctctctaactttccgctgaaaaagtatgctcatagaactaggaat

SEQ ID NO: 22366 - DNA, 120 bp, Homo sapiens
cctcgaggaactaagtttagcaggctaataagaaataccacaaggggttaaaatattaagcagaatgtgaacactgccctaagagttacaagtgccatgcaggcttggaagggggagata

SEQ ID NO: 22367 - DNA, 120 bp, Homo sapiens
ctacgtgctccccataccttaaaggaattttctgattctaaagagatgagcccgacaaacactcccccagctacaggaatttcttggattgtagaactgatatactgcagtcaaaaattt

SEQ ID NO: 22368 - DNA, 120 bp, Homo sapiens
aaacgtttcctaagggggaaaaaaaatctcaagagcttgaccttaaatcactggtgagaaatgcagagtaagccttttttgttttgttttttactgaggattgaggtactaaaacatttc

SEQ ID NO: 22369 - DNA, 120 bp, Homo sapiens
ctgcgagtctctcccttttaccataagaagagagtttcccagttttagaaatttcttaatgtcacacttccaactctttaatttaggagttcagtttgtattacattctcacacatcacc

SEQ ID NO: 22370 - DNA, 120 bp, Homo sapiens
agtcgtgattaccaatttgccaatgtgtctgaaagaaatagcaaaaatatgtattgaactttgagacaaatatcatggttttgctgatatccagtgggtttttgcaagctgtcatattta

SEQ ID NO: 22371 - DNA, 120 bp, Homo sapiens
agacgaagttggccttcaggcccccttatccactgctccttactctggtatcaccctctacccccacgcctttggttttaccatctacttaactaattctctgtgactctaagatttgcc

SEQ ID NO: 22372 - DNA, 120 bp, Homo sapiens
tggcggagggaaataagaaatataatgcagtatttcaggaaccaccaccaaataagaagaaacatctgaaaggaaaaaaaacttccttggcatgctgaaacccaaatggaaaagactgtc

SEQ ID NO: 22373 - DNA, 120 bp, Homo sapiens
aaacgtccaacgtgggaaaactggaagattgtttagtccaacctcctcagtttacacaagaagaaaaggagatgtaggaaaaacttgctcaaaggtcacgtaacatgacgcaggcagagc

SEQ ID NO: 22374 - DNA, 120 bp, Homo sapiens
gcacgctgcctcccaacatctgttccttcacagagacatgtgcctttataaataattgtttttaaaaagttactcaggttaccagaccttttctgtgatcctgtgttcttgttattggaa

SEQ ID NO: 22375 - DNA, 120 bp, Homo sapiens
acacgcttcctgaggagtgcatggaactgtttgtgtaagtggtgtggggaattcagatcaaatattcagggactcaaaactgaagacaaagacggccaatgctggaaaacgcatgtggct

SEQ ID NO: 22376 - DNA, 120 bp, Homo sapiens
ggtcgacctacacaaagggaactccctaggatagccttagaaaaacacagcccctgcaacaggtaaatttagggtacatcattccaataaactgtcttgcctgacaaggttctctgtaac

SEQ ID NO: 22377 - DNA, 120 bp, Homo sapiens
catcgtaactgttcacaggaaaataaagtcacccagtcttctggcttacaaacctcaggcaaattctacttctcacaccaccacctttgcaaatgccatatgtactaactgtattgtaag

SEQ ID NO: 22378 - DNA, 120 bp, Homo sapiens
tcacgccatcagacagtaccacttcctgtgatagcttcaatgcttgtaacaatgtgtggtagcaattacagtggagcataaatcagatctgggtgttagaaacttcttggtcccttcttc

SEQ ID NO: 22379 - DNA, 120 bp, Homo sapiens
catcgcgcgggtgggccactggattaatgagctccttaaaggaaaaaacaaaaacaccctgaagctacaagcagcccctcctccattgtgctacaaaaatagtaactctgactctaagag

SEQ ID NO: 22380 - DNA, 120 bp, Homo sapiens
atgcgtaattgtagcaattttgggccagaaaataaaattcagctacctctgtgattaaaaaggactccactaggccccagggattaagcttcctacattagattggttcacagactttgc

SEQ ID NO: 22381 - DNA, 120 bp, Homo sapiens
gcccgccctccatttccatggattctaccaaccatagatcaaaaatttcaggaaaaataagaatacaaataaagaaacaagacagtataacaactatttacatagcattcacactgtatt

SEQ ID NO: 22382 - DNA, 120 bp, Homo sapiens
tgacggcttcctaccacctcactatctgttggtgccaacactttcttcaggtcctacacatggacctgaacaaggtttcagtccaacagattgccaaagggcagaagaaatattaaaagt

SEQ ID NO: 22383 - DNA, 120 bp, Homo sapiens
atacgcactagctaaccagaacagatgcccggaagatgccagctggcagcaattctgcctcttccctttgcagggccagcattaaccccttagatgctgaactgtggagaggttctgggt

SEQ ID NO: 22384 - DNA, 120 bp, Homo sapiens
caacgatctgtactgtggtgttctggctgaacattcactctgctaagaggattagaagacatcagaaaaataagccagtaccgctgagcagagcagaagagtgactcagcgtccactagc

SEQ ID NO: 22385 - DNA, 120 bp, Homo sapiens
tagcggatgtcaggaaatctaccctacagtcttggttctactacttttgtgtgtccttaggtggatattttgatctgggcctccatatccctgtttttaaaataaaaaggttagactgaa

SEQ ID NO: 22386 - DNA, 120 bp, Homo sapiens
gtgcgggggatccgaagcaaacaccccaaagtttgtttgtgagtggaggcgcggaggcgcccggagccacgccgaagctcacctggtcagcgcacagagccgggtaggagtcgggtctag

SEQ ID NO: 22387 - DNA, 120 bp, Homo sapiens
gagcgcttcgttcctctcaggctactgcgtttaaatcaatactgggtggcaaacgatacccattctttgggctctgaagtttggaattcatgggttctgcggcacaagaaagtttcttca

SEQ ID NO: 22388 - DNA, 120 bp, Homo sapiens
gtccgaggctgtcgcttagctcatctcctcccggtgcggccctggggtgtccaccaagccgccgggcagatcgctgccccgtgctgcggcatcttgatgcccaggaccccgaggctgtgg

SEQ ID NO: 22389 - DNA, 120 bp, Homo sapiens
ggacgagagtaaagaggctccacataaaaggaatcccttccgacagcatctttcatgctgggggacattaggatgccaatagacgcagcccatgggtttgggttgccaggtaaccagggt

SEQ ID NO: 22390 - DNA, 120 bp, Homo sapiens
acccgcagatttccatttttactttatttccgattcaggaaagcctcgtttcatacagaggaagggaagaacacctctcccccaccccgcttatttaggtctaactaataacattcacct

SEQ ID NO: 22391 - DNA, 120 bp, Homo sapiens
ggacgcagttgtttttaaacatttaagctgttagaaaatcaacaggaaacatcgggatgaaaacgggagggtggtaacgtaaagggcagcggtgttcctgcttggtattcaggcagccag

SEQ ID NO: 22392 - DNA, 120 bp, Homo sapiens
ccacgcgtcccccctggggtttctcagttggcctgagcgcattaatcctgcttcaacaattcaagctcttctgcctccttgctgtgaatttccttgcctctagaaaacattcatgacata

SEQ ID NO: 22393 - DNA, 120 bp, Homo sapiens
tcccgtttgatagaaaagcagccgaattgaagaacatctgaaattcaatggaacaaaggctaaataagcctgcagcccaacatgtggttagaaatgatctgtttggatagtgtttatgtc

SEQ ID NO: 22394 - DNA, 120 bp, Homo sapiens
tgtcgtgtttatccatctggaccctggacaggaagcttgccaaattgtccctttagtgcggcaatgtgccctttagtgtggcaatcgggttgaggctgagctgtttaaggcttatcagcc

SEQ ID NO: 22395 - DNA, 120 bp, Homo sapiens
tgccggcctaggaagtttttgtctttaaaatctgtcatttttccaagctcttacgaatgaaggccaaagcaaaatgagccttggtctggctgacaactgtcattagcactttgaataatt

SEQ ID NO: 22396 - DNA, 120 bp, Homo sapiens
tagcgttctgtgctctgagggaaataaaatagagcattgtgacagagaggtaccgagggagaaaggacaactgggaaagcctctccaagaggcaacattcactagagctgagacctgaat

SEQ ID NO: 22397 - DNA, 120 bp, Homo sapiens
acccgtgaacaccctaggcaagcgtgggatgtggtgtgtacagaaaagaagcccgtgtctggaacagagtgggcgaggggttgatgctagaaggggaggtcagatcagtgggcagaggca

SEQ ID NO: 22398 - DNA, 120 bp, Homo sapiens
ggacgctgaggtggcaggcacttgccctggagcccctggaaggtagaaacaggactgagataagaactggaggctccaggctcacaagttttatggttctgtgccagccatggtgtgcag

SEQ ID NO: 22399 - DNA, 120 bp, Homo sapiens
ttccgtcctggagaccttatgctgagtcaccaggtcagttatgggaggtgccacactggcccctggacacgttgtcctcacactcaaaacctggcaagggacaagctctcgaaggccaaa

SEQ ID NO: 22400 - DNA, 120 bp, Homo sapiens
tgtcgccgaccatttcttattccataaaaggcatccctcaccagacaacaagtcttgaatagtccaggttactacataaatatgcaccccatttttcaaattgctgtgtaatattcctca

SEQ ID NO: 22401 - DNA, 120 bp, Homo sapiens
agacgtaattcacaaatggaaactgaattggtcatgggaatttctaaacactgagtggctgtcgagagccgggagacttgtctttattattactgccattgtggactcactgcatgattt

SEQ ID NO: 22402 - DNA, 120 bp, Homo sapiens
gaacgctaagaactcttacagttcttgcctcctacaactctatgatttggggtatcaaacctgtggggttctctcccaagtcgaggtttgattcccattccaaggttatagggcacttgc

SEQ ID NO: 22403 - DNA, 120 bp, Homo sapiens
gaacgtactgtacagaggtcaatggggaaatgactagcacacacatagccactgacttctgcctttccttttccatgccctttctggatattaggggatatgatgtcaccttgtataaat

SEQ ID NO: 22404 - DNA, 120 bp, Homo sapiens
gtacggcctacaggaaaaaatgtgatttcaggccatatggacaggaggtgagagtcccactctgcagaccctgatcaggctctgtttgaaacattatattcagggaagacagtgatcagc

SEQ ID NO: 22405 - DNA, 120 bp, Homo sapiens
gcccgtatattcccagaaatgagtgaccggaacagtggaaggacttgaaacatgctggggagaggatgttgaaggaacagtaggaagacgccaggcagctccacatgttggttttgtgtc

SEQ ID NO: 22406 - DNA, 120 bp, Homo sapiens
tgccgccctgctgttcccaggggctgtggtggctgtttgtgtgcctgtgctacagccccaccttctctcgcagcagaatgctactctctagtgcctctatcatttccaaagcttcgtcct

SEQ ID NO: 22407 - DNA, 120 bp, Homo sapiens
ggccgatgaagcaactgctttgcaatagtctaatgacacagctgatctattttaagcacctgaagcacactctatcaagtgccaatcttcccgctgcaagtcacgctcagcttgcagcag

SEQ ID NO: 22408 - DNA, 120 bp, Homo sapiens
gcccgtctggtgatagtctaaagcaaccataaaattagatatttttcacagtcagcatgagttgttctcgaaagagagttgcctgtgatgttagcattatatggtgcaggaacctcaggt

SEQ ID NO: 22409 - DNA, 120 bp, Homo sapiens
ttacgcttcacaagagtcctagaaagaggacactgacattgttctcattttacaaagaaggaaattgaagcccagagaagagatatttggctccaaatcacaaagttaagaaaagtgatg

SEQ ID NO: 22410 - DNA, 120 bp, Homo sapiens
ggacggagttggagtggtggtcaggctgtcctcacagccctggggaatggggccctggccagcagttcagatttctgtgggaagggttctgtcacatggcgtgatcacttccaatgagct

SEQ ID NO: 22411 - DNA, 120 bp, Homo sapiens
ctgcggaggccatcagtgggtagtcccgtaggactttgagcaatgggaggagcactttggacacaaaaaggggcctccagtagacctctgccccataagaatggagggtgcttgcaacgg

SEQ ID NO: 22412 - DNA, 120 bp, Homo sapiens
agtcgctgcggctctgcattcatctgcctggcttccaggtggggctcatagctccaaggccttaaagtgcctggcagtacaggagagaagctggccaggggtaaggcaaaaacaagaagt

SEQ ID NO: 22413 - DNA, 120 bp, Homo sapiens
gaacgatgaccagggtgtcataggtttgcattccatgcgtggtttgcaacagaaacagtataacctaaaggccatttcatcatttcatttcaagaaagtcttcatagctttaaaaaaaaa

SEQ ID NO: 22414 - DNA, 120 bp, Homo sapiens
agccgggttcacagttaagattccttggatttccccgcaatacatcagtgcatgatggcctgccagcatctcaggaagcaaatgttgtgtacatattaaaacctctggctcaaagaccag

SEQ ID NO: 22415 - DNA, 120 bp, Homo sapiens
aaacgaaacccaaatagtatttttcagataagctggagagatgctggaaagggcaccgcaggcctccagtgcaaggcaaccccattctccctgctggggtcgaggcagtccctcctcttt

SEQ ID NO: 22416 - DNA, 120 bp, Homo sapiens
aagcgcatagcacaatgcctggcacatagtgattgctccattaatgttagttgttttagctatttttacaggctcctctgtgttactgactgggggctttgtaaagatcacaaggaactg

SEQ ID NO: 22417 - DNA, 120 bp, Homo sapiens
caccgtgcattaaaacccatgaccaagtgtagccggatggtatttttgaaatattaactgggatttcctttacccaccactcttgtgcctttccctctattcagtgagcaaggcctcaga

SEQ ID NO: 22418 - DNA, 120 bp, Homo sapiens
ccacggacacaggcacagtcaacagcagaggaggaaagaagagaggaaggaggggcgggcaatccggcagctgaaacttcattttctcttatcttggaatagaaaccagttgaaatataa

SEQ ID NO: 22419 - DNA, 120 bp, Homo sapiens
ctgcgatgttatgggctgccatttagtcctccttgcttgtgaagctcactgcagtgaagacccctttaggtctatctaacccaaaccctttatgctgtagctgccatgtggcagctggct

SEQ ID NO: 22420 - DNA, 120 bp, Homo sapiens
tgccgttctgacacatgtcctgacaacacgtttctgaagaaggcagcacgagccgtgttgccagcaacacgccatgaccatggaacatgctgatgagcctggcagagagaagctgcggag

SEQ ID NO: 22421 - DNA, 120 bp, Homo sapiens
gcccgggccatctgtgaaaggacccaggggttcccagaggactcgtacttccaccctgctgcagctgccaacacctgcagcacttgcatctctctgggacccagcacacacacctgtcag

SEQ ID NO: 22422 - DNA, 120 bp, Homo sapiens
atacgacataacaggaaagcagtatcacttgccatattgcatgtaacctgaaaataaatagagttctagctagattctattgcatgtggaggttccaagcctcacacctgttctcattct

SEQ ID NO: 22423 - DNA, 120 bp, Homo sapiens
caccgaactggtacttcgtccttgacaaaatcagaagaatgtatagaggactgaaaagatcttttttttttttccattggtccaatgttattaaatcccaagttcatgtaccacttaaaa

SEQ ID NO: 22424 - DNA, 120 bp, Homo sapiens
tcacgaagcttcccggctggtcttttagatggttgtggactcccttgggtagctccaaccaactttagggccatgaagatgcaaacaacactaatgtacccaggaaagattcaaacccaa

SEQ ID NO: 22425 - DNA, 120 bp, Homo sapiens
gtacgctgccaccagatgttcaccgaaggagaggaaatgtacctcacaggtaagtaaatctgaccctctgtaaggccttccgacctgctcatgactggaaaggagatgcgatcttcaggt

SEQ ID NO: 22426 - DNA, 120 bp, Homo sapiens
tgccggtgtggctaatatgaagtgacatgtaatctgccttccgtctctgtgcacctccacccgctgcccagctggactgcttccctggcagtgctctgagcagactctcctggctctgcc

SEQ ID NO: 22427 - DNA, 120 bp, Homo sapiens
agtcgtccccacaaagctaaccagggctgctttccatctgctgcttcccagccctcttaccccaggattcttacaacagtcccctaattagtctccagattctgctcagtcctctaccct

SEQ ID NO: 22428 - DNA, 120 bp, Homo sapiens
tcacgtgctcttggcactgccctgctcttcagagcccctccctgtctgcctatttagctacaaacacttcagcctagcatttaaaatcttgccaaggtcccaggcttcctttgtagcctt

SEQ ID NO: 22429 - DNA, 120 bp, Homo sapiens
acccgacacctaagctaccaaagctaacttttgatcatttattcatccactcaatgattgtttcttgagccctgccatgtgtaggctctgtgccagcgtccatggtgaggctcacccagc

SEQ ID NO: 22430 - DNA, 120 bp, Homo sapiens
taacggggtaggaggagccccaggagggctccctgacgaagggccaggagctgagatccagaccatgagtgggtgttaactgatgttgtagttcatctgggctgttataacctcagcaga

SEQ ID NO: 22431 - DNA, 120 bp, Homo sapiens
tcccgggttcaagcgtcagcaattccactaataggctgtgaccttgagaagtggcttccttctctggatctcttgcttcacctgtaaaatgaggataacatcatcgtctttcattgatcc

SEQ ID NO: 22432 - DNA, 120 bp, Homo sapiens
ccacgctatgtgccaggctctctgctacatgttgggcattcagagatgagtgaggcaagcatgcttgctgtcctggtggagttcactctctggaaagagaaaccaacagtgccaaataga

SEQ ID NO: 22433 - DNA, 120 bp, Homo sapiens
gaacgaggtggagaaactgaggcaggcccacttacctggcacacagagagcaaccatatgccacaaggtcctcatgaacattagaggagagagtgaatgtgaaggcactggggactccat

SEQ ID NO: 22434 - DNA, 120 bp, Homo sapiens
tgacgtctgtctggaggagaacttctggggccccaggagacaagagcaagttttatttgttttaagttctgttgtgtattcaatcttttaactgtgtttgtaaagatgccaaatatctaa

SEQ ID NO: 22435 - DNA, 120 bp, Homo sapiens
gctcgatgagacattttattagtctagacattttaggtgacagaaacctaactcaagctatgttaggcaaaagaagattgatcagctcacagaactaagaagcgtctaggagcagcacag

SEQ ID NO: 22436 - DNA, 120 bp, Homo sapiens
ggtcgaggggcccgtgagcaccatcaggtggttcttctccctgtttctttttgtgtttggccccatgctctcctgcccagactggctgtctccatgcagtaggacagagggcctggccag

SEQ ID NO: 22437 - DNA, 120 bp, Homo sapiens
tcccgctaagctcagcagagaagttccagagagtctgaggacctgttgcccacactcaggccagggtggggagacagagacggacaagcaggttagacatccaagctccctaacccccaa

SEQ ID NO: 22438 - DNA, 120 bp, Homo sapiens
ctgcgtgtgaggcagagctcccaggatggaggcacctctgactcctcttaaattgagataggctccatatgttccctgtatgcctcacctcacagccccacagccccatggcccatgcct

SEQ ID NO: 22439 - DNA, 120 bp, Homo sapiens
actcggagaaacgtagaatagaatcaaagtccccctccctcactctccagatgggacactgagaaacagaaggacttgcccaaggtcacacagccaggacctcagaagccgggtctcttt

SEQ ID NO: 22440 - DNA, 120 bp, Homo sapiens
ccccgataactgagtttgccgggatctccccagacgcctctggtctgaaaaggcttcagtgtgccccggctgagccccgttcaggagcctgcactgctggccatggctacagtgaccagt

SEQ ID NO: 22441 - DNA, 120 bp, Homo sapiens
gtgcggcagggaagcgccacgtaccaggttgtgaggccagtccattccgccaagctgcaaggtcagcctgcagctgctgcccgcctggaaccccagatgccgccgagagaatggcagcaa

SEQ ID NO: 22442 - DNA, 120 bp, Homo sapiens
gagcgaagcaattatagctcaactgggggctgctgggggagtgagtgggtgggctcgtcatcagctgggagccttgggcccccagctggctgagcctagcgcagtggcaggcggtgaggg

SEQ ID NO: 22443 - DNA, 120 bp, Homo sapiens
gggcgtgggggcaggccaggagccgagctgaggtgcccaggggctgttgaccgagggacaatgccctgtgtgtctggtggggctctggccggtggcacctccgcctgtggcctgcggccg

SEQ ID NO: 22444 - DNA, 120 bp, Homo sapiens
ccacgagtgaggctggggtccttgggtcttaacacgcagagggtggtcagcatgcgtgaatgaaggactgggcagatgagctacaggggaaggggcagtgggtggccgcggtctcgctca

SEQ ID NO: 22445 - DNA, 120 bp, Homo sapiens
ccccgccaggagcagtgctgcactcaccagcagatggcgccactagaaagccagccaaccctgaaaaatgtactgaccctgagggaacttgcactctgccacctctttctccaagagcgg

SEQ ID NO: 22446 - DNA, 120 bp, Homo sapiens
gcccgggactgagaatgaggggatggggcgagtgggtggggccctgcgcctgtgcctggcttccagagtgaccctattgttgatgaggaccagagcctaggagacatcagagccggccag

SEQ ID NO: 22447 - DNA, 120 bp, Homo sapiens
aggcggtgtcggggtcaccgattccaggtgtcggggtcaccgattccaggggtcgggtgagggcttctgtctgctgagtgagtgattgcctttactttgagcacctgctgtgtgccaggc

SEQ ID NO: 22448 - DNA, 120 bp, Homo sapiens
cagcgtggttaaccacttgcccaaagtcacagaagattcacagcaagtttgtctgactcctgcacacactgctccctgcggtggagtaaggagaggggcggcagccaggggtggaggggg

SEQ ID NO: 22449 - DNA, 120 bp, Homo sapiens
gcacggtctgtgatggcctcagccttgacccatggcctcaaacaacctgaacccggtaggttcgggtgctcactaaacccacgcccaagcccaagtcatcaaggggatccgagagctccc

SEQ ID NO: 22450 - DNA, 120 bp, Homo sapiens
gctcgtggggcacccaacagcattcctggtatgtgaactaaaatattgatacattgaatcaaactgactataatacagggaggccatgctgggacagaggaggaggccagagcagaggga

SEQ ID NO: 22451 - DNA, 120 bp, Homo sapiens
agccgggagggcagaggtcagcctccacagatgggctggcctgagtttcagccctgcccctgccccttcactgctgtgtcatcttgggaatgttaattgacttctctgagccttagtttc

SEQ ID NO: 22452 - DNA, 120 bp, Homo sapiens
gtacgttcctgggtaggaagggcattacgaagtggggacaaggctagaaccagcagaagaatgcaaaggtgcctatttccagcgggcccaccctagagcgttggcaaggccagggggacc

SEQ ID NO: 22453 - DNA, 120 bp, Homo sapiens
tcccgtctccaggccccaaggagccacacctggaccagaccccaggaaaggtaagcaccaacggcagacctgggatccgtgggtgggggcctctgggaatttccctagggggatgctgca

SEQ ID NO: 22454 - DNA, 120 bp, Homo sapiens
gatcggctctagttctatggtcctgttggcttctaggattccttgttgttgtagtcaattgggggaagaaggtgcagagggagtgcacagagttaacatcctatcagcccaagcttcacc

SEQ ID NO: 22455 - DNA, 120 bp, Homo sapiens
cctcggcacccgagtctcaggcagtctccctggcttctacataggcagtgcttcttcctcattgtgtggggctttgattttgtaattccaagagcctggggctcctggcaaggaaaatgg

SEQ ID NO: 22456 - DNA, 120 bp, Homo sapiens
tttcgagaaacaaagctggggaagaggcaatgtaagctcaggctctggcaggcaggcagagatcctgggaaggctgggtgctgactgcacatggagcaatgggaagggatgctggtgaga

SEQ ID NO: 22457 - DNA, 120 bp, Homo sapiens
agacgggggcacttaagctccggccccagctctgctctcagtgcccggctctgtggtcttgggctggccccctcccttctctgggccatagttttcccatctgtatagcaaggccattgg

SEQ ID NO: 22458 - DNA, 120 bp, Homo sapiens
agccgagtctgaactttgaccacaagcttggagtccaagcagatgaagtcctgtgggagcttttggaggttgagcctgagtgagggagagtagctgaaggttctgtgactgaaggcttgg

SEQ ID NO: 22459 - DNA, 120 bp, Homo sapiens
ccccgagccctccagatgaacttggctgcaaccagcctctggtggggaaaggactgatctctggattcaaccacacaggaatgtgggacatggaagtaggtaagggatggaaaagatggc

SEQ ID NO: 22460 - DNA, 120 bp, Homo sapiens
tgacgatgagtttatcaggaagtaacttaaggaacatctgtagtgagctcctcatcaccagaggtatgtaagcttagtacagacaccatagagagaagccaaacatcagaaaaggttggg

SEQ ID NO: 22461 - DNA, 120 bp, Homo sapiens
cctcggatctcacatgccagctctaactgctttaggacaatcatgagctgagccttcctgcagcctggatgtcagattcccagccagacatgacatcagttctgccctgactttgcacaa

SEQ ID NO: 22462 - DNA, 120 bp, Homo sapiens
ccccggggaacattcagctgatggccttctgcccggcaggaatgagacaaagggggccagggaccctgggagccctgttcacacgctccagagagtctgcgtggaaattccaggagggtc

SEQ ID NO: 22463 - DNA, 120 bp, Homo sapiens
ggtcggtgggggtgtcatagaagtctgggaaaggaaagcaagcatcctcttgggctgagtcacagaaagagcatggagagacggagggtatggggtagattgggaggcccaccagacagg

SEQ ID NO: 22464 - DNA, 120 bp, Homo sapiens
aaccgcctgtgagggtcctggagcagtgggcaactacatcgcctgggccagcagccttccctagatgctcaagaccagagctgccagaacctgggttcaagctggggtcagagagtcagc

SEQ ID NO: 22465 - DNA, 120 bp, Homo sapiens
tggcgcccctggtagatgattaataaatattcctggtgttaaatcccatactcattgcatcatagtccttttagagctgagggaccttaaagagcatcagggcctatctcctcatgttat

SEQ ID NO: 22466 - DNA, 120 bp, Homo sapiens
aggcggtgcccaggcaggatgcaactatctccaagagatagttagaggatggcagcctatcttgagttctggctgctctgcccaggaggtccctttgaatggccagagatggtctccaat

SEQ ID NO: 22467 - DNA, 120 bp, Homo sapiens
cctcgtgtggaccccggcatcgatttagcttggtggcttacacccccacacagggagctataatctcttcccctggctgggactcagtttcttcttctataaaacagagacagccaggtg

SEQ ID NO: 22468 - DNA, 120 bp, Homo sapiens
ctccgtctcgaaaacaaaacaaaacaaaacaaaataaaacagagacacagcgtggaccaaatgtctctagactttctgccataacactaaggatctaccaggaccccagtgctttcctgg

SEQ ID NO: 22469 - DNA, 120 bp, Homo sapiens
tttcgctccctctcctcccatctcacatcgctgttctgtcttccttccccctcacttcttccttctcccaaaatcttttcatagtcagcttccctcccccacttctctccctcagatctc

SEQ ID NO: 22470 - DNA, 120 bp, Homo sapiens
tctcgtttctggtggtggaagaaagtaacacatctgcactcccaccccttcttaagcactatttacaacataaattccaaacatccgccatctggttctaggaagggccaaaagatattt

SEQ ID NO: 22471 - DNA, 120 bp, Homo sapiens
tcccggccagagctggagaggtggagcccaggtcccctctaacaccccttctcctggccaggttggagtcccgccacaggccaccagagcggagcagcgcagcgccctgtctcccagcct

SEQ ID NO: 22472 - DNA, 120 bp, Homo sapiens
ttacgtagatctgtgggatcagtgaggctcagagaggtaaagtggccagcccaaggtcgcccagacagcaaaaggcagggccagcgctgatttcaagtccaatggcctatggcaatttct

SEQ ID NO: 22473 - DNA, 120 bp, Homo sapiens
aggcggagtgggcacgtgtgggaggaaaggccaagagaaagtgatctgtgggagggaaaagtcagaatgtagcattcctcacccctcccctgtctggtttaagcaaatggcacattttgg

SEQ ID NO: 22474 - DNA, 120 bp, Homo sapiens
aagcgggtttgcaggaggtggggattgggaagggaggaaagttttagaagtttcaaaatgtttcaagtaggtagttggaagaccgcatggcaagggagggggaatggaagcctcagatga

SEQ ID NO: 22475 - DNA, 120 bp, Homo sapiens
ccccgggatgagactcaaggggtcgcatctcagcgcagggcacggaggagctcctgtgcagctggaggaaggaagcaggactcactggcaagttctgggatgcagggagagaggcttgga

SEQ ID NO: 22476 - DNA, 120 bp, Homo sapiens
tgccggggctgcggctttgggcaacgccagcctctatgaaccttgacatcctcctctgttggggggtaatgatggcgtggcagagggggtaggcccagaggaggatctggggcacccccc

SEQ ID NO: 22477 - DNA, 120 bp, Homo sapiens
ctccggctcccgggcgtgtctgcgtccgtgtcatcttccgcccaggcgtgggccaactcagcacaatctggcagggcgagcctgggcaccagctgagggaggctgggttccagcccctcg

SEQ ID NO: 22478 - DNA, 120 bp, Homo sapiens
tcacgccccaatgacgccacagctgggcaagccctggggacccagagggcctggttccagtcccgcctgtggaacaaactcaaagttgccttctctggggctcagtttcccctctgatta

SEQ ID NO: 22479 - DNA, 120 bp, Homo sapiens
atccgtgtgttcattttccctttgtgggggcatctaccaagtgtcagacctgcaataagcatcaagcatcagtgaacccctatccttagccttgggaagcacccagcctggctcgtctgc

SEQ ID NO: 22480 - DNA, 120 bp, Homo sapiens
ccacgcacaaaactagaagctgctctgcagggccagtgggcttggcttccctctgcatccgcaaggcggcaggtgcccagaagagggcagcagagagcgcgtctccagcctcccaggctg

SEQ ID NO: 22481 - DNA, 120 bp, Homo sapiens
agtcgtggaaggccaaggccaaggcctggggatttttcagcctcactgttgtcaggacaaagtttcagaggtacctctggcacattagcattctctttgtcctggacccctgggcggccg

SEQ ID NO: 22482 - DNA, 120 bp, Homo sapiens
ccccgcactctccagtcccagagcatccggccctgacaccctggcctgtgcactgccccccaggaagagttgtcctggggctgctttcaaccagctgtggccagctctggggaatggaag

SEQ ID NO: 22483 - DNA, 120 bp, Homo sapiens
ccacggcaagtccccgccaccaggggcatgggctggtcctaggagcagtgggcaccctgcagcgccttccactaggtagtgaacgataccagtacgttttctaaagatcaccgtggtgcc

SEQ ID NO: 22484 - DNA, 120 bp, Homo sapiens
acacgctcatgttctcattctcacacatgcacactctcatgcacactcatgctaacacgtttcacacaaatcaccccaaactcacacactcagatacactcacactcacatgctaacaca

SEQ ID NO: 22485 - DNA, 120 bp, Homo sapiens
actcgcgaacactcgcccacacttatgtatacacacaacactcacacactcatactctcatacactaacacacattcatttttcacacagctcttacaagtgttcgtgtacacacactta

SEQ ID NO: 22486 - DNA, 120 bp, Homo sapiens
taacgatctatctcaagtttactattaggtaaacaatttcagtactagaccaacatcatttcctcatatgtatgttagagagctaaacataatatcctattttcatttagcttttttcta

SEQ ID NO: 22487 - DNA, 120 bp, Homo sapiens
caacgtaagaggtgcttgagcaagatctacattctccagaattaaaacaaaacaaaaatcatcaaaataaaacaataaaaaagaaaagcacatgaatttgggattgaggttggaatagga

SEQ ID NO: 22488 - DNA, 120 bp, Homo sapiens
ggccggcgcagacaggcaacaccgaggcattagagaaagaacagggtagccaaatgccatccttcttccaccaagcactgtagcttctcagttttccaaataagaatcacatgctcaaga

SEQ ID NO: 22489 - DNA, 120 bp, Homo sapiens
gtacgggggaaaaaaatcttcagtaaggaagaggtagaaggcatttagtcaccttaaaatttattttcgtaagcatgcagggctgattactggaagagatgagcaaattcactaagattg

SEQ ID NO: 22490 - DNA, 120 bp, Homo sapiens
atgcgattaacaagctattcttaagggggttgtgggggagggggggaaggcaaagtgatatctaggtcatcatttaaatttaaggcaaaaaccacgtactgcaatgtcaacgatgcagaa

SEQ ID NO: 22491 - DNA, 120 bp, Homo sapiens
gcccgagctcaacatagtatcgataaagaaagcaattcactcagtaagactaatcattacagaaaaaaagtcaacacaattagtttctaactgcaatcatgcgccactagctaaaaccca

SEQ ID NO: 22492 - DNA, 120 bp, Homo sapiens
acccggccagaagagccagttttgtccttattgcttaaaacagcatactaaagctgctgttattttccctcttccactctttattctccctatgggaattcaacacctttcacattcgct

SEQ ID NO: 22493 - DNA, 120 bp, Homo sapiens
gttcgtggacttggccatgtctgtaccttaagccgcggctctccaagtgcctagaaccggaagcttcatttcttaaaatatcaagaaaatggatgccattctcttatccttgcttttttt

SEQ ID NO: 22494 - DNA, 120 bp, Homo sapiens
tcccgcctgctagcttattcacatcatggtctcatggttctaagggctgtggggagggcttggcatctagaggtcttagctgggaactggcacattgtcattcaaatgaagtcctaaggc

SEQ ID NO: 22495 - DNA, 120 bp, Homo sapiens
agacgccagaaacttagatgtaacatctctcaagagttcagtgctggcatctagctcagacatttaataaacactgtgtgtgggagccctagtttgctcagaggctgctgtttattacat

SEQ ID NO: 22496 - DNA, 120 bp, Homo sapiens
agccgagctccatggtggtggatgtggcttggcccctggccatgagagagccatcttatgtctcaggatctagtttccttatgtgtaaggtgggaggaataacagccccgcatggggcat

SEQ ID NO: 22497 - DNA, 120 bp, Homo sapiens
acacgagtgacactcaatgaatctcacgtattatagttatctcggctaggcagggattctattttctctgagaccacactgtagttctcaattttatcagtgccatgctcccttgttata

SEQ ID NO: 22498 - DNA, 120 bp, Homo sapiens
tgtcgccatcccctccgtcactgacaggcaggcaggtcattaccacccacgcagccccagggcccagcagctctgcagagcccaggaagtcatttggcctcaggccaagacaggctttca

SEQ ID NO: 22499 - DNA, 120 bp, Homo sapiens
agacgtggcatgtctgatgcaccttctaagcccgccaccggctctttttgtccctatttactcctctggcactggctcactgacttctaagacgcgggtgggggctgcggtgggtgacag

SEQ ID NO: 22500 - DNA, 120 bp, Homo sapiens
cgggagcttgaccagcatgggcactgccagactgtgaaacaggggatttccttcagggcatttctgcagtcaccacagttgaatctctctctttgtttacttcttattgccagttgtcac

SEQ ID NO: 22501 - DNA, 120 bp, Homo sapiens
taacgttcagcttcctcacaaggccccagacagactccttagagcatgattgcaaaatatggaattgggagtgagttggaaattggctttttcttgcccctgtgacctcttaatctaaaa

SEQ ID NO: 22502 - DNA, 120 bp, Homo sapiens
atccggggaacgagagggttccacatggttccatgggacagcgcagctggaggagggtggtttgctccagttcactctggagaggtaacattagggctgaccagtgcctaatgtccaccc

SEQ ID NO: 22503 - DNA, 120 bp, Homo sapiens
caacggggacacaaatcctgattcttcccttagtagccatgggacattaggcaagtcacatcacttcctccaatggggataataatggtacctatgttatgaggaactggggaactgttt

SEQ ID NO: 22504 - DNA, 120 bp, Homo sapiens
atgcgtgcatggaaagtccttcaaacagtatcgtccatagtaggtgctcaaaaaatatcagctttaatcattatttcttccatttttcctttctgtaatataatgagacgaattccaaga

SEQ ID NO: 22505 - DNA, 120 bp, Homo sapiens
gctcgacactgtgctaggcaatatacatatatatgttctcagtcagtcctcacagccacctctctgcctgagaggccagcaggattattcttattttacagaggaggaaacttaggccca

SEQ ID NO: 22506 - DNA, 120 bp, Homo sapiens
agtcggtgaggcagtgattgacaatcagacaattgcaaattgtgggtgtcattgtgcactgtgtaatgagagataatcacaccaattgtgatttcaagctggggaatcaggagaggcctt

SEQ ID NO: 22507 - DNA, 120 bp, Homo sapiens
acacgtttccactgcccctccacagttctaaagttctatcattcaatgggaggtggagatggttctcagcatcaacaatacaaagcagggagatttttagttcctcttggcctgagtccc

SEQ ID NO: 22508 - DNA, 120 bp, Homo sapiens
tagcgcagtggctggcacatagtagctgctcactacatatctgctgaatgatgtctcatctcctacagtaggggagcctattaagcacagattcctgggcccaccccagacctactgaat

SEQ ID NO: 22509 - DNA, 120 bp, Homo sapiens
tggcgttagtgtccaagtgactgtcatgccctccagagtctgagaaccacagctgtatgtagtgtctgaataaagcatcatcttattattggaaaggagaaaatgctgatgtttcaactt

SEQ ID NO: 22510 - DNA, 120 bp, Homo sapiens
tgtcggtagtgactaaaatattcaagtcaaataggttcattttgctgtagccatttccatggagcctggggagctctgggctttgcactaggtatgcacagggctcactttcactaatct

SEQ ID NO: 22511 - DNA, 120 bp, Homo sapiens
caacgacaatgatgtaaaaatataaaacacacaaatgtcaatttgagctttctgggagttgggagtgccttagagacgatcttgcttaatgcccttaccttgaaggaaggaaacagacta

SEQ ID NO: 22512 - DNA, 120 bp, Homo sapiens
cctcggctgctgtctgcttggccgggctggctctgagtagctgggactcaactgtctgggacccactgtctgggaactcagccgggtgagccctgcttggctgagagatggatgctcccc

SEQ ID NO: 22513 - DNA, 120 bp, Homo sapiens
ccccgacagctctgcagccgtattttttccctgtgattgcctggcagaacatagtcatttagcagagggaatgcgaggagatgttagaaaccaaccaggccctgagcagttgcagcagcc

SEQ ID NO: 22514 - DNA, 120 bp, Homo sapiens
agccggcccacgagtcgctccctgatgttgccatggcaaacagccttggcaacgtggctgctcgcgcctttatttctggtctcaggctctttgcaaggaagtgtggtacccagaacactg

SEQ ID NO: 22515 - DNA, 120 bp, Homo sapiens
acccggcctttatgctgctagcagtcccaggccacagcagcccctgctcaaaacacctgcagacccaccctgcctttgcagaagcagactactgggtatgggatttgaagcctcaaatgt

SEQ ID NO: 22516 - DNA, 120 bp, Homo sapiens
aagcgtgagccaccacgcctggcatagccacataatattcttaacatgaaccctggtgttaaaggttcccaggcaggtgtcatcttcaaccatgtccttcaaggatggtgatgatgatga

SEQ ID NO: 22517 - DNA, 120 bp, Homo sapiens
gcccggttgtgaggcctggcctgagtggtgctgacaatcaggagtgggagggggcctgcctggctctgagctcaggagtgtgttgggaaattccgccaccctcccacgcaggcagggaag

SEQ ID NO: 22518 - DNA, 120 bp, Homo sapiens
tgccgggcagccggcccctcccccagcatcctcacatcttgccttctttggtcctctctccccatgagaaccacaccacccagggcctctagcttcccaagatggggacacttggaagta

SEQ ID NO: 22519 - DNA, 120 bp, Homo sapiens
atccggctgcttgtatccatgtagcagtgcccccctccccccccaccacagacacacacacagagtacccggctgctcatatccatgtagcatcacacacacacacacacacacacacac

SEQ ID NO: 22520 - DNA, 120 bp, Homo sapiens
atccggctgcttgtatccatgtagcagtgccccccttcccccccccacagacacacacacagagtacccggctgcttatatccatgtagcagcatctcacacacacacacacacacacac

SEQ ID NO: 22521 - DNA, 120 bp, Homo sapiens
gctcgtatccatggagcagcatcagctgggtctcagcaggtgctttgtcttggaggggatgacagaagggaggcagcccctgacccaagagtggtgaggaggcctgggttcctggcaagg

SEQ ID NO: 22522 - DNA, 120 bp, Homo sapiens
acccgccagtctgcaactccgtgatgggagaagaggtctgtgagcttccctgacttagcctagccctccagtggccagagagactccagaggcagggagaggaggctccaagcagaagcg

SEQ ID NO: 22523 - DNA, 120 bp, Homo sapiens
ttgcggctgccattgggcagctctgatggtcacaagggcttccttagaataaatgagctgcagtctcagctcccaccatagcctgggcttggcgtcgtgggccctcatagagcaaggctc

SEQ ID NO: 22524 - DNA, 120 bp, Homo sapiens
ggtcgtagtgggctaagcccaagaagaagagaggggagattaagagaagaaaagggaagtaagaagggcacactgagccattagcctggcataagcaaaggctcgagttgtgggctggga

SEQ ID NO: 22525 - DNA, 120 bp, Homo sapiens
agtcggatccctgtcactcatttactgtgtgaccttgggtgtggccattcctcttgtataagatataaagaaactcttaaaaattttttttcttcaaagatgaatatctgcaacatacac

SEQ ID NO: 22526 - DNA, 120 bp, Homo sapiens
tatcggggaagaaggaaggatgtgggccgagtgggcctggacggctgacagatccccagatttctagagaatggagtattttccctgaggtcagcagaaggtttgggcccagagcagctg

SEQ ID NO: 22527 - DNA, 120 bp, Homo sapiens
tcacgaggccccgggtgctgggatggcctgatgcctggccttgccagccaatcacagggccgctgctctagggtcctgcacattagcaggttccctattgtgaacccacagggctggcct

SEQ ID NO: 22528 - DNA, 120 bp, Homo sapiens
cagcgtgggcagggatggctgctcctcccagtcaggctcagagcttcctgccccacctggctgtttcagtggagtagggtggggagaggtcgggagaaggagaagacttttggttttacc

SEQ ID NO: 22529 - DNA, 120 bp, Homo sapiens
cttcgccattttggactcatttcagcaccgtgaccggcactcagtaagtcagtgttggctctctaagtcctgggttctagtccttagtcctacccctgactcactgtgtgaccttgaaag

SEQ ID NO: 22530 - DNA, 120 bp, Homo sapiens
ccacgccccccaaaaataatggcagatagatttccttgtgagtgccaactgtgattgattggcagttgtcacctgaagccctgcatcagggaaaatgctggcatggaaggaagcagctgt

SEQ ID NO: 22531 - DNA, 120 bp, Homo sapiens
tagcgtgtgcgccacgcatttgaaatctctcttcactacatggttcctgagagcccttccggctctgatatttgtgataattcacaatatctctgggcccttggtactctccctgggaaa

SEQ ID NO: 22532 - DNA, 120 bp, Homo sapiens
gttcgtgcagtgctgatgatgtcatctctgaatgacttccctctagaatctgctctttgagacactgaacttagcctcccgccattgttcattgtttggttcattcactctttcattaag

SEQ ID NO: 22533 - DNA, 120 bp, Homo sapiens
tgccgtggtgcctcccatgtcccaggcattgagcttagggacctaagcactctacaaagcactctcattactgcttccagacttggccttctgggagcccagggaggaaggctggccagg

SEQ ID NO: 22534 - DNA, 120 bp, Homo sapiens
aaacgacttgcctaagatcacccttttgatggcagaaccccaagagtggtcgctgaggcccaagttccaggatcttaactctccatcaagctggacagatggttctgggctggacagggt

SEQ ID NO: 22535 - DNA, 120 bp, Homo sapiens
gcccgcttgcattctaaagccagagtcctcggaccctgatctaccctcgggcctccatccccagggcctgggtcaggcccaaccaaaatcttcttttgacctttcttttattcttagctc

SEQ ID NO: 22536 - DNA, 120 bp, Homo sapiens
aaacgcgtttgttctctccccgtgttcccccttcgaactactcagctgctgctccggctgtaaggcctggaacagatttagtgcagccaaaaggccgtcacgagacgtgtatttcagatg

SEQ ID NO: 22537 - DNA, 120 bp, Homo sapiens
tgccggaggaggcatcatgtgacagaatgtgccttctgccagaacagcccggggaccaggccttactaaatgaggcgctcggtgcctcacctagaagccacgtgctctccacaccaggcc

SEQ ID NO: 22538 - DNA, 120 bp, Homo sapiens
gggcgtgggggcctgtgggctgggggaacacacgccgaccctccttatggttcatctgtgcatggggcactcttgctgtccaagtcctggctttggacgttatttgctatgtgacccctg

SEQ ID NO: 22539 - DNA, 120 bp, Homo sapiens
aatcgtgcgcccctgggcgaggttgctgtgaggcctccctgagcctgacagagcctttctactcctctcttcagccaagcgctgtgcctctggcctttgattggggtttccctcttcctg

SEQ ID NO: 22540 - DNA, 120 bp, Homo sapiens
taacgctttacctggctggtgtctttcaagcctacctttaagtatcagctgctcagagaaggcatctgggaccaccctcaagagcctgtaagtcctcaccacattctttttctccatcat

SEQ ID NO: 22541 - DNA, 120 bp, Homo sapiens
tcacgctctgaaatgatcttgtttgtttgttagtttcgtcccatcctccacaggagggtaagctccatgggagcggggcatgtcattctccacgtgctgtttatcaccagcgtccagcat

SEQ ID NO: 22542 - DNA, 120 bp, Homo sapiens
ccccgggacagatctaagccatagtttctagtggggacagtaaggaattaaacccccaacttggctaggtaacgatgtcaaatctcacattaaccttgtctttgtccccactggatagct

SEQ ID NO: 22543 - DNA, 120 bp, Homo sapiens
atccgaatgttgtgaccatttggctgtttctctcttgttctcagacaatactagcaatacactttttttttttttttttaaagaaaaacagcttaggagcttttcacacatttctttcaa

SEQ ID NO: 22544 - DNA, 120 bp, Homo sapiens
gatcgcgctgcatatgtttagggcagcttttgttttttgtttctttaatggtatagcagcagtgactgagccttcgtgattcctggggacagcttttcagatactctgtttcatcagtat

SEQ ID NO: 22545 - DNA, 120 bp, Homo sapiens
atccggaaggagtacaaaaatccaactgcccaaatttggggcttggaaaataggttttataggtggtcggtccctgggctgtgcaacaactcctcaaagaggggtttatataactagaac

SEQ ID NO: 22546 - DNA, 120 bp, Homo sapiens
aggcggcttacaaaagcttcctttttcacttgaccacccttgctcattggttacttgtgaagggaattggtcagtttccacctcagcactttgccttatcaacatgcggtcgccatctag

SEQ ID NO: 22547 - DNA, 120 bp, Homo sapiens
tttcggccaccctgctgtccatcgtgaactttgggaatgaaatataatggcctgaacgaactgcctttgtgttcagagatcagtgcaacactagggtcagaagactccagaagcagccac

SEQ ID NO: 22548 - DNA, 120 bp, Homo sapiens
tcacgcagaactgagaaatgcactagctgtcctgtgggcagaagagacaggagtggaccaggagaggtccaggtgcccgggaagggtttactgtaactgcaatactggcagcccagctgc

SEQ ID NO: 22549 - DNA, 120 bp, Homo sapiens
gtccgaattctgccctcaaggcaagataagaagttgggtgtaaggattttgtggggggcctggccatgatctttgatatgatccccgaatagccaaatagttttttttgttcaatttttt

SEQ ID NO: 22550 - DNA, 120 bp, Homo sapiens
gagcgtggacaaggtggtatgtgcagcaggggaatagactgcttggatttccaaatggtttctggggaagatgaccatccagaagtccagcttagtgcagtctgctctggaattcacacc

SEQ ID NO: 22551 - DNA, 120 bp, Homo sapiens
cctcgcctccttgtgccatgttgttagcattggcttggagcatctgcttcttccagaggcagctgctaatgttgaaaccaacacgagccctctccccaaccccaggtttctaaagaaggt

SEQ ID NO: 22552 - DNA, 120 bp, Homo sapiens
ctgcgacagggtcaaaccaaggaatggctaaacctgtgaggttttgtcatccccgggggtactactgtagggggcattatttattaggaagcttaacaaggtaactacggcctgagtgcg

SEQ ID NO: 22553 - DNA, 120 bp, Homo sapiens
acacgtctgtgcctgtgtgtgtgtgtttgtgtgtgtgtgtgtgtgtggaattacattgatgcatttattgagaaaggtgcaagaatttcacctacacagagggacacatctgctttgtta

SEQ ID NO: 22554 - DNA, 120 bp, Homo sapiens
cagcgtcaccttctcagataagaccccggatgatgtctgctcctcacctcaccacacttctccctccttcagagcacttttcacagttcataatatccattcgtgccaggcacaggggct

SEQ ID NO: 22555 - DNA, 120 bp, Homo sapiens
gaacgactttttgccctgacttttataaagctataccactttctgaacaaagacttccttgttttggtatatcaactttcacataagcacattgaataaatgcactgtaggaggtatttt

SEQ ID NO: 22556 - DNA, 120 bp, Homo sapiens
atgcgtcaggagcccagattgatctactgtggaggccaccaggatgtggctgccctgtacactatgttctctgtgatcctgggcatctcctggagggaagccagggaactgtgccaggaa

SEQ ID NO: 22557 - DNA, 120 bp, Homo sapiens
ccccgtcttctcactggccttcaatttcctcatgtgtctaaaaagagagattacagtagatgagtggtttaccgtttggggaaaccatgtggctccctctcctcaaagcaactgttttaa

SEQ ID NO: 22558 - DNA, 120 bp, Homo sapiens
atgcggccacaaagaaacaaacagataaatacagaatgtgggaaaactgactctgtttctgcaaggtgatgacaatggaaaaaaggaaggagtactttgtagattaaaagagacttcaga

SEQ ID NO: 22559 - DNA, 120 bp, Homo sapiens
gaacgatagagaaggaaaaaaaatcaagatttggacaagtgtaacaaattgacttgcaaatttttagcatgttattgccattttcaacttctggtttatttgtgctgttttcaacatcag

SEQ ID NO: 22560 - DNA, 120 bp, Homo sapiens
ttgcggtagcccttactcagggagtacatgaaccgcaccagggcctgtgaacacatgcacatcagtgaggcaggacacacctgaaatggtctcatgagggttggaataacaaaaatatga

SEQ ID NO: 22561 - DNA, 120 bp, Homo sapiens
ctgcgaaagtgctttgcaaatactaaatgctaaatactaagaagatgttgttgttgttgttaggaaacgaggtgagcatgcatcattcctctgactgagcttcatcagtaattcccgaac

SEQ ID NO: 22562 - DNA, 120 bp, Homo sapiens
tgccgtcccccatgaccctagactcacagcaaaccttagtaaggaatcctgcagggaatgagccctgtttaaatgggtttagcccacattttctgccctcatttaactataggacccatt

SEQ ID NO: 22563 - DNA, 120 bp, Homo sapiens
tggcgaaggttgcattctgccactggggcccaaggttgcattctgcccagggccatgaattgagtaagatttcctgaagtaaacacgtgcaaataccaagtacgcagggatgactggcct

SEQ ID NO: 22564 - DNA, 120 bp, Homo sapiens
tgacggatgaacagaaagcaacaggccgtcccttagcacagaggctccaaaaactgttaagtcaggatcttctagactcagaaaaacaccctgaatcctcaatcccttaacaccaaggta

SEQ ID NO: 22565 - DNA, 120 bp, Homo sapiens
caacgacaacaataacagtagcaaaatggtcgtaatagtaataaggaacgggagctgccaataggagccattacggtgtgccaagaacactgctgatgagataattcattcatttaattt

SEQ ID NO: 22566 - DNA, 120 bp, Homo sapiens
aaacgatttgccaaggccacattctttgaaagtgacagagtcctggttcacatccagatctcaccttaaagcataagatcttaactctctgctacatgatccaatgaccttgctcaaata

SEQ ID NO: 22567 - DNA, 120 bp, Homo sapiens
gtgcgatgccctcattttatagaggaggagggagtacagaatagcagagcaattaagaggaattaaggctctgtaacgactccctggctgaaccaactagttaaaaaaaaaaaaaaagat

SEQ ID NO: 22568 - DNA, 120 bp, Homo sapiens
agtcgagtgaagcagtaggagtggagggggaacaaagaaatctataactggctgtgatcaattagttataaacacctgtgtacttgaaccagccaggatctgccactttctatctgcata

SEQ ID NO: 22569 - DNA, 120 bp, Homo sapiens
gatcgttatgaggggaaacgagtgaggcaatccttgttggctacaattacagttagaagagttgaagggagaatagactccagtccagttggatgagtcctccggaaagtctcctgagtg

SEQ ID NO: 22570 - DNA, 120 bp, Homo sapiens
gcccggcccctggatgcccaagaggagatgacgggagccatgcgcccatgtgggagcccaccgggtatgctttccacagaggcacaagtctggcttatctcactaaggagcccaagacca

SEQ ID NO: 22571 - DNA, 120 bp, Homo sapiens
tgccggaacacagctcctggtttggccagtgtaggagtgaataagacccgcatgggccctgccgtaatgggacaaacattcttctgggtgagacagtgttaaagaaattattgcataatt

SEQ ID NO: 22572 - DNA, 120 bp, Homo sapiens
ctccgcatgtaaagcacaaagaaaaacacatcacctctgtgctgctcctgccggaaatgtgtgacctgcatctaattatgaagaaatatcagacaagcccaaatgaaaggacatttctgc

SEQ ID NO: 22573 - DNA, 120 bp, Homo sapiens
caccgtggaaaacaaagacagactgaggaacagtcccagattcaaggagactcaaaagacagcgctacatcggtgtctgagacaactgacagaaactgaatatgaactgtttattagatc

SEQ ID NO: 22574 - DNA, 120 bp, Homo sapiens
ctccgagtagatgggactacaggcatgtgccactactcccagcagataatggtgtcgtatccacattacatttctatgattccgtcattgtactgtggataggtaagaaatgtccttgtt

SEQ ID NO: 22575 - DNA, 120 bp, Homo sapiens
tttcgtaaggccagcatggcagtgtgcatcagtagtcccatctatttgggaggatggcttgaggccaggagttagagagagtagtgtgttataatcatgcctgtgaataaccactgcatt

SEQ ID NO: 22576 - DNA, 120 bp, Homo sapiens
aaacgaacgaacaaacagaagtcttgtagtgcttccagcaaatcagcagaaaggaaaaaagagctctagagtaagaacagttgattctttttttaacaattagtgatgggggagtattca

SEQ ID NO: 22577 - DNA, 120 bp, Homo sapiens
acccgtcaccaaagattgtgatttaataggcctgggatatggcctgagctttggaatttttaaaggattctcaagtgatcctaatttgcagacaagtttggaaacccttggatgaatcaa

SEQ ID NO: 22578 - DNA, 120 bp, Homo sapiens
gtccgtagctttcatcagattctcttgctccactggatgcctgctgctggaagtaagctttcttcccggattttcagtgggtttcaaagtgctcttcttgccatagcattgatcacaccc

SEQ ID NO: 22579 - DNA, 120 bp, Homo sapiens
ttgcgcggtttgcagtggaagtgggtgttactctctagatctaggatgatgaaggaacttaacttctcaggtgacataggaaattatctagggacctcttgccaatttcaaatcccactc

SEQ ID NO: 22580 - DNA, 120 bp, Homo sapiens
aagcgaaactcattcaccacctcccttgctcctgccccacgataatctactcatgagggatctgcccccctgacccaagtacctccctttaggacctgcctccaacgttggggatcacat

SEQ ID NO: 22581 - DNA, 120 bp, Homo sapiens
agacggtaaacatccaaactatagcattaagcatttaacttctacagagccatgtataatatgtccatcacatatgaatcagtatcttatgtgtgtctcaggcatcatgctggttgggaa

SEQ ID NO: 22582 - DNA, 120 bp, Homo sapiens
aagcggggagggtggtggtttagcagctgtcagatgatgaattctgcagtcaaggggtgcactcagagaacacaaagcggggagtgatttatgctgccttggcaaaaaggatcagggaga

SEQ ID NO: 22583 - DNA, 120 bp, Homo sapiens
caccgagaattaaagacagataactttaagcagtgcagatacttgtttatgtatcaaaactatcattcatagagccttcattgcaccataggcattgtgctaagtgctttacttataata

SEQ ID NO: 22584 - DNA, 120 bp, Homo sapiens
cagcgccagtccacactgcagctgctgcgcaaagtcctgcagattcctgagaatgagtcagagctggctgaggtcttcgccttgattcatgaactcaacagctctcgacttatcttgtcc

SEQ ID NO: 22585 - DNA, 120 bp, Homo sapiens
caacgtgagtgaggagacagtcaccatcgagcaaacctcttggtcgaattattatgagtctccgtccacgcagtgccttctctgtagcagcccattattcaaagggggacaaaagtaagc

SEQ ID NO: 22586 - DNA, 120 bp, Homo sapiens
tgccgtttttaggcttcctttaactttctgattgctgaaagtaaagtaataattggtaattatcatttctgttgaaatgcctgaaagttatcaccagattaggatttagtttacatctgg

SEQ ID NO: 22587 - DNA, 120 bp, Homo sapiens
agccgctgactgtggagtctgcaccctaagcactgccattctcaccagtacctcctacgactctgagttctgtttcttctgatcatatctggccacagcaagtttatggtttccaagaat

SEQ ID NO: 22588 - DNA, 120 bp, Homo sapiens
acccgtcctgtcccaatcaaggctcctctgtcccagaatggagtagcattcccttcactctcagtttgcttgtctctttccttcagtggtaccaggtacttctttcatagaggtacttct

SEQ ID NO: 22589 - DNA, 120 bp, Homo sapiens
tctcggagttgtataaaggaggaccctgtggttagtttgtgtactgggttggcatttcctgttcccttgctccttgtggagaggatagactcagctggcctcattcccctaggtgtgcca

SEQ ID NO: 22590 - DNA, 120 bp, Homo sapiens
atccgggtcacgttttgagagccatataagagggcattgcaagaagaaaaattgagtagcacaagcgctattaatagatgtctataagagataagtaaatgctgccctgggtagaggaga

SEQ ID NO: 22591 - DNA, 120 bp, Homo sapiens
tgtcggcaatccacagggccttggaaaatggctggaattttactcaataggattctgctcgttcttgccagcctggtatcagcagtaagggtttgggctttggaactagacctgtgttga

SEQ ID NO: 22592 - DNA, 120 bp, Homo sapiens
tgacgtgattgttctgtctcttcgagtgcttgaatactcacctcagccatccccagacttgttttttagtagttcattacaaagtgtctggcacataacaggtactcaaatggtagctcc

SEQ ID NO: 22593 - DNA, 120 bp, Homo sapiens
tgacggggtaggctgttgtgttgctgatgttctgtgactcccacagtttgaccttctttatcctgaccttctagttcacctggcctgaattcctgggctctaatgaggtaaatgtggagg

SEQ ID NO: 22594 - DNA, 120 bp, Homo sapiens
gttcgtattttattctgactgatgagggaccttttggatggttttgaatgggaaatctgtggaagggtatggacaaggtggcactgggttagctccaggacaggttatgtactagatgac

SEQ ID NO: 22595 - DNA, 120 bp, Homo sapiens
gaacggaaacccccccccttaacaggtactgaatgggagagaggtggcttatcagagccttcactgaagcacatgagtcagcagggggatctagctgtaaaaagagaatccagttcccaa

SEQ ID NO: 22596 - DNA, 120 bp, Homo sapiens
atgcgacaggggatcatctcatgagaagcagctgacagcacggggagagctgtagatcttgggggctgtgatgggagtggcatcacttggaggtgacagccaagtgggtgtacccagagt

SEQ ID NO: 22597 - DNA, 120 bp, Homo sapiens
cctcgggcccaggcatctccattcttaaccagctcttagctgctgctgctgctatgtagctagcatagtgaactggtaggtgatgtggagagagtggggttttgaaagatgttctgaggt

SEQ ID NO: 22598 - DNA, 120 bp, Homo sapiens
cttcggccctgaagctgattgctcatcttcctgggaagaagcgagtgagaactgtacactctctgcagactggcttcctaattaaccctgcgccccccacccttcatctcccaggtggtc

SEQ ID NO: 22599 - DNA, 120 bp, Homo sapiens
ctgcggctccaagtatcttgtgcgaggtgagagtgcccgtgaccatgtggacctgcttgcctcttcccgccactggccgcctgtctatgtggtagatatggccacgtcagtggccctgtg

SEQ ID NO: 22600 - DNA, 120 bp, Homo sapiens
ttccgggtcccacagcagattagtggcagagcccttgtctctgtgtcttggtatattgtaccagacagtatttctcaccagtcatgtaccctccaaggccagcaggccagcctttggcct

SEQ ID NO: 22601 - DNA, 120 bp, Homo sapiens
acccggtgcttcctgtgtgccagccagtgtgtggcaggcttaggctttaggaaggtgtgagcctctatccaggccttatcacaccaaacattcttgcacaggctttggaatcagaccaaa

SEQ ID NO: 22602 - DNA, 120 bp, Homo sapiens
tatcgttaaagtgtggacagtcaggtggttatgagggtataggagcagcgtatttaagaactgagtacaagtccttgtgcctagtcctcgggaaatagcagttctttctactagagccta

SEQ ID NO: 22603 - DNA, 120 bp, Homo sapiens
aaacgagggaagagccagaaaggagcgcctgtcaggggcagagggtctgccgagtcccgcaggagccacgatgctgggtttcgagagcccttgcccattcctgcactctcaccaaccctc

SEQ ID NO: 22604 - DNA, 120 bp, Homo sapiens
taccgttacttctgatcatagcagctgctatctgccaggcccttccctaaactctgcacacattgaaccctttttcttttcaacaatcgttatgcccatttttataggtgtagaaactga

SEQ ID NO: 22605 - DNA, 120 bp, Homo sapiens
tcacggagcaggtggcagagccaacaatcaaaccactgactcccgaatctgttctaaggaagatggcaagagctcccattccctggcacttcttcctaggccgagcgcactttatacgtt

SEQ ID NO: 22606 - DNA, 120 bp, Homo sapiens
tctcgtgttcctttcctcaatgtctctgtggcttatggacccattaaaccgatccatggaccagccccctccaaagggcctacacattccagattcagaacttctgctttaaatgagagg

SEQ ID NO: 22607 - DNA, 120 bp, Homo sapiens
agacggaagaagaggggtgtggagttattatagattgcacttcatgggaagagttttgagcttacagagaagagcagccagtgagaaattcttggggctgggtgatcacaatcctttaaa

SEQ ID NO: 22608 - DNA, 120 bp, Homo sapiens
ccacgcccagctactaactagtttctcctaatgacattttgcacagattgtaatacagctgctcttgttgaatctcaggcaagggaattgtggcaagaaccccaattcactcagcctctc

SEQ ID NO: 22609 - DNA, 120 bp, Homo sapiens
ctccgtgcctgtcatggtagcccctgacatgccttcttaaaacctcagggctctgccacaagccctggactagatgatttctaagagctcctctccttactctattctgtctaaaaatct

SEQ ID NO: 22610 - DNA, 120 bp, Homo sapiens
cagcgtggcgttcaaggctctcaatcaaatcaggtctcactgtgctcatccagccacctcccctcttccttcctacacacacacactcaacgctccacccatctgggtctcctaacatcc

SEQ ID NO: 22611 - DNA, 120 bp, Homo sapiens
actcgacttttgctgcccttccagactacacactcattaggcaccacatctgcactgcttcatgcatctggttctccctccaggtagctttcttctctctccaagtagtctgtgagcttt

SEQ ID NO: 22612 - DNA, 120 bp, Homo sapiens
ctgcggtagcctcctttcatctcaccttcccactttagctctctgacctcatctgagaccactttttttctcactctctccccgcagccacactggcccacttgtcccctgaacatggca

SEQ ID NO: 22613 - DNA, 120 bp, Homo sapiens
cctcgccacctccatctcccataacattcaacacatgaggcacggccagacctaaatgtctcagagcctgctcccactccgatgagctgctgccttgcttcagggtctgagtccagtgac

SEQ ID NO: 22614 - DNA, 120 bp, Homo sapiens
ccacgaagtgcctcctctgtacaatctgaccccatcactctcctctttacaatgacctcccaataggttaagatgcagttattctttctcactttaagacacctttacctccggcttctg

SEQ ID NO: 22615 - DNA, 120 bp, Homo sapiens
aagcgctgttccccttcctttcccacccttctgcccggccaactcaccttcattcttcccatcccagtttagaggccaccttctcgaagcctgggttggggggactcttcagtgttccca

SEQ ID NO: 22616 - DNA, 120 bp, Homo sapiens
taccgactgtccaccaccaccctgatgcttacctaccacccggaagaacatggaggtggagtgcttgccctgcacgttgctggccacgcaggagtagttgccggcatgttggaaatctac

SEQ ID NO: 22617 - DNA, 120 bp, Homo sapiens
gatcgaggttgagggtcaggactttttggtaacggttattatgaaagtcagattgttgagggattgcgagctgcagccagaaggaatggagatgttataccaaggtagtttagggattag

SEQ ID NO: 22618 - DNA, 120 bp, Homo sapiens
acacggcaggtgcagtgggaagggagggggctcttagaggcagcccaacgtgagtccctcctggaatcctccctcctcctccctctctcccaatgtctttctgaaatagctgttatattc

SEQ ID NO: 22619 - DNA, 120 bp, Homo sapiens
cagcggcacaagcatgagtcctgattctgtgtcagctactgactgggagtgagatctcgggtgagtctgcacccctctctggagtctgagctgtgccttcagctaagacagccagtttgg

SEQ ID NO: 22620 - DNA, 120 bp, Homo sapiens
caacgctgctggctgagcacacgatctgggcagcctcccctcgaatccgcaccagctctgcaggcaccagtgtcaaggctgggggccctgggatgactgagaccgggggagagacccctg

SEQ ID NO: 22621 - DNA, 120 bp, Homo sapiens
tcccgtcaccattctccactctggacttctgcaccagcctcctcagagacctccctgcctccctccaagccccccacacctagattcttcactaaagtgacctcttacaaatataaatgg

SEQ ID NO: 22622 - DNA, 120 bp, Homo sapiens
gaccgccctgataaccccaccccttgttcactgcactgcagcccgctggacctctttcctaccacagggcctttgcacccacctttccctcctggaatgcctttcctcccacacttcaaa

SEQ ID NO: 22623 - DNA, 120 bp, Homo sapiens
acacgtggccactccacactggcacatttacattctcatcacagatgcggggcccgtctggccttctagactctggtggatggattaagactgagggtgataaagaaaaagccccaggac

SEQ ID NO: 22624 - DNA, 120 bp, Homo sapiens
ctgcgtgtgctccaagtgccctgggcaagggctgcaggctgggggtgtcctgtacttggctcagcctccagcattaattaggctgcctaatggccccagaccagctcgggccagggaacg

SEQ ID NO: 22625 - DNA, 120 bp, Homo sapiens
gtgcgaggagagagctatgattccttgaggggtagctggctgaacagaaaaaagttaatttaccacctcagtaactccaagaatcttcccagggagggattcggtctccccacctgtcag

SEQ ID NO: 22626 - DNA, 120 bp, Homo sapiens
tcacggcccctgcagttttcttgcctcctaagccagccccagggtttggggcacaacacgtcaggagcagaaagcttccagaaggggacagctgataagggcagcctggctgacaggaag

SEQ ID NO: 22627 - DNA, 120 bp, Homo sapiens
gcccggtcaggccaggccaggagatgctgggtgctggcagggggggagcttcaggcagggcagggtaggggccagccccctacaggaagctatcctctgcttccgcccgaggcgcagggc

SEQ ID NO: 22628 - DNA, 120 bp, Homo sapiens
ccccgaatccggcaactgttccagctctggctccggctccacctggagctcaagctggggctctggctctggttcgtcctggggctccagggggctgtcacaggagatggttgaggaggt

SEQ ID NO: 22629 - DNA, 120 bp, Homo sapiens
cttcggtgtgtccacccctgcaccgtaggcttcacacactccggctcatttaactcttgtgaaaactatgcaaggcctgcaccgtgaggaaagtgtggctcagagaggttatatcactgc

SEQ ID NO: 22630 - DNA, 120 bp, Homo sapiens
gaacgggggcagggaggggaaggagcagggacatggcgaggggcgtgctcatcaccattgatctgtagctggaaggagagctggacctcagcatcctcatggaaggcccgcatggtgtag

SEQ ID NO: 22631 - DNA, 120 bp, Homo sapiens
tcacgcgaaccagtgtcagctctgacacatacctggggagcaggaaaggcagctgtcagagtcggaaggactcttacagttctccccaccctcctggtataaagaggaacaaggcccagg

SEQ ID NO: 22632 - DNA, 120 bp, Homo sapiens
tctcggcattggtagcagagccgggactcaaaccaggtctcgtaaatcctcacccacaggcagttcccctaggccaagagggagggttgagatgaactgtgggtgggggtggggagcatt

SEQ ID NO: 22633 - DNA, 120 bp, Homo sapiens
gggcggtgggtaggcctcgaacactacctgcagtgtccggctccgatgcagctcagcaaattgtagtgtgcccacctctcccaggagccgcacgtagccgctctctgcaaggggtgaccg

SEQ ID NO: 22634 - DNA, 120 bp, Homo sapiens
gggcggggccctgggggcagggcaccaactgaatcccaaaggaggccagcctgtggggtggggcttcaggcctggggaccgtgccagccatggagtttccggagctgaggttgaaattgg

SEQ ID NO: 22635 - DNA, 120 bp, Homo sapiens
ccccggggctgtgacaggcactgggtccagctcagccctgatcactgtatcaaaaatgcaactctcaccatcactctgcacccagcaaagtgggtgagggtggggagcgttgaaggaatt

SEQ ID NO: 22636 - DNA, 120 bp, Homo sapiens
ccacggtgatgttgatggccttttcatcctgatggtcattcacactctccgtcacattgcaggtgtaggtccccgagtcttctaactcggcactggggatgtgcaggatggagcggatgt

SEQ ID NO: 22637 - DNA, 120 bp, Homo sapiens
tcacgctgtcttttgagctgggtaaagctgaagctgacagtttgagtgggaaacagtcactccatttttcacagagccctacagtcttagtacattccctctattcacatctcccccacc

SEQ ID NO: 22638 - DNA, 120 bp, Homo sapiens
tcacgaccaccctgtgaggggggtacactcattattcccattttacagaggagaatgatgagtctcagagacttttggtaactttcccaaggtcacacaataagtaagatgcaaaggaac

SEQ ID NO: 22639 - DNA, 120 bp, Homo sapiens
agccgcactgcctatccagggctgggcactgggggaagagcacaggatggggaaaccttaaacctttccccagcagaaagtgcggcctcagttctgactgctggggcctgaacaatctct

SEQ ID NO: 22640 - DNA, 120 bp, Homo sapiens
tgcgggggcgcgcgcatccccccgccgtccgtccgtcagctgtctgtctgggtgtctatgcgggcgcagcagtgcacccttccccagcctcgggcgctgcgcagggacagacaaggcatt

SEQ ID NO: 22641 - DNA, 120 bp, Homo sapiens
attcgcagcgccctgcccgcgctccacgcccgcagccgccagacggcagcgcctgcgtccgtgcccgccccagccggtgcgcgggagccgcgggggcaaaggcgcagtggccagcggacc

SEQ ID NO: 22642 - DNA, 120 bp, Homo sapiens
cctcggaacctgcccagtgggctgcccaaatgttaattgcctcctttctttaaggacacaggggctccctcttctccctggcatgacaggcagagggatttgggaatgtggttgaggaag

SEQ ID NO: 22643 - DNA, 120 bp, Homo sapiens
ccccgactccgtccatggaaactggggctctacaagggaaaggtcagaggcagaaggaggcaggtcggggctggaagaaaccgggaaagccagctgcaagcccaccgcagttctcccggt

SEQ ID NO: 22644 - DNA, 120 bp, Homo sapiens
tcccggattggcattcagacactctgaggaggggcccgccgcgtaattatagcaacagccgccacttcccaggccttaccctgttcccagcaccctgctaagtgcgtcatctcagtgcct

SEQ ID NO: 22645 - DNA, 120 bp, Homo sapiens
tcccgaattacagaccaggaagcagagcacccagagccgagcggcattgccaagagccatccagcttgcaagtggtagaacaggattctcacccaggcaggtggatccctcccctgggga

SEQ ID NO: 22646 - DNA, 120 bp, Homo sapiens
ccccgccagggggctgtggccaggactcccccagtgatgtggtcaggtgtttgctgggtgtctggccacagtgaaccctccaccagcgctgcctgtttcctgttttcactgctctcgttg

SEQ ID NO: 22647 - DNA, 120 bp, Homo sapiens
cagcggctccaacaggccagccggccggccatggactggggaccatcgctggaggagaaccggacgggcatgtatgtggccacgctggctgggagccagtcaccaaagccactgatggtg

SEQ ID NO: 22648 - DNA, 120 bp, Homo sapiens
atgcgcaagtacgggggcatcaccagcttcgagaacacggccatcgaggtggaccgtgagattgcagaggaggaggagtcgatgatgtgaggcaggaggcaggcgggcagaaggccctgc

SEQ ID NO: 22649 - DNA, 120 bp, Homo sapiens
acacgcacacattcgcactcacactcacattcacacacatattcactcacacactccacacactctcacacacttaacacacactcccctccttccactggagctggtagcctccgtaag

SEQ ID NO: 22650 - DNA, 120 bp, Homo sapiens
tcccggagcctctggctgctgtttgtgcagggaaggggaggtgccttctgggtataaatagcagatggagatgcttctctctggcaggagagttaacccttggggccctgggcacggaga

SEQ ID NO: 22651 - DNA, 120 bp, Homo sapiens
tagcgatcacctaggccctgctcctcagtgcggtctatgagtcagcaggcttggcatcaactcagagagtgttagaactgcaaaatcctggccccatcccaggcccagtgaatccaagtc

SEQ ID NO: 22652 - DNA, 120 bp, Homo sapiens
cagcgaggtgttgtttcagagcccatccccacgggttctgctgccctggctctgtcccagcctgccatggcccagcctctccatgcagcctgtgcccggcctgtgggccagggcctgagt

SEQ ID NO: 22653 - DNA, 120 bp, Homo sapiens
ggtcgacggaggagggcagggccacggtgccaggctgaatcggcatgggtgtgggtatggggaatgggccacagcggtcaaggccaagcatgtccccctggcctattttcatctctccca

SEQ ID NO: 22654 - DNA, 120 bp, Homo sapiens
ttccggaggctgccggcagtgtgggatgggaggaagggcctttcttcaccttcccccgaaacaagctggctctgaggaatgtggaaaccattaaagacgccccctttcccatctctgctg

SEQ ID NO: 22655 - DNA, 120 bp, Homo sapiens
acccgcaaacacccacgtgccagggtgggcaggggagcagggcctggctcccctgcgcccctctcatcccacaaggctcaccgatgttggggtgcttcagcaggcggcagatgcgggctt

SEQ ID NO: 22656 - DNA, 120 bp, Homo sapiens
tcacgctccagcttctgatggtctgaaacacagaggctcatgtgagtccccggtgaggaaggaaccattaccctccatctcccccttctcaaagcctcgtattatctccacctcccaggg

SEQ ID NO: 22657 - DNA, 120 bp, Homo sapiens
tcccgctgggaagaaaagcggctggcagttggcagacttttccagaaggttccctgataacctccccaccccctcaacactcacctaggccgggccaccttccttccaagaggtcaagga

SEQ ID NO: 22658 - DNA, 120 bp, Homo sapiens
aggcggtttggacagtgactgtctggcatagcccagggtctgcactgtcccaggagtgcttagtcaccttccaaaacaggagccatggcccttccaccctcccatacacatctgtctctt

SEQ ID NO: 22659 - DNA, 120 bp, Homo sapiens
caacgtgcaagtgtgtgtgtgaatgtgcctcgagagtgtggtgaactaacccgagatccccagcatccagggaccaccttggtgcctgaccctctctcccactggggcaatcttaacccg

SEQ ID NO: 22660 - DNA, 120 bp, Homo sapiens
tctcgtcctgctcaccagcacctgacaaagcttggtccagagctacagctcaattaatatatgtgggtggatggagggatagaggaagggatggttggacgggggagggagggatgagta

SEQ ID NO: 22661 - DNA, 120 bp, Homo sapiens
caacgccttccggggaagtcctgctgtgtatcctgtctcccttggaaatcagcactgatgggggccagcgaggggggctctgcacagggaggcctgacaggccccatgagcctgggctct

SEQ ID NO: 22662 - DNA, 120 bp, Homo sapiens
ggccgtaagagctacgtctataaaacaagagaagccatacgtgctgaagttcctcttcagaacagcaccaagcttttgtgtaaattagaggctcctcactgaaggtccatgccgtagatg

SEQ ID NO: 22663 - DNA, 120 bp, Homo sapiens
aagcgcagaagtcttcttcccttcaaatatacattcaccactaagcacccttttgatcctcacagcaatcctgtgaagttggaattctgatctcccatttaatagatcaggaaactgagg

SEQ ID NO: 22664 - DNA, 120 bp, Homo sapiens
ccccgaaagtgcagcaatgacccaagttcagagagctgacaagcagtggagctaagctttgaacctgggtccactcaagtcatgctcaaaatcttttggtgataacggcctctccaggcc

SEQ ID NO: 22665 - DNA, 120 bp, Homo sapiens
ggccggtcttcatagaggtggggtgctgtggagcgctggcttgtaaagcggatgggccagctaagagtcaccaaagcccacctgcaagtgagtcacaagagaaactttgcctctctccag

SEQ ID NO: 22666 - DNA, 120 bp, Homo sapiens
taacgagggctgtaagcatcaatgagatggagccagctgcagggtgggggagggcaggcactggccggccaccttcagttagcttcgcagatcaggggactggagcactgccctcctgct

SEQ ID NO: 22667 - DNA, 120 bp, Homo sapiens
ttccgctacttaaaccaaaagtcacctcttaggacagaaacgctaagttgtgtataactcttgggaatgcagactcctccaccctcttctgcaggtcaacattggtcttcaccactacac

SEQ ID NO: 22668 - DNA, 120 bp, Homo sapiens
aaacgctgggtgccagatcgaaggaacaaaggacgccatttgatgcccagctccgggacccccgccaaacacctggcctctcaatcctatctcccacagaccctgaagttgggcacgggc

SEQ ID NO: 22669 - DNA, 120 bp, Homo sapiens
cctcgcctgtggacatttccttgtggaggaagcagcatgtctacttggggctcccagccaacttgggaggattttgcagatgaaaaaacagaggctcagagaaatgaagtaaccacccta

SEQ ID NO: 22670 - DNA, 120 bp, Homo sapiens
tctcggggtccataaatagaagcagcagtaaatgtcagaggctgccatgttcctctaacaaagggatgaccagatgtctccacgttgtgtggaatgtgagtgtcctggaacatcaaagca

SEQ ID NO: 22671 - DNA, 120 bp, Homo sapiens
gggcgagggacttactaatgattacacagccaacaggagatttcccagatcccagcatggggtggtactggcaggagaaatctatcaactgggttgatttggggtttagatgcccagccc

SEQ ID NO: 22672 - DNA, 120 bp, Homo sapiens
ccccggggccttgagccacgcctacctgccagtgaggagctggctccgcgaaggcgtgcagatgggctggatgtaataattctccaacttgacccccttggccgccagcctgtccagcgt

SEQ ID NO: 22673 - DNA, 120 bp, Homo sapiens
tctcgatatctgaaccatggtagcccacgtcgtggtagccttggtcgtccgtgaggatgaagatgatgtggggaggctggggcggagcggccgagggctgctcgccagcctccccgggcc

SEQ ID NO: 22674 - DNA, 120 bp, Homo sapiens
gcccgtcggccacgaagctcggcttggcccagtcccaggacaggtagccgaagctgagcaggctgaccagggagaagccagtgagggtgtgcatcgccaagccggcccgcgcgtcccggc

SEQ ID NO: 22675 - DNA, 120 bp, Homo sapiens
cggcgcgccgggctcctggggcctcaccacctcgcgcgcccagggcgcaccaccggcccgccggctcggatgctgcgagggagttcagcgccccccggggacggtccagtgtctggtccg

SEQ ID NO: 22676 - DNA, 120 bp, Homo sapiens
tgccggacggctgggccggatctgctcggccgcagcggggcgctctggggaggtcaggcccgcgccgagctgcctcccgctgcctaagcgcaggccctgcgccgcctttgctccctcttc

SEQ ID NO: 22677 - DNA, 120 bp, Homo sapiens
gcccggccagcctgagacgcggcgtggcagcttccaaaaagtgctctctaccatcctctgactcccctcttccttcttgccctggatttctcccgcctcctaatttctctctcctctgct

SEQ ID NO: 22678 - DNA, 120 bp, Homo sapiens
tcccggcctctcgccccacccggagtccttaaaacagcccagctccctgcagggaggtgggcaggaccccagaggggaaggggagggaggcacaagttgggcgggtcgaggggacacggc

SEQ ID NO: 22679 - DNA, 120 bp, Homo sapiens
cggcgggagagaattcgaaaaagttgtaacatctgccgggccgggccgagccccaggtggaggggcgggacgcagagcagcggctccacctcccgggcgggaagccccggccctctcggc

SEQ ID NO: 22680 - DNA, 120 bp, Homo sapiens
cagcgcccgcccctgaccgggatggggaaaggagggagtggggctgcttggaattcgatggaacagctccagaatggctgggtcagacattcctcgatcatggagtcttagcctctctga

SEQ ID NO: 22681 - DNA, 120 bp, Homo sapiens
aaccgggtcattctacagatggagaaactgaggcccggagatgagcctcaacgcgtctaagtcacagaacaagtcagtggctatgtctctaaggctcaccgtggctgttggagtggcggc

SEQ ID NO: 22682 - DNA, 120 bp, Homo sapiens
cttcggtgagccggtagagaaagcgatggagaatggcaagcactttggcaagcccccgcggctgcaagtcaggaagcttggttgtagccttgccagctcccctctcctcaacccctccct

SEQ ID NO: 22683 - DNA, 120 bp, Homo sapiens
cctcgttctgcagttcccaactagaatcttagaatgccagcgctggaatccagagggcaggggctgttttatccatctcgtatccacagggtgcagcacacagtataagctcaatcagta

SEQ ID NO: 22684 - DNA, 120 bp, Homo sapiens
acccgatgagcatcataaatgagtagagcaagagatagttgtcttgccctaaggagacacaggggctgcagcaagttaaaaaccacagcctggcttccagctgactacagtcaggcaaga

SEQ ID NO: 22685 - DNA, 120 bp, Homo sapiens
atacggaccagtgtttccagatcttctgatttttcaagaggaataccctctttatctattaggagaactattccaattgtgaaatgttagtgactaattgaaagcaaaatttaagcactt

SEQ ID NO: 22686 - DNA, 120 bp, Homo sapiens
catcggtgccggtttgcaagctctgctctgcatcattgttttgcaaaattttactaggctacatttttaaatggaaaaactgggctaaacaaaaccagttaggcttctttacttctagga

SEQ ID NO: 22687 - DNA, 120 bp, Homo sapiens
ctgcgtgtggggaaagaaaccagacctccaaaatagcagcccgtgtgaatctgcattttgaaatgagggctgcgtggggccagccgctcccatttgctcaaagccccatatttagggtga

SEQ ID NO: 22688 - DNA, 120 bp, Homo sapiens
ggtcgaagtggaacaagtcaccagaggtcaggtggactagggttttgcattctttctattgccccagggcaaaaggaactgggcagggctgcctcccttctactccaagcacaaagagaa

SEQ ID NO: 22689 - DNA, 120 bp, Homo sapiens
aggcggcagacctctgtggggctgtcactgagacaagtagtatttcagaattcaagacagtgggctctgctatcagactatttgagttcaaatcctgccactcatttggggtctggcctt

SEQ ID NO: 22690 - DNA, 120 bp, Homo sapiens
ttacgatgattgttctctgtgcttttgagaggaaggactaagtcctgtgggtgaaagttacaggaaaacagatttcggaccaatttaagggattgcttttgtaagaaatccggccacctg

SEQ ID NO: 22691 - DNA, 120 bp, Homo sapiens
aatcgtggtcatatagctttcaagattggctcacttatcttccctttgtgttctctacaagacaaggtgcttacctgccgtcttccctgggacaatgtccatcagccctaccccaaccta

SEQ ID NO: 22692 - DNA, 120 bp, Homo sapiens
aaacgacatccacattacaacactacagaaagcctaatatctgcatacaaaatgcatttcagatgtggcagggtgtagttttgttacttcctgtcacagatttccattgatgaaatcaga

SEQ ID NO: 22693 - DNA, 120 bp, Homo sapiens
gagcggagatataaaagtgaaaaactgggttagttggttttgtggctttgtctgtcattgctattcgtgtgtatgtgtgtgtgtgtgtgtgtgcatgttagtggctaggtatatgtgtat

SEQ ID NO: 22694 - DNA, 120 bp, Homo sapiens
tgtcgtcctctctctaggggtcaatttgtctaggcaggatcaaatcaaagaccaaaagaaaacatagaaggcctctgaacactcaaaatatcacagagttcaatcacttaactcagagga

SEQ ID NO: 22695 - DNA, 120 bp, Homo sapiens
gtccgagaatattagaagcagctcagatggaatatataagaaagtgagacacttgcctattttatagtaaaatatgcttacatgtttcacagtgaaaaattaaggagaaacaaaagaata

SEQ ID NO: 22696 - DNA, 120 bp, Homo sapiens
tatcggtgcaggagccaagaactatattcacctgaacagacccagaaacatcgccaaatcaccgttccgcacagaagtgagtttagatctctttttaagagttgaggatctctttttaag

SEQ ID NO: 22697 - DNA, 120 bp, Homo sapiens
gaacggttcatagtgcaaggtcagcttcagttgcagaacatcctctctgcagacacaggctcagtgaggcagcaacatcttcagcgggttccatggtggtgccggaggtcattctcagct

SEQ ID NO: 22698 - DNA, 120 bp, Homo sapiens
acacgtgggactcagtgtggaagcagagaatcccactctggtgccctctctgacagccaggccatatccctctaatgagcaggtctttctatttggaagagaaaactctacatgttccct

SEQ ID NO: 22699 - DNA, 120 bp, Homo sapiens
taccgtaactcccacactctctgcttcagcatcattcattataattaattactgattaatggaaaggccacaggtgtttaaggaagccatacggctgcattgtggagaatggattgcagg

SEQ ID NO: 22700 - DNA, 120 bp, Homo sapiens
acccgtggtatgggtccacgcaggaggtccacgcaggaagtccacgcagagacacgtctgcccgatgggttgctctccacagaaggcaggctgaaggggtatctgagaaggtatctaaca

SEQ ID NO: 22701 - DNA, 120 bp, Homo sapiens
cctcgcttccagacctctgggtggtctcactgagtgcccttgtcttagtgatcaggatccctatatcaggtctttgagccaggataggcaagagcccaggtacccatggcctccttgtct

SEQ ID NO: 22702 - DNA, 120 bp, Homo sapiens
tggcgctcaatgaaacattcttccgagaagattattgaaagcagagctctgggtacacaatgggcgctctgtgctcacagccgctgcccaatctgtttgcccagcctgactgtggcctca

SEQ ID NO: 22703 - DNA, 120 bp, Homo sapiens
acccgaccccggtcccaccccaaggcctgctcaaagggaggtcgtatgaaaggacttgttctccatgttctcagaagttcccgccctggcctcttccaaccttgagaggaattagcctaa

SEQ ID NO: 22704 - DNA, 120 bp, Homo sapiens
ccacgagggccttccaaggttcagggaaggaaaaagcgtgttctggttaaatgtgagactcctagaactagatcgcctgtgttctagcccagctctgccatttgctagctgcatgactta

SEQ ID NO: 22705 - DNA, 120 bp, Homo sapiens
attcgcagctttgcatcacctggttctcacccgctttgattaccttaatcacagatgacatcccatcacaggacatcctctgcatctgctccatgcacaggcagggaggtcaaggcccac

SEQ ID NO: 22706 - DNA, 120 bp, Homo sapiens
aatcgctggcatggagagagccctcactgcatgtcaggccatgaactggggcctggtccgcatcctaccacaagaccctctcttctcctccctgggggctgtgcctgtgtgacccctgag

SEQ ID NO: 22707 - DNA, 120 bp, Homo sapiens
caccgtctgcctgcctcactgctgtgagtcagcggcattctttgtggctgagagcagcgcagctcaacctcagggcccttcccctgtaccttggtgagcctggcacatcctccagctagg

SEQ ID NO: 22708 - DNA, 120 bp, Homo sapiens
cagcggatgagtggccttgggtcatggcctgagagctgacctgtgggggccactgggattcggatgactcagagctgcctccatgctgttcggaagctggacactgactctgtgaagtag

SEQ ID NO: 22709 - DNA, 120 bp, Homo sapiens
ctccgggtggctgttggggtgagggttaagagcatgggttttgccacaaggcaaacctagtttggggttggagtcctaagtctgcttcttacagtgtgaccttggcaagtcacttaacct

SEQ ID NO: 22710 - DNA, 120 bp, Homo sapiens
agacggggcctacagtcacccaggtgaaagctgaaaagcaggaagactctgagagcagtgaggaggaatcagacagtgaggaagcagctgcatctccagcacaggtgaggcctagaagga

SEQ ID NO: 22711 - DNA, 120 bp, Homo sapiens
aggcgctgttcctcagggaagtcctgtctctgtggagcatggacatgctcctgcagtgtggagcgatggggttgagatagagggtgtgagcctgggctgcgcagcatgacaggtgagagc

SEQ ID NO: 22712 - DNA, 120 bp, Homo sapiens
gtgcgaggccagggaatgagagagtgcctggcttgggtgccttgccacaggcggcacattgtggtgggatggctggcagttgtttagagccagaccgcctgggttcaagtttcagctcca

SEQ ID NO: 22713 - DNA, 120 bp, Homo sapiens
tgacgatgggccaggctaatgtggaacagatcaggagtgaggtctccaagcctggaagagctgagagaagatggctcactccctgcactcacccacccactgtttattatttttaattgt

SEQ ID NO: 22714 - DNA, 120 bp, Homo sapiens
tgtcgctctgtttttttctgtaaccactcagaaattagtcatttcttttttctctgtaccagagcacacatttctactgatttttttttgtcctcctctcgttgacttgtgggacctcag

SEQ ID NO: 22715 - DNA, 120 bp, Homo sapiens
agccgcctctactctttcccaagctgcaggcacattccagacccaatgccttacagagtttcattatgcagctcacttaaatatttgtcttcccttctgagcctcccacctgtaccatga

SEQ ID NO: 22716 - DNA, 120 bp, Homo sapiens
agccgtttaatttccaaatatctgggattacccaggtttctttttgttgatttctaatttagtcacattgtggttggagaacatattttgtatgatttaaatccttttttgtgtattgag

SEQ ID NO: 22717 - DNA, 120 bp, Homo sapiens
agccgagcctgtttatctcaaaaatgcagaggccagactacatataacatttaagggtcacccttgtattcagtaatccagagagcacatgttgaaagtctgccatgagccaggtataca

SEQ ID NO: 22718 - DNA, 120 bp, Homo sapiens
gcccggccagggtcctgggtgggcaggcaggaccacccagctagctccctgcactcacctggagcaggtgcatcacatggtcctctgtcatgttgccatacttggtggcattctgcatgg

SEQ ID NO: 22719 - DNA, 120 bp, Homo sapiens
agccggttgctgggatctaggtaagagactggaatcgcaggcacttggtcaatggttccatctctgccacctccaaacatgagagctcgagcaagtcactttagcttcctgcctcaatgt

SEQ ID NO: 22720 - DNA, 120 bp, Homo sapiens
gcccgattcttcctgaggcaggcactgtccctcccgcagcagtcaggacccctccccaggtgggctctcttccctgcccctccccttggcactgtcctccatccaggcgggataaccttg

SEQ ID NO: 22721 - DNA, 120 bp, Homo sapiens
cagcgcctgcatcagcagcggggtggccatgcgcatcttgctcacaggcttgggagctgtggggacaggaacgagggtaagtgtggccccggtgcccagggaggagggtatcagacccag

SEQ ID NO: 22722 - DNA, 120 bp, Homo sapiens
aaccggagggagaggacagtgggcccagctgggtgcagggatgcgggtctctgagttgagggatggtgggaggtggggggtatcaggatgtaggggtgcacgcacgcttgggaagcttca

SEQ ID NO: 22723 - DNA, 120 bp, Homo sapiens
atgcgcaggttctccagctgcaggttctgggaggtgactgtcagtttgtccagccggccctgctgctggtacaggaagtaggcggtggtggcctggccagcgaggagcagagtcaccagg

SEQ ID NO: 22724 - DNA, 120 bp, Homo sapiens
ctccgcggctgcacttgctgtgggaggtggggaggataggtcagaggaggatccacagtggtggctgccccaagggctggctaggaatggggaaatgtatacccccatctccattagacc

SEQ ID NO: 22725 - DNA, 120 bp, Homo sapiens
catcgatgtgcctgaagtcttccctggcagagaccctgcagctgccacgggcctgagttgaacagagaagagcaaagaggcatgctctttgtcctctctggaccttagggtcctgcctgt

SEQ ID NO: 22726 - DNA, 120 bp, Homo sapiens
gtgcgatgaggggttgaggtgggggggtcttcccaggctccctttgccgtgcggatctcctgatgatcagggctgccctcaaggggaacaggtttggtttttgttttgttttgttttgtt

SEQ ID NO: 22727 - DNA, 120 bp, Homo sapiens
aagcgtgagtcaccgcgcccagccttttgttttgttttttttttctgctggcaggatcaaccaggtatgttattttttttaattgacaaaaccaaaaaaaattgtatgtgcttaccaagt

SEQ ID NO: 22728 - DNA, 120 bp, Homo sapiens
ccacgaataaggggctggaaagggggctgtttgtgtggagggagcaggcctgggctctagtcctataccttccatatgtgccccaggcaagtatacatcatcccttctctcacttgttca

SEQ ID NO: 22729 - DNA, 120 bp, Homo sapiens
atccgtatggagtttacattccaggggcaggagacaggtcagtaaattatacttttgttagagagtggtaagtgctatggaggaaaggaaagttgtttctggagatgcagggttgggggc

SEQ ID NO: 22730 - DNA, 120 bp, Homo sapiens
aaccgggcagaaatcacagccagagcagaggtcccatggtgggaatgtgtccggcctggttgacgaaccacaaggaggccagcattgctggggtggagcgactgagaggaaaagggagag

SEQ ID NO: 22731 - DNA, 120 bp, Homo sapiens
agacgggaggtcacgaggtgtgcagccagatcctgcagccacccactggactttggctttatgccgagtgaagccgggagccgtgggaaggctctgagcagaggagtcgcctcctgactc

SEQ ID NO: 22732 - DNA, 120 bp, Homo sapiens
ctgcgtgggggatctgtacaagatgggcagatcatccccgtgcctcatgggctgctgtgaaggtcacggggggacactggacaaggaaatgcttagaaacaaaaggccctgactgtggtt

SEQ ID NO: 22733 - DNA, 120 bp, Homo sapiens
aaccgtcttattgaagggtcagtggagctcaggagagggttataatttgcccagggtcatatgttctacaaccaattcaagatcggggacttcccactcttctcccagggcaaataccat

SEQ ID NO: 22734 - DNA, 120 bp, Homo sapiens
gtgcggctgacggggactgagtcctcccttgaaaatccattcactccacaaatatttgttaagtgccggttatgggccaggcactgatctggactagaagctgggacctagagatattgg

SEQ ID NO: 22735 - DNA, 120 bp, Homo sapiens
tctcggggctggtctctggtggggttgggctctggtggggttgggctctgctggcgctggtctctggtgcggttggtctgtctctagtgcggttggtctgtctttggtggggtttggtct

SEQ ID NO: 22736 - DNA, 120 bp, Homo sapiens
ccggggtggttggggatgaaccaacaggatcactggatcaccgtggagcttctttgtaaattgatgtgcaggtgtgggccgcttgcacattccagacccacccctatctctcccatctca

SEQ ID NO: 22737 - DNA, 120 bp, Homo sapiens
gcccgcccggaaggaaaagcacccttcagttcttggcagtctctggattcccagccctgagttgctgctctcacactgggaagtcggcctgggagtgaacattaagttcaaggtccctgg

SEQ ID NO: 22738 - DNA, 120 bp, Homo sapiens
tctcgggctgggcagagcccccacttcatctcccacatacgctccccaaggctgatttgcaggagcctctaagaccgctgggaagccctaagcagcaccaacctgagaaagggagtctca

SEQ ID NO: 22739 - DNA, 120 bp, Homo sapiens
gaccgctttccaatgggggtgggcagtgttgtagagtggaatcaaaagtcctgggttcaaatcaccattctgctactactagctgcatgatctagggtaaattacctaaatttccctgga

SEQ ID NO: 22740 - DNA, 120 bp, Homo sapiens
ttacggtgattttctaaagatgtccccaaatatatattttgtcaaatgagtgaattatgctttggaggaaggtggatgggattgtgttggggtggttagggctccagcctccaagctggg

SEQ ID NO: 22741 - DNA, 120 bp, Homo sapiens
tttcgtgcctcggtgtccccaagctgctgcccaggagcccaagggtgggcagtctttgtctgacacaggaaccccttcacttcacatttaggggattgaggcctagtggagcagggactc

SEQ ID NO: 22742 - DNA, 120 bp, Homo sapiens
ccacggccacacagggggtcagaattactgttgaggccagaatccagaattgtttcagttccaaccaggaaggggtttgtttcccaaaacctgtccctaccccaccccttctttggcagg

SEQ ID NO: 22743 - DNA, 120 bp, Homo sapiens
aggcggagtagctgtcgccctcagggtggcccagagcagtgctgggggtagagatgaaggtgccttgtgaagacactgccaagaaggggtggggcaacttccaagaggaagagcaccaag

SEQ ID NO: 22744 - DNA, 120 bp, Homo sapiens
agacggaaaccaaatgtattttctgggccctgagaggatatttggaacaatggaggtgggatgagggaagttaaaaagggcttcttgatatccttagaaaaaaaaaatacaggctttaag

SEQ ID NO: 22745 - DNA, 120 bp, Homo sapiens
ggacgaggaaaaaggcagattctgaagcctcattgtcactgtgatggtcctagcctttctgcctggcatgcctcctgacagggagttccttctggggtaggcaaggttgggggcggaagg

SEQ ID NO: 22746 - DNA, 120 bp, Homo sapiens
agacgaatattgtccgatttcctttatactaaatatctagaataggcaaattcacagagataagaagtaggctagaggttaccatggctgaggggagagggaggatgggagttattgctt

SEQ ID NO: 22747 - DNA, 120 bp, Homo sapiens
agacgtaggagggaaatgctgggtcataaggtaattctatgtttaactttttcaggcaccagcaaactttttgccagagcagttgaatcattttgcatttccaccagcaatatacaaggg

SEQ ID NO: 22748 - DNA, 120 bp, Homo sapiens
cctcgcaacacatcgtggtcacgggtagggctcgccagaccgaggaagcagtgtcccccgcccacagagaaacacacactacctccttccatctgagagtttaaccaggacctctctggc

SEQ ID NO: 22749 - DNA, 120 bp, Homo sapiens
cagcgcagcaaatgttcacgaatgccaattcagaacaagcacggtgctcagccctgctgcagggggaaagaaaagactgaggctgagtctcactcctccaggggctcatcctgtcaccag

SEQ ID NO: 22750 - DNA, 120 bp, Homo sapiens
tgccgtgaagggcataggctggaggtagcaggttatactcgtaggacacacttaaatacccgcactgccacggacaggctggggggctttcagcaaacagttcggcctccctaccagctt

SEQ ID NO: 22751 - DNA, 120 bp, Homo sapiens
atgcgtgtatggtgcatgtgaaacgcttagtacagtgcccggcacagaggaagtgctccattaatggcggttttcttattattttatgagataattagtatccagataagtatccagata

SEQ ID NO: 22752 - DNA, 120 bp, Homo sapiens
ctacgaaaccccctttctaaagaggcctctgaactgttaccaacagagagttccatgtgcagagacaacacaactcatggactttccacatcagcaagctgatggtggcggtggaaggca

SEQ ID NO: 22753 - DNA, 120 bp, Homo sapiens
ggccgctgatggtggtggggagggaggggtccccagaggcctgaaggtgcaggctgacatggtggggggtctggcttgggaaggagggggaggttgaggtggggccaggttcacaggggc

SEQ ID NO: 22754 - DNA, 120 bp, Homo sapiens
ggccgggggacctgctgtcggtttattgcaagggtgacgacaaggacacggaagcgcttgttcaggaagctgattctggggccggatgcaggttacaccgagggccacccatgggcaagg

SEQ ID NO: 22755 - DNA, 120 bp, Homo sapiens
taccgggcgaagcccctctcacatcctttaatatcacgtgatgctcacagttgagtgaaacgacgatctctgcttcacaggtaaagaaccaggtccttagagaagggaccccacacactt

SEQ ID NO: 22756 - DNA, 120 bp, Homo sapiens
acccgggaagcaagcttctgcatcagtgccccctttttcatggatggtttgggggtgctcttcctggcaggggccaggaaagtgactgttattggctgtagagacacccagtggtatgcg

SEQ ID NO: 22757 - DNA, 120 bp, Homo sapiens
acccgcactggctctggagtcagggaatcctggttggaggcccagcccccttaccaccagtgtggcctagggagacatctaaacctctctgagcctcagttgccctaaagtgaggatgac

SEQ ID NO: 22758 - DNA, 120 bp, Homo sapiens
tatcggagaagagtccctgagaagacatctgcgaagacagaggctctttctgtactgtgagcctgggggtcggcggtgggggcttgtcttacagtaactactgcagtgccagtgctgggc

SEQ ID NO: 22759 - DNA, 120 bp, Homo sapiens
aaccgaaatcatagtatccgtctcagtctcttgtttaaactgggggacagggtgagggggcactgtgaatgtggcgggggggggcagtgtggagcagtctcagagccagggccctgtgtg

SEQ ID NO: 22760 - DNA, 120 bp, Homo sapiens
ctgcgtagccttgggcaagtccctccccatctgagcccccattttctggtgtggccaagggagactggactttgtgcagagtggcctctgccctgccacacccctgcctgacctcagcca

SEQ ID NO: 22761 - DNA, 120 bp, Homo sapiens
ccccgtatttatagccatgacttcagtctccccagttcctctgaagctggttccctggcccatgtatttataaacccagcagggcagaaatagatgtgacgtactggggacttggctggt

SEQ ID NO: 22762 - DNA, 120 bp, Homo sapiens
catcggtgcattgtccattctccaggagcatgtgccctcaaggcaagagttgtctgctaacccggttacctgaagacggggcaggctggcaggaaggaaacacatacgtcccacaaggtg

SEQ ID NO: 22763 - DNA, 120 bp, Homo sapiens
ccacgagtcccgtgtacctgcgggtgctcagtgtgcacatatttatgtgtacgtcctgccccctctgtgggtgtgcatgcgtgcctgggcacgctctgctgtgtgtagcacaggcttgaa

SEQ ID NO: 22764 - DNA, 120 bp, Homo sapiens
atacgtgcagaggaggatgtgctgctgccggctggagcctctccagcattaagaggctactgagaatgcgtgtatgttgcaggtgtatgtgtgtgtgtatggaaatggttgcaatgcaga

SEQ ID NO: 22765 - DNA, 120 bp, Homo sapiens
attcgtgtcctacctccacattatgtctatcattcttaaacctgccaggtatgagcctgcctcaggaccttagcacttgctgttccctctgcctgcactgttgccttagacaagcatatg

SEQ ID NO: 22766 - DNA, 120 bp, Homo sapiens
ttccgttctttgctcagatgtgccttctcagtgaggatggctttggttatcatatctacctttgcaaatcactcctcaccccttacagtccatatatctccagtccctgctttatttttt

SEQ ID NO: 22767 - DNA, 120 bp, Homo sapiens
acccgaatgcaagcagagattttaatctgtttcccttcatgcctgtgaacggtgcctggcccttagttggtgtgtaataaatacttgttgaatgaatgaatccatgcaccacctatacat

SEQ ID NO: 22768 - DNA, 120 bp, Homo sapiens
gaacgcggggtggggggtgttgggaagggggatggggttggactgtgtctgataatgagcagaagagtgagaccagacccagagaggggtggtgaagacagggagagagacagatacagc

SEQ ID NO: 22769 - DNA, 120 bp, Homo sapiens
ggtcgagttacgcagaggtgggtgtgtgcaaaagcctacagttaaccaccccccaatgtgtgcacagtgctttatactttagaaatcattgctgcatttcatttactcagcagctactct

SEQ ID NO: 22770 - DNA, 120 bp, Homo sapiens
gagcgggcaggctgaatggattcgggagtgaggggccggctggaaacccacaatccactcactggccaaataaccttgacaaatcacaaaacctttctttttgaggctcagtttcctcat

SEQ ID NO: 22771 - DNA, 120 bp, Homo sapiens
aaccgaatgcctcgcacattagaagtgctcagtaagcagcaacttgagtaatgaacatgattgcacccggcccctgaggagtttgcacacggtgaccacctgccacgactgagggattcc

SEQ ID NO: 22772 - DNA, 120 bp, Homo sapiens
cagcgccttctttggcagctgtgagcgcgcctgagaccccgtctggggaacccgcaggggttgggggcaggtttgtctgtcccagagccccaggctggtgatgacgcctcctggggataa

SEQ ID NO: 22773 - DNA, 120 bp, Homo sapiens
gtgcggtgactttgtcattatcgttcctcctgcgttttttctttgagttatttatttttctgtgaggaaggaatgtggggaatttaccacagggcgctgtccttcactttcagctgggct

SEQ ID NO: 22774 - DNA, 120 bp, Homo sapiens
gcacggcgtcctttcctataagaaggaagctgctgagacagatggcaggagaggtggaggcggagggtcccagctggctctgtggcccaaggagttgggggcagttatgtaacccacccg

SEQ ID NO: 22775 - DNA, 120 bp, Homo sapiens
ctccgggcatgagcctggtaatgtacatagctcctgtggaactgtgcctagccctccccattcacccctggcctctgggcaagcccagtgggtgtgttcctctatcaaagtttcctttct

SEQ ID NO: 22776 - DNA, 120 bp, Homo sapiens
atgcggccaccagctggctttgtgaccttgggcgagtcgcctcccctctctgagctgaagccgcccctcccctactacaacaggggtcggactccatgtctgagcggggaggagggtcat

SEQ ID NO: 22777 - DNA, 120 bp, Homo sapiens
atgcggtagaggggcatcctctggcctttgtgagctgtagggatgcagagtctgatgccagcgtcttgctgggggagtggcctagaaggggatcctaacagggacttctggagcagacag

SEQ ID NO: 22778 - DNA, 120 bp, Homo sapiens
agccgagggtctgcctcctcagctgccccaggggggcctccctcctgaggctcaagctcctggcgtctttcttcctgttgctggattctcacctccatgggcctgtctcttctgcctctg

SEQ ID NO: 22779 - DNA, 120 bp, Homo sapiens
cagcgcctccgcacctggtaggtgctcagttaacgtgggagaaatgaagagtgaaggtgccgcacatcttggatattctccaggacatggtgggcgggtgctatgagttttcctgttctg

SEQ ID NO: 22780 - DNA, 120 bp, Homo sapiens
ctgcggctcaggaatatgaacaacccggccaaagccacaaaacaaggaagcaccggcagggccgggattcaggtctgggtttgtctgactccagagcccagtgccttgttctccatggct

SEQ ID NO: 22781 - DNA, 120 bp, Homo sapiens
gttcgaggccagctcagcttttcctttcaccaatggcctagaagaggccaacaaggtagctttgaggctgccccaaagtggagagtggcagtgaaacattggacgccagagtgagggcca

SEQ ID NO: 22782 - DNA, 120 bp, Homo sapiens
cagcgcagtggcctatatgggtttagagcgtgaggcctccacgtggacttgaatgcagaccccaggcctgcccgtgttgaccttgggcaagtgacttaacctctctgagcctccattgcc

SEQ ID NO: 22783 - DNA, 120 bp, Homo sapiens
acacgagaagccataggtaaagtttctggcaagtaagacacttgcaacaaacaatagctattattgttgttgttgttattattattatttgagacggagtctcacactgtcacccgggct

SEQ ID NO: 22784 - DNA, 120 bp, Homo sapiens
ggacgccacggtcctgctcttctggcatttgctcagaccacacgtggagactgggtctgtctaagacagacgggtgggcgccagagcctagctaggcctggaaaatcagcacatatgagg

SEQ ID NO: 22785 - DNA, 120 bp, Homo sapiens
atgcgctgtgtgagtcacgagccattaacagacattctggagttccctggcaggcaggactgccctatctcctcctgggccctcagaccctgcctgcccagtcatttgaaacctgcagca

SEQ ID NO: 22786 - DNA, 120 bp, Homo sapiens
gtccgttcatgtgcagctccagacccagattctccattagaacttcactgcctgccccagccctcagagcttcatctttccctaaactctaatggcctccatatcacaggtacacatcag

SEQ ID NO: 22787 - DNA, 120 bp, Homo sapiens
atgcgtagtagtagactgggaaccggtgggtgtgagacccaggctctatgtggcctacactcttctgaactcttctgagtcttgattcctggtctgtgaagtgtgcagtgtatccgaatt

SEQ ID NO: 22788 - DNA, 120 bp, Homo sapiens
ttccgtgcttttagggtgagtttgaataacttttaggcagtccaccagatggcgatataacttttttttcaaatggagtggttagcctgccgaagttgtgagagtcagtcctacaacatt

SEQ ID NO: 22789 - DNA, 120 bp, Homo sapiens
tagcgataacacagggctcatgcagtccaacatcccgtataatacaggttgccagttgttgccttttcagtatttctcctgtgtgatcctggactgcttgtgtcagattcacacaggagc

SEQ ID NO: 22790 - DNA, 120 bp, Homo sapiens
agacgtactgaccgagaatctctggaactggttcttcagtatctgctttgcaaaaacaatccgtaagtgctcaacaaacaggttaaagtctgagagccacgtgccagtgaaaaggaggtt

SEQ ID NO: 22791 - DNA, 120 bp, Homo sapiens
tcacgtcttgctgaagccaccccttattagctgttttgttagaattcctccctcggtgagagtgggattaaggattcagggatgctagttctgccctcttgaggccacactgaagagatc

SEQ ID NO: 22792 - DNA, 120 bp, Homo sapiens
ggtcgctaatcatgacttacctcacctccgcccctatcttctctgggggtggggaagaagtcatactttgcattacaggttggctgtcatcctccttccctttccaggaacactataacc

SEQ ID NO: 22793 - DNA, 120 bp, Homo sapiens
gaacgtggactccatgaataactcatcatagctgtgtcttctctgcagcactctggggaaggataaatggactcagagagaataggatggggatggtctagaaaagttttagggtgaggt

SEQ ID NO: 22794 - DNA, 120 bp, Homo sapiens
ggacgaaaggtgactcagccccagagaggtgttttcctcctaccaattgaaagggagatgctagggaagagaccaggtcctcctcttcttgctgcgtcacctccccagtccaacttcagg

SEQ ID NO: 22795 - DNA, 120 bp, Homo sapiens
ccacgctccttgtctctacaaaaggactgcagaagccggaaagagtgacaactgctgacgtgcacgggatcctagtaactgctggtttctaggtgactaaacctggcagagagaatcatg

SEQ ID NO: 22796 - DNA, 120 bp, Homo sapiens
agacgggagaggagaaagacacaagaccagcagccccagccagccagagtcctggctgagtcccatcatccaactctcaagccattggaaccctcttctcttgcccggctgtgggaggat

SEQ ID NO: 22797 - DNA, 120 bp, Homo sapiens
atgcggtgctctgggattccacgtgcccagagaagggaagggggctcatagaggactgagttgcagtgatcagtggtgagcacagccgtggctctccacccatgggccaccttctgaccc

SEQ ID NO: 22798 - DNA, 120 bp, Homo sapiens
tttcgttccaagagactccaggcctgttttgctctgccagcagattcccacaaccattttgggcagcagcatgcttatctccctggacatatgcccagacagtgtaagtgacttgctcag

SEQ ID NO: 22799 - DNA, 120 bp, Homo sapiens
tggcggtctagggtgtatttgttgtgccccagtttgtctgcattttaaggcggaactggccctggctgggaacgaggaggtccaggagcagtaggaatgttgatcttaggtcttgggcct

SEQ ID NO: 22800 - DNA, 120 bp, Homo sapiens
caccggatgtggaatattagactcatgtaaagcaggaagtttgcaccagagccaagaagagagcttgcagctgccagggaatggcctggcggaggaagcgcagcctcgcccagctcagca

SEQ ID NO: 22801 - DNA, 120 bp, Homo sapiens
ccacgccctgccagcatatatcactcccttcacctggtcaggcccaggtaccttgcctcaacagcaagttctccagaattgaggggaagagagggagtgaatttgcttctctaactccag

SEQ ID NO: 22802 - DNA, 120 bp, Homo sapiens
tcacgaccagcccacctgccaaattgtgtcaatgatgcaatgacatcctttcaagaatagtctcagaattttgttgtctgtgtcacgggcagagtaggctcataggccacatcctactag

SEQ ID NO: 22803 - DNA, 120 bp, Homo sapiens
gtccgaagaaaagaaagggccagtccaagaccacacagggagttaatggcaaagggacatggagcccaggtctcccagcccacagtccactgcactctgtccctccttgtcctggaggct

SEQ ID NO: 22804 - DNA, 120 bp, Homo sapiens
acccggaacattaacacatgcaggtactgttgcttttccctacctcaccacagccctttcccccatgcctggctctcagtcctgcttccctatttggtaacaacagcttcatctttcctg

SEQ ID NO: 22805 - DNA, 120 bp, Homo sapiens
atacggcctcttcctcctttctgttcagtttttccttcacactggcctagttcaggttctcatcctcaattgcctggattattccaacagccacccaaccagtctccatcagcccgtcta

SEQ ID NO: 22806 - DNA, 120 bp, Homo sapiens
cctcggcatcccaaagtgccaggatcataggcacaagccacccaacccggccttctctgcaacacttaacacacttttactttatttgcttctgtaattagttgtctggcacctctttcc

SEQ ID NO: 22807 - DNA, 120 bp, Homo sapiens
cagcgagggcagggttgagctgttcctgtggactctatgccaaagcacaatgcctgagacaggctctgaagacaaatgccgggatgaatggataaatgaagctctgtctcatgttgtagc

SEQ ID NO: 22808 - DNA, 120 bp, Homo sapiens
gaacgtgcctgtgtttttggtcacctagctctttcgcactagacccccgggtctcctgactcctgcccctggcttgtttgctccacagaactctccgctaatgtggaggggaactgactc

SEQ ID NO: 22809 - DNA, 120 bp, Homo sapiens
ttgcggtcaaagtcacgctgcttctgctcccgctcggcctccaggtcagtcacctgcttctgcaaatcagccagcttctgacgcagctcagtgatctgggttcagaggcagagaggagtg

SEQ ID NO: 22810 - DNA, 120 bp, Homo sapiens
gggcggttaagtaactcagccacgatgacccggccgcaataagagccaagatgcaaagtcagccctgcctgctgtgactctgacccccaccatactcacacagccaggacacagagccag

SEQ ID NO: 22811 - DNA, 120 bp, Homo sapiens
gagcgtccataggatggaatgggccagaaagaaaaacaaagttctgatgagaaggaccccttctcccaaagactgacagatacaagatgaatacaccgtgtgggaggcacccacgccctg

SEQ ID NO: 22812 - DNA, 120 bp, Homo sapiens
caccgaactaagaaacagtgtgggggctgcacttagcactggaactggcacatagtaaagtactcaaaaatgttggcagacattgggggtccttcccctctgcttgcctctgtcctcacg

SEQ ID NO: 22813 - DNA, 120 bp, Homo sapiens
tcacgcaggagttgcacctgcagagacagaagtgggctggagagggaccagggctcctaagtctgctgctgaagctgactatagcgaaggcaaaggacaagtggcctgaaggccaacaga

SEQ ID NO: 22814 - DNA, 120 bp, Homo sapiens
gcccggtttgtccactgtgtaggtgctcaaggacgcagagctcctgcctctcaaggaacagcctcagggtgaggtccctgggagagaagagttcagctctgcccagagcagccctcagac

SEQ ID NO: 22815 - DNA, 120 bp, Homo sapiens
ggccgccaaggtctttctctgggggttgggagctgtgctcccccacaaaacaaggggacccagctgccctgtgccttcctgtggcaactctctggaggatgcctggataccctccctaca

SEQ ID NO: 22816 - DNA, 120 bp, Homo sapiens
agacggccagggataggaggggcaggcactgcaggcatgtgggggcatagcagcaagaatctaggagggcaggcacagcaaggcctggcccagagggaaaccaggagctgccagagccaa

SEQ ID NO: 22817 - DNA, 120 bp, Homo sapiens
agtcggcaaaggcgaacagacgtgcccacagccacatgggacagcagtggcacagaagaaatgcacacctcgtcctctggtggccactgtgcactctcttaccacaccatgctactgctc

SEQ ID NO: 22818 - DNA, 120 bp, Homo sapiens
acccgggctgatgtgggcccacaaaagaaagaagtctggaataacactggaaggggctgcctacgaggtggaaagcgccctgatcccaggggtcggggtcacgcagaggggcactggggc

SEQ ID NO: 22819 - DNA, 120 bp, Homo sapiens
ttccgccactccaaacagggacagatgtttgagacaaagcaaaggacaactcatccagaggggacacagcatggaccacaagtggcagagggttgaaggcaagtgtcttagtctgctttc

SEQ ID NO: 22820 - DNA, 120 bp, Homo sapiens
tcccgtccccctaccccgtgatagtgacattaatctatttatgagggcagagctgacaatccattcatgaagcagagggattacgtttccaagatatgaacttttgggggacacattcaa

SEQ ID NO: 22821 - DNA, 120 bp, Homo sapiens
taacgataatagcagcgaccctgtaccaagcgcttaccacactggtggcccgtgctgagtgcttgccacacactatcccattaattcccaccattctaggaggtagcattgacgtcatac

SEQ ID NO: 22822 - DNA, 120 bp, Homo sapiens
acacggcacctacccaggtctgccaagcactgaatcatgtgctcttcaccaggggtgctcaaggagcagcccggaccagcggcactggcaccaccaccatccactggatcggatgctctg

SEQ ID NO: 22823 - DNA, 120 bp, Homo sapiens
tagcgatgatcattatgatcatcaattctatgaggcagcagggattgcttctctcctttttccaggaggaccccaaggcctggagctggggagcagcttgccctagacatcagactgtct

SEQ ID NO: 22824 - DNA, 120 bp, Homo sapiens
cctcgtcacatacgtggcctagccaggcccctcccacagttcctaggagccctgggtctccccactccagcgtctctccccctggcctctccgtctccaggtcagggtgtcaagctggat

SEQ ID NO: 22825 - DNA, 120 bp, Homo sapiens
gcccggcccagcctctcaggaagttagacccacaaaaccggagcatttcctaatcccgggaagccctaacagggccctgagagcaatcctctttcagtcccacccaccttcctccctgtc

SEQ ID NO: 22826 - DNA, 120 bp, Homo sapiens
ccccgctctccctccattcctctgtagcctagaagccaccgtcagacttggcctctgttccttgcctcttctagccagggacttccctaggctgtgaaaagatgcctggggaggggatga

SEQ ID NO: 22827 - DNA, 120 bp, Homo sapiens
ctgcgtcagctgtgtctgcctgcccttggcccactccctgtgccctgggctctctgttacaggttccaccacaaaagagtccagcggccctagaagcagagcaggcaggagagaagcaag

SEQ ID NO: 22828 - DNA, 120 bp, Homo sapiens
cagcgccgattcttggcctcttcctatctagctgtagacttctaaagtgcccaacacacacttgtaccctctccatcaaaaattcactgtacacacagatacacacacaaatacacacag

SEQ ID NO: 22829 - DNA, 120 bp, Homo sapiens
acacgcttcagggatctgacacaacacaggcacacattctcacacacacaaacacccacatccatattcacacttgcatacctcccttttcttgagggaataagacaaaaataggctttg

SEQ ID NO: 22830 - DNA, 120 bp, Homo sapiens
gaacgagatgggggagagaagacagtggagaaggaggctgggtgaggagcaggggctgggagcccaagacctgggtgggaagagcaagctaggctgagagcagcagaccctggctggcag

SEQ ID NO: 22831 - DNA, 120 bp, Homo sapiens
gtgcggtgggtcctttcccctgtcctggcccaccggcccccatctagtcactcacctggggaagggcaggagaatacgagggtgtgtgcaccaggggcggctgtccctatgaaggctcct

SEQ ID NO: 22832 - DNA, 120 bp, Homo sapiens
tctcgccatccctcaccttcctcatctgtaaaagggagtaaattctcttcacccatttataacactgagcacagctgtgtgcacaaaagggcatccattaggataatttcatagagaata

SEQ ID NO: 22833 - DNA, 120 bp, Homo sapiens
gttcgcaatcctgactgcacatttaaatcacctgcaatcctgactgcacatttaaatcacctggggatctttctaaacacgcggaccctccaggccccaccccagattaattaaaccaga

SEQ ID NO: 22834 - DNA, 120 bp, Homo sapiens
ctccgggggtgtggcctgggcatgggtattgataaagctcccccaggtgattttgagatgcaaagttgtgaccactgacctagaagctgcttttttttttttttgagacaaatctgccct

SEQ ID NO: 22835 - DNA, 120 bp, Homo sapiens
tgtcgttgagtcactgtggtctcccaacttgttccttctttttgtatcaggaaggtgacttctcaataccaggatagggacaacaaatttcagaatgtagagagaatccctctttcgggg

SEQ ID NO: 22836 - DNA, 120 bp, Homo sapiens
aaacgcaagctaagccactaagtggagaggaggtatgtgtcattctatcagcatttgaaaaatgggattcagggaggccttttgcaaaattgtgctttccaaggaaactaatacagggtg

SEQ ID NO: 22837 - DNA, 120 bp, Homo sapiens
gggcgaaagccagcggtggcagtggcaagccggagaggaaggagcagtgtctgatgatgtggcctgacctcagaaaggaaacctggttggtcaccagggggaatttccccgggtgaggtc

SEQ ID NO: 22838 - DNA, 120 bp, Homo sapiens
tcacgtctatgcaaatattgcactgcaattaacctggaccctgggatgggagagagaaaagaggagaggacactgggaaagacagaagggcaggtaataggacctgaacattcccagggt

SEQ ID NO: 22839 - DNA, 120 bp, Homo sapiens
gaccgcgaaagtacagagatttcttcctagcaataagacaagtgaatgtcagcatttgcaggcaaaaaacatgcttttagatctctgcttcttcatctgtaaagtggaagtaaggattaa

SEQ ID NO: 22840 - DNA, 120 bp, Homo sapiens
ctgcgtgaagttttttacctttccatttttaatttattatcgcattatgattttttccttactaatacaaaggattcatgacattatttggatagtagacagactacagtttacttaagc

SEQ ID NO: 22841 - DNA, 120 bp, Homo sapiens
ttccggttctccagcacataaataaagctgcatggaacatcttgatgcagacaggtatttctgtaattttgattgtttccttgggatagactcccagaagtggattcaaccaggcataaa

SEQ ID NO: 22842 - DNA, 120 bp, Homo sapiens
taacgattggttcaggcccctgtgatcttcttgtccatgtgagactggatgaggagtctcctggaccagtgatggtaacacctgcaccctgagctggggagcaggtggtatcacagacga

SEQ ID NO: 22843 - DNA, 120 bp, Homo sapiens
gtacgtttatggaaaatcacggatccgtgggtctggaagttaaaagaggactggccctttgagcaaataaatgaagagtaagctggagagcttgtgtgtatagcatttgagggcaagggc

SEQ ID NO: 22844 - DNA, 120 bp, Homo sapiens
ggtcgtgtaaatgtggccaagttacttgactgctctgtgccttggtttttccatctctaaaatggacataataacccatacagggttattataaggattttgacaagaaatggcaggtag

SEQ ID NO: 22845 - DNA, 120 bp, Homo sapiens
aagcggtttatttctcctcccacatcagcatccctctcttcttcctatgtcggccccagaaggttcacaccctctccctcttaggctccttcctcattccgaggcctggagggtctttgc

SEQ ID NO: 22846 - DNA, 120 bp, Homo sapiens
ttccgcattcatgaggtccaaggccaggcaggaggcaaggccatgggcccaaatctgtgccatgagtgtcaacagaagatcccaaagctggagaccccaaataaaaaccccaagagatgt

SEQ ID NO: 22847 - DNA, 120 bp, Homo sapiens
gctcgcaagatactcagcctatgaaatcctcagctaatggagtcctcagagcagcatggagccttgggggtgattttgaggaactgacactgggaaacagcctagggtctgtggtgcgca

SEQ ID NO: 22848 - DNA, 120 bp, Homo sapiens
ccacggaccagctaaccatagacgagttaagagtgacagcatgctactgctagcgggggaagctgcacgtgccatggttaaggaccccagggctgggtctgtgccccatcatgttgcgta

SEQ ID NO: 22849 - DNA, 120 bp, Homo sapiens
acacgcttcctgagggcagggcaaacttggacattattgacagaacaagtgcccaatctgaaaatgtgtcacattcctgctcaggttccaaacatgtcatagcggatttatgggtgtaaa

SEQ ID NO: 22850 - DNA, 120 bp, Homo sapiens
tggcgtagtgacagtgaccttcaaactatggtggcatcttagctataggggtgtccctcaaaaagcatgggctttgttgaagcacaacttactctgctgtgtgacttaagtcaaatagct

SEQ ID NO: 22851 - DNA, 120 bp, Homo sapiens
gggcgacagagcgagactccatctcaatccatctatcagtaaaatacaggatggaagggaacgcccagctctcagtcagctgccagcccacggccttggacgccactgatgtgagcctgt

SEQ ID NO: 22852 - DNA, 120 bp, Homo sapiens
cagcgtcaggtcctcagacaatttcctcctggtagcctggcctgaggcccacccaacccagggagccggccctggccagttgcagccagtaccacctggtgcccagcagagggcagcaca

SEQ ID NO: 22853 - DNA, 120 bp, Homo sapiens
caacgtgtagcctcttgggttcggtgtctcccctgtacttctttgcaggccggagaagtcccggacattatcacagacaccctgcctcatccccagcttctgaggtctttctggactctg

SEQ ID NO: 22854 - DNA, 120 bp, Homo sapiens
aaacgggactttgagcttgtgttccagggcagagggccccagcgcctgtaggtgcagacagcgcacccccaacacccccgagtttccgcctcctcatctggagagcggggctggacagga

SEQ ID NO: 22855 - DNA, 120 bp, Homo sapiens
caccggggccaagtgagctatttccccttgccattctctcccaggaggagaaggcataagatgatgctgaaggcacaggctctggaagaggacagggccatgcttattcctgccttgtta

SEQ ID NO: 22856 - DNA, 120 bp, Homo sapiens
taccgagcggcacactgtggtgctggaaacatccttgttgtactcctctgtgcctggacactgcatgtgggcctgtccatacgccacccagacccctcgggtacctttcaccatttctga

SEQ ID NO: 22857 - DNA, 120 bp, Homo sapiens
aaccgggtgaactgaatggggttagggctgctgtggaggcccaggaatcaatcagaagccttcagctttcacctcccatcccccgttccctgaccccatgccaccagatgcaaataagaa

SEQ ID NO: 22858 - DNA, 120 bp, Homo sapiens
ccccgggctgggctgccttccaggcaggtcccctcgacacaggccactgcagctctctcctgcaatgtgtcaggagagcctggcacaatgtgggggacgggggcgggggggtgcggagct

SEQ ID NO: 22859 - DNA, 120 bp, Homo sapiens
acacgtaggaggctggatgcctgctggggcagaaggcggaatccagcctgaccacttagtggggctcatctacgcaagccttgggagcagtggcaggctgctgtgaggggcgcgctagcc

SEQ ID NO: 22860 - DNA, 120 bp, Homo sapiens
ggtcgagctgcaggagcaggcctggcaagtccctaaggcttccagcaacattccccttccccaggcttggcagtgccagcccacaactcagtcatgggacaccaggtgggctcctttctt

SEQ ID NO: 22861 - DNA, 120 bp, Homo sapiens
aaccggggtatggctggctgtccacaggcggccatccccgtgccacaggctgagttctgtcttccccaaactcacgtgctgaaggcaggaccttgcaatgggactgttcttggagacagg

SEQ ID NO: 22862 - DNA, 120 bp, Homo sapiens
aaccgagactcaaaagtaggcattggatgtgatgacatgactatcactggttaccttagggagagaagttttggcggagttgacaagcacagtcagatggaatgtgctggcggatggcaa

SEQ ID NO: 22863 - DNA, 120 bp, Homo sapiens
ggccgtgagtcagaggtagacaggaaagtgactaatacagtgcagaggtcgacgtttttagctttattgtatttaagagagagacctgagcacatttaaaatgctgatgtgacattgtcc

SEQ ID NO: 22864 - DNA, 120 bp, Homo sapiens
ccacgctcaggttcttagaatgaggaagatgacattggcaggaccataggtgagcatcttctaacccaaggaagatttagaactaagtataggctgggcgcggtggctcacgcctgtaat

SEQ ID NO: 22865 - DNA, 120 bp, Homo sapiens
gatcggatgaccaagttttccataaatggatggccatccacttcccttcaagggcgagggtagtttgttctgatccatctcccttttcacagctcagggagggaggaagacccaggaagg

SEQ ID NO: 22866 - DNA, 120 bp, Homo sapiens
gtccgccgtgactgaagcttggctccacatgccagtctgcaaggccctgagtgccctcagcagtaattccaagcaaagcagggaagcagcgggccaggtgctgaactgaactgctgctca

SEQ ID NO: 22867 - DNA, 120 bp, Homo sapiens
ctccgtcagaggcctcctggcagccacgtgggaggcatgaaggctatggggtggaagtgtcagagccttttctggcctcctgcaggagctgggtttggggaagcagttcctgacccttcc

SEQ ID NO: 22868 - DNA, 120 bp, Homo sapiens
tgccggcccacccccgttattctccagacgctgaggatgggatggaatgagcaccaaacatggagtcaggagacctgggactcaatcctcctcctgctgcagactatgctcagaccctgc

SEQ ID NO: 22869 - DNA, 120 bp, Homo sapiens
aaacgtcatactgattgaaaaatatatatgcacacttacctttacactggttacaaaggcatgaagattatgggtatatattggttttaaaaagtacttttatacttattcttatatttt

SEQ ID NO: 22870 - DNA, 120 bp, Homo sapiens
aggcgtgaggcactgcacccggccaagacgaggaatttaaaccctgcagtttgctgtccttacgagcacatttggccaattatccttccatgttatcagttccctctttacatgttacca

SEQ ID NO: 22871 - DNA, 120 bp, Homo sapiens
agacgcaatgataatgagaatacttcacaatgagtgtgacgtgatgactgatgaatgtgacaaaggagaagtaggatgcacttagacagcctgggggaattgagttgtggccagaaggga

SEQ ID NO: 22872 - DNA, 120 bp, Homo sapiens
cctcggtgagactggcagcctaaaaaaggcaccagggagcagggggcactcacatcatgccatccccccacagagcatcccgctggccatctgcatcagcccgacccccacaggatagaa

SEQ ID NO: 22873 - DNA, 120 bp, Homo sapiens
cctcgtctcctccgccctgtggccaattgaaggtgaactcctaacgtgcattctgcctgggatcccagaggttgtggcagccagatgagtcacctcacaaatacagcacgtgttcctcgg

SEQ ID NO: 22874 - DNA, 120 bp, Homo sapiens
gggcggcggtgggaggaaacacgtgaagagctctctctgtgataatagaccatttagagcttcagatggcgaaaacaagctgatcaggtgcaggccctccaggaggctggcaggtgactc

SEQ ID NO: 22875 - DNA, 120 bp, Homo sapiens
gcacgccctccatcgcacgttggggaagctggaaagagcctggtggctgccgggcctccctctggcatcctctctccctccaaggctgtgtgctccccaccttgtctctccttttttcat

SEQ ID NO: 22876 - DNA, 120 bp, Homo sapiens
attcgtcttttcttcctcttctctttctgttgccattctctttctcttctcctctcaacatgtccttctctctacccgtttccccctccccttctctctctcctccctctttccctctcc

SEQ ID NO: 22877 - DNA, 120 bp, Homo sapiens
tttcgccctttgcctctcaaaccctcctccacctttccaccctctctctgcgttctgcttctcccttcttccttccgtgtctctggctcacttatctgccctctccacatcttcttccat

SEQ ID NO: 22878 - DNA, 120 bp, Homo sapiens
ggacggggagggtggctggtggcccagagctgagccctgtgagtcaacagcatgcctagactcacacacagacacatggcccaccttcagggtcatgaggattcataaaccctattctgc

SEQ ID NO: 22879 - DNA, 120 bp, Homo sapiens
ctgcgaagtgcctccaggaatcatcaagggagctagggcagctctgagtctccaccaggcccaccctccgcctctcagggctgagcttcacttcccttcccaaaggggccagggagaggg

SEQ ID NO: 22880 - DNA, 120 bp, Homo sapiens
agacgctgggccagacgtcaccccacgcgttttctcattttatcgtcctaagaagcccagaaggtgcgtaaaatggcctgtcccaaacagatgaggacattacctttctcctcttcctcc

SEQ ID NO: 22881 - DNA, 120 bp, Homo sapiens
gagcgtgttgactaaggtcacacagctacaaacatcagggacctgcgaaaaagctctgttccctggtgacaggtgttctgtgatcctaacacagccggaggtggggacaacgtccttgca

SEQ ID NO: 22882 - DNA, 120 bp, Homo sapiens
tagcgcctggcaggtagatggtgcttaataaatattcattgaataaatgaatgaatgaatgatccaatgagccccaaagcaaataacaataaaggacatttgcagagtgctctacagaga

SEQ ID NO: 22883 - DNA, 120 bp, Homo sapiens
taacggccaggtgtacataccaggggacatgggactgggttcatatgagctcaggggtaaatgatgacaccctttcccctgccctgaaggatctcagtttgagtatttgtagcacactta

SEQ ID NO: 22884 - DNA, 120 bp, Homo sapiens
tggcggtggatgggggcggtggaggtggggtatgcaaagcaggaaactcggcctttgctttctaaaagctcccagtctatttgaggccagacttatgcatgcagaacatttgggaaatgg

SEQ ID NO: 22885 - DNA, 120 bp, Homo sapiens
tcacgatgctgtgtggctgcctctgctcttagacctgccccccatgccaccagagggagtgtctgcctccccctgccctggacactcagctggaggggagggtcacagtccctcacagtc

SEQ ID NO: 22886 - DNA, 120 bp, Homo sapiens
ttccggatctgttgtgctttccaggagtccttcaaagctctaagcttttggaattctgcaagctcaggaaattgaaaaccttttctctcacaactgcaggtctttgtctgcagttgtaaa

SEQ ID NO: 22887 - DNA, 120 bp, Homo sapiens
cagcgtggaacaccctgcctgcagtctgactcagggaaagggtcactgagtgtgtgtgtgtgtgttgaggggtggataataagcaaggagaacactcagacagagagctcacagaggggc

SEQ ID NO: 22888 - DNA, 120 bp, Homo sapiens
ccccgcctgggcatagtggagggagggttaatgccagccaagtttaacaggcatttctgattcgcggcattgttgttgcgctatcctgcaatcctacgctgcgggtactgtttttatcct

SEQ ID NO: 22889 - DNA, 120 bp, Homo sapiens
ccacggtgcccccaggctgaagagccttaaccactgggctgtaccacctcacaggagggcaggtggcacagtgcctggaacttgggagggtccagcacgtggaactatgctctgtcattt

SEQ ID NO: 22890 - DNA, 120 bp, Homo sapiens
caccgctaagcctcattttccacctcttcaaaagggatctaataaacctgttagcagaaggctgctgtgaacactaaatgaggtggcttaggtgagagctctggtctgaagatgctcaca

SEQ ID NO: 22891 - DNA, 120 bp, Homo sapiens
aaacgagggttcgttcctctgccagcacgaccaactctcccgggacaccccctcaggtccgtccttgtgccacaggccacctcacttcaggttggtggctcagagaggtagcagctccca

SEQ ID NO: 22892 - DNA, 120 bp, Homo sapiens
cctcggacaagtcaccttacccatctaagcacatgttgttttaactgtaaaatgaggaaaatagcattcaactcagggtatgaatgagtggagccatgtggagcaacagttaagggcatg

SEQ ID NO: 22893 - DNA, 120 bp, Homo sapiens
ttccgacttcagctgttcatgacacaggcggagactgcgggcaggaggagagtgacacgaggtgtcaactcccaggctccctccctgagggttatagggcatggctctcttccatagctt

SEQ ID NO: 22894 - DNA, 120 bp, Homo sapiens
gctcggccttttgttgatggttttcctcattcatcaaattggggtgctgagggcacccactgcttctgtcccagggcactgccctcttcgtgtgctttcccactctctccctacaccact

SEQ ID NO: 22895 - DNA, 120 bp, Homo sapiens
aatcgaccacctctggcttttcccatttccttgtgtggtcttcatggctttggctgggagcctagctagtctctgtctcctcagccctaaaagcctgaagagattcagtcctgctcttta

SEQ ID NO: 22896 - DNA, 120 bp, Homo sapiens
tcccgtgagtttagcagaaatttcattccaaccttccatcctcatttcccagccacctgagctgcatagagcacttagcagtgtcctatgcgttaaagccaacagtcacttggcttctta

SEQ ID NO: 22897 - DNA, 120 bp, Homo sapiens
ccacgtccagaatcagcagttgcccacagggaagaaaactgtcaggagttatcagcctacagaggacccactttgtcctcatttccacagctttctgatgtcttcaaattttctattttt

SEQ ID NO: 22898 - DNA, 120 bp, Homo sapiens
ttgcggcttttctttttttttcttaatagttgttgcagtaggggagtcagcctgccacaatctactacatcttacctggaagcaataccttatcttgttatttttaagtcaacaaattag

SEQ ID NO: 22899 - DNA, 120 bp, Homo sapiens
actcgcacataaatattaatttagagttaatcacatatttgctttgtattcctttttgaatctctgactttctatctgtgctaattttccttctgactaagccacatcttttagaatttc

SEQ ID NO: 22900 - DNA, 120 bp, Homo sapiens
atacgtacccctcttctattgtttggggtattgtgtgctgtgggatctgtttactctcagttctcccctctaggctgggttccttgaaaaacaccctctggacatttcacctctacatcc

SEQ ID NO: 22901 - DNA, 120 bp, Homo sapiens
cagcgtcttggtcaccatttcaacaccttgaccacatttctcactctcccaaatttcctcctgcttattcctcatccacatacataaggctgtgtctcccaggggaaattcaactacttg

SEQ ID NO: 22902 - DNA, 120 bp, Homo sapiens
acacgagagcattcttgttggttttcttatgacttgagccagcgagacgtacatgcccagcacctgttacctgggctggctcttggctgagagcatacatgcattgggtcaggtttcaga

SEQ ID NO: 22903 - DNA, 120 bp, Homo sapiens
cctcgtgaccttgggcatctcatgttctctccacaggtctcggttctggactccttcatgggagctgtcatgcccctgtcacacagcagtgttgtgcccccggggatcagggaccaggat

SEQ ID NO: 22904 - DNA, 120 bp, Homo sapiens
tggcgcttctcagcctctgtctctcttcctctctgttcatctccctctgtcccctctatgtatgtttgtgtctctttctgtctcctctgcctttctttgtcatgtctttctgcttctgtc

SEQ ID NO: 22905 - DNA, 120 bp, Homo sapiens
ccccgccccagatgctcttctctctgtggggttttttcttcccctccatttccttctcctctcccactccttcctccccagattctccctcactacaggcttctctctaatctctctcta

SEQ ID NO: 22906 - DNA, 120 bp, Homo sapiens
atccgtgccatccaacgggcaggagcccagcctcctggctggtgcgtggctgtgctgtgggtttgtttccacttaccaaagggcatctgtaattaatgtgggcagtgataaaggagctgg

SEQ ID NO: 22907 - DNA, 120 bp, Homo sapiens
cttcgagggctgagatgaaacacccataacatttaatgtggcgcactgacatttaaatgtcaattagaaagtccccgctctgcttggctggcccctgcatcctcagatgagaccgccctc

SEQ ID NO: 22908 - DNA, 120 bp, Homo sapiens
aaccgtgactgaagagtgtgcagggtccaaagaggctaaagtggctttaagagcactccggagggggaggactcttggaacagagaaaggaggaggatggtgccaggccaccaccaaagg

SEQ ID NO: 22909 - DNA, 120 bp, Homo sapiens
cggcgcaccctggcgcagcggagggaggcccggccccggcccccggcgcctcccccgctcccgcccaggcctccacgcccgaccccaacccttgccagcctcctgtcttctgggcccacc

SEQ ID NO: 22910 - DNA, 120 bp, Homo sapiens
acccgggggactcgaggacgccaccaaatccacctgtccaggcttgacctctgccccgcccagcgccccctcgctctctggcccccgaggcgggaatctggctcctgggctgcggtcctc

SEQ ID NO: 22911 - DNA, 120 bp, Homo sapiens
agtcgtaccttaggccctgggtgtcccctcctgccctaacccctgccaccgcctctgttctggcctcctaccatcccggaaatcgttgccccagccgcctggcgtgtggcttctgcatct

SEQ ID NO: 22912 - DNA, 120 bp, Homo sapiens
ccccgctgcccaccttcggctttctacagcacatacggcattggagggcggcacatgacctgccctccacccccacccagctccaaacccatccatgggtcctcccaccttgctatggga

SEQ ID NO: 22913 - DNA, 120 bp, Homo sapiens
acacggagcacacacatgcctgtgagaacacacacgcctgggagcacacacacacaatacacagcacacacacctgtgagcatacacatacaacacacgcatttctttgtgggtctcgtg

SEQ ID NO: 22914 - DNA, 120 bp, Homo sapiens
tcacgtttattgggcacctacagcgtgcaggccccgcgctaaaccctgggacgtgtcctcaggggccaggagagagaggcctcaactcaggaattaggagaactcaggtcaaggggggaa

SEQ ID NO: 22915 - DNA, 120 bp, Homo sapiens
ctacggggagctggctctggttcagacatcttccaggaacacagaaaacaaccacattttactaattatagcgagggaaaacacgctgcgattacagctaaattacattaagacataact

SEQ ID NO: 22916 - DNA, 120 bp, Homo sapiens
gctcggccggctctatctttctggatcaggtttcagccaagttgggtggtgacacaggcggggcaggctggcgaggccttggccgggggagggtcccgcagcctcttttcctgtggggtc

SEQ ID NO: 22917 - DNA, 120 bp, Homo sapiens
ggtcgtgaccctggggtgacagtgtggtgtcccagggccagttgcagcttatgtgaccagcagctacccctccctacaaggggcttccctgggcccctgggctggaacaaactgcccaga

SEQ ID NO: 22918 - DNA, 120 bp, Homo sapiens
ggccgctgagtcatccagcccctcctctcctttccctcccagaactgaggatcagagaattcagggctggaaggaaggtcttggggccaaagccttggtctttcgaaggtaactgagtgg

SEQ ID NO: 22919 - DNA, 120 bp, Homo sapiens
gaacgatgcggcggccgtggtggagagagggaaaggaagccggctggggcccagggagaggctgccagcgatgcggatcacccagtgcgggccagggactgggagcacagaggccagctg

SEQ ID NO: 22920 - DNA, 120 bp, Homo sapiens
tggcggaggcagagagggcagacagggatgaccgtgctggccgtggaatctgggctgcagccatggggtggaaactctcagaggcagagagagatgtgtttgagaacagtctggggacgg

SEQ ID NO: 22921 - DNA, 120 bp, Homo sapiens
gagcgggcagtacaggagctcccgagccccagagacagagagagggctgccggtgaagaaggtactgattgggtccttgatggtggaagtggtgcagtttctgtgatgactagtcctgat

SEQ ID NO: 22922 - DNA, 120 bp, Homo sapiens
attcggggtggaggaggggcactggtgacgaggaagtccaagacagaggggccaggacattgagagggatgtctgtgagggtgtcaaagcgacccagggcaatggcaagagatgcagttg

SEQ ID NO: 22923 - DNA, 120 bp, Homo sapiens
caccgcctctgtctcctgtcctgaggtgagagaggaaagccagccttctcttgggagggaggggaggaaatgatgtccccaaggcagagggggctccccaaggccatggaagggaggagc

SEQ ID NO: 22924 - DNA, 120 bp, Homo sapiens
gtgcgaggcagtgtgctgtttgtggggctggggttcttcagggtcctgggagaaggttctggaaggagggaaggctggaagctgggccaggggagagactgtgcagaaagcatgaggata

SEQ ID NO: 22925 - DNA, 120 bp, Homo sapiens
ctacggggtggggggaaggtgcttatcttgcttcccaaggagcaatggagggggctttttgccacctcctggggtgggagcctcagtcctcggggctgggccccctaaggcccgtcccag

SEQ ID NO: 22926 - DNA, 120 bp, Homo sapiens
tggcgctcagaaattacccgcagaatttccagactgccatgtggagtgctttgacactcgactttcaactctagcctgtctttgtggccttaggcaagtcacttcacctctctgacctgc

SEQ ID NO: 22927 - DNA, 120 bp, Homo sapiens
tgacgggttgcctatcctcctggcaggggtgctgggagggcccgagccaaggctgaggggtcccctggaattcagaaggcactaagcaaaaactagttgcccttttcccgaggatcttgt

SEQ ID NO: 22928 - DNA, 120 bp, Homo sapiens
atccggaatttttttcccttcaaaggaatggcaataaggaaatgtgtgtgagcatgtgagagggagggtgcatatgagtgtgtgtgtgtgtgtttgtgtgtgtgtatgtgtgtgtgtgta

SEQ ID NO: 22929 - DNA, 120 bp, Homo sapiens
attcgtctgtccctctcctaagagcaaagggtctattgaaacgcagtggttgatgcttgttggtgacattctctttatttattctttgtgtgagaatgtgggaaggaagtcaggagtgaa

SEQ ID NO: 22930 - DNA, 120 bp, Homo sapiens
aggcgaggagagacagagaaagaaggggagggaaagggagtgagtccggagggcagagctgagagctgggagacaggcaggggagaagacaaagaaagagaaggaaagaggagtcagaag

SEQ ID NO: 22931 - DNA, 120 bp, Homo sapiens
agacgagagaagggccgggagatggggaggtggggcgggactgggagagcgggacccactgtcccctcccatcttgaacctgccttggtgtatgtcaaccttgacgcctctctcagggcc

SEQ ID NO: 22932 - DNA, 120 bp, Homo sapiens
gcccgtttctcacatggagcctgacgatggagccgagccagcctgcatttgacaaccagatgctgagctcacacaaaggcatcctccgccctggctgctggcggggagatgagcaggact

SEQ ID NO: 22933 - DNA, 120 bp, Homo sapiens
ctccgtgcctgaaaacccagggcaggccctgccacagcttcagccaccaagaagggaccagggttttggaatcagacagagctgagtttgaatcatacacagcccatcccttcccggtgg

SEQ ID NO: 22934 - DNA, 120 bp, Homo sapiens
ctccgtcatcactgtttttgtacttgtgacaagaaattccaaagacccatgaggtttccgatgattgcacaaaacatttactagaaggtctgctattcagtaatgcaccccaaggaatcc

SEQ ID NO: 22935 - DNA, 120 bp, Homo sapiens
atccgcaattagaagtagcaaagccttggaagcccccctgccttcgtctttcctcccctgatagccttgtttttctggaatggctttgcaatctctgctagcaagcatagcgggtgcccc

SEQ ID NO: 22936 - DNA, 120 bp, Homo sapiens
agtcgctcaatagatgcccattaactagagattatacatgattggattttcccttttgaagctcccacctaatggctaaatggaaacttaatgagaaggggaagtgggctagttgtgctc

SEQ ID NO: 22937 - DNA, 120 bp, Homo sapiens
ccccgctcctctgcgtgtgggtggaacctctgaatgtggtatcattcctgcaagcagggaggctatcccgtgaccctgatttaatcacatgagcacaaaagggttttctctagctggtgg

SEQ ID NO: 22938 - DNA, 120 bp, Homo sapiens
gcacgaggaggtctgaatgcatgctggctatttgaggtggaggaggccacgtgataaggagtgccggtggcttctagaaaataacccgtctgaggtcagcaaggaaacagggacctcaga

SEQ ID NO: 22939 - DNA, 120 bp, Homo sapiens
tgtcgaaagctgaatgggtttggaagtgattcttccccagaaacttcagctaagagcccagccacgctgacaacgttgattgcagcctggtgagaccctgagcagagaacccagagagcc

SEQ ID NO: 22940 - DNA, 120 bp, Homo sapiens
aaacgggcgttggtttaagctgctaagtgtgtggcagttcatcacacagcaacagaaaactaaattggcaagcagtttatcttgtgctgcgttctgactcctcagaataacttcctctaa

SEQ ID NO: 22941 - DNA, 120 bp, Homo sapiens
cagcgtggctggtttgactcactgcagcgtcctctgtggacacatggcaggagtccttcggtccatgagagggagctaaacaagaggctgcccttccagaggtggaagctgcagggcgtt

SEQ ID NO: 22942 - DNA, 120 bp, Homo sapiens
gcccgagactgagcccaccagctcggataaagttaccttcttgcgcggccgaagcttgtcccgccattccttcaggttctggttatggctctcatccagggccttcagtttctgggtttc

SEQ ID NO: 22943 - DNA, 120 bp, Homo sapiens
tcccgtggtggcgacaggcacctggcaaaacccccggaatgcctggcagcgagaagggcccagggctgagaaggcagggagaagaacacagtgctggggtgcagggtggggagctacttt

SEQ ID NO: 22944 - DNA, 120 bp, Homo sapiens
cagcggggacaggacacagcctggccggaaggagggggccgggggtggaagcagataaggcaggagacgggcagggcagttacaaagcctctgagcctcagtttccccatctgtgacacg

SEQ ID NO: 22945 - DNA, 120 bp, Homo sapiens
ttgcgcaggttttcctgaggattaaatgacaaacgcaaagcactgtgatgcaaggtccactcgtggcaaaagcgagaagatggtgattctttcaccggcccatgagccagtccagccttt

SEQ ID NO: 22946 - DNA, 120 bp, Homo sapiens
ccccggcacctcctgggagtggtcaggaaagctggcttctgagccccggttagtgctaactggacagcagttgctatatcaggggacagtctggccagcaagaggggacagggggccctc

SEQ ID NO: 22947 - DNA, 120 bp, Homo sapiens
aggcggctcccctgggcctccagggtaagaatgggaagctggccccaccttcctgctgggtcagccaggcccccctgtgggcctggctccctcgcaaacaccactaagggctggcacatc

SEQ ID NO: 22948 - DNA, 120 bp, Homo sapiens
ccccgaccacaggccctgccgatcccttcctgagaagagagacgagaaacagaaaccaccaacgtgcaatgacacaccgtaggtccccagggcctccctcaggcacgcaccagccagctc

SEQ ID NO: 22949 - DNA, 120 bp, Homo sapiens
acacgatggggcccagatgggagagtggggcagccccaccttgcagcccagagaactgagcctgtttgctccctccgcagagtttataagggagtgtcccttgatagctgatggctgccc

SEQ ID NO: 22950 - DNA, 120 bp, Homo sapiens
gggcggcggagataagggaaatctccctttctccgctgtaatttccataaagaaagagatcatttctgctgtggccacagttgtatccctggcacgttatctggagcaggaagcactcaa

SEQ ID NO: 22951 - DNA, 120 bp, Homo sapiens
aggcgacaagagggtagtggttaagcacgtaggctctggacccagctgccttggtttgaaccccagttgttcctcttatcggcaatgtgaccttggataagtcagtcttgctaggtccca

SEQ ID NO: 22952 - DNA, 120 bp, Homo sapiens
gggcggggcatgggggttgggagttggggatgctgaagtaactaaccataggctaaagtggtggtcatgctggaagtgactgtttattgagcaccaactatgtgttgtttgtttttttgt

SEQ ID NO: 22953 - DNA, 120 bp, Homo sapiens
ccacgctgtctctaaacaggaaagaaactctcaaccatggtctagctggaccagagacagctctccagccagaggagggtggagcagcctcaggaatttgatgaagcctccagtttgtgg

SEQ ID NO: 22954 - DNA, 120 bp, Homo sapiens
atgcgtggctttggagccagtcacggctgggctcatggcccaggtccaccgctcactagtgtggccttggacaggtcacttccgtcctctgagactgtgtcctcagctgtaaaatggggc

SEQ ID NO: 22955 - DNA, 120 bp, Homo sapiens
agccgggctgggatgcacgaaaccacagcagataaaacaggggactttaacgtgggccagggatactagagatactaggttccaggggtagcaaccattccaggccctgccaggcttgcc

SEQ ID NO: 22956 - DNA, 120 bp, Homo sapiens
ccacggcagagagctgtggaaggcggcacggcccacttccacaccactccctgctgaggaggaaggaggccttctgggtcactctggtcctgcctggtcatcaacaacgggcctgacctc

SEQ ID NO: 22957 - DNA, 120 bp, Homo sapiens
tcccgaacgccaaggaagaggtacttcctccatccacttgttcattcattcattcgtccattcatttgttccctcttacccaaccaccacctaaccagcttgttcccagtggcaagggaa

SEQ ID NO: 22958 - DNA, 120 bp, Homo sapiens
ccacgaaagaggaagaaaaattctactaactgctagaaaaaaaacaagccacaagaggtgatgatggaaaagaagcaaaactcagtgaccatgcaaggccacttactagctgggcgacct

SEQ ID NO: 22959 - DNA, 120 bp, Homo sapiens
acacgtgcctggccccaggtcgggactcagttatgtgagctgtcactatgattctttccttgagttcatgggtctgtttttctcatttatttttgtttgggttttttgaggctctgtgaa

SEQ ID NO: 22960 - DNA, 120 bp, Homo sapiens
aaccgccaatcctctccgtaaaatgggctaatattacgtggctctaggatttactgtaaggaacagatgaggtggtacttataaagacctagtcctaggctgggggcagtgactcactct

SEQ ID NO: 22961 - DNA, 120 bp, Homo sapiens
tcccgcttctccaacaaggtgccaacacagaggaaaagattgtaaacctggggtcgagtcctggtgtgccacttaattgactacatgaccctggataagtcaatctccctgagcctccat

SEQ ID NO: 22962 - DNA, 120 bp, Homo sapiens
tcacgtcacttaggattcctacaaaaatatgccttcctctcagtctgattcctagggaaaacaaaacaaaacaaagaaatgtcttcccagaactacaatttctttatgtatttatttatt

SEQ ID NO: 22963 - DNA, 120 bp, Homo sapiens
tcacggttttcctaggacctgaagaactgagatttgtggtcagtttaatgcattgatcattataaactgagtgtctaccaggggccctactttgctaggcaacagtaggggacacaaaag

SEQ ID NO: 22964 - DNA, 120 bp, Homo sapiens
agacggattttgccatgattacaaattctgaacaaaaatgagctaatcttgtcaaattgcacatggggtggtgtggtgaatgacctccaccccactcgggggaaagtctgtccctgtctg

SEQ ID NO: 22965 - DNA, 120 bp, Homo sapiens
atgcgcctgagaaccatcacacagaaggaaatatcaaagggttggtgcatccttcaacctgtatctctggacttctcccttctacacttttgcccatttgctggtccctctactttgact

SEQ ID NO: 22966 - DNA, 120 bp, Homo sapiens
ccccgttcaaatgtcccttcctctgaagcctcccctgaccagatgatgttccacatcacatccttgggcttctggcctagtctattcttaccacttctcaaactgcctccacgtttttct

SEQ ID NO: 22967 - DNA, 120 bp, Homo sapiens
aaacgagcatcagagtcacttagattgctgggccctaccttaaaacgccaattgctgggcctcacctcagttactgactcaatgggcctcaggaggggcctgataacctgcatgtctaac

SEQ ID NO: 22968 - DNA, 120 bp, Homo sapiens
caccgctgcccacgctgtctctcctgcctgccatcctttccccctctttatctacccagctccagggccaccttccttgatctcatagtgtctaaaaggcaaatcggaggagctggggcc

SEQ ID NO: 22969 - DNA, 120 bp, Homo sapiens
agtcgtggtccttgattagaggggtctttagtaaaagcaatacctacttcgacttcaggcaggaggggtgagtaaacagcacctctcgagtaggcagcctgggtgacagggatctctgat

SEQ ID NO: 22970 - DNA, 120 bp, Homo sapiens
caccgggacatatggggttggcttaggtcagaggggtacatgctaaggccaagtaggtaatagattgttcaggtctatcagcaatcacacagctctcttggtctggctcacccttaatta

SEQ ID NO: 22971 - DNA, 120 bp, Homo sapiens
attcggaggtaggcggagagggctgtggtggagacagctcacaactttgagaattaaagtcactttttgtttttattgttgttgtttttgagacagagtctccctctgtcccccagactc

SEQ ID NO: 22972 - DNA, 120 bp, Homo sapiens
tatcgattgtggatcggatgagttcctttgtatgaaactttcagagtagcaggggagtcttaagggactaaagcaggaggaaacacaactgaaaatgacaaggggaaatcttaccagcat

SEQ ID NO: 22973 - DNA, 120 bp, Homo sapiens
ctgcgtttaagtttaaaggaagatgaaccctgtgaagccaggacacactgcggggaaggggacaagaatgcaattgaaagcccctaacggagaaaaaaaaaagcccatatgtttgttttg

SEQ ID NO: 22974 - DNA, 120 bp, Homo sapiens
gtgcgtgaaaaaagaaaaaaacattacaaatgccggagaggcacaggaagcagctctgcctggcccttggttacctgcctccctatgggaccgctgcatgctatgctcagagccctccag

SEQ ID NO: 22975 - DNA, 120 bp, Homo sapiens
cctcgaggccacctcagctcccgttgctccataagctctattccccagggggcaacagcttagaagagggaacagggctctgtgtcaaccaccaggaccctggcattctcctgtcatgga

SEQ ID NO: 22976 - DNA, 120 bp, Homo sapiens
ccacgaatgccccctcacccccctcacaatgaagccacttggccaccacttagccagcttctatctcttccctgcctggtttgtcttttacagaggggagggcacaggcactgaagtcag

SEQ ID NO: 22977 - DNA, 120 bp, Homo sapiens
gagcgtgaatttcctcatctataaagggaggttgtgagggtcaaagcatgaatgcaaagcgccaagtacagtgtttggcacccacgaggcactcagcaaaggggtgctcacaagggcacg

SEQ ID NO: 22978 - DNA, 120 bp, Homo sapiens
gaccggagcctgcagcagcaaagcgcagcatacgcggggctggaaccacccttcagggctgaccacggtcccaagatagaaggtgggaggcagggcggctgagcggatctccaggcccac

SEQ ID NO: 22979 - DNA, 120 bp, Homo sapiens
agccgcatccagtggaacctcagaggcccacgggcctgaggctttggggaaggggacactttccctggaactggtaatggaatgcatttcttcaggatgaagttccttctggtagcaggc

SEQ ID NO: 22980 - DNA, 120 bp, Homo sapiens
gggcgcccgaggtgtccgaaactcactctccacccatgggaggcaagaagtcacagtaccccagagtctgtctgccttggaagctgcgtggagaatgataaattaagaggcgtattaaat

SEQ ID NO: 22981 - DNA, 120 bp, Homo sapiens
atacgtgggtaaagccagcaaggaccagcgggccctctaggcagaaagggagtcggctacggcttctttctgagatagttggaaggaatccacccttcccaggaaggggctccgctcagg

SEQ ID NO: 22982 - DNA, 120 bp, Homo sapiens
tcccggacttcaaacactgtcccttcctggaagctgctggtgtctttgtctccttcaaagtcggccacggccacatacaaagagtccttcaggccgtcggcattggggacagaggctgca

SEQ ID NO: 22983 - DNA, 120 bp, Homo sapiens
tgccggtcccccatggccccaggctgcctttgcctcgcgtgtcatcctggccccccaaagagttggagagaaaaggtttggcttttggagggacgaggagagcacggcctggggtgggag

SEQ ID NO: 22984 - DNA, 120 bp, Homo sapiens
tttcgtggccttcacactgtggacctctgacctctgggagcggcctggatgacgaagaggttttctttgggggaggtggtctgcggggtgggaccacaggtctctgctggggagcctctt

SEQ ID NO: 22985 - DNA, 120 bp, Homo sapiens
gcacgctcttagacacaggatctgtggtcttggctggcctcggaggggctctgcaggaaatctcttttgggctgagaccatcctgtttgcccgtcctgtcctgggcgcggccaggcccct

SEQ ID NO: 22986 - DNA, 120 bp, Homo sapiens
cttcggctgaaggccacgtcttggccccctactgcctgggggccctccccatccaacaaggacttgtcttgggacttggcaggcctgagcttactcctgaggttgcagatgtcgacttgg

SEQ ID NO: 22987 - DNA, 120 bp, Homo sapiens
cttcgccctgaggtggctccgttttgggggaaggagctggttttggcctaacctgaggtctggacttcaagaagggattctggggagtggcatctggcttctcctctggcaggtcagttt

SEQ ID NO: 22988 - DNA, 120 bp, Homo sapiens
ggccggaggttgggcttcttcacttccttggccaagaccttgtggccacactccagccccatgtcatttttcagctggaacagtctgcttttgtcaggtttgggctctggcctcctgctg

SEQ ID NO: 22989 - DNA, 120 bp, Homo sapiens
tcccgggctggagggatgtgtttggctggcatcatcggcaaaatcacgcccggaggcttgggagtggggccccggagctgctccgtcctctgccgctcccgctcccgctccagcagctcc

SEQ ID NO: 22990 - DNA, 120 bp, Homo sapiens
ccccgcgggcaaactgtttcacctgcctgcacctccgtctttccacctgcgagtgggactagcatttctacagcctgcttcacaaggctgttgtgtggacaggaaagagagcatttctgg

SEQ ID NO: 22991 - DNA, 120 bp, Homo sapiens
cgatccctctgaaactcctcagcgccacacactcagcctcacctgcttcaatctgtgcttcgagttcaccttccttgaccaccttatacagtacttccatgcatggcattctcatgcccc

SEQ ID NO: 22992 - DNA, 120 bp, Homo sapiens
tcccggtttattgccccccacccatactaggaattaccttgtaacacgacatgtatttggcttatttattgtgtttcgttcagtgtgtgtctgtttcctctgctggaatatgagctccag

SEQ ID NO: 22993 - DNA, 120 bp, Homo sapiens
ctgcggacacggtgcacaattttcattaccttgccggcagctgatcttcactttttattaatcatgttcaagtctttgaatccaaccatgctcgaagcttcaactttcattcgtgtgact

SEQ ID NO: 22994 - DNA, 120 bp, Homo sapiens
ctgcggtcccccgacccctgaaactgtgggaccatccttatggcctcaccctcctccctgagagctgcccccagctgcgtccctcccacagtagccctggagggcctgggctcggcaggg

SEQ ID NO: 22995 - DNA, 120 bp, Homo sapiens
gggcgggttgctcatcgctgcactctggcagggtgtcccacagagctagaacagctcccacccccagtgttatctgctctggcagctgaaatggagaaaaatggatgtgtgtctcaaggg

SEQ ID NO: 22996 - DNA, 120 bp, Homo sapiens
ttccgcccctggttgagtgcctgagccagctgtggcctggtgtcatggttaatatgctgctgcagtcgctatctctttgggaaaataccacatgccgtccgcggcctgcccagctggtgc

SEQ ID NO: 22997 - DNA, 120 bp, Homo sapiens
aggcggaaaacacacagggcgtttatttatttattgatctagcctgctgacctgctcggcgggggccgagctgactcaagctgcacatatcctgtgctcagcacagtccgccgttcccct

SEQ ID NO: 22998 - DNA, 120 bp, Homo sapiens
tcacggaagctgcaggctaggctgctgggctgggaggggtggagggaagaatccaaccccagatgcacagaagttctgtttggtccaggtgggaaagggtgccacccgggtcccagaaag

SEQ ID NO: 22999 - DNA, 120 bp, Homo sapiens
cagcgcgcccagccatggatggattttctatcacccgagtccctctctggcatccatggattgctcagtgattgcacacacagcagagggtggaagaccctgtagactgcaggcctgcgg

SEQ ID NO: 23000 - DNA, 120 bp, Homo sapiens
tcccgagcgtgcatttgcccttcctctggtggtgctaccagcctttgtccccatggcttaggtgaggccaagctcaccacctcctggagggaaggagtaggtgtcggaccctggcctggc

SEQ ID NO: 23001 - DNA, 120 bp, Homo sapiens
tcccgcccaccgtgactggttttatggatggcaagtgaccctactgggtcagctggaaacaatcctaggacttgtgttaaaggagaagctctttctttggtgatgtcccttaaaggtact

SEQ ID NO: 23002 - DNA, 120 bp, Homo sapiens
tttcgaattctggctctgcaggctgttgtgagatgtggggtgagtgactgagttatttggagtcatggttgcatcagctgtgaagcagggatggcaactcctatgttgagtaaccaagga

SEQ ID NO: 23003 - DNA, 120 bp, Homo sapiens
tggcgctggtctcgtgactaatgccaccaccatccagatgatgttagaaacatcatctttctcctcttctttggacctcaactcgccattgggctgtcacagagactgacccactaatga

SEQ ID NO: 23004 - DNA, 120 bp, Homo sapiens
taacgtcacatgttagccacaacaaacccagtcgtttccactgcattttcccagggaggatctgcttatttcctgctctttgccttcaatggggtgcaatggctgctttgtagctaagga

SEQ ID NO: 23005 - DNA, 120 bp, Homo sapiens
aaacgggaaggaaacccacatttttttgagcatctactgtgtgctaagcacaagtttaagcactctttgtatcttatctcacttaatctttacaatcactcttaagagcagaagttttta

SEQ ID NO: 23006 - DNA, 120 bp, Homo sapiens
aaacgaacagtcagagaatgaaggcactgaaccactgtgaaatgtggaattctgatggaaatccaggttaagtgtctcagtcataccacattctgtcccagacccagccagtgttcatga

SEQ ID NO: 23007 - DNA, 120 bp, Homo sapiens
atgcgcctgtcccattagagcccagagcaatggagccttctcggagactcccatgggtaagcaaaggcaaatcaacagagcacatttccagtgaatgctggactttgtctgccagtgctt

SEQ ID NO: 23008 - DNA, 120 bp, Homo sapiens
caacgtcagaacaaatcggtaccatctgagccaaaaggataatggtgagtggtggccaggtgggatattcaagcacagtgatcaaacaggggcctctttctaggagaccctcagcaggat

SEQ ID NO: 23009 - DNA, 120 bp, Homo sapiens
tctcgatgatgtccaccacctgccccacgctgaggctgatctccgaactctcctgcttctggtagttggctaccaccacatactgctccaggaccatggggtccactgaggtttggtcac

SEQ ID NO: 23010 - DNA, 120 bp, Homo sapiens
gggcgggtcaagaggacgttccaaataaaaaagcagcagttacaggactcatctcaagggtgacttcatccattcattgttctattcatgtgcttactcaaccaccaaaattgaccaagt

SEQ ID NO: 23011 - DNA, 120 bp, Homo sapiens
ccacgagcacaccactgcactccagcctctgcaaccagaagcagcacagaagccccttgttagaaccatgaggtctggatttttgatgtgaaaaagcagaatagggcattgtagctgggt

SEQ ID NO: 23012 - DNA, 120 bp, Homo sapiens
gatcgggcaggaagcagcctcaatgagggtctatcacagcctacagacagcacagaaaccatcccaacacagctgccctgcaagctgggtactgccacccccattttgtgggcaggaaca

SEQ ID NO: 23013 - DNA, 120 bp, Homo sapiens
gcacgacagtgagaaaagataagatgacggaggaagaagggtggtctgaggcctgcgggctctccttccccgagggcctggtcaggctcagtctgacatctctgggtgtctcaaggcttg

SEQ ID NO: 23014 - DNA, 120 bp, Homo sapiens
ccccgaggtcaggtggcagggccgactttttctagactcaagatgacagttcccccaagccagcccagccacgtgagcagtggcctgagagtgggctgcttcacgtccccttcctgctgg

SEQ ID NO: 23015 - DNA, 120 bp, Homo sapiens
ctccgggacttcccacctcctctcgagggctggctcacaccctttgtccccgagtgtccttccttcttgaatgaagatgaccagactcctcccaagcacagcagctgcccctggcctggc

SEQ ID NO: 23016 - DNA, 120 bp, Homo sapiens
ggccgccagcgcggggcttcttcacctcaggtccatgtacaggattctgcacaaataaggacctcctgaaactgcaggtgctcttccaggaagagggaagaaagcttttgttggaatctc

SEQ ID NO: 23017 - DNA, 120 bp, Homo sapiens
tgacggggtgggcagatgactaagtcggagtcagaacatctctatttgagctctgtaacttcctgactatgcagcctttggcaaatcacataatcattctgaatttcactttcctaatca

SEQ ID NO: 23018 - DNA, 120 bp, Homo sapiens
ctgcggaggtggtggtggtgtgctaaggaggatactggcagtttttatattcagatgctaaatcacagctgttgggcaggcagaaagccagggcaaagcctgctctctctagctgcacct

SEQ ID NO: 23019 - DNA, 120 bp, Homo sapiens
ctccgcctccagggttcaagcatagaatgtctctcatagcctcttgtaccacctctcctcttgttctctggaacaccgctctgtcttctcttctgtccctggaacataccaagagtgtat

SEQ ID NO: 23020 - DNA, 120 bp, Homo sapiens
aatcgagaactgtggcacatagaaaacactagaaaaataccgtttttgcctgggttccctcaataaaatagtctgttatcaggggttgcatgcattttgggaagtgaatcatgcaagagg

SEQ ID NO: 23021 - DNA, 120 bp, Homo sapiens
ttacgtttccatggatgcatgtaggaccagcgacatgatttgcaaggcccagtgcaaaataaaattacaggtcattgttcaaaaagtattcataatttcaagatagagatagtagagccc

SEQ ID NO: 23022 - DNA, 120 bp, Homo sapiens
cctcgtgcccttgccctcatgcgctaggccaggcaggttcttgcagcatcccactgatgtcagagtgtcagagaagccccagagcatgagagctggagtgaagaagcatggctgaagtca

SEQ ID NO: 23023 - DNA, 120 bp, Homo sapiens
tcacgttacacctgtaggaagcaggttgcacagcagtggttggagcaaaaggtggactgagaggatgtcaggccttgtcacttgagataacaagatatccaaaacaataaatgagtttag

SEQ ID NO: 23024 - DNA, 120 bp, Homo sapiens
ggcgtgagccaccgtgcccggccaggtggagctgttcttattagcagtcctaagaaagagccatatttcctacagagatcagggtgaccttcacatattatagaaggtgagttttgagct

SEQ ID NO: 23025 - DNA, 120 bp, Homo sapiens
aatcggtcaagcacacagtggagagaacccaaaataataacaagggccaagatgtcatagaatggaaaggtatgaaattgtcaagaaactgagacatattcaaggaacttctgaagaggt

SEQ ID NO: 23026 - DNA, 120 bp, Homo sapiens
gggcggtgcagaagctgagcatgaccatgccgtgaggtctgaccatgccgtgagggctttgtttgcccagtttagaaccctggcctttgtcctgaaaagatgcaaaacgtttgatgggtt

SEQ ID NO: 23027 - DNA, 120 bp, Homo sapiens
tgacggcttataaataaccaggctagcagacaataccacagagctttctgttccattttctctgaaagctgcctgcaatgaattaagctgacgtgctccaaattccaagtctctaggata

SEQ ID NO: 23028 - DNA, 120 bp, Homo sapiens
caacgacaacacccacttcagtgtagtgcagaagcctcagtgatctcaaaacaattattgttaaaaatgatcacaaaaataaaatccgtaaggctaggaaagcttttttttttttttttt

SEQ ID NO: 23029 - DNA, 120 bp, Homo sapiens
tcacgattaagctgtgatgcacataaaggcagatgctgtggcatattcagcatggtatgctccctgcactgagcacacagtaagtgttcaagaaatgcttactggaagaattaattagtg

SEQ ID NO: 23030 - DNA, 120 bp, Homo sapiens
cttcgaagcatctaggagctgacaatctagcagtcactatcaggcatgttgcaacaaacacccagatggccctggtgacgggagaattctactcttctgaaaatcaaaaagtattgattg

SEQ ID NO: 23031 - DNA, 120 bp, Homo sapiens
ctgcgccttgaacctgtgccaccacaatttcagttaaaggcttacaagtcctatcagcttctcagaacattttttttttttcaaaaccacttttgtgttttctgaaccagaaatctgctt

SEQ ID NO: 23032 - DNA, 120 bp, Homo sapiens
gacgtaagaagcccatatggcagagtttcctgagctaatgtgagcacatgcgatgatcggggctgctaagggaagtaagcaattcctgctatggctgccacaccccagtgggacttgcag

SEQ ID NO: 23033 - DNA, 120 bp, Homo sapiens
tgacgccagaggccgaggggaaagaggaaagtgctgtctgatgcccactgcaacttccattctatctgaggcaggccatttcctaaggcttggaggctggcagaatggcaatcaatttca

SEQ ID NO: 23034 - DNA, 120 bp, Homo sapiens
gcacggaagaggaggccacgcccttgccaacccccagcccccagatctcagtccggtgccccaggcagcagctcagcctctgtcaaggtcatgcacacaagcacagatagggtttctgaa

SEQ ID NO: 23035 - DNA, 120 bp, Homo sapiens
tttcgaaagcgtcgatgagtaattccaagtgggacccgtcaaagagggagacaggcaggccctgacagtcccggactgcagaaacaaagcggcttcccacctcctcccgtcccgcgtcct

SEQ ID NO: 23036 - DNA, 120 bp, Homo sapiens
catcgttctgtgactcacgagtgtcagccgctggagcactccccatctcccagccctcagagatctcattgtgagcattttcttctcatccccatgcacttagggttgggcacgcagcca

SEQ ID NO: 23037 - DNA, 120 bp, Homo sapiens
acacgatccacttttccaaaggcgccccctgaggggcagcttcctggcaggcaccttccacaggcaaaaatgatttgcctgtgaagactgatgcgccagacggacaagctgaggtttatg

SEQ ID NO: 23038 - DNA, 120 bp, Homo sapiens
ttccgagggctgctatccatggggctctatctgcataacaagatagcctttgctcaccatgccttttctcccctcttcctccaataacttgtcttgccatgccccaagcctctattcctt

SEQ ID NO: 23039 - DNA, 120 bp, Homo sapiens
gagcgaaggaaattctcttcatccctacccaggcaagctgagatggttgacatcactgtttgcacaatcactaagtccaggttaggaaagagaagcaatgccatacggtgattgaaaccc

SEQ ID NO: 23040 - DNA, 120 bp, Homo sapiens
aaccgtgacttgtcaattagatgatgacctcaggcaagcttcagtttctttatgtgtaagaagggagaaataatgttgtatgccttaaacagttgttgtgaagatgaaattagctaatat

SEQ ID NO: 23041 - DNA, 120 bp, Homo sapiens
cagcgctcattactgtctgtcaactctaaatgccacccagacatttctaggtagtgcaattttgccctgccaagtgaaagcatttcatgacgctcaatcattaggcagctatttaaaaca

SEQ ID NO: 23042 - DNA, 120 bp, Homo sapiens
atccgtgcaggccaaccaaaagataaatttgggaccaacctcaaacaaggtaattggagtgttcattcagtagtcttagcttacttgtactggccatctttatgtctttagtgagtccat

SEQ ID NO: 23043 - DNA, 120 bp, Homo sapiens
tgacggtgtctttttagaaggatgaactaagcagaaatgtagaaaaatcagaatttttgagattcaactttgaagacaacctcctccaattccttggagagtattttgctcatttaatac

SEQ ID NO: 23044 - DNA, 120 bp, Homo sapiens
gctcgtcaaacagtgacaagaggatttggggaaggcaaacagctgcagattcagatgtgggagggaggtgggcagatgatgggggaatgaatcttgagtgtccacatgccagggagaggc

SEQ ID NO: 23045 - DNA, 120 bp, Homo sapiens
ccacgatggtgagtgacagcctttcttggccaccagctgtctggagcgacccagaggagtggcaggcattgccctcagcggggcaagtgaggaggagctgcagaggcagaggagagacag

SEQ ID NO: 23046 - DNA, 120 bp, Homo sapiens
attcgactctcagtccaaaaaaccacactcctattgtgaaaattagacctttgagcagcgttccatgtgtttattctacttgtatcaaagaggctttcatctccctagagcaaattatta

SEQ ID NO: 23047 - DNA, 120 bp, Homo sapiens
gcccgaaacgtgaacttaagaaaaactaacataaaagcccccacttttaatgatagtggttggaaaggcgccaaggtccttgtgcccaggggagcatggttggctgactccttgtccgtg

SEQ ID NO: 23048 - DNA, 120 bp, Homo sapiens
ggccgtagtgtgggaggtggggacttttgcaggttcagcaggttgaggcactcacagccagttgcccttagccttaactggagaccagattttgttggctgagtgagcagtggctctcga

SEQ ID NO: 23049 - DNA, 120 bp, Homo sapiens
tttcgtgccagaaattactgttcatgtgagatgtatattgtcaaaatgcttcatttgagaagagcctctgaaggctttaaagtagcgcagtgagagcagatggggggagttcatggaggt

SEQ ID NO: 23050 - DNA, 120 bp, Homo sapiens
aaacgcagaagcccatgggtccttttcacatcagtgatgccaagtggatcaacttcaaccagtccttgtgaagatggctttctgaatgtctttgcatttaggcttgttaaatacagtttt

SEQ ID NO: 23051 - DNA, 120 bp, Homo sapiens
taacgtttcactagaataatggtattctgattttcaacaaatattcaggcaggaatagtgcttctgtagtttctatttgcagcttaatattgtatgtcacatataatgttaacatgatat

SEQ ID NO: 23052 - DNA, 120 bp, Homo sapiens
actcgttatggcatttcttgtaggaacaaggcctctgagtctaggatgatgaagttaaatttatgtgaggccaaaaaataaataaaaataatggctctgccccagttgttgcatagctat

SEQ ID NO: 23053 - DNA, 120 bp, Homo sapiens
gatcgataagaagagaagggctggacatggtatcactaactgggtctactgtgaaactgctaaaggaagaacccaaactttgggaacaaaatgggaaatgcaccaccctctcctagaatc

SEQ ID NO: 23054 - DNA, 120 bp, Homo sapiens
caccggaaggccagcatataatagcgttcaaataattgcatctctcaggcttgcaagcacgctcagcattgttcaggcaaactgtgccttcctgtgcctctgaacttggtcaccgcagat

SEQ ID NO: 23055 - DNA, 120 bp, Homo sapiens
tcacgcagaaacattcatgcagtgtcctccagaccctttgtgtgcttccccggatacaagagagtgggacctggaccccccctctgcccagcaggcttatgctgctctacatcctctggg

SEQ ID NO: 23056 - DNA, 120 bp, Homo sapiens
ggccgtggttctcctgacacatgtagcagaagccattccaggaagaaaaggtgcctggaccctggatattagggcctgaagcaaggcatcaccaggaaattctcttcagttattttggct

SEQ ID NO: 23057 - DNA, 120 bp, Homo sapiens
cctcgattccatcatgatgcttgtcaccacattcttcactaggtgaggggcaccatgaggatagtgactgtgtatttcatctgtttgtacctctagcacgtagcacactgcctagtacca

SEQ ID NO: 23058 - DNA, 120 bp, Homo sapiens
aagcgagaggggagagggagcctgaggcaccctgtgggtggtacaatacttcttcatagcctttgcgttacagtctaaagattttaccagcttcaaatattaaacacctagagagatttt

SEQ ID NO: 23059 - DNA, 120 bp, Homo sapiens
gcacgtccatggaatttgcaaagttaccaaatagtttaatatccaggtaaatcaatggcagctcaaaaattccatgattgtgtaatcctgcctcagctttttaatatgagaatatttacc

SEQ ID NO: 23060 - DNA, 120 bp, Homo sapiens
tctcgatgtgacatccaaaggctgggagtcccaaaccttgctaaaagagaaaagacattttccctatatcatgtgctggggtatttccagggcttataatggtgagaaagaaatgctctc

SEQ ID NO: 23061 - DNA, 120 bp, Homo sapiens
caacgtgctggaagaaggtagttgcttctcaaaggctgccatgttagaaatccatatggccaatgtttctgccattgttcctttcctgctgtgaggaaaagtgcctatgtagtctctggc

SEQ ID NO: 23062 - DNA, 120 bp, Homo sapiens
acacgtgattgtcctgtgtgatacgatgccatgatctggccgtctcttacagtacagcttttcattccgagatagcctgtcgtgctggctgttttggatgaagcttggcatgagcacaga

SEQ ID NO: 23063 - DNA, 120 bp, Homo sapiens
gaacggaaacttttgaacacgttccaccagctgcacaatggtaccatttattactttattctcaggggaaaacgtttgctgtgtgaataataccagggacttatgtaagcttcttcattt

SEQ ID NO: 23064 - DNA, 120 bp, Homo sapiens
catcggattttcccaaggccaaatggacaataagtggcatggacttatttccagagagatccatactattctgctggaaagcacaaagaatttcccactcacagaaagtctcagtgggat

SEQ ID NO: 23065 - DNA, 120 bp, Homo sapiens
agccgtcaaccccagtacctctgactgtgaccttatgtagcaaatgggcctttgcagatgtaattaaggaatgatcttgggatgagatcatctggatttaggataggcttaaatccaacg

SEQ ID NO: 23066 - DNA, 120 bp, Homo sapiens
acacgggcagggactggagtgattcagctgtaagccaacgaacgccacgggttgccagcagccacctgaagccaggagggcgtggaatcggttttccctctgagcctccagaaggaactg

SEQ ID NO: 23067 - DNA, 120 bp, Homo sapiens
ccacgtgctgcatgactgtgtcctgaggcagccacatggctgccagctctgaaggtcctgagatccccattctgaggcccttcgctgactcactgctctcattcttctttctctgtccac

SEQ ID NO: 23068 - DNA, 120 bp, Homo sapiens
acacggtgaaggcagggcctgtgtagtggatgccaggctgtcttcacgtacatttctctttctcttaagcatcctggaccataaagccctagtgtgctgctcctaccttgccagtaggac

SEQ ID NO: 23069 - DNA, 120 bp, Homo sapiens
ctccgtctcctgaagactgaccctacaggagagatacaagcatctcctgttacctgtgcccagatggtccttaaaaaatcattttcctatttgataaacataaaaatgttatgtctgacc

SEQ ID NO: 23070 - DNA, 120 bp, Homo sapiens
tctcgaactcttgacttcaagtgatatgcctacctcgacctcccattacgttttaaatagcacagctctctgctacgttgtatatttcccaaataaaaagttttcagctcaatctctaga

SEQ ID NO: 23071 - DNA, 120 bp, Homo sapiens
tcacgcacctgccaatcagttttatcacttgccattaggaggtccttgggaagcaatgggaaagctccccagtccagagaaactaacttcaggcatgtgtctgaactcagaggctccaac

SEQ ID NO: 23072 - DNA, 120 bp, Homo sapiens
tgacgtaatccctatgtcaaagtggcatattttggggtggcatattctgccagcctgcaccagtttgacctctttgtccctccctcaccctgagctccatctgagtgctaagcacaaacc

SEQ ID NO: 23073 - DNA, 120 bp, Homo sapiens
gcccgatcagtccctcataccgcccctgccatgtctgagtctcaagttcatgtactttttccttttgatcttccttcaatatcataagctccccgaggacagatgagcttgtatcttatt

SEQ ID NO: 23074 - DNA, 120 bp, Homo sapiens
ggtcgctcttccgtgtcctggggccgaagcagcaatagaaagcctggtaatcggacaccttttgccccacagtgtcaccctgaatgagtcttttctttccgttctctctttgcttggtct

SEQ ID NO: 23075 - DNA, 120 bp, Homo sapiens
gaacgtgctacagaacacatcagaagacctgaattctatttctggcactcactctgatattctgtgaccttatccccggctacttgaagagctttgtcctgcccccatacccaccctctg

SEQ ID NO: 23076 - DNA, 120 bp, Homo sapiens
acacggaatagattttaccagttacctggaagcactggcatgcccataaaaatctcctcctttgagaagccatggaactctgttctgccatctacccaacattctagaaatttacttgca

SEQ ID NO: 23077 - DNA, 120 bp, Homo sapiens
atccgcaacctgttgatgcaaaaacatgaagcttctagtgaggagggaacaaacccctctcttttggaggtatcagtcttagtgtactttgtgaaaagggaaatgatcatgtgaaatagt

SEQ ID NO: 23078 - DNA, 120 bp, Homo sapiens
tgacgctttgcacaaaccttgatttcacatggtgctgtagctgtgttgctggaaacagtatagcctggagagggcaaactttggaagagaccagctgggtaaaatcctgactctacacta

SEQ ID NO: 23079 - DNA, 120 bp, Homo sapiens
atccgttaatctgctttgctgacttatcaggccccagaccatgaactaccatcacatggcaatcagcgacatttttccctcctgttcagtatcatttactaagtagcagtacagtccatt

SEQ ID NO: 23080 - DNA, 120 bp, Homo sapiens
tttcgacaaggtaaaattgatcagtgaattaaacacatgtgaaacatctccaaatacaaacccactacagggaaagatttaaatgctgtccatttccttgccgataataacttggaaggc

SEQ ID NO: 23081 - DNA, 120 bp, Homo sapiens
agacggatgctgaatggagagctctgtttaaactgtgtcttccataaatagaaacaaagtgcagacatcctgcctcttaacttgacttcttttgtcatctaaagctttcagaagtatgcc

SEQ ID NO: 23082 - DNA, 120 bp, Homo sapiens
acacgcacacacacagaggtagttaaaagtctttaacaagggctgtaaataattgtcctcaaggcactctacggagaactcactgacacccatgaaaggatggagcaagtttatgttaca

SEQ ID NO: 23083 - DNA, 120 bp, Homo sapiens
agccgtgatttaactgcagtccctcatggaaggaaaccagtctggacctagaggaaatcaagctgttgtctgaaaggctggatgcaggggctgagtgagcacaggctctgtcagtactga

SEQ ID NO: 23084 - DNA, 120 bp, Homo sapiens
ctgcggcacgacatagagtatttgccaaaggaagttggggacttcttaaccagtgacaaatggctctctcatctctgagctcatgtggcactttttaccattcatctttagggaaccaaa

SEQ ID NO: 23085 - DNA, 120 bp, Homo sapiens
acccgacccatagtagacactcaatgtttcattaaagaaagaataaatgcatgggcttctctattcccctctcaccacggggaagctcatacttccaaatattaggatgaagtgccttct

SEQ ID NO: 23086 - DNA, 120 bp, Homo sapiens
caccggcaaccactattgcttacctggaagctttgtccaggcacctggcatcataagtctcaggctccatggaaagagcccacctggatctggagttctgcatggggggtgggggggaaa

SEQ ID NO: 23087 - DNA, 120 bp, Homo sapiens
tttcgacagttagtgccatttggtccagtcacataatcacagctggtaattggagaaggtgaacatgtgcttccaacattcacttttcgtagactcattaggtcaaagatcatctgagca

SEQ ID NO: 23088 - DNA, 120 bp, Homo sapiens
actcgcgagctgtagctggaaaaaagctggaaccagaatcctaattgctccaagtccaaattcacagctctttctagcacatcaagctgctcataaaccagaaatgatccgttccacaca

SEQ ID NO: 23089 - DNA, 120 bp, Homo sapiens
aggcggggaggcagccaagctgtcttcagtgctgtattcagaggtgcgagcgcctggaattctgcaatccaaaagggccttctgggggtcagctgccttcttagtgtctttgagggatca

SEQ ID NO: 23090 - DNA, 120 bp, Homo sapiens
cttcgactgaaggaggactttgcacatgtcatgcagtgtgagtttcaaagactgccagaatccaaagtctcgatcaatccatcaggatggggacaacttttagacaggatctggtgataa

SEQ ID NO: 23091 - DNA, 120 bp, Homo sapiens
aaacgagacatcagcagttttccaaatccaggtgaagaaagtgaatgacttcagcatgaaagacagggctggggcgacaggggagagcaggagacggatgagtcagcccatgttcgtgga

SEQ ID NO: 23092 - DNA, 120 bp, Homo sapiens
gagcgggaaaggcgtggagaggaagcaggcctgggagtgagagtgtactgggcttcaggaagctacctgctgaggaggtgctggggaccccacacctgagctccacactggagggatgca

SEQ ID NO: 23093 - DNA, 120 bp, Homo sapiens
agccgtgcagtggggcctttttgttcttcttgcccaggtccttctctcctgcctctctggctgcccggctccaagtcagagacttgaatatgcagctggaagtttgggtattggcaagaa

SEQ ID NO: 23094 - DNA, 120 bp, Homo sapiens
taacgggcaatgacaaggaggaagttatggcacaatggcagacttaaagtgcccagtcatgctattactgcactcagctgagaattctgcaggggcagggagcgggggatggaaacccct

SEQ ID NO: 23095 - DNA, 120 bp, Homo sapiens
tctcgttttgtcccctgcagagtgactctgcagcattataatatctgccccagccaaaacacaactgctctcctgccagaagggagatttttgccagatgcaaatcacatgctggccaga

SEQ ID NO: 23096 - DNA, 120 bp, Homo sapiens
aagcggaaacgttccagatcactggagtttgagatcccagtctagcctgtctccttttctctgctcacaagacattttatggataagagcaggaatgaaaccataatacgtatgatttat

SEQ ID NO: 23097 - DNA, 120 bp, Homo sapiens
taccggactggtatatgagagttaaagggggttactgaaggtatagactctgttgttctattggtttgtttgcctatgaaaggcgagccttttgttatctgtaagacagaccctaggagg

SEQ ID NO: 23098 - DNA, 120 bp, Homo sapiens
ccccggacagcaaaattttcaagatgtcaaaacatcataaaattcaaaacatttttaaaaacactattaatacactgtatccatcagggctcagaatggacaacagaacatactgtagat

SEQ ID NO: 23099 - DNA, 120 bp, Homo sapiens
atacggttctaacttggatctggaagtagcaaagatgctgctgctaccaatactgctgtcccctccagaatgacatatccccacaaagctggtgactagacatggaatgctggtccatct

SEQ ID NO: 23100 - DNA, 120 bp, Homo sapiens
tttcgcaagtacaggaaggaggggacaactgtggccacacatttctgtgttctatatagtataacacacaaatgaaacgtgataaacacgcaagactgaactgcctctctgtccttcaat

SEQ ID NO: 23101 - DNA, 120 bp, Homo sapiens
cctcgatcctccccatggaagcagaggtagactctcatcgcagtgcccaccatacttctttgctcttacaccaatgtctctctgcttgattgtgagatgcttcaagccattccatggcat

SEQ ID NO: 23102 - DNA, 120 bp, Homo sapiens
acacgttctaatacatttcaaaattcctgtctcactcattctctcctttcttccatcccctccctctttcttgacatgtgaccttcttttcccattaaatgagtcaatggaaatgggaat

SEQ ID NO: 23103 - DNA, 120 bp, Homo sapiens
aagcgttcctacctgtaaaagtctgttagaaaggactgcagatttaataagcatctttcaagagctctgtccccattccaactcaccccaaccctccagccccaacacatttgttaaaaa

SEQ ID NO: 23104 - DNA, 120 bp, Homo sapiens
cttcgagtggttcagctgactgaatatacacctagagaccctaaaacaagccacaggggtgagaaatcagagaattaggaatgcgcaatttaaaagcactgcggtttccaatgtgaattg

SEQ ID NO: 23105 - DNA, 120 bp, Homo sapiens
cttcggtaccttccttccctgtccaaatcctatcggcagcctttatcactctttcgttctttgaaatgagcagttgatgtttttctcatgttcttatacaaataaccaccttaattcagc

SEQ ID NO: 23106 - DNA, 120 bp, Homo sapiens
tcacgtaatagtctgacaaaatgtgaatgcctaccatgtgtccagtactttctaggtgatggagacgcagcagggaacaaagtttctgcactcttggatctcatatctactgcaagaaac

SEQ ID NO: 23107 - DNA, 120 bp, Homo sapiens
aagcgttgtgtacatctggaggaagccgtttccaagcagagggggaacaaaagtaaaggcctgaagtaggagtggcatattcttggaacagcgagaaggccagggtgaccagagcagagt

SEQ ID NO: 23108 - DNA, 120 bp, Homo sapiens
gagcgaggagacagtggaaggagatgttgtcttgaggcccagttgtgtggggctttgtaggacattgccggggcttcagctttttctcaaagtgaggtggaaaggcattaaaaactgtgg

SEQ ID NO: 23109 - DNA, 120 bp, Homo sapiens
tgccggagcagggccacacagccacaccctatctcaaaggaaaagctatctttgaactgagcacgttgctggcctgagaaatcaagcttctgttggtaaggagagcagggagaatgggtg

SEQ ID NO: 23110 - DNA, 120 bp, Homo sapiens
ccccgtctgcaataactagcatacacacacacacacacacacacacacacacacacagtcttctttcttgacttccaatgaacaacaaatcacaggtttcaatatttgctaagtaagctg

SEQ ID NO: 23111 - DNA, 120 bp, Homo sapiens
gctcggcagcagggccacatgctgtgtatatgcagagtgtaaatttggatcacacacactgtgatgatgctggcagttgggataaaaataaatacctcccaacactctctgcattgtgat

SEQ ID NO: 23112 - DNA, 120 bp, Homo sapiens
cttcgctcttcccaccatctacactgtagcacagctgcagttttacttaacttttgcaagctaaattgtaaagcacctatatgccaacctccaaagagagccttctccattgaaacactc

SEQ ID NO: 23113 - DNA, 120 bp, Homo sapiens
atccgcagctcctccatggttggagcctcagaggcagacaaaaactcctttataaagaagctcggaaagaactaaactctgaaacgatagggtctctgtgttctttgtgtaggcaggcaa

SEQ ID NO: 23114 - DNA, 120 bp, Homo sapiens
tttcgggttttgcagttagcttttgtaattacaataaaagagagatagtaacctttagagtgagtggcagcagcaccctaacactaggctgtgtgaaaacagatcacattactccggagc

SEQ ID NO: 23115 - DNA, 120 bp, Homo sapiens
agccggcgttattgtgcagaactgggttctgctgtaggcacccggggagcctttcttcatcaagggaggtcattgcacctgtgcaaagaagattttttttcctttaagattctttttttt

SEQ ID NO: 23116 - DNA, 120 bp, Homo sapiens
cagcggctgaacccgctctgctacagaagaaatgccccaattgtctttcctaagcaaaaattgccacgactccccataaacaatcagttgtccattgactgttataaatagactttaata

SEQ ID NO: 23117 - DNA, 120 bp, Homo sapiens
actcgagtgaaaattatggggacagcacaacgggcttcatgtgggagtctatttcaacagatactgtattcttctctcatgggcacccttgaattcaggattgtgaaataagtggcagtt

SEQ ID NO: 23118 - DNA, 120 bp, Homo sapiens
tttcgatgatacagtggcaagatgcactagtttaactgtgataagaactaatcccttaccacatttcttctccatttcctgttgtttccctttatcttttccaggatgactctccttctt

SEQ ID NO: 23119 - DNA, 120 bp, Homo sapiens
cctcgttgacaaccactctctatgaaagagtgttcccgagcatcttattttaaccagaaccagtccctggggcgaggtggtatctcaaaaatctgatcaggtgtgacagagaacagggct

SEQ ID NO: 23120 - DNA, 120 bp, Homo sapiens
ccacggctgctctgagttctgaccagccagccagagacaactagatgtggtggaggttgaaggtggatgcaggtattgtcacaaagctcaataagactaaacaaggaaggataacatgcg

SEQ ID NO: 23121 - DNA, 120 bp, Homo sapiens
tgtcgatccccaccccagtcttattaatgcccttagatcagttatggaccatttacaaatgattgcagagtttattgtcctaaccatgatctctcctaaagtccagacctacacctggct

SEQ ID NO: 23122 - DNA, 120 bp, Homo sapiens
ctgcgcagtcagatgtctaaaaccaaattaaagatcttccctaaaccttctcctaacatgttccctgctcattaaatggcagaaccagaacccaggagtcacccttgacacctcctcctc

SEQ ID NO: 23123 - DNA, 120 bp, Homo sapiens
cctcgtcagattcagaccatccttaggtgctggcagtttgacctgttatcacacccctagccaggtgcccattgtctctcatttccactaacttagtggcctccttgcctgatccctgtg

SEQ ID NO: 23124 - DNA, 120 bp, Homo sapiens
gtccgttccaatctgtattaggtggccagagtgatcatttccaaatgtaaatctgatcataacttcctccctccagaaaagtaaatgtaatttaattttaagatgttcagatggcttcca

SEQ ID NO: 23125 - DNA, 120 bp, Homo sapiens
gaccgagtccctgcccggttgggcccctgtctgcttctccaggcccatctcagctcacacttgcccttgttccgtggcagggttgcgtgctttcatttcctcagactcactcactgcctt

SEQ ID NO: 23126 - DNA, 120 bp, Homo sapiens
cctcgttgttaaaatcttaactcattgacacttcctcagggaagctttccctcatccacccagactggctttgtagcagggtgtccctactgtcagtgttgtgcttttacatttgttacc

SEQ ID NO: 23127 - DNA, 120 bp, Homo sapiens
tgacgatgtaagcatcacaagatttatgtcagctgctggacctccacagacagggtcccagcaagctgacaggttgtaggtgagcaagcacgttagatgtgcaggtcactcacatccctt

SEQ ID NO: 23128 - DNA, 120 bp, Homo sapiens
ccccgtccactgtgagtcggggaggcatcaggaggcttttttgggaaatgtgaggtggagcaccaagccaagtcccgataaacgtggaggaatgaaccaggtgaaaggaacttgcaagga

SEQ ID NO: 23129 - DNA, 120 bp, Homo sapiens
actcggccagagtggaggcagggtccagggaccaagctgggacacgatttctggctctggccagagagagagccacgcagagctctctgcctcgtattgcccccactggccaatccttga

SEQ ID NO: 23130 - DNA, 120 bp, Homo sapiens
cagcgcttaggacaaaataaaaaagcctttgtaatttgacaggtaaccacagagtgttaggaagtgggtcaggaggccccaagaaggatttacatcagagctgggacaagacagtctggg

SEQ ID NO: 23131 - DNA, 120 bp, Homo sapiens
tgacgaaaactccatctcaaaaaaaaaaaagaacctgggccctaggaattagacctgttagctacttggaccccagggaagtcacttctctgaaccttgaatttcttgtctctaaaatgg

SEQ ID NO: 23132 - DNA, 120 bp, Homo sapiens
ggtcgttggtggtataatgaagcaccattcttgatccagaaaagtattcagttaatactaactgtagataatactcttgcaagtaactgtctatgctcactacttaaacctttaaccttt

SEQ ID NO: 23133 - DNA, 120 bp, Homo sapiens
aggcggtttgtgtagataatacatcatcttgataacaatacattttcccctgttattttgaaatgatttactagaaaaatagaaaatggcaactttcaaaattctgtgatatgggataaa

SEQ ID NO: 23134 - DNA, 120 bp, Homo sapiens
acacggacattcagcagtaattattttttgtcttggattcctggtagtaaagaatgcttgatccttcctgcttctgccccaacccatgctagttcttactgttgtgatcagttattagat

SEQ ID NO: 23135 - DNA, 120 bp, Homo sapiens
gcacgtgatttccagataaggctgtgatcaggaatagagcaaagtcttgaatcttggtcacctcagcaccattctctaggtagttgtgactgatggtgataactggctgtaggttttgtt

SEQ ID NO: 23136 - DNA, 120 bp, Homo sapiens
acacgagaacaaagccttccctttttgagctcaggtccaaaaaagcagttttggcattaaagagaaaaggtttatgctcaagaacttcttgctttttcttctccctcttacttcttggac

SEQ ID NO: 23137 - DNA, 120 bp, Homo sapiens
aaccgttggtgtctgaagtacctctgaatccagcagccttctaaagaaatgttatcagaattatattgtgtaatataatgctttcttcttgttgaggatgccccagaataccgatagatg

SEQ ID NO: 23138 - DNA, 120 bp, Homo sapiens
ttccgtctctgtttcttgttttactttccctctctctttcttaaacacatacatatactacctaccccacccccatgcatatacaggtctttctaaattactgccttttcactccacatg

SEQ ID NO: 23139 - DNA, 120 bp, Homo sapiens
ttccgtccaagccctctgagtggctcttgtgtttgtctaccctcttcctaattgtcgcttttaaatacctcatagaaatactctctctccatatttcaacttggtcagcatgtgtacctg

SEQ ID NO: 23140 - DNA, 120 bp, Homo sapiens
gcacgtgggaaggtaattcaggaattaccttttttttggtaataatgtcagagtgttaaagtgattagtttttagagagttaatttcggacctatttagaaatacccatatagatattac

SEQ ID NO: 23141 - DNA, 120 bp, Homo sapiens
taacgctttgggcatttgtgcggtttatcttgtctctgcttcgggtcgggagtgacttgttactgtttacatgaggctagttgtgtggcactccctaaacagtttattgaagttttgtct

SEQ ID NO: 23142 - DNA, 120 bp, Homo sapiens
aatcgattcaagtctcaagtcttttgatttaccttaatccatttgaattttgtattttagccacctttgtatctttgacataaaaccatcacagggtactcctctcagaaatcttggaat

SEQ ID NO: 23143 - DNA, 120 bp, Homo sapiens
attcggaattccagcactgccccccagacatgcccattcactgaccccctgagctagttccctttcttcctcttgggttgcttccctaataggatgcacttcatggcttttgcatctccc

SEQ ID NO: 23144 - DNA, 120 bp, Homo sapiens
tggcgtagaagttcatattggaaaggcattgcttcctcacagcttcctatgtacaaatactgggcatttgggagtctggatgaaagatgagtaagacaaaggctttgttctcaagtaaaa

SEQ ID NO: 23145 - DNA, 120 bp, Homo sapiens
ttccgtcctcacggatctcaaagtcaagagtgggaaacagataagaggccattatagcagtgctctttgctgagtgaggactgaggaagatttcttcacactgagttttaggggacgtgg

SEQ ID NO: 23146 - DNA, 120 bp, Homo sapiens
gtccggtatcagtcagagtgatgatgaattgagtcaaagctgttgttttaaaaagaatattcatatgcatgcctatgaaaaagagctgtcttgttttaaaatggagtaatacaatttgtg

SEQ ID NO: 23147 - DNA, 120 bp, Homo sapiens
gcccgtggagaactagtcattcattatccaggggtggtataaaagtggctgtcatcatctaacagcttatcaggggacccgtgtacaacttgttaggttgacttttgttgcttctgcatc

SEQ ID NO: 23148 - DNA, 120 bp, Homo sapiens
ttccgtgttaagtgccactcttcctgcagtaacactatttgtgtgttttactttcaaactctcagggagagagctgactcaggcgtacaataccgttcagtacagaaggtcattggacca

SEQ ID NO: 23149 - DNA, 120 bp, Homo sapiens
cttcgcttcccagaaaggggcagtatgtcaggtcactgggcagtgtgatagaacaatgaataagagggaacttgtcctggaagagctcacaatgtggagagggaagcagatacttaaaca

SEQ ID NO: 23150 - DNA, 120 bp, Homo sapiens
cagcgggagagcagctaactgccgtagaatggtggtaggaaattcttcattgaagccatattgagatggcaaagggtattcctggcagggaaaaaaaaaaaaaagtcatctgcagagacg

SEQ ID NO: 23151 - DNA, 120 bp, Homo sapiens
ccacgaggtgcagggccacttaggttgggctaaacattttggattttagtctaagcccggggggaaccactagagcattttaatggaggaagtaaccctggctgcactgtgaaatctggg

SEQ ID NO: 23152 - DNA, 120 bp, Homo sapiens
cctcgttaggagcctgttgctagttcagagcaggtttaagagcagcttgacctggatgggcgtgtgaatggaagacatattttttagaagattatttgacaatattatcaaaagtcttca

SEQ ID NO: 23153 - DNA, 120 bp, Homo sapiens
aaacgaaatttaaaaaagaatctcagatgtgtgtaaaagttcagctactagaatgctcatccctattatttatgataaaagaaattggtctaaaagatgacagtattttcaaacaagtgg

SEQ ID NO: 23154 - DNA, 120 bp, Homo sapiens
aagcgcttttaatactaaagacttggaagtgaatttttattatgcagtcaccacataaattcagttgcctacaaagctgagcctcctggaataccaactgagcaggatggacttttttgg

SEQ ID NO: 23155 - DNA, 120 bp, Homo sapiens
ttacgctgtggtcttaatgcctatttgcaagtttcaaaccaaatgttatgtattctttgtatttctaaaaatgtctaggccagttgctgatacaaagatgtttaatatgttgccttctac

SEQ ID NO: 23156 - DNA, 120 bp, Homo sapiens
aaacgggttaaccgtttcctttctagtgaatatttttttttaagtagtttcttcttcctttggctgattctctgaagatcgtacttcatagttgtgattagctggaaaattcctagagga

SEQ ID NO: 23157 - DNA, 120 bp, Homo sapiens
tatcgtgtatgcatgtatgctcatgtggatatgggtatattttaaaattagtgattttcgtgagcttgatgctttgcctgttaggctttgtagagttaattctcaaacgttcttagttta

SEQ ID NO: 23158 - DNA, 120 bp, Homo sapiens
gcccggccccttgtctctgtttttgaattgaaatagttacatggatttttgtgcttgaagctgctgatatgttaaaattgaggaagggaggagtaatggggaaagaacaggaagagtgag

SEQ ID NO: 23159 - DNA, 120 bp, Homo sapiens
ctccgtaaatggaagataataattgtatttacctcataaagttgtcttggaattgacatgagatgatgcctctaaagtgtttagcagtttgcatggtaagagcaaaaattggacaaaata

SEQ ID NO: 23160 - DNA, 120 bp, Homo sapiens
actcgttgcattttctgtgactctccaggatgcttgctcagctctggtcagtggagcctattcactgtgaagcagggtcaagaatggtagcacaacattcctggcaggtatcctaatggg

SEQ ID NO: 23161 - DNA, 120 bp, Homo sapiens
atacggataaaaaagcaaattcatcagagaactcctccccaaccctgccccttatctctgaagctttagctgggaaagccgggctgactcacttctggtgaatgtggtctgctctcctcc

SEQ ID NO: 23162 - DNA, 120 bp, Homo sapiens
agtcgaggcatgcaaagacttttgaggcctaggcttggaactgacacagtgtctcttctatgcattcagttgggcaaagcaagtcacaagtgtagctcagattcaagagctggggaggga

SEQ ID NO: 23163 - DNA, 120 bp, Homo sapiens
gaacgtggctacagggaaagaaagagttgtggccagttttggaaacaagcttaaggcacaataaggatgagattcctgaaaaattcagttttcaaacttgcacacaaaaagtaaggccat

SEQ ID NO: 23164 - DNA, 120 bp, Homo sapiens
ctgcgtgtggctggggcctgttacaattgttgtgaagtcagaggaataattgagagagaatgttagtaacacatacacaagagcagagctggtaggaactccgacaatgcagtagaagtg

SEQ ID NO: 23165 - DNA, 120 bp, Homo sapiens
agccgcttcgagggtgaagcccaggtttaagtacttgtttttaattttcaaaccacaggcaaacggtttctattgccagagcagcaaccattaaaaactttttcctttcctaccgaaggt

SEQ ID NO: 23166 - DNA, 120 bp, Homo sapiens
acccgagatggcgatgggacccaggtgtaataaccaacactccaccttctattaaataggaactttcttctgatttgttccaaacactccccacactcggagagcattccagtgaagtgg

SEQ ID NO: 23167 - DNA, 120 bp, Homo sapiens
tcacggatccttccttctttgggaagtgttagagaaaggagggaatttctggaaaccaaccaagtcagtcttggagatatatccagagaactccatcagctatgaagggaccatgttccc

SEQ ID NO: 23168 - DNA, 120 bp, Homo sapiens
tggcgaggaaggacagagggcagaaaatgaggtccaaatagagtggtttgagttgtcctcatctgagcctaaacagttatgatggaatctcaggaggagccacatggtatgaaagggttt

SEQ ID NO: 23169 - DNA, 120 bp, Homo sapiens
tcccgtcgagttaaaggctgacatctcatcaagcagctcaacagccccagagagagagagcgagagatcccttagagagctgggccccagggagagacacatctgaggaactctccctgc

SEQ ID NO: 23170 - DNA, 120 bp, Homo sapiens
gtccgaggttttcagatcttatcaaatagtgtctcatttgcactgcagtgcatgtcacaaagccctgtggatgcaaaggaggtgacagcaaaaaaggttaacagcaaactggggacagtg

SEQ ID NO: 23171 - DNA, 120 bp, Homo sapiens
ggtcgtttatataccatttgctaactgttcataattccagtgcaattttcctcagaacatgggaaacaaagacagcgaaacaaggggcttttatgtttttctgtgctgtcgtcagtggat

SEQ ID NO: 23172 - DNA, 120 bp, Homo sapiens
catcgattttggcagggttagagtcaatagattaatcattcagtcaacaaatacttgaatagatgcaaatcattcattgctgtcagagctactcctagcccccactgagtctttgtgcaa

SEQ ID NO: 23173 - DNA, 120 bp, Homo sapiens
tcacggtgatatctcatgtccatctaggtacagatccatggttttttggttcctgccctatcttcagaattctcttagtggtggaatttgtgcctgttttttacccgtcattttcccctc

SEQ ID NO: 23174 - DNA, 120 bp, Homo sapiens
cagcgataacattgccattttctccaagtcatcataaaataaactagaattaggaaaacagggagatgtgtggaatgctgtcacacaaaaggcccacagatgagtgtggatcaagctaat

SEQ ID NO: 23175 - DNA, 120 bp, Homo sapiens
tttcggtgtatgggaagggaggaggtaaaagcattttgagaaaattgggaagcttgaaattttcaagtagtgtttgatttgtcagtagagaatctgccctggtaccttatcaatctatga

SEQ ID NO: 23176 - DNA, 120 bp, Homo sapiens
cttcggagctataaattgcctactcaaaatggataaacgaatggatggtattaccatgtctccaattgaggcaaaaggagcgtatgtgtgtgtatgcggggggtggggatttggtggcat

SEQ ID NO: 23177 - DNA, 120 bp, Homo sapiens
catcgggaattgtgagggatgaatgcccaagaacctctgttttgcatgctcttaccagtattttggtcgtggaatcactagcactgaggctctcacaaagggtcccctggactttgatgt

SEQ ID NO: 23178 - DNA, 120 bp, Homo sapiens
aaacgcagagattaccgcaggggaagatgcgccagcaggctggagctgacagtgtggagcaggcattgcttggaggagctgagaccattgtagaggtactgccatcactgcagatgctac

SEQ ID NO: 23179 - DNA, 120 bp, Homo sapiens
tcccgacatcctcctcttccccgcggcccccgtctaccagtgcctcctatgtattggctagactaagcagaagctagcaggcaaagatgtatgaaagccgtaggtggcaggcccctgtga

SEQ ID NO: 23180 - DNA, 120 bp, Homo sapiens
atccgagagcaaataagcaaatgggctagggggcagacatctggtacccttttctttcagtctgtccgtaagcactggctgtcaatacagtgaagaataaaaggcttctgtgtgtatgtg

SEQ ID NO: 23181 - DNA, 120 bp, Homo sapiens
ttccgctttgtcttcccttccctccctctccttttccctcactcccctctttctttcctctctcttctatttctcactccccacttcgtttccacctttcctctccatgctgtctctctc

SEQ ID NO: 23182 - DNA, 120 bp, Homo sapiens
agacgaggggcctcagaattattttgttagcacctgtttttaatcttctgtcctaagaatcattttcgggacctctcctaggacccaaatcaatatgtggtattgaacccaccttaagct

SEQ ID NO: 23183 - DNA, 120 bp, Homo sapiens
gaccgatgggactgccattgttgtactcagagtgtttggcagagatgtagagatctgtgctttccagtgaatttgcataataaaactctcattgaattatggttcaatgaaggggaaagt

SEQ ID NO: 23184 - DNA, 120 bp, Homo sapiens
atacgtctcgtctgtattgccaattcctattttcacacaaatgtggtctgacctattcctgagtacagaagtggagttgggacatacttttctttaaaataaaacaagaaaaaaagagtt

SEQ ID NO: 23185 - DNA, 120 bp, Homo sapiens
agtcgctattgttagatgttaggttggttgtcattgaaaagaaaggactttcatctttctgtggacccacctacaaacaggagttctgcttctttagggtgtacaggtgcaattatgcag

SEQ ID NO: 23186 - DNA, 120 bp, Homo sapiens
actcgtaagcagatcatgaacaaatgtgttcagcagaacctgtggtatggcctggcagcaacctcgagagaaggaactgacatatccttacattttcaagtcatgtttttactgtagaaa

SEQ ID NO: 23187 - DNA, 120 bp, Homo sapiens
atccggagcccttttctgtaacagaagatggaaacttgtttttcttttcatggtttgtgtgtttggtggatgaatcagaggtcagacttggtcagactctacagtcagccctttggaatt

SEQ ID NO: 23188 - DNA, 120 bp, Homo sapiens
tatcgacattcggttaattagagctatttgagattgaatgggagacactatgtcaaaaaagactcttaaaagttaaaattcaagctttgattactaactccatgcctattttcctgagaa

SEQ ID NO: 23189 - DNA, 120 bp, Homo sapiens
attcgaatctcacagggacatttatctgttcacgagaagaaagaggaagaaaggggcccccttaagatagtaagggaagggatttagggagagacaaagatatttttccaggactttttt

SEQ ID NO: 23190 - DNA, 120 bp, Homo sapiens
tcccggccttgttccaaagccctgttgccaactgctttcagctatgaattcccaaacagattttagcacttacttccaaaaccagatgaagtatcaaaataatttctaaaaggctagtgg

SEQ ID NO: 23191 - DNA, 120 bp, Homo sapiens
caccgtccaccacctccctaccagctggtgccctgcaagtgcatgcgtggtgctttttgctttcttctaacataatcctaatcgtgatgctttgaaatagcctaagtcatttttttttct

SEQ ID NO: 23192 - DNA, 120 bp, Homo sapiens
attcgttcattctacataacaactcctacgagtttgattcagtgatctattttgggggtcctgtggatgtggctatttggaaaccattaagaggcagtgtaccagctcagggcaaagctt

SEQ ID NO: 23193 - DNA, 120 bp, Homo sapiens
ctgcgctgaaccatccaaggtgctggcgtctgccacagagaaaggtcttgtcgtgcagaatgcttttaactttacacattggtaagaaccaggagtgggctgccatttggctggcgatgt

SEQ ID NO: 23194 - DNA, 120 bp, Homo sapiens
ctccgaggactatcaccataaaagtttcatgtcactaaaacacttcctgtttccaaattgcctttggtctgatgtgaacatccaaattgtaatacagttgtggcaacctccaaaataatg

SEQ ID NO: 23195 - DNA, 120 bp, Homo sapiens
tgacgagagaggcagtctttctggatatatttacatcttattaaaatcatataattagcattcgaagagggaggagacacatcatgatgattatggccatgggttaagctccctgggtct

SEQ ID NO: 23196 - DNA, 120 bp, Homo sapiens
tgccgctgtgagaggaatatcaatggcttcaatattccattgtttgtgactgagaagcatttgcctgctgtactgggctgcttagttttttcagactggccacaaggcagaaaatgtggc

SEQ ID NO: 23197 - DNA, 120 bp, Homo sapiens
tggcgctattaaaacacctcattttaaaatcctaaacagggttgcaaataaggaaaatgcaaaattagagtccttcacagagaaaatactttttatcaaagagagacagagtgtgcgtgt

SEQ ID NO: 23198 - DNA, 120 bp, Homo sapiens
ctccgtggaagaggattctttactttaaaacatgttgtctattatgtgactccgtgctgctggtaccattgttatttaaagtagacattttcatgtttgtgcattctgtatgtgcatagg

SEQ ID NO: 23199 - DNA, 120 bp, Homo sapiens
taacgccctgaattttacattgattctcccttatttcagccccagagcaactctctgaatcagatgatgctgataactccattcttaaggcgaggctccaggaagttaaataagttgtca

SEQ ID NO: 23200 - DNA, 120 bp, Homo sapiens
caccggcagctgggagtgaggcatggaacagatttctcctcacagccttcagaaggaaccaactttctgacaccttgatctcaggatcctagcctctagaacagggagacaatatatttc

SEQ ID NO: 23201 - DNA, 120 bp, Homo sapiens
ccacgtgttagaattcccagcccagtggtcatgagtttctcacatgctgggttgcacaggccttccctatatggtcgaggtctgttgagaaattctgagtgttggaggcctttccagggc

SEQ ID NO: 23202 - DNA, 120 bp, Homo sapiens
ggccgccctcaggagagagaaatcctgctgcagggtaactccctaagattagaaaaatgtagcttcgctggccaactgaagcaaggaatgattcatttcctgtcattaacagagtgagaa

SEQ ID NO: 23203 - DNA, 120 bp, Homo sapiens
tgtcgttcacaaagttctttaagctggaaaagcacattatgtgaaatactcaatttcctgatggatggcatcaactctcctaacttgcctttcagcagcagcgttgcttctggacagttc

SEQ ID NO: 23204 - DNA, 120 bp, Homo sapiens
cctcggctatcccctggatgatgtatcgatgtttaatcctcaagttgctatataacatttctaaatatttagcaaccagattgcaagttaaaactttcatgttcaggctcttctggttaa

SEQ ID NO: 23205 - DNA, 120 bp, Homo sapiens
agacggagagctccttggaggaaaggattgaaagtgaaaccataaacgtaccagaaatgagaggcagagaaagtaccattattaaaatagtgatgttgccagaattagagacttggaaga

SEQ ID NO: 23206 - DNA, 120 bp, Homo sapiens
gagcgtagccgagtcagcaggagaaaggcaggtaatagccaaggtacttagaacagtacctggattttccacatctgttggctacctcaaatcttatttcttccttttctcctgagaccc

SEQ ID NO: 23207 - DNA, 120 bp, Homo sapiens
gatcgctttgaaaaaacttgaaagccatccagggtgcactgtaggcctttgtagacaccccatgtggagctagtctgaaaactctatagtttttctgtttggattatgtcctggggatga

SEQ ID NO: 23208 - DNA, 120 bp, Homo sapiens
ggccgtgctgtgagcagaaggcagaggacatagagatcagctgaataactcactctttgcttcttaaatgtcagtttataacccactgcttcagtggatttactgtttggatagaaattt

SEQ ID NO: 23209 - DNA, 120 bp, Homo sapiens
ctgcgataaaaatattcttcttccttcagtggctggcaaaaatttgccaaggcagctacgagctgagacaaagttttgaaaaggaaaagaacattcaagagcccaagcattcttgaattt

SEQ ID NO: 23210 - DNA, 120 bp, Homo sapiens
aaacgcaaagtttcagagcaaatagaaacacctccttaaggtgtaattaagcattttcatggactttaattatcacttatatcctgaggaaggataggggagcatgtttgcagttgtaca

SEQ ID NO: 23211 - DNA, 120 bp, Homo sapiens
taccgtccacagaacattataatcacaacttaatgatttaagggacacattaaatcattaagagggacacatttgcaatagaactgtctatgtaaaaaatactggagtctctgaaatagc

SEQ ID NO: 23212 - DNA, 120 bp, Homo sapiens
acacgaataaggattatagaaaatgtggctttagccatatgtttagactgactatctgcggaagcctagacatgatgcaatgacaacctttggaagtaagagtgacacttgatgaaagcc

SEQ ID NO: 23213 - DNA, 120 bp, Homo sapiens
gatcgggaacaaaggttctaaaatccctctcaatggctggtgttgataagggacacagggctttcctgagcaagcacatacaaagacttttatgtctgttaagagtcaggatgcatcaga

SEQ ID NO: 23214 - DNA, 120 bp, Homo sapiens
caccgtctcatttaagttttgttctccctcaatccaagttacagtgtcatttcattccaaaacaatttccctgtaaatcatagaccaatatttttaaaactatgttcctcaaactatctg

SEQ ID NO: 23215 - DNA, 120 bp, Homo sapiens
tgacgatctcgtatagcagtggtttcttctcagtggttctcaaacagtagcgtgtatcagaatgctgtgcagagctaatagaaactattgaggccaggcttcatgaataaggtctttgta

SEQ ID NO: 23216 - DNA, 120 bp, Homo sapiens
ggccgcatgctaagaacagccataaatttggtttaaaaccccgctctcatctcagtgaaattgttactaatttttaaataatagacccaggttttcattttgcactgggctttgtaaatt

SEQ ID NO: 23217 - DNA, 120 bp, Homo sapiens
tcccgtagactcatttgtttcagatgcattactttctctgtaccctgtctgcatccactctggccccaggtgctgttatctcatgcccaggcagctgcatcattgtttgcccttccccta

SEQ ID NO: 23218 - DNA, 120 bp, Homo sapiens
cctcggccttccaaaatgctaacattacaggcttgagccactgtgcccagcctattgtgtttaattttaatgagtcctgtgttctataaatacaaactaaaatattcatggataaaaata

SEQ ID NO: 23219 - DNA, 120 bp, Homo sapiens
aatcgtaaatggaagaatgggtgggggtatgaataaaacagaagtggtcatgtatcgatgattgccatgagagagtgacgggtacatggggctcaacacttgattttctctgcttttgtg

SEQ ID NO: 23220 - DNA, 120 bp, Homo sapiens
tatcgtgatagtttttattagcttcagttaaatggtcaggaagaaaggctgataggcaagggaatggattaacggatatgtgaggagaatcatcccttttcaagttcttctaacaaagat

SEQ ID NO: 23221 - DNA, 120 bp, Homo sapiens
atccgccctctttgacctcccaaagtgctggtattacaggcatgagtcaccgcgcagggcctgaatgagttatcttaagaataatatcactgaagataccatactggttaacaattacta

SEQ ID NO: 23222 - DNA, 120 bp, Homo sapiens
tcacggttttctgggaattcaggaagtactcagtccaggcagctctctgttgggttctctcatgcagttgcagtcagatgttgactctggctccagtgacataaggatcaactgtcatag

SEQ ID NO: 23223 - DNA, 120 bp, Homo sapiens
aagcgtatctacaccagcatggctgtctcagggtaatcagactttttacatggcggaagactttctccagaaaggctcaagagaatcagacaagggctttttccagccagcctcagacat

SEQ ID NO: 23224 - DNA, 120 bp, Homo sapiens
caccgccaccaacccgtaaaagccctcttgaaacattaaaattgaataccacaaccatcgtaagcatggttcccttcttcaaatagaaaacataagctacctttttcaaacacattagta

SEQ ID NO: 23225 - DNA, 120 bp, Homo sapiens
ttccgaagtcattcttccaaatagaaagttgttgctttctatttataacagaaaggaaatccttgttaacattgtgatgcatgtaccaacaacgggtttaagtgtttaaatgaaaaattc

SEQ ID NO: 23226 - DNA, 120 bp, Homo sapiens
atacgataggagctagactggggaggctgatgggaatgtgtctcctttattctatgagcttgtttgaatgctaggggccaggttctgtcggcagcactgacatctctgggtcccctccag

SEQ ID NO: 23227 - DNA, 120 bp, Homo sapiens
ttacgccagcagtgccaacatgaacatactcaagcaaatccttttacccagacagttgtaacagcaccctgataatttgtgccagtgctcaaggcttgggtgtggaatataaccaaccat

SEQ ID NO: 23228 - DNA, 120 bp, Homo sapiens
ttacgctccttgtcacttttcaaacacaagctcattttcagataagcatagtagaatgtttcagaattgcatctttagttcaactaacacattccttatggatctaaaagagttgctttt

SEQ ID NO: 23229 - DNA, 120 bp, Homo sapiens
ggtcgatctcggtaggggtggtggttacacaggtattaccaaatacctcaggctgctgggtcttctgcagtactgtgaagaatttgaggatgagagaaaagagaacttcccagtcctcta

SEQ ID NO: 23230 - DNA, 120 bp, Homo sapiens
aagcgaagctcatagagcagaaataggcaggattccagaagtgggcagccttccagaagtggtgtgcccagtattcttttattcactagtttatggacttctttcgcagggacacatttt

SEQ ID NO: 23231 - DNA, 120 bp, Homo sapiens
tgccgagttaaaatagcttttttgtgtgtgcaggtagtgtgaaagagccacatacactatcagtaaagccgctgtctgagagagttaaagaggcagacagacagttaaggttaattggag

SEQ ID NO: 23232 - DNA, 120 bp, Homo sapiens
ccacgaacctgcatcatccacaccaaagcaagttgagttcaggcagtagatgctggaggtgttaaaaatgggacttacagagctagactgcctggatctgaattctagttcctcttcgca

SEQ ID NO: 23233 - DNA, 120 bp, Homo sapiens
tatcgtgacagagatattttctgtcctatgttaagtgagactactgatagtacctgtttttatatagttatctacacacacacacacatacatatatgactatatatatgactatatata

SEQ ID NO: 23234 - DNA, 120 bp, Homo sapiens
aaccggagttttatgtggattaacccattcagtcctcaagaatgacagacgtcaaaatggacatggcagtcaggagaaagtgtacaatgtgcaaaagagtaggggtggctgccttctctg

SEQ ID NO: 23235 - DNA, 120 bp, Homo sapiens
taacgtctgcatcaatggatggatgccctgtttgtatccatcttcctggccttactttggggtctcagaagacagaaatggtgtgttctatttaccatcctagagtcatagaagatttgt

SEQ ID NO: 23236 - DNA, 120 bp, Homo sapiens
ctccgacaactgaaatgcgaagtagagtactatccccaattaatattcttgctccacaaagacttccagtgtttgtttttgcttcttttaatatgtaactctcctaagtgtgttattgta

SEQ ID NO: 23237 - DNA, 120 bp, Homo sapiens
cctcgttaatgggcagcagggtagacagagggtgcgaggacagcctgcatgccaattgtgtgtctgtgtcctgctgagccttgctgccctctctgtttttaaaaggaaattgtccttaga

SEQ ID NO: 23238 - DNA, 120 bp, Homo sapiens
gtacgttctgtgagagattcctccctgtacgatagtgtcttacttttccactttgcttgtatgttcttggaaataaagctgtgatatttaactttttgagagaaagagtcaaaaacccat

SEQ ID NO: 23239 - DNA, 120 bp, Homo sapiens
atacggcactgtactttcttccaatacattttgcatgcagtttttaggaagccctggcatatagattgaatgaattgttttaattggataattttggatgtttttggacttaaatacatt

SEQ ID NO: 23240 - DNA, 120 bp, Homo sapiens
tttcgtctcatggagtctggctctactcacgctattctatgctgggacctacctctctgcttttgcaaatcattgattacttaacccacgatatcgtttacttattacgtttattgttca

SEQ ID NO: 23241 - DNA, 120 bp, Homo sapiens
ccacgtgctctgaatgtcatgtgcagtcatacaaagcttaatggcccatcttgttttagaaaataacagcttatttgttatccacatccttcatctgaggcatcctgccttggccttaac

SEQ ID NO: 23242 - DNA, 120 bp, Homo sapiens
cagcgaatatcctcagggcaaattctgtgccctttctcccatccttttatctccttccctttgcatgggggctaaaattgccaatatgaggatgacgttttattttatttttctacaagc

SEQ ID NO: 23243 - DNA, 120 bp, Homo sapiens
cttcggagagaacctcttccatgttttgtttggataaagagtgtgctgggtgtgcaaggtgggtgttacatgtcctcgggtgaggcagctattgaaaggcaatcttatggctctttctgc

SEQ ID NO: 23244 - DNA, 120 bp, Homo sapiens
tcccgctacaccaaccccattcagccagggtcctgtattttctcttgtacacaacgaaatgagttgattgaaaatggggatatagggatatgggaataaaaatatattcctctgtcatat

SEQ ID NO: 23245 - DNA, 120 bp, Homo sapiens
agacgggtgagagtctgtgcccatgttagtttgtgcagtgcagtgaaacctgctaacacaagagattacttactgcatacccacctccatcctgacctgcacaaccctccctggctcctc

SEQ ID NO: 23246 - DNA, 120 bp, Homo sapiens
attcgtatatgatatgtagtaaatgttatatttaaaccatcatatagaaaagccattattgggtacactgtacaaatctgcctttataattgagtgtactgttctactaaaagcagcttt

SEQ ID NO: 23247 - DNA, 120 bp, Homo sapiens
gcacgacttccagtgaggcaaggcagtaagccccagaagagaggccttccatgggtagataggaactcaaatgctttcccaggctggacccaggagactgtgtcagctactgtgatatgg

SEQ ID NO: 23248 - DNA, 120 bp, Homo sapiens
acccgtctaaggagttagggtatccccaagagctgtgatgggaggtggaaattcacacctgtgaaatgggaggtatgctgagttgaacgggatagcccaaggcctgtccatgaactgagc

SEQ ID NO: 23249 - DNA, 120 bp, Homo sapiens
gagcgtgactatccagggaaagcccctggtttgtatttagtcaagttggccagagaagactggatctaagcgggaataaaatttgctgacccccatctcagaggttaacattttcatttg

SEQ ID NO: 23250 - DNA, 120 bp, Homo sapiens
caccgtccccagacaccacataatggaaaaagcaagaattttctgcataagcaaggccttaaaaaaaaaaaagccagcctctgatgggacttctttcctgccagaaatcccactggtcca

SEQ ID NO: 23251 - DNA, 120 bp, Homo sapiens
tgtcgcaatttttacaaaaggccacgatgaaagagtaaggcccattttgagccctttgcttctgtattatgtgaaacataacttgtatgtttcacatatgttcttggtatcagaagaatt

SEQ ID NO: 23252 - DNA, 120 bp, Homo sapiens
gggcggagttagaaagtcctgttctaccaaatttgtgctaatagttgcacctttctttctttcccagaatggtcactggagaaaatgtgtaaaccaactgcaaacaagtttatccgttgc

SEQ ID NO: 23253 - DNA, 120 bp, Homo sapiens
attcgttaacctgaaggagctactgtaccatcaagactagctcccagcccagggcttcagcataaagcagctgctcagttaattttggtggatcacgggcagaaacaagttacctttggg

SEQ ID NO: 23254 - DNA, 120 bp, Homo sapiens
cttcgtggacaattgagtaatttcagtttcctctcttcactcttgtttacttcctgctcttctagcatcaagtgttaggtattctgttctcttacaatgagaagattaaacagctgtagt

SEQ ID NO: 23255 - DNA, 120 bp, Homo sapiens
tggcggggatgcagtacattagtacttgtcctgtggtacagagcatgtgtctcagggtgtggccactccagggagagggaagacgtgctttatggggcctcctcagccatcactgtgata

SEQ ID NO: 23256 - DNA, 120 bp, Homo sapiens
taacgcaaggcaatctgaacaggtggctgatagctgctccatccagaggaagagccatgaagttcccccgacccacacatttcaccctgtcttgtctaccaaaaatcacatgaaaatgca

SEQ ID NO: 23257 - DNA, 120 bp, Homo sapiens
ccccggtaattacggtttaatgttgttctttttacccctttggctggctggctgtgcaaaggcaggccccacaggggagtaatgtatttgtgacagccagttggggtggggagagatggg

SEQ ID NO: 23258 - DNA, 120 bp, Homo sapiens
tatcgtataatctgagtttgggaactgcttgccacttccagtttctgacacccaaaacacattttatgcttagagaaaacaatagcaccctgactttttagaagacatagttttcccttg

SEQ ID NO: 23259 - DNA, 120 bp, Homo sapiens
gcacgaggtgctaaattgcttcaaaatcctccatagctcgtggggatgctacctttttagtaggagtttgaagcccagaatgcactttatattataaccaacacagttgaaaaataggtt

SEQ ID NO: 23260 - DNA, 120 bp, Homo sapiens
tttcgacctctgccctctttaagttattttcatttgtcttgtagccagtatcagacatgttaatgaccactaactttgtaaatgaaattattgcagctcataatgtcaagatgtgaacct

SEQ ID NO: 23261 - DNA, 120 bp, Homo sapiens
agccgaaccataccagtctttccctgatcattgaaccttctgtcttctgcagtcagcagaccgtctctaatgagaggtgcacagacacttttgatgcttattttaagggaagccagtggc

SEQ ID NO: 23262 - DNA, 120 bp, Homo sapiens
aaacgccaggatgccaagttcctagtattgcagcaggttcttagtacataacaaacactatcagtgcccccagctcaacttcgactaaatgccttccaatagagttaagctgtttttatc

SEQ ID NO: 23263 - DNA, 120 bp, Homo sapiens
tgtcgccaagtgcttgtccatcagtgtcacgtaaagattttttaacctcacatatggcatcatgcagtttgtctgcctaaaaaggcaacctagattcacagagtggttacaattggcttt

SEQ ID NO: 23264 - DNA, 120 bp, Homo sapiens
gagcgttgtacagattaaatgagattaaacgctgagcagagtttcttacactaagtgttcactacatgggaattaatcagcagtagtagtgatttgtaatcagcctaacattttctgtcc

SEQ ID NO: 23265 - DNA, 120 bp, Homo sapiens
tggcgaggtaggaaaggctctggcatgggcatcaggaggcctgggtcctcggcttgaacttcctgtgggaccttgggcaagttgtggctcacataatccctccccactcatcagtacaca

SEQ ID NO: 23266 - DNA, 120 bp, Homo sapiens
attcgttgtggtatcagaccaaatttgatatgatagctagacccgccggtccgtcagtatcatttggggtctggtgtaagatcagcctgtgaaactcaggcatgtaggcaacaagttatc

SEQ ID NO: 23267 - DNA, 120 bp, Homo sapiens
acacgcagagggtatttatttactaaatacttacagaatttgtgtttgacattgacattttctagacaaggttccattcctctctttgggtgtagtgtactgatgtgttaggtcagggtt

SEQ ID NO: 23268 - DNA, 120 bp, Homo sapiens
taacggtgttggcatcacttaatgcaaagaatgccactgtctcccacacaccgctggtgcccaaggactgtcgaggcctgtccatgttagtggtttgggaagggctgaagtttggagaga

SEQ ID NO: 23269 - DNA, 120 bp, Homo sapiens
gaacgagtggaaaatgcagcatcggatgtgtcatcaaatattcttcctacaacctgggacacctagttcattggtgttctggtcaacattgaaggctgaatcctcctttcttttgaaata

SEQ ID NO: 23270 - DNA, 120 bp, Homo sapiens
atgcgtgtcttggattcactacttttaaacctttctgctgatctttatccttttcttcctaagcaatactgatttctttcaatgaaaaatgatttagctagtgaaaaactgggattgggt

SEQ ID NO: 23271 - DNA, 120 bp, Homo sapiens
aaccgaggcccacagatagaggttcgctctgtgctacccggccagtatgggcccaaaccgggtctgcccaggagccgcctcctacactccagcccattctatctgccatgccctgctgcc

SEQ ID NO: 23272 - DNA, 120 bp, Homo sapiens
cttcgtgagcaatgaggctgcttttagtgtccaatcaaaaactcctctgaagtttccagcatgtaataaactaaaaatatgtgaaattagcccccatgggtcacatatagtaaacaaagt

SEQ ID NO: 23273 - DNA, 120 bp, Homo sapiens
tctcgagtaactcagcttttccaaattgttttccagactgtggaattgggttaatgcctctctcctggggttggtatgagatttaatgaactgataatttctctgctatctatcgcatca

SEQ ID NO: 23274 - DNA, 120 bp, Homo sapiens
tgacgccatgttcccagccagcagagctacggcctctaggagcctgtaggggctaaaagggacacttgggaagttgccaccctgatgtgggtacattgcttggagggagaaaggtgcctt

SEQ ID NO: 23275 - DNA, 120 bp, Homo sapiens
atacgtcgctgccccaagcagtgccatccactttatctgcactcaagtaggtccttcccgttttatatgcaagttaagtcgacccattcagtatgtttatgcctttaagcttcctgtcac

SEQ ID NO: 23276 - DNA, 120 bp, Homo sapiens
tgtcgtttggctttcaatatttttttcttgaatcattgtgttatctttacccaattaatgcttaggcaggtaaagtagatttctgtaggcaaaccaaggtaaaaataagtctatttaaca

SEQ ID NO: 23277 - DNA, 120 bp, Homo sapiens
atgcgtagaactaaacgggcaagccacactaggttttgtcaaacaatagttttatttgtgtcctgagagacacaggtattttggtatgtatgtgtttaggaggggtatatagtcagtttt

SEQ ID NO: 23278 - DNA, 120 bp, Homo sapiens
atacgtaaacctgggcttatttatatacttaaatggatgttttccttagcataatgtcagttaagaccagtggatatggagcaaataatttgaattaccctaaaaggccctctgttctaa

SEQ ID NO: 23279 - DNA, 120 bp, Homo sapiens
cgtgcatgggcgtgtggaaacagaagggaaggacttgaggcacaagccaggatggagggattctaagtaatgcattgtgatcccctacgcatgtgttggccaggatgctctccaaacagg

SEQ ID NO: 23280 - DNA, 120 bp, Homo sapiens
aaccgctaggcagcctagggcctcccttctgggcaattcttgtgccagatgtaatgcacacctcaggggcctgagcgagggccagggagggcctctccctttttccatcatgtctaattg

SEQ ID NO: 23281 - DNA, 120 bp, Homo sapiens
aaacgggggactgaacagtttgtcgacgtgacagtcctgtggcactttctcagcagtattttgaaagaagcactggaggcagcgcctcatgctgagaagcatgaaacaggcgcaggggtg

SEQ ID NO: 23282 - DNA, 120 bp, Homo sapiens
ttacgaagacatttttctctcgcaaatgcaaaagctcgagctgtgtgggccatcaatttctgccccttcatacagacaaatcagggctgcatggtggctcggccttcctctgctgggaag

SEQ ID NO: 23283 - DNA, 120 bp, Homo sapiens
ggccggccagcagggaagggagtcctgtaggtggcagcttctgggggtgctgccagaaggcactgggtgcttacccttattgatattgcagagaaaaaaaatcagaatattgctaagtag

SEQ ID NO: 23284 - DNA, 120 bp, Homo sapiens
tgacgtgaagcccacacagctatccagagctgaaaccaatgccaagcaagctcaaaggtttgggctttatgattagacaccccacttcgctttgcttacctgccaaatcctgtaagtgtg

SEQ ID NO: 23285 - DNA, 120 bp, Homo sapiens
tagcggagctgctgggagaaactctaagccatgcttcagtgaatggaagcctccatcagcaccacatctcccttgagaagcatctggaatgatcttagttattgtctttagctatatcca

SEQ ID NO: 23286 - DNA, 120 bp, Homo sapiens
ggccgctctcagccttcgcttctgatttcatatacccagccaagcctttgtctagcccaccatagctgattattcaggctgaacatatatccactggctcaatccaggcctatgcccatc

SEQ ID NO: 23287 - DNA, 120 bp, Homo sapiens
atccgaggcccttgtgctggcgcagagcctccagtgtctgttgcacaatttgggcaccacagggaacacatgactggcatccacaaagacaaagatggaaaatatgagccatccatttgg

SEQ ID NO: 23288 - DNA, 120 bp, Homo sapiens
attcgtgctgccaagctctgaccagaaagatcttggcctgtttactgcctgatgcagtcagtccagactcagggtggctcaggtcatggtgatagagccagctataatgagatttagaca

SEQ ID NO: 23289 - DNA, 120 bp, Homo sapiens
aaacgttacgttctgcttttcttttttatttggttttcataggagaaactgttttctgtccacataaagtgtgtacgatcttttttccagaataagggaagcaggaaaataggtgaagaa

SEQ ID NO: 23290 - DNA, 120 bp, Homo sapiens
agacggaaagaaaagaaccagtgcatacattgatctcatcctatgctccccccaaatctttcaagttaagtgttatttctcccaccttgccaactgaggcagcctcaaaaaggctaaagg

SEQ ID NO: 23291 - DNA, 120 bp, Homo sapiens
tttcgcctttcagcacataactgtaacctcatgcactgtctgagtttattttcaaccccctacacaagggcttattgtttataataagctgtcctctaaacccatttccaggaaaagatt

SEQ ID NO: 23292 - DNA, 120 bp, Homo sapiens
tcccgggctgcacagtgaccatgaagactccaggccaaatgtcaagagccaacacaggggagggggcaataaattttccagtctttgttataatttatattagtgcccagtcagtctcag

SEQ ID NO: 23293 - DNA, 120 bp, Homo sapiens
ctgcgcatgtttgtggagaacagagtccagacctccaaggctggcctagaaacattctccctagcaaagacttaagtctccgtttcacaaactgaatcagtgcttttcatgattccaaag

SEQ ID NO: 23294 - DNA, 120 bp, Homo sapiens
tcccgttcgacttttttttcccctttcgtcattcaacttggaaacattcctttttgtggattttcatgaactccagcccaacaccaggtgcaaattgaaaaaatcccactggccaaattt

SEQ ID NO: 23295 - DNA, 120 bp, Homo sapiens
tctcgacggtgcctgcctctccagaccccccagcctagaggctcagatgcatgtgcctgtgtgaatctggggatttgtaggagaggaaagccagagagattcctcattgatcttgaccta

SEQ ID NO: 23296 - DNA, 120 bp, Homo sapiens
cttcgactaccccctctccttgtccttctccaaattccttaagattctatgcccctaactcaagctttacaaaatcagagtgatattccagatgcttgctcactgagaaactgagagacc

SEQ ID NO: 23297 - DNA, 120 bp, Homo sapiens
gaacggcacagtcatgggcttcatggtgctttgttgcttgggaaccctgctttcttccctcctcctcccccagaatctgtcctactctcccttctgggagctcagctacggcaggtggca

SEQ ID NO: 23298 - DNA, 120 bp, Homo sapiens
ccacgctgtgccctggggaagtccaagaggccctcatctcaggaactcccaagcccacagcactaatccccacagcttcaagaggagagaacattcctattttaagagctcctgggtaac

SEQ ID NO: 23299 - DNA, 120 bp, Homo sapiens
taacgttgtgctcactgaggtctgagtcactgctcttctttaaagtttttgaaagaaatctatttctcagccattagctttgcatgttttttttttctgcctcaaagatcaattggttta

SEQ ID NO: 23300 - DNA, 120 bp, Homo sapiens
ctccgcaacgtaggctggaatggctccacgagccaaaccacttgacagaattttaagaaacagaaatctattgctgtttcctttctatactggaaatatacaagatattgaggctactca

SEQ ID NO: 23301 - DNA, 120 bp, Homo sapiens
atacgtgtatgttctattgccatctgatgccatcctaccccacatgcacaatgccagtgtgggggctacaaagtacctcggtgcctattttaatccatttaggccactctaacaaaaata

SEQ ID NO: 23302 - DNA, 120 bp, Homo sapiens
caccgaagtgagtcctaaattataaccggggttgaggggggacttggaggtcatttagaccatcacttcattttgcagatgaggcaactttagcccagagacatgtcttgcccaagacca

SEQ ID NO: 23303 - DNA, 120 bp, Homo sapiens
ttacggagcaccttctaaatactaagcctttcttgagaatacacaaagagtctctccaaaggtcccagcccatgaggcaacaggagggcagatcttcgcataaatcacacatcctttggt

SEQ ID NO: 23304 - DNA, 120 bp, Homo sapiens
aaacgtttccaggcacaaaagtagtataaccctctttgagccatgaatggttatggtccgttgaacaaatccttatttaggcttttctttctgaagaatgtccccgttggagttgactaa

SEQ ID NO: 23305 - DNA, 120 bp, Homo sapiens
ctgcgggaggcagtgttagggcattactttatttctgagcttctctccttgactaaccccaaggccaaaataagtaaagtgaattcattagtaagcatgtctaacacccaaccaatacca

SEQ ID NO: 23306 - DNA, 120 bp, Homo sapiens
aaccggaccctgccacatcagacatgacaaggcttccaagcagtggacaaggcaaccatccaggagactggcagtcactggctggctctgccaacaccccatgcagctgtcagcatgaca

SEQ ID NO: 23307 - DNA, 120 bp, Homo sapiens
gtccggggaacacaaacaatgccattactagactccttgaaagggaaatggccatccaggtaccccttcctgaacccaggcctggggcctcaggcctgctggccagtgggcagcctgctc

SEQ ID NO: 23308 - DNA, 120 bp, Homo sapiens
gaacggctgcaagcttcctgaaggacggggctcaccctcaccctcttgaatctactgcagtggtcacccttttatcccatcctctgacctccacccctcccctctagccctatcattgac

SEQ ID NO: 23309 - DNA, 120 bp, Homo sapiens
aaacgtgttcccaaaatgatgtgtgtattttagaacctccacttgttcctgcagagttgactatcagagaatttctctgacagcccagttggacgcatttttaggtgttctccagattct

SEQ ID NO: 23310 - DNA, 120 bp, Homo sapiens
gaacgagagaaactctcaggttccacattagtcaacgacagaaccatccagagaatacataagtgttctggagtcaaagtgagcaaataaaagatggatttctttttgtttccttttctt

SEQ ID NO: 23311 - DNA, 120 bp, Homo sapiens
cttcgtgtcttaaagggatggccaacctcccttctccccagtccttccttgtgggtgtttgtttattaatggagtggagtgaaaccctgaaagctgtgcccttgctctgaagttctgatt

SEQ ID NO: 23312 - DNA, 120 bp, Homo sapiens
caccgtggttatctactgatcaaggacagcatgcctgagagagagagcagccagagcctctgcctgtcaagacaagcctcattccgcctccactcgctctgccctgccagtggctaattg

SEQ ID NO: 23313 - DNA, 120 bp, Homo sapiens
ttacgacaaatcctcggaggaacaaaaaatccatttcatgcacacattcccctgcttgagtctttcttccattcaattcccaattagctaaatcttcagcacccaaagaactaagcagat

SEQ ID NO: 23314 - DNA, 120 bp, Homo sapiens
tgacgtccagcaatcagtctagtgtctctatgcatagactcagaagtactgtcggtcttctataaacccatcccctgcaaaatggaccagagcattggtttgggatttcctgctgcccaa

SEQ ID NO: 23315 - DNA, 120 bp, Homo sapiens
ttacggcccgatcatctcacaagcatatcccagaaaactgggatatatgtgtgtggtttctaatcttgaaacacaggacaaggccaggatgcctcatacactgaagaagggaaaaactat

SEQ ID NO: 23316 - DNA, 120 bp, Homo sapiens
gagcgacacaccaatccactgcagagaagagaaacaccacactcggtgcccggctgtgaagtttaaaacctttcccggagacatttgtatttttcccaaaaggagagagccctctgctgg

SEQ ID NO: 23317 - DNA, 120 bp, Homo sapiens
caccgtgctggggaagggtgaccggactgtccacgttaagtcacccttaccggctgtttgctccttttcaggcagcaaatgtgtaagttattaccaactggctaagttttcatccgtggc

SEQ ID NO: 23318 - DNA, 120 bp, Homo sapiens
caacgactggcagttgccacccactccagccatgtgcctgttctcacccacccacagggttgccaaggcctgagggaggtggcactggcagaaaccataattagggatttcatcatatac

SEQ ID NO: 23319 - DNA, 120 bp, Homo sapiens
gttcgactttcaaacatccaactaactttcaaacacatttttgggaacccattagatacgtaaggaagacactacctcttctgaactgtagacatggccttgaaattcagacaagagcat

SEQ ID NO: 23320 - DNA, 120 bp, Homo sapiens
acacgtgatgaaagagaacatggaggtcagcaaacatggtccagcaaggtccaggttgcaccaaggcaagcacagacccagaagctatgagggaaggaaagggggaagtacaaagagggt

SEQ ID NO: 23321 - DNA, 120 bp, Homo sapiens
tttcgtctttcagataaaggcagtcttggggaggggaagagaaaagtgcctggcttctccaaattagctctgaaataaaagtcactgccagatgttatataaaaggtgacgtaatcctaa

SEQ ID NO: 23322 - DNA, 120 bp, Homo sapiens
tgtcgatcccattttctatacccacatcatttttacataatttttcctgcctgacagacatcttcacattttcacagcaacccatcaagatagcgttacaacagcacaggaaaccaggct

SEQ ID NO: 23323 - DNA, 120 bp, Homo sapiens
caccgtgttccttcagaacacgtaccaaacctattcgacaagtaggaaaatggagaaatgtcaatctaaagttattcttgcaattcttttcgttttcctaataaattcttggctcagagt

SEQ ID NO: 23324 - DNA, 120 bp, Homo sapiens
attcgtaccaatgaagtatctagctactgagatgctttaagtgcaaacactgagagacacttcctcccactcgccaggtgctaagcatccttccctgtctccctgggcactcatggcccc

SEQ ID NO: 23325 - DNA, 120 bp, Homo sapiens
ggacggttcaaaggcatttgccttaaggtcagtgtgagaggccaaagacactgagctcctagttactagtcagaaacaaacttatgcgactcagaattccagtgggataagaaaatgcct

SEQ ID NO: 23326 - DNA, 120 bp, Homo sapiens
tcacgactaatttggctttgaaatttgattctttgatttaatccatctgcaatatttattcctcatagctattatcagtgcctttgcagaaagtcatctgttgcctgaggaattagaaga

SEQ ID NO: 23327 - DNA, 120 bp, Homo sapiens
ggccgacccctcaagaacccatgcagaatcacaaactgatcctcccctgggttcatcagcatgaaggatgatggcattcttttctcgatccaaataaaacccagcaaacccttcttcaag

SEQ ID NO: 23328 - DNA, 120 bp, Homo sapiens
caacgtccctatttatactctggtggtacacatgtgtatatatagcaaaccagccattaggaaagaagctttgcatctttccacataatccaaaataatggcaaattatgatgtggtgat

SEQ ID NO: 23329 - DNA, 120 bp, Homo sapiens
ttgcggactggatctattcaaagctaccttctttttcaattttttatattttattccaccttgccaatgtactttccttataattcattctctagctcagctggacttattgctacttag

SEQ ID NO: 23330 - DNA, 120 bp, Homo sapiens
catcgctccacaggaaggttttccagggcagatgcgtgctcccttggcaataaaagtggtggagattgcacatccattttaaaatcctgaaaggtagattttagtaaatctcaacttttt

SEQ ID NO: 23331 - DNA, 120 bp, Homo sapiens
agtcgggggaaaaattagtgaaagattattatgcaggattctattcaagtgtgccagaacagctttaaaatcaaatgcaagcattagagataggaagagactttaggaagaggaagacaa

SEQ ID NO: 23332 - DNA, 120 bp, Homo sapiens
caacgtaggaagtaagagtgaagagaaaatccaggaaaaatagggttgggtacagtggctcatagttgtaatcccaacattttaggaaactgaggcaagacaatcgcttaaggccaggag

SEQ ID NO: 23333 - DNA, 120 bp, Homo sapiens
ctccgatgtggcagattccaaactctgatcctcactaacaaatcttcaaactgaaaaaataagaggcttatttatggctctctcaaaaactagtatccaaagtgatatggcttggatatt

SEQ ID NO: 23334 - DNA, 120 bp, Homo sapiens
aatcgatgggtacacttcttcaaatgtggacagaagattagcccttatgaactcaatctctgactctgagttatttcacagtagcaagggcaaaaaaaatcttggttgtgttaatcacat

SEQ ID NO: 23335 - DNA, 120 bp, Homo sapiens
ctacgctatgcatgttttgcttttggattcagttggccactgacaagtatgtgattgtagtcaatgtttaatgcaacaggaaaacaagttacaggacatcagttccaggttcttactggt

SEQ ID NO: 23336 - DNA, 120 bp, Homo sapiens
ctacgacacacttcaagtaagatatatgtgatagccaggtacattttataaagtgtatctggtgcatgattctcctgataaactgagatttttggcttaaagagtaaattgatcttgggg

SEQ ID NO: 23337 - DNA, 120 bp, Homo sapiens
aagcggggctgaggaggtcctctgtggaagctatcataacatttctgagctacaaggatatatgatcagctcctatgatctagagttggcaaaattgtgcacgtgtattcagggtgggat

SEQ ID NO: 23338 - DNA, 120 bp, Homo sapiens
caccgtgctgctgcagtccccaaacactgggtgctgctgctggagatgattccctgctatcccagctcctctgcttctcctgtttcacagtctggtgtgggtatgtctgtctgatgaggc

SEQ ID NO: 23339 - DNA, 120 bp, Homo sapiens
tctcgaatgtttatctccccttttccactctacgcccaaagaatgtccagccctgtcaggcaagaacaaaagagtcagtatcatctctgctacctaaaaataagagctgcattagtcaga

SEQ ID NO: 23340 - DNA, 120 bp, Homo sapiens
gaccgctctaggcccgttttaaggatgcctatattgaaggaggttgttaagttactaacaaaaaagatttcagacttacggttctttttgcctaacaatcacttcttaagaattctatta

SEQ ID NO: 23341 - DNA, 120 bp, Homo sapiens
tcccgaggtccctggctgaaagtgaggagggcagtgaacacatcctgtacctccagaacagagtaacccatggatatgccttcccctggagcaagaggtacccaggaagctaccaggaag

SEQ ID NO: 23342 - DNA, 120 bp, Homo sapiens
tctcgagggaatgcttctgggatcaaaagctttggggcaggcaggtggtgcaaaagggcagccagagagtttataacccacatcagggaacagcaaagtacagagtttcctaaaatcgag

SEQ ID NO: 23343 - DNA, 120 bp, Homo sapiens
gggcgaaagcatgtaaattggagagagtgatattttgttctggactgcaatgaacctttaatagcagttccaataaccaaaagtgtccagaaagcaaggagttctgccaggttgaaggca

SEQ ID NO: 23344 - DNA, 120 bp, Homo sapiens
agtcgtcccgggaagacacgctgtcacagcgtgacggagggcaacagtggggaaactaaagctgcttcctgattggaacttcctgagatctgcctgatcaaggcaagacagacctgtcca

SEQ ID NO: 23345 - DNA, 120 bp, Homo sapiens
tcacgaggagacagcatctaggatataaagagaagttctcagtgaacttggactgcggcagccgaaggggaggttgacgacagcaagccagagaaatctgcacacgtccacaagcacatc

SEQ ID NO: 23346 - DNA, 120 bp, Homo sapiens
caccgtggcagcattttcctggacacagcacagtttgcccaatctttacatttaaaatctgctgttctgtctctcacaaatgcttggagaagattctgagaggcgcacacgtgacatgtc

SEQ ID NO: 23347 - DNA, 120 bp, Homo sapiens
aaacgcagaggccttttgagggagagggcgtagggtcattgagagagaggtgtacctctcttgtttattgacatttctatttcttttttcattctctcttgttcctgagattaaaggcct

SEQ ID NO: 23348 - DNA, 120 bp, Homo sapiens
gtacgactattacttctattttacagagacagaaagagggaggttaagtaactggtttaaagtcatctggctagtgagtgacagagtcaggatttgaaccccggtattctaactctattg

SEQ ID NO: 23349 - DNA, 120 bp, Homo sapiens
gtgcgaagccactcagcatgttcgattttagaaatggaacctagtattctactgttgaatacgaggcaggccaggtaagttaggtttcactgcatcctagctatgcggttgatattctca

SEQ ID NO: 23350 - DNA, 120 bp, Homo sapiens
ctgcgggtgacttttcctctgtctctgaggaaatgcctatatcaaaaatctctgtttataataccaagtacctcagaaaatgccatctggtgctcttggacttaacgttcttatacaaat

SEQ ID NO: 23351 - DNA, 120 bp, Homo sapiens
tcccgaggcttttcttgccttcctgccaaatgttaattggtacctgttcctgtaagtcttgaattctccttttccagctgcagagatcagccttaagggcttttttcctttacttctaaa

SEQ ID NO: 23352 - DNA, 120 bp, Homo sapiens
ccacgctggttttttaaaggtttgcaaaataccttcagtaggtcctgctgtcagtcaccatatgtgcctgaacctcctacagtattgccatccagctcctcctagattaaaaacccacac

SEQ ID NO: 23353 - DNA, 120 bp, Homo sapiens
atgcggcagagtgtctgagaatagtgactttctaatccctagtaattcctaggaaatgtaattgtaggaacaaatttcataaagtatcttcagtcttacataaatctgtgtaaatcacag

SEQ ID NO: 23354 - DNA, 120 bp, Homo sapiens
tgccgtttggatagcagagctctagctggaactgcaacctgacttccctctggagcttcctgaaggcagcttgctgattccctggtggaacccttgccttcccagactgaccaacccttg

SEQ ID NO: 23355 - DNA, 120 bp, Homo sapiens
attcgggacaatgtcaccccctttgctgtgtcaagaacttgccccttgaattttaaaagcatctgcctttcataagaaaactcaattttctgctgctgacttatttacacacagagttgc

SEQ ID NO: 23356 - DNA, 120 bp, Homo sapiens
gcacgagtcctgttgaatggtgcaaacgtcccctgcacaaaagcactattaggatgaatgagaaatgacaaagtgagaactggacataatttgttaacagcttccgaagttgatgaggat

SEQ ID NO: 23357 - DNA, 120 bp, Homo sapiens
ccacgaggctggtcaagatgactaggaagattataaaccagaaaacttccgccttggtatttgaaaaccacatggaattttacaacattcttgcctattaactgctgggaagggcactac

SEQ ID NO: 23358 - DNA, 120 bp, Homo sapiens
actcgcctcttaggaatgtgtatgagtgagggaacattcattcactctttttattcatccattcatttctcagtttgtcctttcattcaaaaaagagtcactgaatcttatctaccactg

SEQ ID NO: 23359 - DNA, 120 bp, Homo sapiens
caacggaggactcaacaggagacatgacaaaggcgctgcccccgtaagacttgtggctaataaaagaggcaaggaatgaaacaagcaatggcaacacagaggaaatgcaggactgtggca

SEQ ID NO: 23360 - DNA, 120 bp, Homo sapiens
ggccgcagggggccggagaggcaaggagaaaatgctctaggcagggagggggcatgagctgggagagtagcaatgggcactgcttgcaggatgacggcccaagggttagcatcagatcct

SEQ ID NO: 23361 - DNA, 120 bp, Homo sapiens
ctccggtaactttcctatggggactccatgtggacgcattcctgtgtataaatatgtgtgttctggataatagtaatggtagcctttgggttcaaagagaaaatgctggacttcataaaa

SEQ ID NO: 23362 - DNA, 120 bp, Homo sapiens
agacgaatagtgaacacaggaaattgtgctgaaaattaatcgccctcagcaatcaatggggataggccccacacgagagaaggtccgactaaggatggagcgcactgcgatgagaccttt

SEQ ID NO: 23363 - DNA, 120 bp, Homo sapiens
aaccgtgctaatggatatcagaacagtccttgtggtttttcctatcaaatctgttaaaaggggaagaaggttcctgttgttaattgcaggggatctcctattctttgttttaaagaaagt

SEQ ID NO: 23364 - DNA, 120 bp, Homo sapiens
aggcgaatctcctccgtccagatggcttcctcaggcaggccaatgtaagaacccagacactcacccctgctgcctcttaatgccgcgccttgattgttgctaacgatccccagctgtctt

SEQ ID NO: 23365 - DNA, 120 bp, Homo sapiens
tttcgttgctggctccttaacctctctctgccggccacatctgcctgcaactctgagaggggaagaggagatgctgacaaaagaggcatccaagagatgctttggaggctgcccccaaag

SEQ ID NO: 23366 - DNA, 120 bp, Homo sapiens
caacgcagatggggtcccgagtcgtgggactgtgcaccaggaacttgattagaaattaattctccacaataaacttcaggaaaaaatgtgaatgtcatatttcatatcaaggaaataaac

SEQ ID NO: 23367 - DNA, 120 bp, Homo sapiens
aagcggtgccctgagatctcgagaagttctccagttgggctttaaaaatccccacagatccaaagtattcttgggggtcaagggggtctctacaatttttcaattttgtgtttccacttc

SEQ ID NO: 23368 - DNA, 120 bp, Homo sapiens
tagcgtacagtcacattggtggcaagtagtactttgttgtcatggactaatgggtgttggaggaggtggggagacagaaaacttacgcaatagaagtgattttccaagtgaagtactact

SEQ ID NO: 23369 - DNA, 120 bp, Homo sapiens
ttccgtgttagtggttttgttgtgctgtgcattcaagaataccaaggtttgagttgtaatttgttagtataaattcttaaggccagagtgacctttttttagactagaacactgttgcac

SEQ ID NO: 23370 - DNA, 120 bp, Homo sapiens
ttgcgggccaacactaaattcattcatttactcgactcagtacattgactgagtactgattctgtggtagccattaggatacagtaaagaacagaagtagctcagtccctgcccacgtgc

SEQ ID NO: 23371 - DNA, 120 bp, Homo sapiens
aatcgatagcaccagaggttattttgatgttctctgggaccttcgtattcaaagagtagctcacattccagcacctgcagcatcaccggcagcttctcagaaatgcagagtccaggtccc

SEQ ID NO: 23372 - DNA, 120 bp, Homo sapiens
tcccgcctcagacctgctgagtcagaacctgcattgttacccaactgacccttatgcacatcaacatttgaaaagcccttttctcttaacatgttttaagagaaatggctgccttttcac

SEQ ID NO: 23373 - DNA, 120 bp, Homo sapiens
agacggcagactggaaaaatatctccacgacttggaactgttcttgtttacaaagctgtgtcaactataagttcaaaataagggcatacttctttttcaatttctatatgaaaagaaatc

SEQ ID NO: 23374 - DNA, 120 bp, Homo sapiens
aggcgtctcttatccaccaagttaaacttgtctcatcccactttgccctagagccctcagaaggattgcaagcagagtgcagcctcccctttgttctggctgcagctgtctctgcctgga

SEQ ID NO: 23375 - DNA, 120 bp, Homo sapiens
taacggtcttgaccgtgactacttaccgagaggctatgaaaggataaacaggcagccacatgaacgcaatgctctttaattacgtggtcccaccatggaaggaaggccggcagacaggca

SEQ ID NO: 23376 - DNA, 120 bp, Homo sapiens
gaccgtgcgtctcagggctgccagtgctgctggtgaaacaggatttcctttgattaaaatagactttcatataaataacagcctcaagtctagaggtggtcaaatgtaacttccactgca

SEQ ID NO: 23377 - DNA, 120 bp, Homo sapiens
cctcgttttcttccagtttttaccctacctatccagagtcggcagtcaattggttcccttggttaacgcttggtggcagtgggccttgaggcttaaatctggttgttgtgtgggtcacct

SEQ ID NO: 23378 - DNA, 120 bp, Homo sapiens
gaccgagatgttactaacccagccaaattcttttatccaggccagcggggaaccagtgacctgaacgtgcaaggtgagttgtctgggtacctcgccactggttgtaagctaatctgtaga

SEQ ID NO: 23379 - DNA, 120 bp, Homo sapiens
actcgtatgtggggcttaaaagatttgattttatgggcgtggtgaatacagtagtggttactagaagctgggaagggtagtgggatgaagaggggttggcaacaggtacaaaagtacaat

SEQ ID NO: 23380 - DNA, 120 bp, Homo sapiens
acacgagggactggggaagatgctataaccacagcgcgtgatgaagggaagacagccctcagccaccttcccagcctgtgccggagcacacgcgcccccgcacttactgacactcttcac

SEQ ID NO: 23381 - DNA, 120 bp, Homo sapiens
tcacgtgtcggatctgactcctgaagcaggtatcacgagaaagagcaaaatgcccatctttgcctttaatattgaaaccagctgtgttgattcctctctgaccacctctccctctgcctc

SEQ ID NO: 23382 - DNA, 120 bp, Homo sapiens
tttcggtgttctaacttggggggaaataatatagtgactaaaaatgcaccaagttattacttagaaacaaaccctttgagacataagattccagacagtggcagcctctgatagctctct

SEQ ID NO: 23383 - DNA, 120 bp, Homo sapiens
gaccgagtgaagttcagaggtcagtcccttttattcccccttaatggttttgtgctggacaatacctaaatattacaatatggacatgttttttcctattatggagcaagcttcctttct

SEQ ID NO: 23384 - DNA, 120 bp, Homo sapiens
catcgtatgttttacttttggtttccaggcaaggctgagcagggaattttcagttttccctgcccagatgggtgttttttcctgaaggcatcatttattgtgtagcgaggagacagggct

SEQ ID NO: 23385 - DNA, 120 bp, Homo sapiens
ttgcgttgggaactactgtatggccacaaaaatgagtgcagaggtgaggatgcttgtccagccgtgccatctttggaaagggttgaacattcagttgctaaactgcagccaactgaatca

SEQ ID NO: 23386 - DNA, 120 bp, Homo sapiens
gttcgaaaaacaataaacgagaaaaaaacaagtctttgctgcatggtgcccacttctgtctaaaccgctctgaagtccagatgcaagctgtcactggagcatctctggagagagcgtggg

SEQ ID NO: 23387 - DNA, 120 bp, Homo sapiens
aaccgaaggggaaggaggaacagccctgttggcctagtctgcccttgactagtctggtggtggttgaacaaagacgacgttgtatgcctcttgccctataaaatcctgattaggaaggaa

SEQ ID NO: 23388 - DNA, 120 bp, Homo sapiens
tgccgttcagtgccatgtctctccctccagatcctgtagtttttagccatgtatcacagtcattccacctctgccaatgcagtgacttttgcctttttgacagtacctggcacagattat

SEQ ID NO: 23389 - DNA, 120 bp, Homo sapiens
attcgtaagttgcctcccgccacatccactgccccttctcctgccacagcacccagatattacctggaggcaaccctctcctccgcactgcctcccccttctctggcaggtggatacagc

SEQ ID NO: 23390 - DNA, 120 bp, Homo sapiens
ctgcgcttcggtcaatcagagcacccatcatctggccgggtgattggctcaggggtgggcatatgggctgattcaggccaatgaggtttgaggaaacgttcacttgcgcttctgggaaaa

SEQ ID NO: 23391 - DNA, 120 bp, Homo sapiens
tggcgctgggatcatgaagagggtgtaaattccagatcaagctgtggagttttcaggctgtgagccaatgcaatcccttggttggcttaagctggcttgcgtttgattttctgtcgcgtg

SEQ ID NO: 23392 - DNA, 120 bp, Homo sapiens
tgccgctcccagtaacatctgattgttgctttggtttctcaatcaatagcataaaacccatttgacaaaaatgactaatcctccaaaattcatcagcatttctggagcacagccatctct

SEQ ID NO: 23393 - DNA, 120 bp, Homo sapiens
cctcgtttttctattcctgaggtctggcttcttcggttttctgctctggtatagctcagtctaggtcatttctcctccgggttccaccagtgacaagtgacagctgcactctgctgagga

SEQ ID NO: 23394 - DNA, 120 bp, Homo sapiens
gcacgggcagccagctacagatgccagcatcagcctgacgagaaaagcagtgccaagaaagggtttggccacaatatatttttgtttgtttttgagacagggtctccctctgccacccag

SEQ ID NO: 23395 - DNA, 120 bp, Homo sapiens
gcacgatttcaagtgtattatttctgtgtaatacattgtgaaggttgtgtttcaggagacaaacttgtccagtaagcttgctaggagtagaaggcctgtgactgactctagagaggaagt

SEQ ID NO: 23396 - DNA, 120 bp, Homo sapiens
ggacggcctgagtttccggggctgggcaagaagctgccctgaagcagagttctgtttgcgaagcccactcagcccacacatcctgtgaccttgcctcacctccaaccaagtcctggagca

SEQ ID NO: 23397 - DNA, 120 bp, Homo sapiens
tggcgtccatggccaggtgcacagcagcactgtctggatctgggtcacgaggaaagggaatttagccaacaccccatcattctcctcctctcaaggggaagcagaggttattgggtatac

SEQ ID NO: 23398 - DNA, 120 bp, Homo sapiens
ggccgtccctggaactgtctgtgatagtcctcacctcctctagccactgaaaaactaagccttcccccagggccatgtgtaccctcccatctgggagatcatgaccccaagtatagagaa

SEQ ID NO: 23399 - DNA, 120 bp, Homo sapiens
tgtcgacttagtttatcccccaaatcaggagagcaggcaggttcacagggttcaacacgctacaaggcccaaattatgaaagttcctactctggtagctcaaattccatcttaaatatgt

SEQ ID NO: 23400 - DNA, 120 bp, Homo sapiens
catcgacatccatttctaccctctcccttctccttttttcctaattgaacctcagcttcttcaggtgtctaatttctgcacagtagtgtccttcaggtctcagcctcaaagggttgggtc

SEQ ID NO: 23401 - DNA, 120 bp, Homo sapiens
caacggttccgttcgtggccccatactcttctttcagactcttgccctgttggcaaatgactttctacccaggttttcctgaattatctctctgtttctcagtctgagaaggaaccattt

SEQ ID NO: 23402 - DNA, 120 bp, Homo sapiens
gcacggagctgtgactgctttggaggcatgtgccaaggcgccagttccattgccacagggcagagaaaagctcagcagaagttcctgtccctgtacaaaggaggagggcacggctgttgt

SEQ ID NO: 23403 - DNA, 120 bp, Homo sapiens
aaacggacacaagcgaggagggctccccgcgggagaatccccgagaggcagagggcgagctccccgagagcggtggccccgcagccccccctgacgccgagctgtcacctcgctggagca

SEQ ID NO: 23404 - DNA, 120 bp, Homo sapiens
cagcggctgtggctgtgcagcagtgccatgaaaatgattcaccccaattagaacctctggaggcagagggagagcctttcccagatgccaccaccactgccaagcagctgcattcctcgc

SEQ ID NO: 23405 - DNA, 120 bp, Homo sapiens
cgccgggaaattcctccaggcaagagaacgcagagacgcccgcccgcagtccgggggaggacgcttcaccaggtgctggccacgaacaggaggctttcctgggtgtgaggggtgcgccag

SEQ ID NO: 23406 - DNA, 120 bp, Homo sapiens
gaacgggatgaagggtaaagagatccctctgtgtgctgcacagtccatttcctaagtgtcatacgttgtaaattagaaaatggcccatgtccctcctgcatcattcctactattaacaga

SEQ ID NO: 23407 - DNA, 120 bp, Homo sapiens
gaccgttggctcctgattttctttaaaaaaacaaaacaaaacaaaacaaaaaaccaaaaaaaacctggtgccccgtgagtcagcagaaggaacacagccttgcgaaaaggagtacaactc

SEQ ID NO: 23408 - DNA, 120 bp, Homo sapiens
actcgttaattgggtctgttgtgctggagggggaattctttcagtaaacagaagtactgtttggacatgcatagaagaactagcaggaggaacagaagtagttgtaatatggaatcatga

SEQ ID NO: 23409 - DNA, 120 bp, Homo sapiens
taccgcgtccccttatgtacttccgggtgtcatccaaacctcccctttgacctaatacagcccgttttcattgttcatgcaagtgctgttcctcgataaccattcctcccacctttccac

SEQ ID NO: 23410 - DNA, 120 bp, Homo sapiens
cctcgctggtgtctcgaatctaccatctcaccaccaaatatatgttagtctctttactccttttcccttctctcgggttttcccagttcccttgaatttcagacattgtaagagtgactg

SEQ ID NO: 23411 - DNA, 120 bp, Homo sapiens
gcccgtgaggtgggatgtcctgtgtgaaggtgctggtgccccaatggtgggatctggacagattcacccatggcaggttgaccctctcatcccacaggggcccaggcttccctccctgcc

SEQ ID NO: 23412 - DNA, 120 bp, Homo sapiens
gatcgactcctccttcattgattctaaattcaaccttaaatcatgctgccatgactcagagaacttactcatcgtttcaaaagactatcatagctttaaaccaataatttgtcctccttt

SEQ ID NO: 23413 - DNA, 120 bp, Homo sapiens
aaacgaggtgtgaaaggctcaagaggatgaccagcaattaattatccccagaaagtgaaggaaaagagacctttagggatgttgctggtcaagtcttgatttgaccggagtcaaatcaat

SEQ ID NO: 23414 - DNA, 120 bp, Homo sapiens
atacgctgctcttccaacagtgggttctagctttgaacaaaagtgctaaacatttccttgaatatattcttcctctttttgtcctcatcactcaatactggtgctcttgtcacaggtaga

SEQ ID NO: 23415 - DNA, 120 bp, Homo sapiens
tatcgtctaacccagaaaacctgtgagagctaaaggattcatcattaataattaccctaggactacagatataaagagagtcaagcttactctagaattggtgtgatgagatattgactc

SEQ ID NO: 23416 - DNA, 120 bp, Homo sapiens
ctacgtgcacaatcagaaagacattgaaaactacttaaaaggttttcacatgagattaccactatcatctttcaagtaggaggaaaagagaatgaagagagctgtgcctgttttactctc

SEQ ID NO: 23417 - DNA, 120 bp, Homo sapiens
ctccgaggacaactctgaaggttaacttgtaagaggtctcactggagtacaaactgaaatcttacagaaaacttaaacttacattttaaagcactggaaaatctgggttttgtgaaagag

SEQ ID NO: 23418 - DNA, 120 bp, Homo sapiens
tgtcgtcactctcaaggcgcccaaagaggcttaggccctgacacacagacaagacggtagctgacaaaatctctgaaagggacaatgttagtccttaaacatgccaggcatgttccggac

SEQ ID NO: 23419 - DNA, 120 bp, Homo sapiens
aaccgcccaaacaagaatgtaagctccatgaaagtgggcatttgtctggttcaccactgtagctggtgtttggaaccctgcctggcaagagtagaagctccctgaacagttgaaggaatg

SEQ ID NO: 23420 - DNA, 120 bp, Homo sapiens
gggcggtgtcagataaggactcccttttttttcttttttctttctctttaaaaatatacttctactcaatgtggtcaagagtagttgacttctgaaaactaatcaaaaaagggaaaacct

SEQ ID NO: 23421 - DNA, 120 bp, Homo sapiens
taacgaatgtcttggagagggtcccaagtcctgtccttaccattggccttgcttgagtttgggggctgggcaacaaaaacccattttagtcaaagaagaactgagtgcagagggaactat

SEQ ID NO: 23422 - DNA, 120 bp, Homo sapiens
cttcgcttccctgggtgtgaaccaggggctctgcaagcgtataggagaagcccccatctggcaaggactgagtgagaggccaaggaagtcagtgtctcagaagcccccccaatacccagc

SEQ ID NO: 23423 - DNA, 120 bp, Homo sapiens
aagcgtgcccaagcaccacaggcttgcagagccaaaggaacctggtaatatgtgggcctggtgacgtgaggccatggtggatttgggcacaagtggtagatgccagcgcatgactaagag

SEQ ID NO: 23424 - DNA, 120 bp, Homo sapiens
cagcgcctgggtgctgcagtgccctctctctctgcacaggaactgtgacagccttcagggagaagaggacctaggaggaggagaaagatccagaaattgactattgattcaaggagtcgt

SEQ ID NO: 23425 - DNA, 120 bp, Homo sapiens
atccgaactacatccggttgccctaggacatgggaaattgaggctgtcggctgtcagccgtgcatttgggtgagcactgaggcttcctgcagtccttgctaactgggatcatgcaggttc

SEQ ID NO: 23426 - DNA, 120 bp, Homo sapiens
aggcggcaatgggctggctgcgtttgtggctgatgataaaatctcggctcagctgtctaggagtatcaagaaatctttaaatctgtgctacttggcactgggtaggactggctgacacat

SEQ ID NO: 23427 - DNA, 120 bp, Homo sapiens
gctcgtcttccaaccatatgggaactctgctgtacagctcaggctctgcaatgccagcgtctagcccggatcttgatcagggcgtttcattcagccaccagcacccgtagaacccagaga

SEQ ID NO: 23428 - DNA, 120 bp, Homo sapiens
agacgtcttcatcgcaaccccaaatccaagagtggtcactgaatttagttcaatgaatgagtggctcaaaagtgccctgagagtcagcacgctggaacactcagaaagcagcatggcttg

SEQ ID NO: 23429 - DNA, 120 bp, Homo sapiens
gtccgagaactattttaccagagtcaaattttagcaactccttccactgtatttcaaggaactacacctcactttggatcgccatcatctgagctgggtgtctctgagtggctagaaggg

SEQ ID NO: 23430 - DNA, 120 bp, Homo sapiens
gaccggattcccagcctggtaggaggcctctcaaggaaacacactgcaggtcacctgaatgcccctgcccttggaaactgccatggtcacataacccattcctgccaatcaaggggagtt

SEQ ID NO: 23431 - DNA, 120 bp, Homo sapiens
aaacgatggctgtcagaggcggacatactttacaaaacaaattacatttggcagagaaaaggcagagagggaggagacagcggttggtttatttggggaggaaaagggtcatggtgaaag

SEQ ID NO: 23432 - DNA, 120 bp, Homo sapiens
aggcgtcgatgagagaacacagcagacagggccatgggtggtgagaagggcagtctatttatctgccattatattcgcccaaccatgtgtctctggcaggcccatcacatagggagcagt

SEQ ID NO: 23433 - DNA, 120 bp, Homo sapiens
tgccgggaatgtggcttggtgagcagaaaacctattttctgattttttatttttccttgtttccagtggggttggaaggaggctattttctgaaccaccaccatgtgaccctacagcagg

SEQ ID NO: 23434 - DNA, 120 bp, Homo sapiens
gtgcggctgcctgggcattcaagacaccgagtgcttgtgctttggaaaacacttccgtgtccatttatagactagtgacagatgctaggttagcccagaagtagcccagaacacagcatg

SEQ ID NO: 23435 - DNA, 120 bp, Homo sapiens
ctccgggccagcaaatcagcttcactcattaagaagctggggaatctcccatttgcaaggcctggaaacctcgcgcctgcccctggcttgcgcagtggggagtgaggtgagcatcccctg

SEQ ID NO: 23436 - DNA, 120 bp, Homo sapiens
aatcgagtctttctgtgccttccctcagccagccagggaggaaataatagagtcttcattcttttgttaagcttcttctgatgaaccatgggcctgtttccaaatttgagtccctctgtc

SEQ ID NO: 23437 - DNA, 120 bp, Homo sapiens
ctccgtgcgtagaaacagactccaccccacaatacagaaaagcttctacaagagagatgtgtaggccactccctgcatccccagctggcgcagggacagcacaccaacaatgtcacagct

SEQ ID NO: 23438 - DNA, 120 bp, Homo sapiens
tctcgcctacctgactataggctacgtaggcgctgccacaactacccaaccaccacagcacccacctcctaaaggctgctgtgagcattccctttgcctcctggactctggagaacttct

SEQ ID NO: 23439 - DNA, 120 bp, Homo sapiens
gcacggccctgcgcggtcagtgaataggtagaatagatttttaaaagaaggcatatgttggctccttgctgcccagtcgcggcgagggtttgaattaacgtatagtttgggtttaccgta

SEQ ID NO: 23440 - DNA, 120 bp, Homo sapiens
gttcgaatgtgtccccgccaccaggccccgctgctgggcgagaccactgaaccccctgaaagcttccccggagccgcgcgcataatcccgggaccctctctggaaggcgtgcggagagcg

SEQ ID NO: 23441 - DNA, 120 bp, Homo sapiens
gtgcgcgtggcctggcaccggaaggagccagcttccgggctccgaggcaccccctggacagcgccccgggccgcgggttcctcctccgatgcccgggcgtcgtcgccgggatcgggagct

SEQ ID NO: 23442 - DNA, 120 bp, Homo sapiens
cttcgggggcccgccggcaccgacggttttcgcttccctggcgggcagctggacgaggtcccgccgctgcaccgggagggacagtgggtggaaaaagccgctgcagcgccggggcgaggg

SEQ ID NO: 23443 - DNA, 120 bp, Homo sapiens
gggcgccgtcacttgttgcgaccaataaacggcgctcgatcctgatgcgctgtttctaaaatctttagctgtgtcccgatccctccaacccaagcccctcggccaggaggaaggggcaag

SEQ ID NO: 23444 - DNA, 120 bp, Homo sapiens
aagcgagagccgctggctctgtggggggagaggggcgccgcgccccaagagcccccgtcccgccctgcggcagccgccccggggcgcccagccgcccgcttccctccgcagagcgtcttc

SEQ ID NO: 23445 - DNA, 120 bp, Homo sapiens
tgacggtgaaaccgcgcgggacacaacccaccgcggctcatcacccacttacaaatagctgtcgctaggattcccgccactcctctcagaccggcccccccgccacctctgccacttttc

SEQ ID NO: 23446 - DNA, 120 bp, Homo sapiens
tttcggagtcccccgccctcgtcactgcctccccggagctgcggggcagtcggacgcagagctgcctaaccgcaagaacgcctggccggagctgccctctgcagccgagccggcgccccc

SEQ ID NO: 23447 - DNA, 120 bp, Homo sapiens
tttcggacccacaacctcttctttttaaggctgcttgaactatttattagtctgtaattagagtcccaagcgtttccttctgtttcctaaagggttggaaaaatgccccgagggcttgtc

SEQ ID NO: 23448 - DNA, 120 bp, Homo sapiens
aagcgtagacagtggagtttttcagcctggattttagaattggtttttgtcagttgggctttatatattagttgggaataactaaataatttaaacaacagctatttgattatactaatc

SEQ ID NO: 23449 - DNA, 120 bp, Homo sapiens
aatcgaaaagtgccttttaaaaagtcctcctggattaaaaatttctcttagaaacattcataattcattgctgctcttactaatgtcaaaatcttactgactcagtaaatggcaaaaggt

SEQ ID NO: 23450 - DNA, 120 bp, Homo sapiens
actcgttaggtatataaatctcataatccttaagggaaaagagaccagggaagtgtatctaccactggagattttctttgacattacagacttaaatgctgtcactggcctccctttgca

SEQ ID NO: 23451 - DNA, 120 bp, Homo sapiens
aaccgttcctaattgctgaatgacatacacctgccacttaatttcctcagtgtcacctgtgaattatacctaagatcaaacagcaagaacatgtattcattcagatatctgtgtgtccat

SEQ ID NO: 23452 - DNA, 120 bp, Homo sapiens
ggacgcagtcagtccaaagccaccccgggaaagatgtggcccgcagcctggcaggctgaggacgtgtagggggctgcaccaggcgcagcgagtaaccctactccgtttctgaacgcacgc

SEQ ID NO: 23453 - DNA, 120 bp, Homo sapiens
acgcgggggcgctgccaatgtaaggctccctgttaggaacgggtcctagccctcagcggagggtcacaaagaaatgagactttcctggcaagactgtggaatcagatcgagccattttta

SEQ ID NO: 23454 - DNA, 120 bp, Homo sapiens
gtgcgttgccgccctccgccccgctcccctgcacttacccacccacctcgcctgcgctgatccgcagacgcgcgcggggaaaggcacgcgcgatgctttcccactcgctcagcgggcgcc

SEQ ID NO: 23455 - DNA, 120 bp, Homo sapiens
agacgcaagaagaaaccaggtggcactttcagcactctggttagaaacctcctgagctagatcacacagctcctcagacattctctacttttggtgtcactgaaggctacagtgtcactc

SEQ ID NO: 23456 - DNA, 120 bp, Homo sapiens
tgtcgttttgtcctcatatctgtggtcactgtgttggccttgggcacttctgcttggtcactgcaacagcctgccatctgatcctcgttcattctcagctcagctccattgcctgttctt

SEQ ID NO: 23457 - DNA, 120 bp, Homo sapiens
agtcggcaggtcactgcagtgcctcaccctgacagtgactgcaccaggaagtgctaggttctaggtcctccgtctagccctcctttgcaacactatgaggcttttaaattgtaaattatt

SEQ ID NO: 23458 - DNA, 120 bp, Homo sapiens
taccgtatgcacttttttgtgtctagattcttttgctaaacagccatgctttttaaaagtatttttgatgttgtttttaattcatttgcatttcaatttatatcagggactccaaaggtt

SEQ ID NO: 23459 - DNA, 120 bp, Homo sapiens
ctacggagcaattgttttattgtttttctgttgccatgtccatgattaaagaagccactgtacagcttctgatttttacccatgaatcagtttctgctacatgtagagagtgacagttgt

SEQ ID NO: 23460 - DNA, 120 bp, Homo sapiens
aaacgcttatctgttttccatctgtacagattagccttttcctgaatgccatagaaatggaatcattcaggacttagccttttgtctccgtccccttcccttgggatactgcttttgaga

SEQ ID NO: 23461 - DNA, 120 bp, Homo sapiens
ttgcgtgcatcaacacttagttcttttttattctagagcaggcttccattttatggatgtacaacattttgaaaagatcgatctgttcaccagttggtggtcatttgggttgtttccagt

SEQ ID NO: 23462 - DNA, 120 bp, Homo sapiens
acacgtggtggagaaatggccaccaccagaaagctctccgcagcccatccccgcctgctgcacctgtggtctcttctgctccaaccctgggatacaggcttttttatcttgactagggtt

SEQ ID NO: 23463 - DNA, 120 bp, Homo sapiens
aggcggtaatgttcgctgccgctcatctcctgctatgcagcctggtttctaacaagccatggactggccctggtccacggcctggggactgggggcacctgtcctagaacactgacctgg

SEQ ID NO: 23464 - DNA, 120 bp, Homo sapiens
tcacgtaaatgagatttaattcattcccagtctgccatttttgatctaccaaactacctcctcataaatggtcatccctgacttcccagtgagaaacttggaaattgcttttatttcttg

SEQ ID NO: 23465 - DNA, 120 bp, Homo sapiens
aaacggaagtgaggtacagaagcagctggattggtcacagcatggtgcctgccttatttgaacacggttgaaaaggttggccctctctgactggccaaaactcagtgtttggcacaagag

SEQ ID NO: 23466 - DNA, 120 bp, Homo sapiens
cctcgctcccccttcctacttttgaaacatttttaaagttttcaatgagaaaagaaaagcccaaacattattaattttattgtattttttccccagtaaaatatatcatgcatacaaact

SEQ ID NO: 23467 - DNA, 120 bp, Homo sapiens
taacgtacgttcactgttttaataaggagaatgaaatgagcctcactgagtgtaatcttgggtttgcccttcacctggctccctcttcactgcctcactggctctgggctttagggagag

SEQ ID NO: 23468 - DNA, 120 bp, Homo sapiens
ttgcgttcaaggtgaagcccagacagggggcaagccatgcagattttccctctatttagcatggagaggggtggggcagtgagagatggctgcatgggcctctagacaggcaggatagca

SEQ ID NO: 23469 - DNA, 120 bp, Homo sapiens
aggcgggtgggtaggggacagggaggctggaataagggaggttacatggaattgacatagattgaatttaactttagttatagagggcagggaaaaatcacatttcctgaacacttgaat

SEQ ID NO: 23470 - DNA, 120 bp, Homo sapiens
cagcgtagtgttcatcagaaatgacaagaaacacagtaactgggtcagtgagagggagcaaccagattaacaggaaggcagatggtggagacaagcgagattccgaaggtgctgcaatga

SEQ ID NO: 23471 - DNA, 120 bp, Homo sapiens
cagcgtgtgcagagcactgaggccattcagacagctcccacttctgctttgagcaacagttcttttctcaccaacgtagaaaagaacaggaggcagagccgatgtgcagatgagaagacg

SEQ ID NO: 23472 - DNA, 120 bp, Homo sapiens
gaacgtgttgaatttaaagagtccaggtggggctggcttgcagtgttcacaggttggaaactgagtagggaggtgcatgcatggagtccagtgttgagttattaacatagaagccaggct

SEQ ID NO: 23473 - DNA, 120 bp, Homo sapiens
agacgaggagcctgcaaaagtggctgaaaaacagtggacagaggagtagatggaaaataaggagatgtttggtttctgaaagcaaagggagaaaaaggattttgataaaatggagagtgc

SEQ ID NO: 23474 - DNA, 120 bp, Homo sapiens
taacgtcatcacagaactcacacttgtcccctatggtatatttttcctacatcagccagagtgaaaaatgcaaaactgatgatgtcacttctctggaaataaaccaaagcccacctaatg

SEQ ID NO: 23475 - DNA, 120 bp, Homo sapiens
gagcgaaactccatctcaaaaaaaaaaaaaaaaaagagagaattagagccctctaccctcacctccactccatcattctttaacctcattttatggcttatgtttcttcttggcacataa

SEQ ID NO: 23476 - DNA, 120 bp, Homo sapiens
tttcgatggacaaaaatagcaatgggaaagggaaaccgaggcttttgacaagcttacgattttctagctcagctgaaaataggcatacatttctgttctttccaagtaagcagaacttgt

SEQ ID NO: 23477 - DNA, 120 bp, Homo sapiens
ttacgcttttaattttaaaaatttgccataagctgggtgtgatggctcatgctagtgatcccagtgacttgggaggctgaagcaggaggactgcttgaggctgggagtttgagaccaccc

SEQ ID NO: 23478 - DNA, 120 bp, Homo sapiens
gaacgtattcaaaagccttgcccacaagcttgtaatccctatggaaccaaccaaactcatcaagaaatgagtatgtttttaaagtccaatttgtgataaatagctctttttccattttcc

SEQ ID NO: 23479 - DNA, 120 bp, Homo sapiens
ctgcgagacaggggtgagaagctctgctgaaggtatttccttaatgaaagtgtttcttttatcacggaaaggaaatattgagttattcctgacaattccccctaactatgagctctgtag

SEQ ID NO: 23480 - DNA, 120 bp, Homo sapiens
gcccggcagggagagtgaaatagactaagtctgccgctcagctgcctttgtcaagggccagaccctggccttgggaactgactcgcggcagtttgcaaatgtatgtgcttggtgggaagc

SEQ ID NO: 23481 - DNA, 120 bp, Homo sapiens
agccgtagtgtgtcatccctgactaccccagcttccaaacaggaacatcatgagtaacttttcagacaatatcaaacatgaacattcagtgtttaaccaattctttctccagatgcaaat

SEQ ID NO: 23482 - DNA, 120 bp, Homo sapiens
gagcgttcaggacatgctacccctaaatataggggcacttggaatactgagtgttttaagctgagggaaactgagaacattgtagaagcaggaaggcctcctgaaacttctcccaccttc

SEQ ID NO: 23483 - DNA, 120 bp, Homo sapiens
gttcgcttttcattaagcctaagcataaaaatgcacaagtttacctgtttctttgatcttcatatccaaaggctcctgtgtcacgtaaagcttctattaaataaattcatatgcatttct

SEQ ID NO: 23484 - DNA, 120 bp, Homo sapiens
ttacgcttttctcttgctaaccagtcagtcttttgttatagaaatgtcagctgtgctggatgaggaaaggtgtcacatctttctgcccttacaagtgcataaagaggtctgttgcttaca

SEQ ID NO: 23485 - DNA, 120 bp, Homo sapiens
taacgaacaaacaaacatttatttcttgtttgtgttacatgaagacagcaggttaaccgcaggtttgactgggaggggtggggcttgcctgagtctagccgggcttgcctgactttggct

SEQ ID NO: 23486 - DNA, 120 bp, Homo sapiens
gctcggctccacatcttatgtcattccagggctcaggctgaggcagcagttcctgtttgaggttaactagtctcatggccaagggaagaagctcaggaaggacagagccacatcacatac

SEQ ID NO: 23487 - DNA, 120 bp, Homo sapiens
cgaggctgcattgctcaactcaagctaccacatcgagctgcgtgccaccttccaaaggccaacaggccgggtgttgcagggggagtgcgatgtggctgcagggtgggcagctgacaataa

SEQ ID NO: 23488 - DNA, 120 bp, Homo sapiens
gcccgctggaaggagccagtattttcaggagaggggttcatgcccacaaggtggcatcattggtgccaacttcagacggaggccctgggctagtttatctttggaggtgatgtgctttgc

SEQ ID NO: 23489 - DNA, 120 bp, Homo sapiens
ttgcgggtagatcagggtgaagtcagaaaaaacattcacgtgaaataattcacaccttaatgaagctgattcttttaatacacataaacagcagtgaggagaatggcaaatagcattgct

SEQ ID NO: 23490 - DNA, 120 bp, Homo sapiens
gttcgtgactggtttcttgctttttgcattctgatcaattccctttccattaaataatgatagtttcaccttatctgtgaaactttcttcaggttagggaagatcagcctcactgagtta

SEQ ID NO: 23491 - DNA, 120 bp, Homo sapiens
aagcgaacaaaatcctttgctataggttactttcattttcataacggataatcgtgttttatgtttatagttttatgtcatcttgcgtttaaagatgcacatatctgctttatggagcgg

SEQ ID NO: 23492 - DNA, 120 bp, Homo sapiens
acacgtaatgtcaaaagggttctagggagaaaaattcgaggctccagtcggcttcacttagagacaagcacatcagtggtatgagagagccacactcgggactcaaatacagactgaaag

SEQ ID NO: 23493 - DNA, 120 bp, Homo sapiens
tcccgagctcctcacgattctgacggagacagtaggcttctggttcgtgtagattttagaaaccaacactgtgaaccaaatttcaaagacagcatttaactgattaaatgctggcttgaa

SEQ ID NO: 23494 - DNA, 120 bp, Homo sapiens
caacgggtcagtccttagtttgtgtgtagctatgttccaagctgttcctttgatttgtctcctcactaattaacagtctccccagttcagcgggtactgatgttccacccagtccattgg

SEQ ID NO: 23495 - DNA, 120 bp, Homo sapiens
ttgcgttgaagaagcagcagggcacagagattaataatgcagtctctggagtcatcccagctccttgtttactagctagttactcagttctttaggcctcagtttcctcatctgtaaggt

SEQ ID NO: 23496 - DNA, 120 bp, Homo sapiens
aatcggaaggaaaaaagaaaagaaagacaatacactaatttgatagactgtgcaggaaatcgaaaggtaaggcagagtgagatggaatctaagtaatatgtggagaaaacataagaacag

SEQ ID NO: 23497 - DNA, 120 bp, Homo sapiens
tctcggtggacattcctaaaggaccgctcagaggctacctccaacaatgagtgttctatttcttttttcctttgagagtaaaaagagctgattttctggaagtatgtcaagttgctctcc

SEQ ID NO: 23498 - DNA, 120 bp, Homo sapiens
caacggggtcagtgtctggacagcaatctgtcatgaagcaaagcctgtcacagacagccctggagatgtagacaaagacgccggactattattttccagagagagcctttaaagcacctt

SEQ ID NO: 23499 - DNA, 120 bp, Homo sapiens
ggccgaagatctgcacggccctgggcttccacgttggaccacctgccaggaactctgcgtcaggctgacctctcccacccaatgtgaataacttccgagaggtagtcccccacataaggg

SEQ ID NO: 23500 - DNA, 120 bp, Homo sapiens
tggcgaagaaagagaagagatttatagctctagaatatctctcccttttgaaaatgaaatgacacattagctggggagaggggcttggctgaaagggcctatccccaggcatgacaagtt

SEQ ID NO: 23501 - DNA, 120 bp, Homo sapiens
ggtcggtccaggccagtctgccgaggaaagaaaggatgggtgtgtttagtaacagacgagaagaggctccctcaagacttatttgatccattttttaaaagccttatcccatatgatctt

SEQ ID NO: 23502 - DNA, 120 bp, Homo sapiens
taacggagatgtactgtttttggaaaaacctttagagacactagatcttgtcaaattattcaataaagatcctttgtgattggatcaaaatcatcaactaagcacaagctccagacaccc

SEQ ID NO: 23503 - DNA, 120 bp, Homo sapiens
gtccgaggtggatcagaaattctgtagagtccctgaaataattggaaattttaaaattaaattggacttaaggagaaaagcgaaggctgaaatacacataggaaggcatctgtctgtaat

SEQ ID NO: 23504 - DNA, 120 bp, Homo sapiens
tgccgtgacataaaaggtattgaatggggttgaattaatagaggaaatataactaccaatgatgacagtcttgtaagtatcacactcagggtatccatatcattataaaagctcaatccc

SEQ ID NO: 23505 - DNA, 120 bp, Homo sapiens
tttcggttcttaatttggttaaattgttttaaaccttcctcatcagtactgtgtataatatcatatctaagagtttatatactaattgatatgcttgtaatctttctagtacttctaaca

SEQ ID NO: 23506 - DNA, 120 bp, Homo sapiens
ccccgcttgtggtttcactgtcttatttatctcctcgacttgctgagacagaaggggaaatccggggaggggttgggtggaggtgagaagaggagaaacagataaagaaacacagaaaaa

SEQ ID NO: 23507 - DNA, 120 bp, Homo sapiens
acacgcatattataagggagtaaaaaatgagaaccgaaagaggcataagttaggcattaaaacttttatgtcatcttgtatttacttgctagaatataagcatagagattagatggttta

SEQ ID NO: 23508 - DNA, 120 bp, Homo sapiens
gcacgtgcacatggatgcatgctattttcagcagggatagtataagtccttggagcacttagcagcaggctaaacaaattgtctgaactgccttgaatgctctgagcaaacttgccattt

SEQ ID NO: 23509 - DNA, 120 bp, Homo sapiens
caccgaaagagtggcttcaagcagtaatgctcattcttctctagcggcaagactctgcttcaatgcaaagagagggagacctggagggaggctgttgtgtgttcctcatggaatatggat

SEQ ID NO: 23510 - DNA, 120 bp, Homo sapiens
cagcgtgccttttcttgctctgaatctacagctttttatatccctccaggccaagaccttctgtgcctctgcttcttcccttctatctggcgatgacctccagcctggacccataatcgg

SEQ ID NO: 23511 - DNA, 120 bp, Homo sapiens
ccccgactcggtcctctcccaaaggtttgttctcctgttagatgtcaagttgatgattctaaatcccagatgtgtcatgctcagttagtgaataacagactgtcaaatagagcaataaat

SEQ ID NO: 23512 - DNA, 120 bp, Homo sapiens
tctcgctcagtgactgctgtgcagagctgccatgccacagcactcacatacccactaattctgtgtgatgagtgaggctggcggcagccctgtgtcctccagggactggtatcaaggtgc

SEQ ID NO: 23513 - DNA, 120 bp, Homo sapiens
tgacgccatgagagaggtattattaatagacccatcttacaaatagggaaactgaggcattgaggggtgaagcaatgtgcctaagtttaccctgccagtaggttgtgaagccagacttag

SEQ ID NO: 23514 - DNA, 120 bp, Homo sapiens
agacgttacttactttttcagagtcatatttttctcatctgtaagatagggatgatgatacaaaacttatgaaattgctgcaagaacgacatgtttgctgcctcccccataattggttct

SEQ ID NO: 23515 - DNA, 120 bp, Homo sapiens
ccccgtcctttctctgtcattcttgctttctcttctcttatcctcccccactttggttcattagtggctgcctcatgcgctctggggccatttgcatccacaaaggcatcagggctggca

SEQ ID NO: 23516 - DNA, 120 bp, Homo sapiens
cttcgagaacagtgctcagagtctttgccacactcagctcttccccaccgcttcatccaaggcaatgccgccaaaggtcatttcagtatgaagtctgattgaggtcctggggtgagaaaa

SEQ ID NO: 23517 - DNA, 120 bp, Homo sapiens
attcggtgacaacaccattctcgtcaagtctgcttctggattcgtctgcatgaggcccacagaaccagagctgaggaaacatcagctgggctggcacagttcttatttctttcatatccc

SEQ ID NO: 23518 - DNA, 120 bp, Homo sapiens
ggacggatcattttctcagatgctgttatcagcgaagtcagagctggtacactctctgagggagtccctgagccacaggttactggcaggcagacaaacactcactgacagccatttgtg

SEQ ID NO: 23519 - DNA, 120 bp, Homo sapiens
tgtcgagaaatgtacggtgcttcatcgtgaataatggaaacattattcagaagcaaaaagacactttactgggagggttaaggtcttcaagatacttaggagaaaagaatcttcttgctc

SEQ ID NO: 23520 - DNA, 120 bp, Homo sapiens
gggcggaggtggcaggccaggcctctatgaatcccattacaccaaagcgtgggtatgacctgctcatgggaacataacacatcagtgatggaggataaggaaaaaagatttaaatgtgct

SEQ ID NO: 23521 - DNA, 120 bp, Homo sapiens
ggccgtgcaatatgaaaaacaaatctaaacatttgtctgtagaatcaggtgatgattggctgtcggctgtctcagggggagcagggaaatagtccatgcacctgccacctaattcagttt

SEQ ID NO: 23522 - DNA, 120 bp, Homo sapiens
tgtcgacaataggtttttctgcctccacaccactgatatttgggtgaaaccattgtctccaagcctcagtttcctcctttcttttctttctataagataaagatagtaggctgggtgcag

SEQ ID NO: 23523 - DNA, 120 bp, Homo sapiens
tctcgggcagcccatgaagcaatcggcaagatctgaaggatgagaacagtgtgttctttgaaatccctctgacaagcagacagtccctccttccctcaaaccatcctcaaagggaagtgt

SEQ ID NO: 23524 - DNA, 120 bp, Homo sapiens
tgtcggcttgggcagtaatgagacggtgtgggaattcccctgtccccttggttcactttacagacaaagttcattagggttaaagatgggtcattcccatccacagattccttcacttga

SEQ ID NO: 23525 - DNA, 120 bp, Homo sapiens
gaacgggcaaagtgttagttcatgtaatgtgcaagaagacatgcagcccgggtgaataacttctgatcagcatgtagtataagagaaaagtctgtccagcatggcactgagctgcattcc

SEQ ID NO: 23526 - DNA, 120 bp, Homo sapiens
caccgaaagcagactgctggagcttatctggcgtttgttagtgcagagctcattgtgttgtcatgcattgtctagtttaggcttgattccactgtcacataatccaagggaaaatgaaga

SEQ ID NO: 23527 - DNA, 120 bp, Homo sapiens
atgcgtttgctttgtgctgacattaaaatctcatttggaagcaacgtgggaggtcagtgagtctaactgctcctgctctctcagagcagcagcactggaatatggtcttttttttttttt

SEQ ID NO: 23528 - DNA, 120 bp, Homo sapiens
tgccgtgcactgtgctagttctttaaatacattatctcaaatagtcctcacaataaaccagtaaggtaggcacttttatttccatttttccagatgggatagagtcaagccccatggagt

SEQ ID NO: 23529 - DNA, 120 bp, Homo sapiens
tgccggtacactctataaaaatgactgcagtcaggtccagtaaaagtccacttatttggcttctactctttgccattcattgttaggtggagggctaccagcaaaatcacatctattctc

SEQ ID NO: 23530 - DNA, 120 bp, Homo sapiens
ggacggtttcaatgtagaaatatgcaaagtctagaaatagtacaagaaaaatgaggcattaggggaggagagggagtaagaagtgtggctaaagaaggctccttgagaaggcaacgcctg

SEQ ID NO: 23531 - DNA, 120 bp, Homo sapiens
gcccggccgacacttctaaacttagcaatccatttccttgaccctatcagtttgttgtcacttccaacctagggcccctcaaatggcagaagtaagttgaacacaaatttagtgatgttc

SEQ ID NO: 23532 - DNA, 120 bp, Homo sapiens
ccacgatcactctgctgtcccagcctgtccccaccatcgctctgatgatccagtctcagcttctcccccaccatcactttgatctcccagcctcatcctgtccccaccacactctgatgt

SEQ ID NO: 23533 - DNA, 120 bp, Homo sapiens
ctgcggtgcagcttgtgccttatatcgccagacacttgacaacttgttttaaaatgatgcagaagagaatcaacactctccaattctgtaatgacaattgtttttgagacaaagtcagtg

SEQ ID NO: 23534 - DNA, 120 bp, Homo sapiens
tgccgttagcttcatcctacttctcaatgctgcctcctgatctcccctctctcgtggaagggggctgactgcttccctcaaaggtggccagaaggcctggaacctagtgtttgcaatggc

SEQ ID NO: 23535 - DNA, 120 bp, Homo sapiens
atgcgcagaactcatcatccctcctgcagcaaactgaattctctcactcatgacacccagacgatgacaagcaagtggagcaggaaagaatccgtttcaaatatgtcgcaggagtttgat

SEQ ID NO: 23536 - DNA, 120 bp, Homo sapiens
cctcgtcttgacgtggggacctactgatttttcatgcagggtgtgagcacattcatcagtgtttatacttggagagaaccatccataacagcttcccatttctcatatggttttacttta

SEQ ID NO: 23537 - DNA, 120 bp, Homo sapiens
ttacgtcatggagaagtgttggactccccttgctacctcccactgccatggaggaagcaaaggatgctggtgtagaatttgcagttcatgttttcagcttgtgctaatgaatggaggatc

SEQ ID NO: 23538 - DNA, 120 bp, Homo sapiens
tctcgagtctccttttcttgccttcttccttttctccctactatagctgacttctctttgcagagtcatacaaatgtaactgagttttggccctgttgagtcaaactctgttgagttttg

SEQ ID NO: 23539 - DNA, 120 bp, Homo sapiens
aggcgggcaggttgggggagctttaagacactttggttagtccaagcctggctcattttcagatttagcgaattctttatcccagcaagctgtgaaaggcaatgtggggaagacattgtc

SEQ ID NO: 23540 - DNA, 120 bp, Homo sapiens
tagcgtttagcagtggaggttgctgaaatctgtgttagaaatcaaggtgctctgaagatctagtttctctttttcctttccctgctgccatagaagacaaagaatattcttgtctccttt

SEQ ID NO: 23541 - DNA, 120 bp, Homo sapiens
ctgcgtctgtgggctatctgccagttgtaagccagtcctaatggtttccatgttctattcccattaataaggaagacctacaattagctctccattacaaggcctgtccttgttaatagc

SEQ ID NO: 23542 - DNA, 120 bp, Homo sapiens
gcacgaattattaatcttcagaaacaagccatggccactcatcctctctttatgaccaatagttgatgactttataactctgggctttaaacataaatccactgaaaaaaataacaatcc

SEQ ID NO: 23543 - DNA, 120 bp, Homo sapiens
tttcgtttcaaactgtgcctctgagaaattgtttatattgatggattttaaaaatggatcccaaatgatggatagggacccgagctcatcaatttagtgatgtcagtagctccatagagt

SEQ ID NO: 23544 - DNA, 120 bp, Homo sapiens
tttcgccattgcccactcacaagtgcaacttaccaataaaggattatggattagaccaccttgtatcaaaacagcttcaaatgcaatttccaaggagccagtgcttttaaaagacagttg

SEQ ID NO: 23545 - DNA, 120 bp, Homo sapiens
gcacgtatacctagctttgccaggaaatgacttaaattgactttacctctctctaaggaagaaggaaactttaagataaaagagactctagtctggaattgatgtgaatacccactgggg

SEQ ID NO: 23546 - DNA, 120 bp, Homo sapiens
tctcgtttggaaaggtcatgcatttatatggtagacttgctattaccctgactgcagtaaagcagccaattgccaatgtattgctatacatacagctgccttcggggtgactaggctata

SEQ ID NO: 23547 - DNA, 120 bp, Homo sapiens
gatcgatggggatgttcagtagttgaaataccacaaacatattactgctgggagaagttgctgtttatgggaaaataaaattttacctcattgttctctgcgtgatgcttgttgccaaaa

SEQ ID NO: 23548 - DNA, 120 bp, Homo sapiens
gttcgatgcctatggagaaggtactgcaaagcttttagcagaggacaggagctgtaacttcagaaggtaaaaaggtttcagtctgacctagggaaacacctgttttaaatgatttagaaa

SEQ ID NO: 23549 - DNA, 120 bp, Homo sapiens
gggcgtgaactgagtatgttctcagtgtagaaaattcaaaagcctaggaaacataagtattgacacatcatgtcacttgaaccatgcggaaggttttacgacatccctactttatagaga

SEQ ID NO: 23550 - DNA, 120 bp, Homo sapiens
aaacgtgctaggctgccctcccagtagccttgccaggaggggtggctgctttgccttcacggcctgcgggtccacgcctgagcgttgttctccacagatcgtgcacctgggaagaagttc

SEQ ID NO: 23551 - DNA, 120 bp, Homo sapiens
acacgcatacatgctgcgtacgtgcgtgtgtgtatctagtggaaggtgcttacgttttaaacagctcctttaatggtgtgactcatgcatgggcacgatcatctgttttccagactgccg

SEQ ID NO: 23552 - DNA, 120 bp, Homo sapiens
ctgcgacctgcccatgctgctcctaggcatcaaccagaaacagattgacataacagagttgtttcaaaggctgctcttgaaaggatgcacaggattcagcaattatcagaacctgggtgt

SEQ ID NO: 23553 - DNA, 120 bp, Homo sapiens
gggcggataaaccaaatgtgttcccccacccaattttgtagccttcattctgcttacttccaggtaaagtagacaccccatgtctactggggctacaatagcccaatttcatggttaggt

SEQ ID NO: 23554 - DNA, 120 bp, Homo sapiens
ttgcgaattacagccaaattcggccttagaaattcaaataatttctctatataatcttaaggaaaatggcaggacaatgtaaccagtttactgagtgactcaacccctatcaaaactatc

SEQ ID NO: 23555 - DNA, 120 bp, Homo sapiens
taccgttcctctgctcaatcctgcttttcccttttcctttcagagatgtcacttcaccagttttgtactcctaactccatctcagcctaaaattggcacaattggtaccagtggcccacg

SEQ ID NO: 23556 - DNA, 120 bp, Homo sapiens
gaacgtaggtggtaagacagcatttgcaggctgagtgactcactgtctggctggctcggaggcccccatccctggtggataggtggcacagacagtccctggcacaagaaggctgtccag

SEQ ID NO: 23557 - DNA, 120 bp, Homo sapiens
gaacgcaatgactggtgggtgatttgggtgtctcaaatatgggaagggtggataaaagagacaaggacagtgggcttccatggttattgctgagttggattgacgtcctgcaagtggata

SEQ ID NO: 23558 - DNA, 120 bp, Homo sapiens
agccgcagagtctctgtggtagcttgccaacaatcctcatctcatgctgtagccaagcagagcaagctgaaggccaagcacaggatttgatggtaaaagtagctaacagccaacaaatac

SEQ ID NO: 23559 - DNA, 120 bp, Homo sapiens
taacgagacttaagtcacaacataactgattgcggctgaggggtctgatgagggagaaatgggatctatgccagaggagccacctaacctggcagcatgtactgcaggggccaggggcgt

SEQ ID NO: 23560 - DNA, 120 bp, Homo sapiens
atccgactcttgctaatatactctgtcttatgactgccacactgcgctccttgccaggaagagcagcgcctaccagaacgtatcacattgagccactgtccccaatgtcataaaaatcag

SEQ ID NO: 23561 - DNA, 120 bp, Homo sapiens
ggtcgactgggggtcattacctcatcattcccgtcttccttgaggaagtcacaggcctctgaggatgaaccggctgcgttggtctccggcaccccagctacagaagagcaggcaggcata

SEQ ID NO: 23562 - DNA, 120 bp, Homo sapiens
agacgcacaagtgactggaatttcagtcctcagccaagcttctaaatatgctgcttccctgccattcccgacaatgtgagaaccacagggagatgccgtgggtctgtagtttgatagttt

SEQ ID NO: 23563 - DNA, 120 bp, Homo sapiens
gaacgcccatggcatctctcttaaattttgttgcaacgtttctttgcgcggctcttcggaagggaggtgttacccattgctatttaatacccagcctgctgcagatcatctccatccccc

SEQ ID NO: 23564 - DNA, 120 bp, Homo sapiens
ccacgtgtgagcattcaacaaccctatctggttcagctgcatatgggcagagggcacaggagagagaagccaggaagccagactcacctgctccgtcctgttgagataggcagctctccc

SEQ ID NO: 23565 - DNA, 120 bp, Homo sapiens
catcgcccccagtatccgcactgttctcggctggctcctcctgcttgggggctggtgagacatcaggctgaaccatggggacattggcttccactctgctgggagacatggatcctgcag

SEQ ID NO: 23566 - DNA, 120 bp, Homo sapiens
aaccgaggtgccagggtgcgtggcatgagagccagcttgggctgcagaactctcttttgcctccctgctgtgcacagagccctcctctcccgtcgtggggctgggcacagctcggagggc

SEQ ID NO: 23567 - DNA, 120 bp, Homo sapiens
cttcgctcacgttctctgcgggctccactgcaaaatctttctgcggaggtggtaccaccaggaacagtttgggcttcttggaaatggggggtggcttcctgctgggtgaagagtctggga

SEQ ID NO: 23568 - DNA, 120 bp, Homo sapiens
ggccgagcctctgcctccccagcgcttggagctccagggctgcggctcacagggccaccacgctcagccgcactgccatggtcaccctgactcgagctcttggcaggcgtcggaagcgag

SEQ ID NO: 23569 - DNA, 120 bp, Homo sapiens
tttcgggatttcaggaaagcagatggctttaagtggtactgtggagcaactggagttcgttgttcctgagctgttcgttcagacaactgtgccgcctcagcgcctgagttctttctcacg

SEQ ID NO: 23570 - DNA, 120 bp, Homo sapiens
ttccgtggttatcaggggcatggggggcctgctggtctcctccttggtagaaggcggcctcaaggatccccgggaggattctggctggccagaatttgtgaaaggcggcctggtgtcttt

SEQ ID NO: 23571 - DNA, 120 bp, Homo sapiens
actcgccaagcgaataacttaaaagggaacataggataaagaatttagctgatatggtacagatcaatggtgggggaatgctatatctggtatctacttttagtccctaaagaatgccat

SEQ ID NO: 23572 - DNA, 120 bp, Homo sapiens
ccacgccctgaatgtaaaagccaaaatcctcctaatggtttctaagccctacatgatatggctcaatgtgggtggctggctggtgctcggtgagttccttaaatgaatgaatgatctgta

SEQ ID NO: 23573 - DNA, 120 bp, Homo sapiens
tagcgtgcttgaaggggtactgtaactatatgacaaaggtgatggccccattggtcacccaggtagattttatcctcagccacattttccaccttcattaacccaaggcatatgacctga

SEQ ID NO: 23574 - DNA, 120 bp, Homo sapiens
caccgcactccagcctgggcaatagagcgagatcctgtcttgaaaagtaagatatctgagggagaaaataaacagggtcttccaatgccaagcagtttttccaaacttctcgaaaattgc

SEQ ID NO: 23575 - DNA, 120 bp, Homo sapiens
ccacgggaaagaggaatcggtcacagactccagacaatatattacattcattatcaaaataaatcccagagcatctatggagaactcgttccggcacgatgtcccatgttaaaataggat

SEQ ID NO: 23576 - DNA, 120 bp, Homo sapiens
cttcgttaatacaattctaactgctcgtcaacaggataactctatattctgaactttctagctttacttgaattgtttttaacatcccccgacaccaaaaaagaaaaaaaaaaaaaaacc

SEQ ID NO: 23577 - DNA, 120 bp, Homo sapiens
attcgacttagaatgcaccccaaactagatgtgttcaatggcaacgtgaatgcttcattcagagagaaacaaaatgtgtagaatgtcctaaaaacatcacagtggcaaaggggatcatta

SEQ ID NO: 23578 - DNA, 120 bp, Homo sapiens
agacgaccgctttcagcccttgcctgcaaattcttctcaggtctatgcacatggcgagagaaaggtttcagaagattcccacagtgatcaaaggaggaatcgctaattcccctcagcctg

SEQ ID NO: 23579 - DNA, 120 bp, Homo sapiens
ccccggtgttacctcccttctccacaactaatgtgtttcttcctcctggtttcctaataaaatgcacctaccctcaatctgttcgtgctctgccatcagttacccagacctaaactaaca

SEQ ID NO: 23580 - DNA, 120 bp, Homo sapiens
attcgtacttgatgtgctatgtgttctacacatggcagacaccccctctgatatttctggaagctcctggagggccagagccaactccatgcccttcactttgcacagtgccaacctcgg

SEQ ID NO: 23581 - DNA, 120 bp, Homo sapiens
tggcgaactttaaagcattcttgtcacatagtgccataattttctaacctttatgaaaattttccttaagaaacgccttgcaaatactaaacaaaaatgtccacacatttatgaataaac

SEQ ID NO: 23582 - DNA, 120 bp, Homo sapiens
cttcggcctcccaagtagctgggatgagtaactttttgaaaagtttccctgtgtgttgaaattggattttattttcttgaataccagatattttggcaatcaaatgattacaggggctgg

SEQ ID NO: 23583 - DNA, 120 bp, Homo sapiens
acccggaggaaacagtggctagaagataattagatgggcaaagtggaacacctcatatgggcatggggtctgcatcataacagaggtcagggcgggagattttaaaaactttaaaattag

SEQ ID NO: 23584 - DNA, 120 bp, Homo sapiens
gtacggcaaagtcagaaaagtgagcattgcgtctggccacgtggaaaccgtgaacaccctggagaacaatcctgtgatactgtggagccagaaatccagagtcagatgcactgaagagga

SEQ ID NO: 23585 - DNA, 120 bp, Homo sapiens
aggcggaaaggctaggaattatttcctgaatgaatgagtttcattaataaaataaaaggaagggtctctgtccccccacccccaccctttcatgatctctctgtataacattctgtagtc

SEQ ID NO: 23586 - DNA, 120 bp, Homo sapiens
ggccggcgagaagtccagagcatcagacaggaagagtttcctgggggtaggaacagtgactggcacatggtaagtgctcatcaacacgcaatgaaataacacaccccaaattctatcaaa

SEQ ID NO: 23587 - DNA, 120 bp, Homo sapiens
tgtcgacaaatcttggataccctttgacatataaattagccaccttgggacaatattgatctcttttgcataaaatactgggtattctgttacagcaaaacttttccaggaaaaaagaag

SEQ ID NO: 23588 - DNA, 120 bp, Homo sapiens
ccacgtgatcttctaccaagtcaagcatcctctgggcatctgccaggctcgtcagccaggctcctgtggtcctttgccttccctttcctaagagaccacacattaagtcactgttcatcc

SEQ ID NO: 23589 - DNA, 120 bp, Homo sapiens
gttcgcgccctcgagagagcagaggcgtctgtcccaacttttattctgaaagttccagcaacaatgaaccttgcacagttcactcagtgaaacaaaataatgaagaacatagatggcctc

SEQ ID NO: 23590 - DNA, 120 bp, Homo sapiens
agccgagattttctcttttgctctcaaatgctgtcttgcaaaatttcacaagtacaaacatatgttatcatctgaccttttgaaaactattctgtgtatatataaattcacttaaagtgt

SEQ ID NO: 23591 - DNA, 120 bp, Homo sapiens
ccacggtgcataataatcccagagttacaagatccacagagcacggtgcggcccacaaaaacagctcttctgaccctcctcttgatcatgccgaacatgatctgagccttttcctttttg

SEQ ID NO: 23592 - DNA, 120 bp, Homo sapiens
ttgcgttctatttctatttaatgcatctttgtaaactcagctattaactataataagtctacagccactcaagagggaaaaagttccaagtcaaaaatagaatgctaagtttaaagtttt

SEQ ID NO: 23593 - DNA, 120 bp, Homo sapiens
tttcgaggcaggtgtgcttctgacagctctattaagttactcaactgtctctagggacttcagttcctaacaaagaaaggctgcagcctggtgcccttgggttggttttttgtttttgtt

SEQ ID NO: 23594 - DNA, 120 bp, Homo sapiens
gtgcggaataaaagtgacatgagaaagcctgttttcaggactggcgttcttcctcttttgtctttgctatggtaagttgcttatcttctgcatatctgcttagaaaactttctgtgtgat

SEQ ID NO: 23595 - DNA, 120 bp, Homo sapiens
agacgcttccaaaacctgctctgtaaggtcagaaaaggaatttgtcacttgaccctcacagggcagtcaggaatgtcaaaattaaagagactaacagaaaggaacacactctcaatacct

SEQ ID NO: 23596 - DNA, 120 bp, Homo sapiens
tctcggaggttccttccagccctgacacgttagttagccttgttgttaagctaactctacttggatcccttcacatgtccaatttaaagactgtgtacatatatttactaaaatgcttca

SEQ ID NO: 23597 - DNA, 120 bp, Homo sapiens
gaacgccaggagctgcagaaccggacccccgccaaccagagatcccacagggggacaactgatgcgaggctagcttgttaagctacagttgccctacatctagctgtcactgcatgatgg

SEQ ID NO: 23598 - DNA, 120 bp, Homo sapiens
gagcgagagagaaaaagagagagagcgagagagtggggaggagggagagtttttggcaatctgtgtaaatcaaaaaatgttaatgtaagttaggggggttgcggaataaactgaaagaaa

SEQ ID NO: 23599 - DNA, 120 bp, Homo sapiens
taacgtggccattgggcattcttagcattgactgataatccttgctagagtttcagcctatttgatgcttctaagaaaaaacttcatttctgcatattttttcttgaagacttttcctct

SEQ ID NO: 23600 - DNA, 120 bp, Homo sapiens
atgcgaaaacagaatataatgccatgaattttgatgtataagcagctttttaaggattctttctgacaccgtatgtcaaaaatcatattattcatgcccaattatttaaaaaaaaaaaca

SEQ ID NO: 23601 - DNA, 120 bp, Homo sapiens
ttccgttaagggataaagggcacaatcttttgtatcgctacgtaagcaagtcctcccttcacaagttgcccctgtcctttacaatgacttctttattttccacaagtcacatgtacagta

SEQ ID NO: 23602 - DNA, 120 bp, Homo sapiens
caacgcaaccaggcatgtaattgctctactcgccatctgtgtaaaatgccagccaaaaataggaactaatttcaagtgccatcagttttttggcctcacaggccacaaatgagcactgtg

SEQ ID NO: 23603 - DNA, 120 bp, Homo sapiens
acacggctggattgcaagcgccgctggggttggctggtttggctgggagtgaggtgcataaacagaaggcatgtgaaaagagacaaaggtgcaaagagaaccacatagagcacagaagag

SEQ ID NO: 23604 - DNA, 120 bp, Homo sapiens
tcacgttctgaagtggccctgcctgggctgggagcagtgaagtgtgcctctcatcagattaccacatgaatcacccagacaacccacagggacctttagcttaggacagcgtacagtagg

SEQ ID NO: 23605 - DNA, 120 bp, Homo sapiens
acacgaataatgaaagcttatctcaatatcaaaagtaaatactttgagccagatatttataattaaaaaaacaaaacaaccaaacggtattacccccaggaccacagcaaacacattccc

SEQ ID NO: 23606 - DNA, 120 bp, Homo sapiens
gatcggcactgggattgaggttagctaaatagtctaaattagtttaagcaactacttttggataatcagttgcacttgtgcccactcacagggagaggctgttgaaattcaaggatttcc

SEQ ID NO: 23607 - DNA, 120 bp, Homo sapiens
ctccgtctcaaaaaaaaaagccttagtctttaacctttcacaaagtattgttatgattggcaacttattttgtgaaatgccacaatcaagtatgaaactgttgcctcaggcagggcagaa

SEQ ID NO: 23608 - DNA, 120 bp, Homo sapiens
ccacgcagtatacatatgatatatgcatatatatgtacacagaaacccatattcaaaacacaaatacatatgaaatgtttcacgaaacatgtcttacccttactgtatgatacgctccaa

SEQ ID NO: 23609 - DNA, 120 bp, Homo sapiens
caacgattcctccataaaatgctcccacatattttgttttttaaatccccaggtaagggtggtaccagccttgactgaaaaacaaaacaaaacaaaacaaaaaaaacactattccatgta

SEQ ID NO: 23610 - DNA, 120 bp, Homo sapiens
ttacgaggtggggaaaagccagttgcagaacaatacatacagtatgattctaattatgtgaaaagaaaccacccacgctctaaggggtgtgcacatgaatgatatgagtcagaggatgtg

SEQ ID NO: 23611 - DNA, 120 bp, Homo sapiens
tcccgcaggacttgtagaaatgtttcctttaacctccatatccagcttgtgtttcatgcttcctttcactatagttaccaaccgctctcccgcttgacccagcagattagaagctctttg

SEQ ID NO: 23612 - DNA, 120 bp, Homo sapiens
atccgtgaaatagacacctaacttggcatgacttttaactagtttacaacactaagatgagtcagagaaaaatggatcacattcaacagcaatagttgaaaacaaaattacaattgtcct

SEQ ID NO: 23613 - DNA, 120 bp, Homo sapiens
agccgtgtgccctgataaaaacacaagacccccaccaaggcagctggaagttgacatacacagttccgatgtgatgaaagcagaagtcaccagaaagagcttacctcccccaaaaaacct

SEQ ID NO: 23614 - DNA, 120 bp, Homo sapiens
tgccgcaggcaactcgtgactctgaggagaaacccatgtgacaaagacacaaactgtggatctaaaatgcttaagcaccggtcctcgatgaaaggaatgacttcttctggtatctttaca

SEQ ID NO: 23615 - DNA, 120 bp, Homo sapiens
ttacgagtttcttttacaaaattacagaaaagctcaataaaataagaattaaaaatgcattaactccaattttataaaatctggtttttcaacagaacaaaatctgtgttgatttttcag

SEQ ID NO: 23616 - DNA, 120 bp, Homo sapiens
cctcggtatgggaaacttcctaagatgttgttttggctgtaaatcatgcggccctctcagagcaatgcatttgtgtgatttgcccaattatgcatgagtacagtcagcatggaaatccag

SEQ ID NO: 23617 - DNA, 120 bp, Homo sapiens
aagcgataatacatcaggtttaaatcttctataaatgagattggattactgcagctgataaacatggaaatgagtaattaaaacatggtgtgtaaggaaacataagttttctttgtggtt

SEQ ID NO: 23618 - DNA, 120 bp, Homo sapiens
cctcgtaggataatttgtggtgctgagaacctgcctcgggtttcttaataatgttttcctagctggctaattaggatgtgctattgatgtgatccaaaaaagcgttcagcttcaaaagaa

SEQ ID NO: 23619 - DNA, 120 bp, Homo sapiens
atacgcaactttggtttctcccttctcattcatatgtggatttattatctagatcagagcttccatttccccataatattctagatgcccttcaagtctcagtaacaagatcaatgaaaa

SEQ ID NO: 23620 - DNA, 120 bp, Homo sapiens
cgccctgaataaacaagatgcctcacacacggcctagatgggtgtttcccaaattcgcctcattggaatcacctgggggtccttgctagggaggtctgttcctggcctcacccggctgcg

SEQ ID NO: 23621 - DNA, 120 bp, Homo sapiens
gggcggggccacctgggggtgtttttcaccaagctcccagtgactccgatgattcagaaagtgtgggtaacccggagatgaacagctgctgcacgttccaagatgcccgaggaaagccga

SEQ ID NO: 23622 - DNA, 120 bp, Homo sapiens
gcccgtcaagttccgggtgaaaacgtgacattgggggcttggatagccaaccccaggccaagtgaggcacaagcgacagctctcccatagctaggaagcgaggtgggagctgagcggccc

SEQ ID NO: 23623 - DNA, 120 bp, Homo sapiens
ccacggcaggaggaaatgggggcgagagggctctgtgaaagcaagcccatgtccatgtccataaaaaggccccggaaacaggcctggcttccccggccccagtgaagcagacagaaagca

SEQ ID NO: 23624 - DNA, 120 bp, Homo sapiens
tctcgggagccacatatactttcacatgcctgtgcagaactctctggttttccaaccagaggtatttttgtgtttatctctgacaccagctctcatgtagccgtggtcagctttcatctt

SEQ ID NO: 23625 - DNA, 120 bp, Homo sapiens
gcacggcctcctgcagactgggccatctgtggcgatacagggacacagacgcacacacatgctaactcagccttcaatgtcaccaaaacaacagcagcaactgttaaataaatgttagct

SEQ ID NO: 23626 - DNA, 120 bp, Homo sapiens
aggcgctgtgctaagtaagtacttttgatgcgtgtctcaaatttcttggccatctgctagtagtttgagaggtttctaaacaaagagaaggaaaagggaaaagcccaaaagccttcttgt

SEQ ID NO: 23627 - DNA, 120 bp, Homo sapiens
ccacgcgatgtttgggcggactaatcctggagacagccctggcctggttcaaagcctagctccattgcttaccagctgtgaatgtgggcaaacaagttatttgtgccttcactgtatcac

SEQ ID NO: 23628 - DNA, 120 bp, Homo sapiens
ccacgtagcaacacagaaagtctcagatcccaggtatcctgagcaccaaggtctgctaacttattctagggcagtagaacaataatctggaatttttccaaattctgctattagctctgt

SEQ ID NO: 23629 - DNA, 120 bp, Homo sapiens
tctcggagacatgtaacaggtctgctgacttcaaaccccaagcccttagtcatttaccattgctatactgtcttggcatagcataaaagtctctagagagatatgacacagagccctttc

SEQ ID NO: 23630 - DNA, 120 bp, Homo sapiens
acacggtggtggggagggtgctgtggtcaacatatgctttcaaggctccatctactttcaacttcctcagtacatgttcatccttccctcctatgaagtctttttttttttttttttttt

SEQ ID NO: 23631 - DNA, 120 bp, Homo sapiens
caccgcacctggcccctcctgtgaagtcttgtaacacaacttattcttatgttcagatctcattatttttatgggaatagcttttctccttaggtcgattataaattatttgaggacagg

SEQ ID NO: 23632 - DNA, 120 bp, Homo sapiens
gctcgcttgaatttggagctctatggggagttagaggaacttcctgaggataagagaaaaacagccagtgactccaatctggataggcttctgtcagatgtaagtgtaattctttttctt

SEQ ID NO: 23633 - DNA, 120 bp, Homo sapiens
ttgcgaaaaaatgtaccttttgaactattttaatgtatacaatcacgtggttgctagcgtattcacagtgttgtgccgatcgctgttgaattgcggaacacgttcaccaccccagaaaga

SEQ ID NO: 23634 - DNA, 120 bp, Homo sapiens
tatcgtatttacatctaagcatgtattctcagaatacagatgctggcaaatctgaaagcaaaatatttgcttctgtacagatataataaaatcttaagatatagaagatagtggtgaaaa

SEQ ID NO: 23635 - DNA, 120 bp, Homo sapiens
tggcggttacttgtttttaaaggcagaacgacatttgctatttctgctaattgagtacattgccatatgtattactttgccagggctgccaaaacaaagtaccacagactgggtggcttt

SEQ ID NO: 23636 - DNA, 120 bp, Homo sapiens
ttccggaggctaaagttggagctcagggtggcagggttgcttttttctgaggcctctcagtttgtagtagccgtcgtgttcacatggcttcttcctctatgccaagtgtccaactttgct

SEQ ID NO: 23637 - DNA, 120 bp, Homo sapiens
acacgttagttttagattccctattaactattgacaaaaaagggttaatttctactgtttttctctcttttgaataagtaaatgtgagggaacttgtatgccaatactttcactatttcg

SEQ ID NO: 23638 - DNA, 120 bp, Homo sapiens
atccgcccaccctggcctccccaagtgctgggatcacaagtgtgagccacggtgtctggctttaccagttcatgttttacatttttttcctcttaacagataataagtataacttgctat

SEQ ID NO: 23639 - DNA, 120 bp, Homo sapiens
acccgacaaggcttagaggtgctacctaggcaaccagaaaacagggacctctgccaaatccactctcccctccacaggcctctctccaagctgttctcctagtcattttcatcacaattt

SEQ ID NO: 23640 - DNA, 120 bp, Homo sapiens
cctcgtcacaataaatgagcaaaacacattttttcactgtctccttacatgttgttatttctcttcacagatttcttactttgcaacattaactaaaatgtgatgagccctgcaatgtca

SEQ ID NO: 23641 - DNA, 120 bp, Homo sapiens
tgacggaagcatttttctttcttcttaagattcattatactcaaacgtgtccttgtagcagcatagaataggaacaaatataaaacatgtataaccaaggtttacttttggaagtaattc

SEQ ID NO: 23642 - DNA, 120 bp, Homo sapiens
ggccggaaacatctctgttttgcctcttattttattactgtattttataattccaagtaaatgagagtaaaacttatctcaaaggctagcaaaatgatcctgaagtctaactcaggcaat

SEQ ID NO: 23643 - DNA, 120 bp, Homo sapiens
ttacgccactctgttttgtctcaggatgtgacaaggctacatggacagggatcaaaaaaacagcagtgacttaaggccaggggaggaagaacacagaaaataaatcgttaaaacttggaa

SEQ ID NO: 23644 - DNA, 120 bp, Homo sapiens
acccgtcctcttctgttaaccctttctctctaaatggatcaattaaacttcaatatcaaatccaagggaaacacaagtggaactgtttcctcatttggcgttgaaggttaaaatgcatgc

SEQ ID NO: 23645 - DNA, 120 bp, Homo sapiens
gctcgagatttcccaaatatacccactttttcaggagcctggaaatcaattccaactagctcaagaaactaagtgtatgtatgtgggcaggctgggtcggggagacagacagaggagggg

SEQ ID NO: 23646 - DNA, 120 bp, Homo sapiens
gtgcgttgaactgataacctaggaagttaccctctagccatctcaagataactgcagttttctaaacacagggctctctttcacccctaggactgaggctggaaggtgtggacacatgct

SEQ ID NO: 23647 - DNA, 120 bp, Homo sapiens
ctacgctcttccaggagccacttcctggtaccagcccggcctagccccacccccaccaccgaagtacatttcttctttcccttctcctatagcaacttttgctgggactttgtcctccaa

SEQ ID NO: 23648 - DNA, 120 bp, Homo sapiens
tagcgacttgaggcaattcatatatgacaatcacttatttgcacacaagtctccttgaggacaggcattttttacttttagctaaatttcttgaagagggcctgcaacataccagatgtt

SEQ ID NO: 23649 - DNA, 120 bp, Homo sapiens
ggccgtactgtttctccagtattaattatccacgtaaacatacttcactaggctgcacaatcatctggcctgctctgagctccccagtcagcagcctcctggtcttccttttcctacatt

SEQ ID NO: 23650 - DNA, 120 bp, Homo sapiens
cctcgatgtcagcaagtgctgtgcgctgatgtgttcactgtcaacaacacacggggaaatctcgctctgggcagccaagagttatcttggcttcaggctgcctctgaaagcgaggttagc

SEQ ID NO: 23651 - DNA, 120 bp, Homo sapiens
agacgctgccagcacactttgtgcatgaactttgagagatgtgcaaggaagtgttattggcggggcattcaggaactcaaactactggtgccacagaactgatgggaagagagaggcagg

SEQ ID NO: 23652 - DNA, 120 bp, Homo sapiens
actcgactgggcaacccccacctcattcggtgaaggaattttaaaccgttggcattaaagattccacctctctttctatgagctcttcaaatggtgaaggaagagtggattcccgtgaca

SEQ ID NO: 23653 - DNA, 120 bp, Homo sapiens
ttccgtactatggatgttaaggggatttttctttcttccccttcagacagattcatgcattctcaattacaacttgagctctatgtgagacccaattcaagaaccccagtaggagtttct

SEQ ID NO: 23654 - DNA, 120 bp, Homo sapiens
aaccgcttttattttaaaaaacaaaaacaaaaacaaaaacaaaaaaaaacacctaaaccaaagtcattccctggacattttgcatcatcaccctctagatagatagagcatggagctcta

SEQ ID NO: 23655 - DNA, 120 bp, Homo sapiens
tcccgattggcccttctccacatgggttcacatcaccgcactgcttattaacactctgtggactccactgcacgtcaggtgaaacccacaccaccacagaactaccttgcattgcctgat

SEQ ID NO: 23656 - DNA, 120 bp, Homo sapiens
caccgtccccttgatcataaaactggacaatgctggcctttgggtcttccttcatgtggctgttatttttgccaaagtctctaactcccatttgccattaggtctcagcccaaaagccac

SEQ ID NO: 23657 - DNA, 120 bp, Homo sapiens
ccccgttttcccctcgcggcatttgtcacagctcttagtcacatatttattagtgtgggggttgttcacgggtgctgttgcttttcatgtctttctctccctcactgtgggctccatacg

SEQ ID NO: 23658 - DNA, 120 bp, Homo sapiens
taacgctggcactaactctgctcacaccaggagggctgtgagaaggcagagctgctgagaaacaccacatcaggactgctgcctaaggaggcgtggccaggcatctgagtccttgatttt

SEQ ID NO: 23659 - DNA, 120 bp, Homo sapiens
gtgcgtccggccagattcctgatgtaagggattacctgattggttcttgatgctttgcaaagctcttcctcaaggatgaccttacagagactcacaacaaccccatgagggaggtcccat

SEQ ID NO: 23660 - DNA, 120 bp, Homo sapiens
aggcgtcactatccccatttcccaaataaagacagaggggcagggctcacgcagctcatcaggccaggtctggtctcctcactgggtagagaggcccttaacacaacaggaagtactgca

SEQ ID NO: 23661 - DNA, 120 bp, Homo sapiens
acccggatgggaagctccattcaggccattttcaaatgacgatgcgactggagtagtaggacagcattccatgttagtcttggcacggagcccactgaattaggtaccactcagcaccct

SEQ ID NO: 23662 - DNA, 120 bp, Homo sapiens
aatcgccgacaaaccattgttggcttaaaaacgccccttctctgaaggatcaggtgaccaggtgaggaacacgtgctctgccagggcaactggcccacaccggggaacagaatcaagact

SEQ ID NO: 23663 - DNA, 120 bp, Homo sapiens
ttacggaaaatgcagtgtggctcggtgttttcgtggggctggatcagggatcaaactcaagggaagaaaaaaactagaaggacatgaagagccaggaagggtgaaagggaaaacatgaga

SEQ ID NO: 23664 - DNA, 120 bp, Homo sapiens
agtcgcctgtctccgtccctctgtgtccctctctgtccctgtctgtccctctccgtctgtctctgtgtctctgtatgtctctttgtccctctctctatttttctgtttttctctctctct

SEQ ID NO: 23665 - DNA, 120 bp, Homo sapiens
gaacgatgcattacgagactcaaacatgaagacccccagggaaagctgcaactccaactgccctttacccctcacaggctgagacacagactgctgtttcatctttttgtttttgttcta

SEQ ID NO: 23666 - DNA, 120 bp, Homo sapiens
caccgtgtccctgtccacatgggttgttaatgggaaaagcaacgggccaaggcctagactagatgtgacagtttatagcttgcattttccagggttttcttacaactatcttcttcaact

SEQ ID NO: 23667 - DNA, 120 bp, Homo sapiens
aaacggagtccattccaaaacttattttctgagtcttttgcctcattcctcgctcacctaagctctattcacttggctttttatctggatccctcctctcaaaaaatatttgttttcacg

SEQ ID NO: 23668 - DNA, 120 bp, Homo sapiens
ccccgtgccaggtttttctctcccaaatactgtgttgggtaagcgttatgaaaatgatctgggatggtgctggtcacgttgcttaacgccgtgtcacagaggcaccagtgactactgtct

SEQ ID NO: 23669 - DNA, 120 bp, Homo sapiens
ccccggtgtcacctcacagtccgcagtagctgccagacctcacctatcatgtccacttggaaaggctacagagggcctctcccagctgagtggctgtccttacagagcctcctggaagcc

SEQ ID NO: 23670 - DNA, 120 bp, Homo sapiens
tttcggtcagcctagtcacctccttgtatcttactgcaagggaaaccaaatgatccagccttttactgagcctcgttactccaagtcaaatgagggtgctgctatgaaggaagaagagaa

SEQ ID NO: 23671 - DNA, 120 bp, Homo sapiens
tgccgcatttcccttctaactgtgccttggagctgggcttgcttcctcccaccactgctgccagttcaggacctcagcctcacctgcctgccagggcaacctgacctgcttccagctggg

SEQ ID NO: 23672 - DNA, 120 bp, Homo sapiens
cttcgtaaattcgtgcttcacgtggatccagatggtttttatttcctgatacacaccaggcagttcatctcccttgacccagtgccttgtgctgtttcttctgccctgtggtactgtaca

SEQ ID NO: 23673 - DNA, 120 bp, Homo sapiens
gaacgcagcatctggcacacagttgggatcagtatgtggttttggaaggacagaggagggaaggaaggagctgctgggtgaatgctgcctgctactgtagcaccgggtgagggcctttct

SEQ ID NO: 23674 - DNA, 120 bp, Homo sapiens
tgacgtcccaggacatgaagggctgaggctccacgcctagccctcctgtatgacctcggccctgaagcccagggcctgactcaccaaaccaaaaataaaattcaacatctacttgtgaac

SEQ ID NO: 23675 - DNA, 120 bp, Homo sapiens
cgatgcatcacatgcaggtctgcttcccggtcccctcttagcaagctctcatgacctttctctctcctcctagtacctttagactcagaatcgttttccttttacctctgactcctgttc

SEQ ID NO: 23676 - DNA, 120 bp, Homo sapiens
catcgtctcctggcagatgttgtgtgttaagtgtcaaggccagtgttccaacaatcaggtaactcaaagagagttgcctggccgcagacagggggctgtctgtcagtaccctttcttgtg

SEQ ID NO: 23677 - DNA, 120 bp, Homo sapiens
gaccgaggtcttctgctggtctggaacagttggcatcctcgcacaaccctgtctgttttcatggctttaagggacactgttgtgccctcatagccagaaaaacctttttcttttcttaga

SEQ ID NO: 23678 - DNA, 120 bp, Homo sapiens
atacgtatagtttctcttcaagttgatatagttgtttcggattcttaagagaaataatgggtattatgaaagtgtacttatttacctcagggtctgttggacaagcaaaacataaaccat

SEQ ID NO: 23679 - DNA, 120 bp, Homo sapiens
agacgttgttgctgacctaaaggagcccctagttgaacaggagggttgacggtgccgtgggaggggtgtgtttcaagctgtgattctagtgttgtgaggcttaggagaagatgttgataa

SEQ ID NO: 23680 - DNA, 120 bp, Homo sapiens
ggacgatgtctaaattgaaatgtttatccactatagttgtaatgatctttttcagcctctttagaaagcagttcattgagcgaagaagagaaaataaaaagaaacataaaagggtaatat

SEQ ID NO: 23681 - DNA, 120 bp, Homo sapiens
gcacgtgtgttggaggaggaggcggggcctgctcatttgtttgcccattgtgaggctgtcctgcacctttgtgcttttttgtaacagggtgaaggcccctgaatagaggccttgtgccct

SEQ ID NO: 23682 - DNA, 120 bp, Homo sapiens
cagcgggaagtctgtgtgacaagtggaaatctagaatctggaagaaacgtggtgtttgagggggaaggtggtggggagagtggtcataatctttcagcctttgcttttgtgccccacaag

SEQ ID NO: 23683 - DNA, 120 bp, Homo sapiens
gcacgctcctgtatttcagagcgtgttgaaaagcaggtcgcaccaacactaggctggttaaatccagtttgtacagcttgtgtacttggtggtaccagctattgctccaaagtttcctgg

SEQ ID NO: 23684 - DNA, 120 bp, Homo sapiens
tcccgaggtaagaagtctagacccagttctgttggtctgagggatattaagcagaatgacatgttcaaatctgttatctgaagaggacactgggggcactgtgagggagaatgggttgga

SEQ ID NO: 23685 - DNA, 120 bp, Homo sapiens
atgcgagtctcagttaaggcattggtaatgggaatggaggctagtctgtatttcaggaatggtcagatgatgtttatagccagcatctggtaagtgctgatttcattctcataacaacca

SEQ ID NO: 23686 - DNA, 120 bp, Homo sapiens
tgtcgtcatatacatgaagaagctgaggcccagagatgctaagaaacttgtctaacttctccaaagccactgcttggaggagttaaatttagttctgtttagtgttacctgagtccatgt

SEQ ID NO: 23687 - DNA, 120 bp, Homo sapiens
tatcgtcctttgtgatgcctttttatgataaaactcagtcatccacgctcactcaactgtcatctaattgcctgcgaatccatgttctttagtctcctgcaacttgtgccatgacctgta

SEQ ID NO: 23688 - DNA, 120 bp, Homo sapiens
cagcgggtcacctccgcggatataccacaagcatgtcaaattgccgaggacacaaccatgccattcattcttcccaccaagccaaaagaaaatctgggtgtatctggacgactcctgtct

SEQ ID NO: 23689 - DNA, 120 bp, Homo sapiens
tttcgccccctgcctttctcttttagcaaagataaataaaaagtgaaacaaattggcacaacttggaggatgaagaagtagcaaaagacaaagctgttagagggataggagaaagtcatt

SEQ ID NO: 23690 - DNA, 120 bp, Homo sapiens
tagcgctattcagtaaacatgggccaaattaaagaactcacagttctcttagaaaaatgggaattcaaaaggagagagttctgaaattggtgacttataacctttctcctgtgggcttgg

SEQ ID NO: 23691 - DNA, 120 bp, Homo sapiens
aagcgactccactgtgacagatacctttcacaagtgtgcttgccgaatatttagtccaatctgaaagaagtaatggagagtacttgaggtcgtgctcgagaaccttcctctccacattgc

SEQ ID NO: 23692 - DNA, 120 bp, Homo sapiens
agccgtgcccaggctggcactgcctctggcagagtttactcctgagctgcggggtccctgagggtgcccactgccacccgcctggacctcccagttctagcctcgtgctggagaggtctg

SEQ ID NO: 23693 - DNA, 120 bp, Homo sapiens
atccgggtttcattgtgcaactctatatctcttgaaaaagcacttatttaaacacccaaatgtattaatatgtcatggtgtgaattgtgatagtgaagcaaggtaagcaggtgctggttt

SEQ ID NO: 23694 - DNA, 120 bp, Homo sapiens
attcggttggttcggagggctctgaattttcttctttacatgggccaaggacacaaatgagtcttctgttatcactttctcaaatgcattttctgagtcatcatctgctgtgacgatgtt

SEQ ID NO: 23695 - DNA, 120 bp, Homo sapiens
tggcggtattttatgaatcatgggatgcattacttacagccttttttatttctacttgaaatattgtgcataagagcagtgcctcgggcgtgcactgtctaagccacggtgccctgtgtt

SEQ ID NO: 23696 - DNA, 120 bp, Homo sapiens
agtcggtgaccagtatttacccttgaaattgttttggttcagaatgttaggtgttttttactttacatttaattatttggtactagtactaatttactacaaatgtctgaaaccaaatgg

SEQ ID NO: 23697 - DNA, 120 bp, Homo sapiens
taacgaagtctatgctgtttgtccaggtcttttatcccgactagttatggttctaatgtaaaaagcagcttctagtggtgacacagtgcatatttctcagtgtctataaattcaggtctt

SEQ ID NO: 23698 - DNA, 120 bp, Homo sapiens
atacgtgttatctaaactgaaaatcatattcctgatcctctgactgccacagataccccgtgattagacttagtaaggagtgaccgtcctgagagattctgggaccgtgtcctgcctggc

SEQ ID NO: 23699 - DNA, 120 bp, Homo sapiens
catcgtcaaataccaggctttgtgctgaatgtgccctgaccttcacggggggcgaattggtgatgatctttaggacactaatttttttctttattatttgtaattcttttgagcaatatg

SEQ ID NO: 23700 - DNA, 120 bp, Homo sapiens
tgacggagtcagagcggttagcctgatccagccggggtcccaggaccaccgccccagaggactatgcaatgttctttatgtgtgtgtgtgagtgtatttgtgtttccaatttattgaagc

SEQ ID NO: 23701 - DNA, 120 bp, Homo sapiens
gcgtttgtgtacgctagcacatttaatgcgtaaaatagaatcttactattcctgccttcaaaataatattcatacataatttattgtaaatactgacaaaactaccacttaaaaccattg

SEQ ID NO: 23702 - DNA, 120 bp, Homo sapiens
gctcgatgccacagaagccatgtgcccatgactttaccactttctctggaattgttttggctgtcattcctttgaacccgctctgaatcaactagccaggacatgtggactcgcatacat

SEQ ID NO: 23703 - DNA, 120 bp, Homo sapiens
tttcgcactcatcctgctcttttatccttctattcttctgaaaagggtgttttttaatgtacaggtttactaattcatatctcgttagaccccagagacaaaactgcgtggaagcagtcc

SEQ ID NO: 23704 - DNA, 120 bp, Homo sapiens
aggcggtcttcgcggtgtaatatctctcagctgcttgaggtttcacacattcacaaaaataacagcatttttagctgatcccaatagatttttctctgcagctgcatcacttgaaaaagc

SEQ ID NO: 23705 - DNA, 120 bp, Homo sapiens
atgcgcccgtggaaaagacgggatttcaaagtgtattgttgagtgtgctgatgtaaactcatgggcacgtggcagggcaggcttttttggcaggacctgtggtctcaacctgcagtgatg

SEQ ID NO: 23706 - DNA, 120 bp, Homo sapiens
taacgatattagcaaattagcaccacaaagcttgccagctaattcaccagagcctgctcactctctcactgctgtaattaaaactaattattttctaaaacatagtaatacatgaatatg

SEQ ID NO: 23707 - DNA, 120 bp, Homo sapiens
ctgcggagccttttttaaagctttttttttttttcttggcacataacgctacatgtgtcccgccttggttgagccagcactttcatttgcagaatgtagaatgggccctgttcatcaaac

SEQ ID NO: 23708 - DNA, 120 bp, Homo sapiens
tcccgtctctctccttccctctcttcctcactctgactcttcacatctggttggtgcctcactcgcagcccctgcagcccagtgttgcgcagatggttttcacagtggggttctgtagaa

SEQ ID NO: 23709 - DNA, 120 bp, Homo sapiens
tgccgttgttgctttttaaatgttttgagatgccctttttccttaattggaggtgcagtgggatgagcgtgaggcgttgggagatgtggcgggcagaaggacctccgagcagtgcttttt

SEQ ID NO: 23710 - DNA, 120 bp, Homo sapiens
tgccgtgtttttcactaggttaataaaaacaagaagtggcgtgagctggcaaccaacctaaacgttggcacctcaagcagtgcagcgagctccctgaaaaagcagtatattcagtacctg

SEQ ID NO: 23711 - DNA, 120 bp, Homo sapiens
tggcgatcttgttataaagcatctagaaaaggttgtgggggagttccaatgagcgctgtaggaagcacctccccagcctgtaagctggagatggggaggggaatggaagggaccaggctg

SEQ ID NO: 23712 - DNA, 120 bp, Homo sapiens
attcggttaataagtctgtaaccaaaaacccatccatcttggctggcaggtggctgactgaatttctattattagctgacaggtgatgtcacaaaacctgtcatggatccaactagggaa

SEQ ID NO: 23713 - DNA, 120 bp, Homo sapiens
tgcgagctgatggcttttggtggagcccaggaggggcgctgtggggcacagacgtgtgcggggccggcagctgcggagagagcagcgcaccccagccttcaattccccgccgaagatggg

SEQ ID NO: 23714 - DNA, 120 bp, Homo sapiens
agccgaggcccctggctgctgccccgctcccttgcggccgcagtgacactcagagccagattcctcagacaatcttcactcctccgtggtggctgccttgggaggcgttgcggggtgaag

SEQ ID NO: 23715 - DNA, 120 bp, Homo sapiens
agtcgcagctggtcccaagcagtggggagggcaggacagggagtaagacaccgccttcctggggtgcacacggaggaggggcgctgcccaggagcggaggggaggggagcggagcgcgga

SEQ ID NO: 23716 - DNA, 120 bp, Homo sapiens
gaccggtgccagacttcacccgcctagctctcggaacccccgggggccgcgctcggctccgcctgggggctaccggttctgggccaggagaagaagtggcatccgcggggcagggcgggc

SEQ ID NO: 23717 - DNA, 120 bp, Homo sapiens
gggcggtgacggccggctcaggtggcggccccaccccagcgcccttcagcaggcctgggtcggtcggcctcggaccccgtaggcgccggcggagctggcggcagggacccgacagctctg

SEQ ID NO: 23718 - DNA, 120 bp, Homo sapiens
tgccgcggactccgcaggggacatcccccaccctggcggcccacccaggcggagcgcggcggggaccgtgcatctagcgcgccctggtgacctgcgggccgaggcgggctgtggggcttg

SEQ ID NO: 23719 - DNA, 120 bp, Homo sapiens
ccccgcgactcagccttccgggcccacagcggccctgacccgggaagtgcggaggtttggccgccttcaacagcacctgccaggccactgggagcagcgggggagaagtgggctcgcaca

SEQ ID NO: 23720 - DNA, 120 bp, Homo sapiens
caccgacggcctcccgggttcggcggggacgacccgagctaggagcccgcgggggccgtgggagctgctccgccgaggtggacccggggcgcccgcacccctcaccttctttccgtgggg

SEQ ID NO: 23721 - DNA, 120 bp, Homo sapiens
gtccggggccagggacgcagcgggggacggcgggcatcagccgggcagcgcccgagccgtccctggccgggtccccacacctgcgtgctcgggcatccccagggtcgggggcgcggtgaa

SEQ ID NO: 23722 - DNA, 120 bp, Homo sapiens
aatcgtggtccccgcagcccggggcccgccaggcccgcggagtcagcccaccctggcgaggggcccaggcacccgcatttaaccagtcccgacctcggcacgtggcggcgccggtgtcgc

SEQ ID NO: 23723 - DNA, 120 bp, Homo sapiens
ctccggctgatgctggctgcttcgaggtgcacacagatctctttccacatgggcttcccatcctggccgctggcccacacccagccgggaaggcaggccaggccagtggggaagggccga

SEQ ID NO: 23724 - DNA, 120 bp, Homo sapiens
ccacggcagggaggggcctgggaacgctggaacctggactcttctgtgctgtccctgcagcttcagaagaaaaggcttctgaaaataaatccagagaagggccagaaaaatgaggacagg

SEQ ID NO: 23725 - DNA, 120 bp, Homo sapiens
atgcgtgggaggggaggttcctgtgagaacagacggaaagcaggacttctgacctggaaaggcccttgcagagacagcctcgggagccaggaaccagggagactggaaagcacaggcgtc

SEQ ID NO: 23726 - DNA, 120 bp, Homo sapiens
gaccggatctcttttcactcctgcaatgaggaatctcaaaaccaaacgtgcgggctggccagggacctcaggcggcttcctacagcttgcctatttgcattctcgttttatccttctctt

SEQ ID NO: 23727 - DNA, 120 bp, Homo sapiens
ccacggcccctcacactctgagtgtctgctgccagctgactaagtccactaggcaagtcggggttcgggttgagcgagagcaatcttcaagcacagcctcattttcttcagaacctgcag

SEQ ID NO: 23728 - DNA, 120 bp, Homo sapiens
actcgtcatgaccctggcccaggccttctgttgtggagtagatggaaaatccctctttctcgtcctattctggtctcagaggagttctctgtcctcaactctctgtagttttgagacaag

SEQ ID NO: 23729 - DNA, 120 bp, Homo sapiens
tgccgaggtggatgggagggatccctattttggaaaaataacatatcaccgtacacacacccacacgcagaggggaaaatgtggcagcagacaccaaaatattcctatagttattgatgg

SEQ ID NO: 23730 - DNA, 120 bp, Homo sapiens
attcgagaaagtaaagaaagtagacagaaaatggcaccttaaaacccaaaccgccagaaacaccacttagatctcaaaaaggcactaggaaaagcccacttctggtttttgggttttggc

SEQ ID NO: 23731 - DNA, 120 bp, Homo sapiens
gggcggcccctgggtgctgagagttccggggtcgggagtgggatacaggtgggtaaatgaggggctccgagagggtgcagctgcgggcgctgaggactgaactctcctgggagcacgcgc

SEQ ID NO: 23732 - DNA, 120 bp, Homo sapiens
cagcgatgcaaggacctggggaaggagtttcctgggcaaagctagagtaaaggccctaggcaggaacagccctgtgtgttgaaggaataagaatgctggcagggctggagtgcagtggga

SEQ ID NO: 23733 - DNA, 120 bp, Homo sapiens
ggccgggaaactggacaggaaactcttaaaacactaggcaacagaggaatggatgtggagagatgaaggaggcaggcggtgttcagcggcagagctgacaagcaggacttgcatgcatca

SEQ ID NO: 23734 - DNA, 120 bp, Homo sapiens
tatcgacatctgttttcatcaactttaccgctgccacctatctcaaactactgccaattctcaccagtcacgaagggtccggtccacagaacttccaaccagttgtttaaaaaaagaagg

SEQ ID NO: 23735 - DNA, 120 bp, Homo sapiens
caacggccctgcctgtgacttgccctgagataatcttatcagcggaggaatggcgatctaacccacttgggaaggaatttgagctcaataagtctgctatcttttggtggttttcaggcg

SEQ ID NO: 23736 - DNA, 120 bp, Homo sapiens
cagcgtctattggagatgttacttctacttgctgagaaatgattgcccttcttgtactgatcatagaaataagtctctaaaatgtgtgttcctggcaacttccttgacataatctggtat

SEQ ID NO: 23737 - DNA, 120 bp, Homo sapiens
gcacggtcatggtggttgctctggcctttgcaaatgtgaccttcatctctgtgtctctgtcccctgcttagagcacctgccccctgacctggcatttcctcttgcctgtagagatctctg

SEQ ID NO: 23738 - DNA, 120 bp, Homo sapiens
agacgctcacaggccagcttctcagcacttcccagactgtcctttccttgtggcttctgtctgtggccaggagcctgcctgtacttagtggcatttttttgttttttcatggattctctc

SEQ ID NO: 23739 - DNA, 120 bp, Homo sapiens
caccgtgcccggccaatagaatgcagtttgcagtgggaattgtcttagcttgaagtggtcattaccttcacaattcaggtggaaatggtggtacaactcaagtactttggagaattggag

SEQ ID NO: 23740 - DNA, 120 bp, Homo sapiens
aagcgcaccatagttagcctggatagcaggagaccacgtaggtgcacgcccacgtcagaatcagagcaaaaccatttgtcaaattgtggacatgaagttctggaaataaattttcatgag

SEQ ID NO: 23741 - DNA, 120 bp, Homo sapiens
tagcgttgggaaatcaggtccatgagaaagaagaaaggctgtgggatccgtattttttggcccagaagttacagatacaacagctttcaaggacatatgttttagagagcccgtggggtt

SEQ ID NO: 23742 - DNA, 120 bp, Homo sapiens
cagcgccaaagtgaaaggaggtcggctcacagtactgaacggcagattgaagggagacttcaggaatagtcttggaagtgagggagacggtgaatgagggaggaagtgggaagtgtaatc

SEQ ID NO: 23743 - DNA, 120 bp, Homo sapiens
aagcgtctaaagtgccaagaacagtgcctggcatacagtagacacgcactccgtgtttgtagaagcggtgatgtgaggccctgcagggggtcgaggggtgggcacatggttctgctgctt

SEQ ID NO: 23744 - DNA, 120 bp, Homo sapiens
agacgactggggacagccctaaaacacagaggttttgctcatgatacgccactgaagatttacatatggagagagagctgatgaacagctgttctcgtctcctcgcctggcatcttacag

SEQ ID NO: 23745 - DNA, 120 bp, Homo sapiens
agacgtcactgccttagtttgcctcaggaaggggaatttcttatttcatagttttaaaattacctgaaatagcagataattctttcagaaagattttttttttcttttaaaggtatctct

SEQ ID NO: 23746 - DNA, 120 bp, Homo sapiens
ttccgtctaaagcctgtctccatggagcctcaaaactcctttctacccacagcaacttcttttctttctctggaaaatgtgtgcctggactcagattccatccatgtggcttctcatgga

SEQ ID NO: 23747 - DNA, 120 bp, Homo sapiens
aggcgtgcaccaccatgcgcagctgagagagcactgggttcttgttctggctctgccgctgcctctggcatgcccacggcgaactccctttgcctccctgggctttgctttcttcatctc

SEQ ID NO: 23748 - DNA, 120 bp, Homo sapiens
tgccgatggcctctaagcttccgcccatcccccagtgatctcaggttctagaaaagtaggctagctggcacccttgattatgaaaaccatggtgccacccttccacttccacctttaaaa

SEQ ID NO: 23749 - DNA, 120 bp, Homo sapiens
tatcgtacagttgttggtttgtgttttttcctgacagacttacgaaattccttcacatcttctttccatttgaattctgcaccatctagttcaggtttgcagcttttttttttttttttt

SEQ ID NO: 23750 - DNA, 120 bp, Homo sapiens
ccacgtgcagacatctctagttttcatcagctgaagttcacaaattaccttcacagttatctcaaagtacagcacaatgctgaaacccccctgtgaatttgcaaatgtgaggatcaccat

SEQ ID NO: 23751 - DNA, 120 bp, Homo sapiens
gttcgtacaagacgcttgtgtctttgtaagactttctcagggaataaaaagtttttccttccactgtaccacaagatatttcctgcttatctcaggcattgtttttgaaatccgaaagtc

SEQ ID NO: 23752 - DNA, 120 bp, Homo sapiens
attcgtgttggtgtcaggatgttagagtactatttccaatagcagttggagctagagctgtggaatttatggatgtgtttggctgtggaggattgcagagaaagctgtggacaaatatat

SEQ ID NO: 23753 - DNA, 120 bp, Homo sapiens
gggcggtagagagtgccaagaactgaattcatctagaattgagcattcgtgctgagttagccactccactgcttagagaatcatattgccaacaaagagtttttctggcagttcatgtga

SEQ ID NO: 23754 - DNA, 120 bp, Homo sapiens
aagcgtgagccatgggacctggccttaatgcatctttaaacatgaactgacacaatttaaagagcaaatagatataaatgctctaatttttcttttagcacataaaaagcatctgaaaat

SEQ ID NO: 23755 - DNA, 120 bp, Homo sapiens
agccgggatttgaacccagtcatcctggctcggggtccatggccctggctggccctggatgccgctggggggccctctgtagggctgacttgccctcctcagaagccccttccttagctt

SEQ ID NO: 23756 - DNA, 120 bp, Homo sapiens
ttacggccacatagccctctggtagtcctcatcaccagctctgctcttaatttggccattttccgccttaggattggagtgaatcatccttcaaagacagagccacgttctgcactgtgt

SEQ ID NO: 23757 - DNA, 120 bp, Homo sapiens
gtccgtggctcacagttcatgcgtgagccacacacacatgcacactttgttgggaagaagagcaacaataaattgcttatttagaaatgggcgaggccaggtgcagtggctcacatctgc

SEQ ID NO: 23758 - DNA, 120 bp, Homo sapiens
atccgtcttccagtatgtatattttctaatctgtacactcatcagaatgtagggttagactacataatatactctgaaaatgttcctgtcattatttgagaaattatttattttatagat

SEQ ID NO: 23759 - DNA, 120 bp, Homo sapiens
gaacgctgaaaaaggcatgtgtatcactctcatatcagtgttccagaataaacaatacgggactttgttaaataatgcatccacttctgcataaacgtctggcaaatgctgttatttcta

SEQ ID NO: 23760 - DNA, 120 bp, Homo sapiens
gttcgtgacgtctcgctgttgagcagattgctcttaatagcttactgttctctgtaagatgaaaacaaaattgactgttcagcaccattctcctcctcttagtgtcattagctttcttaa

SEQ ID NO: 23761 - DNA, 120 bp, Homo sapiens
tggcgtccacacctgtcaggacaggcagggcccagggtcggagctgatagtaagtcagtttcattctaaacattcatttctgaacatttcacaccattccctaagctgttagtgctttgt

SEQ ID NO: 23762 - DNA, 120 bp, Homo sapiens
ccccgagctccatctgggactctgtcaacattgacataagccttggaaaacacagactcatggctgtttttgctgttcggtatttaggatttacactacaccaggcacatcactaaatac

SEQ ID NO: 23763 - DNA, 120 bp, Homo sapiens
acacgccatccacatcctttctctcggaggctggctggtccctcctgccagtcttcctgaatgagtttgcttcaccagatttggctctgtctctagaaacaaaatgagttgagtttcatt

SEQ ID NO: 23764 - DNA, 120 bp, Homo sapiens
gcacgtgggtataaatgggttccagggctctcaattttttggggggacaaggcagagttacgtgtaaacaaccgacaagccagctcacggccatgcggcccacactgtaccgtcactccc

SEQ ID NO: 23765 - DNA, 120 bp, Homo sapiens
agtcggctgtgcaaagagcaaaacttggatgtccccaggtggctgccagggttgggatggaaggttctgctctagaagccaataaaacaaaaatatctgcctattagattgcagtgatta

SEQ ID NO: 23766 - DNA, 120 bp, Homo sapiens
tatcgccaagaagttggattggaagaagtccctggaatccccaatctagtacttcagtttctatgtttattgctaggcagtgaatattgagtttcatggcaaatgtcatataactgtaac

SEQ ID NO: 23767 - DNA, 120 bp, Homo sapiens
ttccggttgttgtttgagccctgcagcctcttgactgctggaaagcttcactggccttgaccttggaaggctgacccagcctctcttccccgctgggcggtggggagtgggtgatgtcca

SEQ ID NO: 23768 - DNA, 120 bp, Homo sapiens
caccgatggtataggcacaaaaaccaagccaacaaggaacccattccaggagtatgggggtgcttggggcctgggtctcaggggagatctgctttggtggagtctccaaagtataacatc

SEQ ID NO: 23769 - DNA, 120 bp, Homo sapiens
tctcgacttggcaggtccggagactcagtgttatcgcagctctttcagaagtgtttgcatcggggccttacaggtgcctgagatatcaaaaggatgctatgtatttagtgagaacatttt

SEQ ID NO: 23770 - DNA, 120 bp, Homo sapiens
tcacggggagagagatgaccctgaatgacacctcatgccagccacggcgagtactaatgagtcatcccacagttgagcatatcgctggtgaccagaaggttcctgccttcctgttacagc

SEQ ID NO: 23771 - DNA, 120 bp, Homo sapiens
ctccgaatcttttccatggtctttccagcagagcacagtgtaactgattgcattccagctcacgtgattctagtcgcatcttaggccttcttttctgggctgatgcgaaatcacacacaa

SEQ ID NO: 23772 - DNA, 120 bp, Homo sapiens
gttcgatcttttctttgttgtgttttggtttggagtcaggcattacagctccgtttggagtctgggtcttccagcacagtgcttatcacacaatatgggctcaaaaaattctggaagcag

SEQ ID NO: 23773 - DNA, 120 bp, Homo sapiens
ggacgcttctgtcttcgtctgttcaggcatctattacaacaaaataccaggccgtgggtagctcacatacaacagaaacttacttctcacagttctgggaggtccaagatcaaggagctg

SEQ ID NO: 23774 - DNA, 120 bp, Homo sapiens
catcgcattggcggttaggatgaattttgagggaggaccacaaacattaggaccatagcagcttctttggtgtgaggagaggctatgacatggtttcctggcaagggggaattcagcagt

SEQ ID NO: 23775 - DNA, 120 bp, Homo sapiens
actcgaaggccatcaaataaaggagaaacatttgagacggtctcttatccaaataaactgaaaaattgctaagtatataacaagttgcattttttttttaaagtacaaagctggttatac

SEQ ID NO: 23776 - DNA, 120 bp, Homo sapiens
acacgagtgtcttcacatttgggagtcttgcccaccctcaagctcgtgggttaggaaggggcttccctacatggccctacgtctgtgctagtctcagggtggcctctgtgctcctgccta

SEQ ID NO: 23777 - DNA, 120 bp, Homo sapiens
cagcgactgtgggaacccatcttctctgaatggactgacacacgtgcgccagggctcggctgagaaggctgaagggcagtgtggacagccagattattcaccaaccgctggaccagggac

SEQ ID NO: 23778 - DNA, 120 bp, Homo sapiens
ggccggggcagtggatggtggccgggagcactgaaggacttggggcagcatctttagcagctggcctcagagtgtgcttctgaataggtacttgattacgtacctcccctcctaagagta

SEQ ID NO: 23779 - DNA, 120 bp, Homo sapiens
ggccgtaggtaaggccaacgttctcttctatcgctgcaagctggtgaccctcagctgagccaccctgcaactgggtgcctgaaagcagattacaccagccggggggccatggctgcatca

SEQ ID NO: 23780 - DNA, 120 bp, Homo sapiens
catcgactccaggagctccccagctcctgtttctactctgaaggagaggctgcattctcagctcatgtggcgaacaggaatagttgatattcctttgctcaactgacctgttttcctatt

SEQ ID NO: 23781 - DNA, 120 bp, Homo sapiens
tcacgaggttttgccacagagcgtataggctcagctagagcattttcaagctgtttttctgtggccttgcttggtggacctctgctttttgacctcaagtttcacaagtgctttaaacat

SEQ ID NO: 23782 - DNA, 120 bp, Homo sapiens
taacggtctctcaggaagttgtttctggaaatggaaagactgttctcagaacttgacagttctttagggctccagttattctgaatgttgaagccaactggacaatgtatgacgcaagcc

SEQ ID NO: 23783 - DNA, 120 bp, Homo sapiens
caccgtattctttaaggttgtttccaccatttttccctagatctaatgtccattattttgccttttgcccttctctttttagtaatcagttaataatcgtgtttgccatggggaagtcct

SEQ ID NO: 23784 - DNA, 120 bp, Homo sapiens
cagcgtgtgctcttacccgctgcacagtgctgcccacctcctgctgcctgaggagccaggccctgaggaagccatgcttggctccctggagcagtggcacttccccttcccatggaccac

SEQ ID NO: 23785 - DNA, 120 bp, Homo sapiens
ccccggtacagcctcgagcttcgaaacagaaagccgagcctagtatgccgcggccggcgggcttggttctcaaatcctgggctccagtgggtgtagcaggaagaacttcggggaatttcc

SEQ ID NO: 23786 - DNA, 120 bp, Homo sapiens
gagcgcccacaggtaggccgttcagtgacaagagtagccaatcgagagggctgacacccagctgttaccaagtctagaggaaaacaaaactaatgactctggtgcaaacatggaatccaa

SEQ ID NO: 23787 - DNA, 120 bp, Homo sapiens
cctcggagggtggatttccccccagctctctaatacaaatgaaagtgagccctttgagtctaatcacacttcccaactcttacagctcaaaacacacaaacaatgagctttttcaagctc

SEQ ID NO: 23788 - DNA, 120 bp, Homo sapiens
tgccgagataaaagcagttaacaaccactcttccatgatgataaatggttgttggttttctttaatcaatattttaataactatttgcacactttgacaattatgactacagagagactg

SEQ ID NO: 23789 - DNA, 120 bp, Homo sapiens
atccgctcaagctggaactgccctcaggtctcccaaggagagcccagccaccctgccatcttgaagggcatcttcctggaataacagcatgctcatgtttcctggcacttcttctcattc

SEQ ID NO: 23790 - DNA, 120 bp, Homo sapiens
aaacgtctggatttacagagagagaattaggagctgtctttctacattgtgtcaagttttagaaataaacatgaagaaccaaaataataaaatgatggaaaaaattcactgtgaaagaag

SEQ ID NO: 23791 - DNA, 120 bp, Homo sapiens
agccgtgagaacagctggtgcagcctcagagaaggcgctgcagaagctcccagggtggacgctgggactcctgggccagaagctctgtgagcgtggcgaggggtctctgccttgttccgc

SEQ ID NO: 23792 - DNA, 120 bp, Homo sapiens
atgcgattctctaggcagatttggggtgggggctcccgagagggtctgtgaagactaccacttctccaggtacagagagggaggggaccctaagctgctgcctctcgctgaggtcagcag

SEQ ID NO: 23793 - DNA, 120 bp, Homo sapiens
actcgatgagccacctgagcagctcattcgcaggcaggttccaggcccagtcctgagctcaccacccagagtctgttggagacaggacctgggaatctgcatctagcacagtaatgtttg

SEQ ID NO: 23794 - DNA, 120 bp, Homo sapiens
gagcgttttatgtgtgtgaagtgtagtgctgtggagaggggcagcctcctcagaaaatggaggttgtgtcagctaggaagctgctcaggacaacggttccctcccgcctcccaccgcccc

SEQ ID NO: 23795 - DNA, 120 bp, Homo sapiens
aggcggcatggaggctggggccatgtggatgtagggttcatggtcttcctgcggtaagaagccggctccacaagggcctagtgtctcccaggcacccggagctgggctggactcctggag

SEQ ID NO: 23796 - DNA, 120 bp, Homo sapiens
ccacggccaccgcttagcaatgcttcctggaaaggcccctgcccgagcttggcctgcctgggcgttaagcgtgcctcttccccagctccaagccagaagaggagccggagcaggtccggg

SEQ ID NO: 23797 - DNA, 120 bp, Homo sapiens
tcccggagtggaatttctctgttgaaagtgggagtgtgtgctcttatgcctccaatacctggttctcaggtggtgcttattagagagaccccatggcaagcacttgccagccccagcagc

SEQ ID NO: 23798 - DNA, 120 bp, Homo sapiens
ctccgtgtatccacactgtgtgtatccagaacaaagctggtcacttctttacataggatgtaaaaaagattggagtgtgtccccagccagcaggggcatgcggtgggcactgaacaggac

SEQ ID NO: 23799 - DNA, 120 bp, Homo sapiens
gtgcgaactaggaccagaggcacaagtcacggattgcagatgtccagacctcaaacacccggggaactctaaggccagacttctaggttagttagttgaggctgtggggctgcggtgagt

SEQ ID NO: 23800 - DNA, 120 bp, Homo sapiens
aagcgaaacagtgtgctctggtgggctcataggcttcaggctgaattcagtcatccccaaatctagccattctgagtggctccctaagggggaacccctgtctgcagaccaaccccaagg

SEQ ID NO: 23801 - DNA, 120 bp, Homo sapiens
aatcgtatttctccttagtgaaattgacaaaagaattgagaaactccttttctgctgaccagatttttaaaaaaatccaacctcacattcttcagttagaactgttcttgcatggtggtc

SEQ ID NO: 23802 - DNA, 120 bp, Homo sapiens
tcccgctggacatgtccacttggggagataaaagcaccccaaatcatctttccccagtgaccccccaccttgctgagggccagccccattcacaggctacacagacgtgagggtcctacc

SEQ ID NO: 23803 - DNA, 120 bp, Homo sapiens
taccgactcctttctctgccacaccctgctcacctaatccatcaccaggctctgtacagtttgcttactaggtggatcccagcttaaaccacttcatccctttccttctgtgcactgcct

SEQ ID NO: 23804 - DNA, 120 bp, Homo sapiens
cctcggccagctgcaagccgccatcatctctcactttaactgtgcaaaggtctctcggaggacacccaccatccactctgctcctcatctaatccagcctctatgctgacatcagagtga

SEQ ID NO: 23805 - DNA, 120 bp, Homo sapiens
gaccgtttccaaacagaatctcatcactatgggaaggaggccaaaatccttaacctagtatacaagacccacctctctcggcttgcaccgtagtcctgcatgccacctgggctccagccc

SEQ ID NO: 23806 - DNA, 120 bp, Homo sapiens
ccccgaggtctcctctggttcctctctgttaattcctgctcatctttcagggagatgttcaggcgtgggctcctcagggaagcctgccactgcacacacttcccatagctttctgtatgc

SEQ ID NO: 23807 - DNA, 120 bp, Homo sapiens
actcgagtggccgatgtctctgcccacagttgggtaagcttcaagaggccaggcctgtgtcagtttcccttactgtattcccagcagccaactccttgactggcatgcagctgctcagtt

SEQ ID NO: 23808 - DNA, 120 bp, Homo sapiens
catcgtagtcttctctcttagagaaaaaaaaaaaaagtatattgcttttttggccctatgatgaggttagtgttctcaactggggggaaaaaaaaagcctcgggcacccaatctaaacta

SEQ ID NO: 23809 - DNA, 120 bp, Homo sapiens
tgacgcaacctacacgtgtatttatctactcaacagatatcggagggcctcacgtgtgcctcctacaaattcgaataaaacagtagctttcaaactttttgtgttttacagcaactcaca

SEQ ID NO: 23810 - DNA, 120 bp, Homo sapiens
aagcgtaattagagtagctccttctgagtaggccaaggattccattgacttatgccggggttagcccagggtgtcagcctgcctggggctgggattttaggttgtatacctccgggaccc

SEQ ID NO: 23811 - DNA, 120 bp, Homo sapiens
acacgataggcacctgttggcctgccttcttagaacagctcagttttaaattctggttgaaataaatcatttcaagcagccttgttggagcagtaggcagcccatccatctcatcatctg

SEQ ID NO: 23812 - DNA, 120 bp, Homo sapiens
cttcgggaaattgtacctaaaatgtgtgagtgcacgagagtgaagggatccatagctgtcatcagagttttaaaccagtaaggaatgaaaaaaaaagtctaagaacggttgccctggagg

SEQ ID NO: 23813 - DNA, 120 bp, Homo sapiens
tctcgtggtctccctgatattatatccttcttccttggtaaacttgttcccatcacaccttcacccagtcagcctcgcccaggctagaaaatggcagctcttggcaagcccccccaccgc

SEQ ID NO: 23814 - DNA, 120 bp, Homo sapiens
caccgcagctcttggtaggggggatgggggggcggggagtgcaaaaggccaggacccaagttcaagtcctgtgccatagagtcctacatcccatcaacagtgccccactgtgtggtgttt

SEQ ID NO: 23815 - DNA, 120 bp, Homo sapiens
ctccgaggaaatcacaacttcctcactgtgtgatgttcttagaaaaactctctataaatcctctcagaaaaccccatggaatcgctagacatcgatctgccacaaatgggaaaatcacat

SEQ ID NO: 23816 - DNA, 120 bp, Homo sapiens
ccccggccttgcttctcatgtatcttattccaaagaactccctcagattcactggcacgagtagtagcttctgactacttccatccctgagtgactcagcctgtttaaatcgagggctag

SEQ ID NO: 23817 - DNA, 120 bp, Homo sapiens
ccacgtgtgggttgcatcctggcatgcagtcaccaggtgagagtcctcagacccctctgttccgattctgttgggggttacagtttgccattcggattactgtattatttccaggaacag

SEQ ID NO: 23818 - DNA, 120 bp, Homo sapiens
agtcgaagtctcctaattttcaggactgtctatgttgaacatcaaaatatattctttagagcagatctttaataatcatatgacaaaagaaaaactttcataatcttatgacatgaggga

SEQ ID NO: 23819 - DNA, 120 bp, Homo sapiens
gaacgttgcataatagagcggggctcaaattccaaattaagtttctgaattttttccatctggaattttatttgatgattagtctagcatcgtaatggtgtccttcgtgttgacgtgaaa

SEQ ID NO: 23820 - DNA, 120 bp, Homo sapiens
tcccgtttattagggatgcaaaactccagccacaggtgacctacgactctgactccttccccacctactttaccctcccctcccccagtacattctggggctaaaccctaagaggtaccc

SEQ ID NO: 23821 - DNA, 120 bp, Homo sapiens
catcgctgggccgatgatgaaaatgaagaagtcttctgatgaagcgagaccccggaagtgcagcttcaggcaaaatcctgagcgaattctttgctgccaggacagtccataggctcttac

SEQ ID NO: 23822 - DNA, 120 bp, Homo sapiens
ttacgtaagcatgagcagtcaacgctgaaaagcagagaatgtggttttctggcggactccagagggagaccaggaaatcctctcacttacaatccatcaagagtagttcctccaaattga

SEQ ID NO: 23823 - DNA, 120 bp, Homo sapiens
acccggatcagaacataaaagacaggagacctcacggcctggagacccactagagcaaaatctgccatcccaggcagggaggagaatcaggcggaggcctgacatggtgaggccttgctc

SEQ ID NO: 23824 - DNA, 120 bp, Homo sapiens
gaacgtgaattttttttggagttagagtctttaaaaagataattaagtgaaaatgaggttatgaaagtaggtcctaatatagctagtatccatataaaaagagattaggacatacataca

SEQ ID NO: 23825 - DNA, 120 bp, Homo sapiens
gcccgactcacagcagactagaagggccgaagagttcacgtgtcaggcagcagccttcaaccaatgggaattgatgtacaattgcccaactccctccttccgtggctgggttaactctga

SEQ ID NO: 23826 - DNA, 120 bp, Homo sapiens
cttcgttggctgttttcccttcccaatcttttactcagctgctactgaagtttcatgcacctccaaaataaattactttcattcatgtccctgtgtcagggactgcttctggaagaaacc

SEQ ID NO: 23827 - DNA, 120 bp, Homo sapiens
aaacgaatgcaccccgggttagcttctaatttgcttcacagcagtaaaggtcaacttttctttgcattacccaagagaaaacttagccattacctcatcatggtgcttggatccctagaa

SEQ ID NO: 23828 - DNA, 120 bp, Homo sapiens
tctcgacctggtcaataggtgtgagacccagatattcttatccgggagatgctatttctttttttccagaggccagaggtggtttttagtaaccacctgtatcattttgcaggggcttct

SEQ ID NO: 23829 - DNA, 120 bp, Homo sapiens
atgcgtggccagactcacctcactgtgcctaggtgccaatatggcctctcagctttattccccttgcaatccaaaatctgccagaactggacagcagtttgatccttgaattagaccgtg

SEQ ID NO: 23830 - DNA, 120 bp, Homo sapiens
catcgctgggcaaagttccaagtaaactgcattgggaatccttggcattttaacaatggctcactgctccccttgtgactaatgggcaacacaggcctgtttatgagttcaagtctctgt

SEQ ID NO: 23831 - DNA, 120 bp, Homo sapiens
gctcgtaactgcttctgctgaaggtcatccttttggctccatgatcttcatggctgaggttgcttcattacttctggagggaaatcttgctgctttctgtaaacatttttttctcatggc

SEQ ID NO: 23832 - DNA, 120 bp, Homo sapiens
aaccgaaggaccaatcctttattactaacacgtaaactttatcttaaaatacgctgcatccatgttttttccaacttggggaatttaatctatttcagcaaggattctaccacggtgtta

SEQ ID NO: 23833 - DNA, 120 bp, Homo sapiens
tttcgggccctttccgagatcccgcaccactagttccctccacgctttcatctgttgccacagcaacattttggcttcttatgcccagttctgctctccgttgctttaagcacaaatgac

SEQ ID NO: 23834 - DNA, 120 bp, Homo sapiens
acacgccagggcaaagggtaggcagaagtacaaagatcacaggcatccagaggtcctctttggagaccctgtgtactagttgatatgaatgttgtgaaggtcgcttgggtgttcctgtat

SEQ ID NO: 23835 - DNA, 120 bp, Homo sapiens
tcacgtgggccctgctacgccacaaggaggagcttgcttttacttagcagatgatagagatattaaaactggggaatgacaatcattttagcattttggaaaaaatgttctgattgatat

SEQ ID NO: 23836 - DNA, 120 bp, Homo sapiens
ccccgcgtgaggaatgctgcaaggggagattgatgaaccccctgaaaatgaaggtgaaaaaggaactgcgcagtcagtgagtaatcagtaagtcattggtacttgcttgggatttccaag

SEQ ID NO: 23837 - DNA, 120 bp, Homo sapiens
catcggcattttactctcactcttagagcttagcttcaaccatcaaacagacagttgagtgttcaacagtccctttatgggacagatttttttagttgactgtgtattctaaccctgagc

SEQ ID NO: 23838 - DNA, 120 bp, Homo sapiens
acacgagtgcttagggcttacataagccccatctgcacgctgctaggagcagatcatcctactcaagacaataaaaaaggaatcatcatgtaccttacatatttagagatacgtgcgtac

SEQ ID NO: 23839 - DNA, 120 bp, Homo sapiens
agacgaattcattcagatcagtggtttcaaaccgtgctctgggcaactcaattgctaagggttccacaaacaggataaagtttcttatatacaaaaaaaaatgaaggtttcaaattacac

SEQ ID NO: 23840 - DNA, 120 bp, Homo sapiens
ttccgctgcactgtcctcatcccgatatgctgcatcaggctccagaatctcagacaggacatgagtagggatgcagctggtggaggtgacactaaacctgggtctgtccttcccagaggc

SEQ ID NO: 23841 - DNA, 120 bp, Homo sapiens
agacgcatcctctcaccataatttttctctcctggacttacaggaaggaggctggcaacctgggataacttgtcttttacccccacagggttcctgagctcactgaaaagactattgtgc

SEQ ID NO: 23842 - DNA, 120 bp, Homo sapiens
tttcgttagcatctggctccaggacagaccttcaacttccaaattggatactgctgccaagaagttgctctgaagtcagtttctatcattctgctctttgattcaaagcactgtttctct

SEQ ID NO: 23843 - DNA, 120 bp, Homo sapiens
acacggcaggtgaaaaaaccagactcctggaggcaacacccttttgtctctgacaagctttaaaatgggctttttacagctgagtttcttacctcaccccacccactaccccaagcatta

SEQ ID NO: 23844 - DNA, 120 bp, Homo sapiens
tcccgagtcctcctgtcacaccagctgggcacttgcagaagctcattgtgcatttgagtctttgggtactcactcttctgttaatctaactcctcaaataaaatccctagcacaaaagag

SEQ ID NO: 23845 - DNA, 120 bp, Homo sapiens
tgtcgggttattcgagatatgtcgtcggaaactccaaattagcaaatatgtatgaaaataggaaccatctatgaagctggaagagaggataaaaaacagaggtgccaagttagaccccaa

SEQ ID NO: 23846 - DNA, 120 bp, Homo sapiens
agtcgcccaggctgaaatccagggtttcaacaccaaagggaaagcaggaaaatggctcaaaagagaaagggatgtgtgtagatgtgggaatgaccgtgatgtttggaagtcactgcgagc

SEQ ID NO: 23847 - DNA, 120 bp, Homo sapiens
agccggtttctatagctggaaagagggagggaggtggagaggactgcggagaagctccctgttcgacatcccagtccccgggccacctcccaaaaaagggcaggctgggctgcagactcg

SEQ ID NO: 23848 - DNA, 120 bp, Homo sapiens
gcccgccgggcagcggggctgagcggagggagggtcgcctgggaacactagttctgtgctcgtccaggcagcggctgagagcagaggagtgggggcatcaaggaaagccgcggctgcctt

SEQ ID NO: 23849 - DNA, 120 bp, Homo sapiens
cctcgagttccgcgagcggggctgggcaccaagcctgaggctggggggacaggggcgcacgactgcactcccggtccggggcagtgcaggtattcggggaagaggaatcgcctctccaga

SEQ ID NO: 23850 - DNA, 120 bp, Homo sapiens
aaccgactgctgttccttccaccacccgtaacctctctgcccctcacttcctgtttcctctgctctgggtacccccagcccctctggccccaaattcctcccccatgctcagttctctgt

SEQ ID NO: 23851 - DNA, 120 bp, Homo sapiens
agccggccgtgtttccccctaaagcccgcttggccctcccagttccgcagctgcgcggcccgcccgccgatcccatggctcccttctccacccttgggatttctcgtttgttcgcctcct

SEQ ID NO: 23852 - DNA, 120 bp, Homo sapiens
ctccggtaccctcaatcccgtagatgcaggtgggcatcctccagccccagcaagtactgcggaccagttgggctggctggcccctttcctgcagaagcagacaacacccacttctaccct

SEQ ID NO: 23853 - DNA, 120 bp, Homo sapiens
cctcgtaggagcccctttctacactcacttccctggaacccgtgatcctgactcccctcctcccggaccccaagcatccaggacgtgtacggtataaggggaagttgtagtgggaggcag

SEQ ID NO: 23854 - DNA, 120 bp, Homo sapiens
gggcgttgttcctggagtttcagggtagagaagcaggtggggaggagttgggtgagatacagaggtggaagccaaaagtctggagttaacctgacttctcttctggctccaggggctgcc

SEQ ID NO: 23855 - DNA, 120 bp, Homo sapiens
tgccgggatcgtctgtcctcaccctccttgtcctccccagccctaaccacccggcagcctcttctctgtctctgctgcccgtcctgccttcactctgaaacagcctgccccctcccgggt

SEQ ID NO: 23856 - DNA, 120 bp, Homo sapiens
cttcgagtgcagtgtggtcttcaccaggacccccagaacaccacaaacctggagagcccagaggctgccagaccctgctgcatgggaaggacatctccagggacatgggagagaggacag

SEQ ID NO: 23857 - DNA, 120 bp, Homo sapiens
ctccgatcctagaatggcctcatgcttggcaagggggaggggaacaggtccacaagatgatccagacacattatccaaaaaatcgctttcctctttaataccaacccaccccaggagaca

SEQ ID NO: 23858 - DNA, 120 bp, Homo sapiens
acacgtacctccatagctcagtatatgtttctgtactatacacctgttcctgagggagtgatagggttctcgtgtcatggggtccacatttttgtatgcaaacctcctaacacctgggtt

SEQ ID NO: 23859 - DNA, 120 bp, Homo sapiens
caccgtctcaccttatgattgctgtctgtatcccactttcttactgtctctcctcttttggtgtctctctgtcccttccccctttaacatcatgcccaccccaccatgccaggacaacag

SEQ ID NO: 23860 - DNA, 120 bp, Homo sapiens
agccgccgggtagacaatgtgctaaagctgtggatcatagaggcccgggagctgccccccaagaagcggtactactgtgagctctgcctggatgacatgctgtatgcacgcaccacctcc

SEQ ID NO: 23861 - DNA, 120 bp, Homo sapiens
ccccgctctgcctctggggacaccgtcttctggggcgagcacttcgagtttaacaacctgccggctgtccgtgccctgcggctgcatctgtaccgtgactcagacaaaaagcgcaagaag

SEQ ID NO: 23862 - DNA, 120 bp, Homo sapiens
tgtcggcctggtgactgtgccagtggccaccctggctgggcgccacttcacagagcagtggtaccctgtaaccctgccaacaggcagtgggggatctgggggcatgggttcgggaggggg

SEQ ID NO: 23863 - DNA, 120 bp, Homo sapiens
gctcggggggtggctcagggggcaagggcaaaggaggttgcccggctgtgcggctgaaagcacgttaccagacaatgagcatcttgcccatggagctatataaagagtttgcagagtatg

SEQ ID NO: 23864 - DNA, 120 bp, Homo sapiens
tatcggatgctgtgtgcagtcttggagcccgccctgaatgtcaaaggcaaggaggaggttgccagtgcactagttcacatcctgcagagtacaggcaaggccaaggtgagtgttgtgccc

SEQ ID NO: 23865 - DNA, 120 bp, Homo sapiens
tcacgagattgggttgtgcagaggctgacacttggattttcctgggcctcaggacttcctttcagacatggccatgtctgaggtagaccggttcatggaacgggagcacctcatattccg

SEQ ID NO: 23866 - DNA, 120 bp, Homo sapiens
ccgcgagaacacgcttgccactaaagccatagaagagtatatgagactgattggtcagaaatacctcaaggatgccattggtatggcccacactcaggccctcttcttcccaaacctgcc

SEQ ID NO: 23867 - DNA, 120 bp, Homo sapiens
ccccgtcaattgccttttcttcctatgtctccagcatgtgttctggggcctggcttagggctgaagagtcaccctatttttaatttctgagcacagttactcaaggtgtgtttgtgagtg

SEQ ID NO: 23868 - DNA, 120 bp, Homo sapiens
gggcgcccctcatagtgcggggtcgtgtgcccggcgggcaggtgaaggagtacgaggaggagattcactcactgaaagagcggctgcacatgtccaaccggaagctggaagagtatgagc

SEQ ID NO: 23869 - DNA, 120 bp, Homo sapiens
caccgtgcctggcctcctctgggactttttattcttactccagcatgggtcccagtgaagtctgctgggaggaaacaacttactgaacactccctctttgagggagacagggtaagaagg

SEQ ID NO: 23870 - DNA, 120 bp, Homo sapiens
catcgaggagggtgtggctgcagcagtgcccgctggctctcaagttcatgccactcctggggcaagagcctggggggtttttagctgttcctggggcctcctgcagcccacccagcacat

SEQ ID NO: 23871 - DNA, 120 bp, Homo sapiens
cagcgaggagaaaagtgaggaagagaaaatgaaggaagaggacagctcattcaagctctgtgtcccaggcattgttgccctccagtcgccaccgaacaaggctttcagatccacagacac

SEQ ID NO: 23872 - DNA, 120 bp, Homo sapiens
ttccgcccttcccctcccacgtgcccccaggtccaggaagcctcgctttggccggcggctcaggggtgcaataccagcaggtaccaccagatggtaccagaggacctaagaggaccaccc

SEQ ID NO: 23873 - DNA, 120 bp, Homo sapiens
acccgagaccagggagcagcgtgtggctgggctggaggccacactaggtgtaacgggtcttcctctgggtttgggaagtggtgactgcgggggtggtactactcaagcaccaccctttcc

SEQ ID NO: 23874 - DNA, 120 bp, Homo sapiens
taacgccttcagtggctgcctccatccctggttttcccatcatgcactgctgtgacagagccccagagggtcctctctgccagtagagccccgggcagcccagacatggacagcagttgg

SEQ ID NO: 23875 - DNA, 120 bp, Homo sapiens
aatcgtggttcacatttacatagccattaatggggcagaccctctttaagcacttttcataaaatcctgcattttacgactctgaggtaggtcctattgccatctccagttcacagtgag

SEQ ID NO: 23876 - DNA, 120 bp, Homo sapiens
gcccgatgtcacacagctagtgatgggcagagctgggacttgagtgcaggcagtttgggttccagatccaggctcttgagttggttggtggtgggggcaaatacctgccctttgcatgct

SEQ ID NO: 23877 - DNA, 120 bp, Homo sapiens
agacgcaggctctcatgctgccgctgccagagaaggccctcaaagagtgagcttcctggggaaggcagggcgaaggaggggtggtacctggctggctctacgtcctggaagaagagaggg

SEQ ID NO: 23878 - DNA, 120 bp, Homo sapiens
agccggtgctggccctgagtctgccctgcccagatccccggagctggtacatggagtatgtcttttcttagggtacatctaaggatcccctgtggccagcgggtcttgagacacagtgtc

SEQ ID NO: 23879 - DNA, 120 bp, Homo sapiens
agccgtgcccctgttaggaggggtgtccctgacttccctccctccctaagttcccaggctgtgctgcagcctcctagggaggatccgggaattctccagcaggaagttcctgcccagcca

SEQ ID NO: 23880 - DNA, 120 bp, Homo sapiens
cctcgggagggcgggcctgggtaagccaggggtccctggtgtccagtgttgcctaatctcaaaagtaagggtgggcttgggatggagtgcataatgatgggccttactggccagggaagg

SEQ ID NO: 23881 - DNA, 120 bp, Homo sapiens
gaccgacacacctggcttcccagagatgagatgggcagcagggccaggcctagtttggacaccaggaggtgctgttcaccagaaggtcctgctggcttccctgtggggtcccccgttcct

SEQ ID NO: 23882 - DNA, 120 bp, Homo sapiens
gcccgaggcctgttgcagagctgaagttcagtatcagaacatgatggctattcttagtaatcgcggtgattgataacaacagctgttggttggatggccggccctgtggccacagacttg

SEQ ID NO: 23883 - DNA, 120 bp, Homo sapiens
tggcgtggggagacagaaactgtagcagcctggtcccctgccctggcccaggccagcccagtgaaggtgggagtccctgcctctgtcccccagcctgcagggtgtgggtggagcctggag

SEQ ID NO: 23884 - DNA, 120 bp, Homo sapiens
ccccgagctggggccgggtggaagggcccatctggactgcccccctgagtcagccaggaggcagccttgtgaccagatgactcacctgtgccctaattgccctgttaatcatttcctccc

SEQ ID NO: 23885 - DNA, 120 bp, Homo sapiens
gttcggggtgtgggaccctgggctggtcacccttcctctctgttcctcattttccctgtctctccagtgaggcccatggcaccttcttgtccactcctgggattcctctgaactgcgggg

SEQ ID NO: 23886 - DNA, 120 bp, Homo sapiens
tggcgctgtccctggagcaggagggggtctgtgtgctggagcaggcctgagggcctcttcccagacacacagtgtcctgggctggtttctgcggaagggcctggcttgacatttctgggt

SEQ ID NO: 23887 - DNA, 120 bp, Homo sapiens
ccccgtgggtgagggcagagggctgggctcgggtcaaggctagaatggtgagagcccaagcgttcctgaaaggcctcagagaacactgcaggcgcaggcctgcagggcggggctgaggac

SEQ ID NO: 23888 - DNA, 120 bp, Homo sapiens
aaacgcctcagagaacactacaagggcaggcctgtggggtgggcccgaggactggggagcattgcagcattgccttctcccccttgcatagagacatctggggacagcttccacggcccc

SEQ ID NO: 23889 - DNA, 120 bp, Homo sapiens
actcggccgaagggccagcgggactgaagcccagcccatcacactcactcaccaggccctgggaggggtagcatccccccggagggtgcctttcctaacttgttcaaaagggacaatggg

SEQ ID NO: 23890 - DNA, 120 bp, Homo sapiens
ttgcgaagggacttgccaaatctctgtcactctcctggtctctccctgttggtatataaatgtgtccctgtgtgtgtgtttctgtctctgccctgtctccccatgtctcccagtgtctct

SEQ ID NO: 23891 - DNA, 120 bp, Homo sapiens
gcccgggattccaggagggactggcgtggtcacaatgtggactcaggaggttagaattttcctgtgaaccaggcggatgccctgcccgtcccaaggcccttgggaggctggggaggggaa

SEQ ID NO: 23892 - DNA, 120 bp, Homo sapiens
gaccgctgtaatttgctcttgactcccttgaatctgcccccttctctcctttcctgtttccctccccgacacccagccccagcacctgctgcctggaccctgtggcagcccctcccagca

SEQ ID NO: 23893 - DNA, 120 bp, Homo sapiens
tgccggggcccttcctgctccattacagctgcgctgcttgctccttcctggagcgtgttcactgtgttccttcctgcctctgggccttttcactttccattccccaatgcttggaatgtc

SEQ ID NO: 23894 - DNA, 120 bp, Homo sapiens
caccgtactctcccacagcacatggcaaagttgcaatataacttaggtaagtgattcagacctgcacccaaacttgaattccaagagggcagggctgcgtctacttggggtcactatagt

SEQ ID NO: 23895 - DNA, 120 bp, Homo sapiens
cagcgccagggcctcagcgcctggggatgcttctgagtgccctggttgcctcggcattctggtgcctggctggaggttgggggttgcactcctgcagacctcagtcaggtctcctctgtt

SEQ ID NO: 23896 - DNA, 120 bp, Homo sapiens
agccggtggggctgtgggaggaagaggccgactgctcaggccaggcctgctctacatctggccagcagcctcccccgctgccccaggacaagggccccagtgtctgctcagcttttacaa

SEQ ID NO: 23897 - DNA, 120 bp, Homo sapiens
cctcggaaggcacagccctggatgcatgaccttttccttctgaatgattcggaaacaggctgacaaacccggcgcaggagcaggtcctgtatagtgtgtgaacccctctatttcatccat

SEQ ID NO: 23898 - DNA, 120 bp, Homo sapiens
ggccgggcagccagggcaaggactggctgggagggccttagtcctgccaaggtggggtggggtgcggctagaggccaggcccagcccaggtggacttgacgtcatgcttttcacctctgt

SEQ ID NO: 23899 - DNA, 120 bp, Homo sapiens
cttcgtgcctggccctgcccccggggaagttttccatgctgctctcctttctcaacaggatcacagggctgatgcttcccctcccaacccacctttcttgttggcaggtgaagtgccaag

SEQ ID NO: 23900 - DNA, 120 bp, Homo sapiens
atcgctgtggctcagttggtgtggggtaataggagaatacccggctaaaaatcagaggcttggttggcttctgcctccagttgccaggaacctgccgtgtgcccttgatgggtggtgttc

SEQ ID NO: 23901 - DNA, 120 bp, Homo sapiens
agacgaaggtgtggactggtctgctgtaaaacttgttactgtttgccatggtgaaaaaacaaaacaaaactgtaaaacacggtacttagcgatcctggaggtgtccttccctcccacatc

SEQ ID NO: 23902 - DNA, 120 bp, Homo sapiens
catcgttcctgggggtcttcgtaaaacaaacaaacaaacaaacaaacaaaacaacaacaacaacaaaaaaaccactgcctggggctcttctcctcccagggtcagcagctgtctctttgc

SEQ ID NO: 23903 - DNA, 120 bp, Homo sapiens
caccgagtcccctcctccctctctcccagggacaaacgcccccccacaactcaggaagtggggttggggggtccgaagggagcaaaagtgatcggatggcggtggcaatgggcaccctat

SEQ ID NO: 23904 - DNA, 120 bp, Homo sapiens
aggcgttcaaataaaggactaggaagcaaacacccaagcaccggggaacagaacagaaagtaagcgagcccgggacgcgaatttgagggcaggacttcgggagccagagcctggcggcgc

SEQ ID NO: 23905 - DNA, 120 bp, Homo sapiens
tgccgcagcgggtcactcccagggggccggcacccagacttggcatcgttagcgcttgggtgctctgtcaactagcgaaggtaattttcatccctgctttttttttttttttgaaaggaa

SEQ ID NO: 23906 - DNA, 120 bp, Homo sapiens
agacggaaggagccaagagttttggagccaactcctggagagggagcggctgaactgattcggaagttggatctctttgtacacaggaatgcggagagaaaaaaaacaaaacccacccca

SEQ ID NO: 23907 - DNA, 120 bp, Homo sapiens
tcacgttgagaaaaatgaatcccgaatttgctctgcaaagggatgagcgcgcctctgggcgccagcctgctctcagctgggcgcggagaccgcgcggtggccgcagggcggccgcggcca

SEQ ID NO: 23908 - DNA, 120 bp, Homo sapiens
ccgagggcccgggtgcagatagtccgggaaccccgagggcggagagctccccactacgcctgggcctcccagggatggcagctccgagagccccctagacccggtgccttgcaggacgcc

SEQ ID NO: 23909 - DNA, 120 bp, Homo sapiens
tcccgacaggccatctgataagagctttcttgcttatctgttaatgacttcacgcgacgctccctcccgtcccctcctgctcccctgtcgccagagatcaccttcatgggatcccttagg

SEQ ID NO: 23910 - DNA, 120 bp, Homo sapiens
gtacgcacagagacacgggtgaggggagcttgggggcacggtgggaccctgcaaacatctgcccagggccaccttctttatctacacacaccaggtgggggctgcgctcaacttctggag

SEQ ID NO: 23911 - DNA, 120 bp, Homo sapiens
tggcggacccgggagaaaatgcccaaggtcccatctcctgcctcccaagtcctcactcctgaccgaccctccctgctttccgtagccctgcccagggcttgcttctctgctccagtccct

SEQ ID NO: 23912 - DNA, 120 bp, Homo sapiens
gaccgttgtcgtctgctcagctgcacatctgggatgttttccttcccagccttgtttgaattcccctccggaatccgtgctccccttctgaccggtccctcccttctctaagtggcttct

SEQ ID NO: 23913 - DNA, 120 bp, Homo sapiens
aggcggggcttcagaagctgtgccagcgtgggctcggacaaatggacatccacctaatgaccaggtgggcttgtccagaggggtgaggaaaaacgctttggcccccaaatttgcatgtct

SEQ ID NO: 23914 - DNA, 120 bp, Homo sapiens
aggcgtggaggggtcagggatgaggatgagttttttcctcagacagggaccctctgaggagggggactctgcggcctcttcctctttcccccgctacaaggccctgtgtaccggtcaaga

SEQ ID NO: 23915 - DNA, 120 bp, Homo sapiens
tgccgccagcctctcttcagctgcacaacctccatgctgccctgcggctccatcaccccagtcaatgctttctttctctcgccatcaaaattcatccatcctgtgtcccctcccttcagg

SEQ ID NO: 23916 - DNA, 120 bp, Homo sapiens
gcccgagcctggctgcaagtcagcctgcctggctggcgctcaactcagtgttgtcccaggctgcttttccccctccctccctcccctctaaatcttggcaccgcacactttcattttagt

SEQ ID NO: 23917 - DNA, 120 bp, Homo sapiens
ctgcgtggtttaaaagctctgtgcagctgggaagagtgatggggctgccagggtgctgcccagaggcccagggcttcctgatgacattgcattatggaaaagctgtaataacattccact

SEQ ID NO: 23918 - DNA, 120 bp, Homo sapiens
tggcggtgggggatgaatatctcccaggctgccctgagcccctgctccacagagatgggaaggatccatgtttgctcttccacatctcctatctggaggaccaagttagagttcccgtgg

SEQ ID NO: 23919 - DNA, 120 bp, Homo sapiens
gaccgaagaggaaactgaggtaggggagatgcttaggagatctaccagcactcggagcacactaaccgtatgaggacatgggcagaggaaggatctaggtcagaacctgcagccctggca

SEQ ID NO: 23920 - DNA, 120 bp, Homo sapiens
tcacgctctccacttgctctgtatgtctttgtttctccttaggtcaggtatcaacttgacttgaggtttatggagaaagaggttctcatcaaacctatttcctctttttaggcacacagt

SEQ ID NO: 23921 - DNA, 120 bp, Homo sapiens
tcacgggcaagtcccaattaaatcattcaagttggcaggacctttctcagcccagaccttccttttgccacatgcaggcacttctgccgttggcatgggccctgcctttgatcaacgccc

SEQ ID NO: 23922 - DNA, 120 bp, Homo sapiens
aggcgctcctggagcttgctgaggcctgagatgaactggggaagtgctctgaggcttggcttgtcaccctctgccacagccttgtcatgatgctcggaagacaaagtgaagacactcctt

SEQ ID NO: 23923 - DNA, 120 bp, Homo sapiens
ccacgcagggtctgtcactgcctgcattattctcaggaccgacttccatgagtcaacttgggtgctgcatggcaggtgaggtgcctgctgccaaatatccttggctctctttagtgcttt

SEQ ID NO: 23924 - DNA, 120 bp, Homo sapiens
tgtcgttgcatcatgtcctgaatgaagtaacgctgggcctcactccaggagactccagggctaatttctgctgatggggcgcagacaccgagctggttgttaaatgaggccctgggctgt

SEQ ID NO: 23925 - DNA, 120 bp, Homo sapiens
ctccgcagccccacagggcctgagtgacagccagcctgtgctagcctgtgagacactccccagtcagaaaagagggtcactgacagcagggccgtgagtgggtttggcttccagagtgga

SEQ ID NO: 23926 - DNA, 120 bp, Homo sapiens
cctcgctgatgccagacacaatgacagatgccacccatcaagccgaggcggataagggcatcataacttgtcacaacccgtcggcacatttttatttccggagagtctttgtatcttata

SEQ ID NO: 23927 - DNA, 120 bp, Homo sapiens
aaccgctttccacatgctaaatctgagttcattaacattacggaagatgcatctcttttaggactcacactcccattttagggaaggtggcagacgaaaccacaaatcaaacttgtaggg

SEQ ID NO: 23928 - DNA, 120 bp, Homo sapiens
atccgcaaacagactggctgactgtggccattgtcagggctgttcacaacattctgtttttccctgtgagaatgtggtatgattgcagctgtgaaggtaagcgtggctcacgtgatttgc

SEQ ID NO: 23929 - DNA, 120 bp, Homo sapiens
tcacgtgggtgggtgccatgtgttacttctgggtgggaacttcaagagatgttccccccattctctttccctggccatggtgatcttggaagcacatgctgaggtgtggcctctgtcagt

SEQ ID NO: 23930 - DNA, 120 bp, Homo sapiens
agacgtaaggtgttgccagcggttagcatggcagttttatggttgcaagatggaacagctctttaaggtcaaaacacaataatgggatggagtgtgtgtgcgtgcatgtgtttgtatgtt

SEQ ID NO: 23931 - DNA, 120 bp, Homo sapiens
gtgcgtgtgtgggagtgtgtggctgagggagaatgcaggcaaggtttttccccaccagagggcagcagcacacacgttgaggccccaaatgcctgagagggattaactggaaactaaagc

SEQ ID NO: 23932 - DNA, 120 bp, Homo sapiens
cctcgatggcagctgaagttctgcctccaccaggcagatgtttttgaaaagctcagaagccatcattgaggttggattctccccataacgttctataacatctcttgccctcccctccca

SEQ ID NO: 23933 - DNA, 120 bp, Homo sapiens
cagcgatctccaccccatctgtccatcccgcccaggctgtggcaccctggtgggtgggtgaggcctctcagctgccagctgggcctcccagccccggatgagttgcagtaactattatta

SEQ ID NO: 23934 - DNA, 120 bp, Homo sapiens
gcccgcgggccagcacgcgctgccaccctgcgcctccccagccagtgcacgtgctttcttccctgaaggacctgatgctcataaagtttattgctgttccctgtggctgctagtgaacaa

SEQ ID NO: 23935 - DNA, 120 bp, Homo sapiens
atccgggtttctgcctgggaaggatttattcaggctctgtggagggcaggagaaagaaggagatgccgctggccagggggtgggcttggcctggcctgtgacccccggaagcagcagagg

SEQ ID NO: 23936 - DNA, 120 bp, Homo sapiens
tctcggggcctcagcttccctatctgtactgagagctgtctgaccctgccatgttcttaccctcctatgggacaaccccccctttgattcagcaaggcaaagtggtggggaaaaatcacc

SEQ ID NO: 23937 - DNA, 120 bp, Homo sapiens
ggtcggggggctggcagaggctctttctaattgaaagagatttaagagacctgctgacccaatgccttttgactggatccttttctaacaaaacattaacagacatgtagggccagctgg

SEQ ID NO: 23938 - DNA, 120 bp, Homo sapiens
agacgctcatgggtagttgttcatttgttagtggacagtgggttatgtgaggacctgctgaggactttgtgcaggggagaggcgtgctgtgatgtcagaacactctagctgtagcgtatt

SEQ ID NO: 23939 - DNA, 120 bp, Homo sapiens
atacgacaaaactcgggccactgctgaaatcaggcgcaggatgtacaagtgtgcatgagatcattccctctatttgtatgcttgaagtttttcataataaaaggttaaaaaataaatggg

SEQ ID NO: 23940 - DNA, 120 bp, Homo sapiens
caccgtttggtggagacatgtctcccacccccatgaccgccatcccgtggtctaccaccaccctgcaccaggccccaggcagctgctgtagatgctgatgtcatccagcctggtgccggc

SEQ ID NO: 23941 - DNA, 120 bp, Homo sapiens
tcccgtggaaagctggggctgctgggctaggacatgctgttcctgtgcccaggggatgctgcccgcgtttcttggacaccggcctctgttaagggttaacgcagcccccggtacttgccc

SEQ ID NO: 23942 - DNA, 120 bp, Homo sapiens
caacgccctaccccacccccgccacacacagatggacagacctccacgaagacgctggcacctccgtggggcagactcctggccagcctggaatggagacaagaccccagggtacagaca

SEQ ID NO: 23943 - DNA, 120 bp, Homo sapiens
acacgagaccctctctcccctcagtcaggccccgtcaaagaggctggccctgcccatccctgcctacaaggcagcactcaccagagcttcctccgagatcgtggggagtgtatggaaggc

SEQ ID NO: 23944 - DNA, 120 bp, Homo sapiens
gcccgtcccagcgtggagcatttgctgttcaccagagccctggtgcgggaggtctgcccgggagggccgggctgccgtggcctggggagggaagggtcacctgaccctctggggaagggc

SEQ ID NO: 23945 - DNA, 120 bp, Homo sapiens
ccacgtagatgtcaggacctgggcaccaagggcccatcaccccaaggccctggttattttttgattcctaattcaaaaggaaaggggtgagtctcgggttggggggttcatgctctccct

SEQ ID NO: 23946 - DNA, 120 bp, Homo sapiens
aggcggcaagacgttccatcagtcaacagtcagttagactgaggacaatcaggccatcaacaagcattttttgagaccccctgctagggctgaccaagcacccccagtgtcaggggatta

SEQ ID NO: 23947 - DNA, 120 bp, Homo sapiens
agtcgagactccggaaggtggcctggagctccttggtggatgtccatggctgagatttgtggggtacagcctccccttccctgcccctgaagcttctttatcggtgtccactgtggcccg

SEQ ID NO: 23948 - DNA, 120 bp, Homo sapiens
ggccgtctgtcaccgagaaaagacaggtctgcagcccagggagctctctgaagggatttgggcagagaaactgggatctcagcaatcactccagcccacagatgcccttggacaaaccca

SEQ ID NO: 23949 - DNA, 120 bp, Homo sapiens
caccgccccatactgtcccttgtgaaataagagctgcttgaaaggggacttggccctgagaagctgaggaaggtggaaagcctgctctgaaatgtctgcagcctgagtgaggccgaggac

SEQ ID NO: 23950 - DNA, 120 bp, Homo sapiens
cctcggggcctctgcgccaaggcgctctgtgttccagaaaggaagaagctgggctggcaggggccttttgttatttagtttattttgatctcgctcctgctctccaaacagcttcacaga

SEQ ID NO: 23951 - DNA, 120 bp, Homo sapiens
tctcggcttaaaacaaaacgtggcagagggaaagtctttcatgaggaacagaaaagggaaagacaggctcattttttcccgagttgcgtttccaggtcctttgactatggacccaactgt

SEQ ID NO: 23952 - DNA, 120 bp, Homo sapiens
tgacgaggataacaggctggtgctcactgtgaacgggaaaggtgaccacaacagcccacaagccccatggggcatggcaggactggctgccttcttggggtgactgaccttggggcctct

SEQ ID NO: 23953 - DNA, 120 bp, Homo sapiens
gaccgcatgggtgggcaatgagtgggcttccctatggttgggcctcagaggagacaaagaagtcggcctcatgaagggacgctaccagctgctgggaagccccatccaacctcaccctgt

SEQ ID NO: 23954 - DNA, 120 bp, Homo sapiens
acacgttacaaatgtggaaactgaggctgtgagagttatgcagcttactcgagaactggtcactgggtggcagaggccagaggtctgggaggaactgcagagcccacgtcctgctgtctc

SEQ ID NO: 23955 - DNA, 120 bp, Homo sapiens
atccgtttttaataaatagtttattcatccagcagtttcagccctgatactgaagcctgttgcggtgtttcttatttttctggctggagcctgattatgagaacatggcctcaccacggg

SEQ ID NO: 23956 - DNA, 120 bp, Homo sapiens
cagcgctcagattcctgccctgccgatcatccagacatcagaggaaatgagagtattgctcaaatgagggagactggagctttattaaggaaacaaaaaataccagtaagactagagagg

SEQ ID NO: 23957 - DNA, 120 bp, Homo sapiens
tgccgcagatgaggacacacggggaagactcgctggagaggcttctcgcacttaataaggccccccgtcggggtgcttctggagcctgcctcccagggagcaggctgaggagctggcggg

SEQ ID NO: 23958 - DNA, 120 bp, Homo sapiens
gcacgggtgttagctgacgagcgaggacagtggttgcaggcacccatgctgcgtcgccaccctgcccacactcaccagatgcccacgtccttgttactgctcagtatccaggtcagtgcg

SEQ ID NO: 23959 - DNA, 120 bp, Homo sapiens
tggcggaggagctgctggtcacattctgtgggagggcgcgggagaaggttagttcggcgtctgggcggagcagctggaacattattctgctgctggattaaggaagccctctcccgtgtc

SEQ ID NO: 23960 - DNA, 120 bp, Homo sapiens
aatcgggggttgatgaaagccaaggaagaggctataaccagaggaggtgatgcggaagcacaagcaggaaaacagtgcgggtctgaggcggccaaaagaatatgattctctcgaggatgg

SEQ ID NO: 23961 - DNA, 120 bp, Homo sapiens
aagcgaataacagcgttgtggctgggggtgggtgagcccagtggccggtgcaagtggtctggcctcaggcaagtccctgaccctctccaggcctcagtttcttcatctgtgaaatgcaaa

SEQ ID NO: 23962 - DNA, 120 bp, Homo sapiens
aggcgacctggaataccagctccatagttctataatctaccatcctgaggccacacaggaaatcagacggcccctgggcagtctgaatggtaatcatacgggggagaagggacagcatgt

SEQ ID NO: 23963 - DNA, 120 bp, Homo sapiens
agccgaaggcaagacgagcaaagtgaaccaagggagaagcaggtaacaggcacacctacagtgcagcagtcaggagtgagccgccccactgcacatggcggcctggctctggggcagtca

SEQ ID NO: 23964 - DNA, 120 bp, Homo sapiens
ttacggctatatattcttgggcttccataacaggaatgcatttgctttttagattctctggatttccacactcaaaattacctaggagaaaaaaaaccacacatgctcaaacacaaagga

SEQ ID NO: 23965 - DNA, 120 bp, Homo sapiens
cctcgctgtcacatccctctgccctcagcatctcccacaccccacctccaccctccccagagactggggacacatttcaggccagctgtgttattggattttaaatgatgcgatggcttt

SEQ ID NO: 23966 - DNA, 120 bp, Homo sapiens
gcccgccggtgacattccttatccgatgtcccttcaagctgcagtcaaagggatgtgctctcagggcctcggcagtgaggttttcttaggcctagaagccaccccctccccagcttccag

SEQ ID NO: 23967 - DNA, 120 bp, Homo sapiens
agccggcttagtgtgtggaggctcccacagaggccagctctacacagaaccacacggaccaatgctgcatggggaggagatggctcgttagaggacaaaacagcctgggcatggcgataa

SEQ ID NO: 23968 - DNA, 120 bp, Homo sapiens
acacggaggggcttcccttcgccctcccacccccaagctgccatccctgaggtcccgcatgccctcttcaggcctgggcccagctcaagtaccagggagggggccccagcctcctcttcc

SEQ ID NO: 23969 - DNA, 120 bp, Homo sapiens
aggcgctgcagagggctacaggaggggaagccccagggacttctaaaatgatgtccctcggaggccagccatctgagaaagacctttcccaagcaggccaccagggccaggttaatcaca

SEQ ID NO: 23970 - DNA, 120 bp, Homo sapiens
tgtcgcccactaactgcccaccatgagcaagtgagttaccctgtaggtgataagatggtgatgataataacaggttagtgtgaggattaaatgggattagatctgcaaggtgcttagccc

SEQ ID NO: 23971 - DNA, 120 bp, Homo sapiens
ccacgaaattgtatttaaaatgttcagtaggaaaagggtttgccccctttaagaataatctggcaagaaactgcttctgtcagcaaaaatcaatgattgggaaacaaagcaggagtcgcc

SEQ ID NO: 23972 - DNA, 120 bp, Homo sapiens
atccggaagtctgtgcaaataggaagagtgatcagcctgggaccagacagcccctctggtctggggcaccaaccacttgtctagtccagttttttggacacacatcacctttcttttctc

SEQ ID NO: 23973 - DNA, 120 bp, Homo sapiens
tctcgtctctttgttactaaggcgcactttcagtttgcccttaaaagggacaaaagtgtgcctggcacagagggcctcatgggtctggccctctctggttctgtgtccacattggtgaga

SEQ ID NO: 23974 - DNA, 120 bp, Homo sapiens
gagcgcctaataggtgccctgcaatgtacattcttcattcctgacatgtgttcttcatgctgagaccacactcccattgcacaactaggaaaactgaagctcagggaggttagatgactg

SEQ ID NO: 23975 - DNA, 120 bp, Homo sapiens
aggcggagaggcccccatttcctgcagccgctcctggacagttccctttccttgcaaagcaatgactccgcagcagccactgagaataaaggggcagtgtttcatgtgccggagcctctt

SEQ ID NO: 23976 - DNA, 120 bp, Homo sapiens
gcacgcactggcacagatcaacatccaccatcaccacagcccaccctgtgcattccaggccacgctgctacagacccaaagtcacaccaagcccaccagccatccctgtgcccagcccct

SEQ ID NO: 23977 - DNA, 120 bp, Homo sapiens
acacgactaacactcccgcagacgcctgcttctaacctctcccctagggaggggcacgcctcctcaccctgtgccccaagtctctctcgttgaataaagtaagaatccatgggtccatac

SEQ ID NO: 23978 - DNA, 120 bp, Homo sapiens
ctccgtatctcagggcagaggctggagccctccactccccaggctccaggcacaggaccatacggggagggggacacacatgaagaagtctgggggtccccatggcctccttggctttcc

SEQ ID NO: 23979 - DNA, 120 bp, Homo sapiens
agccgcccaggctcctgacaaacacccgaatgccacttgccagctgcaagctctgccatcccggccaagctggtgcgtctgctcgccggccaggggcaggaagccacagcctcttgccaa

SEQ ID NO: 23980 - DNA, 120 bp, Homo sapiens
gtccgtggggaccttggagacctcctggcccaagttggatggagagtgaggagacagaggccagagaggccttgcccaggggcacacagtagcaggagcagagccaccttcagacgaggc

SEQ ID NO: 23981 - DNA, 120 bp, Homo sapiens
ctgcgctgggaagtttgggatccaggccagcccctgactgctttccagcaggaaccgctatctctcccagctctgcgcctcctccccagcccgcccaggttccacacctcccctcctccc

SEQ ID NO: 23982 - DNA, 120 bp, Homo sapiens
cagcgccactgccccaaaggggaaatgagggagaactggaggcctctcccctcccctcagctctgtgacccctctgctatccatccgggcccccactggctgggcagaggtgtggtttgt

SEQ ID NO: 23983 - DNA, 120 bp, Homo sapiens
aatcgggttgtcagaactgtgccacccctgccagctgcactgtgcgactcgcaggccatggggaaggtggatgaccagttagcccttcaaatcctcgcagcacagccctcctcgtgctga

SEQ ID NO: 23984 - DNA, 120 bp, Homo sapiens
tgacgtgatgtgagccaaatgattccagggcctctcgttcaagtaatctatctctgtgtttaaggccccttccataagcaactctttaacccacaggactgattctaatggtggaatgtg

SEQ ID NO: 23985 - DNA, 120 bp, Homo sapiens
agccgcatgctaagagctaagagcaagaagcacagtgggggtctggccccaaccggcttccctttccttcccccgtgagctgctccggctcaccagcctcgaccaggaagcctcctgatg

SEQ ID NO: 23986 - DNA, 120 bp, Homo sapiens
atccgggggaaagtggggctagcccaggacgcatcccgggagtgtgggcagatgggtatgagagcattcttcacgtccaccattggctggccccggggcgggaggctgagcgctgcagaa

SEQ ID NO: 23987 - DNA, 120 bp, Homo sapiens
ctccgtatggagaccctgggagcactggtctccctgcctgccctaggcccccactcaccccagaacggacaaggcgagggactatgatgggaacatacatgcccctccctccctgtcact

SEQ ID NO: 23988 - DNA, 120 bp, Homo sapiens
cttcgggctttctgccagattgacacaggggcagccaccgctctgagagacacgtggcttcgggcacccagctaggcaagcccagctcagtcggtgtccggaaaggccgcgttctcccgc

SEQ ID NO: 23989 - DNA, 120 bp, Homo sapiens
ccgcgccaggggccggcaatggtgcggagaggggagaaagaagcaaggcgcctcctccgacagggactgaaagtctgagggcgggatgtcactcaaggcctaggggcagggggcgctcgt

SEQ ID NO: 23990 - DNA, 120 bp, Homo sapiens
gtacgttcgggcctcaggactccctgccgccgccgatgctgctgccccatctcagcacaaacagcctcagaccgccctggtgcgggggcgcctctcgcagtcgaggcctccacctcccgg

SEQ ID NO: 23991 - DNA, 120 bp, Homo sapiens
ccccgcccccgcgcggggaggagacgcctcccacctgcgagcgccggggaagaccgaccccggagcggggacccccagcacacacgcgcgtacacacatgcacacacagagaccactgcc

SEQ ID NO: 23992 - DNA, 120 bp, Homo sapiens
tgccggtccgctcgcccggcggccgcgtagacgcgcaggttcatcacggtcccggggagggacggtcccgagtgtccggagagagcctgaccctgaagtcctggggctgcagggagaccc

SEQ ID NO: 23993 - DNA, 120 bp, Homo sapiens
tgccgaggccacgggcaagcggttgccgggctccggccgctggcgaaggcggcgctggggcgggcacgggagctggacgcggtgcctgggaaaggagccgaggcgcgcgaggctgggtgc

SEQ ID NO: 23994 - DNA, 120 bp, Homo sapiens
tcccgccgggagactgccgggaagaggtgcaaataatgccccgcgcccccgcctgtcccgcctctccgcagaccgggatgcgctaatgccgccgcccccacctgaaagctggcacgaccc

SEQ ID NO: 23995 - DNA, 120 bp, Homo sapiens
atccggtggaagcccctgtatacagagacagtactttccaccgggcccgcaaaaaagcctctgccccattccctccctcaggggcacccggaaagcctgccttagccccgaggggagacc

SEQ ID NO: 23996 - DNA, 120 bp, Homo sapiens
tcccgcgccctccggcccctagggctccgggggcgccagctctcctcggagcactccaagcgcgggagctcgccggaggccacctccccgagccccgatgtccccgccgcagccctcgcc

SEQ ID NO: 23997 - DNA, 120 bp, Homo sapiens
agacgctggctgctggcactgagccaccaaagccatgggagccccactgctgaggagggctggcccgggagctcgtctcagttccacagtcacactccgggtccctggtccaggacagga

SEQ ID NO: 23998 - DNA, 120 bp, Homo sapiens
ttccgccatctgtctgcagtggtcaggagacagtggaccatgcttcaagcccatctccacgcctgggtatccagcctgggccgcagatttacaactgaaaggctgcgggactggacggtg

SEQ ID NO: 23999 - DNA, 120 bp, Homo sapiens
ggacgctgggcggcctcctgagctccaggagggtccttcgtcccaacctgcctcactgggtgtttccttcccagccttcccggctcgccgcaggcctcagaggaccctcaaagccttggt

SEQ ID NO: 24000 - DNA, 120 bp, Homo sapiens
cctcggaagacaggaaacggggttgggagtttgtcgcagtatcgcagcccaagagcccaaattgtcccaagcccagtccacccgcgccctccagcagctccgctgaataggcgcggcgaa

SEQ ID NO: 24001 - DNA, 120 bp, Homo sapiens
aagcgggccacgaccgcgagggggcgccaggcagccacgcgagactcccagggtcaggcccacgcgggccaccagccgcactactcttccgcttcccaagtcggcacacacggcgcccgt

SEQ ID NO: 24002 - DNA, 120 bp, Homo sapiens
ccacgctgctgactgctgcaagtcgaatccctctcaactcctgtccgcacgggaaccccagtttacaggggagccggctgcctggcatcccggtgcggccacagaggcgtccttgtggaa

SEQ ID NO: 24003 - DNA, 120 bp, Homo sapiens
gaccgctgcggcccatcaagtgtgctgcacgccctccgtgcgcggcccgtcggagtgcaccttgcgcctcctgcattgtgaaagggagcggggagaacggaacatggacccaaagacact

SEQ ID NO: 24004 - DNA, 120 bp, Homo sapiens
ctccgcctggggccgatgccttaggcagtacagtactggtcatcttgattggggtgcacctatggcctgccgttgtatgtgtggagaaaccaaaacctggagggattttctgccctgccc

SEQ ID NO: 24005 - DNA, 120 bp, Homo sapiens
cttcgcaattcacctgaccttgctgaataagggcattttcctccagtgtggattggagttatgcatctgaggctatgaggcactcattaaatgttatccttatctcacctgtctgcaaca

SEQ ID NO: 24006 - DNA, 120 bp, Homo sapiens
acccgcaactcttatggccaccaaaggcggcctatgccccaccccacccccagaccctccatcttttatccatttctactccttgctacagcaagatacttaaccttctcaggcttctgt

SEQ ID NO: 24007 - DNA, 120 bp, Homo sapiens
ctacgtagtaggtgctttaagctcttcaaagaaaagcattgtagacttccagaagaccaagccaccctcttaagatggacccaggccaatgctgaggtgggtggggccagcaggttccag

SEQ ID NO: 24008 - DNA, 120 bp, Homo sapiens
atgcgcacagatcccagggagcaggggtggaggagagggccccaagtcaagaagctgcttcgagaggagctgttgatcactgttatacactccacctccacctgggctggtaggcaacag

SEQ ID NO: 24009 - DNA, 120 bp, Homo sapiens
acccgcccttgcccctcaccaaaagccggggatctcaacaggccccctgtatgatgacacagaaacctgaatgtcagcagcttctgcctgacactgcccatggcgagctccactgctctt

SEQ ID NO: 24010 - DNA, 120 bp, Homo sapiens
tcccgggcagctgccagcagggaaggccctggagtttctctactcgctagcttaccagtctcccttacagatcccaccccagactgcaaggcatgcccagttcccagtagctgtatttcc

SEQ ID NO: 24011 - DNA, 120 bp, Homo sapiens
tcccgccatccagcagacctcagagggaaggcaggagttgggaggtgtcccagcctgggctggccaccagattcacgctgctcaccctctaggccactcaggtattctagagacccccta

SEQ ID NO: 24012 - DNA, 120 bp, Homo sapiens
cagcgaggactaactgggtcttagagggtatatcgacccccgggatttatgggtgggggaaagacctgaggactgggtgagcagggagcaggagaggaggttggcgtggaagagggagcc

SEQ ID NO: 24013 - DNA, 120 bp, Homo sapiens
ggccgctccccaccaccatctcctagccagattccagaccagcaggcttgcccagcttggcctgcctccctcctccgctctcccaccagtggctacctcccctcccccactctgctttcc

SEQ ID NO: 24014 - DNA, 120 bp, Homo sapiens
gagcgccaagttccccttaggccctggtgcgaagcttgtgggtgtggagaagaacaaaacaaagccttggaggcttcccacaaatctccagcttggtgttggcccctttcccctagccca

SEQ ID NO: 24015 - DNA, 120 bp, Homo sapiens
cctcgacctccacccggctctcagttccatctcctgactttggcccacagcttgtggggctgtatgtcccaccccaggtacccctgtgcttctggtttcaggcaggcagcgtaccctcct

SEQ ID NO: 24016 - DNA, 120 bp, Homo sapiens
ggacggagaccccaataccatactcagccctgagaaaggttcggggtgaggacgcagggtggcctggagtcctggtctcacatgactccctaatcaggacagtgtcccctagccgtgaca

SEQ ID NO: 24017 - DNA, 120 bp, Homo sapiens
acacgccagcacctgggtaatggggtcacatgtgtgtgcagtagccatcctaacaggcttccttctaccgactcacacgaatggggctttcacaggctacacagcttagcagtgcatgtg

SEQ ID NO: 24018 - DNA, 120 bp, Homo sapiens
gcacgttactcagaccaaagggaaacgattttgttccacaaaaagccaaaatcttgcactcatccagcccaactcacagtctggtgagctgccaccactgcctggtcaccaacaagcaaa

SEQ ID NO: 24019 - DNA, 120 bp, Homo sapiens
gggcgacaagagcaaaactccacctcaaaaaaaaaaaaaagcgcctatctctggaaggtgcaaaagccttcccacctgtctcaggcttggccaccctgccattcccatgatgattgctgg

SEQ ID NO: 24020 - DNA, 120 bp, Homo sapiens
gcccgcagactcttcctgcctgccgctttgttgcacaggcccagccttgccaggccagcccagggtgtcctgaccccaggggcgccttcttccaggcttttccctacactggctcacttt

SEQ ID NO: 24021 - DNA, 120 bp, Homo sapiens
attcgtagctgaaaggttcctgctacttcttcccttgatttaaaaggcagctctctgagaagaccaagaactgtattccccactccctgcaagagacaactactcacctgaaaatggtgt

SEQ ID NO: 24022 - DNA, 120 bp, Homo sapiens
tctcgaagatttatactaaaagtcaaatttctcagtcacagaggataagtacctccagatattttcaagttggtctcttttggtagatcaactgcagagatagtgaccattctccacctc

SEQ ID NO: 24023 - DNA, 120 bp, Homo sapiens
cttcggccaacagaatgtagaagaatggtttaccaggtccaagcctaggcctcaagaggccttgtagtttccacttttcctcctggaactctgccatcggcatatgaataagcctgagct

SEQ ID NO: 24024 - DNA, 120 bp, Homo sapiens
cctcgactaaggagcaattcttttttaaacgctactagcttttgagataaattatacacagaaatgagtgtatttacaacaatgtggcctatgcgcaatttgtgaagaggagtctattaa

SEQ ID NO: 24025 - DNA, 120 bp, Homo sapiens
ctccggacaagaaaattgatatctagagatgataaataatttgccaatactatgcagttaaacatcagcaccaggattagaacctaggtgcctctgattttaaagcatatacacgtatca

SEQ ID NO: 24026 - DNA, 120 bp, Homo sapiens
tgccgctgggaaaataaatcaggacaccttctgcaggggagataagtttatttaaatggaacattaaattattttttgaatttgcagttactacaggggtattacataaatcttttgcct

SEQ ID NO: 24027 - DNA, 120 bp, Homo sapiens
gaacggtttatttgaaagctgcaataagctgcatctacctttcttattctcaatctgctaaatgacatcattttttactttagacattctaataggtatgtagtggcatctcactattca

SEQ ID NO: 24028 - DNA, 120 bp, Homo sapiens
tcacgatgtcagcaccacatagaaatagttttcttttgcttgcttgccctttcacagagatttcttccatgtgcctttgcagcttccaaaagctgtagcctgttctttgagaaagctctt

SEQ ID NO: 24029 - DNA, 120 bp, Homo sapiens
catcggattgattctgggccatgcatcatgtcagcttgcaaaagacaaaaccctttctgtttctaaagaaatttctcatattttgaaatgaaagcaagaattgctctgccgaggtgccaa

SEQ ID NO: 24030 - DNA, 120 bp, Homo sapiens
ttacgaagtgtttctaacaaaatgttttggagattttaaaggggcagctttctaaatatcccaggcatctgcaaacaaccagacatgcaggcccgcttttcagcccaaacattgtttctg

SEQ ID NO: 24031 - DNA, 120 bp, Homo sapiens
atacgctatacccggccctcaagttacagacagcccaaactaaatgggatcttggaggttagttgacattttaccaatgagacaactaaggtaagataactgttaagattaaggggaatg

SEQ ID NO: 24032 - DNA, 120 bp, Homo sapiens
tcacgtacccaaaatgacttttaaaaatttcacattctttctactaagatgccagcggcagcagcctactccatacgtcaggcagtgtttgtatatatttcagcgtatccaagcaaggcc

SEQ ID NO: 24033 - DNA, 120 bp, Homo sapiens
agacgaagctgtactttcctgaatggcagccaggaaaaaacttggggatttggcaggaagactgtgggaagcctggtgttccaccaggctgagatctggagcggagctttctacaaagac

SEQ ID NO: 24034 - DNA, 120 bp, Homo sapiens
gagcgaaacacctccctttgtttagctcttcataggagcacaaatggagcccccagattgtaatcaggccctattgtataaacttggggttttcaggccatacagcatttttggcagcaa

SEQ ID NO: 24035 - DNA, 120 bp, Homo sapiens
gcccggggcgggcgggcccaagtccccgctgaggccgggaggtgcgggcgcccctcagccccgccctaacccgtcccaccattgctaccgggtcggccccgcagggtctgagacccgcac

SEQ ID NO: 24036 - DNA, 120 bp, Homo sapiens
ccccggtcccacccgtcaccaggccgcccgcgtagccaggaattcttagccaggttcctgtgcgcccaccgtgaccctaagagaagaggcggacgccctggcacgtccttccctcctgct

SEQ ID NO: 24037 - DNA, 120 bp, Homo sapiens
ccccgcccaaagcgctcccggttcccggggcgtcaggttggctgacagttcggggtccctgcgtcctgtctcctcagctgggcttcgaggatgtgatcgcagagccggtgactacgcact

SEQ ID NO: 24038 - DNA, 120 bp, Homo sapiens
atacgtaatgtacaagttcctgacggtgttcctggccattcccctggccttcattgcgggaattctctttgccaccctcagctgtctgcacatctggtgagacggggcacaccgggtgga

SEQ ID NO: 24039 - DNA, 120 bp, Homo sapiens
gaccggctttctgaaacatgggcatattctccgccacctgccccctactctcctcttatcccaggccggcgtcaggaggaggaacgcgcatcagttcccaagcagtaggaagaactggaa

SEQ ID NO: 24040 - DNA, 120 bp, Homo sapiens
atgcgcttcctttagaataacagtttgggcttggagtttcaacaggagaaagaatgtcggtctttcctggggtgtgattttccttgcatacataaggctgggctgagtgtggaggcgggt

SEQ ID NO: 24041 - DNA, 120 bp, Homo sapiens
tctcggggccctgttgtgactcgtacctgcggttctgggcaggactcttctttctttcattgccttttattcagtcactgcctgtgcttggggtaaaacaaaagtgatctctgagcagaa

SEQ ID NO: 24042 - DNA, 120 bp, Homo sapiens
tgccgctgacagtagaattggatgaggatgtcagacctggttaagcagtagtgtggaggggctgcttcaactttgcccctggcagatggcaaggatgggacccagaggaaagggaggtgt

SEQ ID NO: 24043 - DNA, 120 bp, Homo sapiens
cagcgccctaagatgtgatgggatctcagcaagaaacagccacctagtgttcctaaagaggctggaacatgagcactgggctcctagacttggcaataaccctagtgccccacaatggca

SEQ ID NO: 24044 - DNA, 120 bp, Homo sapiens
cttcgcaccagtgaggccgattggaggcttggagcatattaaatttatttagagaaaggaaagaaatgtaatattactcacatcctgtgtttgaaagaaaaatcatcctgcccacttaat

SEQ ID NO: 24045 - DNA, 120 bp, Homo sapiens
ctgcgagggctgagtaggagacaagtccagttacactcacagggttgtgttcaaaaaccagtgtttctccttaactaaccctcaagcaattacctcagatcaagtgaatagacctgactt

SEQ ID NO: 24046 - DNA, 120 bp, Homo sapiens
tcacgagttttaagttactctggcagatattgatcaccaccagcagctaggaacaggtgagaactataatcctcctccccaacaatctcattactgggtgatgagttatattgaaagcac

SEQ ID NO: 24047 - DNA, 120 bp, Homo sapiens
atgcgcgaaacggccactcaaagcagatgtatcagtattctggtgaaagtttcagctaaacttctgatcagaagttgagccacaggattctctgttgagctattgaatgaagccctggtc

SEQ ID NO: 24048 - DNA, 120 bp, Homo sapiens
gtccgagaagagccctatgaagagggtaggctgtggagctctctccagattcttactccctgttgtttacagaaggaaggaattgcttacataatatttccagcatattcacatatctta

SEQ ID NO: 24049 - DNA, 120 bp, Homo sapiens
actcgtttcatccatggaaacttattttagcatcccctatgctaactaacaggcttttttgtgttcattggagataaagctataataggacagctgattagggtcgttcaaatgctggct

SEQ ID NO: 24050 - DNA, 120 bp, Homo sapiens
ccacgaccaaagctaggctcccagccaagtaagtgaccccagctgtctgtagcttgctcccctctcacagttgtggaggtcccagctctccatactgcccaaggagacagtttgagatac

SEQ ID NO: 24051 - DNA, 120 bp, Homo sapiens
atacgtgggtgagtagaagggtgggagacacaggagatgtttctcaagggaaaagctttgactcttccatgttttgtaatcaggaattttccatggtcgcacagtgagtcagaggaaaag

SEQ ID NO: 24052 - DNA, 120 bp, Homo sapiens
agccgcacacaagtgaggagattttaaatcagctggacaatccttttttggtttaaatatagtattgtttcatccctctcccatgtgattttatcccatcaatatttttaatgtcattag

SEQ ID NO: 24053 - DNA, 120 bp, Homo sapiens
tagcgaatttgttaaagacaggaaagaaaacaagctctaactaggcttcttgaggctcccaatgctgcttggtcaccacaatcagtgagtttcctccagaaaagggttcatgcagctctc

SEQ ID NO: 24054 - DNA, 120 bp, Homo sapiens
tctcgagtctagcatgtcttcagggaatttaggaatgtttctttcatcagctctaccctgaggggaaagattcctcagagcaatgtaaaaagcacagggcaaagaaagaggaggaggctt

SEQ ID NO: 24055 - DNA, 120 bp, Homo sapiens
ttgcgcctcagtgccatctctcacgatagcaagagactgtgagactgaacatttttctcattgtaacaggggtctgactcactagtttaaaaaaaaatctgagaacgatgagacccaagg

SEQ ID NO: 24056 - DNA, 120 bp, Homo sapiens
taccgtgcctctgtacagtgggacacagagccaccctccccacagaggagctctctcctcctgctaccattatcgtggcagtagttcctgcctcttttgtacgttcaaactcttgggatt

SEQ ID NO: 24057 - DNA, 120 bp, Homo sapiens
aaacgcctagtggatgctctcagtgcatcgactcttggaaacaatgattcttcctctctactacccagtagagtgagagaggttctttatcttgcctaagtgttttgaggcacacaagaa

SEQ ID NO: 24058 - DNA, 120 bp, Homo sapiens
ctgcggtgcccaaatctctctaaacccgggtgggcgcggggcggttagcggagacgtgggagaggccgagagcaaagctcgcgcccttcccggggtcagcgagcggggtgccaggagggt

SEQ ID NO: 24059 - DNA, 120 bp, Homo sapiens
gtgcgcgccctgcatctgagcccggggtgacactcgcctcccaagcgccaggagggggagactcggtcccgcttatctccggctgtgctaacttcagactgcctgagctgggggaggaga

SEQ ID NO: 24060 - DNA, 120 bp, Homo sapiens
gagcgcgcagccagggcgagaaaacttctccacctagaaagtttcaccttgtcgtgggcggggcagaggcgggaggaaacgcgacccccgcggggccaggcgcggcgcggacggcaggaa

SEQ ID NO: 24061 - DNA, 120 bp, Homo sapiens
gggcgggggccgatttccctctgggtggtgccagtccccacctcagcggtcctcggaacccgcggactaggggacggacagcacgcgaggcagacagacacgtgctggggcgggcaggcg

SEQ ID NO: 24062 - DNA, 120 bp, Homo sapiens
ttgcgccgctgacttctccactggttcctgggcaccgaaaggtaaaattgcagcccctttcagatccagtacccaatccctcgcctcaggggttctgctttctttgttcccctaagagac

SEQ ID NO: 24063 - DNA, 120 bp, Homo sapiens
ccacgtaggtgggctagagtttaggggcttcggaaactgaagagacgtggccacggcgaggacgaaactagaatggggcttgtctttttagggggttgcttctgatggccacctgtatga

SEQ ID NO: 24064 - DNA, 120 bp, Homo sapiens
gggcgctgggacagtgggtgatgtgtgactgttacggcccagcaagttttaaagctgggatctgactcagcccttacaaaagggatccggtcatcctcgtcccaccgtgatgcagctggc

SEQ ID NO: 24065 - DNA, 120 bp, Homo sapiens
agccgagctgtttccttgttcccagccttgctttatctgtgttatgttggggtccttccaaggggcaggtgtttctgtgaaagtctgaattcatttctggcaatcacgcggggcttgtga

SEQ ID NO: 24066 - DNA, 120 bp, Homo sapiens
catcgtaccttatctctttctggggcttgtggtggacatctatcttattaggtgaaatagattataaccagaggctgagcgatgtggccagtcgtagtgctgacccgataattaaagcac

SEQ ID NO: 24067 - DNA, 120 bp, Homo sapiens
ctccgaatactgtttcacattttgggtgttacatccttacttcagacttctgccttatcagtggccatcccaccctatgttcttatctcctcagtctaaaaagaaaaatggggacccatc

SEQ ID NO: 24068 - DNA, 120 bp, Homo sapiens
tggcgtgatttcccttatatgaacacaaggccttctcactttcctgtggtagcatccacacattcttctgtcaaacaccccagagcgtaatcctttgtgtgctccttcttccccaagagt

SEQ ID NO: 24069 - DNA, 120 bp, Homo sapiens
aatcgatgtgtaagccctggggatgtgggtgggactttcagactttatccaacagagaatttaaaaggattctccatagggggtcttaaacagctgttgtgtacttttgcttttctcagt

SEQ ID NO: 24070 - DNA, 120 bp, Homo sapiens
tagcggaaattgatttttgttgaacttcgctgtttttcttagatgctttactgtgtatcctagttctctattacctcagtggtgggatatatgagttttgtgtgctaacctagctcattt

SEQ ID NO: 24071 - DNA, 120 bp, Homo sapiens
tatcgctaatcagttgacaagcgaagattggtgattgcttgggtagttaattagcatacttcatttagcaaccaaagtaaacccacaggggagacagccttactactgcagatctacatt

SEQ ID NO: 24072 - DNA, 120 bp, Homo sapiens
taacgttatttttgaagcactgggcccaaattacaatgagaattaattcttattcctttcttgaaaagaagccctttgtctttgtgcattcaatttttcactgtcacatgagtacattct

SEQ ID NO: 24073 - DNA, 120 bp, Homo sapiens
caccgcatgagtcccaggctggcagaaacatccactaatccttagacctcttggctggaacgacaaaaatgcataaaatcttaccaggccaaaagagatcaactttaaaaatctttggca

SEQ ID NO: 24074 - DNA, 120 bp, Homo sapiens
tttcgctggttctgcaaaccatttgtgttcttcatttatggtccaggggatctgtaatgtcagttcctacttttattgggcagcctggaatttttaagcaccatatttcctttacctttc

SEQ ID NO: 24075 - DNA, 120 bp, Homo sapiens
caccgctgtttttacgagttttcttctctatgtctctaagcctaagtgtggagatgtggtaatagacagcctgctctttgccaatcaaagcccttactttgacgttggccactttgttcc

SEQ ID NO: 24076 - DNA, 120 bp, Homo sapiens
tggcgttttatattacgggcaataaaaggctttcagtccagcctgggcccaatttactgtttaaacttatttaaatatgaccttactggaaaatgaatccaaaattctaattgacttggt

SEQ ID NO: 24077 - DNA, 120 bp, Homo sapiens
tttcgtgaattaggaaaatgagaagtgaatagcttcttttttctttctcacccttgtacacttctgtattcaatgtcatcttttttgagcatgtagtatcaagaatttgacagctaataa

SEQ ID NO: 24078 - DNA, 120 bp, Homo sapiens
ggacgcctggccatcccgaataatctggaagtttccaagtagattagagatgtatttctgagtttggaaattctcagtatcctttctgttaagtgacagtgatttcccagattttagatt

SEQ ID NO: 24079 - DNA, 120 bp, Homo sapiens
tagcgttataagcctgaggtaactggtttttctttttctgacctgggtgcatttgtggagtctgaggctgacaagtgaaatagttactagctgtttaataaatctcccgaattgtttggt

SEQ ID NO: 24080 - DNA, 120 bp, Homo sapiens
ctccgcatattaagttttgactttcctgtgttttattggaactctttgttcctgaagcactaacatttctattttgtctttcatgcagttagccacctccctaatggtgaccagtcctct

SEQ ID NO: 24081 - DNA, 120 bp, Homo sapiens
aaacgactgaatattttacgtatttagctgactgggcttttattttgtttatttgattttgagaattgacagtaggaataagcctgggtaaacagcagtgctaggctctgcactttttgt

SEQ ID NO: 24082 - DNA, 120 bp, Homo sapiens
cagcgcttcagcctaaaggccgcttacagaattcagcaggtgtgcttcctaataagcttcctccttctctaacacaagtaaaaagccacaggttggacccagcattgtggctctaggaat

SEQ ID NO: 24083 - DNA, 120 bp, Homo sapiens
agtcgcatggacaaccggagcagttgcctgagccacgttttgtgaggcagtcttccccctaaacattggtattttatactggtgattaggataatttagcatttgggaggaaggtcctgt

SEQ ID NO: 24084 - DNA, 120 bp, Homo sapiens
atacgggagtgctgtgatcttttcacattgtcctattggggctggtgagaatatgttttattcagttttcatgaaactattaaaatgatccattatatgttcagcacattgtgttgcaca

SEQ ID NO: 24085 - DNA, 120 bp, Homo sapiens
tctcggctgataaaacaggaatatacatatgtgtgtagtggtcagtttcaaaatcatgccagttaaagttctctgtgttttaatttttcttaaaggcatatataaaaaagaatctcagag

SEQ ID NO: 24086 - DNA, 120 bp, Homo sapiens
tctcgccctttatgtcacattgggaaagccacatcctgttgaatttaactctgcaacatctgatatgctcaactcccctctctggtggtattataggcgctcccctctgaaataattccc

SEQ ID NO: 24087 - DNA, 120 bp, Homo sapiens
tcccgcagctgcacattttacacactctaccccattgctaccagatgtgtctgtctttgtcacatctctggttatgaatggtatcttctttctgcctgctatatgaagtccacttttctt

SEQ ID NO: 24088 - DNA, 120 bp, Homo sapiens
atccgccctgttttccaatccaattcctttatgtatgctgtgatatctacctagagtccatactctctcttctttcctctctaatctcatgttcaaagcttatccttctttccaagccca

SEQ ID NO: 24089 - DNA, 120 bp, Homo sapiens
tagcgtttatcaaacattgagtactgtgtggaccaggctctgtgctgggtgctctgtgttggctgatggaggattgagacacagtgtgtgtgcttgtagggaagaggttcccagagcctg

SEQ ID NO: 24090 - DNA, 120 bp, Homo sapiens
gatcgtctgagatcttgctccacttgtccttgagggttattaaggtttgtgtgtgactgggcgttggatggtccttcatgatatcagggaaggttgacagatggcctccctccagcaagg

SEQ ID NO: 24091 - DNA, 120 bp, Homo sapiens
ttgcgccagtatagtttcccagaccacaactgaggaaagaatgtgctcagctccactcctcagcagagccagatgcccagtacagcagaaacagtgtacctgtaaagttgcctaggcgac

SEQ ID NO: 24092 - DNA, 120 bp, Homo sapiens
catcgggagtggaaggaagagtagacagaatgatttatgagggtttcttgccataggaatgggtctaaaattatacttccatgtcttttcctcaagaataaatgacacaggatttatcaa

SEQ ID NO: 24093 - DNA, 120 bp, Homo sapiens
gctcgtgctgtgcttttaatccttgatcgaactgatgctctgccttgatgtaaaactgatttttaaaaaacatgcaaatattgtgtatttaaaataggactagaaaaaaaaccacttact

SEQ ID NO: 24094 - DNA, 120 bp, Homo sapiens
aatcgggaaagaaacgctcggggcacatagagttggtgtatcttagcaccctttctcggcatactgcaattagccagcattatcagatgtcaatgttgatttttattttcatgaattatt

SEQ ID NO: 24095 - DNA, 120 bp, Homo sapiens
ttccgtaaatatagcagtttaacacacacttcttatctctcagtttctgtgtcaggagtccaggcatggcttagatgggtcttctgctctgggcctcacaaggctataatcaaggtgttg

SEQ ID NO: 24096 - DNA, 120 bp, Homo sapiens
gctcgggctctggggtcagacagatgtggtcctaatcttctgtgtgtgaccttgggcaagttgtttaactttgctatgtcttagtatcttaatctgcaaacatgggaatagcagtaatgt

SEQ ID NO: 24097 - DNA, 120 bp, Homo sapiens
atacgactgtggagaatggcagtcacttggaggtatggctttgtggtcagccgggcttactcactagctgagtgactctttatatccaggccattcagtgctttcatttcaaatatatcc

SEQ ID NO: 24098 - DNA, 120 bp, Homo sapiens
tttcgggctgctctctaatagtcttaatgagggtaaactcaccaaaatctaatggatgtgttgaaagtgattatcttagccagtgtttttcacatctttttaaaatcctttgacactaaa

SEQ ID NO: 24099 - DNA, 120 bp, Homo sapiens
tctcgacagtattcttgaagaaagtggtacattatcttgaataggaggccaaaataatggtcttaaaattcacatttacttatatcttttgttatttcataaagaatttgagatagtaac

SEQ ID NO: 24100 - DNA, 120 bp, Homo sapiens
aatcgagctttaagcccctttacagaaaggatccatgaaaatcaagctcatagcaacaacaaaagttgctgctactactgtttgtaataacattgtcatgcttatccatactttagattc

SEQ ID NO: 24101 - DNA, 120 bp, Homo sapiens
ttccgcagactttgggaactaagcaagtgctattcaatatttgctgctgccctttttcttgaatttcattcttgcatgtgtgctaaggatggaacatttctgtcagcacttgtgagtaga

SEQ ID NO: 24102 - DNA, 120 bp, Homo sapiens
tacggtttctgattctgtcatgcaacatatttattttccagtttcttgtcatctacaaattcgatatgcctgccttctgtgtgtcatccatatttctgagaaaaatatgaaggccaggaa

SEQ ID NO: 24103 - DNA, 120 bp, Homo sapiens
cctcgtatgttgacattcttttagtaccaaaggaattcagtcccatggccatgggttcaggcagcagtgcacttttccaaatgccactctgtagccatcaatgccatagcaatccttaat

SEQ ID NO: 24104 - DNA, 120 bp, Homo sapiens
cctcgtgttataagactgattgtaaaataaagaaatggaactctccattgtctctaactattccattgcacagcctctgttccacaacattcaaaaactgatttattagattctgataac

SEQ ID NO: 24105 - DNA, 120 bp, Homo sapiens
gcccgtcccaccctccactgaaacttggctcacactttgaaaaattcttttgttgcaaatggacaaactcaccataccaaggcccttgtgttgagctttgtttatgttgtgtacctggca

SEQ ID NO: 24106 - DNA, 120 bp, Homo sapiens
cctcgttaggggttttgagttcagcagttgtcaatagagtacagatgacctaacaccgactgaattctgaagggagttttggtgctgacttggctcaggcctgtatcatttacagtagaa

SEQ ID NO: 24107 - DNA, 120 bp, Homo sapiens
agacgtctactgagttgctggttccttatctggccctgggcgaggaagtgggtgctttagaggtcttagagtacagacagcttttagggcattctgatcttcaccctggttcagatgtct

SEQ ID NO: 24108 - DNA, 120 bp, Homo sapiens
gaccgatatcttctctgtcctgcttcacccctcattccttccacacactgtgtttacatcaccagtgtgcctctctctcccctactcctgcctccacacatcccatcctgtttatgtgtg

SEQ ID NO: 24109 - DNA, 120 bp, Homo sapiens
tcacgtgacaacatcccggctctgagaaagctggctgctacaggcagacatgctgggcaacccactggccatgcctggggaacgctggctccaggacttctggcaatgcagctgcaatga

SEQ ID NO: 24110 - DNA, 120 bp, Homo sapiens
aaccgagttcttgtttggccttagttcagcttttccccagactgctttccctgattttttgaatcttgagaatttttttaccaggtcttctctacttggcatctttcctcctctaagaag

SEQ ID NO: 24111 - DNA, 120 bp, Homo sapiens
tatcgtgccagcttctgttcaggtctggggctttcagccagactgcgccccagggtagggccagttggttccctggaggttgtgagtggagcctgggggttaacgtggactggcaggtgc

SEQ ID NO: 24112 - DNA, 120 bp, Homo sapiens
ctccgtctggaatttaataacatcttttctttccttgaagttacatgtgcccaacatttctgtcctctactccagcctctcctgagtggtcttgaaaccctaggaagctgccctggacgg

SEQ ID NO: 24113 - DNA, 120 bp, Homo sapiens
ggacgaatgaatactcattgagttctaatcacagggagctctggtatactagaaaggacactggagtgagagttagaagacaaatacttgagttcaggctgtgcctcttatatgcttata

SEQ ID NO: 24114 - DNA, 120 bp, Homo sapiens
atccgtatctaagggtggttctaagcaccaaatccaatccaagtactttacaaagtgcttgtcaagtaaaaggaaaagtgttcggtgttagtccttccagaaggttctgagcaagtgtat

SEQ ID NO: 24115 - DNA, 120 bp, Homo sapiens
gtacgtagcacagtggttgactcataggagatgctcaatacagccttactgaatgaataataactgttcttccctgaagatgattcagagtgtcttgctcatatcacagttcgaatcatg

SEQ ID NO: 24116 - DNA, 120 bp, Homo sapiens
tctcgggatcctgaagtgtcatgtaaactcactgctgtgttgaagtcccatatctgtatgacagaacaataataattttcagaaactgtttaattatctgtctacaatatatagatcagg

SEQ ID NO: 24117 - DNA, 120 bp, Homo sapiens
ttccgttggttcagaaaaattaaaagaaatttgccaatgaatggctaatagccaaaggaaatattcaaattcatttgtctgtatagacagtctgctgagtaattcttactccagttacta

SEQ ID NO: 24118 - DNA, 120 bp, Homo sapiens
acccgtactcccttctccttctagttgtactcttaggctgggaatatttgtcttgattaagcacgattccaaaatgacaattcagggttcgaggcctttcatgaagccttcattactatt

SEQ ID NO: 24119 - DNA, 120 bp, Homo sapiens
caccgagtcagattttgttttctgtttttcctgctatttcttcggctggtgggcgacctccacctgtaacctgaagcacctaaacatttacagatgggtttgtgacgctccccagcctct

SEQ ID NO: 24120 - DNA, 120 bp, Homo sapiens
cttcgtcatttaattatttgaactgggtttacgggcagtaatgtgactcctctcgtctgtggaacttaggaaggcctacgatgctattaaaagaggactgggtgaactgcctggggaaat

SEQ ID NO: 24121 - DNA, 120 bp, Homo sapiens
tcacggggtcagtcactacccagaaattacaaaatcaagttaagggtccaaaaatagcctacatgttaaattgatcatgttgatcagattttaatcatgctcttatctagaactagataa

SEQ ID NO: 24122 - DNA, 120 bp, Homo sapiens
tcacgaactatttgttcatccaagcggttcttgtctgatcgttacttcgttgggcagcataaaatataaattcagtttcgcccatgaattgtcatggcaaagacaggctttctgattact

SEQ ID NO: 24123 - DNA, 120 bp, Homo sapiens
caacgtgtgaggagcaggaaagtgttccctgtggctggtatacagtactcaaaggggagagtgtcaggagatgaggctggagtggtgaggggaagctgcactgggaatggtcaaggggtt

SEQ ID NO: 24124 - DNA, 120 bp, Homo sapiens
gagcggttactagagtcaagagaaggtgaggaggcaggacctgtgggacatggtgactgagtggagactgggggaggatgagaaaagtcaaggtttctcaggttctggcctgagtgactg

SEQ ID NO: 24125 - DNA, 120 bp, Homo sapiens
ccacgggtgtgaatgagacccccagtgggtgtgaaaagtgctctcacttggtatcccagaagtgactcttaatttttacttttttgttattgttcacatgcgctgagcagcagtaaacat

SEQ ID NO: 24126 - DNA, 120 bp, Homo sapiens
taccgtaccatgcattagaattctttatctgccgtagggctttgggcttaagggggccaggataaggaggtgaagtgtctcgttcctgactcagactgttggcctttcactgaaatctaa

SEQ ID NO: 24127 - DNA, 120 bp, Homo sapiens
gcgaaatgacctgttggctttgattccttggtgctgggcttaaatacagagcccatagggaggggaacttggagggtccatgaccctcgggacctaacccagcagtatctgccaaagcac

SEQ ID NO: 24128 - DNA, 120 bp, Homo sapiens
ttacgcacacccagctcctctccggagctgcggagcgcaaaagatcacatagagaggaaccgaggcagccaggcgttcgccgggggtgtgcgcccttgcacctcctgccgcctgggcgct

SEQ ID NO: 24129 - DNA, 120 bp, Homo sapiens
gtgcgccttgtggaggttaagggaccctcggtcctggacctgggcccccgcccagccaagagagaggggcttgggcccgcgggtggagcattttgagcagtagctggcttgtagccgcgc

SEQ ID NO: 24130 - DNA, 120 bp, Homo sapiens
cgccgtttatcaccggaaaggaaggaagaccaggaactcgtggcggccgtgaactgttccattgctcttttcctggggcggagggactcactgcccgcccgaggagcgtgctctggggaa

SEQ ID NO: 24131 - DNA, 120 bp, Homo sapiens
atgcgcctgtgtgtatgtgtgggaggcgaattgttcgcagggcgtgggggagggggtgccgcccagatcggaaggacgggctctccctctctccagcccaccctcgggcctggactggcc

SEQ ID NO: 24132 - DNA, 120 bp, Homo sapiens
gagcgtcagccctcgccggcagcgagcgcggtgagaggctggacgaggcgaagctcagagacgccaaaaacctgaaagatgctgtcatcgccacccccttcccccacgctggtccctggc

SEQ ID NO: 24133 - DNA, 120 bp, Homo sapiens
gtccggcccctcccaggctgacccagatacatccccgtttgggtccggaaagggaggggagggaaacaagcaccgcgccacccacgactcgggaagagcagggctcctcgccagggccgc

SEQ ID NO: 24134 - DNA, 120 bp, Homo sapiens
ctccgtatcgctgggccgcgacccagggaagttctgcttggtctgcgtcggtcgggcgggaggtgcagggagggcgcgtggggcggcaggcagcggggcgggggagcgtttctgctcgcc

SEQ ID NO: 24135 - DNA, 120 bp, Homo sapiens
cgccgtgtgtgcacgccggccatggggagggtatgataggcaccaaagagcaacacgcctctcatgtacttacatgcttatgctcacaaacctccttcccccgtgaagcaggggaataaa

SEQ ID NO: 24136 - DNA, 120 bp, Homo sapiens
gcacgctgtagacaaattggcacttcttttcattttacaactggttgctccggcttcttcttgaccagtgcttcttcaatggtggtatcctgacatgctgtatgcctggagcacttagga

SEQ ID NO: 24137 - DNA, 120 bp, Homo sapiens
aatcgttgatgacttttttttaatcaattagaacagattcaatatggtcctatagtaatgcccctgctgcttagttgcaatccgatatgcctccctgaaaggaagaagtggtggaattac

SEQ ID NO: 24138 - DNA, 120 bp, Homo sapiens
tgccggacagagactgcctgtagccctgaccctgttggatgcccatgggagggtgtcatgtgttgtgcatgtgaatgtcatttatcatctgcaacacagcacttgagaatgactgatgga

SEQ ID NO: 24139 - DNA, 120 bp, Homo sapiens
ggtcggacatcaaggcactggagactcaggccctggagaaatctgagccagcatcctatgacgcaggtgcaaaccaggaagagtacagaatggagggcctgttcattatgcctgtctctt

SEQ ID NO: 24140 - DNA, 120 bp, Homo sapiens
gcccgtcccctgcctgggcaatgttgcattcctgggaaggaaggagaggaggtggggagagaagagggagaaggagaatatgacgtggagctgagctgtatttaaagagcacatttgatt

SEQ ID NO: 24141 - DNA, 120 bp, Homo sapiens
gtgcgggtgtgaaacagtgaactaagacagggatttagcaaatcaaacaaggaaggaatggtaagaaccagctgcaaggggcagggagaggcatgtcctgaagctcacaggaaaaagcca

SEQ ID NO: 24142 - DNA, 120 bp, Homo sapiens
catcgtggtattcctgctgtgcagctgttcctccatattaaataacactgtgtaggcagagaagcctttagaccatttgtaaccacgcaatgggttcaccttgcctgctgcgtagacaga

SEQ ID NO: 24143 - DNA, 120 bp, Homo sapiens
attcgataactatttttgattgatttataggccacgcagaacgtgaaggtcaatgcctaatctactcacccgttctcttttggccatatcagcagcactcacaccctctgcagccttcgt

SEQ ID NO: 24144 - DNA, 120 bp, Homo sapiens
gcacgaatcactgcagaaagagggaaaaaggccaagacatcaacaagggaattttcactgagcaacaagaggaatgtgatttgaatgatgcaaactctttgtacagggcccagaggacta

SEQ ID NO: 24145 - DNA, 120 bp, Homo sapiens
acacggtggcatttggttaggtccagaaataggctacagggctaagttctgggctcagagctgctctcaaggactaaaactctaaacattttgtgattttattcctcttctccttctctc

SEQ ID NO: 24146 - DNA, 120 bp, Homo sapiens
tcacgtacatgcccaaagtcagaaagaaaggcctagaagaagtatggaacataagtacattttgggcatttagaatgcacaatgttccacctataatctgcccttggaacttaactttgc

SEQ ID NO: 24147 - DNA, 120 bp, Homo sapiens
agccgaaaacagttatgttgccatagaaggctggtgtcgaaggctaaaggacattactagtacaggctgtgaagctatggaggaggtgagctgataaatgctgtgtgacctagaagaatt

SEQ ID NO: 24148 - DNA, 120 bp, Homo sapiens
agtcgctgtgaagacagagaagtgagtgttattagtggggaggggtgccccaaaggggcagagcctgccatgccagaggaggcagcaggggggtacagaaaagcctagaggagcagaggc

SEQ ID NO: 24149 - DNA, 120 bp, Homo sapiens
cctcgtgcacctcactagagtctggcaaactccagcccccagagctagagccaaagacagcgaaaggtctactggggtaccatcaaggtaataggcccaaaatatccattgcctttaagt

SEQ ID NO: 24150 - DNA, 120 bp, Homo sapiens
aagcgacacagaagttcccatatcgccacacacagcagacacagtgcctgcctttgaaaacttctcaatcttgatggggagagaaaataagtaaacattgggaacaaacctgagaacaat

SEQ ID NO: 24151 - DNA, 120 bp, Homo sapiens
tggcgctcaacacagtatgaacatgacccagcacaggacagtccgcatgccccggtgcctgggctgctgagtcacacagggctcggaacagcatggagggaccccagggggctgagtgca

SEQ ID NO: 24152 - DNA, 120 bp, Homo sapiens
ggacgggaaaggggaggaaagaggccttagaggtgggaccaggacactgggtccccagccaaagcatggcagctaccaacactagggtgggccacggtcacagcaaactccgcaagggaa

SEQ ID NO: 24153 - DNA, 120 bp, Homo sapiens
tagcgcaggaaggaaaagccacagggtggaggggggtgggtcattaatctgccctaaggcctagagaaactcctaggcgttcccctagggtgttctcctagaagacttcaatgacaactg

SEQ ID NO: 24154 - DNA, 120 bp, Homo sapiens
tttcggctgctcccagcctttggcagcccttcttctgtatagcaaagaggccacagaagaaatgctggagtctgggcctcatagcattttctaggtgttctatacacccgtcgcctacgg

SEQ ID NO: 24155 - DNA, 120 bp, Homo sapiens
gcacgcagggcaactggcctagggaccacggaaaaggcaaatgaagccagaggcagacgggtgggtctgtgtcctcctccaaaaccccatgtagggtgggcttaggggtagcagtcacag

SEQ ID NO: 24156 - DNA, 120 bp, Homo sapiens
gatcgggacccctttccggtaacaaaactgctcctctcgtggtggcttcctctactagactctcctgtatccagtaaccactccctcccttcatccttcagatccctggtatggacttag

SEQ ID NO: 24157 - DNA, 120 bp, Homo sapiens
taacgtgagcaggaacatcactcatctccatgcaggcgttgtcgcagtggggccaccatcctggccaggcagtcccggccatgagacagtcgctgggcttccctccagcttactgctttt

SEQ ID NO: 24158 - DNA, 120 bp, Homo sapiens
cttcggcttgggttggctgcatgttttctacgtgtacacccatgaagtctaattgatgtggttctgtgcccagaaacatggaagctgcgtagggaaacgtgccagccatatgtgtgtacc

SEQ ID NO: 24159 - DNA, 120 bp, Homo sapiens
aaccgtttctgtttatacctcattggccacactcagtcacgtgacctcactcagctgcaagggaggctgggaaatgcattccccattttgcatagacatgtacacaacacaaaattagac

SEQ ID NO: 24160 - DNA, 120 bp, Homo sapiens
aagcgggtagtggtggaagagaataaatagaagagggcaaggagtgagccaggcggggcctgggaagccatgcgaagatatttagacttccagtatcatgggagccttagcagcatttta

SEQ ID NO: 24161 - DNA, 120 bp, Homo sapiens
tgacgtgatccaatttacattttgaaaaggtcatgctagctgttgcctgacagttaatttgaagggaaggagagatgtggaaaaacgagctagggagctatggcaacctactctgggcag

SEQ ID NO: 24162 - DNA, 120 bp, Homo sapiens
gatcggaaggatgtaagaaatgaggggaggaagggattagtttttgcttcattgctatcttgataattgctttgtacagacatttagctctttcttgttagtttcccagaatgaagcccc

SEQ ID NO: 24163 - DNA, 120 bp, Homo sapiens
tcccgattttttttttctggaactttaatatgcgtcacacccatccaatatagccacagctggcctttttcatatttatatctgtctctaaagctttgcatcaggaactttggaacaaga

SEQ ID NO: 24164 - DNA, 120 bp, Homo sapiens
ccccgctgctgccctctgcataactgcctcctttctgtgagctccctgcagcctagccctgtctggtttcccttcccaggccaagaggtagagcagccacccgctgccactcctgtcaag

SEQ ID NO: 24165 - DNA, 120 bp, Homo sapiens
tgtcggccctccccgccaccttccagcgcggcggcaccgggggcccagggggtgggcgccctcaaccccgtcccgccgcccgggcggcgcgggggaggggcggcgggggcggggcgtcct

SEQ ID NO: 24166 - DNA, 120 bp, Homo sapiens
gtgcggcgcggcccccacccgcgggccgggcggcattcctgggaggccggcgctctgacgtggacccgggggccgcgggcgcggcgggggggcggcggtccgggggcttcttaaaccccc

SEQ ID NO: 24167 - DNA, 120 bp, Homo sapiens
ccccgccccggcccagcccgcccttcccgagcaccgctccggccctggagggagagagagccagagagcggccgagcgcctaggaggcccgccgagcctcgccgagccccgccagccccg

SEQ ID NO: 24168 - DNA, 120 bp, Homo sapiens
cggcgcgagagaagttggagaggagagcagcgcagcgcagcgagtcccgtggtcgcgccccaacagcgcccgacagcccccgatagcccaaaccgcggccctagccccggccgcaccccc

SEQ ID NO: 24169 - DNA, 120 bp, Homo sapiens
tggcgggggggtcactttaaagatagtatatgcccctctctggtttagggccatctgtgactccctcctgctccagagtaaagtctcctcttcctgacaaggtctccagggccacccagg

SEQ ID NO: 24170 - DNA, 120 bp, Homo sapiens
ccccgagacctggccctctgaccgtgggccaggtgtgggcttaggggagggaagaagaaataacaggcctcctggtggggcaaagctgctgtgtgtgtctgtgcccctctgctctccctg

SEQ ID NO: 24171 - DNA, 120 bp, Homo sapiens
ttccgtaaccctcatcactttaatcatccctttgaggactcagcaatgaccagagggtgctgggaagggcgagcactacttcgcaggcacgggatcctcagcaccaggggaacacagtag

SEQ ID NO: 24172 - DNA, 120 bp, Homo sapiens
gagcggcttgtcatttcggaggccagggaaaggggcctcctgccaccgccacacccctccttgcccgcccctcacctggccccgagggcccgcagccgctccgtcctctcccgatgcatt

SEQ ID NO: 24173 - DNA, 120 bp, Homo sapiens
tcccgcagggcgcgccgccgcccagccgcgtcctcctggcggtgcggagcgctgagcgtccgcggctcagtggggcgggcggggcagcacctggcacacctgcccctcgcgccccgccga

SEQ ID NO: 24174 - DNA, 120 bp, Homo sapiens
gtgcgctcacttcaaagggacccgggcgcgctaagctcggcccctgccccgcgcaggctccttgtggccccaccgccttctaggggtcttgcctgtggcgggagttgagccggactgggc

SEQ ID NO: 24175 - DNA, 120 bp, Homo sapiens
gggcgggagccccacggggtgaacccggcagtggcggttcctggcgatgtggaggcgttccaggacctgcagaggcggcagtcagcgtccggccgcccctcggtgccccgcccgctccag

SEQ ID NO: 24176 - DNA, 120 bp, Homo sapiens
ccccgatcccggcgtggggacacacccggagccgctgctgctcacggtcccgccggcggcgctgccgcctggccgcgctgtgcagctccagcagccgctgcagagccgtcacctgctgcg

SEQ ID NO: 24177 - DNA, 120 bp, Homo sapiens
cgccgcgcttaagcccgcaggcgccttggcggtgctgaggggcgccggccacgcggccttcaaggccttgggacgctcagggccgccccacccgaccccggagggcacccggaagccaag

SEQ ID NO: 24178 - DNA, 120 bp, Homo sapiens
ccccggtgcggggcccactccagggccctgcagcccgtgcggatcgcgctccaggcctgggggccccggagagccccgaggagcccctgctgcccggatacctcggcgcgcagggtcgct

SEQ ID NO: 24179 - DNA, 120 bp, Homo sapiens
tctcggctccggctccgcgacctgggagccgccgccgggccgggggcttcgggcgggtaagcgcagcccacgccccctcccgggcggcccccagctttgccaccgccggtgccgaccttt

SEQ ID NO: 24180 - DNA, 120 bp, Homo sapiens
gctcgcctttgatcatgctctgcgtcagcgtggtagtccttctccggaggtttgggctctccctgcccacaggctttggagtctgtgctttcagggacccgcaggagtccctcggatggc

SEQ ID NO: 24181 - DNA, 120 bp, Homo sapiens
ggtcgccttcctctgggggctgcacagtggcctctccgggagccacctcccaggcttgtgagatattgccttcccaagaccgcagcatcttcttccctggactctggggactcgcctttc

SEQ ID NO: 24182 - DNA, 120 bp, Homo sapiens
cttcgactcctccctctgaccctgaggagcccttgggctctggcccccgtgtgtcttcaccttctgactctgaggagcatctttgatctcgccccaggaggcctcggctctcttacgctg

SEQ ID NO: 24183 - DNA, 120 bp, Homo sapiens
ctccgctttctgatcctgagggtcctcctctcagactcaggggtgtccatccttggtggtctttgaagttctgctctctcctggcccaggtgcgggtccgagcccagcccttcaagggca

SEQ ID NO: 24184 - DNA, 120 bp, Homo sapiens
ccccggcccaggggtcccgggagtgagctttcttttctgggtctcaggctctgcctcactcctctcttccctctgggccaggtcctggaaaggaaaagcactttgggcccaggtttgaga

SEQ ID NO: 24185 - DNA, 120 bp, Homo sapiens
gggcgctgtctgaacctcaggctgtcacagttcatcaatcagccagccatgcacctgtcaggtgtgcctgccaacagcctgccccatctttctcatcctcccagccaaggcagaccactc

SEQ ID NO: 24186 - DNA, 120 bp, Homo sapiens
tcacggtgctgggtgcctgggttcctcagcaccggccactcccactttgccctggtgtgcccatcaggcccagagaagaaacccgctctgggcgtcttactttttactcttattcagaaa

SEQ ID NO: 24187 - DNA, 120 bp, Homo sapiens
cctcgcagctccacatacagcagcggctcctgcaggaagggcaaggccaccgggtgcccatccacctggaggataaaggaggtgggaggaggggtgatgtcgaggcacatgggtggacag

SEQ ID NO: 24188 - DNA, 120 bp, Homo sapiens
cctcggctttgctcaccgtgactgccccgtcctgcagcagccgcacggccatgtctcccagcagcaccgccacctcctgggtccaggccacaccgctccggccccggtcatcattggtca

SEQ ID NO: 24189 - DNA, 120 bp, Homo sapiens
tcacgtgcacactgtgggcaggaaagtcccaggtgccaatggtcagcagggctgggtgtaggggttggggagaagagagacaggggatgcacacctgaagtccccgctgtggcagtcctt

SEQ ID NO: 24190 - DNA, 120 bp, Homo sapiens
aggcggccgtcgaaggtgcggtaatgggggtctccgaaggccatgcaggaagcgggccgaggcaggcagcgggggcagcagctgccaggactcagggcaggggccttgtcctgcactcag

SEQ ID NO: 24191 - DNA, 120 bp, Homo sapiens
caccgccctccccgccatgcctctcgcagaccctcccagaaaaccaagcatctcccaggagtctccagggatctccaggactctggctcccaggctccctgtgagtgaggtcagggcacc

SEQ ID NO: 24192 - DNA, 120 bp, Homo sapiens
catcgtggtcgcactgggaacagcactgtccccagctcccagctggcggcaggagcccagcctccctctctgatgcctggtcacaccaggatggcggtaccatgtgcccccaccctgacc

SEQ ID NO: 24193 - DNA, 120 bp, Homo sapiens
ttgcggcactcacggggccacacgagagcggtgagcagcgctggctctggcaacgcacggtgcccgccatgcaggagcagctggtgcaggtgtccacagtccagcgctctccagaggcca

SEQ ID NO: 24194 - DNA, 120 bp, Homo sapiens
tcacggccctggtgcacgcaggactgggtgggagctgaagggataggagctgggagggtcagctgctcctcccacatgcccagaaggtctggcttacccctcccccatcaccctggctgc

SEQ ID NO: 24195 - DNA, 120 bp, Homo sapiens
ctgcgcaccttggcatcgctcacagcagctgtcagcctggggcaccttcgcccagccatgggggcaggagagggcctggcactcctcgaggtggcactccacatggccccgctgaggaca

SEQ ID NO: 24196 - DNA, 120 bp, Homo sapiens
ggccggagtccccagcctcatgcttctgggggcctctgggcatggacttctgcctgcccctcccacaatacattcttcacagttcaagaggggaatgaaatccagccttcggctccatgc

SEQ ID NO: 24197 - DNA, 120 bp, Homo sapiens
ccccggtgcagggatgcccctgacccttaaagaccccatatctgctggtggagtgttggacactcctccctttatccatctgcgagatcctccaccctcccaggcccaccccagctcaca

SEQ ID NO: 24198 - DNA, 120 bp, Homo sapiens
aggcgatgcacgcattgctggggtcccgccagctctctccatctgccactctccggccctcggcctccaccacacattctgaggggggagacatgggatgggcaggcactgtccctcctg

SEQ ID NO: 24199 - DNA, 120 bp, Homo sapiens
tcacggcaggaaagcacccactccgtgtccctaccaccctgatggtgttgatttcttcagccaatatccacagggcctattagacatcaggcctcacatcagagctcaggatgtctctag

SEQ ID NO: 24200 - DNA, 120 bp, Homo sapiens
gcccgctcagcagtgcaatgccctcttcatgggcctggggatcctgagccccctgacaggcatcaggccagaccttgagaatctaggcttcatcccagcttccccctgcctcatgggtct

SEQ ID NO: 24201 - DNA, 120 bp, Homo sapiens
aaccgagtacaaaccctgggctgcccgcttggcccatgaatgcctccccttcctgtgttccccctgggctcctctctgagggtggaggccaaggctgggcacttaccccggcatacgggg

SEQ ID NO: 24202 - DNA, 120 bp, Homo sapiens
tggcgctctgagaggggacagctgagctcaggacaagcctggtggatgcagagccatgtcaggtcctgcccatgtgaacacaagaggtagagaatggcagatctcagggagctggtggag

SEQ ID NO: 24203 - DNA, 120 bp, Homo sapiens
gggcgaatggagagccctggagctgctgcgggagaggagtggcagccacagcccacagagaaggaagaagaggggctctgtgagtccccaaggcaggagggctcacctggcactggcacg

SEQ ID NO: 24204 - DNA, 120 bp, Homo sapiens
actcgtggccacaaatatcaatgagcactggacattgccagaaatcctcctacaatctcttggcaaatcgttctccccctccctgagaggagcattttttttttaaccttccaatggttc

SEQ ID NO: 24205 - DNA, 120 bp, Homo sapiens
agccgaccactgcggtgggcatcagcatccggtcctgcaggacctggggagccatgtgaaaggcaggcaggcagtagaagccatcggcactgggaggcccccagggcattagcttgctcc

SEQ ID NO: 24206 - DNA, 120 bp, Homo sapiens
tcccgagggtatccaatgctgtgcatcagagaaattccaaaatgagagaggtagatttgcagccaggacctcaggagagacgctgtcagggtgcactgtgtggagctgcttgcaaactgt

SEQ ID NO: 24207 - DNA, 120 bp, Homo sapiens
aaccgaaaagtcaatgttaacattttttaaaaatctgcaacagaaggtaaagaagcttctggaaaactcaccctataaagtgaaagcccagggccctgaggaaagggtgttatttgcaag

SEQ ID NO: 24208 - DNA, 120 bp, Homo sapiens
gctcgatgcaggggtacagtggtgaatgagacagggtcctgcccagaaccttctgggaaatgagactcctggtaaagggaaccacatgagcactgggctcaggtccacacaaatgtcagg

SEQ ID NO: 24209 - DNA, 120 bp, Homo sapiens
gaccgtggtgcagcctttctgaccagaaacagctctttctttacaagaagaggatttggctagagaaagaaagaaggaatggcttgggcccaggtttgagtcctcgcttggcctggaagc

SEQ ID NO: 24210 - DNA, 120 bp, Homo sapiens
taccgtgatgcgtgggcccctgggaggcatatggccgcagtagcagcatatgatgctgaggcgggcgcagttcagagtcagtgagttcagaattcaattcctgtgctcccacttactaac

SEQ ID NO: 24211 - DNA, 120 bp, Homo sapiens
agacggcatcactctgtgctttcatgccttctggtttcctattggttccaccaatgagaggccccagcaggggatgagggggcaggagggagaatggttggggtatttctttcccgacct

SEQ ID NO: 24212 - DNA, 120 bp, Homo sapiens
tcccgatgttacactattccttcctcttgtcccctcgaaccgggaggtggcagtggtttcctgctactgttagtccctggggggcctcaacattccttgctggtcattataaccatgtct

SEQ ID NO: 24213 - DNA, 120 bp, Homo sapiens
gcacgcagcccgtgctgcttcttgaggttcagaggctctaaggaaggggcctcacctgagcaagatggacagtgggaagggggcagagggcagaattctagggtctcacggtccctcaga

SEQ ID NO: 24214 - DNA, 120 bp, Homo sapiens
tcccgcacgctgtcctccttagagatcacactgtttcaccctcccaggagcagggactatggatgcatctcatagcccctagatttcatgtagcttgctggcagcctgagggctggggca

SEQ ID NO: 24215 - DNA, 120 bp, Homo sapiens
ccacgctgcaaaccaggtctggggctcagcgaggctcagcctgtagccgaagttctccccacacagtagagtctcctatgggacaggaggcagactggggctgtggcagggatgaggttc

SEQ ID NO: 24216 - DNA, 120 bp, Homo sapiens
ggtcggctatttcttcctgccccaggcctgggccaaggagacagggaaatacaccgaaggcgtggatgaagccgatccggccaagtggaaggccaacctgcgctgtgcccttaacaagag

SEQ ID NO: 24217 - DNA, 120 bp, Homo sapiens
agccgggacttccgcctcatctacgacgggccccgggacatgccacctcagccctacaagatctacgaggtctgctccaatggccctgctcccacaggtatcaggcctagccctctgtgg

SEQ ID NO: 24218 - DNA, 120 bp, Homo sapiens
aaacgatgcgggggctcccgctaggtcatgacacccagggcttccaggagtggctgggatgggtcactggcatatcaggaatggcttggcgtgcagtcagggacctgggtgcttcttcct

SEQ ID NO: 24219 - DNA, 120 bp, Homo sapiens
cctcgttttggcttctggctccagcctaggtctcatggcccatggagtcggggaggtctttcccaatcctggtggctgtgccctccacctcgccctgtgttgggggcagctttggggaag

SEQ ID NO: 24220 - DNA, 120 bp, Homo sapiens
ctccgacattgactcctttactgccctgcttttctctccctgctgtgcagactcccagccccctgaggattactcttttggtgcaggagaggaggaggaagaagaggaagaggtgagtgt

SEQ ID NO: 24221 - DNA, 120 bp, Homo sapiens
ggacgagctctctgctgtccccatcggccttaggtttccgcagccccactcccatggagccccgtggccctctcaatagttctccttgtttcttctcctgggattctgaacgataggagc

SEQ ID NO: 24222 - DNA, 120 bp, Homo sapiens
ccacgcagcagttggggcttggtaggtctgactccctgcagaaggcaaatgaggaaagtgaggcaaagggcttttctgacctgcctgggatggacgagctgggaccggaggcagggtctt

SEQ ID NO: 24223 - DNA, 120 bp, Homo sapiens
tctcgcctgttatttccccagccccaggtcagtggaataacctgtcctcctttctctcccatctcttccctcccttgctggtggtgtcccttcagctgcagaggatgttgccaagcctga

SEQ ID NO: 24224 - DNA, 120 bp, Homo sapiens
ggccgggaggtggtggttgggggtctagtatacagagaagctataggtaccataggtacctggaagggggctgatgggaggctagggtggcccagggctgggaggaggtgtgcctgggag

SEQ ID NO: 24225 - DNA, 120 bp, Homo sapiens
gttcgtggaggtggcactgacagccgtccacacgcactctctgtagatgcagtgcagtctggcccccacatgacaccctattctttactcaaagaggatgtcaagtggccgcccactctg

SEQ ID NO: 24226 - DNA, 120 bp, Homo sapiens
agccgcccactctgcggccgcctactctgcagccgcccactctgcagccgcccgtggtgctgggtccccctgctccagaccccagccccctggctcctccccctggcaaccctgctggct

SEQ ID NO: 24227 - DNA, 120 bp, Homo sapiens
aggcgaacagctcctgccagacctgctgatcagcccccacatgctgcctcgtaaggacccatggctgggcacggggaagcagtgctgggggattggggtaggattggcaaggagggtgga

SEQ ID NO: 24228 - DNA, 120 bp, Homo sapiens
gggcggatggggctgggcctggccactgggctgcagaatggggaggcgtggggctcaaggacgggatgggcctgccttctgccccacagtgaccgacctggagatcaagtttcagtaccg

SEQ ID NO: 24229 - DNA, 120 bp, Homo sapiens
gggcggccaccccgggccctcaccatcagcaacccccatggctgccggctcttctacagccagctggaggccacccaggagcaggtggaactcttcggccccataagcctggagcaagtg

SEQ ID NO: 24230 - DNA, 120 bp, Homo sapiens
gtgcgcttccccagccctgaggacatccccagtgacaagcagcgcttctacacgaaccagctgctggatgtcctggaccgcgggctcatcctccagctacagggccaggacctttatgcc

SEQ ID NO: 24231 - DNA, 120 bp, Homo sapiens
atccgcctgtgtcagtgcaaggtgttctggagcgggccttgtgcctcagcccatgactcatgccccaaccccatccagcgggaggtcaagaccaagcttttcagcctggagcattttctc

SEQ ID NO: 24232 - DNA, 120 bp, Homo sapiens
cttcgagatcttcttctgctttggggaagaatggcctgaccgcaaaccccgagagaagaagctcattactgtacaggtacatctcccctatcccaaagtcggccttggcttgaaaactgg

SEQ ID NO: 24233 - DNA, 120 bp, Homo sapiens
tggcggccagagaccatcaaggctcagagccggagaatgcggtctattactcacccctgatggctgtcctcatgcacagctggatctggcagccctgccacaggtctccctgtctcatct

SEQ ID NO: 24234 - DNA, 120 bp, Homo sapiens
gctcgactgctgctggagatgttctcaggggagctatcttggtcagctgatagtatccggctacagatctcaaacccagacctcaaagaccgcatggtggagcaattcaaggagctccat

SEQ ID NO: 24235 - DNA, 120 bp, Homo sapiens
cagcggttgcagcctgtggcccaggcccctcctggagcaggccttggtgttggccaggggccctggcctatgcacccagctggcatgcaataacaaggctgcagacggtgactggccctg

SEQ ID NO: 24236 - DNA, 120 bp, Homo sapiens
tggcggtgcggactgatgtggagatgtgacagccccgatgagcacctggctggctgcagggtcctacctctgggtttcctggaagtggatttgggccaagaaggagagggagaaaggccc

SEQ ID NO: 24237 - DNA, 120 bp, Homo sapiens
gcccgagcccctgccttcccgggcctttctctcctgggctgtctctggtctggtcagcctggctctcgggaaattcagccatgagcagggaaagaactctcccaaccctggggcctagct

SEQ ID NO: 24238 - DNA, 120 bp, Homo sapiens
acacgtgcgcactggcgcttgtgcgtgtatgtgtgtgtgcgtgcatgtgtcatttgctaccaggtgaatgtttcagttctggtttctgtttagtcttccttttttttcttttttctttac

SEQ ID NO: 24239 - DNA, 120 bp, Homo sapiens
tggcgttttaacttgtgggttcaagggagctactgctttaatgagacaccgtctgcagtgtgcttccaatgctgagtgtgctgtggaaacaagggatgatgtgtcaggagggcaaagagc

SEQ ID NO: 24240 - DNA, 120 bp, Homo sapiens
tgtcgattttattttgaaagaaggctttgcctactaataacagttgaaaacaaaacaaaacaaaacaccaatttagatgctatcgaaaggatactgtattaagcggagtggttcaaagtg

SEQ ID NO: 24241 - DNA, 120 bp, Homo sapiens
ccacgaataactgtcaggcaaattgttaaacattgttgaacctcaatttcctcatttgtaaaatgggaaaaatagtaacaaatccagaaaagcagatgaggattatcttagttaatacat

SEQ ID NO: 24242 - DNA, 120 bp, Homo sapiens
tctcgactactagggaagagcatgattttagttccaagcctggcttcctaggagttgccctggtcagagtagtttattgttcagtcagtgtttatccacaggttctgtttaaggcctttg

SEQ ID NO: 24243 - DNA, 120 bp, Homo sapiens
ggccgctgaaagggcataggcaattgctagaggtgaagaaaaactctgtagctaagctataaaaacaggcatcctgaatctggctacatcctggtaatcttgcacataggatgaatccta

SEQ ID NO: 24244 - DNA, 120 bp, Homo sapiens
cagcgggatggcgtgccagtcagcagattttcagtttcaagataactgaaaatccatttttatctgacttagacaaaatgaaacaaaacaccaaaccaacaaacaacaaccacacaattt

SEQ ID NO: 24245 - DNA, 120 bp, Homo sapiens
attcgcataactgaaaagtctaaggttagggcttgtttcaggcaccactgatcttgtggctcaaactatgtcactgggacttggtttaaccctgtctcagctctacctttcctcagtgtt

SEQ ID NO: 24246 - DNA, 120 bp, Homo sapiens
gcggtggcggcggcggggccatggcgcggagaccccgggcgccggccgcctccggggaggagttctccttcgtcagcccgctggtgaaatacctgctcttcttcttcaacatgctcttct

SEQ ID NO: 24247 - DNA, 120 bp, Homo sapiens
tctcggggtcgagggcacctgggcggcggggtccccccgcggggtggaagggtggcccggggtgccccacgcgcgggagccgcactgccgagttttctgggctgacggcactttggggga

SEQ ID NO: 24248 - DNA, 120 bp, Homo sapiens
ccccggggacgccgcgtctgcagggggcgttgtagggaggagggtatgccagggaatcagtaaagactgatgggtattctcggggcgtcggaggagggtctgtgttaggctagaaatgtg

SEQ ID NO: 24249 - DNA, 120 bp, Homo sapiens
aggcggacccactgacacattcatgatgggggtcgggggtggcggctgactttcaggcctgggggcctggaggcccggctggcaaagaaagaagaggaaggaaaaacccaaacctctctc

SEQ ID NO: 24250 - DNA, 120 bp, Homo sapiens
ccccgtgttgggccggagggccaggggtcctttcagaatcttctgcttggggtggaaaaagtattgggctgggactccggacacctggattcccatcccactctgccgttcattgttgac

SEQ ID NO: 24251 - DNA, 120 bp, Homo sapiens
gaccgacctaagcatgtatgttcatgtctgcaggccttgactccctcccccacaaatccaacccagtgtgatcaggggtggcagaaagactgctgaagctgagaattgagctgaaccaga

SEQ ID NO: 24252 - DNA, 120 bp, Homo sapiens
gctcgaccctgtttcctggctagagagtcctggaggtcctggggtgtgagaacatagggacatccttcccccattcacctcctcttctggctcctaccacaccagagctgctgcttctgg

SEQ ID NO: 24253 - DNA, 120 bp, Homo sapiens
gcccgtggggtgaggtgcagacacaaagcccataagtgctggcctgttgggacaaatgagagaaatcccatagggtggtgatgacagcgcactcagccatcctactcctggggaaaatga

SEQ ID NO: 24254 - DNA, 120 bp, Homo sapiens
tgccgctgggggaagtcctcagcacagatggctgctgctatagctggggtatgggcagtattagtagttaaccagtcaacccaagttcccatagtctaggttctgcttcagctggaggtt

SEQ ID NO: 24255 - DNA, 120 bp, Homo sapiens
tgacgtgacatcctcggagccagcactagcatttcagggactttaggtcgtcactctgacttcctttatctgccgagactgtctcccttggagccattggtacctcacccttgtctgtgc

SEQ ID NO: 24256 - DNA, 120 bp, Homo sapiens
gctcgccagtgacaacagctgggtgcatctgttacacttgtgttcctggtcattttttttttctcgagcttccctaccccctacctccaccctaccccccttttatcggacaaacgactt

SEQ ID NO: 24257 - DNA, 120 bp, Homo sapiens
agacgtgggtggccaagctagcaccaccccaaattagaatagagccccttcttggccctaccagtagactcataaaaaatcagaggctctagaaatagcacactgaaagacaagaggctc

SEQ ID NO: 24258 - DNA, 120 bp, Homo sapiens
ggccggcttctggagctgccgcatggcagtggttattgtgtctgtgcctggaacccactaggaaggtgtccggcatcctctgggctctgaatagtggtgctggtggtgatggtggctacg

SEQ ID NO: 24259 - DNA, 120 bp, Homo sapiens
ctccgtgcagatattggggtggtgcctgctttctcagcttggccatgtgttgtcaggaatattcagtgccgcccacctccttcctcgctggtccttttcccactcagggcagcagttggc

SEQ ID NO: 24260 - DNA, 120 bp, Homo sapiens
ctccgtctccccctctagacttcgggctctcgagggtgggcacggccctattcacttctggatccccagtgcccagctgtgtttggcataaattgggtgcttactgaatgtttattggat

SEQ ID NO: 24261 - DNA, 120 bp, Homo sapiens
tggcggcctggcaaccctccacttaagccaggtcagaaacatggcagccatcccctcctcagagccacacgtacttactgcctacagcatctggattttctcacttccactgccacatat

SEQ ID NO: 24262 - DNA, 120 bp, Homo sapiens
tttcgtctggctcaaaaaccatgaggaagtaaccaggcatcaagccaggcaaaaacctcttctaagtggcaggggccctttctgccatccaaccccctcatcctatacttccaaatacac

SEQ ID NO: 24263 - DNA, 120 bp, Homo sapiens
ccccgccgtcttccccatagacttggctggcttccataactgaagacagatgctttttataaaaacaacgaaaattacaaaatatgggaaatgaagacaagaaccatctcctttgctatg

SEQ ID NO: 24264 - DNA, 120 bp, Homo sapiens
ggtcgcgtgcacacttcttaacttcccagcagctttgtttgccctgtaccaagtagaaaaccataaacgtcaagcagcctttaaaaaggaaaaaagaaggctgggcgcggtggctcatgc

SEQ ID NO: 24265 - DNA, 120 bp, Homo sapiens
ctccggggctttgagtttgaatggttatttactgcaagcccttgcagacctcccttcctctttcttaaccttggaagaacaaagccagccgtggcctgaggaagatgccaaaggcttggc

SEQ ID NO: 24266 - DNA, 120 bp, Homo sapiens
ccccggacattgttgaggaaggagccctgtggactcctccactccagggggacagtgtcccccaatccagagggagagcgctgacagccagcctcccatggacagccgccacctcagaca

SEQ ID NO: 24267 - DNA, 120 bp, Homo sapiens
cagcgccatggagagcacagaaagaccagtatgtgaaggtcacgggcagggagagaggtggccctactccggggccacaggctgaaagctctttggcttcatccagatataagggtaggg

SEQ ID NO: 24268 - DNA, 120 bp, Homo sapiens
gtgcgggccctgagacagtggggctccactgcttcttgcagcctggactttggactatggaagacagacaaggctagggctttccctggaggctacgcctgctggtggccccactgtggc

SEQ ID NO: 24269 - DNA, 120 bp, Homo sapiens
caacgccatgccttcccttttcagagtgctgttccagagacttccctctgagccacctcctgggccctgctggcaccctgtccccgccgccagctgcaatcttccttcccctgcctgaaa

SEQ ID NO: 24270 - DNA, 120 bp, Homo sapiens
agccgctcactagccatgtgaactgaggaaagttgctggaattctctgaacatcagctctataaaatggagatcctaatgccctcttgggtttgtggtcagaattaaatgagacagtgtt

SEQ ID NO: 24271 - DNA, 120 bp, Homo sapiens
cagcgcctggtccttagcactcaacaaaaagtactgccactgctgtccctgtaaatgctcctagaggtcacctgctgggggtgggcgtggagagtgaggctgagcgctcctccagggagg

SEQ ID NO: 24272 - DNA, 120 bp, Homo sapiens
ggcgccagctggcacctgcagctctgctagcagctcccaccctcctggacaaagagtatgaaggccagcaaataacactttgggccctgagttagaggcatggtcaaatgatgtgaggtg

SEQ ID NO: 24273 - DNA, 120 bp, Homo sapiens
ccccgcaaaaaagagggggctgtatatacaggcagagaagagttctggaagacgtggttttagataaaggtttgccatttactgctgaatgcacctgccctcccctgccagatggcagag

SEQ ID NO: 24274 - DNA, 120 bp, Homo sapiens
ttccgtcttgcaggacagtggtgtctagccagccatctccttccccactgagttggtcaagaccctgctgctgagaactctctcctgccagagcttggccccatctgttgccatggcaac

SEQ ID NO: 24275 - DNA, 120 bp, Homo sapiens
aaccgcccaggcctgctttaggtataaaacctgtcctttgatgcagatagattcgaattcaaaacttttccatttatgtgtgaccctgggcaagttaactattaataatgatagataata

SEQ ID NO: 24276 - DNA, 120 bp, Homo sapiens
cagcgagggtgtcaggcactgacatggctgaggggtagggaaagggatagtgctggccgcactgggaagatcgagccagggaaaacaaggccatcactcactgctgagtgcccaattcct

SEQ ID NO: 24277 - DNA, 120 bp, Homo sapiens
caccgggctgacccatggtactgagaatccatcctgcacctcctcaccatggaaactggcaagcctcataaacgaacagcagtgggtgctgaaagcagcaccaaatggagatttggattc

SEQ ID NO: 24278 - DNA, 120 bp, Homo sapiens
atgcgcctcctctcccccatcccagccctcagcattgtgccagagtgatacccttaagtgtttgggtttatgttttcagttttgtttgggaaacagcagttgcacagagagttgggggta

SEQ ID NO: 24279 - DNA, 120 bp, Homo sapiens
caccgaggcactgccaccaccagctctagcagggatgctcctgagcttggcggacatacttagatcctaacgtgccagtgagacctggctgtggagagtagcactggcagccctgcctgg

SEQ ID NO: 24280 - DNA, 120 bp, Homo sapiens
ggtcggctggggacagccgtatgtgctaggtaggagtggagggagatatgtttaccaaatgcctgtcctgccatcctcccaggtagtcagagtgagctacatcctgccccgccttcattt

SEQ ID NO: 24281 - DNA, 120 bp, Homo sapiens
acacggggtacaacagcagccaaattcttccccacctcccttacttcgaaaaaaagtttggaaccctggtccctatactctgcagtcagaagtgggactgagccatacatgcccttgaat

SEQ ID NO: 24282 - DNA, 120 bp, Homo sapiens
catcggagctcagtattcctacagggtaagaggtaggaatcttgctgggacgaggggagccagaagtggcaataaaagcgtgttgacctgggctacgcgggactccatgaattttccatt

SEQ ID NO: 24283 - DNA, 120 bp, Homo sapiens
ggacggcactggagactctcctaaacgccacacacctcccccttgctgcccgccacacgcgcgtctccttcaaccgatgcattgccaccctcccacagcctcgccctctgctctaaatta

SEQ ID NO: 24284 - DNA, 120 bp, Homo sapiens
ggtcgaaagagtcccagttccaatctaggaacagcataattttgttccaaaacctgatctgtgtttttctaattaaaattaatttgtcacccaaaacaggagggggatggggaggaggga

SEQ ID NO: 24285 - DNA, 120 bp, Homo sapiens
ctccgctggggccgggacggggaatgaggaggaagaaggccctctcttcccctacccgggccctccaggaccttctccctgagtcggctgtagggaggactccgaggaagctcggcgcgg

SEQ ID NO: 24286 - DNA, 120 bp, Homo sapiens
gtgcgctgggcctcctggcgccgggaggagcgcgcgaggcaggcggggcgggcgcgtccggggcggggcgctggacttcgtgggtggtccccgcccccgcggcggcctaggcccgcgcct

SEQ ID NO: 24287 - DNA, 120 bp, Homo sapiens
ctgcgtcccccaacccggaggagatggggggctgtgctagctgcttgcccagcgagtgttcccggagtctcctcgccgcaccccgctatcgggcgctcagaccaggggctcggcctggcg

SEQ ID NO: 24288 - DNA, 120 bp, Homo sapiens
cctcgaccgaactgctgcggggacaaagagccgcgagttcgctccctgcccccagtgtctcctaagcgagccttctgctcctaggaaggcgcctttccagcagccgctgggaccctggcc

SEQ ID NO: 24289 - DNA, 120 bp, Homo sapiens
agacggaaagaaaaaataaaattatccagaatctagaataaaaagtaagggccttttattctgggagaggacagttaaaaagcgcgctttcttgctaacttgcctttcttggttagtgcc

SEQ ID NO: 24290 - DNA, 120 bp, Homo sapiens
agacgtgcactttataaacttatttaagtgacacggacccagaagtcgatgtcttgggttagaggttggagtgatgcgccctctgggttcagcggctttgaggagctcaccctgcagcgg

SEQ ID NO: 24291 - DNA, 120 bp, Homo sapiens
ctccgtttggggccccttggaggaagtaagaccaggaaccgtgatcctcagaatgattattcaaatctggattttcaaaactaagaactacactttcaccatcgcctctactgtctctca

SEQ ID NO: 24292 - DNA, 120 bp, Homo sapiens
taacgcacagagcaaatgttcagtatagtgcagttcagggttcctagctagattgcaaattgccaatgtctctgattctcagtctgtagctttctttctcttcggcctgatgctggggaa

SEQ ID NO: 24293 - DNA, 120 bp, Homo sapiens
ctccgtcctgtaacttgcgatgctctgggggccagatcatgttatgtggctatgatatatttaattatagtgtcctttttcataagttgacatcaagtgaacccagcaagccaaaaatct

SEQ ID NO: 24294 - DNA, 120 bp, Homo sapiens
tggcgcacagcagggaaaacaaggcaggagaggatttatttcagaaatattaaaactttctgacaataaggctgcaagcccaagaacctcaactagattgtgcttacatcagtatcagta

SEQ ID NO: 24295 - DNA, 120 bp, Homo sapiens
gaccgtgttcaaacagaccctttattgcttttggcaaacatatccaccttccactggctttgttgctgtcaggagagaatgagttgagccatgttagcacttcttgtcctgaattgttta

SEQ ID NO: 24296 - DNA, 120 bp, Homo sapiens
gtccgtctccaaagcccatgtccttttcattatgccacagtgattctaacttcttagatgctgagttcttgctttctcccagaggtcttttagaatactaagtgaactctaaggcgtgtc

SEQ ID NO: 24297 - DNA, 120 bp, Homo sapiens
caccgagacccagagggagagttacacacagactccctacacacagagacacttcccccatatatacataacagaacccctgccccaccatgcccaagcctctacccagtcccttcccac

SEQ ID NO: 24298 - DNA, 120 bp, Homo sapiens
atccgcctcaaaaaaaaaaaagaatcccatggccatctccacagagagtcttctccatggttacagagacaccccacacaaaccacacacaccctgagacccacccacacacaaaaacac

SEQ ID NO: 24299 - DNA, 120 bp, Homo sapiens
acacgggctcccacagagagaaatacatacacagacacacacactgacatccaacaggtaatgcttaaaactaaggttttcatggagcgtgaatagtgttctccacagttattttgagga

SEQ ID NO: 24300 - DNA, 120 bp, Homo sapiens
agacgggctgccattgggtctgcagaacagtgaatgctacaaagccagtttgatttggattcctgtttctggaactgcttgttcctgggcattgttttcagtttgatgcactcagcatgc

SEQ ID NO: 24301 - DNA, 120 bp, Homo sapiens
gtgcgtgggaccgaggaatgtagggggaagattatgtattagatatagaaagagatgtaattttcatttttttttaacctgtgggtcattcatggtataggtttgcgtagagagcttgat

SEQ ID NO: 24302 - DNA, 120 bp, Homo sapiens
tggcgctttggattattttggttgagagagaacactgaaactacatagccagatttcttgtgactcgggcagcatcttctgagaattatcttgttaggaaaaagagttgacacatgcagc

SEQ ID NO: 24303 - DNA, 120 bp, Homo sapiens
aaacgttaagttccaaaaagaactattttctcttgttgcctggcacacgtatatgtattcctttgactaaacctgtttaatttcaaacaggctaggcatggtggctcatgcctgtcatcc

SEQ ID NO: 24304 - DNA, 120 bp, Homo sapiens
ggccgtgagctacagcttttgctttctctcccatctatggcctccctcgtgtatttatatatgtagcctccctgatgtgtggatgtatggatgtatttacagctagcatcagctatggtt

SEQ ID NO: 24305 - DNA, 120 bp, Homo sapiens
taacgtgtaccctggataagtcatatgttgcctttgttgtagttttccagtctgtaaaaatgaagatgttaataatatctattctgccttcccagtggggtgtgttgaatgtgtgtttgc

SEQ ID NO: 24306 - DNA, 120 bp, Homo sapiens
ctccggggaattgaagctgagcagccaggctggttctgtgaagccagagcaatctggttttaaaggatttaactaaattctctatgattaaggttttctgagggatgtgcattgctgagc

SEQ ID NO: 24307 - DNA, 120 bp, Homo sapiens
ttacgtatgagtcagtctgtgtccctagactgagaacagagtagtggaactggtttaagttcagggaatagtcttcaacaagttcatagcatcttgaagagaagcctagactctgaaagc

SEQ ID NO: 24308 - DNA, 120 bp, Homo sapiens
ggccgtgaatggccagagaaactacttaaaacatttgagtttctgaaactacaggcatcctcagagggttaatgcatgctcttagtagaactcaaatgtctctaattaggaagatcttaa

SEQ ID NO: 24309 - DNA, 120 bp, Homo sapiens
cagcgcttggagttggaaaccttagaaagaaatctacttggtgccctattccattgcagctatgctggcagtgaaaccacaagacaaatccttcctattcttccctaccctttccccagg

SEQ ID NO: 24310 - DNA, 120 bp, Homo sapiens
agtcgtgaatttgctgggacacacctgaagtcagcatggctcaagagtcttacctaagacccatggcaggtcctagctggttgccgctgctgattatttagagcccaagggctgtttagt

SEQ ID NO: 24311 - DNA, 120 bp, Homo sapiens
atgcggactggggtgaacattcttgttaggaggagcaaaagttgagagattcatcaagcaagcaaatgatctgtctcactttgtgaaattatgagtaagagatcagaattgctgtgggtg

SEQ ID NO: 24312 - DNA, 120 bp, Homo sapiens
atccgggatgatgtcatttctaagatgtaatctgatacgaaaatgaatttaaagagtaattttaaattaaataaatttaaagataaaaggaatgatttgaggctagtacacctaggacta

SEQ ID NO: 24313 - DNA, 120 bp, Homo sapiens
tgccgcactagactgctgctctttgtttcctggggctaagcacacggtgagggcaagtggggttcttggatctctggtgcagtctcagtcttaggcagacctctgtgaggggcagggttt

SEQ ID NO: 24314 - DNA, 120 bp, Homo sapiens
actcggagagtcacatcctgaatgggaaagttactggcttctctccacacccaagacttcctggtaaagtgagatcatcgtatttgacttccaaggtctaagtcagaagacagctgctag

SEQ ID NO: 24315 - DNA, 120 bp, Homo sapiens
cagcgtttggtgtataataggcacctcaacagacattgttcccctccccagtgaattgccctgctttctgtcctctctccttgcatctgcctccttaatgttttcaccctttaagaccta

SEQ ID NO: 24316 - DNA, 120 bp, Homo sapiens
gggcgacagtgcgaccgtgtttcttaaaaaaaactagttgctgttaaggtaggcctaccacatttgtaatctcttgaggcaaatctgtgttgtttctctaagagcagtcacttagaagat

SEQ ID NO: 24317 - DNA, 120 bp, Homo sapiens
agccgtttctcttaaggagaagtgtgtgtgtgttggagggagtgttggtggggagaagaggggtaaagagaagatgatactagtaaaataatctagttttgtaggttgggatgatcactg

SEQ ID NO: 24318 - DNA, 120 bp, Homo sapiens
tttcgattaattcatgcatgctgatttctgtggtaacaaatgtgaaaagtttggctgatggcttaagtggacattttcttaagaactctttaagtggtgcctgttgggataaactatgcc

SEQ ID NO: 24319 - DNA, 120 bp, Homo sapiens
gtccgttttgttgctgctactgaatgctaatgtggttaggctggcagctaaacctacaaagaacaaggggaaatgaggaaatgtcccaatgaaacattgcttaaaactgtttgcgcagtg

SEQ ID NO: 24320 - DNA, 120 bp, Homo sapiens
tgacgatgattaaagatataccacattctgggcatgtactaggtgctagagtaacaaatcttgggccttgtcgtgtagagcagaaaggtatgggctcaactagctatgttacaacttcta

SEQ ID NO: 24321 - DNA, 120 bp, Homo sapiens
gctcgacttggagaatagtggaaagtgaaactgataaggttgtggccatattgggaagagtttgtaattccatgctcatgagtgtgaactttattctataggcatttagggaccataaga

SEQ ID NO: 24322 - DNA, 120 bp, Homo sapiens
catcgattctggggataatttttacttcacagttgtcagatttgagtgacaattgagtaaagagttaaagattatagtgtggttattgggtgatgatgatgcctttaagatagggaatgt

SEQ ID NO: 24323 - DNA, 120 bp, Homo sapiens
tgtcgtggggtgaggggaggagggccagctatggtgctggataacttcaacagccctgcagccctgtgctctgcctggctcaagtctgttagtttctggaggacttcagaaatgtatcag

SEQ ID NO: 24324 - DNA, 120 bp, Homo sapiens
actcgattagcaaccacttcatctacgtcatgtgcagtgccagttctgaccatcactgtgtttcagaagggaagctgcctgccagtccatctgccctgatttcatggctgttatctttaa

SEQ ID NO: 24325 - DNA, 120 bp, Homo sapiens
tcccgagagctttagtctaacatctgtgaccccagccagactccatcaaacttcatactcaaagtcatctttgaaaagcagtggcatttattatatacctactatgtgccaagcactgta

SEQ ID NO: 24326 - DNA, 120 bp, Homo sapiens
attcgacttcattctgaatcagagtaaaaggtgttaaggctgtttggtctgtggagggcaagactaaagggactaccatcaagtttctgaaattcatgaagagtatgatcaatgatacat

SEQ ID NO: 24327 - DNA, 120 bp, Homo sapiens
tggcgctgggaccttctacccaggaacgggaacaggcagcctctggggccatcagtcagtggcaggaatgggccaagctaaaaccaaccaaatatctcccatccagacggcactctcctg

SEQ ID NO: 24328 - DNA, 120 bp, Homo sapiens
ctgcgatctgattctcggagtggcatttccccagaccgccagtcacttacccaagggcagcacacttccgtgttcccacttcccctgatgaggccaggtcctttcccaaggggtgttgaa

SEQ ID NO: 24329 - DNA, 120 bp, Homo sapiens
ttccgaacatgccccggctgggggagcagctgacttggcagggcccccaaaatgacaccgctgccgccgccaccgccaccacccctcccatcctgcctgccctttagggtggagtgagat

SEQ ID NO: 24330 - DNA, 120 bp, Homo sapiens
cctcggtggcacccagaccggaccggcagcctgggcttgggcgctggggaggacacctctgcccgaaaggagaggcttggtggggaaggtttggcctctgagcagaggcacgactctgga

SEQ ID NO: 24331 - DNA, 120 bp, Homo sapiens
ctccgagggtgggcgggcctgctttgggacatcagcagcactgggctctcttggtcccatggagcccccaagcctgggacttgctgaggaggccactcccaccctcctccagtgtgtatg

SEQ ID NO: 24332 - DNA, 120 bp, Homo sapiens
ggccgcaccagccgggctccatcggcagcctggggctgcaggcgatcaatggtgccggatcgcatttcgacccgcctgaggctgggcagaggctgggataatggcctggaatgaataagc

SEQ ID NO: 24333 - DNA, 120 bp, Homo sapiens
aggcggggagtctggaaaacccactcatacagccctccagggagctgcccctcctgccgctccacgcacccagacaggccaagcaaggtgcccgacatgggggacgccctaaacccgggc

SEQ ID NO: 24334 - DNA, 120 bp, Homo sapiens
agccgctgcttttgacaaacagaaaaacaaagcaaaaagtgcttctcagtgaccctcccgctccagcaagaaaggccttcgctgcagtgggacagcgttcctgcctgacactggacacca

SEQ ID NO: 24335 - DNA, 120 bp, Homo sapiens
gcccggaactaggtaaattaggagatctagaaactagctttggcctgaggtcctcccctggagcgctggagcagggccccagagcagccgggcctgaagcctggtggaggcacgccccca

SEQ ID NO: 24336 - DNA, 120 bp, Homo sapiens
actcggggctcagcaaaggcgcccacctgggcaggtgtgaggaggtggagcccagctgcagaccacccaggggctgagggcagcttctgtcatccggccttccccgctaggcaggaagga

SEQ ID NO: 24337 - DNA, 120 bp, Homo sapiens
aaccggtcactgccaggggccttccacccccccttgctgggtctctgtgcccaccccacctccagggctcattctcactcaggccgggaaatcccttctttcctatcccatgggacctgc

SEQ ID NO: 24338 - DNA, 120 bp, Homo sapiens
ggacgccctaaggaagcacccggggcggaggactggagcacagagacagggtgcggcacaggccagccaggttccgaggggcagagggagagctggggccatcagaagagagacctagct

SEQ ID NO: 24339 - DNA, 120 bp, Homo sapiens
acacgggcaccacaccccagagggaatttattgggggctcctcgcggtttggtgatagctaactgacaagaaaaaaaaggcccaacccacccaaggcagtccccagggcacccaggcagg

SEQ ID NO: 24340 - DNA, 120 bp, Homo sapiens
acccgtcatcctccagctgccagcttcaaccacacacatcccccacccgggcactccctggctcagacacctaaaatgactcccactgatctgggctaagtccaccaacccttgcctgag

SEQ ID NO: 24341 - DNA, 120 bp, Homo sapiens
agtcggccactggtctcctgcttgattgctgaccaccagatttcacatgggtccagcctggctggccaggctctccccagctttgacagactaggtccaggcctcccagcctcagtctct

SEQ ID NO: 24342 - DNA, 120 bp, Homo sapiens
tggcggaagagccacagtgacccagctctaccactcaccaacctcttcagccaagcctttcctctcaaagcctcaggttccccatctatgagataactattttaaaaaattacaagcccc

SEQ ID NO: 24343 - DNA, 120 bp, Homo sapiens
ctccgagccccactaagtatcctcctcttggagctgttcggagatgacccactccacagcaggctacagctccagagacggtagcccccctggaaacacccaggctgacctcaagggcag

SEQ ID NO: 24344 - DNA, 120 bp, Homo sapiens
aagcgtgtgctgggagcctggctgggcctttccaacccacggcaccattcaggatggccctacagatggtttcagactcccccacctctgccctgggcggccccatctgctggcccagct

SEQ ID NO: 24345 - DNA, 120 bp, Homo sapiens
taccgtggccccaggcagtgtaaggcgatctggctgcccaccagcgctgggccctcacacagcagctgagccagatgggctggggaggcggtgaggaggccttgaggaggagcaggctgg

SEQ ID NO: 24346 - DNA, 120 bp, Homo sapiens
aggcggacgcagctgcgggtcctgcttttcccatattggcactgcacatgattgctcagagcggagagacacaagcaaaaatgtgctagtgccaaaatcggccaagcagatggcactggt

SEQ ID NO: 24347 - DNA, 120 bp, Homo sapiens
gtgcgggctctctggggacacactggacgaggggccttgcatccctgcacccttggaagcagcctgtttccgacgtctaggagcactcaaggcagaagtgggtaaggtgctccggaggcc

SEQ ID NO: 24348 - DNA, 120 bp, Homo sapiens
cctcgtggatctgtctctgctctgtttatggcccttcggtaattcactgactgagactgttcacagtgaattctaccagtgccatacacagaacaggagtcacactctgcggcctgccga

SEQ ID NO: 24349 - DNA, 120 bp, Homo sapiens
ctgcggagagaccagcggcccacgatgcccgttccctgctcctagcctgcccactcccttgggggccccccagcaggccctcagcagcggctgctacggtctctaccccccaccccatcc

SEQ ID NO: 24350 - DNA, 120 bp, Homo sapiens
gtgcgggagaggagctgaccttctggccttgcagaggagaagaccacaccaaggtgtctcctatctccacctgaaggcccacatccctccacatcacccagactgcgcctccaggctggg

SEQ ID NO: 24351 - DNA, 120 bp, Homo sapiens
gctcggagaggcaagcagctggccagagcctcctctctacccaacctgccacaggggcagtgaccagtgggacatccaagatgcctctcgtagcctctgagcccagacaccagcagccca

SEQ ID NO: 24352 - DNA, 120 bp, Homo sapiens
aaccgaatctgctgctcacccccactcccatcccaaaccagaccagattgggccagactgtgaaccgcccaggctgggcatctctgctgccggcctaggatcaaggcaggaaaaggccag

SEQ ID NO: 24353 - DNA, 120 bp, Homo sapiens
agccggaggcacggatgcactctagcaagggagtggctcctggctggctctggagtgactgcggaggaaagcggaggctcaggagcgagggaggggctgggaaggttgcatcagtggttg

SEQ ID NO: 24354 - DNA, 120 bp, Homo sapiens
tcacgacaatggaaaaaaataagtggtacaacagcagaatgtgaactaagtgattgagaacctcatatcctttggattctatcatttacatgaccattcatacagtcctacctcctgata

SEQ ID NO: 24355 - DNA, 120 bp, Homo sapiens
aaccgaggctttttataacacagagaaacactaatcatgagcagttgctgctaaaattgaaacattttaaaatagttacttacgcttcatcaatgttgggatggaaaattttattcatga

SEQ ID NO: 24356 - DNA, 120 bp, Homo sapiens
tgacgctcacttactggtatcacttggctgcactgtgcacggaacatgaatgaaactgttgaaatgctaaaggaataccacttcaaaccacaaaggatttcctaaaagcagtgaccaaaa

SEQ ID NO: 24357 - DNA, 120 bp, Homo sapiens
ctccgacccccatcctccatcacccccatccccacagtctctctctctcatattcattcagaacatatttggtcagcacctacaccgcaggcattgtgcttggatagggtataaaaataa

SEQ ID NO: 24358 - DNA, 120 bp, Homo sapiens
aggcggagtaaaatgggaagagtcaggaaagatgcagagaaatggcactggaggaggagcctcaagtgaggcgctacagagattgtctccaaaaacctgagaaacttcccctgaagtaga

SEQ ID NO: 24359 - DNA, 120 bp, Homo sapiens
acacgagggaactgtaagtttccatcaagtgaacaaatagatactctcactccacaggatagaatcagaagacattcttaactagctccccatattggacaagggccattaacatcttga

SEQ ID NO: 24360 - DNA, 120 bp, Homo sapiens
atccgtaacaacagcaaaaactgattcattcacagagtaggccaaagtctgacctcagcagggcaaacaaagcatttgaattattagataagcagattatgaacactggatagcatttta

SEQ ID NO: 24361 - DNA, 120 bp, Homo sapiens
tggcgtaagactgagacttttcctagttaacattaacacaggtttctgaatgtgaaatatttcactgccacattttaaaattccaaatgaaggtgttaaaaggttttctactttgaactt

SEQ ID NO: 24362 - DNA, 120 bp, Homo sapiens
aagcgaaacaacattcactgtgaaagacactgtacgtgatccaacccagtatccattctctccttcttactatcaaaaccccgattgtattcagggcagtcaaagagccttgtttcccag

SEQ ID NO: 24363 - DNA, 120 bp, Homo sapiens
caacgagacacttctagctcaggatgatcagggcaatgtgtagggagggacactcagaaaagttcctttggtcattggaggaggggaatagtctcagctagctcttagccttctgcctat

SEQ ID NO: 24364 - DNA, 120 bp, Homo sapiens
tgacgtgatggcagaagcgatgcctttaagattaagtaatgcactgaagagggctgggaatacacactgcggcaatctggattccctgatgacatgaagcccgcccttatctgcctccct

SEQ ID NO: 24365 - DNA, 120 bp, Homo sapiens
tttcggttgaggaaaccaaggcaaagagataacaaatccaatctgtgactgaagcctatagttattccactgtattttacttcttcaaatgtcacacatctgaaaaagtctatgattttt

SEQ ID NO: 24366 - DNA, 120 bp, Homo sapiens
tgtcgatggtcaagctgtgcgtgcagctgtttttattgctaagatggaataggatggaagggattcagaagtggctctcaggcacccacaaccagaagaagagtataagtgaggaaagcc

SEQ ID NO: 24367 - DNA, 120 bp, Homo sapiens
tcccgtgagtggctgcaagatactcctttctactgtgagagggagatctcaactttgagcttgggaaagaaaaccatagactcacagtgcttggaagatattcccagctgtatcgtaatg

SEQ ID NO: 24368 - DNA, 120 bp, Homo sapiens
tctcggtaaaaacaaaatctacttggatggggaatgcaacctttgttaaaacacagaatcctagaggatttagtggagaaaattagtaaaaggagaatctgaagtttggggggactataa

SEQ ID NO: 24369 - DNA, 120 bp, Homo sapiens
ctcggtatatacttttttttttcgaacatcaggatcctttaccacacagtctcattaagctttctagcttcgtcacagcagctgtcagaaggttaagacacactaccgaaaaaaaaagtc

SEQ ID NO: 24370 - DNA, 120 bp, Homo sapiens
tttcgtatggcagtgacagagaggagtcttactgaaaactgccaatgtactagttcctgaagatctaggcagagaaatgcggatttttttttctgtgaaaacttggaaaaccttcacctg

SEQ ID NO: 24371 - DNA, 120 bp, Homo sapiens
acccggctgcctccagccctcgctgccgttacagggggcttttcccagggtgctcttctcacccttcggggagcaggctgtctcctcaacaccatctctttccaccagtttggcctccgc

SEQ ID NO: 24372 - DNA, 120 bp, Homo sapiens
tgacggttagtcccttcaggaagggcaccagtgtccaagaggctgatgacccctggggtctgtgtgtgacacccaacctgtacccagggtgaagcttccgcggctgaggagcttccatgg

SEQ ID NO: 24373 - DNA, 120 bp, Homo sapiens
aggcgggcagcagggtgtaaggggagccagcctagttggctcaaggctgctagcaagcccttcagtggggagatctacctccaacagcttcctcctcaacagccctcttggggaagaaga

SEQ ID NO: 24374 - DNA, 120 bp, Homo sapiens
cctcgctgcgcttccaagagcggagcccaagccccagctgtggtttccactctgccgccccgtccagtcttcccgcctgccttggcctctttttcacagggccacaccaaatggggcagg

SEQ ID NO: 24375 - DNA, 120 bp, Homo sapiens
gaacgcatgggaaccttccatggaggcactgccctcccggctccagaagcctaggctcccttgcagtggctccttgaaaaagggacagccagcacgagccaccaaacctctctcctctgc

SEQ ID NO: 24376 - DNA, 120 bp, Homo sapiens
caccgtgggcagtgtgcctcttccccacctttccaccatagacttaggttcagactctccctggtgagagcaaggtggctccaggaagaagtgtaaatcatagacttgggcttgtaggaa

SEQ ID NO: 24377 - DNA, 120 bp, Homo sapiens
ctgcgtcgtaacgtttagcctggaataggggacagagggctggcttggggcggcggcagtgggatgcaggaagcaaacggtattttaaacctaagctgcttaggggcataactcttcctc

SEQ ID NO: 24378 - DNA, 120 bp, Homo sapiens
cctcgaatggtagaattgctcactcttccctgggaggaaagtcaggcccagatggtgttatccatttcccatccagtctggcaagatcacaggaagggccagctggtggcttccttgtta

SEQ ID NO: 24379 - DNA, 120 bp, Homo sapiens
agccgtgagttctttcatcctccttcctacagggagtattgcctctgtttttccagaagattcttgtaatggtttctgtaggaccgtgcacttcacaggcttcagttaaaattggactca

SEQ ID NO: 24380 - DNA, 120 bp, Homo sapiens
agacgtttgatcctgcaagtcctcaaagcctcctgctcccccggggcggccgggcacatgaatatggagagtggcattgaagatgtgctgtctccttcccagatcctgctgcctggggac

SEQ ID NO: 24381 - DNA, 120 bp, Homo sapiens
ccacgggggtggtggctgcaaagggctgggcacagagagagacctggcaaggtgaccgggggaggtgactgggctcaggctggcacctgtcccacctcactgtcagccaagcagatggag

SEQ ID NO: 24382 - DNA, 120 bp, Homo sapiens
gcccgttgcagccacctgccctgcggcctctgctgtgcccgtttctgctctgggtccgccagcaggagctcagccctcatcctcatgttcatctagtgaggcggggggaggcggtcatcc

SEQ ID NO: 24383 - DNA, 120 bp, Homo sapiens
agccgcaggtgtggggccattgcagcgaggggccctgccctgttcctccaggaactcccacgggctcttagagtctctccaggttgtcgccatttcacttccgcctgcagttgggcatgg

SEQ ID NO: 24384 - DNA, 120 bp, Homo sapiens
ccacgcatacacattggagctacacataccacatacaccacaaaccagaaacacacacacaccatatacacagccccatacatgtattgcacacaccatatgcaccacacaaatacaccc

SEQ ID NO: 24385 - DNA, 120 bp, Homo sapiens
atacgcaccatgcaccacacaccacaccctcacactgcaaccacattccccagatacaccagaggcccatggccccctgccctgcgtgggagtctgtgacggggacttaggaactgtgac

SEQ ID NO: 24386 - DNA, 120 bp, Homo sapiens
gcacgtttgccacgcacgcaggcaggcagcacgggcaggagcagacagtggctcactcagcccgttttcgcctttggagacaaactgcgtccctgcctcctgagggctgtgctgtgcgga

SEQ ID NO: 24387 - DNA, 120 bp, Homo sapiens
ttacggccccctgactcagagccggggatttttgatctctttttgcagacggagaacacggatgcagggaagaaaagagttcagccaggggtggcagccactgggccccgagcagactct

SEQ ID NO: 24388 - DNA, 120 bp, Homo sapiens
ctgcggtccccactgggagtggctccggcggggaaggggctggcgcgctggcagccagggtcttcctggggggcactcgggcagaggccagggccgggccagaccacacggactcttccc

SEQ ID NO: 24389 - DNA, 120 bp, Homo sapiens
ccccggcctctggggccatgggggcagccgcggagaggctgggcctggcgctggtacccggggaaccgcctggctccaaagagcagctcagaaaagtcagtggagccagttcctgaacag

SEQ ID NO: 24390 - DNA, 120 bp, Homo sapiens
ccacggggaccggtaggaggaaggaggaaggagaggccgtttttgaccttcctccctctccctgcctggtccaggcgcacaacggcagcggcccctgtggagggcagggtttaggcatag

SEQ ID NO: 24391 - DNA, 120 bp, Homo sapiens
ctgcgggtctccctcagctccagggaggcgccggcctcggcctgccgtcttctcacgggtcccaggccctctctctgcccacggccaccctgcctccctccacctgagccctgtcaggcc

SEQ ID NO: 24392 - DNA, 120 bp, Homo sapiens
caccgatcaagggctgtgggcacccaggcactatgggctgagggtccctggccgcttggcaaacacctcacagctctcgagcccacgggagcaggtgagaaacagttgcgtttcttttgc

SEQ ID NO: 24393 - DNA, 120 bp, Homo sapiens
catcggcctccgtgtcctcagtgaggcagggacagctgtgttggtgtggccctggagcctttggggagaccgtagcagggccacactgcttcaaggtgagacagaaaaaggtgccttctc

SEQ ID NO: 24394 - DNA, 120 bp, Homo sapiens
ggccggggcagtgctgccagggtgtgaaggggacacggtgcccaactgcttctgctttgctcacagctctcagcacctcaggagccagaacccctcagggtgtggtggggacagcagggg

SEQ ID NO: 24395 - DNA, 120 bp, Homo sapiens
tggcgggcaggggtgtggtgggtggtggggagggccaggcctggtcagaagccaggaggcgagccaggcccgaggctgacacaagccggctctgggctccagccaggagcaggtggccat

SEQ ID NO: 24396 - DNA, 120 bp, Homo sapiens
cctcgggaggccccgcaggagccctggcacctttccaagtgccagctgcgcagcctggcccagagtccgggcccaggagggcccgcagtgcctgcagctgcctggggaccacatgcgtga

SEQ ID NO: 24397 - DNA, 120 bp, Homo sapiens
tcccgcctctctcctccgcctggcttcgcgccgcctgcctgccctcggggacaagcgtgcccatctgacacctcagcgcctgcccattccccgggaccaggccatctggcctcgctgctg

SEQ ID NO: 24398 - DNA, 120 bp, Homo sapiens
tgccgcagcccgtcgcctcctgctccagcctccgccaggactgtcctgtgcgcccatcagggtgtccttggtacctggctggcaggctgtgcccagccaggaagtcctcctgtaagctct

SEQ ID NO: 24399 - DNA, 120 bp, Homo sapiens
tctcggtgccaaggggcacagccctcagcacggaggtggccgtggaggggattatcagagtgcaggggcccagctctcccttgtcaggccactgtcaggccttcctgtgaccctcccaat

SEQ ID NO: 24400 - DNA, 120 bp, Homo sapiens
tggcgtgacctcttgtctccgctttgaccagaggctggaagagtctgacccaagcaggcaacaggaggtgcagggagggttagaggagccagcctgggggggaaagccaggaggaaacaa

SEQ ID NO: 24401 - DNA, 120 bp, Homo sapiens
cagcgccgccagggggcgtcctcttgcagcagtgtcctgaggccacgcttctagaaaggcctcgaaccccagcaccagcagggcctgggcactgacaggcccactctgggcttctgggcc

SEQ ID NO: 24402 - DNA, 120 bp, Homo sapiens
ggccgtctgtaaaacaagacagtccaactgtttgatctccaaggccccttctaagcttttctgagctgtgacaaggacaaaatctcaccaaaaaacctgaagcagctggaaaagccaacg

SEQ ID NO: 24403 - DNA, 120 bp, Homo sapiens
gaccgagtgggcaatagggaattcaggatgagctggaaaaaaagaaaaaaaaaactcctgctgcaataaattacatcacagtggagatctctttctacccagaaaattctgagcccagac

SEQ ID NO: 24404 - DNA, 120 bp, Homo sapiens
ccacggagaaaagagagctgttcaataatagattcccaggcgtgagggaggccttattaataaatccatcggtggtctgctgaaaatgctgccccctcccttgcgggcatcccacctgac

SEQ ID NO: 24405 - DNA, 120 bp, Homo sapiens
tgacgacagtgggggactgatgcacccagggccctgaccagggaggacgtttgggtaaatatttgggcagagatggctgctgctagaatggtgagcagagctggggagcgcaggaaacgg

SEQ ID NO: 24406 - DNA, 120 bp, Homo sapiens
tctcgtattctatagtcagctgagaccatgctttgagcatgggcggtaagaggagcaggaagcaggaggggcggggaggggtctggcaccagctttctaaatttaacatgcagttgcttt

SEQ ID NO: 24407 - DNA, 120 bp, Homo sapiens
acacgaagatgagggatgggaaatgcaggaggggtgtgcggagggcaagttgatggctctccgccttcccgtcacgtttatttggcctggcagagtgaccaggatctgctaaggtcatga

SEQ ID NO: 24408 - DNA, 120 bp, Homo sapiens
gggcgtggccatgctgcatcagaccggtccagaggtggagggcaccttggggtctctcgtgtggctctcctgttgatgagggacctatgaatatcccacagcgaccttttcagatgctcc

SEQ ID NO: 24409 - DNA, 120 bp, Homo sapiens
cctcgtgtgaaaagccccggtggacctgggcttgcctattgcattgtgaagttgtagtcctttgaaaatcctgccccacgtggagtcagaatctttctttctgggactgatgccatgggg

SEQ ID NO: 24410 - DNA, 120 bp, Homo sapiens
atgcgctcctgcctcccttcagtttgttctgttctcccaaattctttcagtgtgcctggtagaagcagtctgccagtctcccctcgctccctctcattcatcccctctctaactactcat

SEQ ID NO: 24411 - DNA, 120 bp, Homo sapiens
ctgcgaccccactgacttggttttggccttgtccctgccacagttgacaaatataatggcgcgtcttcttcttcattattatcattattattactggcaatcatagtccactctgcctca

SEQ ID NO: 24412 - DNA, 120 bp, Homo sapiens
tagcggaggtgacagacatagaggagactctgatacggagtggaaagtgcaacgtcagctgttgtcagaatctgtcagcgcagagcggaagggcacctgagccagtcagggctgggagag

SEQ ID NO: 24413 - DNA, 120 bp, Homo sapiens
taacgatgactgatggtaacaatgataatgactactaaaatttattgagcaactgccaaatatcggggattgccaaaatgttttatgagttaatcattcagtcctcaaccagcctgtgag

SEQ ID NO: 24414 - DNA, 120 bp, Homo sapiens
gcccgaagccatcagctagcaaggagcagagcccaggttgaaacaaggtgggctggatcttgggactgtgccctagaccaccaggctcaatgcctcctgagtagaggactaagagtcagg

SEQ ID NO: 24415 - DNA, 120 bp, Homo sapiens
ctccgtaccagctctgcagcaggactgatgagctatttctaaaagaactgaccctgcggttcaggaagacaagcagagtcacaggggaagcagaaaagtgcagccaaccacacccactct

SEQ ID NO: 24416 - DNA, 120 bp, Homo sapiens
ttccgagacaagtcagacctgaccccacattttgggaactagcttaagaacagggctgccatctttattttaccaaatatgaacatgaaacagatctaccagttacccccatgagtggct

SEQ ID NO: 24417 - DNA, 120 bp, Homo sapiens
cctcgtgggctgttgttccctgctctcccctggactgcctcatccctgaaggctgatttccccagagttccaccctcagcctcttttcaggcctcagacgctacctcagatctgatccac

SEQ ID NO: 24418 - DNA, 120 bp, Homo sapiens
caccgcccaatatctcccaaaccagcccagcgcattggggccctggccttcctcccaagcttctgacctgaacagctgcctcctgggcatgcttccaaactaaaaccctctcttgctctc

SEQ ID NO: 24419 - DNA, 120 bp, Homo sapiens
caccgcaggaacagagactgaagagtcgtcacctctcacatatcctctcatcacaccgtcaccagctatcccaaatttctcacacacatagcccttggaaagctctaatctagatacttc

SEQ ID NO: 24420 - DNA, 120 bp, Homo sapiens
tcacgagacagcttctggtcaatgggatgtgggtgaaaggaaatccaccacttctagacctggcccacaaaaacctcccatgcatccctcttttcgatcagccccctcgaacttgataac

SEQ ID NO: 24421 - DNA, 120 bp, Homo sapiens
gagcggaggtcagtcagcctgcatccctgaatgactgtatggatcaaggcccccaccccatgctcactactgggcctgacatgagcaagaaatatctactctattaagacaaacatacac

SEQ ID NO: 24422 - DNA, 120 bp, Homo sapiens
tagcgcctatactttaactattgtgctaggtccctctttagctggttcagttcacgcaccgattctgatccatttatagttcttcggcacacattgttgagaagaattctggggcagtat

SEQ ID NO: 24423 - DNA, 120 bp, Homo sapiens
cctcgattaatgatgtctgccatatatgcgcaggaatggggaggtgggagttacttcttttttttttttttttaactctgctgaatcattccttggagaaaaattatctctggggttata

SEQ ID NO: 24424 - DNA, 120 bp, Homo sapiens
taacgccttctaaattggggcatgttgacatctgaagtgtttaaagcctgctttgtttcctagctgtagtagaattctttaactgcctgtttataatttatctgagagaaacactggtaa

SEQ ID NO: 24425 - DNA, 120 bp, Homo sapiens
ccccgtgatgttatttttccgatcattgctttcctcacaggcagcatttagaccatgccaaatacccctcccatcagatggttagaaatggccatacagtcggtctctttactaaccttt

SEQ ID NO: 24426 - DNA, 120 bp, Homo sapiens
aatcgttctatgaggtgttcagtatacactttcccatcctttaaacatttttttctcagctaaagtaatatacgtatattgagaattcctgggatggctgttatctcctctaactacaaa

SEQ ID NO: 24427 - DNA, 120 bp, Homo sapiens
ctccggccgagaaagagaaaagttatttgggaggtcagctgtcataagccaacagggttttgaaggagtcatgtcaagatgaaaccccacgacaccaggatagggtgggggttctgtccc

SEQ ID NO: 24428 - DNA, 120 bp, Homo sapiens
ttccgcggacaggttagtggccagctggtagagacaacacaaaggaattcacacacgagagagggaggaagccgactgagctctaaactcagttcaaagctggattccagatgatggaag

SEQ ID NO: 24429 - DNA, 120 bp, Homo sapiens
attcggagaatctgttcaacattggtagtagagggatgacagctgtgagaggtgaagggggtgactgaaggtctctcctccctccactgactcaattcagaggtctggagacataaagac

SEQ ID NO: 24430 - DNA, 120 bp, Homo sapiens
tttcgagtgaagttaaggacccacgtcttctgagactttagcacaggctgagtcagggattttgaggctgaactgtctcagtggacgatctccaggtcctctgcatcttccagtataagg

SEQ ID NO: 24431 - DNA, 120 bp, Homo sapiens
cagcggaaataggaggccaggggagggaaccgaggacttacacagaggggaaacagagagagaataactagccaggaggacatctaaacaaacggatataaagtgagactgaaataaaga

SEQ ID NO: 24432 - DNA, 120 bp, Homo sapiens
gagcgtgcagcactttccttcaaacaagtgcagcaggcagtgtctgggactttgtctccccctgctgagccaagaggtatgaatggtccgccacggggaaagggttttcacaggccaaga

SEQ ID NO: 24433 - DNA, 120 bp, Homo sapiens
caacggtataaaaatctccttctctctcacaaccaccacgaccctgaagcattaaagaagctggtagacagtgacatggctgtgccaagaccagatgcgtgtggaaggggacagcaaagg

SEQ ID NO: 24434 - DNA, 120 bp, Homo sapiens
tcacggattgcagagcctggggctgggagggtgggggcaggaagttagggatcctccctcaggtcatgacacaggcttgcttctcaaaagatctgttggtcaggcgccgtggttcacgcc

SEQ ID NO: 24435 - DNA, 120 bp, Homo sapiens
gcccgaacagtatttcacatttaatttgatttattctagacataagctgaaacaaactttatgtcgccagaaatggcctaaggaaaagcacaagattgtgctttgactctaaaggcacag

SEQ ID NO: 24436 - DNA, 120 bp, Homo sapiens
ttgcgttcagcagcagcagcatctgcccgcagctacacattggtcctttctgaggagagcctatccaacaggcccttccctctcgaatggaaattctagtgacccgaataactagctgtg

SEQ ID NO: 24437 - DNA, 120 bp, Homo sapiens
ctccgcagctggtgggggaggtcacatggagggactgctcctgcaagctttagggtcccagatgcagcccagatgcggtagatactccatgaatatttgatgagctaatggaggaagtgg

SEQ ID NO: 24438 - DNA, 120 bp, Homo sapiens
gcacggacaccgtgtcccgctgagggcttgcaaggatccgtggcaatcagacacgtgctctggacaactggattctctttgttcaggacagctacagatacagatacagctggacgttaa

SEQ ID NO: 24439 - DNA, 120 bp, Homo sapiens
gcgaccatttaaaacatcatccagctgggttagaaatcaaggatgccacgcgctgacttccatcctcctcctccagctgccagagtctttctgcctgtctctcctgagtggccacggcag

SEQ ID NO: 24440 - DNA, 120 bp, Homo sapiens
gctcgccatactcaggaagggctttcctaccaccaggtgctcagggcaggcggctaggcaggaggagacttccgttagctctcagcttgcattctgttatcgggtaactcctccaccgtg

SEQ ID NO: 24441 - DNA, 120 bp, Homo sapiens
caacgatttccacctttcaatgagaaatgacatgaaaatcactcttgtaatggacaacagcaaccttggaagagcaagcaccgtctctctgttttccaatgcagcttctattgaaataaa

SEQ ID NO: 24442 - DNA, 120 bp, Homo sapiens
atgcgctcctttgaagacttgaaacattcagtttttagacgtggtaattccgagttgtctcagggatgccttgctgactgagatggaccacagcttggctggtaagttaattttaactgt

SEQ ID NO: 24443 - DNA, 120 bp, Homo sapiens
agccgagggttgctgcccagccagagagctgtggggatccgtatcagtcccatagaagatggaaattatggaatcaataacagcacagtgtgatctggcagccatataatgactgaggtt

SEQ ID NO: 24444 - DNA, 120 bp, Homo sapiens
tcacgtcctcaagaagttctgaaagtcttacactaaagctccaaggaaaggccaaatctatatgatgccaaaataatcagctgaaaagttgaaattttggtcattgcagttatttggttt

SEQ ID NO: 24445 - DNA, 120 bp, Homo sapiens
tgtcggccttaaggcattcttgccagagctattaagtgtatgccataaaacacatataaccaagttaatgttgttgtaggaaccttatctttggaatttcctgacatttgagggtttctc

SEQ ID NO: 24446 - DNA, 120 bp, Homo sapiens
atacgctttcttaaaccgaggatctgaatccgctggttttgctcttaaggaggtgaaataattggcctatgaaaataagctgaatacattctctaaggcacacacagcctggccatgaaa

SEQ ID NO: 24447 - DNA, 120 bp, Homo sapiens
gtgcgtctgccaaattcgtggtacagtcctttttgtttttaagagataggaccacaataaagagcatactttatttttttaagagtagaaagtgaatatcttgccctaatcacctccatt

SEQ ID NO: 24448 - DNA, 120 bp, Homo sapiens
aagcgcagatgatagttaagagagaaaagataatgggaataactgttccccaggttgactcgcctgcccagtgatgacacagatgaaggattccagtttcccagaatcaacctgtccctg

SEQ ID NO: 24449 - DNA, 120 bp, Homo sapiens
gggcgtggaagggctgctgtgggaagcactgggcaggggcagggaagtcatgggagtgctcggggacccgggctttggcactggctggagaaaggatttattattggagatggattcaga

SEQ ID NO: 24450 - DNA, 120 bp, Homo sapiens
tttcgtttggggtacgtggctggaaggcacagatatttgcataatctcagaatgactaatatttaaggaagcaccagccactgaatgaaaagcaacactggctccataaggaggagacgc

SEQ ID NO: 24451 - DNA, 120 bp, Homo sapiens
tcacgaagaataacacgggagcttttcttacaacgtgcatgtcaattacattttgattcacatgaaaccattctcggggagtacaagtcactttaagtgttacctttctttaaatgtgaa

SEQ ID NO: 24452 - DNA, 120 bp, Homo sapiens
acacgctgtgtcttgaagtatggtgctctgaaaagcataaacaggtttcattttttaaaagagaggacagtgcatcctcaaacctctctttctagttgctatctcctgtagggatccttt

SEQ ID NO: 24453 - DNA, 120 bp, Homo sapiens
aaacgaagtgcaataattccttgtaacctccccacaacaagtattttctacattaatatagaaattacggtcacaaaaccttcctttcttggaaaaaagagtctggctattgtgtgaaaa

SEQ ID NO: 24454 - DNA, 120 bp, Homo sapiens
acacggagagaggaggtctgggtccaagagagtaacagctgcttcctcatctctctcagcagcccgaccccaggtcctgtcgctggcagtcttactcaaaaaaacttttagttgtaacta

SEQ ID NO: 24455 - DNA, 120 bp, Homo sapiens
cctcgcaggtgactgtgagttccgagcgaggtaacagtgatgacgcttccggcgtgatgcctggcacatcatggtgataagatgttagtttctccttcttgctcctctctgagatcctca

SEQ ID NO: 24456 - DNA, 120 bp, Homo sapiens
ccccgcctctgtgcctctaatgaaccactctcccctgcctggtgcatcttttcctctcctctctgcccaaattgggtttttccttgtaggccagcacgagtcccactctcttttgctaac

SEQ ID NO: 24457 - DNA, 120 bp, Homo sapiens
cagcggcagagcccaggaaagccatctctgtcctggcatctgcaattctggtgactcatgaacaatcattttacttttctctgaagaagcaggaatgacgaatttccaagtctgtttatc

SEQ ID NO: 24458 - DNA, 120 bp, Homo sapiens
catcgcccctgcctgcctccatcactgtctcccatctccagatctgtctccacttcctgggtccccagagagaaagcatgagctcattgttttccagtgaaaaaccagatctggtctcct

SEQ ID NO: 24459 - DNA, 120 bp, Homo sapiens
tctcgcctcgtttgtctgtcagagcctggagatgaatgattcttcccctggctgaaactgtacctggaggagctgcgccgggtgtctgcaccgggcgtgtggggccgcaggcagggtggt

SEQ ID NO: 24460 - DNA, 120 bp, Homo sapiens
gctcgcggctctgaactttcccaaaggtcattagggatgtgatgggaataagggatagattatttactacacaccagatggtaatctaaagccatacctcaccttctcattctttcccaa

SEQ ID NO: 24461 - DNA, 120 bp, Homo sapiens
gagcgaagtggggaaaaagcagccaaaaacacgcaggcaggatgggccatgaggggcacagacggagacagctcattctttatttcctcttgtgaagaagcggctatgtaatgacattta

SEQ ID NO: 24462 - DNA, 120 bp, Homo sapiens
ttgcggtttctgccattagtagtaatggcaacctagtaggtactttagttaagaaaaagagtctcttgataaaggaatgaaaagaacctggttagcaaatgcaatgataaggcagaggaa

SEQ ID NO: 24463 - DNA, 120 bp, Homo sapiens
catcggcataatttggggaagatctccatccgttgtagtgggagaggtgcctggtggtcccccagtggggaggctgcttctctctctttattcctcgcttattttcttcctttctccttt

SEQ ID NO: 24464 - DNA, 120 bp, Homo sapiens
tcccgcctcggcttgccaaagtcttaggatggtgggtgtgagccactgtgcctggcccatttttatttcttagttggaatgctgaccaccagatgatgtggaagcataggtagaggtggc

SEQ ID NO: 24465 - DNA, 120 bp, Homo sapiens
tgccgggggagacaggatggcttaagggagctgtggaatgcaacggtgatttttctagtgggctgtcctggttgtaggggacatggtttttcagaggtggtttttctagtggggctgaga

SEQ ID NO: 24466 - DNA, 120 bp, Homo sapiens
ttgcggggggagacaggatggcttgaaggagctgtggaatgaaaagtgctgtgagcctggaggcaggtgaccggtgtctagattttcaatgaaagagagcactatcaggggattccgtga

SEQ ID NO: 24467 - DNA, 120 bp, Homo sapiens
tgccggcagagtgaacaagccatgccaagctgacctcattccctttttggatacggttcttagacatactgataggggtgaacagtgtgggcaaggtctctcatgacatccaggtggcca

SEQ ID NO: 24468 - DNA, 120 bp, Homo sapiens
gaacgtacggaggcagatcagggagggagctgagttcctggcagcggaatgatggcacccaaagtgctttctcctaactgcttgattttgggtcatgacaaggctttgtgtgtgtgtttg

SEQ ID NO: 24469 - DNA, 120 bp, Homo sapiens
caccgccctgtggaaagattttagcaatggcttggcgaggatggggatggcctgctgatgcagcatgtgggactaattgctaatttgtagaatgacagaatcacgatccaaaattttttt

SEQ ID NO: 24470 - DNA, 120 bp, Homo sapiens
tcccgtgcacatgaaggggcagagttggcttaatagctttgttggaggaaaccacgtcggcgccatcccctcgggtgacagcaccggcacacagcagcccacaaagctaagaggaggcca

SEQ ID NO: 24471 - DNA, 120 bp, Homo sapiens
agccggtggccctactgggtttgcacaggtctgactgggcacaggagtgactgtgctcagtgctccgtgtgaccctgggaaagattctcaaccgcagactgaacctggaggatggccagt

SEQ ID NO: 24472 - DNA, 120 bp, Homo sapiens
agccgggaagtgttcagctggaagaaaaggagacttgtgggtggggaggggcatgatcattgtctttaaatatttatgggctgttgtatgggaaggggattttattgaaggctcaccatg

SEQ ID NO: 24473 - DNA, 120 bp, Homo sapiens
agacgtcagatgcgggctagtgagcactctgagctctccttcacttctgtgctctgtgttactgaggagctatcttctctccagcttgttaagggagctatggaagcaaacattttgtct

SEQ ID NO: 24474 - DNA, 120 bp, Homo sapiens
cctcgtgcagaacctggtccgagaatttccatgcccatcacatttcctcattctgggttaatcaaaccctaattccccttgcatcttcttgtaccccatgccctcaaaattgttctgtgc

SEQ ID NO: 24475 - DNA, 120 bp, Homo sapiens
tctcgtctatgtggcagagccaagccttgatgagagagcagaggacaggccaagaagagaaacagttgggtcagttctgtgccgtctatgcagacgtgggaggtgaataatctgaaacag

SEQ ID NO: 24476 - DNA, 120 bp, Homo sapiens
gaacgcacgacatgattgctggcagcgggggtagcagatttatcttcctaattaggcaaatattcaaatgagttggcactctctgaacaagccaccaaatcctaaggccatgtaaaaaga

SEQ ID NO: 24477 - DNA, 120 bp, Homo sapiens
tggcgaatgggcttccgtcgacacatcttcatttgtgactgattttccgtgaagctgggaatgacctttaccaaatttcagaatcattaaatgaagccttctgatttattgtggtaagga

SEQ ID NO: 24478 - DNA, 120 bp, Homo sapiens
gttcgtgaggaagagggcagtgcgctctcttctattaagaggtggttctacttcttcctatttgcctcaaattgggaaacctcacttgtataggtttttttttttattgtctcccaaagc

SEQ ID NO: 24479 - DNA, 120 bp, Homo sapiens
aggcgtgcactcctggctgggaaggagaggctgccctgggcctcaggtggggttctgctagggcagccccaagctggaaccctgagtctgacctcagttaccaaaatgactggagtgtct

SEQ ID NO: 24480 - DNA, 120 bp, Homo sapiens
tctcgagaagccagccgtgagcaaatagcactggcttctcttcctagatggccctttctgtagccatcggtggattcccattgcatacctccatgattcccaagttattcacttctggga

SEQ ID NO: 24481 - DNA, 120 bp, Homo sapiens
actcgttgactttgtgtaatacacaatactctttcagttgcaagtgacagaaacccagcttggtgaatccagttgcaagctcacttcccatggcatgagaggggcaagggtagggtaagt

SEQ ID NO: 24482 - DNA, 120 bp, Homo sapiens
tgccgttctgaacaaataagaaatgtctagtattgcatgtttgggaaagttccctgtctggactccattcatatggtggactccctgctggcttagaccagtaattaaagcatgattttt

SEQ ID NO: 24483 - DNA, 120 bp, Homo sapiens
ccacgtccaccttcaagctgtgtcccttcccaagtgattacactttattccgaaataaagtggttactcactcaagagattcctgccacctacccatcgctggctggctcttccttgatg

SEQ ID NO: 24484 - DNA, 120 bp, Homo sapiens
tctcgatagtgctgctgttgctggattcggagaatgctttgccatctatattgggaaagtgttatttatcccctgcagctggaggagtgttctgtactcgattacctcaaccaaaatgac

SEQ ID NO: 24485 - DNA, 120 bp, Homo sapiens
ttccggttgtctctcctattttaggagaccctgtgggaaatctttttatgatctcgaggcctgacatcaccgtgtatcagactcttatttcttataagaagcagctgaaattaacagacg

SEQ ID NO: 24486 - DNA, 120 bp, Homo sapiens
tatcgtctgttattcttaagtaggttagaccatgatgtgtgcccccgttcctggaaggaaagctgggcagtagcgcgaggagtgagaacacataatgtctacaggtttccttttaaaact

SEQ ID NO: 24487 - DNA, 120 bp, Homo sapiens
tgccgattgtagggtttattgaagaattgtactttcagttttgtgggaaatgtagagacaacaaacgccttttggtccagcttcctcttttggagtgcagaaattttcatcttcttacaa

SEQ ID NO: 24488 - DNA, 120 bp, Homo sapiens
ttacgaacctgtaaccagcaccatgcctggcatgtagagagtgagtaggaagtctttataaacctataataatagaaggcatctcattgtcccatcaaaaacgtaggaaacccaaaagaa

SEQ ID NO: 24489 - DNA, 120 bp, Homo sapiens
gaacgcagcccttctgagacagccaggccttttattttgagacttaggatctcagacccaaagcaagaagcagcaggacaccagctttctctctgacagcctctggtgcaagcaggtctg

SEQ ID NO: 24490 - DNA, 120 bp, Homo sapiens
agccgttacagctttcaaaaaatgttaactatactaaaactcccaattaaagactttatacatggggaaaacaagctgagtcaggggattgtcctttagagacccagtcctctaagatcc

SEQ ID NO: 24491 - DNA, 120 bp, Homo sapiens
ttccgcctttcagctgtgctacatcctggtggaatgcaccctcgccatgtgcacagccctcacctgtgaagagacatcaggcaaacatgggcccttttcaatctgatatgatttgtcaga

SEQ ID NO: 24492 - DNA, 120 bp, Homo sapiens
atacgatgagaagtgttcttcccttttgtggggtctcccatggccagagctgcccacctgggagcctacttgaaatatgacagatgtctgcacctgcacgcttgctctgctattctgtgg

SEQ ID NO: 24493 - DNA, 120 bp, Homo sapiens
cggggttacaggctttgtgagtcataccatggaggtcaagtgctcttcttgcattatatgatatcgacatgacttattgctggtgaagttagccttgatcacctggttaaggtagtgtct

SEQ ID NO: 24494 - DNA, 120 bp, Homo sapiens
tgccggagatggtactgagggagaggctcctaagcgaaggtggtacctggggcataaagcccagagtccttgtttagcctctacagctacatactgacctttgccaacctgcagatctgt

SEQ ID NO: 24495 - DNA, 120 bp, Homo sapiens
tagcgagagtgaaagaaaactgccagccaacttctcttccctgttggacatcccttcccactctgggaaatgggatatgctgccactagccacgaaacatttcagaattgcccttggggg

SEQ ID NO: 24496 - DNA, 120 bp, Homo sapiens
tcacggtgcacaacaggggcaccaaggggcctcagaaacatcctctgcttgggggaagcacagagcaaaaggagccactccggatttggagagccatgcaggggcatcctagtctctctc

SEQ ID NO: 24497 - DNA, 120 bp, Homo sapiens
cagcgtcagcaaaggctgcggacaagcagggcatgaagcagggcatggagaagggtgagccagctgcccagttggctatggcactgagtgtgtgaaggagggaagagagaaaggagattg

SEQ ID NO: 24498 - DNA, 120 bp, Homo sapiens
gcacggaggagagagaatgaggttggctttagcagaagtcatctggcaataggatatgaaatgaattggagcagagaaactctggaaagacagactctggggagtggatctgcaagaggg

SEQ ID NO: 24499 - DNA, 120 bp, Homo sapiens
taccgcctgtccatagagatgggaaaattgagacctgttgaaagtcacagggcagaaagcgacagagacagtgttaaactgaaaactgaagctcaggctcacttgactatgccgagctgc

SEQ ID NO: 24500 - DNA, 120 bp, Homo sapiens
ggccgagaggaggagctgcaaaatctagttactgtagaggcaaaatcaggtgaacttggcaacctatcagaaatccagggacaaaaaggaatgaaactcaaaatgtccctgagatttggg

SEQ ID NO: 24501 - DNA, 120 bp, Homo sapiens
ttgcgaggatggtgatgccattgtcatcaataggggatgtgccctttgatagtgaagatgagaaactgggttttagaagttctgaattagaggcacaggcagaccactcaggttagcatg

SEQ ID NO: 24502 - DNA, 120 bp, Homo sapiens
gtccgtcctattcatagacatcggaggtgctgtcccaagtccagagacattcccaccacctctacatccaaatcctacaagcacggaaggccctgactctttttcttttccagtgacaga

SEQ ID NO: 24503 - DNA, 120 bp, Homo sapiens
ccacgatccatttagttttattccaacttggaggtaaatcaaacacaccgtttcctttgggagaactgaaaaacaaaggctttgcccaaatgtttctcattttgttctggattttcacat

SEQ ID NO: 24504 - DNA, 120 bp, Homo sapiens
cttcgatagcctgccacagaacaaagacaacatcaagggcagagggagagattggcacacatggggctaacggggtggggatgcttgtctcttgtagaaccagacacagagtacataacg

SEQ ID NO: 24505 - DNA, 120 bp, Homo sapiens
caccggcaaaattcaacagtgactgactacacgtgaagcatgaaaaatgtttccagtcatgtgagacgcttcaagcatagaaagcaaaccatgcaaaatggaaagcgttggaaaacataa

SEQ ID NO: 24506 - DNA, 120 bp, Homo sapiens
tgtcgacggttcctggcacatagtaagtgctgagtaaatgtcagctccttcctcccttgctacctcatcatccaggagagacactgtgggctgctagtcattcatgctcctaccaaatgg

SEQ ID NO: 24507 - DNA, 120 bp, Homo sapiens
cagcggccttctcaagacagaagggctggtgtcttacccatctttgtctcttcagggcctagaataatacctgactgagagatagacctcagtgaatgaacaaatgaatgagtcagtgaa

SEQ ID NO: 24508 - DNA, 120 bp, Homo sapiens
ccacggtgatgctacatgattggcacttcttacagaacgggtgattctagaggagctgggagtgacttgggaagaggaaaggtgcctctcacctgtaaactcatccacttttctccctac

SEQ ID NO: 24509 - DNA, 120 bp, Homo sapiens
tagcgccttccactgaatgtgcctgtgtgggtgtacctgtacattgcgtgtctgtttctaagcctttttgagcacttacatagcagttactttgtgccagcctctaagtaatatgcaagt

SEQ ID NO: 24510 - DNA, 120 bp, Homo sapiens
atgcggaaccaacttacaccctagaagaaagtcataggcaaaacctcccattatggaattcgctgttttagttcttcttaactaaatcattgatgctttcccagcagagtctcagtcctg

SEQ ID NO: 24511 - DNA, 120 bp, Homo sapiens
cctcggaggataggcagcaccagctccctggggtggatgcaactcagtatcaataaattaagaagtaatgccttcaccttggcctctccaggtacctgaaaagcataaggacagcttcca

SEQ ID NO: 24512 - DNA, 120 bp, Homo sapiens
attcgggggatgtagcagtacatgaaaaaatgagaattgctttaatttaggtgacttctatttctatttacacttatatagctctagcattgcgccaggtactattataagcagtttaca

SEQ ID NO: 24513 - DNA, 120 bp, Homo sapiens
agacggggactaattggcttgagttcccagcaccctggctgcggaagagccaggatttgaatgggaacagcctgatttctcctgttcctgccagttgcatctctatatggcttcccagaa

SEQ ID NO: 24514 - DNA, 120 bp, Homo sapiens
tcccgtggctagcaggttcattgcagattctctctctctctctttccacctcttacttcccagaccgactgatcctttaggacaaaaacacttgagttctgccctcaccactttgctgtg

SEQ ID NO: 24515 - DNA, 120 bp, Homo sapiens
tcccgtgaccttgatttttaagggcttgattaattcgtgaatgaatgtccggctctcagggcagctaacaccctcctgctttgtaacccaggccgcgtgctcctatcatgcagaagggag

SEQ ID NO: 24516 - DNA, 120 bp, Homo sapiens
ggccgtcagaggaccatggctctgctggcctccagctgcagtgcagcactacaggcactagctgctggggccatgaatccagcggtattgatgtgcttctttctctagccccagtaatta

SEQ ID NO: 24517 - DNA, 120 bp, Homo sapiens
catcgcaacaaggtctaacgcatacttaccctcaccatttctgttttttttttttccatgaaaaaaaaatcccagtcatcatcattatttgtgcaaggtctttaaagagcaaatagaaag

SEQ ID NO: 24518 - DNA, 120 bp, Homo sapiens
cctcgcctttcctcctccaccttccctcattatcaacctccctctgcccactcctttccaccaccctgaactcaattcaacaaagcataaacgcacctttctcatttcaaaaattagaat

SEQ ID NO: 24519 - DNA, 120 bp, Homo sapiens
attcgtgaggagatttttctctatcttggcctttgcctgcagagtcaaactcaccattctgggctctttccagggggattattcttaggccagtcccacatcatatttttccaaggcctc

SEQ ID NO: 24520 - DNA, 120 bp, Homo sapiens
gccgttataacccagaaatctttaattgcattattttctcatgtaactcaagaatgcagctcactcttcttgtagtacactggttttgagattatttgtcaataaattatgtaatttctt

SEQ ID NO: 24521 - DNA, 120 bp, Homo sapiens
gcacggctctggcaaaataaggttttcagggtgatgtgaaaatctttccaggtcagtggaaatacacaggcctggcctctgattttcattcttgtttctagatcaacagcttagcacaac

SEQ ID NO: 24522 - DNA, 120 bp, Homo sapiens
ccccgacctggaacacagacttttggaagaggaattattgtcttcattttgctgctgttctgccttttcctctgttttcttctaagtaaaacactttgttctcattctccaacaactctc

SEQ ID NO: 24523 - DNA, 120 bp, Homo sapiens
ttgcgtcaccaggtaaaagtagtcatgtcaagttgtcctaggtcacctggccagtgagtggcagatgagagctggagcccagcctgggacccagcctgctttcttgcatccccagccctg

SEQ ID NO: 24524 - DNA, 120 bp, Homo sapiens
ccccgtgttgaagatctcccatgttcaaccccgtgttgaagaagcaggggccccacagcccctgcttcttcccacactagcacaactctggttctgggcttctaagtgggtgccagtatg

SEQ ID NO: 24525 - DNA, 120 bp, Homo sapiens
gaccgcggccagaaccaagggcacgggtggtaatgagaaaaggaaatcattaaagtttcttttcctaccacctgtgatcagtgtgaccttttataccttcccagtcagtcagggggaatg

SEQ ID NO: 24526 - DNA, 120 bp, Homo sapiens
agccgatgatgccacatgtctggcatctatacccgctccaccaagctcaccagagagcagttcagctgtgtgatgaacccccagacactcagcataacactcttctgctgctagacaaag

SEQ ID NO: 24527 - DNA, 120 bp, Homo sapiens
gcccgaggtgactgctggagagaggccacagcctgcggagagggagcccacacagagcccatgccctacctcagttgaggggtctttgagaatttgagaaatcaaggcagctagaattgc

SEQ ID NO: 24528 - DNA, 120 bp, Homo sapiens
agccgcacccagaaccaagctagaggtttacggaggtgtcctctggaatcttcagctgagtactgacaggtgcatgcatgtgagaaaccaccacccgagatagaggttgagttacctacc

SEQ ID NO: 24529 - DNA, 120 bp, Homo sapiens
aggcgggacagtctcaggagagtcagtcctctcacaaagccaggaatagttcgtgttcaaaccaattagagtagaaaatcctcttcagacatggggcattgggtagtgtcctcagaaagg

SEQ ID NO: 24530 - DNA, 120 bp, Homo sapiens
gcccgactatcctgctgcctgtatttgtacagccttgaagctaacaatattttttacatttttaaatcattgaaaaaaatcaaaagaagagtatttttccccgttacgtgtggaaattgt

SEQ ID NO: 24531 - DNA, 120 bp, Homo sapiens
tcccgaccctgttctagctgaagtgtggctctcccctgagttttgcctttcccacagtctttaagcagtggctgtgctttctttcttttcctccccttgtatgctgggcctggtgacttg

SEQ ID NO: 24532 - DNA, 120 bp, Homo sapiens
ggccgttcttacacatttatctataatgttaattcctagcccactgtctccctctccaatctactcctgtcttaattctcaacacggcagccagagtgatcctattgaaatgaagccaga

SEQ ID NO: 24533 - DNA, 120 bp, Homo sapiens
cctcgccatggtctatgaggctctgctgatgtagctcctctcttccctgtcttcctcacttgttgcccctgtcattcgctctgctccagctacacgggcttccttgctgttccctgctgt

SEQ ID NO: 24534 - DNA, 120 bp, Homo sapiens
ctccgccccagtagttccccttgtgtggattgctcatccccggattaggggttctcaaagtccagttctcagatcagcacatcagtatcacatggaagttgctcgagatgaaaattcatg

SEQ ID NO: 24535 - DNA, 120 bp, Homo sapiens
aggcgtgagccaccgcgcctggccaaaaattatttattttttagttgacaaacaaaaaccagagtctgaatgttacctgctctacagtggcacctgctaaagtttgagaaccactgccct

SEQ ID NO: 24536 - DNA, 120 bp, Homo sapiens
tatcgctgacattttcctttgttcagtggccctgaggttcttacactctagggggcagtgcaccacaggaagatagatcaatgagggaggattgcgagggggaaggggaggaagcagagc

SEQ ID NO: 24537 - DNA, 120 bp, Homo sapiens
agacggttccaaacatcagcataaagatcactcatcccataccacccacaggtagggaggaaggatgctgtagtatatgaaaacaaaagttttcacctgagctgagagcatttagcatat

SEQ ID NO: 24538 - DNA, 120 bp, Homo sapiens
tatcgtggttctgtaacaatatcaaggaccagtgcagaatctggctttcttttctgataggctaccagtgtgtgtttatgtgtgctcattttgtggttctaatcataatggtacatataa

SEQ ID NO: 24539 - DNA, 120 bp, Homo sapiens
agacgtttaatagtgcaactaaaagagagtcagctgagtgaggcttgtcagccaaagctggaatgctgagctatctggaggagatcctaataacccaatttggggatggggcccaggaat

SEQ ID NO: 24540 - DNA, 120 bp, Homo sapiens
taacgatttcttaatgattgtctctcagcctacgccacggggttgggaaacctgcaaatgacaattcctaaactcatacgccaattggcttcctgttagagttcttcaatggagagcatg

SEQ ID NO: 24541 - DNA, 120 bp, Homo sapiens
acacgtggagccacacctcctgagaggtcccagcacagatgcgcagtgcctccctcagcgatctgagcactggctgtgcagggacccctcctgcaggctcccatggttttgctcattctg

SEQ ID NO: 24542 - DNA, 120 bp, Homo sapiens
attcgatcctgccaacacccacctgatcttagaggtggatacctccccagtcaaaccttcagatgagcccctaaccctggctgaaaccatctcatgagagattgtgacatagagaatctg

SEQ ID NO: 24543 - DNA, 120 bp, Homo sapiens
acgcaaatgctgtctccgagggctcgtgccatatgcaccagctggtggatcctgctgcctccctgcacatgtacggaagccacgtaccgaacctggttctccaagaagtgcatgtagcgg

SEQ ID NO: 24544 - DNA, 120 bp, Homo sapiens
atccgcgcgccacgttccagctcgctctccacgggcatgttggcaaagcaggccaggccgaagaagggcccctttcggaaatagctagaagagaccaaatacgtagtgtggctcaagatc

SEQ ID NO: 24545 - DNA, 120 bp, Homo sapiens
gttcggggctgtcaatgacaaagctcagcctcaagaaaacaagcgggccaagccacatgacctcactgatgagcttgaagagattacataacttgccaagggtcacttggctggagctgg

SEQ ID NO: 24546 - DNA, 120 bp, Homo sapiens
gtccgtggcaagcctgccgctcagctgcccacaatcatggacacatctcttctctcctgcaccacgactaatgacttggatgggtgaagcagaaccaacattcctcttcaggctcctctg

SEQ ID NO: 24547 - DNA, 120 bp, Homo sapiens
tttcgtagcataaaccacagtgattcttcccttacttcctgaggctctgatatttttcactgagctgccattttatttcctcctcttctcacacttgtatcaatcatgaattaagcccca

SEQ ID NO: 24548 - DNA, 120 bp, Homo sapiens
tctcgcaaaactctctgaatgccccactacacaggactaaaaaatggccttacttaaagctgaaatttcaaggttgaacacatagatatcctcagttaactcacacggggctgaaactgt

SEQ ID NO: 24549 - DNA, 120 bp, Homo sapiens
acacgaagacctcctaataagagcccttcagctttggggaaagtgtggaggtggggggaatggtacgaagatgactccagttcagaagtacttacatgaaatcagattggattttatggg

SEQ ID NO: 24550 - DNA, 120 bp, Homo sapiens
aaccgactgctgactcagcctcagacagaccagcgagatgctcagagctcagcccctccatcactggcaggggtgacgccggaggacgtggaggtggacactaaaagaacctcccatttc

SEQ ID NO: 24551 - DNA, 120 bp, Homo sapiens
ctgcgtttgcttctgtcattctgctcaaccacttccaaatctgctttttgtagcctcacttctctgcatgtttttttaaccttccaccctcatttccttatcttgtgttctccccttaat

SEQ ID NO: 24552 - DNA, 120 bp, Homo sapiens
ccccgctttctggaatcaatcacatagcaacctttagggcttacccaggacagaaattggagtgaggacaggaaggccacaagttcccatgacacacctagctattcacgtctccgcttc

SEQ ID NO: 24553 - DNA, 120 bp, Homo sapiens
ccccggtagacctaggattactcaggcataaataatagccccccaaatgaaaagtgggaaattgtagagccctaatgtggagagcctgaagagcttcataaaaaaatcttagacttgttc

SEQ ID NO: 24554 - DNA, 120 bp, Homo sapiens
taccgaaattacctcataagtaccctttatatttaaatgcactaataatgggattgacatgtaagaatttccatgactaggaacaagcccgttttaccacaagccccagaacctggctat

SEQ ID NO: 24555 - DNA, 120 bp, Homo sapiens
acccgaatcacagagacacacagggtgaaatatttatgttgttgactcctcccgcaaacttgtcctctgatcattttgtgttgcagccgtgaaacaggcttgctggacgggaagaaatgc

SEQ ID NO: 24556 - DNA, 120 bp, Homo sapiens
tcccgtaaggaaatcttgacaaatagactcaaatttgcatgcaaatgaagccatctggttgattgttgtccacagtccccagctcacaggaaacaatagaaggccctttgcataactcag

SEQ ID NO: 24557 - DNA, 120 bp, Homo sapiens
cagcgacactcctcaccaaactgcagcccagagtgccttcacgcagtcttctccatgcgagccaaacgcagactcttctagccaccatctcttcccccttcctaattccccatctcccct

SEQ ID NO: 24558 - DNA, 120 bp, Homo sapiens
tcccgtaaacatttgttcaaatgcaatcatgtccattgcttgggtaactctaccttcttagtcgtcaggtccctcctcctttcatcagatttttacttaatggctactctacaaagcgta

SEQ ID NO: 24559 - DNA, 120 bp, Homo sapiens
tgacgaggacaaaagggcagacatgggtgaggttgagaggagtaaaccagctgaggaagtgaccgctgcaggcttagctgtcaatcctggggtttgctgctccccgtggttggaactgga

SEQ ID NO: 24560 - DNA, 120 bp, Homo sapiens
caccgaaaacaaatactgcaagctctcatgcatgagtggaatctaaaacaacagactcagagaagcagagaggaagatggtgggtacagaggctggaaggtgcagggaatggggagatgg

SEQ ID NO: 24561 - DNA, 120 bp, Homo sapiens
tgtcgtcttactgttcacacattgaaggaaaagaggctcctcttccatctttccccattccttggccaagcccttgcacaggctgactgtaagtgaaattaaagaatatcagtgtagtag

SEQ ID NO: 24562 - DNA, 120 bp, Homo sapiens
taccgtgttttttaaaaagcatacatttggagtttagtatcagagctcaaggctttagtaactgctttaaatcacacccatatattttagtctttagctgtgacagtaagtgtactcaga

SEQ ID NO: 24563 - DNA, 120 bp, Homo sapiens
taacgcagtttggtgtttttattgcatcctgcgagctgcttttctcctggaaacactggctgctctgtcaggcaatgagtggggagaggcagctggtacaatcacatcttctccaagagc

SEQ ID NO: 24564 - DNA, 120 bp, Homo sapiens
tggcgcaggagaggtgaggaaactgccctagcctagtctggtcacttctgcctcgttcccggctcctcacctcctccaggctccgtcagttgtattcctgaagcacctgcaccaggtgtc

SEQ ID NO: 24565 - DNA, 120 bp, Homo sapiens
ggccgttgacacaggagtgagcactggctcttccaaggcagaggtggatgaaaagcaagagcaaactaccaaaaactttgttcttactttgtcatcctgaggtttatctcagatgctgct

SEQ ID NO: 24566 - DNA, 120 bp, Homo sapiens
ttacggttgtgacatctttggaaacacagtgtgctatgagagaaatttgaggaaccacaagttgcattcagaatggtggaaagtcggatgtgaagatgcaagtgataaaaatgctgcagc

SEQ ID NO: 24567 - DNA, 120 bp, Homo sapiens
aggcggctttaccagcagggccacatgtcctgctttgcctgggacagacccaagctactcctgccaggacaagagtacattattagcagtgcccacttttactctaaaaataggactacg

SEQ ID NO: 24568 - DNA, 120 bp, Homo sapiens
attcgatttgaatataagaagtttacctgggagacaatcccataaaacaagcaggaaagtagagacatgaaacagggaaagggatggagcattatcaagccactcaccactgtgggcacc

SEQ ID NO: 24569 - DNA, 120 bp, Homo sapiens
gtgcgagacatgcctccgagtgtcccaaccaaggcaggaggaagccagggcatctcgccacctcctcccatcctgcagtgatgagggctgcttcctgcggtactaactccccagcacttc

SEQ ID NO: 24570 - DNA, 120 bp, Homo sapiens
tcccgtgtttacacccaacacactgctgaggccagaggaaagtgcagatgacagcgaatcgcagtcagtggttcctggagcaggactgaggtgaatgccgggcactgacagcatctgcca

SEQ ID NO: 24571 - DNA, 120 bp, Homo sapiens
ttacggatctatttataagccatgttaaggttttaatgttatcttaggggttaaaggaagtcaaggaaggatgttttttaatccatagaataacgtgatcagattgacactttagccaga

SEQ ID NO: 24572 - DNA, 120 bp, Homo sapiens
tgtcgtattccttctgggtagcaaaggcaaataagctaaacatccaggctggtttaaagctgattctgacttaatcatttcaaaattccttcctggttgtgctctgtccctcatgaataa

SEQ ID NO: 24573 - DNA, 120 bp, Homo sapiens
tctcgaagagcctttcccgtcctctgcttctttctataaggtggggaccaggtgtacagaatataaaaggagacaggcagcaacatgtctagctttagcattctaatgataccgtgggca

SEQ ID NO: 24574 - DNA, 120 bp, Homo sapiens
ccccgaacctgcccttgtgaaggccactttcttagtggtggtggctcatctagcaggctgaggaatgtacaaaggatgtgtaagaaaatctacctagcagtagggtatataatgagttaa

SEQ ID NO: 24575 - DNA, 120 bp, Homo sapiens
agacgaaggatttccttgagctcataaatggaagtggttcatcttccaggtagagaatgcaaggtagattggttttgttcacaggggtcatgcagagctaagcacatagaaggtgctcag

SEQ ID NO: 24576 - DNA, 120 bp, Homo sapiens
tagcgaactctttgaagttgtggattgcctgggaatctacaaatctgcaacctccctccctctagatacattcagagggtagaagagaagtcatttaaaaccttatgcttgacttcttgc

SEQ ID NO: 24577 - DNA, 120 bp, Homo sapiens
catcgaaaaaaggaacacatcaaagaagggaggtgctttgtttttatactttgttatcgtcctggaaaaaaatgtctgctgcctctgataatacatattaacacttcttttttacttagc

SEQ ID NO: 24578 - DNA, 120 bp, Homo sapiens
taccgtctcctaggctactccttgagtttctgtttttagtcagtcactgttaggtgactcctgactatggaagatgaggattaggctctttcacagccaacaactctcctccatggcctc

SEQ ID NO: 24579 - DNA, 120 bp, Homo sapiens
atccgtatgcagtgtttacatcatcatgcttttcataactgaaccatataatagagctgtgtttccagccaggcatggtggttcattcctataatcccagtgctttgggaggcacaggtg

SEQ ID NO: 24580 - DNA, 120 bp, Homo sapiens
ctccggatggcatgagatccccctcctacccggcttccatgactttctctttgttgatctagtcccttttttaaaaatggagccatccttctgtagcttcctgagaaagaatgaacggga

SEQ ID NO: 24581 - DNA, 120 bp, Homo sapiens
gtgcgctctgtcaaggctcagccatgatgaagaaataatcaaagagcaaaacgtcacttaagtggctaaacatgactggcagcagggttggattccccttcagcatcgaacacctcacag

SEQ ID NO: 24582 - DNA, 120 bp, Homo sapiens
agacgggctgctttctagtggctccacaggcctggccgtgtcaggggctgcctttattcaaagacttctgttctgtcttaaccaggatcacttaactctctgaaactccagtgataaaaa

SEQ ID NO: 24583 - DNA, 120 bp, Homo sapiens
aaccggcacaaacatacagctttggaactatctccaaggtcattgttttttcccctgccgcgaatttctttcattcctaattttcctctacctttctttcccttcatcccctacgataga

SEQ ID NO: 24584 - DNA, 120 bp, Homo sapiens
tcccgttcttctccctgggctgtccaccctccgacccccaccccacctggcatggcactcaaaggtgcattttcctggggtctgtgcatggaaatcattgcagctgtcagcctgtgtcac

SEQ ID NO: 24585 - DNA, 120 bp, Homo sapiens
tcacgtggggctggctaagtgcggggcaacgcggttgtacatgttgccatggtgacttctctgttgatggcagaaccactgactccagcaagtcacagtattcatttttgcgtcatgctc

SEQ ID NO: 24586 - DNA, 120 bp, Homo sapiens
gctcgtgctacaggaatgctatgagtagcccatgaaaagggaggcgagttgagctcagtgttatcccttgacttgtgtgtctttccttacccccagcgatcccccattcagatgcttcct

SEQ ID NO: 24587 - DNA, 120 bp, Homo sapiens
acacgtcattctgccatgatgcctcataccacctgaaagagtatacagtcacacatggaacatacacagtcactaacctaactggagaatggtacaaaatacaatcgttacaggtcgtgc

SEQ ID NO: 24588 - DNA, 120 bp, Homo sapiens
tttcgagcatatggacagcctgtcttcctgggataggtacctggaagtccctgaggccttatctcccttcctctttccttctccatcactcttctctccacagtaccaagttcatcttgc

SEQ ID NO: 24589 - DNA, 120 bp, Homo sapiens
agccgctagggctcaggctggtaagcgcgcttttcaccctgtgagaaaggcctcttcacgcaaggtcctggcatgctgcctcttgtgttcaaggtcagcagggctcatccactttggtcc

SEQ ID NO: 24590 - DNA, 120 bp, Homo sapiens
gcccgagttaaacgggacaggataactccggagctcaggcttttaaccagatgttccctgagtgtttgactagtttatgtgaagatggaagaagactagaagagattaaaatgaaaatgc

SEQ ID NO: 24591 - DNA, 120 bp, Homo sapiens
acacgaacagttctggaactttggggctattgttaaattgggtgtgatgttatgactcattggccttgcaaaaatttataaaaccattcaagactgttcaaatataacaagctgcaattt

SEQ ID NO: 24592 - DNA, 120 bp, Homo sapiens
cttcggaaaatagattgtatgaaatgggtgcagccatttaaaatatgtataaagtgtgtatgtactagtgaaggtttttttgttttttgttttttgttttttttgagacagagtctcact

SEQ ID NO: 24593 - DNA, 120 bp, Homo sapiens
gctcgctgtgacatctaatacttgcagttgtaaggttgtgtttcagggaaggaggtgctttggaccggggaagaaggagctggcagtgcctctcactgttctagtatcactctgcaaaat

SEQ ID NO: 24594 - DNA, 120 bp, Homo sapiens
aatcgttgtttcatttctttagcaagcatttagggcattcctgtagtagacgtgatgtcaagaactctgaattagaatgccttgcctttgtccttgtcacatctccgtgacctcatctgc

SEQ ID NO: 24595 - DNA, 120 bp, Homo sapiens
ggacgtagcctcagaatcctcctcaaagcagtaagcagcctgcctgtctcggtagcaagctgtctcctcctctgtcttctgggatgagtcagtggagcatgggaattcctcctcccttgg

SEQ ID NO: 24596 - DNA, 120 bp, Homo sapiens
tggcgctggggcccagcaagctgaacaagccctccagatgactgacgcttgctaaacattaagaaccagtgctctagaccaccaccaagacccgtgacctctgatgtcatttccttacac

SEQ ID NO: 24597 - DNA, 120 bp, Homo sapiens
ccacgccccaacccaccctgcccaccccactactcccccctcctacccccccacccccaccccaagagcaaataaacattccagagggctaaggttcctgagaaagtcagtccctggtac

SEQ ID NO: 24598 - DNA, 120 bp, Homo sapiens
ctgcgggaaggagttcttcctctacgagctcaggtaccagctcaccttcctgggttctggagccctcgtagtctacagcctgccccttcttaaggatcttgatggtggggtagccactca

SEQ ID NO: 24599 - DNA, 120 bp, Homo sapiens
agacgctgaggttgcatcgatcttggcaacaggaatgggaggatctttatcctttaatatgttggcaattttttcatattccggagcaaactgcttgcaatgtccacacctaacaattag

SEQ ID NO: 24600 - DNA, 120 bp, Homo sapiens
tcccgggtggtccctgggggcccaccacgtcattggctggtgacatcaggcctccctcatgccagctgttctaagtttgctacttaaaatttcattcagagggaggtcatggctaaataa

SEQ ID NO: 24601 - DNA, 120 bp, Homo sapiens
agtcgcggccccctgccttgctctgcaaaccctgccctgagcccagacagcctccgcattggccacctcctccctacttccttgtaccaccctctgcggtcttcccgggcctcgctcctg

SEQ ID NO: 24602 - DNA, 120 bp, Homo sapiens
gctcgggctcccctacccacatcccacactctgcatttcagggcaccgcatttcgtgatctcgccctagcttgtctgtgttcaacgttattgctcactgatgtgccgcctcctcctcacc

SEQ ID NO: 24603 - DNA, 120 bp, Homo sapiens
gggcgggaaatctcattttacttataaaggcacccctgagtaatttccaggataacaaatatagaaattgatggggtcaacatgtatcaaaaatcacacctttgcttggaagctaagttt

SEQ ID NO: 24604 - DNA, 120 bp, Homo sapiens
aggcgtgagccaccgcgcccggccataattggtaccatttcaccaaaataaaatttaaagtgacagtttgctccaatacagctatgagaaattatcttcttcaaaacattttgcaccaga

SEQ ID NO: 24605 - DNA, 120 bp, Homo sapiens
tgccggccagcatgtccaagagaggttctcacccaacagcctggttgccctgcctggccacatcccttggaggaaaagccggagttccctcatctgtggttactgtggcaagagcttcag

SEQ ID NO: 24606 - DNA, 120 bp, Homo sapiens
gtgcggcaccagcgcatccacacgggtgagcggccctacagctgcactgagtgtgagaagagctttgtccagaagcagcacctcctgcagcaccagaagatccaccagcgggagcggggt

SEQ ID NO: 24607 - DNA, 120 bp, Homo sapiens
gcccggaaggcccaatggcctgctttaagggtgcagcccctcgcccgtctgggggatggaggggggtggcattggttcccccgaagagacactgcagtcagggactgagttcttcctgag

SEQ ID NO: 24608 - DNA, 120 bp, Homo sapiens
tggcgttctgaccccacagggactggtggctggttccagggctcgtcccggcatttcatgtcttcccacggggttgagtcgggccataggggtgagcagctgcctggaagagttctggga

SEQ ID NO: 24609 - DNA, 120 bp, Homo sapiens
taccgtggcttattcattctttccctaacagaagaacattcacgttttgttcccagagttttgctatggtgaacaaatgtttactgcaatgacaatagaatatgtcatgtacacacatat

SEQ ID NO: 24610 - DNA, 120 bp, Homo sapiens
catcgaatgtttactagcagacactgagcaccaactacatgtcatgtggtctaacggcttttgatatatccagtgaaaaaaacatagaccttacataaggtggtagacacaataaataaa

SEQ ID NO: 24611 - DNA, 120 bp, Homo sapiens
cttcggatgcgcggcactcctttaatgcctctctgattcaccaactcaactggtttggaagtggatggaatataaagcagctctaatgttctcatttacccccccgccacagccttaaat

SEQ ID NO: 24612 - DNA, 120 bp, Homo sapiens
ctgcgctaaattgttatgatccctccacaaacatgaccacgactctagcatcaggaaaacttccctgacttcacaaactacttaaaatattttgcttgcttacaccttaaaatgattttt

SEQ ID NO: 24613 - DNA, 120 bp, Homo sapiens
tcacgggcacctggaaccacaagtgtcacactcgctcacccacacgctcacgggtttggccgcttgggctcccacaccccaaggcgtcccagggctaccttaggggactcccccttgctg

SEQ ID NO: 24614 - DNA, 120 bp, Homo sapiens
caacgtgggtctctgggcaagatggaacagcagacagtcgccctgagtgaaagaaaagatagaaaagggaaaggtgaaacagagagagggaggaaagggaaaggaagaaagtgctgcttg

SEQ ID NO: 24615 - DNA, 120 bp, Homo sapiens
agccggtgactgccgtggaggcacaggggctttggaagcccctcctaaccctataaaggcctcaagggattctcagggtgagtccaggcctgaaccttgggcttcccaatggcctcctcc

SEQ ID NO: 24616 - DNA, 120 bp, Homo sapiens
tcccgcagggcctggatacctcctgacccctcctccccatcctgatcttggagctggcggtctgctctctgtgaagatggagaacagctgggtccagagccccccaggacctgcatcctg

SEQ ID NO: 24617 - DNA, 120 bp, Homo sapiens
agccgccccctggcctttcttcccaagcagtgaatcccttcatccacagcctcctcagcccaggcctttgtccaagcccccgctgcctcggggccttcgttttgcagtgattcctggccc

SEQ ID NO: 24618 - DNA, 120 bp, Homo sapiens
gggcgagagccgatcagtctcccacagaagggtttcctgcctggcaggtgccagagcctggtacaggactcgtcacccctgtagaaagcacgtcgggtagagccagccaggggtctgatg

SEQ ID NO: 24619 - DNA, 120 bp, Homo sapiens
caccgctggaagccctggaagcctgtctgaagggcattcccccaaatgggtcgtcaccttcccagctgccacccacttcttgttcccagaacccccagccaggagactctaggtctcaga

SEQ ID NO: 24620 - DNA, 120 bp, Homo sapiens
gggcgcggggtggcatgtccctgagcgtggcagcggaggcagatgctgaggactgtcgggtcattgtgttccccggcctcctgagacacaggcccgttcccccaggctgcctttcatact

SEQ ID NO: 24621 - DNA, 120 bp, Homo sapiens
agccgcccgcatgtgctgaaagccagtgcagatcttcctgccctacttccttctctcagaactctctccagtcacgagactcactgtggggtttctgtgggtcacgtgctatgggagttg

SEQ ID NO: 24622 - DNA, 120 bp, Homo sapiens
atccgagtcctcttggtctgtgttgtcctgccgacaccactccctccgtgctcacctgtgtcctgactgccaatgtatttactgaacaggcctctcacagcagccacagctctggccagg

SEQ ID NO: 24623 - DNA, 120 bp, Homo sapiens
agccgcttgggtgtggggcttttcccctatagtgcaactgacttcataggtaatatgatcacatagctttgttcaaaagctataaaaggttatgtagggaaaatgaagccttcggcactc

SEQ ID NO: 24624 - DNA, 120 bp, Homo sapiens
tgtcgtcagcatttgtctttgacccctttctatacttttcatgttccttggccactagcaccagtttcttcttttggacagcagcgtggtattcggtagcatgcttcatgtgttctgcct

SEQ ID NO: 24625 - DNA, 120 bp, Homo sapiens
tcccggctccctctgttgccccagaactcagcgaacgtgctgtggagaaaatgcatgtgggggtcctctggtttccagcccttcctggtctggaagggctggtctctgcccttccagcct

SEQ ID NO: 24626 - DNA, 120 bp, Homo sapiens
tcccgccctgtgcctgggcccagagtcgtcagcaaatgctgtcgggaaagagagtggcagcactgtctgctttattaggaagggctctcctcactctagagtttcagtccatctagttcc

SEQ ID NO: 24627 - DNA, 120 bp, Homo sapiens
actcgcacagctgtcactggaaataggatgtttgcagtgtgtttagttctttcctagttgaaattgcatgcatgttggcccgccatggcccagaggccagggggcctgtgttgttgccct

SEQ ID NO: 24628 - DNA, 120 bp, Homo sapiens
tcacggtggtggcagctgggtgtgctgaggaggactagagcccacacctgtggccaacgccctcatgacagccgcaggccaggcttctatgtgggtggccaggacaggccaggcttcttc

SEQ ID NO: 24629 - DNA, 120 bp, Homo sapiens
ccacggcagccaaagcagggccgcgccagagccaggactgacacgtccagtgctctgtgcccagcacccctgtgaccccccttccctggacacagcagaagacagggggcttctgcagtt

SEQ ID NO: 24630 - DNA, 120 bp, Homo sapiens
ctgcggcctgcctggccctgctcctcagcagcagacaggggaccgaggagagcagagcccaggaactggacagcagacaaggaaggtaatagtggctgccggggccctgggtgtagacag

SEQ ID NO: 24631 - DNA, 120 bp, Homo sapiens
aggcgctgcacctgtgggctcagatctgctcctgagccaacatggtgctctggaaacagacctgggcagagccttgttggaggccagaaagccagatagtctgcagcacacacgtgtaga

SEQ ID NO: 24632 - DNA, 120 bp, Homo sapiens
ctgcggttccaccatcccagctggagctggctccttgtggctgggtgtccttgtcccggccgtgccagccccacgagccttggtgtctgggcaccagtctccaagcccaggggtccacgc

SEQ ID NO: 24633 - DNA, 120 bp, Homo sapiens
aggcgctccctggaacatgacagatgggtgtttcccacacctgatgctggtgtgcctgagagcccagcaatggcagaaactgttccctgtcccttcttctgtggcagcacgaggccccgt

SEQ ID NO: 24634 - DNA, 120 bp, Homo sapiens
ctgcgagtcagccgtctcgggcagggtaggggagaagcgcccacccggagcctccatctggtcagcccacaggtgttcacctccagctgcgtccccgcctgccaccagcgggggttcaaa

SEQ ID NO: 24635 - DNA, 120 bp, Homo sapiens
cctcggtactgacagccccacttcagttaaagtgtttgacaaggaaatagacttccctctctgtccctctgtttcttccccatctctcatcctttccccagaggacagaagctggtgcca

SEQ ID NO: 24636 - DNA, 120 bp, Homo sapiens
gttcgctaaacaagaagataaagtgtcacaaagtgctgacaaggagcggggtcgggaagatcattgtttgtgtccatccattgggtttctccagtggagaagcttcttgagggggctccc

SEQ ID NO: 24637 - DNA, 120 bp, Homo sapiens
tcccgccgtccactgctgctgcttggtttaacttccagcagaattccttcctagatctgctgcagggcctgctgggatgcctttgctgaataaatgcggttttgctgaccctcccatcag

SEQ ID NO: 24638 - DNA, 120 bp, Homo sapiens
agacgaggatgggccctaactgagccccacccttgggctgctggcccctgtgagatactggggtgcagggatggcacctgcctggtgggagaagccgcctggcctgtgagacctaggcct

SEQ ID NO: 24639 - DNA, 120 bp, Homo sapiens
gaacgcatgctgatcgtgggctgagctgaaaaggggaccggttctgtgtgcccagacactaaggcagagacctggctctcttcaggctgatgacagagcactctctggtcccctgcccag

SEQ ID NO: 24640 - DNA, 120 bp, Homo sapiens
ccccgctgcactgcctggagagcgccctgagggggatcttgcctgtaaggcccttgcgcttcgcctgcgtgggaggccccagccccagccccagccccggctccagctcgagcttcagcg

SEQ ID NO: 24641 - DNA, 120 bp, Homo sapiens
acccgaggccagagcctgatctctggaagccgctcccccagggtgagcctgtgcggagagggaggatagcgggatgtgtgccagggcgccagtcaccactctgatgccagctttgtttgt

SEQ ID NO: 24642 - DNA, 120 bp, Homo sapiens
tgacgttagagagggaccgccttcccagctgtaagcctcctgtccctctgtccccatgtcctggtgggacccctgctggcagcagtggcggcagccctggtgaagaccccaggagaacag

SEQ ID NO: 24643 - DNA, 120 bp, Homo sapiens
cagcggcctcggtgcaggtgagcctggggtctcctgagggggcgcccatgcgttccccagaggaccaggagtccagactggatcctttgagtcctgcctgtcgctttgcctggctcttgc

SEQ ID NO: 24644 - DNA, 120 bp, Homo sapiens
ggccgtgctttagttccctgtaaggtgagctgtgtccgagaaggagggcggggctgctgggggtgctggtgagcagctgcagggaggtctgagccactcacttgatgccacgtacacggt

SEQ ID NO: 24645 - DNA, 120 bp, Homo sapiens
ttgcgcttgctaatatacacgtgtgcatgtagacagatgtggatgtatttatacaataatagcgtatgcttttaaaacttggcaatcaataacaaaagtctcaaaagtgagatttcccca

SEQ ID NO: 24646 - DNA, 120 bp, Homo sapiens
gggcgacagagtgagactctgtctcaaaaaaaaaaaaaacaaaacaacatagataattcttatctctggactctccccttgtcccactctgcaatgtttcccttcggacatctcctcaca

SEQ ID NO: 24647 - DNA, 120 bp, Homo sapiens
agccgtgaccttcactgggaatagaagtgggggcgaggggtgagcaagctctgctttctttcctgaaacagcaaaatgagacaagtgtgtgcacgctgtgctgctgcagctgcgaaatga

SEQ ID NO: 24648 - DNA, 120 bp, Homo sapiens
ccccggcaggccccctaggtgtgtcatctgcctccagcccagctaggcaagtgtgcttccatctgggttggggagagggatgggtggaagtctcctgtggggtaattgtgagtcctgatc

SEQ ID NO: 24649 - DNA, 120 bp, Homo sapiens
aaacgggcgtgtgggaggcgggtgaagagcacacagggaggggacggagaagctcctgagccagcctccttcatggctcagtttcatttcagtgcgtggcacttcccagaagaaacgagt

SEQ ID NO: 24650 - DNA, 120 bp, Homo sapiens
tctcgttgtcactgtgatctgtacccaggtggggagagatggggtgtgggccatgcatgtaaattgacaacacccctccccgtgtagggtgccctcaggtggtcaggaacacttttggaa

SEQ ID NO: 24651 - DNA, 120 bp, Homo sapiens
tgacgtttgatgacatcactgtgtacttactccaggaggaatgggtgctgctgagccagcaacagaaggagctctgtggttccaacaagctggtggcaccactgggtatgggtgcccatc

SEQ ID NO: 24652 - DNA, 120 bp, Homo sapiens
gatcggcattcccaacctcatctgcgtcaggaacactggagagagttttctggaatccaagcatttgtctaggcatctttactccacctgtctgctcgatcccgtatctaccttaattgc

SEQ ID NO: 24653 - DNA, 120 bp, Homo sapiens
ggccgggagggaaactcggaaactaggcctgtggatctgtggagcccgtaggacactggaggtaggaagcagtggtggcaagagcatcacatttgtgatgtggaaatctggtctcaatcc

SEQ ID NO: 24654 - DNA, 120 bp, Homo sapiens
catcgtcttagagatgagtgagataaaacagtttaagagtttgcacaagtgtaggtattttcatctcatctatttttgaatgctctttcctttgattctttgggtagactttctgtgcga

SEQ ID NO: 24655 - DNA, 120 bp, Homo sapiens
gcacggtagaagcaacaatcagcattttatgggtggaaggattgcagctggggtgagtcttcctgtgccggctaaaagagtttgaaaaccactgattcttccaaacaagaagttgcaaaa

SEQ ID NO: 24656 - DNA, 120 bp, Homo sapiens
aaacgggatggtgtggcagggctgagcctgcatcctgagtggcagcccttctgcagctgagtagctgctgttcccttacgtcttgcaggttgccacagcccctgcacttggcctggtttc

SEQ ID NO: 24657 - DNA, 120 bp, Homo sapiens
tgccgagagatgtcgcagacagatacctccttcgtgttgtgacccggagccaggtcttcatagtgcttttctctctctctcgctctcttttttttttttggactcaggaccaactgttgc

SEQ ID NO: 24658 - DNA, 120 bp, Homo sapiens
ttccgcaagttcggacgagggccagagccatggcttggcagcgtccagggccagaggagccttctggagcatcacccaggtgagtgtggaactgcactcaggggcagatgcttggctgga

SEQ ID NO: 24659 - DNA, 120 bp, Homo sapiens
ttacgtaaaataactgcgttaacccagcccctactgtgggagaagagggaggtggggaacaagatcctgtatgaatcaaatcacagaagtttgttttcccttgtgatttctctcagacca

SEQ ID NO: 24660 - DNA, 120 bp, Homo sapiens
ggacgcccaggatcagtttacagcacaaagcagccccaccgcggagggagagttccccagggcccagaacgagcacttggcagacagcagaggctcagagattgtggagtgagcagagcg

SEQ ID NO: 24661 - DNA, 120 bp, Homo sapiens
acacggctggggagatgagctgggaacacaggactcatgactcagatggctggggtggtgggggacaggctctgagatcaaaggagagaggggcaggtgctccacaggggcttctgctgg

SEQ ID NO: 24662 - DNA, 120 bp, Homo sapiens
ctacgggacatactctcccagcagcccttgcctctcacatccttgacactaagaggcctgaagtggggaaggcaccctccgtgctcctgagatgccacgatgccagcctccaacacctct

SEQ ID NO: 24663 - DNA, 120 bp, Homo sapiens
tggcgtaattctcggtcatttcaatccacaaactgccctccctatctcctggcctctcctctcctgcccgtcttcctgccctcagcctcagcccagggtcaaccccaccagtccttcacc

SEQ ID NO: 24664 - DNA, 120 bp, Homo sapiens
cctcgaaagcctagcctcgcctccttatgcaccaggacaacaggcctgagccaccgtgactcccagaccctgtccttgaaatgcagtcctgtggtcatgaaaaactgcccctgttctcag

SEQ ID NO: 24665 - DNA, 120 bp, Homo sapiens
ccacgaaaccagaacacaccaactgccagcgtcccaccacaccaccttcccagctctttctctagctatcctgaagcaacaattctcagccccacaaggggcctgatttgttgaccctat

SEQ ID NO: 24666 - DNA, 120 bp, Homo sapiens
tctcggtcagctcagactcagcaggccaccatggcgccactgtacttcaactcccttccctaccaactgtcgctggcacggtgcccgcggccacaccgtaaacgctgcccagggaaaaca

SEQ ID NO: 24667 - DNA, 120 bp, Homo sapiens
caccgctcactgctgacctcacacccatgaccaggaacctggcgcagacacttggtgctgcctagccacccgcctgcatccctggatctgggcactccccagagaaagcatccacgcctt

SEQ ID NO: 24668 - DNA, 120 bp, Homo sapiens
ccccgtgcttacgctcagctgaaaaccttgttttacacacttcactggaaaacagaagccacattcatgaaagaactccacatcctccatccaccaagctgacccacccacttgaatgtg

SEQ ID NO: 24669 - DNA, 120 bp, Homo sapiens
aggcgtctgtcctcctagttaactgaagccaaccccaggtcccaccccgcttgtctaatctaggtcaccggcttcagatcacctgattgacaggaagcagtgtgtagagaaaaaaggact

SEQ ID NO: 24670 - DNA, 120 bp, Homo sapiens
ccacgtaaggtagtgggtgatcttagaaaagtcatttaacttctctgaaacttaatttcctcacttctaaaatgaggcggtttaactacatgatctgaaggatacagtccataggcactc

SEQ ID NO: 24671 - DNA, 120 bp, Homo sapiens
tcacgtgagattgaagtgtatttcagatttgatgagaagtatgtaagaaacactggtgagcaataaaaccagtgaccttcaattagaactaagtaactgcagttatcaagtataattatg

SEQ ID NO: 24672 - DNA, 120 bp, Homo sapiens
tgtcgggtatcttccctgggagtggaacacccaggcagaggttaaacagcaagtgaaaaaagcaaaaaagtcaatgcagctaaagctcagagagaacggtagatagctaactaggatgga

SEQ ID NO: 24673 - DNA, 120 bp, Homo sapiens
aagcgatcattttctccctaaagatatgggcaagagttacaaagaaaaaaggaaataatataattaaaaagatttttgcaacattttgtgtagtagaactggactaaaaatagtgaaaga

SEQ ID NO: 24674 - DNA, 120 bp, Homo sapiens
tctcgacaacctgacttgcgggagtgaagggacgggggaaaagagcctcaggagtttcccgtgaaattcaggaagccacatttgaacagaaaagaaagttacacacattaaacaagacag

SEQ ID NO: 24675 - DNA, 120 bp, Homo sapiens
aaacggagtgagagaagagctccttatttgtatcacaatgggcatacactatttgacaggctaaattaacatttcacttgaaaacataagtaatcattccggtaacagacaatgtagtct

SEQ ID NO: 24676 - DNA, 120 bp, Homo sapiens
catcgcaggttgacagccaactgttgttttcatgaatagtaaactgggataccagaatttaaaacgtattcctccagggtggaaactggattttcaatcagactggccctaggagaaagg

SEQ ID NO: 24677 - DNA, 120 bp, Homo sapiens
ctacgtttcccttgggtctctcctccctggggctctcccgccaaggtgaggtcattaattatttaactaatccagaagggataggaaggctatatttgctaacatgctgttttttgccat

SEQ ID NO: 24678 - DNA, 120 bp, Homo sapiens
caccgctcattttcaagtgttctcagttccagttgtaatttctggctttaaggagtgtcttctggagacgtagttcagatcttttggttaggtttttctagtttgtttgcaaccacaaaa

SEQ ID NO: 24679 - DNA, 120 bp, Homo sapiens
atccgagtgtgatgaagccctgcttttcaccctgcagaatctgcatatatgaaaagtcggccctccatacatgtgggctttgcatccaaggaatactgtattttccatttgcatttggtt

SEQ ID NO: 24680 - DNA, 120 bp, Homo sapiens
agacgcaaaaagctgcataatatatggttccatttattgggcatcctgataaagacaaaactataggataaaaaccacaaaggggtagggggctaactagaaacaggcacagggcgcttt

SEQ ID NO: 24681 - DNA, 120 bp, Homo sapiens
caacgctgggctcacttttagtttactctttggggggcctttatctggtgggctggtggtgctacacagctgggaaggcggggcattctccctttctctgtgtctcctcctaacatctac

SEQ ID NO: 24682 - DNA, 120 bp, Homo sapiens
cctcgttggggactaacaatagaacagacaccagtaaagcagacttggtttgtaaacggcagaaaaaagactgcagactcacctggcttataaatggaatgaaacctgaatcaccactgt

SEQ ID NO: 24683 - DNA, 120 bp, Homo sapiens
aaccgcataaaggtttctatgtgttccttacatgacacacaatgccaatcatatgcttaacaatcgtatgcacccactctagtaagaaatgtgtagctccccctatggcaggattggtgg

SEQ ID NO: 24684 - DNA, 120 bp, Homo sapiens
aatcgtgggtctggatttcaagaggctcaggaatgagctcatcaaatctctccctcagtggaggtgaggggcagtcttttgtacttctggctcctggagccagccttgtttttctttctg

SEQ ID NO: 24685 - DNA, 120 bp, Homo sapiens
ctccgttctcctaaaaggcaagaggagctctctccacacatggctaagtcgtattctttgtgcgcggttggtctgcgcacttggccacctctggatttgtctgtaacactgcagattatg

SEQ ID NO: 24686 - DNA, 120 bp, Homo sapiens
ggacgctgcaccagcgccacgatccacatagacgtgctggctttcaccagccactgtccagactctgaacagacatcagttgagcacctgccacatgccggatccttgccagagctcaga

SEQ ID NO: 24687 - DNA, 120 bp, Homo sapiens
catcgagatgaacaggtcaccctcctcaaaggactcaggggaccactgtgtcaacaacaactgctactaacatttacatggtcctttagagcctgcaaagtgctgttgcctataaacaac

SEQ ID NO: 24688 - DNA, 120 bp, Homo sapiens
tgccgggcagcaaaccctcctctgactgcagatgccagccgctttcaaccactgctctccgctggccaggagggagtgagggtagggtagggacggtgacttacaacaaatacagctgtg

SEQ ID NO: 24689 - DNA, 120 bp, Homo sapiens
tggcgggtcttgtgcagcacagagggagggggcatctgtttgctggggagggagagtcacagcagaagtcatatttgattcagatcttgagagatgagcagaattgctctagatggagaa

SEQ ID NO: 24690 - DNA, 120 bp, Homo sapiens
cagcgagggtttcccagcactgaagtgattcgatttttggtttaaaaatgcagccaggcatagtggccataattcggaagggacacctcttagggcttacaactcgaatgcattcaaagc

SEQ ID NO: 24691 - DNA, 120 bp, Homo sapiens
aaacgaggtggtttccagcttttctgctttgtgtgtgcaggagcagaggtgaaggaggctgtgttggaaacaggagtgaggtgcccaggggcagggctgtagacagaggtgagggctcct

SEQ ID NO: 24692 - DNA, 120 bp, Homo sapiens
atgcgggcatttatggaatcaggctggttaaaaagaaagaaaacaaaccgaagaaggaaggggaaggaaggagatgggcacagagagatcagtgtcaggggaatctgagccgtggaggag

SEQ ID NO: 24693 - DNA, 120 bp, Homo sapiens
gcacgacctccaggctgaaggcacaggatgagatgtaggcctcagacagggcagcgagaagcccatatccagtgctccaggagggaggggaatcgtatgggatgtgagttatatcacagg

SEQ ID NO: 24694 - DNA, 120 bp, Homo sapiens
gtccgaagcatgggtaaggactcagcacagctggctgtggggttggagctgaacagctgtagggccaagaggccattcttcaacacatccaccaggaagcagagaaagttctgagatggg

SEQ ID NO: 24695 - DNA, 120 bp, Homo sapiens
ttgcgaagactggtgacgagtcccacttaccaatacccccgaatcctcccagcattgtcctctgcttaaactagtcagggatcttccggtgacaaaacctctatctactccaagacaaca

SEQ ID NO: 24696 - DNA, 120 bp, Homo sapiens
agtcggagacaccaccaaatgtgaagtcacgtcctgacttcagagatactgaaatgtgtacctagaccctacagaatagggcaatatgttacatatggcgccagctccagaggaacaact

SEQ ID NO: 24697 - DNA, 120 bp, Homo sapiens
ctacgaggagtgtgtgaactcagcagggaagggtagagtttggaaagcagataatcacccgagccttctcgtgccctaagtaatgatcgacaagtaccagactgtgcccacacacctgcc

SEQ ID NO: 24698 - DNA, 120 bp, Homo sapiens
ccccgcagtagagtcaagaaacctgcaagttgacgcttggctgtgagagtcaagggacaagggaataattcaatagatgaccacaaatacacagggaggcaattctcccttaagcaagtt

SEQ ID NO: 24699 - DNA, 120 bp, Homo sapiens
ccacgacattttaatagcacagatatactgtgtatttgttcatgtgccgtggccctttgggtggccaaaatccactgtaacagctgcaatttttttgtctcccaacaagaaccgatcttc

SEQ ID NO: 24700 - DNA, 120 bp, Homo sapiens
aagcgagagagaaaaagcaaaagatcaccaagtgccggccccctggttttatagagaaaactcttaacgacagcaataacaacaaaacaaagcccggagaggcctcacgggttgtccaag

SEQ ID NO: 24701 - DNA, 120 bp, Homo sapiens
tctcggcaatctttaggattttcttggcaaactcctgagctggggggaagggcctgatcatttattcaccttctcttgccatgtccctctgtgtaccccacacctaaaccttaaggcatt

SEQ ID NO: 24702 - DNA, 120 bp, Homo sapiens
tcccgattcttttctttcagtctgcttttcctccttcccccaccgccttccttccttccttccttccccgattcacgaccttttctcacaacttgcctggttaattacttctctgaaccc

SEQ ID NO: 24703 - DNA, 120 bp, Homo sapiens
gaacgaatgactcatcatccttgtattgcctgtgtgtgacacatagtaggcattcaaaaaatatttgagtgaaatgaattgttcattcagacatccattaaaacttggtagggaaacagt

SEQ ID NO: 24704 - DNA, 120 bp, Homo sapiens
gttcgctggcagtatgagatcctggcatggatactggctgagagctttgccagctcttgccaccaccctacaatttcagcttttttgttcccttcttttttccttttttttttttttttt

SEQ ID NO: 24705 - DNA, 120 bp, Homo sapiens
tgccggcccatccggacccttctcagggccaggctccagctgcttggcactgagaaatagagacagtagccagggctcggggaggcctgcccggggcctctcagggggatctgcaggggc

SEQ ID NO: 24706 - DNA, 120 bp, Homo sapiens
gctcgtcctggtcccacaatgcacctaggacaggctatctcctctcctgagagtcaagagggaatgttctcatcctcctctcccagcccctttccccactggacacagggccccttcagt

SEQ ID NO: 24707 - DNA, 120 bp, Homo sapiens
tcccgggggctgtgcccctgcttcctgtaggcatgtgcagggacctgatggggcagagctgaataggatgtggtggggggcgttttaggttcaaaaacctgtgccaccccccacatcctc

SEQ ID NO: 24708 - DNA, 120 bp, Homo sapiens
cttcgtgtgtaaaggaaggggccagccacagagatctctaaagcctcctccatggacaatgctgaaaagtagctatgtccatccctgagcagggcatgatcaaaactagccctggccagg

SEQ ID NO: 24709 - DNA, 120 bp, Homo sapiens
aaacgcgcatgttcctggacccagtaattccatttctggggccatagacttatttgtgtaattgctaagtgtcgactgtactaagtgtcggcttattcattaccatggtgcttttaaaag

SEQ ID NO: 24710 - DNA, 120 bp, Homo sapiens
agacgcagaggctcgtcaagaagaggttagataaatcatggcccatctgcaggcacaggcagccaccattcctgtcggaacatgacagggatcctcgttcctttcatctccaagatggag

SEQ ID NO: 24711 - DNA, 120 bp, Homo sapiens
gagcggtaagtgaagaaagccaactgcagagccatctgtatcgaatgataccatttgtagttttgaaaaaaggaaagaaagtatctatattctgcctgtctgattttgcctagactatct

SEQ ID NO: 24712 - DNA, 120 bp, Homo sapiens
acccgaaatgtttttaagagggggtagagtcttgcagcatcaacactttttttttgttttttgcacgatgccaccctgtttacagagggcttacacactctggccccctctgcccctcac

SEQ ID NO: 24713 - DNA, 120 bp, Homo sapiens
tagcgaataaatggcagggaccacacctcagctccactgtcctgactctataacccagacactttctgccacaatcaaactggggtatcaccgagagaaagaacatgaagacttaaaatt

SEQ ID NO: 24714 - DNA, 120 bp, Homo sapiens
tcacggggccaacaggaaggagagcttggatgacactgggtgactgcagagggaaagaagaggtgccacagaagagagaagggcacagagacggagtgagcttgggaccccatgtgcttc

SEQ ID NO: 24715 - DNA, 120 bp, Homo sapiens
caccgactgggtttggcaccatcacccagaagccgccctcctctgggtttcccaggcgccccaggtggctgggctgtgtctcgggtgatggaggaggtgtacagatcccatgtcagggtg

SEQ ID NO: 24716 - DNA, 120 bp, Homo sapiens
gcccggaggcagtggcggcagaatgtcaggtgccaccagggactccaggccttcctccgcggcgcgtacgtgcatcacgtggtgtaacatgactgggcggctcagtgtggcccccaccct

SEQ ID NO: 24717 - DNA, 120 bp, Homo sapiens
tcacgtgccctcctggcacccagcctccgcccgaccctctgagagctctgaggagtgtgaacaatgggacgggctcaggctcactcacccgggaaggacgctctgctggctcagcaggaa

SEQ ID NO: 24718 - DNA, 120 bp, Homo sapiens
caccgcaggagactgggtccctctcctccactccctggcagtgactctacactcaggacccacgagactgctaatggtaaccacagggacagccctgcaggggccttgctctggcccact

SEQ ID NO: 24719 - DNA, 120 bp, Homo sapiens
acccggccagagccaagcccagggatgggaggtgcccactggcctgacctcggacaccagctcctgggctgcaggtccaggaggcacccaggcacaatcaggctcctgttgccaaaaaag

SEQ ID NO: 24720 - DNA, 120 bp, Homo sapiens
ccccggccccagactcaccggctggtacagtgaccactcagcagctctggactggctcccgtgtggccctgccaacaggatggggagggcctggcatgtgtgagtagccatgcccaccca

SEQ ID NO: 24721 - DNA, 120 bp, Homo sapiens
ccacgtatttgcctactatgcctgccaactgggatgaaaaagctttggatctggctaagtttctgtgaaccaggtaataaatctgttcttggtgtgctgaaaatagtggggtttttcagc

SEQ ID NO: 24722 - DNA, 120 bp, Homo sapiens
ccacgcagcatctttttacacctcctctatgcctgaccttgggagtggggggaaggggctctgatgtgagggtcgtcctgggccagactcagcttctgctacatggaagcagatgccagg

SEQ ID NO: 24723 - DNA, 120 bp, Homo sapiens
ttacgtaacagaagttgattttcttacggttctgggggctggaaagcccaaggtcacggtgccagccctgttggtttctggtgaggaccctcttcctggcttgcagacagccgccttccc

SEQ ID NO: 24724 - DNA, 120 bp, Homo sapiens
gcacgcagtattggggtgacctgaatgttcatgggccaggaaggatgctggcgttctgggcaagaagccgttgcgtagtcatgcggtgtgggctcatggaaggggaggtgggtataaggg

SEQ ID NO: 24725 - DNA, 120 bp, Homo sapiens
aagcgtcctcagaggatgtggtctccggtcttactgggaccctgggcacacaaggatgaaacaccagcttcctgacacaccgcttggactcctggctccagtgctggcctcagaaatgag

SEQ ID NO: 24726 - DNA, 120 bp, Homo sapiens
agacgctaaatggtttttatttaattactgccctgtaattgcagagggtgaaagcgctactacagtcattgctctttgatctgattagcataatcctttcctaatcttccctctacattt

SEQ ID NO: 24727 - DNA, 120 bp, Homo sapiens
tgtcgacataatctggatttctctttgccaaagaggccgaaagaaaggcttagccaagctcgtcacttgtctagcgcctggagcctgaaagctggagaggtggggagcttcccttctgtg

SEQ ID NO: 24728 - DNA, 120 bp, Homo sapiens
cagcgggtgaacatttccagcgacagccacaggctttccagtggaaatgccatccaccgcaattacgaatggacctggtgattccgggggctgcagggccttgatttgatggctgtgggg

SEQ ID NO: 24729 - DNA, 120 bp, Homo sapiens
gtgcgcacaggtacatgacatgtgtgtgcgagtgtgtatctcttgacccggggaactgcagggaagcccccagataaacagtgtgcaccttgtccctggggaagcagctccatgctgagt

SEQ ID NO: 24730 - DNA, 120 bp, Homo sapiens
gcccgtggttcctggaaaagactgacacagccacagaggaaacccagtggatgggagggacctgtgccaacagcctaggtgggcttcctgtggagaggagggaggagaagtcaatgacag

SEQ ID NO: 24731 - DNA, 120 bp, Homo sapiens
ctccgaaggtgggagcatcaccaaagcaggccctgagagaactagaggactctaactcgctgagggcaaggagattcttccgggaatttttcgttggcttctcccaaataataacagcct

SEQ ID NO: 24732 - DNA, 120 bp, Homo sapiens
ggacgtcttccaggctggcgccagagggcgctgtccccagggaccacacgggatgccaggccacataactctgcaatgtgttggctgaacttttcaggaaacttggatgccgcacatact

SEQ ID NO: 24733 - DNA, 120 bp, Homo sapiens
tcacgtttttctggagtctgctcagccccagtattcagacctcatcagctgccctggtccggaaggctccagctgtggccagtgagcggggggcccagggtgcccgcgttggctgggcca

SEQ ID NO: 24734 - DNA, 120 bp, Homo sapiens
tgtcgggtacagggtaaagctcacagtaattctggatcatggcaacatctggggacagacccagggccctttgtacaactcacagggcacagccctgagggaggctgggctttggcttca

SEQ ID NO: 24735 - DNA, 120 bp, Homo sapiens
tcccgcccacccaaccccctccgccgcacctgactccccaccacctctccaggccctaacttcgagtacctcactctccagcacttcgagctgcacctcactccccagcacttctccagg

SEQ ID NO: 24736 - DNA, 120 bp, Homo sapiens
cttcgcggtcccctcagttcccctgcctcccttccttccgaaggccactgtggtattggaaagttggagcagcgacctgaaggaagggaccccacctgtgtctatctgcaggaagggtcg

SEQ ID NO: 24737 - DNA, 120 bp, Homo sapiens
gggcgatggagaccccgtgaagccccgacagagagttctgaagcccggatgccccttcagagctgtcctgagcgggggtcgggggctggtcctttatgtacatcggccggttattgggcg

SEQ ID NO: 24738 - DNA, 120 bp, Homo sapiens
ggccggctctgggaggggctgaaggctggcgaggtggtgctccttagctgagggccatctgtctgtcacacccacagctgggagtgagttcctcattcttgaaggaatcgggaatctggg

SEQ ID NO: 24739 - DNA, 120 bp, Homo sapiens
gcacggcacagcacagcctcaagggtgttctggctccagggtgttttctagcagagggcctaggggacatgctcagcatctcagggtgtttcaggcagagggcctaggggacatgagcct

SEQ ID NO: 24740 - DNA, 120 bp, Homo sapiens
gggcggcgtcaaggggttgaacaggggatgacatgatgggatttatgttttaaaaacaggagttggcaaattactacccaatggcccaatcctgctggccacctgcttttataaatactt

SEQ ID NO: 24741 - DNA, 120 bp, Homo sapiens
cttcgtagttgcaaaagagaccacgtggccttcgaagtctaagacatttaccatctggctttttacaggaaacatttgtcaactgctgtttgaagagactcctctccttgctgggcagag

SEQ ID NO: 24742 - DNA, 120 bp, Homo sapiens
tcacgggggccacggcccctcacgagccttcccagtttcaccccggtgcctaaagcaactcactttagcagttgctcgtgttctttggtattaatgatataaatcacctgtgcacaccat

SEQ ID NO: 24743 - DNA, 120 bp, Homo sapiens
acacgacattagatcattctggaggtcctgccttgctgactgtgtaagattctttttgcttttttaaaagactttaatcttattattggcagttcatgaacacacagacatgcactttcc

SEQ ID NO: 24744 - DNA, 120 bp, Homo sapiens
ccacgtaataattcttgtggcacaaggtcagccaggtaaacatttcaggctttgtaggccatggggtctctgttgcacctgctcagttctgctgttgaagtgtggaagcggcaggagagg

SEQ ID NO: 24745 - DNA, 120 bp, Homo sapiens
acccgagctggtggggacagacatggggagagtccagggtaaaagcaggccgctgtttggaagctctcagccttcgctgcatagacggatgggtctgctcagtcatcgggtgggctctcc

SEQ ID NO: 24746 - DNA, 120 bp, Homo sapiens
ctccgcccacactgtggctctctgtccacactatggaaccctcactttgcccagggcccagtgagacacccacaggccccagctggacgagaggacaaagacggatgtgaagggccgttg

SEQ ID NO: 24747 - DNA, 120 bp, Homo sapiens
gtacgtgaagggcaatcacaggtttagaaaagcaccacgatcacctcctagcctcgtctctgagccttggcagcagagtggggcaatcctcttgccttcgcacgctgggtaacagtcgtg

SEQ ID NO: 24748 - DNA, 120 bp, Homo sapiens
gctcggcaaggaccgcgtctttttcacccctgagtcaccggctcctcccagggctggattccatgagcctctgtccttccccttcgcagagctgacacggggagagtggtcataagctgg

SEQ ID NO: 24749 - DNA, 120 bp, Homo sapiens
gggcgtaaatgactgaggacggcccgggggccagtaaacaccaagacctcgggataagggaatgacatcctgatgcgccacctccagcccctgtacggagggaacagcccttcatttcta

SEQ ID NO: 24750 - DNA, 120 bp, Homo sapiens
gctcgcaaataaaatgccaaaccaccagccaataccagcatagagccctccgtgggcactaccgactcaagggaaaggccccgaggccccacacccggcccggccagccagctgcagaca

SEQ ID NO: 24751 - DNA, 120 bp, Homo sapiens
catcggccacccagacttcagagaggaaaaaaccagccacgaggtgaaagtgagatggccccggcctgacctctgctgcagaggcccaaatggccctggtcagatctgacgcttccccca

SEQ ID NO: 24752 - DNA, 120 bp, Homo sapiens
caccgccgcctggtgctccccaccgggtacacacccagcggttttggttagtgcttgaagacaaactgcaggagggacaccatgaactacaataaaattgggcaccctggggacattttt

SEQ ID NO: 24753 - DNA, 120 bp, Homo sapiens
caccgagttgctggctggctctgagacacaccctcctctacgtagaggaccttgtgtgagagaggacacctctgaacgagggctcagagacctcatttctgctcccaaacagctacccaa

SEQ ID NO: 24754 - DNA, 120 bp, Homo sapiens
ctacgggtacccaaggactccttctactccatcttgtttcacccacctgctctgtgccaggcacattatagatcaaaaggtacagggagttcagaggaaggaggaaataccatggactta

SEQ ID NO: 24755 - DNA, 120 bp, Homo sapiens
tcccggggtgagccggccactcccgcagcatctggccacggctcttcacactgacagtcccaacttgtcagtggattatgaaatcaatttagtggattgcacaaccaccaaaaactgaat

SEQ ID NO: 24756 - DNA, 120 bp, Homo sapiens
agccgctgtacccagcctgaataaaatgtacttcctattgtgttgtgggtgaaaaagtctgaaaaattctgcattagataagctttgaaatcatgcaggtagatttcagggaacagagaa

SEQ ID NO: 24757 - DNA, 120 bp, Homo sapiens
ccccgaggtgtcaccagaagtgtggagcaaggggtaccatctgtcctcctctcctggctgaagccctctgacccctctccgtactttatgcccagaaatacacatggagttaagaacaca

SEQ ID NO: 24758 - DNA, 120 bp, Homo sapiens
tcggtcacgctgattatctcaggctgatcaggaaggctggtaccaggagtgagtgactaaatgaagaaattactaattaacaaatgcttgggtggacaatccttcaaaatttaggatcaa

SEQ ID NO: 24759 - DNA, 120 bp, Homo sapiens
ttgcgctggacatgggatacacaaaggtaagacatggacccaccctcaagtctgaaggtggaggtggggaagggcagaggctgtaaagggtcagagggaccttgtggagtggtggaaatg

SEQ ID NO: 24760 - DNA, 120 bp, Homo sapiens
tggcggtggtcacatgactgtgcacacttacgacaacccatctaattgtatactgtcagtcaaagggcattatatgtaaatcacacctcaataaagctgaccaaaaagtggccagtcagc

SEQ ID NO: 24761 - DNA, 120 bp, Homo sapiens
gaacgtgggaaaatgcctatattaagaatcctggaatactccatgtgctttttcatgcagcgggagtggaattttcaggaagcagctgtgctgtgggtgacggtcatactttattctcta

SEQ ID NO: 24762 - DNA, 120 bp, Homo sapiens
tggcgtgttacacctatcagatcgggcacactgccccttcttcccaacctacgagctgaaatggccagcactgcgccttccagaacccagcgtagatgcacagctgccacggaggtagga

SEQ ID NO: 24763 - DNA, 120 bp, Homo sapiens
attcgtttgccaccaaaagcccagtttctccaacaggtaagtcccagcagggtgcgatgtcccaaacctacacaaccgtttccactgcctattcccgggcccctcacttgggtcaaggca

SEQ ID NO: 24764 - DNA, 120 bp, Homo sapiens
gagcgagaactcgtgcatccgaacccttctctgacttggcgggttattggattagctactctcagaagacccaaaaggcataggggagagaagagataaatctggatgcggtggagacaa

SEQ ID NO: 24765 - DNA, 120 bp, Homo sapiens
caacggccaaacagaaaaaccgcttggagaataaaagtcgggggaagcctgtagtggggacgctagactcaagggaaggctctggaggaaggaagaggctaaaggcatagtttcgtaacc

SEQ ID NO: 24766 - DNA, 120 bp, Homo sapiens
gaccgccccgcagcaagacgacggcagatatttaaaatgtgaggaaccccggccacagcgggcggggctccccacccatcacctagtgtcctcactcactgcactccagactttgtcaaa

SEQ ID NO: 24767 - DNA, 120 bp, Homo sapiens
ggccgctccccatgcacctggcaccctaggtgacaggggtaccagatgaagcacaagtctccgccctccagggaactcccagcacagtgggaagaatacatttgaagcctgttttttccc

SEQ ID NO: 24768 - DNA, 120 bp, Homo sapiens
ggacgctcctcaggcccacatctcctttcacgtcccatcccctgagctggacatttgttcagcaagtcctttcctgagcacaaatgcatcgagcgaagggatgcccagcattacagacac

SEQ ID NO: 24769 - DNA, 120 bp, Homo sapiens
agccgccagtaggtccttggccagcatccagggtgaccaattagtctcggtttacccaggactgtgtgggtttaaaacaggaagtcccacatttgaagaagcccctccatcccagagaac

SEQ ID NO: 24770 - DNA, 120 bp, Homo sapiens
caccgccctgccctaaacacccccacccatccattctctctttctccatctctcctgacttccagttccacttttttttttgttgttgtttttttttgacagagtcttgctctgtcgcct

SEQ ID NO: 24771 - DNA, 120 bp, Homo sapiens
gagcgtggctctgaagttgtggcagtgtccctcagagactggtcactcactactacagaccacaggcaggccagtgctccctctgggcctcagtgtactcttctgtaaaatgggaagatc

SEQ ID NO: 24772 - DNA, 120 bp, Homo sapiens
cctcgtctctagctctcaacttctaccactccgcgaagtcgtgtgggctggaagtcagagcggcttcctcaaagaggcggaagaggacccatcacatgaaggggctggtttggcgaggca

SEQ ID NO: 24773 - DNA, 120 bp, Homo sapiens
gaacgggggtaaaaaccctcccacctgggtgagcgtgtccatcggagcagtggttctcaaatgagaagcccttccccatgagcgaatcacaaagttattttaggtaggtcatacgaaata

SEQ ID NO: 24774 - DNA, 120 bp, Homo sapiens
tcacgggccagagagaagaagcctccaccccgactgctgttgtttatttctctaaaaaatcacattagaaatgagcctccaaggagcttgacttgaacctggaactttctaaaatgcaga

SEQ ID NO: 24775 - DNA, 120 bp, Homo sapiens
acacgaacacacgtgcacatgcacacacacgtgtgcacacataacccttctggacttagcagcacacggaccagctggatgcttgtggggcctgagggtggacagctcctccacgccatc

SEQ ID NO: 24776 - DNA, 120 bp, Homo sapiens
ggacgcagccttcccccacacatcacaggcacagggaggcatttggagcgcccgaggatagggctgtgtgacatccctggcaagggccaggcagcgggaatccagccgccaaactcgagg

SEQ ID NO: 24777 - DNA, 120 bp, Homo sapiens
ctacggacagcactgccacaggcttgagtgacatcacctcagtttgcacaattgggctgagactggagctcagccttcctggctcccactccttgagctcagggcatgagtacggccaca

SEQ ID NO: 24778 - DNA, 120 bp, Homo sapiens
gggcgcgcctcctgtgattctcacacaacggcctcaagaagggaggcagcgggggagtcacggaaggagggctcagtcaaagaaaggacacatctgagcagagggatggcctcgcagccc

SEQ ID NO: 24779 - DNA, 120 bp, Homo sapiens
gcccgtcttctggaagttgagcaggtgacagagctgtcctcccacccccacccctcgcacacacctctgcacccctggccccaggaggctaagtcttggtggccacccaggaggggagag

SEQ ID NO: 24780 - DNA, 120 bp, Homo sapiens
tcacgttacgttggttttctcacagcccctccacactagaacttccagcagtgggaggaggggacgcaaggaaagacccagaccttggaagggagtgtcaaagtgctgtgggcagtggga

SEQ ID NO: 24781 - DNA, 120 bp, Homo sapiens
ggacgctgggaccccttcctggggccttggccacctctccaggccatgccatggagcccctcagtgcaagcccctgccctacagctctatcggacggaggctgtggctgcgctgtgcttt

SEQ ID NO: 24782 - DNA, 120 bp, Homo sapiens
atgcggcaccacatactgggggctttaaaacagaatggattctctcattgctctagaggccagaggtctgaaatcaaggtgctgtgagagccacacgccctccgaaacctccgggaggat

SEQ ID NO: 24783 - DNA, 120 bp, Homo sapiens
cagcggcccatattccgaggctcgtggcagcagctctgcaatctctgcctccgccctcacaggccttcttgcctgtgcctctggatgcaacttccctcttcttagaaggactccaggcat

SEQ ID NO: 24784 - DNA, 120 bp, Homo sapiens
ggccggtcctaatggcctcatcctaatctatatgttaatcacatctgcaaaaaccccatctcaaagaaggtcccattcacaggtatggggtgcagagggtgtgggacttcgacctttttt

SEQ ID NO: 24785 - DNA, 120 bp, Homo sapiens
catcgcactgttcatctttgtgtcctcgacacccagcccagtccctggaaagcacacagaaacgagttgactggtttctggtcccagcactaaccctgcgtaaacatagttcttagcaat

SEQ ID NO: 24786 - DNA, 120 bp, Homo sapiens
agacgctgggagcctggggttacggagcaaactggtctttgtcgtgcattcatcagcagcttcactgccaggtcagagtatatcaaaacacagaggccctggcagacgccccaaagcctg

SEQ ID NO: 24787 - DNA, 120 bp, Homo sapiens
agccgattggtccgtgaccagccatgggttggcagagagggcttcctgtcaacaggaagtaaaggacagggattaaattattttcaaagtaggtagtggaagaaagagatgagtgagatt

SEQ ID NO: 24788 - DNA, 120 bp, Homo sapiens
gctcgttaatagctaaccccttcctctggtctgggggcataagccatgcaatgagtaacagtgggggcttctaagaactccgtatggttaagcccgaaggacgcagctgaactctcaggt

SEQ ID NO: 24789 - DNA, 120 bp, Homo sapiens
gagcgagtcacggttaaagaaccaagcaaagtcaccactctgtttcaacgtcacagctcagctgcccatcggcctttgtttgttgcgcattttaaacgacgttgacagaactgtggggtt

SEQ ID NO: 24790 - DNA, 120 bp, Homo sapiens
caccgtcctgaaaggacggcagacagctggtgcttcatcggtgatcacgttcattggtcccattttggccgaagggagggcggagggaggagaacgggtgagccacattctcactcggct

SEQ ID NO: 24791 - DNA, 120 bp, Homo sapiens
actcggtaaccttagcagcccccataaatgtaaaaaggtgcctagaaacagaaagacactggccatgagctgaatacaccaaaatcagctcttataggaaaacagggagagcaaaagaaa

SEQ ID NO: 24792 - DNA, 120 bp, Homo sapiens
ttacgtaagcgaagtctgagtagatgaagaggcgttggcaaataaaaagtgcttccaaatgatttctttcgccagtctagtgttcagcacagtccaaattgcaaaccctgagtgcaaact

SEQ ID NO: 24793 - DNA, 120 bp, Homo sapiens
cctcgtttatataagaatcttggaaccctccacaaagaggtaccaggaccaagcgcgaatagggcagcgggggctagatgagggcagagatgcatatttcacctccactgtaattaaccc

SEQ ID NO: 24794 - DNA, 120 bp, Homo sapiens
ggacgaggcagctccaaggtgactcccgcaaggcactgagcatgtgactctgcaggcccatgggtttgtgcaggctccgcactattcccccatgtgagctgctctgtgggtgtccctgcg

SEQ ID NO: 24795 - DNA, 120 bp, Homo sapiens
tcacgcatcactgtctagctgcccgttccctccaggaccagcactgggccgtgctcaagcggcattgggccaatgtgccgtgccccactgaggacgaccctcgctgatcagccctctcac

SEQ ID NO: 24796 - DNA, 120 bp, Homo sapiens
cagcgtgctgcagagcggcaaccaagcttcatcaaaaaccctggagccacaggccagtctgaggaccccatcaccaagaagcttgactactgaaggttcccatagcatactctgggccct

SEQ ID NO: 24797 - DNA, 120 bp, Homo sapiens
ttacggcagggcatctaagatgcatgaagccactgaagggctgagtcaagaaagcttgcagcgtggcctaacgggctggcccacacaggcagctctggctacaggctggtttgggcattc

SEQ ID NO: 24798 - DNA, 120 bp, Homo sapiens
caccggagaacttaagaaaaatgcaaactcatgggtcccaccctcaggcattctgattcagtaagtctgggctacgaagcagaattttatattctaaacaaacactgggagcttctacat

SEQ ID NO: 24799 - DNA, 120 bp, Homo sapiens
ccccggcatctgtctccttccaggccccacctggaagctgcaataagggctcaagccctccccgatccctccgccctctccgatcctccgtcctccccactcctccgccctctccgatcc

SEQ ID NO: 24800 - DNA, 120 bp, Homo sapiens
atccgtcgtcctccccgctcctccgccctcccagttcctccgccctcctggcttctctgccctcatcgctcctctgccctccctgctcctccatcctccctgctcctctgccctccccaa

SEQ ID NO: 24801 - DNA, 120 bp, Homo sapiens
cttcgtcctccccgctcgtcctccctcccgctcctctgtcctcccccctcctccatcctccccgctcctccgccctccccgctcgttcgccctccccgctcctctgccctccctgctcct

SEQ ID NO: 24802 - DNA, 120 bp, Homo sapiens
ccccgctcgttcgccctccccgctcctctgccctccctgctcctctgtcctccccgctccttcgccctccccgctcctctgccctccttgttcctccgtcctccccgctcgttcgccctc

SEQ ID NO: 24803 - DNA, 120 bp, Homo sapiens
ctgcgtcctcctcactcctccaccttccctgctcctccgtcctccctgcttgttcgccctccccgctcctccgccctccccgctcctctgccttgctgtgtgcccaacactttcacgggc

SEQ ID NO: 24804 - DNA, 120 bp, Homo sapiens
ttacgcttaattatacactgacttgccccatttattttcctctctcgccttgctccataagaggcttttaggcaacgactcctccttttctttgccgagaggtttgtttctgttataact

SEQ ID NO: 24805 - DNA, 120 bp, Homo sapiens
tgccggagaaggcccaggcctcacgggtgcaggtcctacagaaacccagtatctgagagcagcctctgtccatgttctgacactggtcagaccacacctgtgcaacgctcactcccaggc

SEQ ID NO: 24806 - DNA, 120 bp, Homo sapiens
ggccgcagggggcttttggtcttttaggactgactccttcatttgaccagtcatggtgtcatgcagactaaagcaaaagctatgaatggtgggatttgggcagagccccagagttaaacc

SEQ ID NO: 24807 - DNA, 120 bp, Homo sapiens
aagcgtcaaactccagaaaaaacaattccagatcttgccgcatgacagttatgcacagaaaggggacatgaggagccattccaaatgtgaatcagaggtaatttgcattcagcgtgtcag

SEQ ID NO: 24808 - DNA, 120 bp, Homo sapiens
tcacggccagtgcatcaccaggctttcatgacacaccgtgtaagctggcagaacggctttagagggagctgtgggatgtgaggagcctgcccgggcccagctgtgctctcccggcgccag

SEQ ID NO: 24809 - DNA, 120 bp, Homo sapiens
ctccggagagctccttctgacctgtgacttagaaactgagggtgcagcatcactatccttgctacagaatcccagaggagccttgggggccctctgctgtcatccccaccctcacccccc

SEQ ID NO: 24810 - DNA, 120 bp, Homo sapiens
agccggcttctgctagacagacaccctgcatgaagcttctccctgaagccaggcaggtcctgggctccagtcacccaccagccccagcatgactgtgcacctgcctcggcttcctcaacc

SEQ ID NO: 24811 - DNA, 120 bp, Homo sapiens
acacgcagtcctttattttaagccttgaaggaggaggcccatgaggcagcatccttatgatcactgtcatatgccacaaatcagaggaggccgcagaaggaaggaaccaagttccttcat

SEQ ID NO: 24812 - DNA, 120 bp, Homo sapiens
ggtcgtgcctgctgggatgggcatttcagagagccacacggcaggaggaaagtccggccggagcagagggaggtgagggaggagcagtgaggaggctcagccccaggtgtctgggtccca

SEQ ID NO: 24813 - DNA, 120 bp, Homo sapiens
agtcgtggggccccagggtggcttctccctggatagttcctttgcctccttatgcagcaaaggggtctttgggactccttgggaagggacagcccccaacctcaggcacacccaccactg

SEQ ID NO: 24814 - DNA, 120 bp, Homo sapiens
gggcgggcctctgtgtcccttctgtctgtgggtaatggggtgctcgggtgccccttttccaggaggctgctcattactagcccagaggtaggaagggcccacacccctctttacttcacc

SEQ ID NO: 24815 - DNA, 120 bp, Homo sapiens
cagcgtgtgcagagctcacagggcaagaatgggagtgagggaggggggaggtggggctggagagggagcaagggagctgggaggtggtgcgggctccttttcacagtcagttctcacggg

SEQ ID NO: 24816 - DNA, 120 bp, Homo sapiens
aaacggtatcaccgcctccctcctggatgaagctgtgccctaaacggtacctgaaacctgccatattcccaaacacagaaaaaaaaaatcatggttgatctagacaaagataccgcaaac

SEQ ID NO: 24817 - DNA, 120 bp, Homo sapiens
acacgtaggggcttccctccagatttgaaaaatccccaacagcgtggctagggtgggtagcaagatcctgacagtcccgaggccctatttttctaccacaaaccttgaggaatacacagg

SEQ ID NO: 24818 - DNA, 120 bp, Homo sapiens
tctcgcagtggatttagtgaaacagacatcttaggtgacaatgcactggggaataaagtccaccctattattccacgtgtctgagacatttcaccaacatctcgtttagttttgcaacat

SEQ ID NO: 24819 - DNA, 120 bp, Homo sapiens
agacgacctttagaaaaatcccctaagtcagcagcaaacctgggaataaatccagggttttctgattcaacttttgtatctgcgtgtgaatgtttgctctagaccttgctaccttagtaa

SEQ ID NO: 24820 - DNA, 120 bp, Homo sapiens
gaacgcccttggctgtgcacagcggctggggttttattgcatttgtttgggagattcttagacaaagcactgcttcttgaagttaagttccagggaaagcagcgcagtataaggaaatcg

SEQ ID NO: 24821 - DNA, 120 bp, Homo sapiens
cagcgtctgttcacaatgggctctgaggctcgttcactggtgaaaaaacaaattgttgaggaccttctatctaacagagcccaggccctggactagcgggtgcaggtgctgcagggaaca

SEQ ID NO: 24822 - DNA, 120 bp, Homo sapiens
agccgctgtcttcaagaagcattccagtagcaggagtgagactcacttaagcaaacacatgcagagcccgtcagatggggatagggctatggaggtgatgtgtggaagcgtggagcagag

SEQ ID NO: 24823 - DNA, 120 bp, Homo sapiens
ttccgtttaacctcggccacttcaggaacgctgcttctgtcagcttcctcctggcgctgctttaacctaaaggactgaggaaatcagaactcccagaagctttttcaaaaagtcataaaa

SEQ ID NO: 24824 - DNA, 120 bp, Homo sapiens
aatcgcctcttcctagggacaagccgcccgctgagctagcaaggaatgcatttcagttcatccacttccggcagttcacagctccacagtgacacggaatcttgtgctggtcatcttcaa

SEQ ID NO: 24825 - DNA, 120 bp, Homo sapiens
ccacggcaaagacacagggtaagaaaggacagcaaggaaggcaatagcgtttctgcctccatctcccttgcattttaaaaccagcaaacgaaacagacgtaaattaaggaagacctgatt

SEQ ID NO: 24826 - DNA, 120 bp, Homo sapiens
aggcgacaccacccctgctccaaggatgtactctgatcgacactttccattcttctggccatagtcattgggtgacttgggggctctgaactggaatgccggaacagaagtacactctct

SEQ ID NO: 24827 - DNA, 120 bp, Homo sapiens
ccacgttggcttccctctcatttacgtactcgtgaatatttgcagggtacatcgcctgaggactaggagcaggtgactgatttgtattgcagctgaaactgtggaaagagggtggagggt

SEQ ID NO: 24828 - DNA, 120 bp, Homo sapiens
gaccgagggcacgtttttaggtgtgatgctgttgatgaaaactcatctagaatgttggacacaactgagaaaacaccatcagctggatgtggtggctcatgcccgtaatcccagcacttt

SEQ ID NO: 24829 - DNA, 120 bp, Homo sapiens
caccgccctgggacgacaaaggcgattgtaatccaggtttaggagatggcccttgtcaggctgcctgggcggctgtaggtgcggtggataccggtaagcactgtaccatactgcatccaa

SEQ ID NO: 24830 - DNA, 120 bp, Homo sapiens
ctacgtctctaccagtcgttaaatagatgctgctccatctctccccacgccccaaaatctgcctcttctggcccctctctagggatctcctggagcttcttaaaatccagctgctaaagg

SEQ ID NO: 24831 - DNA, 120 bp, Homo sapiens
atccgttgttagacattttgaatattgcccctgcttataccgatgactgtaatatgtgttggcagagacatctggaaggagctctgccatggcaatgcttgaaggctgatccactgaata

SEQ ID NO: 24832 - DNA, 120 bp, Homo sapiens
acccgttcctagacatcgaaatttgatttattaacattggcagcagatacgggccatcttgccaacaaactttctgaaattgaaatcgcatgaaactttcctagttcctgctagtgccac

SEQ ID NO: 24833 - DNA, 120 bp, Homo sapiens
atacgcccttttctttctaaggcagcaaattcacttaaaaataattaagaaaagattgatgggattttggaattgtaatgaaaaatatgatctcattagtaagtcatgagtcagggccag

SEQ ID NO: 24834 - DNA, 120 bp, Homo sapiens
gtacgcacttctgcataattagaagctgatgcaaggagaactaataatggcatgaattaaaaaattaaaatggtttccctttatacttttttggctgtgctgaaattcttccttttgcaa

SEQ ID NO: 24835 - DNA, 120 bp, Homo sapiens
agccgcgtgtcctctgttgaagtgcacctgccagggtcaccacacagtgacgatagcaaggcctgtgcatcctcacggtttgttttgtcatcacttagtggctcctttccagttaccatg

SEQ ID NO: 24836 - DNA, 120 bp, Homo sapiens
tctcgaattcctgacctcaagtgattcgccttataatcacttgtgtgctcgtctgatgtgatggcatggtaagaaaatgagactgggccgagcgtggtagctactgcctgtaatcccagc

SEQ ID NO: 24837 - DNA, 120 bp, Homo sapiens
aaacgatcaagaacaggtaaacatccatgaggcacaactcccagtacttgacaggtgcagcatgcatcctgggccagggtggcacagccctccgcccactcagcactagctggaggcagg

SEQ ID NO: 24838 - DNA, 120 bp, Homo sapiens
ctccgcccagcaaactggacacccgccctggcccagagagcatctggggacagattgacttctttcccgccttgtcttctgaaatttcagtgcccaaggaacattttaaacagaactcac

SEQ ID NO: 24839 - DNA, 120 bp, Homo sapiens
aaccgtctttcatgctccagcgacctctgctcacggtgccaggcatcagaacccccgcaggcactgaggcttagagtcgggccatggagccacccacaggtggggcacacctggaagcag

SEQ ID NO: 24840 - DNA, 120 bp, Homo sapiens
gcacgtgggagcctgcagggggtccgcagtgacagggaaccctctccagagctcagcaccaggccaggggtggacactgagatgctggaggaactgaaaagggtggggcacgcagcaggc

SEQ ID NO: 24841 - DNA, 120 bp, Homo sapiens
caccggggctgagcactctctggcattcccagaaccctcctggcaacccagggccaaagtgccaaccctgacccggctgcagcactcctgcctccacagtgagatccagctaaccaggtg

SEQ ID NO: 24842 - DNA, 120 bp, Homo sapiens
acccgcagctccctgcgactctgatcaagatgtaagggcatacatcaccttggtgagcagcaggacccgtttctggagcctccgggccagcgcctcgtgggtctcgcgcttcttcctctc

SEQ ID NO: 24843 - DNA, 120 bp, Homo sapiens
ggccgctgacctgccggagctcctcctgcagctgctgcctggccttctccagcccccgggcgctgcatgggagagacaagagggcaaagcaatgaagcctggggtgaccaccccaccaag

SEQ ID NO: 24844 - DNA, 120 bp, Homo sapiens
ccccgccccaccccaggaacgagcccaccaggacatcctaaaatagagctgcacgtgcaaccccctcactgccatttccgcactgctgaatagctacttaaggcctttcaggagtttctg

SEQ ID NO: 24845 - DNA, 120 bp, Homo sapiens
acacggcagggagggggaagggagctcaactccacacacaatgggaaaaattgtcggcgacgcagcccttcaggagacgggacttctgaatgagcgagattgcagagccagcgcttcccc

SEQ ID NO: 24846 - DNA, 120 bp, Homo sapiens
caccgcagatgtgcagcgtggtgcggggaagcaagcgccaggcgcctggttggggggcctgttctaaaaacattctgtgaggttgaaagcccagcctggcgctaagcactgggaacccga

SEQ ID NO: 24847 - DNA, 120 bp, Homo sapiens
ggccgacgccagaggcagggccaactccaggctgcccaagaggcctctccctgtccgccccttcgggtggctgatggttcctttcaattctgcttttgaaacctcccttttccctgcatg

SEQ ID NO: 24848 - DNA, 120 bp, Homo sapiens
gctcgttgcctgtcacctacgttaccacaatagcctcccaacggctctcactagacccctctgccactgggcaccaagctgtctcctcagacagcagagaggggctgggtcatgcgattt

SEQ ID NO: 24849 - DNA, 120 bp, Homo sapiens
ttccgagttcgtggcctggcagtagcgggcctcaggggtttggatcttgcccctctctctctgtccttcaggagctgacttgggaccggacaaatgacagcgtccactgaccctgactgc

SEQ ID NO: 24850 - DNA, 120 bp, Homo sapiens
caacggctttctgtgattccgggaaccccaggactccacctcctcacgggaggggctcccaggaagggcacagtgaggcgcagagaggagaggctgtcccagggagagggtgagtcagga

SEQ ID NO: 24851 - DNA, 120 bp, Homo sapiens
agccgggcacacaggtgctcccaggaagggacacagccaggagagatgagaggccgcccgagaggaggagagtcaggactccacagtgaggtacgagagctctcccaggaaaggacacag

SEQ ID NO: 24852 - DNA, 120 bp, Homo sapiens
caccggggagggtgcgagtccgcggagggagggcccatccctactcagacagcccaggcaggcgcagagcggaacggcgctggaacacgggagctgcacacgactctattgagtaccaca

SEQ ID NO: 24853 - DNA, 120 bp, Homo sapiens
ggccggggtggggaggtggggaggctctgagccggtggtggaaagcggcctgtgggcagaggagtcacttggggccagggttgccacactgggctccttgccccttcctcatctggatca

SEQ ID NO: 24854 - DNA, 120 bp, Homo sapiens
tagcgaaagtccatcgagttccctcaaactgacgcgtaaaggaacgaaaatcacagcatccacgtatcagtcccactccaccaacacttctccaatttccagaacgccatcgtgcgaccc

SEQ ID NO: 24855 - DNA, 120 bp, Homo sapiens
acccgggaaacctcaggacacatctcagctggaggacaccagcctgtggagggactgtgggtctcagggactgccaaaaatccccgcatcgggccggaacccaccccacacaggaggcgg

SEQ ID NO: 24856 - DNA, 120 bp, Homo sapiens
gggcgctccctgcatcactgcagcccaggacaccatcatgcaccccttcactccctcgaccagccagcaggccccaggacttctctcttccgggctctgtcctccacacaggggtccgcc

SEQ ID NO: 24857 - DNA, 120 bp, Homo sapiens
cgccgtcactgttccagcccccgtggtcggcggagcacaacggcccaggcccggcggagggggcaggagctaagtgcgagggagaaaagccggagcacaggttagagaggggaaggccgc

SEQ ID NO: 24858 - DNA, 120 bp, Homo sapiens
aagcgggagacacacctgccgtcagggtggggaggctgggccttcatgcgagtggccaacagagatcacgggacccctggggagacagcagggcacgcctgacatggccccaaggtcagg

SEQ ID NO: 24859 - DNA, 120 bp, Homo sapiens
gaccgaggaataaagaacggagaacaagctcccgggaacacctgcgcaggagatgccagagaaagggaagggaggcaggagggggaggggacggggaccaggaggccatgtgtgagtgtg

SEQ ID NO: 24860 - DNA, 120 bp, Homo sapiens
gcacgggaaaccagaaaagccagggaaggagggagggaagggaaggagagcggggaccatggggccgtgtgtgagacagagtgcaggagggagaagggagagagcgggagagacaggagg

SEQ ID NO: 24861 - DNA, 120 bp, Homo sapiens
agccgggcctgggagctcagcggagctgctgtcggagccgtgacttcagcaccatgtggccagtgaatcagagccgtgaggcatggagctgggctctggccggcgtcgccgggtctggtg

SEQ ID NO: 24862 - DNA, 120 bp, Homo sapiens
ccccgtttaactgaggcttgcatcaaattagacaaatagttaaaagaagaggcaaagcgatctctgtggcgtctctctttggaatcacccgatagcccaattagcagctctgaagctgag

SEQ ID NO: 24863 - DNA, 120 bp, Homo sapiens
gcccggcgcctgcactcggcccagcctccgcccacgcctgtgcgccgcacgaccactccagctgcttcagcgctacctgggtaatgaagcacattcggcctgtttattttcccattgatt

SEQ ID NO: 24864 - DNA, 120 bp, Homo sapiens
ccccgttaggtgtggcaccttcatggggcctctgctgtctctcgcgctgcagggagagctcccctgcccgtcaatcaggaacgggtggcacaggcccccagggggaagagccgtccctcc

SEQ ID NO: 24865 - DNA, 120 bp, Homo sapiens
cagcgccgtcctctgccaaagccccgtagcaccagagcgccagtcacacaccaggcctctgcgcagaaggcgcatggcaaacaccctccgtccacagatgaggcctgcgcagcacacgcc

SEQ ID NO: 24866 - DNA, 120 bp, Homo sapiens
ccacggggacccaggtgctcagtccagacaggaacaagagacctcgggccctaaaccctgtgacaaccagacacaaagtgggcaagagtccctcccactcaccgcagagatccaaatagc

SEQ ID NO: 24867 - DNA, 120 bp, Homo sapiens
tgccgtacgcagcagcagtcacccaagccatcatgtgtatggtctcttgcctggttaacaagtcaggaaggctacgctaaggacggccccctcaaacaaatgggcagggagcacagcacg

SEQ ID NO: 24868 - DNA, 120 bp, Homo sapiens
acacgtccatccagcacagccctggtcacggaggacacggcacatgcaagagccgcctgctgccactgctccaggaggcccaagggagcgcactaccacacccgatagctgcccggcatg

SEQ ID NO: 24869 - DNA, 120 bp, Homo sapiens
acacgccaggcatcacgcaccaaggcccggcgtccccagaggtgggcccaaggggaaatggaggaacagaaggaaagcccctggagggccaaataaaggggtcagaaaagacgctactcg

SEQ ID NO: 24870 - DNA, 120 bp, Homo sapiens
tgccggaatgtctggggatggagggcaccctggcatggacacggaggcctcctgacacgatgggtggcaagggtgacagaaacacaagtgaccccagtgcacgtggctgaagagggtgag

SEQ ID NO: 24871 - DNA, 120 bp, Homo sapiens
aagcgcagtggtagcacagcctcccatggtccaggaaggagcatcccccaacgcaccgctaacactggtgaccagactccaccccgaccgccaggtcaacatgcagcagccacagcctgt

SEQ ID NO: 24872 - DNA, 120 bp, Homo sapiens
ccccgcctgccctgtgcactccggcgcccggcccactgtggagggtgcaggtcaggtgctcgctctgttcctcaacaggagttgtttcccgcagcccctgccgccttggcttcgttagca

SEQ ID NO: 24873 - DNA, 120 bp, Homo sapiens
tctcgctgccttcttttgtgcagcagagataagtaatgtttctaatctgtgctatctcccagctgcaaatgttcaagcacttttttctttttatttaaaaaaatgaaatctcattttaga

SEQ ID NO: 24874 - DNA, 120 bp, Homo sapiens
acccgccacccagaggccaggcgggagcgtggacggaagtgagcgcatcgggctgggagacagccgaatctcagaagtcagcactgggagattcatttctcttctcttcaaaaaacccat

SEQ ID NO: 24875 - DNA, 120 bp, Homo sapiens
agacgtggttcagaagaggtactcctacccgagacccaggaagcacccgggccgtggcttcctgtgaacagtcctcaggcgtgagctctcaaccctgcagggaggagcccctggtaggcc

SEQ ID NO: 24876 - DNA, 120 bp, Homo sapiens
tgccgactgtgaggagtcacctcccaccagcccagccctcgatgccccaggcatgactcagaagaaccagcaccaatgctcttggtgtcatctgggctaacctagcacatggattttcaa

SEQ ID NO: 24877 - DNA, 120 bp, Homo sapiens
cttcgcccccagccacacaaagcccaaaaccgtctcagggacatgggcatttaataactacctgttgatggataaggacataggtgagaagcaaatcccaggcaaccattgaggtttgag

SEQ ID NO: 24878 - DNA, 120 bp, Homo sapiens
ttacgacggccagcgcagtcagctgcaagtactttctgttccagaccagcagggaaaatgaggaggaaaaggtctcaaagcccagcctgtttctgagcagagctaggaatcccagctgac

SEQ ID NO: 24879 - DNA, 120 bp, Homo sapiens
ctccgcgttctcctttactcttgaaactctatggcagaaagcacggccttttgaccttgagccttctgacagatagtaagaagcatgccacagccaggcgcttctgagcgtgaagcacct

SEQ ID NO: 24880 - DNA, 120 bp, Homo sapiens
tgccgctttgcttctgctttaccctacccacctgcccacccggcgcgtctgcctcgtcctggcaggacaagccctgagcgggccctgcaccatctgcaggcctcctgacacctgagagca

SEQ ID NO: 24881 - DNA, 120 bp, Homo sapiens
gtccgtgtcctgggccctggctgcaaaccggaaggcgtccttggaaacggccgcactgggccagcacacagcaagcagggagagtgggagccgcgtccacccaagccccaggtcctggcc

SEQ ID NO: 24882 - DNA, 120 bp, Homo sapiens
ggccgcaaatcatcacttcatcttggcagctcattctgtttttatcatcagttttaaataattaagctggccctgaagggggttggagggtgggaggggaacagctcgttgcccaaggcc

SEQ ID NO: 24883 - DNA, 120 bp, Homo sapiens
cagcgactggaggcgcggctccagcatgactcctgtcgggaggggcgcaggggcctccagtgccccccacctccactctgcagacacgcctgacaacttgacgttggtgttaaagtcgta

SEQ ID NO: 24884 - DNA, 120 bp, Homo sapiens
taacgaagcctcatttgcacgtgtcaggggaagagaaaaatcacctaattaaccactttccccatcagcaagaggatggggggagtgctgccaatttgttttcaacggcttccttcccac

SEQ ID NO: 24885 - DNA, 120 bp, Homo sapiens
atgcgggcttttgtgctatggggtctgccctggggggaagggccacagccactgtgcctggcgcgagactggggctccactcctaaagggtctccattcaggtgggtggcatgagactgg

SEQ ID NO: 24886 - DNA, 120 bp, Homo sapiens
atccgggtgcctggcgtgagactggggctccattcctaaagggcctccatccaggaggctgtgcacctggaccctgagagccagtaaagaacaaagacgcttcttccctcaacttaccaa

SEQ ID NO: 24887 - DNA, 120 bp, Homo sapiens
taccggctccatgctcaccaaagtgaacagcttctatgctgctcacccactagactgttggctccgtgcacacagggccacagctgtctcagtcaccatcacagcccaagctggcccacg

SEQ ID NO: 24888 - DNA, 120 bp, Homo sapiens
cctcgctgaccttggaccctcctgtctgactcaggactgagtctccccagcagaagaggctgagagcacaggataaggtgaaaacgcaggctaggtcctggcaccagtcacagggcagac

SEQ ID NO: 24889 - DNA, 120 bp, Homo sapiens
tcacgtcaccatcaccaccaccgtcaccatcacaactgtcaccatcactctcaccacatccccatcaccactgtcaccatcggtgacaccacggtctccaccaccctcgcaccatcatcg

SEQ ID NO: 24890 - DNA, 120 bp, Homo sapiens
caccgtcaccagcactctcaccacgtccccaccatcaccactgtcaccatcagtgacaccacggtcaccgccaccctcgcaccatcatggccgtcaccgtctccaccgtcaccagcactc

SEQ ID NO: 24891 - DNA, 120 bp, Homo sapiens
ccacgccatcctcagcatgagacgcatccttgtcactccagagacaatgcccagagatggcgtcttctcctacccactcctaaagcgggcctctcctcaggtgtataaggcacacggaga

SEQ ID NO: 24892 - DNA, 120 bp, Homo sapiens
gttcggcagaggtggcactgtcccctctcaggacatcagctccacaactcagaggaggcagcctccgtgatgctgccaacacctgggtcagcgctgggtcaggcctggccacgctgcctg

SEQ ID NO: 24893 - DNA, 120 bp, Homo sapiens
agacgcgcgtcctctcccacctcagggcccctgcgcttgctgctgcctctgcctggaacgggctctctcccctgcccctgcaccctacaaaggggcagctccgaccacgcttcagctctc

SEQ ID NO: 24894 - DNA, 120 bp, Homo sapiens
ggccgtccatccggccacgctgagggccgggtcgcagcccaagccatggctgccccgacgggccctgcacacacagtcatacctgcgctcctgcactcagtgaaggcctgggcctgcctg

SEQ ID NO: 24895 - DNA, 120 bp, Homo sapiens
ccccgccgctcagtagacggcacatgggacatcgccatgcctagtgatgacgtttctgtttggaagaagtgggtgagcacctgagaggacagagggtgaggcgatacagcagtgcagcag

SEQ ID NO: 24896 - DNA, 120 bp, Homo sapiens
acccgcccccgaggccactgcacagcggcggggctctcgaccaccgtgctctttgttgggcggggcaaccgcagatgggccagcactggggcaaagcccaccaccaggcagccctgggag

SEQ ID NO: 24897 - DNA, 120 bp, Homo sapiens
ctgcgaaggcctctcaggagccgggcagcacagccagaacactgagactcgatcccacaggggagaaggagggagcggccacgaggaggagccagggaggcggctactcagagggcaggt

SEQ ID NO: 24898 - DNA, 120 bp, Homo sapiens
gcacggagtccctccgcatccccaggcagagggacagtctcacaggtggtgtccggactctggagatggggtgggaaaaggcaaggaatgcggggagaccaccagttctgatgccacgcc

SEQ ID NO: 24899 - DNA, 120 bp, Homo sapiens
ccccgctggacgtcggagaaagaggcccccagacacatggcagagaatcaaatatgcagccggtgtctggaaatcattcaatgaaggtaaggagtgtgctcctcagcagcctgccttgag

SEQ ID NO: 24900 - DNA, 120 bp, Homo sapiens
tctcgtggcagataagtaatgatcagagctctccgggccaactgcacaacaggccatatctgttattaaaggcatgctgctttgatgaccagaaacctggattagaaccacggcaggctg

SEQ ID NO: 24901 - DNA, 120 bp, Homo sapiens
gtgcgaatgccaaatcaaccttcccggaaagataaaggccaccgcatcgaatccgatctttctaatgatgcattaagcctctcgcagaaggatgctgagatctgctaagcttccctaaac

SEQ ID NO: 24902 - DNA, 120 bp, Homo sapiens
cagcgtgtcagccttcttcgggccccagagcggaccctgcacacgataaacactcatcccaggcacttcaggaatctgcaaaggcagtcttggcccaaatgcttaaaaacagaagggacg

SEQ ID NO: 24903 - DNA, 120 bp, Homo sapiens
ttacgcaccataaaatcagttctattcatggtgaggaaatacggaaaggcagtaaaattggcagagcatggagatgagaggacactaaactccctggctctctaaggaaacagggagcag

SEQ ID NO: 24904 - DNA, 120 bp, Homo sapiens
aagcgctgcttctgttccccgacgagcttgtcagtcccaggggacctctgcgcaggcactgatggtgtccttgctcaaggcctcccagctcatcctcacaaatgtgctggaacattcgtg

SEQ ID NO: 24905 - DNA, 120 bp, Homo sapiens
acacgcctccccaggggtgctctgtgcccttcagcccccatcagcccttgtcctcaccctggcccgagctggctcaggctgggaaggtcagcaggatgtgacagccatcgcacctggggt

SEQ ID NO: 24906 - DNA, 120 bp, Homo sapiens
tttcggcaactggcagtcacacaagtcctgtgagccccccacaagggcctgaccatgcacacgtgaaatgatggagggctgctcaggtgcctctaatggaaaggctggtgaaagatgtgc

SEQ ID NO: 24907 - DNA, 120 bp, Homo sapiens
gcccgaggacccatccttgttcttctcttcacctgtcatggaccaagcgcaggtccacatagaaagcaggcgctggcaatgctgtgagagccccacccagccccactcagggagcccgca

SEQ ID NO: 24908 - DNA, 120 bp, Homo sapiens
caccgcaccactgaatgagcaacggggaccccgacattggccaaggaggctacctgcacccctggaaggagaggtcccagtcactctgtcagccaggcccccagagcagcctcgggtgga

SEQ ID NO: 24909 - DNA, 120 bp, Homo sapiens
tcccgggcacaccctcccagcagcctgcccgggagctcctctctgcgagtcagccacggccacggagaggcacactgcaaccacggacccctaacagaagccatcctgctgcctaaaacg

SEQ ID NO: 24910 - DNA, 120 bp, Homo sapiens
acgcgcacgctgcaaacctcacgcactgggcccgaccagactctgccctgagacagccactgacctttcctgtcacttgagcaccctacccatgggcccccgaaaccctcatcagctcat

SEQ ID NO: 24911 - DNA, 120 bp, Homo sapiens
cagcgctcacacagcccctcccccggtcttccagcacccagctcctcctccaaacagaggaagggccacttccttacagtgtctctggccacccccacgcccctcgccatcccatgcctg

SEQ ID NO: 24912 - DNA, 120 bp, Homo sapiens
gcacggcacagaggacagctggaggccgccttgcccagcattagtttggtgtttctggagtgtcttccatcactggaacaaagctaccaagagcctgtgagcagatgtcctgcggcctgg

SEQ ID NO: 24913 - DNA, 120 bp, Homo sapiens
gcacgccacggccttctcccttccacgtcccccagagaggcctcctctgcccacccaaagaacaggccccttgctgaacatctagtggggacagcgatgggtgcagaaggagtagctggc

SEQ ID NO: 24914 - DNA, 120 bp, Homo sapiens
caccggggagaccccatctgtcctcacacacacaggcaaaccggggttagaaagcagctccgtggaaaaaccatttatgactgaaagaccttggaagagaaactgaactctaggacagag

SEQ ID NO: 24915 - DNA, 120 bp, Homo sapiens
gaacgccgtgaccattctctccagtttcccaaagcttccaacctcagggagttaaaaatatcagtacgaaagtaaggaaacctttccaagccaagagatattttttctgaaacatttgaa

SEQ ID NO: 24916 - DNA, 120 bp, Homo sapiens
aatcgcatatatccacatctgcaacggcgcctcccagcccctgtgcccagaaccagcggcaggtggggtggtcacaggcggcaggctacaggctccacctacacagccaagaccaccccg

SEQ ID NO: 24917 - DNA, 120 bp, Homo sapiens
caccgatttagaaacaagcttcttgccccaaggtacgaacccacccagcaaagctgggagctggggtaagatctcagagggccaggctctgctaaccatgttctgcgattcccagtgatg

SEQ ID NO: 24918 - DNA, 120 bp, Homo sapiens
gggcgcccacagatggcacacgcaccaggcagtctcctacgtcacccaggaaggcctctgtctcatgtcatggggtcaacgcctcattctggcactgatgggccacaggagaaacctgag

SEQ ID NO: 24919 - DNA, 120 bp, Homo sapiens
ccccggggcatccatctccatcacccaaggagcaggctggctctccacattcccaccgactctgcaggaggctgcttccgggtggctcccctgcacgctcctccttgcctgaggtgggtg

SEQ ID NO: 24920 - DNA, 120 bp, Homo sapiens
tggcgcctgaggcggatggtcccacacagaccccagccctcgggagcactgtcacgtgatgggctctcagcctggatacttgctggccacatccctaggcccccagatccctgccggctc

SEQ ID NO: 24921 - DNA, 120 bp, Homo sapiens
atgcgaccaggcccccatcatagggaggactgaagctgcagggcttgctattccagagccctccaaccacaggggcagccgtgcccaacacctcccacgggcagaagccgctggagggca

SEQ ID NO: 24922 - DNA, 120 bp, Homo sapiens
cttcgcagcctcttgcgctgaaaaacccgcagtcaccactttggctaaaccaagcctcacgagccctgtctggccattcttgctcatgaccagggttcagcttccactcaaaagcacaag

SEQ ID NO: 24923 - DNA, 120 bp, Homo sapiens
gctcgatgacagccttcaagaacgtcacacgggaccagtctactctacttgcagagacagagggaaggccaggacatccttaaaggaaaaggagatggacccatgggagaaaacctgggt

SEQ ID NO: 24924 - DNA, 120 bp, Homo sapiens
gctcggctgggcttcctaaggctcacttccaaaaccctacggcacaggtacagtgcactgctattacctgacaatccctatgccgttaactttatggatgtggaagggacagggaggctg

SEQ ID NO: 24925 - DNA, 120 bp, Homo sapiens
agccgtcagcatgaacccacggtcacactctgggatgcgagccaccatgggaggatgctgctgcctgccgcactccagccaccaggaccaccctctgcagagcgggaagaagcagccgtg

SEQ ID NO: 24926 - DNA, 120 bp, Homo sapiens
aaacgtggtccaggggagaggggactctgcgccgtgtttcactaaaccaaggtggtgtccacggcacgaaacgaccaaaacacgcgtctcagctcaacagaatggaaggggtgggacaag

SEQ ID NO: 24927 - DNA, 120 bp, Homo sapiens
tgacgggcaaggtggctggaggctcagggcgagacagagtgcccctgaggaccacggtggggcttggagcaacatggccatggctggatggccaccccatgctgcccacagccccgctga

SEQ ID NO: 24928 - DNA, 120 bp, Homo sapiens
gtacgcagaatgaccggcccccagggtacacctgtgcctggaactccagtgtggttactgtgggtccacatgctctgcgaaagaggaagtaagtcctggggtccatactgatgaacgtct

SEQ ID NO: 24929 - DNA, 120 bp, Homo sapiens
acacgttctcccatgtggaaacttctgacaagaacaggccgccagcagcaaagtccacgccaccacgactgtgacgtggtccatccagacctcgcctcccaggaggggatcccgccgcag

SEQ ID NO: 24930 - DNA, 120 bp, Homo sapiens
tgccggctttacagttgctgccctcgcactctttctcccagctcaggaaggatctcaagggcttcaaagcagcctgggttccaattaagcccgtgtgaccaccccagggatgccagaaca

SEQ ID NO: 24931 - DNA, 120 bp, Homo sapiens
aggcgctgtttgaactgttcaagctaaaaaaaagccctcagaacctttcaaacaaatgccataattttctctccctgtttcctcactctttggaaaagctgatcttttgaatgctttaaa

SEQ ID NO: 24932 - DNA, 120 bp, Homo sapiens
aaacgttcaaaaagaaagctagataatggccccaaacacaacttcggcaagaagctcagaacaggggcagcaagtggagagcttgggatgcaaccacacacaagcaggcccgcttccggg

SEQ ID NO: 24933 - DNA, 120 bp, Homo sapiens
aggcgtggcccggccggcctgaggctgtgacagcgtgtgtccactgtccacagcagctgggccgggagaatgacctgggcggaaccacgcctggcagggagctgcagggcctccatcatc

SEQ ID NO: 24934 - DNA, 120 bp, Homo sapiens
aggcgaacccagtgacaagggcctcaaacagaagaggcccagggaagggcagcccatgggcctgagaagcaccactacacacctgggcggcgcactccgctcacaaagcactcttccagg

SEQ ID NO: 24935 - DNA, 120 bp, Homo sapiens
ccccgggctgctggagactgaaccggaatctgcctaactggtggaatccccttttacaaagaagtgcctgtagctcacggggctagaacccaggaaggccccaggtgagctcgaaaccct

SEQ ID NO: 24936 - DNA, 120 bp, Homo sapiens
ccccgctgtggacagtggcatcgcagataggagagtgccggtgaaacagtaagaccagggcagcatgcttcactgggcaacggaggtgctgctgcaagtgggcgcagtagcaggcaggtc

SEQ ID NO: 24937 - DNA, 120 bp, Homo sapiens
acacgccccacagggagcccaaactgaggctgacaggtgcaggctcacaaaccatcggcccaagccacgccccagcatactcacttgcccaagcaaccggggtgagacaagggccaccca

SEQ ID NO: 24938 - DNA, 120 bp, Homo sapiens
ctccgacagccaccacgtcctggagagaaagcgtccccgcccagaggacggtccttgtcctagaacagcaaggccctccaactcttggtcctcaaagcccttccccgcctccgcacccag

SEQ ID NO: 24939 - DNA, 120 bp, Homo sapiens
gaccgtgcgtcctgctctctgctgcatctcccagccagtatacaccacggtacgtcataagccctcaacaaatatttgttgaatggaacagacgtgatcacaatatgtgctcctgggaac

SEQ ID NO: 24940 - DNA, 120 bp, Homo sapiens
cctcggctaccagaaaaaaaggcgagacagaaatgagcacttctcaaccctgggagcaaatttataagggttttatcccttcaaaattattaccaaggggtaacacggccgcgggtaact

SEQ ID NO: 24941 - DNA, 120 bp, Homo sapiens
ctccggaaaacctcactgtgcactgccaaggctccagccagagcaggtgctgagccgcgatccgggagacgccagtctcaccctaggctctcttccacaaccaccctcaggcaaggccac

SEQ ID NO: 24942 - DNA, 120 bp, Homo sapiens
cgtctggctcaggggcgctaaagggagaccccagctcttaactcacaatgctcaggattgagaggatgcgtttacggaaaaccaacacaaccccaaggcagaaagcggccaggactcagc

SEQ ID NO: 24943 - DNA, 120 bp, Homo sapiens
caccgtgctcggacggagctgggaacctggctcacgccccaccctggcctgcacctctggagggcagcacactcgccactctccagctccagggtcctgggacctgcacaccacagacgc

SEQ ID NO: 24944 - DNA, 120 bp, Homo sapiens
gaacgaatgaacaaacgaaaaggggaaacgtggcccagaccacgaggcatccggcatgcaggcccagaagaagggccatgctcacacaagtagccagaaggccaaacgcttctccccctc

SEQ ID NO: 24945 - DNA, 120 bp, Homo sapiens
aaccggcgccaattaaaatggaccaacatacctgacagtcgcccaccttcccaagcaccaccagggcgtctggtattgatcaactcaacagccgggtaattacaaatcacgcgcacggta

SEQ ID NO: 24946 - DNA, 120 bp, Homo sapiens
gcccgcctcccacctccccagcccagcctcctctgcagcccctcctcaccccctcaggcctgcccttgctgacgggtataatgcccacccgccgggatgggaagcaaggccagattcagg

SEQ ID NO: 24947 - DNA, 120 bp, Homo sapiens
caacgggacaggcaaggagccaaaaacagcggcatcttggccacgagcaaatgatttcctccctgaagtgggggctcggctacaggacttgacacccactcccttcctatttcatagggt

SEQ ID NO: 24948 - DNA, 120 bp, Homo sapiens
cttcgagctgaatctctctagaaacgttgaaagcacaccacccccattaggtgacggcagtcacacgccgtgacgggagcgcacagcactcatgcttttcgggagggcggtgtggcacca

SEQ ID NO: 24949 - DNA, 120 bp, Homo sapiens
aaacgcacatctcttttgaactaaaaatcatccttttaagaatttacccaaccagcatagcatggctaattggggaaagaagctggaaacaccctaagtgtccatcaacaggggctgctg

SEQ ID NO: 24950 - DNA, 120 bp, Homo sapiens
gtccgtctgcactccagcacaccctgcagttctttaaagtagttcagcagaccagcctgcgctggggccaaaaaactgtcaaaaactgagtgaaaacagttgcagaataaaactgtggaa

SEQ ID NO: 24951 - DNA, 120 bp, Homo sapiens
gaacgacacacaggaaactcatcaggcattgcctagaaagacgaaccggggccaagcacagcacgccctgctgcccacctccggggcaatcagttctattctggaacagccccccaggaa

SEQ ID NO: 24952 - DNA, 120 bp, Homo sapiens
tgacgatggctaggaagctgtgacacagggcacccagccctgagtgaggtcaccagggagggcaggaaaggaagaacacgttccacttttcattccattcatttgcatttatgcagcttg

SEQ ID NO: 24953 - DNA, 120 bp, Homo sapiens
tgacgtaacaaagacccaggaggtgcacgcagccgtggccgtaggccttccataaactcaggggatgggtccctccccaaatgaaggctggcttaaacagcacccccaggccactctcca

SEQ ID NO: 24954 - DNA, 120 bp, Homo sapiens
agtcgccactaaggaattttccttcccctcacagctaatccgaagagctgaccgtctgctgttgacaggccagcttgagtgaggtatgatctgcgcacgtgaacagtttgacaagagcag

SEQ ID NO: 24955 - DNA, 120 bp, Homo sapiens
ccccgaggtgggcagctggcccagggcagagacacacatgctcagtgccacaagctggggatgtgtcctcttaaaacccccctgcacagtgtgggaagctgaggctcggccaagggctct

SEQ ID NO: 24956 - DNA, 120 bp, Homo sapiens
gaacgcctcataggctagtcccctcccctgcccaactttcatacacgtttaataacagttgttcacacatgtttattgataaaccgtccaaaatgtaggtcatgtgtaaacaattccagt

SEQ ID NO: 24957 - DNA, 120 bp, Homo sapiens
acccgcaaagcaagggcaaaggcctcagatgcacagagctgccctgacatcccttggctcggagtccctgtgccccatgtcagagccctaaacctgtctcccctgcctgcactgtgtccg

SEQ ID NO: 24958 - DNA, 120 bp, Homo sapiens
gcacggtgaccccgagtacccaggacacggaccacgaggacccaatgaaaatgtcccctttcaccatgatcggcagcccccttcccacagccccgccagcccacaacccccctcccacgg

SEQ ID NO: 24959 - DNA, 120 bp, Homo sapiens
ccccgccagccgtcctcacagggcaggcggcatctggcatctccaccagcatcacacgcagctgtccctgccagctaggcaaggccgtaatgaccggcacaagcttgggcttgggccgtg

SEQ ID NO: 24960 - DNA, 120 bp, Homo sapiens
ccccgctctccctccggcatggggcctccacctgcagcagtaagcagcctctcagcccctgagcctggggacctgcccgggcagcacagggccagggccaagaagtatttgtgagaagga

SEQ ID NO: 24961 - DNA, 120 bp, Homo sapiens
ctccgccacccctgcctagcaggcctctttctgctgccctttagaaggcactgggtggcagaggaggaaggggagggaggtgttccaaagccagtgcccacccctccacagagccaaccc

SEQ ID NO: 24962 - DNA, 120 bp, Homo sapiens
ggacgcaggatgggatctggctcagagagatcctggctgaaatccagcctccatcatttcctagctttgtggcctagcacgcagccgcctctgagcttactgttcaaatccgtgcggtgg

SEQ ID NO: 24963 - DNA, 120 bp, Homo sapiens
catcgccatctatgccctgatactacagcaaccccccacaggcccctcgaacgacagcccctccccactccaacccttctggcaccaaactgcttcactgtgggcttcagacccaacccg

SEQ ID NO: 24964 - DNA, 120 bp, Homo sapiens
tgccgctcactatctgtgagaccctgggagggaagcagcccctcagatcccaggccaagggcctcagaattcagtgaggtgggagagctgaaaataactagcaaatagaaaacattcaat

SEQ ID NO: 24965 - DNA, 120 bp, Homo sapiens
ccacgctccaatccgaaaagattctgcagatctacccactaaaactcagaatgcattcccctctcagcaagttttcggtggcggtcagctcccagactggctcacaaattggtgccttcc

SEQ ID NO: 24966 - DNA, 120 bp, Homo sapiens
atgcggtgaggggcaaagtcaggcccaagtcagccgccggcccactgtgacccctctttgcaacaaaaaaaggggaaacaacccacaagcaacattcaagatcctttcagcctcacaagt

SEQ ID NO: 24967 - DNA, 120 bp, Homo sapiens
aagcgagttatccacaaatcagaaggtaacgaaacttcaaacacacacacccatctcccgcccagtgtctttcaccaggaacttcagacagtaacaacacagagcaggtgagcactacat

SEQ ID NO: 24968 - DNA, 120 bp, Homo sapiens
atacgtagattacttctggaattgggaagagtcagaggatgctaatatgacgacagggttggccaggctgggtgacggctgtgggtcctcagcgggcccacgtggccctgaaggtgcagt

SEQ ID NO: 24969 - DNA, 120 bp, Homo sapiens
agccgactttgtcatggccctcctggttgtggtaacgcaggttttgtgctttatgagaagagctgcccttcagggtcattgtgcaagaccgtaggtgactgtatcagttctttccagaag

SEQ ID NO: 24970 - DNA, 120 bp, Homo sapiens
gaccgcttgggaatccatgagccacgtgtaaccgatgcttgggctgagagtgatcaaggcgttgtgtcttcatggtgtagttacttcatttatttccttcctacgtgtgggcagtttctc

SEQ ID NO: 24971 - DNA, 120 bp, Homo sapiens
agacgctttgagcttgtgggaaggagtacccaatttgtgtaaaagttgagctttttattgcagccttataaattcagatcaggcttgtcaggctatttaattgtatggtaagtgctttag

SEQ ID NO: 24972 - DNA, 120 bp, Homo sapiens
tgccggtctctgccctgatagtgtttttcaaaaaggctctttgtgatataattaagaaatgtgtatttgggctctgcctggctcttggcactcagcgtctaaacccttgtaatttccaaa

SEQ ID NO: 24973 - DNA, 120 bp, Homo sapiens
agacgaggacttgattgatggctggggctccttgccagggaaccaaccacgtgattagagggtgggaccttttaggtctccccctgccacccagaaggaagagggctgaaagttgagttg

SEQ ID NO: 24974 - DNA, 120 bp, Homo sapiens
caccggtgctcagtgatgtcattaatcacgcctctataatgagatcttcatagaaacccaaaaggaccaggttcaggggctccatgcagcggaacaggtggaggcttctgcagggtggtg

SEQ ID NO: 24975 - DNA, 120 bp, Homo sapiens
ctgcgcttctcctccatctgccttttcgtctatatcctctgtaacgtccgttataataagctggcaaacctagctctctgaattctgtaagctgctgcagtaaattaatggaacccaaga

SEQ ID NO: 24976 - DNA, 120 bp, Homo sapiens
aagcgagggatagtgggagccctgctttgtagcctgtcggtcagaaccggaggtgacagcccactacttgcgactgccatctgaaatgggggccagtctttggggctgagccttcagcct

SEQ ID NO: 24977 - DNA, 120 bp, Homo sapiens
atgcgacacccacgtccggtgtcaggcgttgtgttgagtgttacgtgagtaggaaagacactgtcacatccctgtctcctgcagttcagttgtttatccttagagctttttaacctaagg

SEQ ID NO: 24978 - DNA, 120 bp, Homo sapiens
gaacgaaggtgcgtggtggtgggctctgcagcggagagaggtggggaagctcaccccagacgcgcttcctctttgggttttttccccatcccctgtgaatggccatccagttcacggcct

SEQ ID NO: 24979 - DNA, 120 bp, Homo sapiens
tgccgcctccttgcagggtgtctctctgagccccgttgagccctcacgtttaagcgagtatttccaaggcttccattctctgccatcatctcaagtgaagctttttctcttctggctgta

SEQ ID NO: 24980 - DNA, 120 bp, Homo sapiens
gtgcgcagagctgttgcacacagctgtactctgcccccgtgcacccggttccaggggtgccacactgcacccacctggggctcgctcctcacagtggtgcgtgggccctcgcctgtctca

SEQ ID NO: 24981 - DNA, 120 bp, Homo sapiens
tcacggcacctgctgcctgtgccctcagctcctcacttcatcctggggtctctgctcagcacagagcccggtgcccgcggggattgaatgagccattgcttgttgcttcataggcgtggg

SEQ ID NO: 24982 - DNA, 120 bp, Homo sapiens
tggcgatgggctgtgttcctcacacaggactctggctgccagctgccctcctgcagagccatgggtttggctctgtaccaggaaggggttggaatctcctggccgcacctttcgcagcat

SEQ ID NO: 24983 - DNA, 120 bp, Homo sapiens
gtgcgtggtgccctcagttggcagtggattacaagattggctgtttcattaattctggttgatagaaacatatgggcaattgcagactgtccagagacttgtgtaagtcttctaggtcat

SEQ ID NO: 24984 - DNA, 120 bp, Homo sapiens
ctgcgtgacacgcctctcctgaggtttggcatggacgctggggccaccgcatgggctccatcccatgcccgtggctgttggggttttcgcttgtgcaagtctgagacccctgcccctgcc

SEQ ID NO: 24985 - DNA, 120 bp, Homo sapiens
ccacgtcagcctgccccatgcctcttttttggatgtaccacaggctgaggggagagaggccacaggttgtcagctctgtttgagatgcagggagcatatgctctgagggggacttgagcc

SEQ ID NO: 24986 - DNA, 120 bp, Homo sapiens
ctacggtagacatggatctcccagagccggcctgctgtggagggacttcctgggtatcagggtccccacggctggcgggctcaggacatcggggggggggggtgtttgggacccctgctg

SEQ ID NO: 24987 - DNA, 120 bp, Homo sapiens
gaacgcggggacttgtaaacgtgttcccggcaagtgccgtggtcagacgctggagcctcatcctcctagaggacagggatgtggttgttggaggggtagccgaatccacctggctggggt

SEQ ID NO: 24988 - DNA, 120 bp, Homo sapiens
acccggatgccaagaaagagatggatgtggccaaaaacatgccctggccttgcacagctgagctgccaggcagtcggcttatgggaaaggcatggtggctcttgggagggcttgagtcgc

SEQ ID NO: 24989 - DNA, 120 bp, Homo sapiens
tggcgggaatggacccccgggccctttcagctccgtggttggcatcatgaagttggacttggccaggcttgaacagcttggatccgattttaatgtgatttctttacttttttttttttt

SEQ ID NO: 24990 - DNA, 120 bp, Homo sapiens
gagcgggtttctgtgcttggcaccgaccctggctctgggcagtgtcgtcctgcactctggttagctcagcctggacgggtcaggtgaccttggggagcaggttcacggtgcggtgccttt

SEQ ID NO: 24991 - DNA, 120 bp, Homo sapiens
ccccgggcttgcagtggaaaaggagcacagcctttaggtgttgaatacacctgagagccaatcaagcgcttactgggaaaggggaggagacgtggtcgcgggccgggcgcgggtggctca

SEQ ID NO: 24992 - DNA, 120 bp, Homo sapiens
cgccgttggaaacggcagttgcagtcgaagttgctcaagttgctgtgtgaagtttcagctgctgccatttgtctgcttcaagggaaaagctccagggccatcctggtttctgtgtgaggg

SEQ ID NO: 24993 - DNA, 120 bp, Homo sapiens
cagcgcctctcctgggctcaaggtggtagagggacccaccctgcaaagaagaggggcagcccctccacctgtgtcctggtgggtgtcaggctggctcatgtgcaccgggtgaggcacatg

SEQ ID NO: 24994 - DNA, 120 bp, Homo sapiens
aaccgggggttgccatagtgagggtggagatagaggctgctgtagcgtctggcgctgtccctgtgtgccaaggtgatcgagagggccaccctgctccttgaggccccaaccacatgagtg

SEQ ID NO: 24995 - DNA, 120 bp, Homo sapiens
acccggaccaagcctcttggaggggtccagggtgggtgccaggcctggggtccatccagggtgcagaccctgccctatcctgaccagcctggtcggctcgttgcttgcagatggtgatgc

SEQ ID NO: 24996 - DNA, 120 bp, Homo sapiens
cagcgaggaccccgaggacgtggcgcgaacacgccggtcccgggagcggaccttcatcttcgacagggtgtttggccagcatgcgtctcaggtctccacctgcccctgccatccctgcgt

SEQ ID NO: 24997 - DNA, 120 bp, Homo sapiens
caccgctccgggcagaaagtaaccattttaaaatgaacaattcaggggtctttagtgtattcaaaatgttgctgatgtaagaggtgaagttgacataacacaaaagtaaccattttactt

SEQ ID NO: 24998 - DNA, 120 bp, Homo sapiens
tcgttttcttacaggaaggcgtgggccaatgaccagctggaagtgcaggttcatgtgtcctcagacagtggctggtgcctcacgctggcttctggctgtgaccagggtagcagagagagc

SEQ ID NO: 24999 - DNA, 120 bp, Homo sapiens
cttcgttaatagtgttacagcaatgctttttcttagttttgatgcagatgccctggggatgtgacatgtttactctgcatctgcactgcctttgcaataaataaaatgtggtctatcatg

SEQ ID NO: 25000 - DNA, 120 bp, Homo sapiens
gcccgtgctccgctcatcgggttgtgaagaagcagtacctctttccaagcagtggcccaggcagtaagcggagcatctggcaggcggggtccacacttccccaagaccctgtgctggctg

SEQ ID NO: 25001 - DNA, 120 bp, Homo sapiens
aaacggcccggaggaggccgggaccccagcccccaggccagggctcccgtgagtagggagacgcatcactctctggccccggaggctgtgcttcccaggccatcacaatggccacacaac

SEQ ID NO: 25002 - DNA, 120 bp, Homo sapiens
ggacggaacctaatcttgagctattgaagacctgaaagccgtggcccctggcccgagccagcagacgcgcctgccggccccaccagagacacctgatccaccggtcgccccgccacaaag

SEQ ID NO: 25003 - DNA, 120 bp, Homo sapiens
ggccgcccgccccaccaacagagacaaggaggaaaactgggtcgctgagatagagtgacagccatggcaggtggggatgagacaggagggaggggcggccaccactgggcacagcccagc

SEQ ID NO: 25004 - DNA, 120 bp, Homo sapiens
gcccgaggggggctcagagccccgaggagggctcaagtgactgccggtttgcagggagtggggtggaggctggagtggggggcgcagctgagaccagaaagaaacagctaggaccccacc

SEQ ID NO: 25005 - DNA, 120 bp, Homo sapiens
agacgccataggccaggttgttggggacaggcctggactggtccccaggccccaccctgctgaggcaggccagccagctgcccaccccttggcctgggcatgtccagcttttgctcagtt

SEQ ID NO: 25006 - DNA, 120 bp, Homo sapiens
cagcgcctcagaactttgggacttcctggcatatgggaggcacccggaggtgtgagcctgaggggttcactttcaagggtggctggagacacctgctgctggccatgtgggcctgggagg

SEQ ID NO: 25007 - DNA, 120 bp, Homo sapiens
ctacggccccaagaggcttcactggcaactcggtcagccctctctagccccctccccagctcccctttgtcctgtccagggctgagcaccatcccacagcccacttccctaccagggctg

SEQ ID NO: 25008 - DNA, 120 bp, Homo sapiens
aagcgggcgggggtggctaggcgggccaccccctcaacagttttcagacctcaagaagtcaccacgaaattccattctcctgacagcaaagaaattgattcactcttgccaaagcctgcg

SEQ ID NO: 25009 - DNA, 120 bp, Homo sapiens
tcccgctgcttccagacaggcagcagcatcaggtcccccactcctcccattcctggctacagagagacgcgggaaccccccctacccagttctatgcatgtgcccctgccaggctgggcc

SEQ ID NO: 25010 - DNA, 120 bp, Homo sapiens
ttgcgggggtggggcggctcagggcaggaagccccatcccctggcctgggaactgtggggagatggactcacagcatcttgtcaggtggggtgcagggtggcatggcacccaccatcggt

SEQ ID NO: 25011 - DNA, 120 bp, Homo sapiens
acccgtgcacatatttgggggcttggccatgcttggctgcaggggattgaggagggattgggcctcaagaaacggggctgggactaagtcacgaggtgcgtgaatatcaggcgggacttt

SEQ ID NO: 25012 - DNA, 120 bp, Homo sapiens
ctgcgtggagaataagtaaagcaggtaggataggagtgggtgggatgggggtggaggctgcccaagtgattcagggaagagatgatggggatggatgaggctccgtctctgaaacaattc

SEQ ID NO: 25013 - DNA, 120 bp, Homo sapiens
cagcggtgtgactgaagcacgtggggtcatggacacccctcagtccggaggctggggctgggctgggactcagctgactttgtgggggcagccaacccagtcactgggtccttttctccc

SEQ ID NO: 25014 - DNA, 120 bp, Homo sapiens
ccccggctcaccctcaagcctctccagctgcatggaggctccagggctaggctctggctgatcggaaggggtttatggcaggaggtgacgccatgggagacttgtcacttgggcacagcc

SEQ ID NO: 25015 - DNA, 120 bp, Homo sapiens
tttcggaggtggtgactgctaattacctggggccaggaagaggcctgggaacccccatcccccacaccacccagcgggtacaggggctaggggtggggcccctggggccctaagagcaaa

SEQ ID NO: 25016 - DNA, 120 bp, Homo sapiens
cagcgtccttagcggggggagagggtctgacagtggggccagacatttatccagtgaattttttcagagcacctactatgtcccaaaacctgttccaggtctgaatgacaccaggtcgct

SEQ ID NO: 25017 - DNA, 120 bp, Homo sapiens
ttgcggctgacattcaggtagaggtaaggagaggggctccaagggcacttaaagaatttaaaatgccatctcaggcgtgaacataactccgaggggggcagtttagccacggtggtggcg

SEQ ID NO: 25018 - DNA, 120 bp, Homo sapiens
ggtcgtggtggtcgcagagaccctgcttaggagggcacgggaagacagcgcagccacgggcagagccgcctccgtccacgcttccggaggacgtggcgggcagggggctcacaccctgct

SEQ ID NO: 25019 - DNA, 120 bp, Homo sapiens
aggcgacccttggccacttccgggcccctcgcccctcaccctcggctgccggcgcgcattcctgccgcccccgctcgtgcgaggggcgggcccgggcccgtgggaagggccggggatggg

SEQ ID NO: 25020 - DNA, 120 bp, Homo sapiens
ggccgtgtgccggggaggcggggtggggagggcgcacagctgggccgcatctggcccgagcgcaaggagaccaaatgggacagaaggcggcctttcatccggcgagggaagtggcggcct

SEQ ID NO: 25021 - DNA, 120 bp, Homo sapiens
attcgaggcctggctgagactgccatggctccggcactggaggcgcccagcccaagacaggcctttccccatgagggttccagggtcaccccggtgccgcttcactgcaggccatgtcct

SEQ ID NO: 25022 - DNA, 120 bp, Homo sapiens
ctccggctgccagtgggacatccctgggcgttatccgaggaaaacagttgcccacccaggccccccagctgcgtcccggggccctgaccgagccacacagagaagcaggtccacgaacga

SEQ ID NO: 25023 - DNA, 120 bp, Homo sapiens
gtgcggcggggatggggtctctctccagcagacaggccacgcggggactcagccgcacccacagggcttccgtccaggggctctggcagcgcccgaaggtcgtggtcaggacgttcaggg

SEQ ID NO: 25024 - DNA, 120 bp, Homo sapiens
ggccgcggagcacaaggactcttcaacgtgatccatgatcttctgggcacacgcgggccagtcaccccccggcaggcagggctgcccctcggctccacctcgcatggacaaagccaggac

SEQ ID NO: 25025 - DNA, 120 bp, Homo sapiens
ggacgtgcaccaggagctgactggccgccgaggccacaaacaggctggagtctccctgcagggagaagatggtgtcgaccgcacctgggtaggggatgggggaagagagggaaaaggggg

SEQ ID NO: 25026 - DNA, 120 bp, Homo sapiens
gaacgcagtagcatcccattatgatactgcgtggactcagctataccagggacaggtagcacaaatgtcatcacctccaccccaagctgtagaactattggctcataatggggcattcag

SEQ ID NO: 25027 - DNA, 120 bp, Homo sapiens
gtccgcattggaaagcaccaatatgatcttccgagggactttaaacattttatgcttctctttttggatttcaatttgagtgaatgagttaatacagaaacacttttgtcttcaaaaagc

SEQ ID NO: 25028 - DNA, 120 bp, Homo sapiens
cctcgtgctgaaatcagacagtacaagtcttatttcattccctggaccaggacaaagtcactggaataagaaggcaagaacctttataggcccaaatgccttctcattgtaatgcatatg

SEQ ID NO: 25029 - DNA, 120 bp, Homo sapiens
acccgttcttaccaggagacagtcacagattcgttgtgctttgatgtaaagatgaataagagtgagaacatttatgtaaaaatgaaatgctttcagcaagaactggttttgtttttcttt

SEQ ID NO: 25030 - DNA, 120 bp, Homo sapiens
gcacgcctgctgggcggcgttttgtgttttgttccccccacccacccattccttctgatgagactgaggaactggctgctgcccagctggagtgttctgagtggcctcagagctggattt

SEQ ID NO: 25031 - DNA, 120 bp, Homo sapiens
ggacgggctgttttcgcttttgtaaacgtgatggtcggaagcccagcaggtgccgtcgagttacagtgtttgcctctcttcctccagggagatgacagtctgtctgcagtcacctttgac

SEQ ID NO: 25032 - DNA, 120 bp, Homo sapiens
agacggtgagtgccgctgggtgtcagccgtgcgacctcgggctggttgcgctgcccttgcagactgcactcggaagcgtaaaataggccgttctccacaatactgtgtcgagagctggaa

SEQ ID NO: 25033 - DNA, 120 bp, Homo sapiens
ttccgaatgctccttggtgtttgaaaagtttccagcccttaggtttaaatacctgtggtgataactttaaaacttttatctggacgtgaatcctgagcagggctcatgtgagacagattg

SEQ ID NO: 25034 - DNA, 120 bp, Homo sapiens
ccacgccctcatcctgacacttgaggggaggaggagagcccctgctaatgccgtcggaaggacccgatgggagaaagcagacctgggcagccgccatcccaagctgaactgctgcctggc

SEQ ID NO: 25035 - DNA, 120 bp, Homo sapiens
gcccggaaaggagaggggcaggagtggtgtccgatggcccagtggcacactatggccccggactgggctttgggtttgtttggcaagctgtgctgggtagaaaaggaagtgtgccaattg

SEQ ID NO: 25036 - DNA, 120 bp, Homo sapiens
tctcgtgtatgagcgaaaaaagcttttcttactggagacgcagatctagcaaacctgcagccagcagaacgaacccggcaccagcagatctcaattccacgtttgctctgtggactcaag

SEQ ID NO: 25037 - DNA, 120 bp, Homo sapiens
gttcgcaaagttaaggattttccctccatgtcacagagggcaggggatgctcctctgatgttccccggaggaggagggatccaaaccaagccccagggaaaattccccccgcgcagaact

SEQ ID NO: 25038 - DNA, 120 bp, Homo sapiens
ggccgcggtagccttatctgctcggtctagtgcaaggtgatgaggaagttaaggttggaagcatggcagcatcttccccaggccacggcacgacgggttgtgtgtctctaatgcaaaatc

SEQ ID NO: 25039 - DNA, 120 bp, Homo sapiens
tctcggatatgggacactcaccccgtagtaagcagtggaaccagatctggaccccgttctgtgagatctggaccccattgggtgtttggcatcgtggttgtcacaggagaccaccttcca

SEQ ID NO: 25040 - DNA, 120 bp, Homo sapiens
gctcggctttcttccatagtgggctttgcagttgacttatgtgcagggattcatctgaccacctccacctgagtggacagaggtgcgctgggctcccaggctggctgtgcgggcggtttg

SEQ ID NO: 25041 - DNA, 120 bp, Homo sapiens
atccgccatttgtgtgggaccctcagtctgaacgtcaggagcccgggcccgatggttttctgtaattggaacttgtgctctgagagcccagccctgagcactgacgtgagtgcatttttg

SEQ ID NO: 25042 - DNA, 120 bp, Homo sapiens
catcgggccctgcgtgtcctgttcctggaccctccttacgtccccgtaagctcacgtcctcttgctgctcttacacgacccctgaccctttctgaacatggtagggtcttgtgatgcacc

SEQ ID NO: 25043 - DNA, 120 bp, Homo sapiens
cagcgggcactgccctctgggtggggtggggcttcctgtgccctccctgccgtcactcagctgtgcacgggttgaacgtggagtgactgttagcagggacccggcaggtgagcagggacc

SEQ ID NO: 25044 - DNA, 120 bp, Homo sapiens
cagcgtgtgtggacgctacccgggggcagctagtcgcggcggcgtctctgtggctccgaggtccctggctctctgctgcctccctggagggtcgcagccatgctctgctcaccatggccg

SEQ ID NO: 25045 - DNA, 120 bp, Homo sapiens
ggtcgcagccatgctctgctcaccatggccggcgctgcctgcacttgcctccctggagggtcgcagccatgctccggtcaccatggccggtgctgcacttgccttcctggagggtcgcag

SEQ ID NO: 25046 - DNA, 120 bp, Homo sapiens
ggccggtgctgcacttgcttccctggagggtcacagccatgctctgctcaccatggccggtgctgtacttgcctccctggagggtcgcagccatgctctgctcaccatggccggcgctgc

SEQ ID NO: 25047 - DNA, 120 bp, Homo sapiens
gggcgtcctcacaaatccccttccagtgggtaggaggatccttcagaaggcagatgtgagcccatgcatgttcagacgaaaagcaaggaacttggtgtcaccatcctgaggctgcagttt

SEQ ID NO: 25048 - DNA, 120 bp, Homo sapiens
gctcgggaggcagcggtgggaagatcgctcgagcccaggaggtggaggctgcagagagccaaggtagcactgctgcactccatcccgggccacagatccagacccttttctcactaaaaa

SEQ ID NO: 25049 - DNA, 120 bp, Homo sapiens
tttcgtaataagcatgtattagctttgtgttattttcctactcaggaaacatttctattttagagaaaaggaagagtgggattaattgagtgatcagctctccaagtaggggatcagctc

SEQ ID NO: 25050 - DNA, 120 bp, Homo sapiens
agtcggtttaagagttgcctcaaggaatttataagcgtgtgaaaatttagacttttttagctgtctgtagttgtgtgagtaaatgttcatttatcttcggagaagctgattttcctttct

SEQ ID NO: 25051 - DNA, 120 bp, Homo sapiens
ggccgcggactaacagatgatctcactttagcggaacagaggcctgaaaatgtgtcaggactgagggaagatgaggctcttcttagggttacaaaatcagaatgtggaagccaagggccg

SEQ ID NO: 25052 - DNA, 120 bp, Homo sapiens
cttcgtcagggatgttaagatgtgcagacacccaagtgaccatcctaggaagattacactcccaggtccctagaaacaggaggcagggcacgcaaggccacgcaggagcggcgcgtcggc

SEQ ID NO: 25053 - DNA, 120 bp, Homo sapiens
aggcggcagggtcgtgcggaagacctgggccagggcctttatcatgagaaggagagggcgaggtgaggtgagccggctggttagggccggcgggctggaagcttgaagaatttcagcagg

SEQ ID NO: 25054 - DNA, 120 bp, Homo sapiens
tcccgcacctggccctgggtgattaaggctgagaaacactgccttctggagtgtggggcccaatacaggaggcgattctgagtatgggcaccagattagctgctcgcataggatggccgt

SEQ ID NO: 25055 - DNA, 120 bp, Homo sapiens
gcccgaaggcaggcccttcactgtctaggaattggccaggcccagaggggcagcaaggccccagatgcccaagcatcgttaacacacagaaaatgaaaagccagagcaagccgttctgtg

SEQ ID NO: 25056 - DNA, 120 bp, Homo sapiens
ctgcgcctggcgcctggcccggtgtgcactgggagcagtcttgtgtctccctccggggagggctttcagcaacagcgtgctctccaccgagcttgcattcttgacacgagaggccttttc

SEQ ID NO: 25057 - DNA, 120 bp, Homo sapiens
ctcgcaggatacatcagagctcactggaccgggaagtgaggggagggcatcccagcagagccggtgggacaaggagtctgagacggggccagggcatggaactggaatggaggttgagta

SEQ ID NO: 25058 - DNA, 120 bp, Homo sapiens
ccccgcctcagtcactcagagctggcgctgggccacagggcttctcacgctgccttcctcctcacccacagctgcttctaagtggcagggcagactcagcacccgcttgtcctcacactc

SEQ ID NO: 25059 - DNA, 120 bp, Homo sapiens
tgccgtcagggcggggcttgacttccccctgccccacccatgtccccttccccttggccacattactcatccacaagtgtttgctgggctcctgccatgtgccgggcaccagaggagctt

SEQ ID NO: 25060 - DNA, 120 bp, Homo sapiens
gcacggggttcatactctgcagtcaggacagccagtatggtcgcgggtgtgggcggcacaccaggctcagtggcctgcgcgcagctgcagtgggagcatgttgccatctgatggccaggc

SEQ ID NO: 25061 - DNA, 120 bp, Homo sapiens
acacgagcgccctccacgagcagacagctggactgcccacctggcccaccacactgcccctgaggaagggacccctgctcgccactgccctagtcctcagccttcggttctgcagcccct

SEQ ID NO: 25062 - DNA, 120 bp, Homo sapiens
ctccgtgcctggcctcctggtccctagacctgccccacagacacacccttgtccatacccatctcacacatctgcaatggcaacttccaacatccccgtctctgacagtccctcccatcc

SEQ ID NO: 25063 - DNA, 120 bp, Homo sapiens
tcccgaggtctccagcatgtcagcctcccacctgtccacccaccacagcctgcccaggctcccggtccccacagcccgctgcggttcctagcacacgcccctgcctggcatctcactttg

SEQ ID NO: 25064 - DNA, 120 bp, Homo sapiens
tcccgtcagaatgcaagctctgtctttttgccaccacacctctggtgcctagactggcgcctggcatgtgggaggcatggggtaaatgccctccagtgagcgggtgaggggatccgggct

SEQ ID NO: 25065 - DNA, 120 bp, Homo sapiens
tcacgttccctgctgccgtggcagctctctcctcggcgcctccctctcgcccgccgttgccccgggcactcacacccacttttctctccctgcttccttccctgacaggcggctgtggtg

SEQ ID NO: 25066 - DNA, 120 bp, Homo sapiens
tcacgcggacaaagctcttagcaagcaaagcacatggctcagagccacccagcgtgccaggcctcccagaccaggtaatgtcggggtgctggacgtcccagtggccatctgcagagctgc

SEQ ID NO: 25067 - DNA, 120 bp, Homo sapiens
gctcgtctcgcactccatccatcgagaaagcgtagggcacccctcagcctccacatccccgcccgcccagcaggcgtcccctgcgctccatccctggccacgcaggccatgcaggcttct

SEQ ID NO: 25068 - DNA, 120 bp, Homo sapiens
ctgcgcaggcccctctgcacaggccccggatggatgtggcgttagggccagattgcgttaagctgccggagagtcaagtagctccatgaagatgtagctaaaaactactaaagacagatg

SEQ ID NO: 25069 - DNA, 120 bp, Homo sapiens
agccgttctggtatcccagaaaagggagtcggggctgcagctgagcaggtgggggaggcgagtaccttccaggcccagggaactatcagcctccttccagaggaaaagggagcagggccc

SEQ ID NO: 25070 - DNA, 120 bp, Homo sapiens
ctccggcctcagctcctcctgccccagctcctcctgccccagctcctcctcctcctcctctcaactcctactgctcctcctgcccccacctccccctgctcctcctgcccccacctcccc

SEQ ID NO: 25071 - DNA, 120 bp, Homo sapiens
ccacggaggctgggctgggtccccagagctgggcctccactctagcccaactgattaagcccggcagggcctcctgcatcccacgtcctccctgccaggctgcaggcccagctgggatgt

SEQ ID NO: 25072 - DNA, 120 bp, Homo sapiens
ccccgcaacacaccccccaccccccattgcgggcgacctgtggcaagcctgaggttcaccatctgtacccaagggtgtgctggccctgtctctgggtagctgtgagccagtgggcgggga

SEQ ID NO: 25073 - DNA, 120 bp, Homo sapiens
agccggcagagctctggaagagcaaaacaccattcatcccagacacacatcctaagcgtctatcccaggcccggccctggccctcataatattgccatcaccatctcacttccagaagcc

SEQ ID NO: 25074 - DNA, 120 bp, Homo sapiens
ctgcgcccctgcactgccccccacccccgggagcgatgtggaggcttcgccagtcctgggaggactctggacttggtcctgaggccctgggaggccagggaggggctggcaggggggcag

SEQ ID NO: 25075 - DNA, 120 bp, Homo sapiens
gggcggtgcagagaagttcaggacaaagggcagggccttgctgccccgtgctccgggggaccttgagcaagacacttccttttccgagcctccagagctgagactggcaggagtggagct

SEQ ID NO: 25076 - DNA, 120 bp, Homo sapiens
gcccggaggaggcggccctgccaggggcaggatggtgatgcctctgaagggcttccccaggtggcccctggacatcttcacgtgacccaaaaaaggccccacctcctgcctccagacctt

SEQ ID NO: 25077 - DNA, 120 bp, Homo sapiens
ctccgggcaagtaggccacccctagagcggcctctagaaccttccgtgcttgtcctaggctgggggctggaagaggggtggaggccacggaggggctgcctgttgcccacctccacgcac

SEQ ID NO: 25078 - DNA, 120 bp, Homo sapiens
ccacgctgagccgggtctccagggtgttgtgttctggacaaagcctccggggtgctgggggggcctgcattccctcctgggccccctgccttggaaatggcatgtcaaggggaggatcag

SEQ ID NO: 25079 - DNA, 120 bp, Homo sapiens
gcccggcccagtgagggagaccccgggttccctgggctcctgggcccaccctgaccagaaaaccagccaaggaagctgagctggcctttccccatgcgtgggggagtgaagtttgtcaga

SEQ ID NO: 25080 - DNA, 120 bp, Homo sapiens
gcacgcaggttatgtggggcctggccttggacaccccttttccagcataatcccagtacccacccagggagagaagcatgaccctcctcctgttacagctggggaaactgaggcttagag

SEQ ID NO: 25081 - DNA, 120 bp, Homo sapiens
ggccgaaaggtctctgctcttggagggggagcagtgtctccttggcagctcaagcctgtgacagcctgtggtcctgtgagagcagcgggcggggctcccgagagggaggtgagaatccat

SEQ ID NO: 25082 - DNA, 120 bp, Homo sapiens
atccggcaacccctccccacccactctgccccagcgcctccctccacgcccgctgctggcctgtttctgaaggtcggtgaaagacgtcttactcaccaagctcaggcagtggggtcggtg

SEQ ID NO: 25083 - DNA, 120 bp, Homo sapiens
cagcgactcagccagcctttgtcaccaatgccaattgcagcccacagagtggccagataccctctcccactgctcctggaattggggcactggaggccgccaggaagagacggtagtcct

SEQ ID NO: 25084 - DNA, 120 bp, Homo sapiens
agccggctcccggcacccccagagcaggaatttactggcagacaacgaacatcccttgaaagcatcagagcattaagaaagctttccccattttgttttttgtttgtttgttcgtttcat

SEQ ID NO: 25085 - DNA, 120 bp, Homo sapiens
ccccggtatctattgtttccctctttctgtccatgcttactcattgctcagctcctgcttatgagtaagaacgtgcggtgtgtgagctcacttaggatgatggcctccagctccatccat

SEQ ID NO: 25086 - DNA, 120 bp, Homo sapiens
ttccggcaaaggccatgatttcattcttttttaaaaaaatggctgtttcctcagtgagtcagggctatgggtgtgggatgaatctcttcccttctcggagcctcagtttccccatctcta

SEQ ID NO: 25087 - DNA, 120 bp, Homo sapiens
ggacgctaagttcccccgtcggtgacatgggttcccaaaggggtcatagcagttgggccaagcctgacataagtcccaggtctcacaactctcagcacagtgctcattgcaacaaaacct

SEQ ID NO: 25088 - DNA, 120 bp, Homo sapiens
acccggtcttgatagtcttatgtggcaagtagggaggttctgaatgagacactcgacttaagtgatgggacttgggacagaattcttggcagctcagaggccatccccactggtctcctg

SEQ ID NO: 25089 - DNA, 120 bp, Homo sapiens
aggcgaggctgctggccaggtgagcccagataatgagaggtgctcacatcctcactctggccaggtgtgcgtggcttgctccgtggtcctcttggggaccatgctggctggcacctctcc

SEQ ID NO: 25090 - DNA, 120 bp, Homo sapiens
acggccgagccagaactggaaccaggagtgtctgtctgcaccagaactgacccccatgggtctgtggccagctccttcctgctggggcctgagcccgtgctgcgtgtccctcctcacaga

SEQ ID NO: 25091 - DNA, 120 bp, Homo sapiens
ggacggggaggaggaggccgctccagggccgcggcaggcgcacgacagcctctaccgcgtccacatgcccagcctgtacagctgtggcagcagctacggcagtgagaccagcatcccggc

SEQ ID NO: 25092 - DNA, 120 bp, Homo sapiens
ggccgcggcccacaccgtcagcaacgccccggtcactgagtacatgtgagttgacgtgggcctagtggggccagcggacacgtcagctgcggctgagagcgcggatctgggctggggcta

SEQ ID NO: 25093 - DNA, 120 bp, Homo sapiens
gctcgaggcaaggggctggagaaggggcggcctccgggctgggcagccctggccttgagtgcctcctgccccaggtgaacacggtccaggggccatggagaggccacatggtcacatgga

SEQ ID NO: 25094 - DNA, 120 bp, Homo sapiens
ttccgtgtccagggcacaaggactctgtggccaaggacctcagggcccagctacatggtgaacaggtggctcggagggagtggactctggctgggccaaggtgggcaggggtctctctgt

SEQ ID NO: 25095 - DNA, 120 bp, Homo sapiens
ggacgcctgacctgagttgacggggctgggtgggactgccagctcctccccgctggccttggagtgtcctggggccagagtgggcagcctcgggaccagccgcccagggggtcagctctc

SEQ ID NO: 25096 - DNA, 120 bp, Homo sapiens
gggcgggcagatgtggccccactgtggccctcccagcttgtaggcacggccctgcaccaggccctccctggcctcttacctgccattctctgtgccttctggacctgtggggtgccaccg

SEQ ID NO: 25097 - DNA, 120 bp, Homo sapiens
ccccggccctgcctccttttctttttcttccttgagtcttttcctgagtgtccacacatggctgtttcagcccaggcctggtgtcccctttgacttcccgcgtaagacacaggcaggagg

SEQ ID NO: 25098 - DNA, 120 bp, Homo sapiens
tgccgaagagaaggagttggtggcgaagctgggggaccggggagggggcggccgggctaccaggacagggcttgggaggccgaaggctgccttgctcagaaatccccatcccggggccac

SEQ ID NO: 25099 - DNA, 120 bp, Homo sapiens
ggccgggcctgtgaggttcaggccacacaggtgcaggcccagtcccgctcggctgccctcgtcctcgccatcacacggcccacagcccactcctggccccacaccctggcgttgaggcca

SEQ ID NO: 25100 - DNA, 120 bp, Homo sapiens
ccccgggccctcctagcgctatctggctgccctggactctggcagccacgcgggctggcagtttaagcccatggacagtgcccgaacgctgtggtagctgttccctcagagcgacaggta

SEQ ID NO: 25101 - DNA, 120 bp, Homo sapiens
caccggtcccccatcccgcacggccacccgcctgcgcctcccgcctccaccctgcactcactgccgccctcccgtcggcactgagctggggctccatctgtccggctcctgttggcaggg

SEQ ID NO: 25102 - DNA, 120 bp, Homo sapiens
ccacggctcagccagagacttctaatgccggctctgggcccgccagcctcacagtggggttggcaagtccccttccaggctccccctgcccagttgcttggcctctggggactctgccac

SEQ ID NO: 25103 - DNA, 120 bp, Homo sapiens
gcccgggcccctgggcatgtggccagcaggccctgccctggaggcaccaactgcgtgtcaggggcgtgcacacggacaggcacgtgccggcgagcacgtgagcttctcccgctggcccca

SEQ ID NO: 25104 - DNA, 120 bp, Homo sapiens
ccacggtggtgcgggtgcctgcttgggctccttcaggggtctgcgcgtctgccccgtcccgtccagtcccgccccgtcccgcccccatcccctccccttgtgctgcatgtcagtggaatg

SEQ ID NO: 25105 - DNA, 120 bp, Homo sapiens
tgacgaggctccgggccgtggctcctccccccaccccctccgtggcgtccccacaggctgctcgaaaccttcttggtgtcccaggagggccctcggggacccggggagctctgtgcctct

SEQ ID NO: 25106 - DNA, 120 bp, Homo sapiens
tgccgccggcccctgacacgtgccaggcctgtgggtcctttggcctcagcacatgcctcgcacatgtgggtttctctgtgagcacacacatgcattctcttgcacacacacgtgcactca

SEQ ID NO: 25107 - DNA, 120 bp, Homo sapiens
ggacgagggcacccacgaggtgcaggccagctgcagagccaggcacaggacagcgccccctgcagccgcctctgttcctaagtccaagacccccaggagcccacagttgggtcccccacg

SEQ ID NO: 25108 - DNA, 120 bp, Homo sapiens
tggcgtgaaggggcagagtagcccgggggatgtcctcaggctggggcctccgtactcctgcatgctgtggcctggctgtaggtggacccggccctgagcccggaggaggccttggcccgg

SEQ ID NO: 25109 - DNA, 120 bp, Homo sapiens
gtgcgtaaggtgcaggtagggccttggagctgtggctcctgggggtggcagaactctgcctggcccaatgcccaaatgccgctggtgtgggcatgggaggctgtgtgtacgcccctcctc

SEQ ID NO: 25110 - DNA, 120 bp, Homo sapiens
gttcgggggctgcccctccctcagcctcagccagacctagagcgcaggggcccccagccagcggcccctccttagcccctccctataggctctgtcagggcaccctgtactgtcccattc

SEQ ID NO: 25111 - DNA, 120 bp, Homo sapiens
ccacgcggaaggcgcccctggctgcgtgcgccatgcaggggccctgctgatgcctcccccttgtctccctccagtacacctccagcatgagagccaaatacctcgccacgagccagcctc

SEQ ID NO: 25112 - DNA, 120 bp, Homo sapiens
cctcgccctgactccagcggcagccactagaccgcgcccggcagccacccaccccacgtgccaacttcccctccccgtgccagcactgccgcttccacctgggccacccaccggaccctc

SEQ ID NO: 25113 - DNA, 120 bp, Homo sapiens
cctcgcacgccgtgccaggcctgccccagacgcgtctgcaggccgcttgccctcctgtcccctccccgcaggggcacagtggagacgcaggggctctgggcccgtaccgccaactcgggt

SEQ ID NO: 25114 - DNA, 120 bp, Homo sapiens
gaacgctgctgccagccgatgccccagccctgcacgccacccactatcccggcacgctccctctgcagatggtcgccgcacctacaagccctggccgcacccaacctgtgttgttgccgc

SEQ ID NO: 25115 - DNA, 120 bp, Homo sapiens
gcccggcccttccctccacagctctccttcctcccgcccggcacttctgtggaccccttcttagttcacaggcacggctggggccgctctgtgctggcgcctgctggccactgagggaca

SEQ ID NO: 25116 - DNA, 120 bp, Homo sapiens
acacgtgccacctgctcatctctgccctgaggtcaccccgtggtccctccacgtgcccatctctctgcagtgccctcctcgcctgtgcagcccgcccacccacaggctcacccctcctgc

SEQ ID NO: 25117 - DNA, 120 bp, Homo sapiens
tgccggctgccagaggccccctccagcagggcctctctccgttgccccagcttcactctctccctcagcacctgccctgctggaggccccagccctccgtggacagcaggggccacgtgg

SEQ ID NO: 25118 - DNA, 120 bp, Homo sapiens
gcccgggccgctcacccgccacccagtgctggccgccttcttggtgccaaacccccttcccccacccagagactgggcagctgtgtctggttcgttctttgcactaaccacatttgtcat

SEQ ID NO: 25119 - DNA, 120 bp, Homo sapiens
ctgcgggctgagggggaccgctggcaccccccttccctcccttcttggttccatttccatccatgacaggtacagcatcccaggagcccggcctgaggggctggacccgagccggctgtg

SEQ ID NO: 25120 - DNA, 120 bp, Homo sapiens
ccacgggtgcccctagctggcccagagccggcagtgtgagcccaagtccgggctggagccgaggccggagcagctgtctgggagtcaaggctgcagtagcgtttcttcatggggtgctcc

SEQ ID NO: 25121 - DNA, 120 bp, Homo sapiens
gaccgacaggcagcccaagggcctggacacccctccccaggcaggtgctgccccaggaggactgtcctcgggaatgaacctcccgcgggctttggactgaggtccctgtggcctcggtct

SEQ ID NO: 25122 - DNA, 120 bp, Homo sapiens
gagcgaggctccccaatggtgcttttggctttagtgtacgatgtttgctgtgcttcccgccgtggagggcagagccaccccacatcaggatcggacgtgctacccctcccggtcccggcc

SEQ ID NO: 25123 - DNA, 120 bp, Homo sapiens
cctcgaggctcgatgcctgtgccaaggccaggggcagccagagggcagctggatggccacgtgcaggggtcaaggctgggccctgcagtggggcgggccgccagccccagcagtttacag

SEQ ID NO: 25124 - DNA, 120 bp, Homo sapiens
agacgcatggctcttcctcccagagcagccggcagctacctggaccggaaatgtcctcatcccctccctggggccaggctctgccctggccttcctctgtgaacccctcctttctttgtg

SEQ ID NO: 25125 - DNA, 120 bp, Homo sapiens
agccggggcgtctgagctccccaggcatgaccaaacctcagtggaggggcctctgcttcaggccccgcctggctgacattctgagcccccctcggaggccccgccacagccaacctgccc

SEQ ID NO: 25126 - DNA, 120 bp, Homo sapiens
acccgccaggggagttctccaggcctagggccaggagagaggccctggcaccctggcgtgggtgcccgccaaacgccctgcgaccgctcagaagcacaaatgctgtccatggccgtgagg

SEQ ID NO: 25127 - DNA, 120 bp, Homo sapiens
tagcgtgagaggcggtgaggccagggcttccagcctcgtgctgtctcgggactcctgaccgtggtgtgcgtgtgtgcccgtctgtgactttctactcaccaaggttgaagaaaggaaacg

SEQ ID NO: 25128 - DNA, 120 bp, Homo sapiens
gagcgcctgccattggttgtatttttgttctgagttttcggtgccgtgttcctaactactccatcccatgacctcgccacacctactggggcatctggctggtgcctgctgccatggcca

SEQ ID NO: 25129 - DNA, 120 bp, Homo sapiens
cctcgttgggaggacagggtggccctggggacaagagggaggagcccaggggcttacctcactgagagtgctccccagcaggcatccactaccccagggccccccacatgtcatggcaag

SEQ ID NO: 25130 - DNA, 120 bp, Homo sapiens
aggcgctgagaaggtctgggtgctggtggcggtctcaccagggggctgcttctggagcccccattaacaggcactcggctctctggggacctgcctgggtctccggccccacaggctccc

SEQ ID NO: 25131 - DNA, 120 bp, Homo sapiens
ccccgagccctgccaggctgggcaggtgtgcagcccacccagcaggcactggagaccccgggagaccccggatcctgcagggcttctccaggtgtttccaggagcccagacatgcagccg

SEQ ID NO: 25132 - DNA, 120 bp, Homo sapiens
ggccgcgaagcctcaagagggagccgggcacgtccttggcaccccagctttccttgctacctgagatcccctctgtggctggggttgctggagatgcccaaggagtaggggctccgtcct

SEQ ID NO: 25133 - DNA, 120 bp, Homo sapiens
ggacgatggtgacgaatccctcagccatctgtggggcgctgctgagggcgtggggggcatttctgcacggtgaagcagagctggtgggaggctgcccgagggaagctggtgctgggaggg

SEQ ID NO: 25134 - DNA, 120 bp, Homo sapiens
agccgtcatgccggccttcacggcatccttccgcacttagagtcctttccatctcctggtggctggcacagggccagggctgcactcacagctggccagggtagggcagggcgcccgtcc

SEQ ID NO: 25135 - DNA, 120 bp, Homo sapiens
cttcgctgataagcctggttcacctcctcacctggtggcctcgttcaccccctcacctggcgccttgcctgatagcctggttcacccctctcacctggggcctctcctggtggcctggtt

SEQ ID NO: 25136 - DNA, 120 bp, Homo sapiens
cctcgtggcgctggttcacccctctcacctggggccttaactggtggcctggttcacctcttcacctggcgccttgcagagtagccgggtttactcctctcacctggggaggcacgaact

SEQ ID NO: 25137 - DNA, 120 bp, Homo sapiens
gcccgggctgactgacctccctcacctgtttggctttaggctctggggcccccctgcccgggtgtttctgggaggctggagggtcccacgtgagctccaccgcgggcagctggagggagt

SEQ ID NO: 25138 - DNA, 120 bp, Homo sapiens
ggacgctgagcgccgggaggggtgtggccctcctgtcctgcccgcggccccacaccggccccagtcccgcccgcctcggtccctgccccgcgcgccgacgtcaccgggacctcccgatcc

SEQ ID NO: 25139 - DNA, 120 bp, Homo sapiens
tcccggcccaggccgagctgcccacgctgctgcccggggctcggtgcccggcgcggcctctgccggctccggcgggcgcgggactgcgaggtaggggggcgcgcggggaagactcggggg

SEQ ID NO: 25140 - DNA, 120 bp, Homo sapiens
gggcgcagggaccgagagggacctccgtgccggggcgggtgggtaggggcagctccgggtccagcccggcccgcgcaccaagtcccgagggcgcccgggcggcggcggctacgggcgcgc

SEQ ID NO: 25141 - DNA, 120 bp, Homo sapiens
gcgcggggaccgcggagacgcgaagggcgcacttggcgagggtttggtgcagcgccgcgccggggtccgcacagccccggcaggtcctgcagagggaaggccgggccagggaagggccac

SEQ ID NO: 25142 - DNA, 120 bp, Homo sapiens
ccccgcagacggcatcctgtccttcttgaagaacaacaagccaggggacgcgctgtgtgtgctgggcctcacactgtctgacctgtacccccatgaggcctggagcttcaccttcagcaa

SEQ ID NO: 25143 - DNA, 120 bp, Homo sapiens
gcacggtgagccggggccccagcagctgtgcgtggggggtagcctggcatggggctgtggcctccgtggctgcagggcaccctctttgcttttgcttcaagcaccctcctggtggaagtc

SEQ ID NO: 25144 - DNA, 120 bp, Homo sapiens
tggcgtctgccccagggcccaacttcatgtgggcaggacagggcctcccaggactggtatgtctttgggccatggccagcttgcatgagagcatgaggtgggtttgacggtgggcccccc

SEQ ID NO: 25145 - DNA, 120 bp, Homo sapiens
gggcgtctgcagcttcgcccggttctcaggggaattcccgaagtcggggcccagcgcccctgatctggccctggtagaggcagcagcagacggccccgaggcccccctgcaggacagggg

SEQ ID NO: 25146 - DNA, 120 bp, Homo sapiens
cctcggtctgttacactgccccatcctcacagtgaagtggatggacccctaactctatggaatgaggaaagcaaggctacacagctatgaagcagcaggggagggattagagccccaagc

SEQ ID NO: 25147 - DNA, 120 bp, Homo sapiens
tgccgcctggggcagggggagggcgcctggaccacctcccggccatctggcctcacccaggtcctcattttggtcctgctggggctgcctggggatctgccggatgcaggggcaaggcag

SEQ ID NO: 25148 - DNA, 120 bp, Homo sapiens
tcacgtgccacgagctctgccaccttctgggcctggggaactgccgctggctccgctgcctcatgcagggtgcgctcagcctggacgaggccctgcggcggcccctggacctctgtccca

SEQ ID NO: 25149 - DNA, 120 bp, Homo sapiens
catcgagaggtaccaggtgagtggctgagttgcgctgcccggctgctgggacctgcgctccggaggcccgcgagcgccgcctggaggctacgcagggcatggggaccgcacacaggcttt

SEQ ID NO: 25150 - DNA, 120 bp, Homo sapiens
tgccgggttccaggcagtgcagagccctgggacctgcgctggggttgagctccatccggatctcactggcagtagatcgagtcctgccagggcccgcgtgtggtggctgtgactgggagg

SEQ ID NO: 25151 - DNA, 120 bp, Homo sapiens
cagcggggtcgagtggggacgagggcttttctccctctgtcaggaagagctggcattggagcccagccggcgggtggcacggtcttcccagggtaactttctctttgctttcccgtcacc

SEQ ID NO: 25152 - DNA, 120 bp, Homo sapiens
ttgcgaggaggtgggagctgacacaacaaggcttgttggaggtggcctccattcctaactccctctgtcgcctgggtggggttgccgagcaaagggctcgtccgtattcatggacatttg

SEQ ID NO: 25153 - DNA, 120 bp, Homo sapiens
ctgcgtacaggcaccagagcagtcaatgaaaccgcgctggaaagcccctgcatcctcctcccgcccgttgaggcaagtgggggtgtggttcccggaccgagcctgtcagaatcccctgca

SEQ ID NO: 25154 - DNA, 120 bp, Homo sapiens
ggccgtggcatttctagctcacagtgctggaatctctctgcagggatcctctctgaagactctggcagtcaagggaaggtgaagggggcacagaggaaacagcttttccaagtgtaagga

SEQ ID NO: 25155 - DNA, 120 bp, Homo sapiens
aggcgcagccatggctgagggtaggagcatctcccgagggtacaggtggcgtgatggctggtcagcacctggtgatgccttgtaaaggttgctgctgccagctgtgccccgtcaaggggc

SEQ ID NO: 25156 - DNA, 120 bp, Homo sapiens
acacgtgctgacctggcatagcctggatccacctggatctgagctggagggtgtagctcctcctcctgcccagagctctctccgttccgtgagcaccatctcctgaggctgtggagggaa

SEQ ID NO: 25157 - DNA, 120 bp, Homo sapiens
tcccgcccctgggtaactgaggacggtggggtccccttaggtaaggaggtctcctggcagttccctggctagacaagggctggcacggagcaaactcagcctgtgtttctccctcttaga

SEQ ID NO: 25158 - DNA, 120 bp, Homo sapiens
aggcggtggtggggacgtggcccagccaggaggcgggggagccgtcagtgtgggaggacaccccgcctgccagcgccgactcgggcatgtgctgtgagagtgactcggagcccggcacca

SEQ ID NO: 25159 - DNA, 120 bp, Homo sapiens
tgtcggagcccctcacccctgatgccgggagtcacaccttcgcctcggggccagaggaagggctgagctacctggcagcctcagaggctccgctgccacctgggggccctgcggaggcca

SEQ ID NO: 25160 - DNA, 120 bp, Homo sapiens
gaacggtggctggccatgtgcatccaggccctgcagcgggaagtggcagaggaggacctggtgcaggtggacagagccgtggacgccctcgaccgctgggagatgttcacgggccagctc

SEQ ID NO: 25161 - DNA, 120 bp, Homo sapiens
tcccggccaccaggcaggacccacccagcagcagggacagcgtggggctgcgcaaggtgctgggggacaagttctcctccctgaggaggaagctgagtgcccgaaaactcgccagagcag

SEQ ID NO: 25162 - DNA, 120 bp, Homo sapiens
agtcggccccccgtccctgggatggggaagagagttagtacagcaggggctgccctacgtctccttccctaaggatgctggccagcactgtccagtagctgaggccactactgacctgcc

SEQ ID NO: 25163 - DNA, 120 bp, Homo sapiens
ggtcgaggctgcagtgggatgtgatcataccactgtactgcagtctgggccacacagaaagactgtctccagaaaaaaaaaagttctttggagaagccacagaccacctgtcttcaggcg

SEQ ID NO: 25164 - DNA, 120 bp, Homo sapiens
agccgctcccaggggcctgcacacatggagaggcctccctgatcctgggtgcttctcgtggagtacaagccggactgtgctgaggttgggacagagccccctcccctgcagaggcagaag

SEQ ID NO: 25165 - DNA, 120 bp, Homo sapiens
cagcgtgcgtcctgtctccttccaggctgtgggcctgcccttcagttatttatagctggagctggagaggctggctcagatgaggagtgaccccgggggcacacaggctccacactgcca

SEQ ID NO: 25166 - DNA, 120 bp, Homo sapiens
taacggggaagtgacggggttttgtctctatcatctcaggcgtcaaccacatgcacacacacactgtcacgttctgtggcgctaacagcatcctgatcctgacggacttcaccggggctc

SEQ ID NO: 25167 - DNA, 120 bp, Homo sapiens
tgacgtgcactgagggcagaggcccccttattcctgaggcggctacagctcaccgtggggaagatcaactgtggtgatgtttttgggacagtttcttggcaaaggtggccgcgctgtcag

SEQ ID NO: 25168 - DNA, 120 bp, Homo sapiens
tttcggtctagttctgtcagttgctgagagaggggtattattgccatggctgggcgtttgatctgtctccctttagttttgccggattttgcttcctgcactttgaagctcctttacgtc

SEQ ID NO: 25169 - DNA, 120 bp, Homo sapiens
acacgtaccccctcagcctgtggtggagggtctctgggagagagacttccggttctgacagcggaatcccttcggagtgacgagggcggggtcacagctcgcgcaccctcatctggagag

SEQ ID NO: 25170 - DNA, 120 bp, Homo sapiens
acacggttatggagggcttctaagaaaaacaaaatacaaaactaaaactagaagggctatgcaggtgaggtgggctgaggcttccttgtgaatctgacattggtggaggccgactgaagg

SEQ ID NO: 25171 - DNA, 120 bp, Homo sapiens
tcccggtcctggtcccactccgtgttgacttcagagaagcaaagatgcagctcagaagtagcattaggatcttcgtcccgttctcttttgcgtagcttcaaaaaggcgtaacagtgacct

SEQ ID NO: 25172 - DNA, 120 bp, Homo sapiens
tgccggcagagcaccctgcagtaacagaaggtgaaagccggagcctggtggctgttgctgcaaacaaccacccaaaacttagtggcttaaaatcaccacagtctagctcatgaatctgta

SEQ ID NO: 25173 - DNA, 120 bp, Homo sapiens
gctcggtggagacggtttgcccctgtggctcgactggagtgttcgttcacacggctgccaagtggaatttggctgggaatctcaggccttggttcctgcccacgtgagactctccatgga

SEQ ID NO: 25174 - DNA, 120 bp, Homo sapiens
taccgtgaggaaacccgacaaacagggcagccagagccagacagcaggctcctggtcccagtcccggaaaatgcaaagggacaagtatgtgttgatttcagagaagctcagatgtagcat

SEQ ID NO: 25175 - DNA, 120 bp, Homo sapiens
agacgaaaaaaagagggtcactttcagaaagggacctgggcttcctcacaatatggcggttgccctcctaaggtggacatcgggagggtcagatggaagctctgtggcctttcctaactc

SEQ ID NO: 25176 - DNA, 120 bp, Homo sapiens
actcggcctcacgtcacagagcgtcacctttcctgcactccacggcggcagtgacaaggaccccaccccaggttcacggggaggggacgtggcagggaatgtgagacaacacaatattgc

SEQ ID NO: 25177 - DNA, 120 bp, Homo sapiens
actcggcgttcactgtggggatttggctggtgcacctgcgaggtggcctgacctgttttccgatttccttcatcttctgcaaaaggttaaccgctggagtgatgcgagattaaacagagg

SEQ ID NO: 25178 - DNA, 120 bp, Homo sapiens
cctcggcgctctctgtacccgtgtcctttgaccctcagctgtgatgtgtgtcccaaaaaagcgttttgaagtgggaaggagcaaaccactaaaaaaaactccttttatccgcagcgttta

SEQ ID NO: 25179 - DNA, 120 bp, Homo sapiens
ccccgtgttagccccaggttctgtctgtgctgtggtgaagagtgacttgggacagtcaccaggaaagacgcaaggcagaggagagagaatgagggctgccttctcgaggaaggtcacagc

SEQ ID NO: 25180 - DNA, 120 bp, Homo sapiens
tcacgaatctttctaaacttaagtgctgcagaagttgaactgagattaaatttagagatgatggtttccaagacacacagggccacggttctttcagtttttaaacacgtgcaaagtcca

SEQ ID NO: 25181 - DNA, 120 bp, Homo sapiens
tctcgtctcatctgtcagaagcccctgcattcacaaggatgggtcttccagcttgacgatgacctctcttcggagagcctcacccatcttggtaagccaagtcagcggggcctcatggag

SEQ ID NO: 25182 - DNA, 120 bp, Homo sapiens
gtgcgatgagtctggggaagctaacacatgccttctgaagtggctagaatacacactcccacgtcacagccatgctatgatgaaggggtgagaagcagtgtcccctctgaggcaaatctc

SEQ ID NO: 25183 - DNA, 120 bp, Homo sapiens
tcacgcacttcctgatcagatgatctgagcagggctcaacggcacgcctgcggtttctgtgccaaaaaaatgcatcccctcatcctgatgacgagaaaataccagacaaacccaaacagg

SEQ ID NO: 25184 - DNA, 120 bp, Homo sapiens
atccgcccgcctcagcctccccgccaaaaaaacaatgttttaacaacaactatagtagcctccaccccttatccgtggcataagttccaagaccctcagtggatgtctgaacggtaccaa

SEQ ID NO: 25185 - DNA, 120 bp, Homo sapiens
gagcgctctcattcaacagggacacccaggcccgcagctcagcctttggagatggcaagtcccaagaatcagaagaaacagatgcttcctgagtcgtcaagtgaggggatttcatctccc

SEQ ID NO: 25186 - DNA, 120 bp, Homo sapiens
acacgtgggctccaggcgaaccatttcaggttcagggaagacggctcagcctaacctgggtggggctgacttctgtgcacaacatctacacctggccctctgtgcacaaccagagctccc

SEQ ID NO: 25187 - DNA, 120 bp, Homo sapiens
ccccgctccaccgatgcccagagcacagcgactgtgctgcaagcggggtgacctggctgatgacaccgcggctcacacagaagacaaaggagcaacaaagctgccagaactctagtttcc

SEQ ID NO: 25188 - DNA, 120 bp, Homo sapiens
acacggcacagatttcgtaaggttgtaaagaacgattgcaaaaccagaagcgcttcccctgacaggctctggttaaaccctagccgccaatgctgcccaagggctgctgtccagtttcac

SEQ ID NO: 25189 - DNA, 120 bp, Homo sapiens
ctgcggcacggacgctgctgaaactggtgctcccttcagaggggttctgctgacagctgaaaagacagtccggcaggccacgcaggacaccagtgtctacttctcaaaaagcccctccct

SEQ ID NO: 25190 - DNA, 120 bp, Homo sapiens
ccccgtccatcttataaaacgaaaggaaatctgtttttttcacgcacagagcagcgcttatttgtttccctagagaggcagcaccacagctttcccaggggcagtgggaaggggctgtaa

SEQ ID NO: 25191 - DNA, 120 bp, Homo sapiens
acccgcgtttcacgcgactcctctccaaaaacctgaaaaaactctcaagagaacttgcgtttcaggcaactcctcaccaaaaaccttaaaaccgggcaagtaagtccctgtgttactaat

SEQ ID NO: 25192 - DNA, 120 bp, Homo sapiens
caacggagaaccactgattagaggctagacaaactacagcttgtaataaagaaaatacaacttataataaagaacaggaagcctggtgcggtggctcatgcctgtaatcccagcactttg

SEQ ID NO: 25193 - DNA, 120 bp, Homo sapiens
tttcgcttgccgttttcacttactctctctgaccagcctcacaaccctttcatggtcccctgtaactagaaggctgtaaggcaggccacaagcccgtggcacgggcagaattctaaagat

SEQ ID NO: 25194 - DNA, 120 bp, Homo sapiens
ggccgggggtattcatcaattgggaacctaggtgaaaggtctttgcagaggtaattaaggctaccaatcagctgagcttaaaatagggcgattattctggattaccctgcgagcctgatg

SEQ ID NO: 25195 - DNA, 120 bp, Homo sapiens
agccgctcgctgctggttctgagttgcaggggctgcaagcaagactggagggaggcctccaggagccgagggaggtcagaaaagaaaccggacctcagtcctacagctgcaaggacctga

SEQ ID NO: 25196 - DNA, 120 bp, Homo sapiens
tgccgatgcattcccagagcctccaaaaaggaacacagtccggctggaaccttcctgttagtctcatgacactcagggcaaccaactgagccacactgtgcccagacctctgacccaagc

SEQ ID NO: 25197 - DNA, 120 bp, Homo sapiens
tcccgaagcctgtggtaatttgttacagtggcaacagaaaaccaaaacagctgtggaggtgtatgtgactcattactgaaaggtgagtttataagtgagaaacacaataaccaaaagcag

SEQ ID NO: 25198 - DNA, 120 bp, Homo sapiens
atacgcaaatggcccataagcacatgaaaagatgctatacctcattcaccatcgaggaaaggcaaaccgaaaacgggatggctggaattcaaaggacagataaacacaagcacggttaga

SEQ ID NO: 25199 - DNA, 120 bp, Homo sapiens
agacgttatattggtgggaacagaaatgttgcggccaattcagaaacactcgggtagctcgtcaaaatgttaaacataaagcaaccatttgactcagcaattccactcctaggaatacac

SEQ ID NO: 25200 - DNA, 120 bp, Homo sapiens
acccgcacatggatgtttatagcaacatcattcataacacacaaaagatggaaagaacctagatgccactgactgaggcacggataaacaaaacggggcgtagcaaaagggaatgctatt

SEQ ID NO: 25201 - DNA, 120 bp, Homo sapiens
attcggccgcttagagggatgacgatgccacgctacagcatggatgaactttgaagaaacgatgctaagaagtccgtcgcagaagacaacatactgtatgattccatttacataaaatgt

SEQ ID NO: 25202 - DNA, 120 bp, Homo sapiens
cagcgtcgagagaaatccacggtgtcgaaagtgggctggtggccgcccggggctggggctggggcaggaggaaaatgtgcagtggctgcagggtttctttctggggtgatgaaaatgttt

SEQ ID NO: 25203 - DNA, 120 bp, Homo sapiens
gatcgcttgaaactagcccaggagacatgcaaaacctatcgctacaaaaaaataaaaaataaaattaaaaaagctaaaaaattgaaaaagaaagtcccaagcgctgtaaagcacagagca

SEQ ID NO: 25204 - DNA, 120 bp, Homo sapiens
aaccgcaataaaaaaatccctgctgctcaaagcgtagctgagggccggtggcagcacagccatcacctaggagctcacagacctcccaggcctactgaatagaatctgcatttgaacagc

SEQ ID NO: 25205 - DNA, 120 bp, Homo sapiens
ttccgactaaagacaagggaggaggcccctctccctcaggccccgtgagggtgaggtctgcacctgcgggtggacagacacctggcttgcctcctcctagatctcgctctgggtagtacc

SEQ ID NO: 25206 - DNA, 120 bp, Homo sapiens
gcccgagaaacaagacagaaggaatcctggggcgtgggaggggagaagaaatactgaacctcactctctcccctccctccctccgagctcttgccaggacttcccactggccaaccagaa

SEQ ID NO: 25207 - DNA, 120 bp, Homo sapiens
actcgctgctacaatctatacaggtcaccccaagagcagagagctgacagaagcaggagagagggcgggaaggggcggacagaagcttcccagcatgtgcgcccccagcagtgtatgaag

SEQ ID NO: 25208 - DNA, 120 bp, Homo sapiens
agacgctttcctcttttccctaaaggggtgtgttttcatttcacataatatgaagacgccatgaagaagatgtaaactagggaaggaggtgctggagagaagggagctatctcagagagg

SEQ ID NO: 25209 - DNA, 120 bp, Homo sapiens
gtgcgtttgtgccatcatacagctactgtggtcatttctggctgagaaggtatcgagctgatgggaggctgagggccgctatagttttgtaaacaggaaagcagccttatgaaaaatgcc

SEQ ID NO: 25210 - DNA, 120 bp, Homo sapiens
aaacgtgtgctggcgtttgcgtccaggacactgaaagaaggaggatgcaggacagagaagccagggaaacggctgtggtggggccgcagacacaaagcagctgcggcagctgaagagaac

SEQ ID NO: 25211 - DNA, 120 bp, Homo sapiens
ttccgccaaacgagcatacgcgtttatcatgtacttacgggatgttcaccaacaaaagaccacagaacatctgccaaatagaccgtatcctaggccagaaaacaaaccaatacatttaaa

SEQ ID NO: 25212 - DNA, 120 bp, Homo sapiens
gcacgagccatcacacctggccgacttctacagcttctttcacaaatatggcgaagagaaaaaaggaagcaagagacaggagaatctggagattcattgcaatgcatgtcgagtcacaca

SEQ ID NO: 25213 - DNA, 120 bp, Homo sapiens
ctgcggttgtgtttttacatggaggcctcatcttttagccactcatatacatcctaaaacgtttcctaatccaactacacaaagttggatttgcttggagaccatggggagggcacaggt

SEQ ID NO: 25214 - DNA, 120 bp, Homo sapiens
tcccgtccagtctccactgctcttcttctaagctcagccggagggcacggccggttgggctcctatcccacaaatcttccagtgggaaatggacagataccattctgctagggcacatcc

SEQ ID NO: 25215 - DNA, 120 bp, Homo sapiens
agtcgaccagttactaggtgtactagttgcataactttttttagcagctttccccaccccccccaacaaacccttttggatgttcttagcttccgtttcctcatctgtaaaacgggggtg

SEQ ID NO: 25216 - DNA, 120 bp, Homo sapiens
tgacgacattggttatggcttgacattgctcaaatcgtcatgaagatataaactgagaacatgaacttaccaaacacttagcacgtgagctagcccaaaatcagctcttgatagagatca

SEQ ID NO: 25217 - DNA, 120 bp, Homo sapiens
aggcggggatcggacctagtgagagctgagcgcctggtctgggccctgttgggcttggtgagccactctgtggcttttagtgatacctgagccagcagaccttacctctgtgcgccaggg

SEQ ID NO: 25218 - DNA, 120 bp, Homo sapiens
gtccgatgctgttcacaccctgcgtcctcccgtcctgtccgggtccccctttcccacgtgcacaaggagtggctgacggtctcccaggactcccccaccaccccctacacactccacttc

SEQ ID NO: 25219 - DNA, 120 bp, Homo sapiens
cagcgatgagtaagaggaggcagggcctgcagccctcggaggcccaggactttagggaactcattagagagactcatttcgttacctgtgtcactttggtcatctgggaggcagacgtca

SEQ ID NO: 25220 - DNA, 120 bp, Homo sapiens
aaacgcaatgcccaagcaggatacagggagaggatgcagggtgggcggggaccaacttccaaccgtgacgcagggcttgtgtttgccagaggagaagaggaaggaaggagggttaagtgg

SEQ ID NO: 25221 - DNA, 120 bp, Homo sapiens
ccacggggagctctagcaaggtcccgggtggggcaggagctgccaggccccaggtgctactgcattcctgtggagggtgactctgggagggaaagcagagccgtgcacctccagggccac

SEQ ID NO: 25222 - DNA, 120 bp, Homo sapiens
aggcggaggttgcagtgagatgagatcgcaccactgcactccatcctaggcaatggaccgaccaagggactggggtcagggagcaccgaccaagggactggggtcagggaggcttcctgg

SEQ ID NO: 25223 - DNA, 120 bp, Homo sapiens
ccccgaggtggatcatctctctgggactggatgaggacagcatcacaggcgcaagttgagggcaggactcatggcttgcgggcgcagtgaacgtgacatgggccaggcttgcagagcccg

SEQ ID NO: 25224 - DNA, 120 bp, Homo sapiens
gaacgctccctggggccctgggtctaccacctgccttgggaatgctgcctgagctctctctctctggcattctgaccactcctgccagatacagctcgatctgtgcctttgttctagcac

SEQ ID NO: 25225 - DNA, 120 bp, Homo sapiens
ctgcgatggggcgcgtcctccttgtagcgtctgacgatggagtcgtttcccgggggctcggcggtgattgacatgatgctgctgcggctccgggggggctgcttcagacacagacacaca

SEQ ID NO: 25226 - DNA, 120 bp, Homo sapiens
acacgttacgggtgcataaatattacacacgcagggactcaattcaatgcaaaatcgtgcccgcctcctactcaggcggcatggaggcagcgagccggctatcagcggcgaccttggctg

SEQ ID NO: 25227 - DNA, 120 bp, Homo sapiens
gcccggagcggccgcagccgccgagcttgaagcacatctgctcgcacatctgctcacagggaggacgcaggcgggagccggccggctgggggactggggcgctgcctcgccatggtgcac

SEQ ID NO: 25228 - DNA, 120 bp, Homo sapiens
ccccgggctgcacctgctgtgggcacctgctctaaacatggtgaacagtgtgggcctggggcgtggggagggcagtggtgccccggacggcacagctgctggagggcaacctttgaaacc

SEQ ID NO: 25229 - DNA, 120 bp, Homo sapiens
agccgctcttaataagagcctgggattctgccacccagggcagccatcagacaggaatcattcattatcaaatatctgcctcccccagggcctgattttggaagctgagctgacaagctt

SEQ ID NO: 25230 - DNA, 120 bp, Homo sapiens
gcccggctctgcccgggtaggggttctgggctggggatggggccccaagcctcagctctgcggcggctccagctgctcacagctccctgccctgcctgccgcccgttccccaggctgcgg

SEQ ID NO: 25231 - DNA, 120 bp, Homo sapiens
ttgcggcagaattttcacggcctgtgccatgcgcgacagcccctgggaggcccagctcctcctcccaccaagtgttaaattgggaaaggaggcggcaagaaggtgtaaatacattgcgag

SEQ ID NO: 25232 - DNA, 120 bp, Homo sapiens
cagcgctgctcagaggctgggtcttggggaggaaggcgaggtgggtcagggctggtggggtggatgaggctggggccccgggacggtgctctgcagcaggagagggtgttgggggatgag

SEQ ID NO: 25233 - DNA, 120 bp, Homo sapiens
ccccggatggcactctggagggagagagggtggtggggataagctgggtccctggatggcattctgcagggggagagggtggtggggatgagctctggagggagagtgggtggtgggcat

SEQ ID NO: 25234 - DNA, 120 bp, Homo sapiens
gagcgcttcatagctgtcacctcattgaatccttcctgacaagtagaggttgttgttgataattgctttttacaaaataggaagcggagtgctgtagcatgaaggaactacgtggcccac

SEQ ID NO: 25235 - DNA, 120 bp, Homo sapiens
acccgcatgctgcgctgcctccagactcaaagcgtcttgttccactccctgtgcaaaatcttccaggggctcaaaacagcagtagagctcctgggtgtgcacagcccaccttggcgtgcc

SEQ ID NO: 25236 - DNA, 120 bp, Homo sapiens
ccccgttaaccccctgctgctccttgactcccactctgcagacggatggaagcgccggtcatgccctgctgacagcacagtgggctaatgccaggcctgtgttcacgctgtaactgcagc

SEQ ID NO: 25237 - DNA, 120 bp, Homo sapiens
ttccgtggggtaaatgaggtaatgcacagagggcacattgcgtggcacctgcacgtgacagcactcggtaaacccagagctataatagtggtaacatttaccctggaggaggcattcctt

SEQ ID NO: 25238 - DNA, 120 bp, Homo sapiens
aaccgtaacgaccacagggtgtcttaaacccagtgacggttcaggtgtgcgggggaaccccagtgggaggccagcagctggctgtggtcactgagagggcactgaggctcctaaggcaga

SEQ ID NO: 25239 - DNA, 120 bp, Homo sapiens
atgcgcacaggggatgtaggccgcttacccggtagcgctaagcactatgggtacacgtgcaggtgcatagtggacctagaactcccagaggccctgtgtcctccattcccccacacctgg

SEQ ID NO: 25240 - DNA, 120 bp, Homo sapiens
ctccggcagaccacgtgcatgtgcctgcacctgctttatgggagaattgagccctggtgacatttgtttcccccgggtcaccctggcggagtagcccttgggcacccctcacctcgagtt

SEQ ID NO: 25241 - DNA, 120 bp, Homo sapiens
tctcggctcctcatgaccgccatgttcttctcctcactgagctgtgcgtagcgcatggctaagttgtagttgtcgtccttcaccttgaccagctcgtcattgtagctgtcccgctcttcc

SEQ ID NO: 25242 - DNA, 120 bp, Homo sapiens
taccgctcctggaaggttagcagctccacgcgcgtcagcgtcatctgcttcttctcatcctccagctgccgcaacctggccagcagctcgcagcgttgcaggtccttggccttcatctgc

SEQ ID NO: 25243 - DNA, 120 bp, Homo sapiens
cctcgttcatcaggaagtgcgtgaggccctcgtggccttcctccactgtggagagggggcacccagtcaggcctgaggactgggaagtggaaaaaggaggttccagacgcagggcaggtg

SEQ ID NO: 25244 - DNA, 120 bp, Homo sapiens
caacgttgtgccaagctctttactcactctgcccacgaggcactggggattcagagtgagcgagactcacagccttggccccgggagagcttagggtgtaataagagaaacacatttaaa

SEQ ID NO: 25245 - DNA, 120 bp, Homo sapiens
gaccgtgaggatttcacaaagtaaaggtagatggggctatgagagtgtgtagcaggggcccagatccagccttgtgggcagagggggttggagaaggctcctgatggttgaggtaaaatg

SEQ ID NO: 25246 - DNA, 120 bp, Homo sapiens
gttcgggtgggaaaaggcattctaggaaaggggaacaacattgccaaggccatatggggaggagggaggaacttggcatatttcaggaactgaacgaagaccaaagtggccgaaggagag

SEQ ID NO: 25247 - DNA, 120 bp, Homo sapiens
aggcgaggctggtggtgtcagcagggactggatcatgaagggtccttgtgggctgcattaaagacctgggactttttttatattttaaaacagggtctcgctctattacccaggctggag

SEQ ID NO: 25248 - DNA, 120 bp, Homo sapiens
gatcgggaatggatatggagagttaatggggttgtgggagtctggactgtgggaagtgttggggcgggcgagaagactgattcaagaatgtttagaaaggaagattaagaaggcaagatg

SEQ ID NO: 25249 - DNA, 120 bp, Homo sapiens
ctacggggtagaatgaacttgtgttccacctggcgccattcatgggggatggtccgtgaacacccacttctcttggttcctgcttccctttgcccctgttaacctttcatcatcaagcaa

SEQ ID NO: 25250 - DNA, 120 bp, Homo sapiens
tgtcgatatatcaaagaaccaacttttggtttcattaattctctgtattccttttctattctcaggttcatttgcttctgccctagtcctgattatttcctttcttttccttgctttagg

SEQ ID NO: 25251 - DNA, 120 bp, Homo sapiens
cctcggaaggtcccctgaggacattggtgacacaaggaattatgttatgcttcaactggggacatgagtgtctgtttcattgttctctgcctcatagatacacattatatatacatattt

SEQ ID NO: 25252 - DNA, 120 bp, Homo sapiens
agacgcaattcgaaatgtattttcccttctaacacttccctctaactcagcatgactcagcctcatcaccggggatgaacccagtgactctgtcaagctctgggcagtttctttgaaggc

SEQ ID NO: 25253 - DNA, 120 bp, Homo sapiens
ccccgaggctctgaactttaacagcatggcaggttggatggcccgtccctacctaagtcttagctggagcttgtcgcaactcgcaactcaaacccaacctttggcagggtttgacttcca

SEQ ID NO: 25254 - DNA, 120 bp, Homo sapiens
ggacgaattccatgagagttgctggcctcacgtcctgacttactcattcaagacctctactgtggcttcctcttgctgttatgataaagttccaatcttttttttttttttttcttgaga

SEQ ID NO: 25255 - DNA, 120 bp, Homo sapiens
cctcggccgctgatgtttaatcaaggacttccttggttttggctttgaagactaaccacaggtgacatgagatctcccggggctgacagaagctgttcctgtcgggcaacggctgggctt

SEQ ID NO: 25256 - DNA, 120 bp, Homo sapiens
ccccggggaggtggtggcgacaggcatcgctgcaggacaccatctccctggtctcctcacggcctccctgctctgtggctgggacagggccaggggttggggctgggtggggaagggaat

SEQ ID NO: 25257 - DNA, 120 bp, Homo sapiens
ctccggcaggagaagggatcagagacagtacagagtggaggaggggatgggctctctaagtcagatggagcgagctcacggcctgcactgggtggtgacggaagagacccaggcaaggag

SEQ ID NO: 25258 - DNA, 120 bp, Homo sapiens
gggcgcctgtcagggctaaatcatgtccccacaaacgatgttaaacctccaaaagatcatgtcctaacccccaatgcctgcaaatgccatcttatttggaaacagggtctttgcagataa

SEQ ID NO: 25259 - DNA, 120 bp, Homo sapiens
acacgtgaggatgaaggtggagatcagagggatgcgtctacaagtcgaggatcactgcagattgtggagaaccaccgggagctggggagaggcctggggcaggttctctgcccccagaag

SEQ ID NO: 25260 - DNA, 120 bp, Homo sapiens
tgtcgtggcaggcccagcatactaatataggacccaagaggtagctggggaaagattgggcaaactgtgtgcatggcatcattactcaggtcaaaaatttgaaatgaagctcaaacttaa

SEQ ID NO: 25261 - DNA, 120 bp, Homo sapiens
tgacgtggctgtgggtctcatttcctgcacggcctgttggggtttgtgtagtttctgggcactcagcttgagaggctgacctcccaaaggcattgggagcctgcgggagccagccagggg

SEQ ID NO: 25262 - DNA, 120 bp, Homo sapiens
tcacggaggcttcaaagcaggggaggacttggttggatttgcgttttacaaagactttagaaagatgtctcttccattattaacaggccactccatgccagcctcttgtgaagggcctgt

SEQ ID NO: 25263 - DNA, 120 bp, Homo sapiens
gtccgccctccgctcctcccactgcagcccatgggcctcctaacatgaacatccatccctttgctcccctgcaggaagccccgccctgatctcctgctgctcccgggatgaagcccaagc

SEQ ID NO: 25264 - DNA, 120 bp, Homo sapiens
acccgaccttcccactctggccaccggagcctccatttctccagtggccatgcccttccctgccctcctgacctggcacatctgtttgttttgttttttgagagagtctcaccctgttgc

SEQ ID NO: 25265 - DNA, 120 bp, Homo sapiens
ctgcgtggcagctctttctcccactctccattcattccctgccctgtaggttatttttaagtccacaggcttctctcttttatttcaactgccaccagcttggtccagatggtggctgag

SEQ ID NO: 25266 - DNA, 120 bp, Homo sapiens
ctgcgctgtaattccccaggcccctctgagccactcttatggccagggtcacatctgtgagctgacatcctctccactatagtggccttctgggctgacagttcccacattcctgccaat

SEQ ID NO: 25267 - DNA, 120 bp, Homo sapiens
ccacggtgtgatctagtacctgtctgtgtagaggctattcaaatagcctctgtagacccaggctagaagtccattcaatccattaactgttttctttttattctttcctctgcagggaac

SEQ ID NO: 25268 - DNA, 120 bp, Homo sapiens
tatcggcattagagtcaggctgacaagagctgaagtgctgtctccatcacttcccacctgtgaagcttgtctggccagtaccactttgtctctctttggggaaatgatctcctccacacg

SEQ ID NO: 25269 - DNA, 120 bp, Homo sapiens
tcccgagaactcagcatctgtggtctcccaaatcagctctatcccttgcctttccaggcatatgagccaataattctttttcttttttttttttttttttttttttttttgcctgagcta

SEQ ID NO: 25270 - DNA, 120 bp, Homo sapiens
aaccggattcatacagtcttctatccagggctggaagttacaagttgccctgctctggaggtccgagtgctgagcagtgagtgactgtagacgtgtggcaggcattcctccctccttgaa

SEQ ID NO: 25271 - DNA, 120 bp, Homo sapiens
gcccgcgagttccaaaagctatgtctgtctcacttggctttgtttttctagcccttactacagtgactagtaatgaagtaagtgcccaaacacagatgtatgaaataaagagagaaatga

SEQ ID NO: 25272 - DNA, 120 bp, Homo sapiens
ggacgttgcttctctctgttgtacttaaggcctgttgcttcacggcccttccctacaggaggctgtaacactcataacgccgattatgactattgtgagaacaaattggcttccagatct

SEQ ID NO: 25273 - DNA, 120 bp, Homo sapiens
aatcgcacataagaatcacctaggaagcctgttctggagtctgcccagagctactgaccgagatctccaaagactgagcccggagagctttttattttcaaaaggctcccaagatgattc

SEQ ID NO: 25274 - DNA, 120 bp, Homo sapiens
tcccgtcaatgtgaacctaagttgaaaaaagaaaacaattaagaggatgtaattatctgtcctgattactgaattaaaagagtttgtgtttatctgtcccagtgtaaaggtggtaaacaa

SEQ ID NO: 25275 - DNA, 120 bp, Homo sapiens
ctccggagctcctacacaaaaacctgcagagcatcctagaagactctagtgaccctgccttaagtgacctggcagcaaacaaaggctgccgagtattattgtgtataaatgtttcccaga

SEQ ID NO: 25276 - DNA, 120 bp, Homo sapiens
gcacggtttgaaaaagctccttgccaatggtgggtgggggagtttcctgcagaaacatctcatttgaattactacatggacagatccatctacttacgcaatgcttaggaaattgctttc

SEQ ID NO: 25277 - DNA, 120 bp, Homo sapiens
tggcggagctttggaaagtcccagaaaacactcagaccaattacatcagaatgtctgggggaggaagcagggcgctagtaccttttcaagttccccaggtaatttctgtctgcagccagg

SEQ ID NO: 25278 - DNA, 120 bp, Homo sapiens
tctcggtctgtgttgttgtggcacagcgagcaaatcttgtgggaatagaatgatttttgacaatgtcttctttttggtaaagggtatgtgttaatgcataacataactaggataactttt

SEQ ID NO: 25279 - DNA, 120 bp, Homo sapiens
atacgtcaggctttttctgaaaaaaatttgagcttgagttactagtggtttatttgggacctctcttagttccatacttcagtgttccttagagcagccgtccccaacctttttggtacc

SEQ ID NO: 25280 - DNA, 120 bp, Homo sapiens
tgccgggtgttttaacactgcatatcttgggttgccatttttccaacttcctttaacaactttccagcttgccatcacctaaacccaaaaccaatgacccatatttcaggtttttgtaat

SEQ ID NO: 25281 - DNA, 120 bp, Homo sapiens
ctgcgagtcagctgcagctctgccgagcttggctgtgttctccacgtctcctcatgccaggctgaggctgaatgagcagctgccatctgggccctgctcttctcatgctggagggcagga

SEQ ID NO: 25282 - DNA, 120 bp, Homo sapiens
ctccggaggggaagcgggaacccccaggatctcataaagcctctgctgggacctggcagccgtcccctcctcccacaagtcatatggcaagcccaaggttaatggggtgagcctgtaccc

SEQ ID NO: 25283 - DNA, 120 bp, Homo sapiens
tcacgatgaggagagggcagagacaaatcattttgaacaagtgatacagtctctcacaggcatagattccaaaaagaaacccaggagagagtcaccatgcctcaaatcaagaacagccat

SEQ ID NO: 25284 - DNA, 120 bp, Homo sapiens
gaccggaggccctccagtccaggtggacatccagctatgcagccagctcagtgcagccgaaagaacctgggaggcagtccggaaagctgagttcctcttacccgtatccctgcagcaagc

SEQ ID NO: 25285 - DNA, 120 bp, Homo sapiens
aatcgtgggttgctttcgaggatgccgttctgatctctgccagcgcacttcacatggcagggaacaggctgccttcccaggaggccgagctgcagtagaaggagcatgagtttaggaatc

SEQ ID NO: 25286 - DNA, 120 bp, Homo sapiens
ccccggatggctgccccctgctcaagtgagccagggtgggaggagatgaggaagacagcccctctggctgtgccttttggcccccttttctctcagttgccctaaaagttatttattcct

SEQ ID NO: 25287 - DNA, 120 bp, Homo sapiens
agacgcagtgagaccctcatcctctactccatcatacacctgttttccattacggagttctgctgtcctctagttcagctctgctctccagcaggctctctcgggtggtgaccagatggc

SEQ ID NO: 25288 - DNA, 120 bp, Homo sapiens
ggccgccaataactccagacttaaatcctgcctgggctgcggggcggacaccccatctactgtgcaggcactgctgttggctcctgtggagcagctgtggagcaggggtgggtggagtag

SEQ ID NO: 25289 - DNA, 120 bp, Homo sapiens
ctccgtcctccagttgtggcctctgctcaggttcatatggccacacagcaacactgtctaccttttatgcttctgctgatccctacctctcccaaagacagtaagctcgggaaaagggga

SEQ ID NO: 25290 - DNA, 120 bp, Homo sapiens
tgacggtgttagtgaccccaccacacccactacagtgttgagcactcatcacatgtgtgtccgtggagctggcctatatgcgctctccagtatgaggctgtattatgtctaaggatacac

SEQ ID NO: 25291 - DNA, 120 bp, Homo sapiens
acacggctttaaagtaggaatattttttaatttactacaaagaagctcagggattaaagaaccatccgtctcttaattctcatggtcgatggctttatctttttgcatagcgtgcttgcc

SEQ ID NO: 25292 - DNA, 120 bp, Homo sapiens
aagcgaggcacctcttcatatataaatcagcctttttttgaataaaagttaaatacaacaggatggaaatgcagctttgaaaacctataatgagcaggagggattattatgcatctacac

SEQ ID NO: 25293 - DNA, 120 bp, Homo sapiens
ccccggggaagtgaatatttcatgttagaaaaagtagaggccaagggcaaggttcatttaaaatgtataaagataataaaagcgctcatggatggaaaggccatctgaaaggactgttca

SEQ ID NO: 25294 - DNA, 120 bp, Homo sapiens
gtgcgaatggccccctgcgtggtgctgcgtcagcagacaggagcattattttcccctggaatgtgcagcgcttggtgcctctgttctctctgtagtgcacagagccaagcagagagagag

SEQ ID NO: 25295 - DNA, 120 bp, Homo sapiens
gagcgtttcaaagagagacaaaacaaaaacagattattctgctgtgctgccacatcaccacagcacaatactctgttcaaaattgtctcttgtcaggcacattcttcaaacagtattatg

SEQ ID NO: 25296 - DNA, 120 bp, Homo sapiens
gtgcggaatatttcctgaagaggccagatttctgtgtgtgtatgtgtgtgccgggcatctgtgtccttagcattttggaaggtgcctgagctttcggaggtcaccaaaaagtactgagtc

SEQ ID NO: 25297 - DNA, 120 bp, Homo sapiens
catcgtgccattcggttaccttcggcgctaccatcctagtctgaagcttttacaggcctctaagaaggtcttcctgagaccccagtcttgttttttgcataagtacgctgcccaggctcc

SEQ ID NO: 25298 - DNA, 120 bp, Homo sapiens
agccggtggtagcccaggccagccatctctttactgtacccattttgtctctagttctgtattaggtgttggaggagggaggtcacacagatgtgaaaatgagtcagctgaacaaggagc

SEQ ID NO: 25299 - DNA, 120 bp, Homo sapiens
agacgtttgacttgcacctggaaggatgactcagagcagagatgaggtgggggagggcattctagggaaggggccaacttgagcaagagcttgtaggtgcgggggcgtgcagggcaaggg

SEQ ID NO: 25300 - DNA, 120 bp, Homo sapiens
gatcggccaaggaagtctgggaaacaaaccaaactacagaggagcttgagcagagtcgaagtttattttgttccctcgttgaaggtttaaagccgaggagctacgtgatgagcgctgtgt

SEQ ID NO: 25301 - DNA, 120 bp, Homo sapiens
ctccgtaatagagaggatgagccagtggatccatttctaaatgtgtttcttaggctataggaggaggagctttctttatttattccaaaatttgctttcagatgctaatgcgtgtattgt

SEQ ID NO: 25302 - DNA, 120 bp, Homo sapiens
tcacggtaactggtgcacagtaggcactcagtgtttttgcatgaccaaataagcaagtacaacaccagcgtgccacagagtgtggttcaagaaacattgcattctgtgaggcgctgaagc

SEQ ID NO: 25303 - DNA, 120 bp, Homo sapiens
atccggggaagaggtactgattgctcaagctaagcttcagtggactgaagatagggaagccaaccacccacaactcctccaaatacctccctctcccaggcaggcatggctggggcaccc

SEQ ID NO: 25304 - DNA, 120 bp, Homo sapiens
acccgcttctgggctctcctgccccctgggcccaccccacggatggcttttcatgcatttacttatcattctcctctggcagagaccggcacggtctggcccgtgggggctcaagacagt

SEQ ID NO: 25305 - DNA, 120 bp, Homo sapiens
acccgatttctttatttatacatggacttgcttgaaaaagatttctagtccttaaccaaaaaaaagtgcagtgacctttccactacgacatctgttcccacgagatgcaagtcacagttt

SEQ ID NO: 25306 - DNA, 120 bp, Homo sapiens
aaccgtggagggccgaaggcaagcaagatgtggatcaggctcttgtttttctcttctcttcatcttcccctccccttctaaagtgagagcttgtgattaaggagggtttaatgacaggga

SEQ ID NO: 25307 - DNA, 120 bp, Homo sapiens
taccgggggccctgccatgaagccttcagggcatcggtatggaaatgcctccagctcctggctcgcgctaagcgtacctggttctctagatggctcccggtcttcttgcctcctggccct

SEQ ID NO: 25308 - DNA, 120 bp, Homo sapiens
aagcggggttgtgattcattcctcgtgattctcggccttaccactaagaaaacgaaagtgtagtgatgccctctgtagaacggagcctggctggggaagtgtaaaatccctcagtcttct

SEQ ID NO: 25309 - DNA, 120 bp, Homo sapiens
aaacgtttatgggatggtttcctttatcaaaagattcttctacctcccagcctccaagacaagcatcctgtggccctcttctgtgaggaccggctgggggcggacccttttaaagggatg

SEQ ID NO: 25310 - DNA, 120 bp, Homo sapiens
ccccgagatgcagaggtaattaataggccctgttgtcaaatcaaaccaggcagcagactctgaaccctgaggctggggttctggactttcaggagctgtttacactcggagtgaacaaac

SEQ ID NO: 25311 - DNA, 120 bp, Homo sapiens
tggcgggatggggccgagggcgggaaagcggcgtctccaggcttgctctgcctctcccgcagtctgattaatcgcctcagtcacctggtttcaacagttgtcctcttgactgtctctttc

SEQ ID NO: 25312 - DNA, 120 bp, Homo sapiens
aaacgatgtttgttcactgtgcctgacggagcaggtgaatggctgactgctagacactgtgatgtctgaaggaagaaagggatggacgaagagctttactgagtccagtatcagtcaagc

SEQ ID NO: 25313 - DNA, 120 bp, Homo sapiens
tggcgttcctgaatgagagcaatcaaggaggaagttttagaaggggaatgtttgcagaggtgcgggtggaggggaaccactgttaccgggggctggtagcctcagagcgggtttcactct

SEQ ID NO: 25314 - DNA, 120 bp, Homo sapiens
gcccgaggcagttgcagaaccccagaaggagagattatgtagggtggctgcttggaaaagagggggacccaggtagccccaggcagcctcccagtgaggaagaaagagccttacatttgc

SEQ ID NO: 25315 - DNA, 120 bp, Homo sapiens
acacggcatgaatatttcaccacagtataattttataatgttcctgtagaatcttaccatattgaatgcttggaacatttattcccttttttcctatagcagacactcttgtacataaaa

SEQ ID NO: 25316 - DNA, 120 bp, Homo sapiens
tcacgtttctattcattaaacaatcattgattccatttttttcttatttacttgttacagcttttacaagtttattatccctttgtggaccatgttgtttctttttttcttttttttttt

SEQ ID NO: 25317 - DNA, 120 bp, Homo sapiens
cttcgcttgctttttctatttaaacgtttatttctttccaattttgttgcattttggttatttataaatattatacaagtgatcattgctaaagtatacatgagtgtagctgtctcttgt

SEQ ID NO: 25318 - DNA, 120 bp, Homo sapiens
ttccgcatgagcttgtgcctatttctacgcagtccttcaattcaaaacggctggctagtgttgtcaggagctgccatttccacttcctctcatcacatttcctctgctaacatttctagt

SEQ ID NO: 25319 - DNA, 120 bp, Homo sapiens
ccccgttttgttatatccagtggtcacttccctgttctgatttcacttgctctttcagcagcagcagacaaggacggccaccacttccttctgctcttgatttcagtggtgccactccct

SEQ ID NO: 25320 - DNA, 120 bp, Homo sapiens
tgccgtactagtttgcttgtttcatgtttattgctgtgtagtattacattatgtgactataccacaaatggtatatttattcacctcttggtggacattagggtcatgcttggttttggc

SEQ ID NO: 25321 - DNA, 120 bp, Homo sapiens
agccgactgtacaggattcagcttctttctggattcaagtagccacactctcatcctcccttcaggtctacacatgatacaagccaggctgcctctcactagggaacactgcaccaatat

SEQ ID NO: 25322 - DNA, 120 bp, Homo sapiens
acacgtttgtgtgcaggagatatttcttttgaaagtaaacactcctttagccatatttctccttatggtcccttttcctctattcttttcccttttcctctgttcttttctctttttttc

SEQ ID NO: 25323 - DNA, 120 bp, Homo sapiens
gatcgctgtatctttttaaaaaggcttgctaaataaatatttgttgaatgaataaacgtgtgaataaagagcaaatttttttccaggaaaaaagcctagtttgattccaggttgatagaa

SEQ ID NO: 25324 - DNA, 120 bp, Homo sapiens
ccacgcagcctccgctgctgcttcctctggcttcacatcacaccaccataagccacatttctctgcaggtcaaagatgaaggtcagtatggcatggtaaggccacactgaatgtttataa

SEQ ID NO: 25325 - DNA, 120 bp, Homo sapiens
gaacgtagccttcttattgaaggaaaactgaatgccgagtgttgctccattaatcgacaggccttcccaattcaattctacatgaccacaaacatgattctccaatttgtcctttttctt

SEQ ID NO: 25326 - DNA, 120 bp, Homo sapiens
cttcgcttgcattctaactacctagattattcaaagaaacctcttatccctttaaatgatttcagtttctatgacattctgaattctccctgctgtgaattaaaacttgccgaagcagag

SEQ ID NO: 25327 - DNA, 120 bp, Homo sapiens
tctcgacctgttttacaatgtcatctaccttcccatcctccaaatgcattttacaaatttcaacctcagtgcttttgttttcaaatattcctggcttgttcattagtagttccaaaattt

SEQ ID NO: 25328 - DNA, 120 bp, Homo sapiens
taccgcagttcagttttttggagggggaagttgtgggtattatgattatgtagtgtagggatggggatgttaaattcttggctaccaattttttaaatctcccaaaatgcacttcttcat

SEQ ID NO: 25329 - DNA, 120 bp, Homo sapiens
atacgtgtgataaggagttaatttccaaaatacttaagaaacatatttgctacaatatttgctaaaactcaatagcaaaaaaaaaaaaaaaaaaaaaaaaaaacaacctggtagcacaat

SEQ ID NO: 25330 - DNA, 120 bp, Homo sapiens
ccacgttcattgcagcattattaacaatagtcaagatgtagaaacaacctaaatattcattggaaggtaaacgaatcaagaaagtttggtgtatacattcagtggaatactattcagcct

SEQ ID NO: 25331 - DNA, 120 bp, Homo sapiens
attcgtaagcttaaaactcttcaaacataatattttgcaataataaaaggctctctctagcctcatctgtctttcatcaccacacacacacatgcatgcacacacatgcatgcacacaca

SEQ ID NO: 25332 - DNA, 120 bp, Homo sapiens
acacgtacacatacatgcacacgggtatttcagcagtttagcctcccttccattcttgtaatatttcaagtcccttctatccccgagtctttcttatccttcagctcttagatcaaacac

SEQ ID NO: 25333 - DNA, 120 bp, Homo sapiens
catcgctcctggctccgtgggttcagggtgtggcctgtctctcttctgtccccagtatcagagcagaatctggtacatggtagacactcagtacctgcgtgtaaaaattgaatgaggatg

SEQ ID NO: 25334 - DNA, 120 bp, Homo sapiens
gaccgcagaaaggaaactgcagataagggaagactactgtacttcagaacatcatgttgttcataataaatacaaacaatttttctgtcaactaaaaaataaataaaaataaaatgttta

SEQ ID NO: 25335 - DNA, 120 bp, Homo sapiens
acacggaaggaaattctaacacatttctgcaacatgggtaaaccttgaagacattaggctgaattaagtgcaccatttgattcaatacatattcttttaaaaaatctattccacgtcctc

SEQ ID NO: 25336 - DNA, 120 bp, Homo sapiens
ttgcgatgataatgtattactcttaaaatcagagaagctgtaatgccatttcaaacaaagtagaaaagcctccccattccctgccccaccacttccctcttgcaatgcggtttttcaata

SEQ ID NO: 25337 - DNA, 120 bp, Homo sapiens
aagcgcagagtagaggaaggtgatcctaaggattctcctcctaagagggccaggactgcacctcgctggcctggggttcacacaggactggtcctggagccctgcctgctccatctgggg

SEQ ID NO: 25338 - DNA, 120 bp, Homo sapiens
caccgaggcgtgcagcgacgctgagtgactcttccataatgcagggctgagtgggcagcaggccagacgtgggtcagggagcgttcatcccgaaccgtgtccagccctggcctcgccggc

SEQ ID NO: 25339 - DNA, 120 bp, Homo sapiens
agtcgcccgccctgtgcagccaggggacggcgacgaggctgaagtgccgcttgtttccgagcctggatgagtaatgacgcgtttcttttccagaagcaacgtaaatctggcttgaggctg

SEQ ID NO: 25340 - DNA, 120 bp, Homo sapiens
aggcgcccggccctgcggctgccgaatcttcgcgaagcctgcatccgaggcgcgcactggttccaggccctgcggccatgcgagggaagccgcagcggtggccgcagcggtggcggctcc

SEQ ID NO: 25341 - DNA, 120 bp, Homo sapiens
gagcggtgcgggctggtgctggcggcaggtgggatggaggggggtgggctcttcatgtctctcaacccctgattagaatccgtgtcgatttctggacacgcgggccgagaggagctgaga

SEQ ID NO: 25342 - DNA, 120 bp, Homo sapiens
ggacggcagctaaatggttggggcctggctcctggctgaccctgtctcatcccgggtggccggctcccacccgtttctacagggccggcctcctgccctaggattctgactctgcaggct

SEQ ID NO: 25343 - DNA, 120 bp, Homo sapiens
aaccgccgcgcccggccccgagcccacgattctaacacgcagtggaggctgagagccttggctggggcgccctagcgtcaagctcaccatgtggcctttgcggcacgtctgcttctctct

SEQ ID NO: 25344 - DNA, 120 bp, Homo sapiens
gaccgctcgggtttgaaggcccagggcgggccccagacgtctcaggggccatagaggcgctgcttccggaactgctggaagaggatgaccaactgctgctgccaggtcgaagcgtccttg

SEQ ID NO: 25345 - DNA, 120 bp, Homo sapiens
ttgcggagggaccctaccaggaaggacagggagccacagccctagtcccctcggctctcctcccgcctcccagtgcctggtccagtgtcccagtggcggaagcgaacagggaccaatccg

SEQ ID NO: 25346 - DNA, 120 bp, Homo sapiens
tgccggaaaatcactactgcggagtgcggagaggtggtttggggctgataggcaatggtttaattgcaggcagagtcttgcgcctgatttgcctatcataatgtccttggtggaagttat

SEQ ID NO: 25347 - DNA, 120 bp, Homo sapiens
ttccgtcctgtcctcatgctcaccgcacagtctttgaccagagtttttgcatccccatctctgcaacttccctcaaatctgctgcaaggcaacacatcctctgcctcctttaaatcccga

SEQ ID NO: 25348 - DNA, 120 bp, Homo sapiens
ccccgacctaagtcagttccgtccatcataaagtcccttgacgccatgcagcaattcagcaattcagcatcatatttatcaaggaagcttgcttgcatttgtgagatccctttggcacct

SEQ ID NO: 25349 - DNA, 120 bp, Homo sapiens
aggcgtgagccaccacacctagccgaactgcctctctctttgctggcctcttaacaccttgcctggcacaaaggaggtcctcaaaaatgtgtgttgaataaaacttgcacaattcactaa

SEQ ID NO: 25350 - DNA, 120 bp, Homo sapiens
ctccgtgaagccagtgcccatcacaatggctttcacagagtaaaagggtcctaaagtggttttcctgggcatggtggctcatacctgtaactcctgaattttgagaggccaaagtgggaa

SEQ ID NO: 25351 - DNA, 120 bp, Homo sapiens
gagcgacagagtgacatgctgtctctaagaaaaaaaaaagggttttcactcctatctctaataactcctcttctaagaaaatattacaagaatgtaatcagaaaggcagacaaagattaa

SEQ ID NO: 25352 - DNA, 120 bp, Homo sapiens
tgccgcaagtcctgggttcataactgtgactgatagacagcaaaagggtaagcagccaacatagccaatgaggaccgcatgctaattaggttcctggcacaatttcggaatataagaagg

SEQ ID NO: 25353 - DNA, 120 bp, Homo sapiens
ctgcgaacaactcagtggggtcacgcagtgcagctgtgcttagtggagggtaggcagtcaggacaaagtgaatcctcgggttgtgacccagcacgtgatgttagcaatgtggtgccttgg

SEQ ID NO: 25354 - DNA, 120 bp, Homo sapiens
tcacgaggcagagagtggtggaccgacaggaatagctgccaaccctgaggcagagatggacgtctagggatctctggtgggaaacatgcctgatcacagataagactcctcaagcggcaa

SEQ ID NO: 25355 - DNA, 120 bp, Homo sapiens
gaacgtagtttgaaaccttgcactcgatcaccctgttcccagtggaaatagatgcctgcgctatagtaagtgtaaactttctctcgctgtctttcttacacgcacacacacaaatacaca

SEQ ID NO: 25356 - DNA, 120 bp, Homo sapiens
tggcgcagccattgaggtgcccagcacccagacacacagcatttaactggggcagctggcttctcagacctgcctgggaacgctaactgggcattggatacggtgcgagagagagctcag

SEQ ID NO: 25357 - DNA, 120 bp, Homo sapiens
atgcgtttatggtgtccagcagatgaccatcccagtgtgggactttacagtagtaatgagcaatggaaattttgaaaatatttctcagaaaacaaccgctggccagagagccctaattta

SEQ ID NO: 25358 - DNA, 120 bp, Homo sapiens
tcacgtgatgaattttgagtttctagtgtcacatgtgccagagttttcagagtcctgaggcctgttttgctttgttttctttgcctttttataatactaaagattaaagctagtcagata

SEQ ID NO: 25359 - DNA, 120 bp, Homo sapiens
aaacgatagataatactgtttttgctggtggaaaataagctaatcgtccttgttgcctgaagactgcttttcagcagaacggccaggccctgccttcacatagagatgttacaggctctg

SEQ ID NO: 25360 - DNA, 120 bp, Homo sapiens
tgtcgagcagagtgagtagagtttcatgagttacatgaaggattgtaggtgtgggtgcccctgagcctcctcacacttcagtgtatttgcgatgttgcattgatgctgttcctgagctag

SEQ ID NO: 25361 - DNA, 120 bp, Homo sapiens
tgacggagcccacgccacgtgaactccaattcccactgcagtgtccttgatccacactgacattccagagcacccccgttccgctctgcagcaaaagttaagacaccagaagcctttgta

SEQ ID NO: 25362 - DNA, 120 bp, Homo sapiens
gggcggtggagggagtaggagatggggccagggatagcagagcccaaactgtctaagggaatagccttaagggacattttaatgatgttggctcttactctgggtgagatgggacgtcac

SEQ ID NO: 25363 - DNA, 120 bp, Homo sapiens
ctccgaacagggaaacggcacaaattttaacttcatcactggcttcttctttgagctctttcttgacctcggttgtcttgtcattgaaaaaaaaggcagcaagtgtggttgtgtgccagg

SEQ ID NO: 25364 - DNA, 120 bp, Homo sapiens
tcccgctgttagattttatgatctctgctttattttagaggctaacgagggtaagtatctgcctagagtcatggagctagtaactgacgaagctaaggtggaattgagtctgttattttc

SEQ ID NO: 25365 - DNA, 120 bp, Homo sapiens
aaccgcatcacctttcacaaaataaatgcatctatcagaagaattggtggaccaatcttggggacatggggaggcaaagttgagtcacagagagccctggttgaaatataggttccattt

SEQ ID NO: 25366 - DNA, 120 bp, Homo sapiens
gcccggattgcagaggaggcacttggtaaggtgtagaaagcagaatttcagatgatagtccaacactgtattcttcgcaaccttctcactgctggacacccaaggactcagtaagaggga

SEQ ID NO: 25367 - DNA, 120 bp, Homo sapiens
actcgggtcccacacactgcagtcattattttactgtgtcttataggctgtgctttgctttacgggcttagatctacatctaatttggttccccttcaatatttcaatcttcattcaggg

SEQ ID NO: 25368 - DNA, 120 bp, Homo sapiens
ccacgccctgtgtccccagcttgacccgacagcttccatgagtaatcgggtctccaccctggggataccctcccatctgcaggctgcatctgcacttggcttgggacagccttggccagg

SEQ ID NO: 25369 - DNA, 120 bp, Homo sapiens
cctcgtggccgcctgcctctgctccctgccctttgcctccctctggtgggcacagtggccatcctggcagcagggcttggtcagggcctttgaagtgacctgctgtgtcagactctttgg

SEQ ID NO: 25370 - DNA, 120 bp, Homo sapiens
tcacggaaagtggctgcagtgtgcaaatgtttcagaactgctggggcagagaccaaggcccttgttccctgaaacattgattaagacgcctaggcttctctgatgcctgggtccatgtat

SEQ ID NO: 25371 - DNA, 120 bp, Homo sapiens
aaacgtttattgcatacacaatgcgaggtgcaacacagtaggcacagcagtcatgacacacccccagcacctcacagtcagaggaaaaacaaggacaaaagagccacatttaagcagaat

SEQ ID NO: 25372 - DNA, 120 bp, Homo sapiens
taccgatctggacgttatagtccattcataaaatgattgtgatacatttgaaagctaaaaatgtttttttttctgttgaaaaagtaacaaacacatgtataaaatctgaaatttaaaagg

SEQ ID NO: 25373 - DNA, 120 bp, Homo sapiens
ttccgccatgtccccaccacccagagagctgctgtttaccttctggtctgccaacttctttaggaacaagagaactgcaaatatatggtacccaattgagatacagaaaattgttgtaat

SEQ ID NO: 25374 - DNA, 120 bp, Homo sapiens
ttacgagaattaaatggaaattaaagaacatctgtatagatgcaagataacgagatgaggaacatgtctctacataaatattcactgaattcctgattttcatttttacactgacatttt

SEQ ID NO: 25375 - DNA, 120 bp, Homo sapiens
ttgcgtttaagtgcatgcattctggtaatagtgtttcccaaagaatagtttgtggacattagtctcataatgttccacagaagaagggctctgtggtctaacacgtttcaggaaacatta

SEQ ID NO: 25376 - DNA, 120 bp, Homo sapiens
atacgttttgatgactctgaatgtcagttttcacactaggtcacttttgtataactgtcagagagacatgctataaattttggggattttacagtacaatattgcacatcattcacactg

SEQ ID NO: 25377 - DNA, 120 bp, Homo sapiens
tcacgccccctggaggacacagagccaaggccagcaggtcagtggccttggtttgcagcagtgttggcagaagcactttattctctttcctccatttcctatgtgtactggagacgcaaa

SEQ ID NO: 25378 - DNA, 120 bp, Homo sapiens
aaacgataaccttctaggtgaaagaaagtactatttgagcttctcttctccaaactgttggtctttcacaatgaaaagagtttggcctcaacaagtgaacaaggaccaagggtaactaaa

SEQ ID NO: 25379 - DNA, 120 bp, Homo sapiens
aaccgaattgacttagcatttactgcgttttaaaactcaaatccatttggtaagggggcctaatcatctaagaaaaacagtcatgtgaagaaacaggatgctgcatctgattgatttata

SEQ ID NO: 25380 - DNA, 120 bp, Homo sapiens
tcacgtcaggataaactcattcccacactacaaaatatgccttcaaaatcccataccctgcatgagaccaaattctttggcttttggagggctttctccacagcctgaaattgattcctg

SEQ ID NO: 25381 - DNA, 120 bp, Homo sapiens
actcggaatcttttggctcatggcaccagcagtaattgaaagaagataccaccactgttttgtacattcatggagctgctcaggagaaatgtgctttctttcctgatcaaggctttactg

SEQ ID NO: 25382 - DNA, 120 bp, Homo sapiens
tatcgttcctaacatcccttttgctgttgttgtttagttgttttacttttttatttttcaaggataatttcaataatattgccatgtacacaatggcatgttacatataaatatgtcaac

SEQ ID NO: 25383 - DNA, 120 bp, Homo sapiens
ttccgggctatttctgattttcaaacacatgtaatatgtggtctcattgagagttttctctgttgtttctggagaacattatttacacagccagaaaacaaaaacttttttaaaagtaca

SEQ ID NO: 25384 - DNA, 120 bp, Homo sapiens
tcacggtgttgcttttcttgctttacacaaaatactgctgggtttcttagctataaaccataaatcctttgccttatggccctcatagtgattgagattagaagtaattgatccattact

SEQ ID NO: 25385 - DNA, 120 bp, Homo sapiens
tatcgtgcacttacattgtgcattgtttgtttggtacaagcataagctcgcttaacttcaaaacctgtaaggcatagttattattatgattatttctgcgctcagaagaagaaaccaaaa

SEQ ID NO: 25386 - DNA, 120 bp, Homo sapiens
aaacgttttatcagactgaagtctcctaaatcatttgtcaatcacttgttggtagtcatttaagtcgagctcaatcgccctaagccacatattcattttaatccatgaataatgtagtaa

SEQ ID NO: 25387 - DNA, 120 bp, Homo sapiens
tttcgctcaaggcctttcttcctatgggtgtgaggcagcaggttcactgcttccctgtgattctgacttcgtctcctcctgttctcctcctcactcatgccactcaacccgcaggctccc

SEQ ID NO: 25388 - DNA, 120 bp, Homo sapiens
ccccgccatgccctgcctgcacacgaaaatagttctctttagcctgctctgtgaattcctcagaatttataacttccagcaccccatatgatttgtatatttattatcttttgtgtagta

SEQ ID NO: 25389 - DNA, 120 bp, Homo sapiens
gtccgctctgtttgaacaaaacagatcagcatctggtaggttgtagcactcaatacatatttatggaatgaacaaatgaatgaatgaatgattaaatgccattagctggacccatgcttc

SEQ ID NO: 25390 - DNA, 120 bp, Homo sapiens
cagcgtttgtatacggtattggtctaaaggcaaatgatgaccatacataagaaattaaaatacatcataatgaatggcattaaaagtcaataatactagcttgaaagacaataagataag

SEQ ID NO: 25391 - DNA, 120 bp, Homo sapiens
tctcgcagatacctcctgagggatcagcctgaggctttttgtataagtacagtctgaaataatgataaaattgtagtatagtaaatacataaactcctcccatccctgattttcttaaaa

SEQ ID NO: 25392 - DNA, 120 bp, Homo sapiens
tagcgctgcgataaacatggctgtgcagacagatatctcttaaacaaactgatttcaaaccttttgggtaaatactcagaagtggaaatgtggatcgtatactagttctatttttagttt

SEQ ID NO: 25393 - DNA, 120 bp, Homo sapiens
tgtcgctggcatttgttggggtcaaatccaaaaaacttgttgcccagcctaatgtggtatagtttttcccctatgttttctaccagtagttttatagtttctggtcttatgtttaagtct

SEQ ID NO: 25394 - DNA, 120 bp, Homo sapiens
gatcgtatgaacatctaaacaatattaatccttccaattcatgaacacaggccattttcccatttatttgtgtctttttcaatttcttttatcaacattttttagttttcagcatatggg

SEQ ID NO: 25395 - DNA, 120 bp, Homo sapiens
taccgagtaagcagtagagtagttttaggaaactagttcttcacaatctagacagaaatatgccagtggaattgatctcgtatctctatagacataccttgtgtattttatactatcaca

SEQ ID NO: 25396 - DNA, 120 bp, Homo sapiens
gctcgtgcttgcgcagtgaatacccagggtggagtgtgagttctgcaggaggagagtgagaagaatacatcaatatattgtgatgccattaatgttgctaattccattgatttccctttt

SEQ ID NO: 25397 - DNA, 120 bp, Homo sapiens
taacgtttattaaaacctcatgttgtatctcctgattgtatatgtaaatgtatttttatgggttttggaacttatgtgcttctgtttttttatggttctgaaaatgagtagaacagggtg

SEQ ID NO: 25398 - DNA, 120 bp, Homo sapiens
aaccgagacctgtctcaccccgtagtgactggttgtaaaagccacatttttgcacaaatattatgatagaaagttgccatgtttgttcattaaggaataatatttgaatttcatcatgac

SEQ ID NO: 25399 - DNA, 120 bp, Homo sapiens
aatcgcatatgaggggactaagactctactgtatgacaaatgattcacttacattatgtctaagcctcagaacaaaaacacagccatccccagatgtttcacaactggcagatagaattt

SEQ ID NO: 25400 - DNA, 120 bp, Homo sapiens
ttgcgtgggctctcagcgtacacacccctactcagccctgcctaagaaattcacaaaggatccaggcccaatgcacgctcaagaacaagcctgtgtcacctggatgcccacatctctgtg

SEQ ID NO: 25401 - DNA, 120 bp, Homo sapiens
ttccggctatcccctcactcctccatctccctgggtctcacaggctctgcgagtcctcagtccctactcttctgagagaatgtgccctacccaaggcatttttcccaggacttccaaagc

SEQ ID NO: 25402 - DNA, 120 bp, Homo sapiens
taccgtttgcattgccagcaaaatatcttttagagttactttttggagttagagtaaatatttctatttccttcttgcagtggcagtacccaaagaacatagagaaagcccttagccagg

SEQ ID NO: 25403 - DNA, 120 bp, Homo sapiens
gcccgtaggccgcttcatacctctttgccttgtgtgatcttgctctctctccaactccattctaacatggttgaaaatgtgcttcctccattctgagaggatctgggcagcagagttcat

SEQ ID NO: 25404 - DNA, 120 bp, Homo sapiens
tatcgaatcaggttcacagttttgccttgttttgtttcaatttggatcttctatactagtctgctcctcagaggtccagtcaatgtttacattcctttgggcatccttgccacttagcag

SEQ ID NO: 25405 - DNA, 120 bp, Homo sapiens
caacgaacaattgttagtgaatgagtgagtgaaaaatgaataaacaaattacagtcttcaaagggacatggtagcaagagatcaccatagggaccttcatggattgagctgaaggttgcc

SEQ ID NO: 25406 - DNA, 120 bp, Homo sapiens
aatcgcatcgagctctccaagcatcattgtattggtgtaaaaagtaacataagaggtaagagtgcgtgaagaaatgcagagagcacgaccaagttccaaataatggcagctgctggcttt

SEQ ID NO: 25407 - DNA, 120 bp, Homo sapiens
tctcggaaagctgagacacattaggcaatggccgctgctaggagccaagggaaccaccaatggcagacgcactagtgatgctggttcgggaagggctgcaactccaagggccgctgggtg

SEQ ID NO: 25408 - DNA, 120 bp, Homo sapiens
tgccgccagctcacatcaggacagcgtccacccatcgggaggcatcaaacacaggccatccgggacttccgtctctgccagaaaaccacgaccctctccctcccacacggcatcctctcc

SEQ ID NO: 25409 - DNA, 120 bp, Homo sapiens
ctccgctatcccagtgggcagggcagagattgttttcaatacattctcctgaaaagagagagaaagccattttcccaacagaaagccagggagcaagaagatctcagtgagcctttcagc

SEQ ID NO: 25410 - DNA, 120 bp, Homo sapiens
cagcgactggaaacttgaacggacccaatcttcacattttgataaaaggcaaggggcagggaagggggttggagctagaaacaggataacaagaacggaggtcatgtgaaatctagtgag

SEQ ID NO: 25411 - DNA, 120 bp, Homo sapiens
agacgaatttcaaaccaaaatgagggtttaataattcttttattgctggaaagaactgagttcttccaatttctcatcgtgagaaaggaactaatatgtgcctgatgctgaaagtccagc

SEQ ID NO: 25412 - DNA, 120 bp, Homo sapiens
tttcgtgttttcttcctctgttgcacctgtggcgtatgaaattcaaacaagtcacctagattaaaatatttctgcgaaggctattaaacagtgctgcttgtgcctccgtttttttttctt

SEQ ID NO: 25413 - DNA, 120 bp, Homo sapiens
gatcgtaaagcagtaaatactctttaaacaaaaacataaaaatgcagagaagtagaaaaaagaaaacaatcacttcttagtgccattgtacaaatacaaccatgtttttaagagtacatt

SEQ ID NO: 25414 - DNA, 120 bp, Homo sapiens
cagcgttttccctctctgtaaaggggtcttgttttcaaagttgtcattaactccatgtacaatttatgtgatgactttatacaaaatgtcatcttaattataaatgtcacaatagcaata

SEQ ID NO: 25415 - DNA, 120 bp, Homo sapiens
acccgatccaatgcaggaagtgaaattctttctcattgtagtgactacagtagtcctatgtgaaatatgtaagtgtatttccagggcctccacaggttcacttgtaaatttagactagcc

SEQ ID NO: 25416 - DNA, 120 bp, Homo sapiens
ttacgcaatttgctcaaagccacacagtgacccaaggtcttggggtcagcctgccctaagcctgttgattgctctctagggctttctacaacttccaccacctttcaatcagtgccacta

SEQ ID NO: 25417 - DNA, 120 bp, Homo sapiens
gctcgcatttctcccacattcttctgtctctccagtaggccctggagtggagtgatctgaagcagggtggcattcttggggtagaggatgtaatctacaatgataaaaaaggactcctgt

SEQ ID NO: 25418 - DNA, 120 bp, Homo sapiens
tgacgagggaggaacaccttatcgcatgggagaaggggcagtcatcagtggagggacagaaaaccacatcagatagagagctcgtcagtccatttgcccagggctctcccaggcctacag

SEQ ID NO: 25419 - DNA, 120 bp, Homo sapiens
tcccgtacaccctagggccctacagattttggccacctaatttacaaaggtaacctgtgtcataattgcttaggattgcacagcaacacctcacttgcccagaggccacttacctagaac

SEQ ID NO: 25420 - DNA, 120 bp, Homo sapiens
ttacgacactcacaggagagacctcatccaaagccaatgtcatccttatgtaattctaaccagcacaattgttagatttctcagccacaaatagattagaaatctcaagtgtttaaaagg

SEQ ID NO: 25421 - DNA, 120 bp, Homo sapiens
aggcgaatacacctgcacctccgtagcttctcgggggtctccacagatagctccatctatcaatgaatgccaagaaggacgactgcccttggttccatcatgccctttagatagcagctt

SEQ ID NO: 25422 - DNA, 120 bp, Homo sapiens
cttcgcttgaagcatcctgaggccctcattctgtttctcagcccctgctgtttccttcccagtgcctatcacagttcacagtcatgttcttcatgactctcctgtgttccacacttgcct

SEQ ID NO: 25423 - DNA, 120 bp, Homo sapiens
tcccgtgcatgtggcacgtggccgtgtccttcttgttcatggttggctgcccatccgagctctgtgcttgtcacatggaaggtgcttgataaataaatgttggatgaataaagaaatgtc

SEQ ID NO: 25424 - DNA, 120 bp, Homo sapiens
gaacgtcaaaacagagagaccaggttcaaagagcagacgtggaatcataaaaacatagaatcaaaagacaagagtcccataaaaacaggatctgagtcagtcttcagcccacttaaatct

SEQ ID NO: 25425 - DNA, 120 bp, Homo sapiens
ttccgtggcttctcagcagcattggcattctgagcacttccgcctttgtgaatcattgtttaccttgggcttccccgtcttccttacctatctgtctgcttcatctcaatcttacttgcc

SEQ ID NO: 25426 - DNA, 120 bp, Homo sapiens
ttgcgcccccccagttcattctctatgttgccaggagagacatctttttaaaatataaatctgattacatgatcccactaaatatagaataaaacttcaagttttaacatggtctatgtg

SEQ ID NO: 25427 - DNA, 120 bp, Homo sapiens
gatcgacttctgccttgacccctgctcaatctatgagactggggagtgacaggtgggttcccagctccaggagtggtgagtgacccactcctggaccatcagagcactctgccatggaga

SEQ ID NO: 25428 - DNA, 120 bp, Homo sapiens
tctcggttctttgcgctgagtgggaaagagaatttctccttcccctttcccctgctgagtgggccagaagctcatgtgtgatgctgccaccctcttgcccacacagtatgaaaatggagc

SEQ ID NO: 25429 - DNA, 120 bp, Homo sapiens
agccgacacacaggaagtcagtgggggcaagtagaaagatgccagtggatgtagctcagtgctggcaccattgagcttccagggcagggccacagactttctctctaaggggccaactag

SEQ ID NO: 25430 - DNA, 120 bp, Homo sapiens
atgcggtctctgttgcgactcctcagctctgttatcctagcatgaaagcagcacaatgtgtaaacaaaagagcagagctatgtccaataaaactttgtttatggacggtgacatttgaat

SEQ ID NO: 25431 - DNA, 120 bp, Homo sapiens
actcgctctaggcttttagaaatggagcctgtaaattctctctctctctctctttttggcttaagccaattctggatattttgtttttctgtcacttgtaagtgaaagagtcctgaactt

SEQ ID NO: 25432 - DNA, 120 bp, Homo sapiens
tttcgttgccacagtgcacatcctgaagtggattcagatgtgcaaactcatgatgaaaggagatttaagtcatgtactgaaaagttagcagagcattagctttagtatttggactattcc

SEQ ID NO: 25433 - DNA, 120 bp, Homo sapiens
atgcgagcccccagcctcgtgtccatttattttgaggccgtttgcttcactcttcactgtcatttataatttggtttagattattctcttgtcattctctgctatctttttccatcatag

SEQ ID NO: 25434 - DNA, 120 bp, Homo sapiens
aatcggtatccaattttaatttactaattaataccatggtttccatcttaaataaggtgtaggcaagagacgtacacttctcataaattctaggtgacttgtattcttcatcaatcaaat

SEQ ID NO: 25435 - DNA, 120 bp, Homo sapiens
gcacggcaaagagatggcagggcacacaccttcctgaggcacaccacggttatccaaccaaacctacttccagatcttacctaaagggaaactagtcaaggcccgaaacactgaagaaaa

SEQ ID NO: 25436 - DNA, 120 bp, Homo sapiens
caccggcagaggcagagagttttgcaaagtagcatggaaacctctctgggtgatggaaacatcctgtgccttgattgtagcagtgctcatggtgtcacagcacagtgaatggacactcta

SEQ ID NO: 25437 - DNA, 120 bp, Homo sapiens
gagcgtgatcatctctagtgatggctggagatgggatggggtttttcactgtacagttttaaaactaatttcaaaccaagtgaattaagtattcaaattgtaaatgaaattaaattaata

SEQ ID NO: 25438 - DNA, 120 bp, Homo sapiens
gtccgtctcattcaccgtttctaaggcaagccttggtagtgatgcctgccaaccaccatgttcccttcctcctccttcctggcactctcagacactctgctttgatgcccaccccttcag

SEQ ID NO: 25439 - DNA, 120 bp, Homo sapiens
agtcgcctgatctgcagaagcactatcctgccatcctccttccacagacacctttcagatccctggcacagcaaacttttctcttgatgtctgcctaggaaagacatggaaaaaaaaaag

SEQ ID NO: 25440 - DNA, 120 bp, Homo sapiens
tggcggcttttcccctttctctaggacaatcacatccctcccttttggtgcctctgctccttcctcatctcctgggtctcttcccctcgcagggctccagggctcaagactcgattctct

SEQ ID NO: 25441 - DNA, 120 bp, Homo sapiens
tcacgcccctgatgtgatctgtcaagaattcatgtcagctctttctccaaagtacaagcagaatccaatcacacctctctgcctgctccacagctgcaagccagtcctgtgtctcacctg

SEQ ID NO: 25442 - DNA, 120 bp, Homo sapiens
caccgggaaggcagctcctcccagacacacgcagccttctcgtttagcccttccctgagcatcttatttaggaggtatccgtctctgttccccttccttcatttttctgcatagcaccta

SEQ ID NO: 25443 - DNA, 120 bp, Homo sapiens
gtccgtcaaccatgttcacgaatgcacctaagactgaggcgttcattacacaaacgaaacggcttcacctcgaactggaacgagctaaaggccatctcccactcacttttctccctaacc

SEQ ID NO: 25444 - DNA, 120 bp, Homo sapiens
attcgcggctttcttgagtgggaccagaagagaatccaggctacctctggagataaaaaggacttagtggcttctgtgaatgaacagccttgaggacgcagcctcctgaggtggctcttg

SEQ ID NO: 25445 - DNA, 120 bp, Homo sapiens
aggcggtcccgcaggggattcggcctgctggagttcgccagcgagcagagggtctgcatccccagaacaggcttcccactgttccaccccctgagcagccttcggtcctgtgcaaaatcc

SEQ ID NO: 25446 - DNA, 120 bp, Homo sapiens
cagcgctggtccttgaaactgtcccatgacacagaatttatcttcatattgacctagagcttggggtctttaggtctcctaaagccaagtaaaggccttgcctgagtgaacacagccagc

SEQ ID NO: 25447 - DNA, 120 bp, Homo sapiens
agccgccagcgtgcgtgtgggcagcttcccttcccggccctgcagctcaggggcgagtgtttcctctggaagatgggagcttctcagggaaactcgagcctccgtgaggtcgccctcgga

SEQ ID NO: 25448 - DNA, 120 bp, Homo sapiens
agacgggctgtggaactgagttttcgggctcctgtggggcacttctctgaggacctcttagcactgtgtcaaaggaccaggtctgcctattcacacttcttggagaatgagttaaatctg

SEQ ID NO: 25449 - DNA, 120 bp, Homo sapiens
ggacgttggtgtgtcccctcctacgaacccaaggatggtatttcctggatgcacttctgtgagccccgcgcagccagagcagggggtccaggttcgccgcggccgcggggagcagggcgg

SEQ ID NO: 25450 - DNA, 120 bp, Homo sapiens
gcccgcgcggaggccccgagtccgcaggagggaccactgtgcccgggcaggctggccaggcgccctcgctcagtccgcggaaaccctagctcagaaagacccattagagagaaggagaag

SEQ ID NO: 25451 - DNA, 120 bp, Homo sapiens
aggcgatctcagggcttggctgcggagtcaccgtgtcagaacctggccctgacagtggggctgggcgctgaagccgctcctgcgtcccggccccgagggctgaggcacctgcccttccct

SEQ ID NO: 25452 - DNA, 120 bp, Homo sapiens
tgccgcccacggtggggagaccccagccagattccagggcgacttgtgcgaccgctggcttctgtgccaggtgctgggcaaagccactgcagaccacctaataattagaaaaacaaattc

SEQ ID NO: 25453 - DNA, 120 bp, Homo sapiens
ggacgcaaaagcatccaatacccctgccccatcccgcagaaatcaacccaccctggccagtgaggcctccaagtcctcaaataagacagaaagatttaaaataaataaacaaaaaagttc

SEQ ID NO: 25454 - DNA, 120 bp, Homo sapiens
gggcggggggagggggagagccaaactggtaagacaaagcagtgagaaaccgaagcttattagcaaaggccgggtaaagagccaggcagtgaactctggccacatcggaactcactgcct

SEQ ID NO: 25455 - DNA, 120 bp, Homo sapiens
ccccgagcacggcctcggaggctgagaggcctgggaggcagggccgcgtcctgcgggctccacgagagccctgtgaaatgccagtcagatcctggcccagtgccccaggtcctcccgcag

SEQ ID NO: 25456 - DNA, 120 bp, Homo sapiens
cctcggcaaagccctcccccggcgctggaaaccttcccctgccaggcgcagaaggccgcgcgcaagcacgcagctcacagtcaccgccacctgctctgaaaccccaggttcagcgcagga

SEQ ID NO: 25457 - DNA, 120 bp, Homo sapiens
ccacgcgaagggacgcaggattgacagcgaccctgaagaaatgcagtcgagagctattgtgaaagggcgctggcccggaggccccccagcccgcgcaggacaggccagttaatcgccttg

SEQ ID NO: 25458 - DNA, 120 bp, Homo sapiens
tagcgtgtccatctgcgacagcaggacacgccttcccatgccagccgctttggggcccgtgcggccctttttccctcgcagctgctgcaacaaatagcagttcttttgagggaaggaaca

SEQ ID NO: 25459 - DNA, 120 bp, Homo sapiens
ctgcgccattggaggcttgaagggttcttcttaaaaaaattaatgactaattctatgttttgattgttcatatgacgactaattaaaggagaaatctaatgggctggactccacttcagg

SEQ ID NO: 25460 - DNA, 120 bp, Homo sapiens
aaacgcctgtgcagaatggttctggcaagaattcaccacgtgccgggtgctgtccctgcattatttcaagccagagcaatcctgtgtacaaacacgtacgccagtccacagaagatcaca

SEQ ID NO: 25461 - DNA, 120 bp, Homo sapiens
tctcgctctcctctccacaaatacatagaatgagtgtgtgtacaacgaacatattatagaaatatataatgtatgataatataatgtatgtttatatattaaacaaagtaatttaatctt

SEQ ID NO: 25462 - DNA, 120 bp, Homo sapiens
taccgtttaaatatttaacaaggggttgactaccttcttgtatacattaaggtgtgctgtgatatgatgagtgacaaacaacctgcacctcccgtgagcctaatgagggggtgtttctct

SEQ ID NO: 25463 - DNA, 120 bp, Homo sapiens
catcgttagaatgccacctacgagtccggcccaaggggctgctcccctccctctgttcccaggctgaggaggaggtcgctggccaacaagagggaggaggaagtgacctggggaggcgtg

SEQ ID NO: 25464 - DNA, 120 bp, Homo sapiens
tggcggacttccaaggaccgccaagaaccatccaccaatggggagaaaaaacagatgcttctgatcacagaagcagtctacgcttctcctttaggctacaattaactggcctcggtgaga

SEQ ID NO: 25465 - DNA, 120 bp, Homo sapiens
cagcgcacacctgccaaatgatcttagcaggtgacaaaactaaatgctacaatgtcagaacaactccctaatctccagtgacacagcaattgccctaaatgcaggcactgaggattccaa

SEQ ID NO: 25466 - DNA, 120 bp, Homo sapiens
tttcgtcttacacatacacacacacacacacacacacacacatccctggttagcttaggtgaccttttgtagattgactgtaagttctgcaaaggcaggaactagtgagtgaccccatat

SEQ ID NO: 25467 - DNA, 120 bp, Homo sapiens
tggcgaagaactatctgtgaggtccctcccaggtttgtttcaatgactgaggctttgtaagctcagtcccttaaaagtaacaactgcaagaatttctgctgattttttggaggggcccta

SEQ ID NO: 25468 - DNA, 120 bp, Homo sapiens
aagcgatttatttccttctatagtacatgtggaagcttcattccctctgtttatattccttgtgaaaaaaaataaataaagtgacacaattttctcagttggtgacctgccttgagtttc

SEQ ID NO: 25469 - DNA, 120 bp, Homo sapiens
acccgtgattacctgcaaagccaactcatgttcaactcatggaacatggtcattccacatgtaccataaattaatggatagatccttttttctctgttctgcaacagaactgaatttgct

SEQ ID NO: 25470 - DNA, 120 bp, Homo sapiens
agacgaatgaagaaagaaagataaggagaggggaaaagcagagataggaagcatacctataaagtggcactatcatgatttaaccacgggggatgagttacaaactctaatgcctacagt

SEQ ID NO: 25471 - DNA, 120 bp, Homo sapiens
cagcgtgaactggagatcaaatgtacctcctaaagaggacagttaccatttagccacctgccatcttccatgaaagcaaacacagttagccaacaattcccattttccgagagaaacaca

SEQ ID NO: 25472 - DNA, 120 bp, Homo sapiens
tcccgccaaccactggcagccactgatcaccttaccgtctccatagatttgccttttccagaatgtcatatatagtcatgcatcacttaacaatgaaaatatgatctgagatgtgtgtca

SEQ ID NO: 25473 - DNA, 120 bp, Homo sapiens
gtgcgtcagtttctgatctctctggtccattgatatatttgtctattctttcaccaataccacatagtctagactactgtagttgtatatgtcttgaagtcaggtagtgttgatcctcca

SEQ ID NO: 25474 - DNA, 120 bp, Homo sapiens
taacgttgtatcctgctcacttgctataactgcttattagttccaggagcttttttattgtttcttttggattttctaagagacaattacattatcagtgaacaaacacgatttatttct

SEQ ID NO: 25475 - DNA, 120 bp, Homo sapiens
aatcggagttggtcatcatgtataactttgttacactttgttgcatttgattttgtaatattttcttgagaatttttacatctatgttcataaaagatatcggtctacagttttctttcc

SEQ ID NO: 25476 - DNA, 120 bp, Homo sapiens
attcgtgggtatagctgttcataatattcatttattatcctttcaatgttcatgagatcagtagtgatgttccttctttcatttctgatattcataatttgtgtattctctctttgtttc

SEQ ID NO: 25477 - DNA, 120 bp, Homo sapiens
aggcgtgagccaccacactcttgctcattttttctatttttgttttccacactttttctgcctctgtggattttacacagcattttgtataattcgatttcctctttttagcatagcaat

SEQ ID NO: 25478 - DNA, 120 bp, Homo sapiens
atacgttggatgtaattctaatattctctataggtattttctttatggctcctctacaggtaaggtgttttttccctttggcttcatttaagaatttttcgttaacctttgattttctga

SEQ ID NO: 25479 - DNA, 120 bp, Homo sapiens
agtcgtttttctttctgtttttcagttttggcagtttctgtttacgtatcttcaatctcagaaattctttcctcaagcatgttcagcccactaatgtgtacttcaaaagtattctacatt

SEQ ID NO: 25480 - DNA, 120 bp, Homo sapiens
tcacgccactgcactctggattgggcaacagagccagaccctgtctcaaaaaaaagaaaaattccatggctctgcttacattatccatctgatcttacatgttgcctattttttccatta

SEQ ID NO: 25481 - DNA, 120 bp, Homo sapiens
ctccgatgtgataatgtcttagtccaattactgtggttataacagaatgccacaaactgggtgatttataaacaaaagaagctgatttaggctgatttagaggctggggagtccaagagc

SEQ ID NO: 25482 - DNA, 120 bp, Homo sapiens
tcacgtgtgaagagagcttactcttataacatagccactcccacaagaattaacccaccgccatgagagccatgtgaattcattcatgaggacagcgggttaagtttccaatatatggac

SEQ ID NO: 25483 - DNA, 120 bp, Homo sapiens
tttcggggacacattcaaaccacagcagttagttgtaacgttcgtgtcatgtctcattctggttctgatgcttgtgcagtctcttcaaactgcgtctttgccttttagtgtgccttgcaa

SEQ ID NO: 25484 - DNA, 120 bp, Homo sapiens
tgacgtagtgacaagctgtggggagagggagtgttgcacagtcctgccgcatgtcacagtcttccagtgagcctgtgtccctggactgtgaacttcatgcttgcttctcagcttccccag

SEQ ID NO: 25485 - DNA, 120 bp, Homo sapiens
attcgtggtaaggacctagcagagctccaggaggtaacactctcaagtgtctcatactaccctgcaccatgactgggctctgctggagttcttaatttgcagaactgcccacactgagcc

SEQ ID NO: 25486 - DNA, 120 bp, Homo sapiens
tcccgcaatttctcaattacagggcaaactttcccagccggcactgggtccttggaggtttctgtctgctggtttcttcctctggaggttgtgcttctgtgtttgcctgtctctccaatt

SEQ ID NO: 25487 - DNA, 120 bp, Homo sapiens
tttcggtttgctcagctttctacttgttgctagaatggagcgccaatagtgcctcctatagtgacatgtaaccctcaactctagagatgatgaagcatactaatgacaaaggagaaatgc

SEQ ID NO: 25488 - DNA, 120 bp, Homo sapiens
ccccgagctacctagttctcctccctagaggcaaagctgttaccagattcttgtatctccttaacatatatccttagaagagctgtcaagtgaacacatgtttaagtgaaaacctatttt

SEQ ID NO: 25489 - DNA, 120 bp, Homo sapiens
taacgtgtttctcctcccctttcacagagcatttggttttaggaaattcagagccacattccttatagacaagactaaactcttattcaacatactcagaaacttcttctaagaggataa

SEQ ID NO: 25490 - DNA, 120 bp, Homo sapiens
agacgcttatgagatttattaagggaaatactagagtcttagtacatacttgctaatatagcatacatgaaggctttatctataatttttttggccaagcagaaattttggtattactca

SEQ ID NO: 25491 - DNA, 120 bp, Homo sapiens
aagcgttgctggacaagaggggtaaaacacggctctgccttggattcaaagttggcctctcatactagcaagtataccttggtatcctggtcacttctcccggccacagcatcacattgc

SEQ ID NO: 25492 - DNA, 120 bp, Homo sapiens
gtccgggccatggtctaggaccaccctccacagaggctgtgagctagagccctaactgtgcagggccctaactatgccaggctacttatctctcttaagaggacttcattagtgcctgct

SEQ ID NO: 25493 - DNA, 120 bp, Homo sapiens
gctcggccatacagttttttacttaccaagtaacacagttatcagcacactccaggtactagccaaggactacaaaatcaacgtgaatgtcagcttttgtatcaaaagctcaaaggagaa

SEQ ID NO: 25494 - DNA, 120 bp, Homo sapiens
agccgtactatgaaggctgttgtctcatatagtcctaacgtagtgagaactgatgttcttacatgctgtctttttgggcactcaaagaaattcctgtacagtcttacaaatcagttgtag

SEQ ID NO: 25495 - DNA, 120 bp, Homo sapiens
ctacggactgctctcagcccaggtgtgcaggaagcacacacatgcctgcagagccttcatggcctctgcattcagggcatgacttcaacgcacagtggctgtactgatttgttaaaacaa

SEQ ID NO: 25496 - DNA, 120 bp, Homo sapiens
gtgcgggcagtgagcagacctgtgtctgtctgcgcttgccctggtgaaaaaccccaccgttcaggctgcagggtgcgagacccaggcacaaacattttgctggatgaggaggaaagatgt

SEQ ID NO: 25497 - DNA, 120 bp, Homo sapiens
agccgagagatcagggttgttgaaccaggcctgaaggtcctagtgaatctcgtgaagagaggaggggtctggctgtaacatggacctagaggacatttttactgcaggagaaggaacagt

SEQ ID NO: 25498 - DNA, 120 bp, Homo sapiens
ttccgcgagtttccctggcatttctcctgcgggagctacaggggcagtgggacacttagcctctctaaaagcacctccacggctgtttgtgtcaagcctttattccaagagcttcacttt

SEQ ID NO: 25499 - DNA, 120 bp, Homo sapiens
ttgcgaagtaatgtgcttcacacattggcttcaaagtacccatggctggttgcaataaacattaaggaggcctgtctctgcacccggagttgggtgccctcatttcagatgatttcgagg

SEQ ID NO: 25500 - DNA, 120 bp, Homo sapiens
cctcggactttagagcaccacctcggacgcctggcacccctgccgcgcgggcacggcgacctcctcagctgccaggccagcctctgatccccgagagggtcccgtagtgctgcaggggag

SEQ ID NO: 25501 - DNA, 120 bp, Homo sapiens
acccgaataaaggagcagtttccccgtcggtgccattatccgacgctggctctaaggctcggccagtctgtctaaagctggtacaagtttgctttgtaaaacaaaagaagggaaaggggg

SEQ ID NO: 25502 - DNA, 120 bp, Homo sapiens
gctcgacctggacataggctgggcctgcaagtccgcggggaccgggtccagaggggcagtgctgggaacgcccctctcggaaattaactcctcagggcacccgctcccctcccatgcgcc

SEQ ID NO: 25503 - DNA, 120 bp, Homo sapiens
cgccgccccactcccgccggagactaggtcccgcgggggccaccgctgtccaccgcctccggcggccgctggccttgggtccccgctgctggttctcctccctcctcctcgcattctcct

SEQ ID NO: 25504 - DNA, 120 bp, Homo sapiens
tcccgatccctcctccgccgcctggtccctcctcctcccgccctgcctccccgcgcctcggcccgcgcgagctagacgtccgggcagcccccggcgcagcgcggccgcagcagcctccgc

SEQ ID NO: 25505 - DNA, 120 bp, Homo sapiens
ccccgcacggtgtgagcgcccgacgcggccgaggcggccggagtcccgagctagccccggcggccgccgccgcccagaccggacgacaggccacctcgtcggcgtccgcccgagtccccg

SEQ ID NO: 25506 - DNA, 120 bp, Homo sapiens
cctcgccgccaacgccacaaccaccgcgcacggccccctgactccgtccagtattgatcgggagagccggagcgagctcttcggggagcagcgatgcgaccctccgggacggccggggca

SEQ ID NO: 25507 - DNA, 120 bp, Homo sapiens
cagcgctcctggcgctgctggctgcgctctgcccggcgagtcgggctctggaggaaaagaaaggtaagggcgtgtctcgccggctcccgcgccgcccccggatcgcgccccggaccccgc

SEQ ID NO: 25508 - DNA, 120 bp, Homo sapiens
gcccgcccaaccgcgcaccggcgcaccggctcggcgcccgcgcccccgcccgtcctttcctgtttccttgagatcagctgcgccgccgaccgggaccgcgggaggaacgggacgtttcgt

SEQ ID NO: 25509 - DNA, 120 bp, Homo sapiens
cttcggccgggagagtctggggcgggcggaggaggagacgcgtgggacaccgggctgcaggccaggcggggaacggccgccgggacctccggcgccccgaaccgctcccaactttcttcc

SEQ ID NO: 25510 - DNA, 120 bp, Homo sapiens
ccccgcccagctgcgcaggatcggcgtcagtgggcgaaagccgggtgctggtgggcgcctggggccggggtcccgcacgtgcgccccgcgctgtcttcccagggcgcgacggggtcctgg

SEQ ID NO: 25511 - DNA, 120 bp, Homo sapiens
tggcgcgcacccgaggggcgggcgctgcccacccgccgagactgcactgtttagggaagctgaggaaggaacccaaaaatacagcctcccctcggaccccgcgggacaggcggctttctg

SEQ ID NO: 25512 - DNA, 120 bp, Homo sapiens
ccccgcctccgccctccgcgcaggtctcaaactgaagccggcgcccgccagcctggccccggcccctctccaggtccccgcgatcctcgttccccagtgtggagtcgcagcctcgacctg

SEQ ID NO: 25513 - DNA, 120 bp, Homo sapiens
actcgtctaccaccacctgcggctcccggggaggggtggtgctggcggcggttagtttcctcgttggcaaaaggcaggtggggtccgacccgccccttgggcgcagaccccggccgctcg

SEQ ID NO: 25514 - DNA, 120 bp, Homo sapiens
cctcgcccggtgcgccctcgtcttgcctatccaagagtgccccccacctcccggggaccccagctccctcctgggcgcccgcgccgaaagccccaggctctccttcgatggccgcctcgc

SEQ ID NO: 25515 - DNA, 120 bp, Homo sapiens
tcgcggagacgtccgggtctgctccacctgcagcccttcggtcgcgcctgggcttcgcggtggagcgggacgcggctgtccggccactgcagggggggatcgcgggactcttgagcggaa

SEQ ID NO: 25516 - DNA, 120 bp, Homo sapiens
ccccggaagcagagctcatcctggccaacaccatggtgtttcaaaatggggctcacagcaaacttctcctcaaaacccggagactttctttcttggatgtctctttttgctgtttgaaga

SEQ ID NO: 25517 - DNA, 120 bp, Homo sapiens
caccggattgctgtccctggttcaagtgtgccaagtgtgcagacagaacatgagcgagtctggcttcgtgactaccgaccataaacccacttgacaggggaaacatgccttggaaggttt

SEQ ID NO: 25518 - DNA, 120 bp, Homo sapiens
ctgcgcgggttccaagagccaggcccgtacttgctgttgatgtcattggcttggggagttggggtttggtgcccagcgcggtcgttgggggaggggcaaggcatagaacagtggttccca

SEQ ID NO: 25519 - DNA, 120 bp, Homo sapiens
tcccgcccccagacattctgatttaattggcatggggcaagacctggacttgggattttttttaatgctcttcatgtgatctgttgggcagccagatttggggatcactagacggaagaa

SEQ ID NO: 25520 - DNA, 120 bp, Homo sapiens
ctccggagatgttacttgccaatgctaagagctctttgaggacatctggaattgttacaatattgccaaatataggaaagagggaaaaggtagagtgtgattccaataataaaggattcc

SEQ ID NO: 25521 - DNA, 120 bp, Homo sapiens
ttccgcttttcattgaaggaactggtggaaaggtttcttctctgctgagcctgcaggcccgtcctgcctgcctggggtgcccgggagacgcgggcctgctccggagactgctgactgccg

SEQ ID NO: 25522 - DNA, 120 bp, Homo sapiens
tgccgaagagactcttctctttattttaaattaaaccctcagagcaccaccaaagcatcacttttctccctccattggtgttctcattctttgatgttacttgtttgaacaccactatta

SEQ ID NO: 25523 - DNA, 120 bp, Homo sapiens
tcccgcattcactcaaaacagaatgctcctgaagacaagagagagagtaggagaacagacgctattccattacagtaacataaaagactggattttcaggggcaaattattaaaatagga

SEQ ID NO: 25524 - DNA, 120 bp, Homo sapiens
gtacgaagaactaaagtgactttcccacagctggtgggaggcagacgggaaattcacaccaggggcttccaactccagatccctctctcaacttccaaactccactgccttgtccgagtt

SEQ ID NO: 25525 - DNA, 120 bp, Homo sapiens
agccggctcatgacgatgagcctgtctgaagcttcaacgcgggctgtccggcagtctgcattcctgccgagttcctcagccctctgttgggtcaccttccatagaggcagcttagtcctc

SEQ ID NO: 25526 - DNA, 120 bp, Homo sapiens
aggcgagtcgaattcccaactgagggagctttgtggaaataagcccgcccagccccacttctggagacgttcccattcagtaggtccgagctgtcttaaagagaaaccaaagtggggata

SEQ ID NO: 25527 - DNA, 120 bp, Homo sapiens
gcccggcctggcaattgggacctttcttctcactccagcccagggtgaaggtggacaagtcactttgacccttcaggcttctgagctgttgtttctgaattcagtgaatatttactgagt

SEQ ID NO: 25528 - DNA, 120 bp, Homo sapiens
tgccgtagcacagaatacaagaaactggctgagagctccaataggcttttaacagtaatttctggcttcacgtatttagtttcataactcatgatttttcaaaaacttctggtttgaaga

SEQ ID NO: 25529 - DNA, 120 bp, Homo sapiens
caccgattgccgaaagtccattgtgctgcataattacacttggtccacgtgacagcactaacatgttctgaaatgtttttagaagtagtctcagcaaagatgaaggattcctccctgttt

SEQ ID NO: 25530 - DNA, 120 bp, Homo sapiens
tgacgagagtgacaaaccaactctaatattaaaggcaattgatgattatgggcactgaagggaaggtaaccccaggctggtgccccggaatagggatgggtcacaatgttgaggacattt

SEQ ID NO: 25531 - DNA, 120 bp, Homo sapiens
tttcgcctgttgcagaacccacctgcaacacagtgtggcccttgccatgtgacttgtgtgtgtgcctgtgtgtctgtgtgtgcgtgttttaattttgacttcataagtactctagttatg

SEQ ID NO: 25532 - DNA, 120 bp, Homo sapiens
attcgttctttttcgttttcctcctacaggaatgaattttctaagaaaattccagcagttggctctttggacgacatctctagattgtcctccattgggcccataggcacaagctggcca

SEQ ID NO: 25533 - DNA, 120 bp, Homo sapiens
actcggagtccaagtgtcctttctgaatatatctggaacttctcattaacaaaagactcaagttataatttaggggacaaggcacccaatgagaatgccttgcaggcagccctaagtaca

SEQ ID NO: 25534 - DNA, 120 bp, Homo sapiens
tagcgcggcagcacacatggccctgacttagtttaaataattacgtaagtcaaccatgattgtttgccctttgcatagaagggcaagtattggtacctgttacaacttaggctttttttt

SEQ ID NO: 25535 - DNA, 120 bp, Homo sapiens
tgacggaactcttcccaggacaaaggatgacttttgagttcagtctttgcctttaattctacatggggaggagagcacgtttagccacaaatggaagggattactcatttgagctatttg

SEQ ID NO: 25536 - DNA, 120 bp, Homo sapiens
cagcggtttggggaatggactgcaggagtggcattggaaacaggaaggttcatgactattgccagagacagaggatgaagcaggagcaaggaagattcaggacaggggactccggggctg

SEQ ID NO: 25537 - DNA, 120 bp, Homo sapiens
atacggtggtccagagcacaggagagcaatgtggcttgagttgtcatttgctcacatatttccgtgtcagttacttgtcttagatcacagaacaagttctcctctcacagtttcctggct

SEQ ID NO: 25538 - DNA, 120 bp, Homo sapiens
caccgtcagcatcgaaattgagccacaccaggggttctggataccagcttctctctaggtgaggctgctatagtcagcagctgattagttgcagttatcagcaactggtaatataatata

SEQ ID NO: 25539 - DNA, 120 bp, Homo sapiens
actcggaatggggatctcttgttccctgcttaagaccacatcacattacttggttttgtacgctagtggctgaaccaaaaaaagtaggagatgattttttttcttttttcttaaagcagt

SEQ ID NO: 25540 - DNA, 120 bp, Homo sapiens
gctcgtaacgaaagaaatcttgtctttgctctcagacccccatttcttactcatctcatgagctccttcgagatccagaaacagttgcatatttcattagtaaatcagttccagagtcac

SEQ ID NO: 25541 - DNA, 120 bp, Homo sapiens
aagcgctcttgaccaaaattcaccaggagtgcctcccaggttttaactaaagaaaacctctctttaactgccaaaaaaaaaaagggaaaaaaaaaagctttctgcagtggctttcagcgg

SEQ ID NO: 25542 - DNA, 120 bp, Homo sapiens
ccccggtctgtgcacacaagtcctcagggagattctgactgatgcatgccagattttgagaactgctgatatactccaggcacatcgcatgctgggatctagatacaccaagggaacaaa

SEQ ID NO: 25543 - DNA, 120 bp, Homo sapiens
gaccgacttaccttttggaagggctgagaaagagagacacatacaagatcactccctgtaatgcaatgttttataacagatgtgatttgggatttcagtgggagcccaaaagagggactg

SEQ ID NO: 25544 - DNA, 120 bp, Homo sapiens
acacgataaatacatgtgaaatcacacaactcagaaaatgtcccttaaattaattgagccattggtacttgtgaattagaagagacatctatgttctgatccactgttgaaagctgtaca

SEQ ID NO: 25545 - DNA, 120 bp, Homo sapiens
tgacgattttaccactacatgcttgcaggccagtgcacagcagatgacgtcatgattgttttagcagtcctatcgttttacttatgatgtcattacaaccctttgctaaaatttctttcc

SEQ ID NO: 25546 - DNA, 120 bp, Homo sapiens
tgccgaacaagataaactagacaaactattttaagtttgttctagtgctaacttgcaagatctaatggctccaactagatttttaaaataaagtatattttaatatattattagaaagtt

SEQ ID NO: 25547 - DNA, 120 bp, Homo sapiens
aggcgacagagcaagactcagtcaaaaaacaaaaaaaaagtggtcattggagaattattgtgtcacctgttgttttttaatgtactaattttgagaggcttttaaatagagtgcactata

SEQ ID NO: 25548 - DNA, 120 bp, Homo sapiens
cctcgctccttcttttttacaagctgttatgaattagccttcacagagaaagaaaaatttttataaataactggaaatgaaactttgcaaaggactgcagatgaaaaactttgtcaaatg

SEQ ID NO: 25549 - DNA, 120 bp, Homo sapiens
gtacgcggcttaacatatttttttctgtaatttgttgttagttataatggggagagaaaacaggttagagtctcccctctcagtttcaccttccataaaacagctaaactagacgatcgt

SEQ ID NO: 25550 - DNA, 120 bp, Homo sapiens
cctcgcatttgtacagcacctcatagtttacacaatgccttaacattcttctctctcagcctcctacaaccccacaggattgggatagctttccagattgggaggtgagggacccaggct

SEQ ID NO: 25551 - DNA, 120 bp, Homo sapiens
gagcgattctgctgttgtccgtaatcaccaggctggtgatcagtgggcactgggtgctctcctgctacacagcactgtctctcaacatgcaggtcaaggttacttattcctccttcaaga

SEQ ID NO: 25552 - DNA, 120 bp, Homo sapiens
agacgtcattgggttttttagctatggatgccccatcacttttagttctatttgtgaatcaaaggctaaataaagtattcctcaaaatttgttatacttctgttactaatgcttaatgtc

SEQ ID NO: 25553 - DNA, 120 bp, Homo sapiens
caacgttgtgtcatcaacttctgtaaattttccagacctataaatacttgcagaaaaaaaatgaaaggagaaggcaacttgatttagcagttgggtcagttagcaatgcctatggcaagc

SEQ ID NO: 25554 - DNA, 120 bp, Homo sapiens
gtgcggcagtgagtagatctctcagtgacggtgatgtgcctctcccagaagaaatttcaaaatgcagtgttcattttcctccacaagaaaggaagaaactgttttgttattgtttattcc

SEQ ID NO: 25555 - DNA, 120 bp, Homo sapiens
catcgatttttcaggcctgtgatgacgtatctcttgttgaataagtaaacccttccagtaaacagacagttagtatattgatttcagggtggctttagccactgaacctgtaagtcttgc

SEQ ID NO: 25556 - DNA, 120 bp, Homo sapiens
tgacgtgcctggtgtcagggagagagttgaatgagaaaagtcccagaagggcagaagacttgggtgattatctgagtccatctttccttatcacatgacagagttcttgaagtcttggct

SEQ ID NO: 25557 - DNA, 120 bp, Homo sapiens
tcacgaactcaaggcctaaattctgctgatggagccgatgagaattgggtgctaaggcaaagagagttgccaatattatattcttcggggttttttgtttttattcgcattttggaaaag

SEQ ID NO: 25558 - DNA, 120 bp, Homo sapiens
ccacgtaatgttattaacagtagtactgatctcacaatcgccctatgtcccattcacaagatgttctgccaagccataaaaggcccagttaagtttaagagaagtctcaaaagtaacaga

SEQ ID NO: 25559 - DNA, 120 bp, Homo sapiens
ggacgcagcttagcacagcatggtggaggctaaatgggccttaagggaaaaaatgatatctgaagatgcaatttatttcaaaaagagtttgctcccgtgaattttcactctctatgtaga

SEQ ID NO: 25560 - DNA, 120 bp, Homo sapiens
gaacggcaccagcacacacttttcctgagcctttgcatgtgtggcaggcagcggcctggcatcctggggaactgaatgaggacgcagatgacccggacgtgttcacagtttgacacatct

SEQ ID NO: 25561 - DNA, 120 bp, Homo sapiens
ccacgctggaagtcaaaataagccaccagtgccaagtgttcaaagcccttagaatcacaatgctcttaaagcaaagtcttcaacaatgcttgaaaacttccactggttctcagtatgtcc

SEQ ID NO: 25562 - DNA, 120 bp, Homo sapiens
taccgaaaaaatcttaagacctgccttgtggtgttttttgttttgttttgttttcattaaagtgacttgttagcctcttgctccctgtgaagcacagggaggtgacgtgatgtgcacagg

SEQ ID NO: 25563 - DNA, 120 bp, Homo sapiens
ggtcgcagaggggattcagtgacagggtggtgtagaggctggagcgtgccccatgtgtgcacgacagccttccaactaggggaggcgggcctgggctctcaccagagagcctgtgttctc

SEQ ID NO: 25564 - DNA, 120 bp, Homo sapiens
agacgtccttcccgtggtctggaccctgggaagtcgccaagagccagacaggagaaaggctccacttggctctcctctttggtgaccatcccttgcctccatggcgggactctcaggtga

SEQ ID NO: 25565 - DNA, 120 bp, Homo sapiens
tgacgactgtgactggcccatttcttgttttttttctcttgctctgctttctcccccatcatcactaaagcagacatggcaatgatggccatgcacactttccaagggtccagctgtaga

SEQ ID NO: 25566 - DNA, 120 bp, Homo sapiens
tttcggcaatgttttggcttcctcaagtgagaaaagaatggatttgtattccccctctgcattattgtttttgttttgtttgtttgttttgttttgtattgagacagagtctcacttttt

SEQ ID NO: 25567 - DNA, 120 bp, Homo sapiens
ctgcgcgtgttatatggaactgtaaaaaatgcgccaaccatctgtccttcctctttatctgattacttatcattgttctctaagttgcaagttaatagactgatcataaattaatgcatg

SEQ ID NO: 25568 - DNA, 120 bp, Homo sapiens
taacggttcaaagttaataatttatcttatggacatcactagtggcatagttgctttaaacagtgagaggatttaatagatatttgatttgcaagtgggatgaagggtggtctaaccttt

SEQ ID NO: 25569 - DNA, 120 bp, Homo sapiens
cttcgagcttaacacataagacttgggaggcaaaaccttttattctctttaaatattcactttaggataagcatttttttaggtgttaggaacagggaaaactgtgtggttaggaaggaa

SEQ ID NO: 25570 - DNA, 120 bp, Homo sapiens
tctcggaaaaaaaaaaaaaaaaggataaagaaatcatactaaaaacaaaacagaatgctgaccaccttatagaaatagaaatagtggtttgctgtgatagcaaattttcttgttaacttt

SEQ ID NO: 25571 - DNA, 120 bp, Homo sapiens
attcgttgaacaaaccagatacttccttatagtttttggattaacttacatgagctaagtttatattctgttcagatcacaagtggtcaagtttgtgtgtgtgtgggggggggggggtgg

SEQ ID NO: 25572 - DNA, 120 bp, Homo sapiens
gcccgtttcaggtgttccgtgctcaaatgtattcatttcttgaaaaattcagggagtgcacacttttgtacattttcctatgtgtatatgataccattatataaatcttaaaaatatata

SEQ ID NO: 25573 - DNA, 120 bp, Homo sapiens
tctcgacggaggtattggctttaaagtcaaggcaatgcatctattctttcttttgatataactagctaaaagatctcttaaattcaaagtggccctcatcttactgttactgcaatttac

SEQ ID NO: 25574 - DNA, 120 bp, Homo sapiens
tagcgacaaagtaacatacctctgctccattacacagataaaacctctaaggaacacctcctctcttaacaggcattaaccaactgcagaaactgcagaaggacagggctatttgggaat

SEQ ID NO: 25575 - DNA, 120 bp, Homo sapiens
caccgagcattctgagccctgatccttacactaattgtattatgcaaccataaatgatgtctgctgtaccagcggggacagtttattttaatagattggtataacttggcagaatcttat

SEQ ID NO: 25576 - DNA, 120 bp, Homo sapiens
aaacgtagcctctgacccctaaggagcctgtaatccagatccccattctttccatcccattctcccaagcaagaatttacctaatgtggtttgcgagaatttaagagctggaaaggtggt

SEQ ID NO: 25577 - DNA, 120 bp, Homo sapiens
tcacgagaagccggaatgggttcgctaaaatgtgtctatatgattaagcataacgtagctttgcagcactcttcacagcttcctcagagccttccgcacgcggtgtctcatttgaatact

SEQ ID NO: 25578 - DNA, 120 bp, Homo sapiens
tcacggaagaccaaatttgccttgaaaaatctttatagtctcttcacatttctaagttgacatcaaaaatcggttaccataaaatcctaatagttgaagagatgtaatttcaattatttg

SEQ ID NO: 25579 - DNA, 120 bp, Homo sapiens
gcacgccgcgattccactccagcatttccagttagtcgggtgcctctgcactcccggtgttccggcgcccagttagttgtgtactctgggctgtccctatactggagtcctaaaacactt

SEQ ID NO: 25580 - DNA, 120 bp, Homo sapiens
ttacgactgcagatagggggaggtttttcaaaaccttggtctgaaaagccatagaagggagataggaaagcgggggggtggagccacagtacattcaggtggatccgtttttggaaatag

SEQ ID NO: 25581 - DNA, 120 bp, Homo sapiens
tgtcgttcacatgcttcatgccgagtccttgtggacccacagagacacactcgccccagtttgaaggctgctaacttgattctgaggacaccagtgaggtggtagtgtgcaaatgatgtg

SEQ ID NO: 25582 - DNA, 120 bp, Homo sapiens
gcacgtggcccctaaaacagcgcagcctcccaaagacagaagatgtggactagtgagaagccaggtatggtgactgctgctggatgaagcttgtcccaccagaggctcgcttgtttcatt

SEQ ID NO: 25583 - DNA, 120 bp, Homo sapiens
acacgtgtggtccctgccctcaggttaataggcaggggtggaacagttatgaaactgctctaaagtcattttctcaaactgggagtgacaaatgtatccacttggaaaagattgagaatt

SEQ ID NO: 25584 - DNA, 120 bp, Homo sapiens
caacgtattttactaagggcatcagtaaggctttctatgacctgctccttcaatgcttggttgacatttggggagcaaagataaactaaggattctaagttctgtcctgtgatgctgtaa

SEQ ID NO: 25585 - DNA, 120 bp, Homo sapiens
taacgcccatatctgctgctcaagactggcagagagaagagggtttgtgatgagaaaaggtggtgaaaggcacaaggaggcacagagcatgtcaggtcccatatcccaaaaggaatgtgc

SEQ ID NO: 25586 - DNA, 120 bp, Homo sapiens
agtcgcttgtgggtttgtgattagagtgaggttcttttataaagggagtgagaagagaaggtctgtggatacttgagtgtatcggtaattaagaaataaattgtgtacatcccatttctt

SEQ ID NO: 25587 - DNA, 120 bp, Homo sapiens
gtccgtgaactgaactgtgatcccagacaggcaagcacaccaggaatctcttctcagctgttgataatgagggagcgctggggagagaaatggggtcctctttgagtttcctctgtgccg

SEQ ID NO: 25588 - DNA, 120 bp, Homo sapiens
tgacgcagaaattcagaattccccgcatgtgtcccggtttgaaagccactgtgctttgctgtggattaggatcagacagttgagtcttgttccaacaaggaaagttgcttattggaaagt

SEQ ID NO: 25589 - DNA, 120 bp, Homo sapiens
acccgcagcctcaagaaaaatatgaaaagtggattatgcctctgtagctatattgcctataaactttctgcagaatgacagtattcatatcctacattttttcaaagcgatattaatcct

SEQ ID NO: 25590 - DNA, 120 bp, Homo sapiens
ttccgcaagctaaaaatatcactctggatcacagcagtagaggactctgtaaatttaatctgtgtgtctcctgtaaataagtgcattagcagtacacaggtggtgtcagagtcagtgatg

SEQ ID NO: 25591 - DNA, 120 bp, Homo sapiens
aaacgtggagtgagcccaaggtgccatttatccagcccatacacatcgtaccatgtacagagtggacaccagataaatacattgactgcatgccacaaacatatatatgtaggcaccgtt

SEQ ID NO: 25592 - DNA, 120 bp, Homo sapiens
taacgagcatcaatgtatttaaaaacaaacatgtttaaactagtgaatgattagattataatgatcttaattcataagttttctcattggccttttgtatacttcaattgtaatacctag

SEQ ID NO: 25593 - DNA, 120 bp, Homo sapiens
gagcgtgacaagtgttttcttacttattttacttttcagataattcatccttaaagtacattagtttaaaagtactgtttaaggaaacagtacttggattaaaacttgaatcattgttaa

SEQ ID NO: 25594 - DNA, 120 bp, Homo sapiens
tcacggacaagaaaatccatgtccatttggttctgtgacccacatcctttgtatcctatgcttttttacacttggtacatggttgcaagattgcccctgttttctacttatagttccatg

SEQ ID NO: 25595 - DNA, 120 bp, Homo sapiens
ctacgtatgtgcacgaggtcgttataaagctcgaaaatatgggctcaccaaccaggtgatttttttaattatccaaccagaagacataacatataggggaatcaaaagaaatctctgagt

SEQ ID NO: 25596 - DNA, 120 bp, Homo sapiens
ttgcggtcccacgtgaggctggagatgcgtattgtcttgactttgcatctacaagtttaacaaatgatgctttctcagtttacctctggaaatggaaattagcattgcaaatgacttcat

SEQ ID NO: 25597 - DNA, 120 bp, Homo sapiens
tttcgctgtgtttacgatagactctcacgtctagatgtgtcatgtattatgttaaattggtatgtcttgaagttataaagcacagccctctataagtatatatattccacctctttcaaa

SEQ ID NO: 25598 - DNA, 120 bp, Homo sapiens
aatcggatggtacctatccttcaaactgctatttaatgactgtctgctatgttcaaggcactgctctcaatgttaatacttgatgagatcgggcgcgttcaaggtggcatggccgtagac

SEQ ID NO: 25599 - DNA, 120 bp, Homo sapiens
ctacgagctgagttgtgaatcaagttaatagattttcggaatgttaaggtctaaaccagtagctcttaactgagacaatcctgtcctcatctcacctgggagacatctggcaatgtttgg

SEQ ID NO: 25600 - DNA, 120 bp, Homo sapiens
ccacgtgaagacgccttagttatatgcacccacccagacacttgctcagaaaggaatcagtggggccctggccttagaaactggctccttcactgctgtagaaacaacataaatttaaca

SEQ ID NO: 25601 - DNA, 120 bp, Homo sapiens
acacgtgcttttcttttttcttcttactttttcctgtcttggcaatgcaaggatgccattaggtaaagaaatccttcaccacactaatcctgcagagccagaagagaaaccagcttgttc

SEQ ID NO: 25602 - DNA, 120 bp, Homo sapiens
ctacgggcctggagctgggcacctgactcagcagctgcccagatccccagagctgagaagtcaccatgcatttgtggtgcttcgagcgagttaccagagtcctggaacagagcagcacac

SEQ ID NO: 25603 - DNA, 120 bp, Homo sapiens
ctgcggggtgtccccttggcatttgggcagggcaggtgaccaagggtcttgttggaactgaagtccagcttgaaaagcaaatctggttgtgagctagagtccagtaacacttgtttcccg

SEQ ID NO: 25604 - DNA, 120 bp, Homo sapiens
cgccgccccccgcataactcgtgtgtcctaaaatacaataatttcttgaacttcagtcacttatgcctataagcgggcatacaacaggggcacaataaatgtttgttaagtgaatgaatt

SEQ ID NO: 25605 - DNA, 120 bp, Homo sapiens
taacgaggtccacagaggttctgcgattgtctaagaaagaaggctgtgttcatggcctttgttgtttacgtggccctgtgattctcttggctccgtgaaagtcctgatgcagacattccg

SEQ ID NO: 25606 - DNA, 120 bp, Homo sapiens
ttacgtatattttaatcaagtttaatttgactatatccagctaaacaattgattgaacttcacttgcttttctatgacaggttttttgttcttagtaaaagaccccagttttctcacttg

SEQ ID NO: 25607 - DNA, 120 bp, Homo sapiens
ttccgtctctaacaaaagtggcctgaagagaggcttctagactatactcacggtgggttcttgggacctcagagtcagctccatcacttaagtggctgtgtgattgagtggagacacctc

SEQ ID NO: 25608 - DNA, 120 bp, Homo sapiens
tgtcgagtgtcaacatgatggcacctaaagctgttgagacttcagaaaggtaatgtgtgaaaagtgaaaagtgcctggcatccaggaagtactcaataaataccaactattttattgctg

SEQ ID NO: 25609 - DNA, 120 bp, Homo sapiens
gttcggtgtttcacatatggttagtccaaactaagatgtgttgtgagtctcaaatacacactggattgtgaagacttaggacaaggaaaacaatgttaataaaatctcattgataacttt

SEQ ID NO: 25610 - DNA, 120 bp, Homo sapiens
tctcgtattacatttctattggacagcagcgctctagacagtactatgggtagtatctgtggggaggttctcagaaacatgtcgcatgctcttttagaaccttaaagtattcctagtctc

SEQ ID NO: 25611 - DNA, 120 bp, Homo sapiens
ttgcggctgtgtttctctgaaggcttggcattagtagattgaaaagaataaccatctagggaaatgtgaattcagtttctttctgacattctgctctctacaaggggatattatgtacac

SEQ ID NO: 25612 - DNA, 120 bp, Homo sapiens
tggcgtggtgcgtcctaagccagtgtttctcggctctgttccttagacatgtgttagtgttaatagatgttcttggaaaaaaaaaaaaaaaacagcattctgaggtcaaacatgctcaga

SEQ ID NO: 25613 - DNA, 120 bp, Homo sapiens
ctacgcttctcgtacacatttcatattaaagattttggaaagtcctgcaatacagagccctgtctaatattgccacaacccacaattgctcaaatgtaaatagatttgagtttattcaca

SEQ ID NO: 25614 - DNA, 120 bp, Homo sapiens
gtccggtgatattaaaaattaatgtgccttatttagataagtaacataaaaatcacaaaatgtatgccttagatttatatgtatttataactagtctatttcctgaaaacagttgagaca

SEQ ID NO: 25615 - DNA, 120 bp, Homo sapiens
taccggtacgatagggccattccaacaaagctgtaaagtggtgataacacagtcataaagaagaggagatagctctgggagaaaaggtggcccagaaaccagctctgagcctcatggctg

SEQ ID NO: 25616 - DNA, 120 bp, Homo sapiens
acacgaatttcagtttagaggacgaagcattactggagtattgttatgcaggaaaactttttcctaaaaatgccctgaaaagagagtagcctaatgcattcaatcaaaatgtttttaagt

SEQ ID NO: 25617 - DNA, 120 bp, Homo sapiens
tctcgaaaacaaacaaacaaacaaaaaaacactggggccaaagaactctgtgtgctgtatcacctaaccacatttcatgacacggctagagaagaatcatgcaaataaaaatttccaaca

SEQ ID NO: 25618 - DNA, 120 bp, Homo sapiens
gttcgtaaactgggaaagtatttcactggggagtgagcagaaaagtaatactataacctctatatctagacaaatgtgaattcagtttcacatataaatatataagtgaaaaaatatata

SEQ ID NO: 25619 - DNA, 120 bp, Homo sapiens
cctcggtttgttttcagttaggaattagggatatttataagaatatctttaaatgacacatgccttgctctgggacgaggcatctgcatgggtgacacatatgtgttgtgtgtacaggct

SEQ ID NO: 25620 - DNA, 120 bp, Homo sapiens
aagcgctggtgaggttggcgaagtttaggtaaacacagctgggaatgccccatggcctctgggtgactttggacatcactgaactttacccttagagatgcatacctgcatcttttttac

SEQ ID NO: 25621 - DNA, 120 bp, Homo sapiens
tttcggttaatagactttcacagtagccaattgaatatattggttaaatgcatctctttatacacagactggattcaaactgaggttgtgtctctccctggctgtgtgacgttgggtatg

SEQ ID NO: 25622 - DNA, 120 bp, Homo sapiens
gcacggctagataaaatacagtagccactgattcaaatttcaactgaggagtaaaataaactgaataacttagaaaagttttcttcttttgaatgactctaagaatttaaggagcatgtg

SEQ ID NO: 25623 - DNA, 120 bp, Homo sapiens
aaacgcacatttagtatgcatatgacaacacgaaggacttcgattttgctgatgcaatacagttttacaggattttttatactcaaattagtaaaattctgtattgcatccaaattataa

SEQ ID NO: 25624 - DNA, 120 bp, Homo sapiens
taacgaccactggtatctgcccagaaagctctaccgcctgtttataagctcctgcaggagacacaaaaagaagagaatttgaatataacttgaaatgaccgtaatctcctgccccaactc

SEQ ID NO: 25625 - DNA, 120 bp, Homo sapiens
aaccgcctctttcttcattatttctcctgaagcacaaatctatagagaactcagctgccagtctctcccactgcactcagcagtgaaagggttaggcctaggcttttcaaacagaccagt

SEQ ID NO: 25626 - DNA, 120 bp, Homo sapiens
ccacgttgcagcatatggcagaacatctgtccatttccaggctgaatggtactcttttgtacgtgtggaccacatttcatttatccattcatccacgggagggcacttgggttgcttctg

SEQ ID NO: 25627 - DNA, 120 bp, Homo sapiens
taacgctgctatgaacatagctgtatgcctttgtcttttaaagcccaaatctgatcaagtcactccccagcttaaaaccttccactgctccccagcagtgggataaaggccagtctcccc

SEQ ID NO: 25628 - DNA, 120 bp, Homo sapiens
tcccgccagccctgctcagtcttcttgcttgtcatccttggctaggccttgcattgccatagccctctgcctctgttcacgctctctcatcttggagcatgagccttccatcatctctac

SEQ ID NO: 25629 - DNA, 120 bp, Homo sapiens
acacgccccctccatggcccttcctccataagcagaatcactcctcactgttcctgcagcacctcctgtgtgcccacacagctgtcctgcggtgggctgtgtgtgtgagtgtgccccctc

SEQ ID NO: 25630 - DNA, 120 bp, Homo sapiens
ggtcggcaccatgctagaacttctgcaagtgagtgcctttggtgctggcccatgggagagctgttggtaaggcatacttttgcagattccagttgctgctgaggttgttgctctttgcac

SEQ ID NO: 25631 - DNA, 120 bp, Homo sapiens
agacgctgaccactgcttagtttctcaaactgaagttttcctcctcagagcttttgcaaaaccttttctttgcctggaaaactccccccacaaatctttagttgtaggttccttctcatc

SEQ ID NO: 25632 - DNA, 120 bp, Homo sapiens
cttcgcttccttcacccatgtgcccactgagtccagaactgtatagcagtttgattgaaaaaatccacagggtggaggatgagaggaccctggatcccagcctcacagcctcttacttca

SEQ ID NO: 25633 - DNA, 120 bp, Homo sapiens
agtcgcccactttagagcccttctgttcttcagaaaccagacttttctttcaatagtttcagtaatcaatcgatcaatcaatcaaccaatcaacagtgataataatcatgagtgagcccc

SEQ ID NO: 25634 - DNA, 120 bp, Homo sapiens
gcccgtgctggctgtgtcctgctgaaggcacactaagtgctgcccttcccagaagcctcaggaagcttgcgaagctcaggtgcatggatgcctggtggaatgaggaagggatgcagccag

SEQ ID NO: 25635 - DNA, 120 bp, Homo sapiens
ccccgtaggagaggggagtcaagggctccgggtgggaatggagctgggggctgatgctggcttctggagcactgtaatgtgactgagaaaggtgaaggagccgttctgaaaaagaagaag

SEQ ID NO: 25636 - DNA, 120 bp, Homo sapiens
gctcgcacagctcttgactcatcttgacttctttttcctgcttcatccaagcaggtcgactctctcgtgatctcagagacagagtgaagtcatgagtgggaggggagcacagaaaataag

SEQ ID NO: 25637 - DNA, 120 bp, Homo sapiens
tctcggaaaatagcacccttcaaatgttttagggatccagatttgatgaagagatgttattttggcttttagattcttaggagagatttgtctttctcaggtcaggaagaaaatgctgcc

SEQ ID NO: 25638 - DNA, 120 bp, Homo sapiens
gcccgctgcacattcttcgggacagactcttttaattattactagtttaatgtatgttttgcttagttaaggaaaacccctgtggtttcttgacgtgcttcagtattctaactcacagct

SEQ ID NO: 25639 - DNA, 120 bp, Homo sapiens
cctcgacctctggaaaggagggtgcatctctagaaataaggctaagtatgccactgacactgtctgcataaacgtgtgtgatctcaggtccaaaggatggggcctggtctaagccaggga

SEQ ID NO: 25640 - DNA, 120 bp, Homo sapiens
ggacgtgggaaatcattttcctgtggcaacttgtgaagaccattctgtgaccttggtgtctctgggccttctcttagattttctaagttggctagtcagtggagctgccatccctccttt

SEQ ID NO: 25641 - DNA, 120 bp, Homo sapiens
ttgcggagcaatgcctgtttcatgagagctgagtttgctgtgtcttccacttagaaacaacactgtggaccaggaggacacacagctcccagggccatcaccacacaaagtgaaggctgg

SEQ ID NO: 25642 - DNA, 120 bp, Homo sapiens
atccgaggcttctagcccttgccgggccaggcccgcagcactccgctccccaacccagccgctgctttgtcgcaggaacctcagcagggcagggtgtttcctaggaggacatccgattcc

SEQ ID NO: 25643 - DNA, 120 bp, Homo sapiens
cttcgcgatgaaccagttttgcttgaagcagacaaacccgattgtcaggagacagtgatgatttcttcagtctctgaggaagagttttcattttccccaattcgcaaaaaaagtcaggtc

SEQ ID NO: 25644 - DNA, 120 bp, Homo sapiens
ctccgtagaatattttccatgtgtgttaacaatggctgagcgtggtagatgccaggaatttctgtcaaccctcaaagaggaaagccctgcctaatggtctgcccgttcttgttcactccc

SEQ ID NO: 25645 - DNA, 120 bp, Homo sapiens
acccgccttctttctggaaggtataaaggctcctgcttatacctggcactgcacgcttcgctccctctgatctcctgactgtcatgcccagtgtctcagcctatcattctacctctaact

SEQ ID NO: 25646 - DNA, 120 bp, Homo sapiens
actcgaccttgagtgaccttgagcaagtttctcaggattccacctccaagtcactctccctttgggatatgcagcactaagttaagcttgcctggaaaacatcacttgaagctggaaaac

SEQ ID NO: 25647 - DNA, 120 bp, Homo sapiens
cagcgggaaaagctatttgttcagacaggagtggggtgggtctgggcagagcactgctctaacttggccatgccgtggcagcagctcctttaatgccactttttcctggcgcgcccgcgg

SEQ ID NO: 25648 - DNA, 120 bp, Homo sapiens
gaacgctccctcgtctctcaacagttgctccagacaggtcagcaaacatggaattcagaatgttcattaaacactggctgtgtcttttgtgttcaaaagcaagacactctctctgaacca

SEQ ID NO: 25649 - DNA, 120 bp, Homo sapiens
tgccgggaaggtctggaccccttgcggggcagtgggcagcaccgtgcctccgttcacaccactcacatggctgtgcctctgcttccttctggcatggctgcttcttcctcaggtctcaac

SEQ ID NO: 25650 - DNA, 120 bp, Homo sapiens
ccccgtgacctgcagaggcagagcactcaccagcagcccagcctcgttgcgcacccatgtttgcatttgcaggccctagaaccactccaagctccgtgtggcgagatgcaccctcctgcc

SEQ ID NO: 25651 - DNA, 120 bp, Homo sapiens
cagcggcacctgagtcacacatctggagccatcctggactgcctcatttccccgatggggggtttccctgacttcatccatcctgtcttttgggtccccataataactgacatgggtcgg

SEQ ID NO: 25652 - DNA, 120 bp, Homo sapiens
gcccgtaccagcccctgtgagaagggctttaactgccttcccaccccctgctcatcttagagtctctctatagtgctgctgaaagaatctctaaatcagtggttctcaacctcagccgca

SEQ ID NO: 25653 - DNA, 120 bp, Homo sapiens
aatcggtctgggatggggccctacaggtatttttttaaagctctccagttggtaatgcatagctagagttgagtatcgctgttctaacgtgcagatctggtcatgttaccagccttttag

SEQ ID NO: 25654 - DNA, 120 bp, Homo sapiens
aaccgaacatgtgcgcattcagtgcacccattttcaactgtgcattaacacattcagcccaccagcaagatttatgaaccattttctgctgttgtatataacatatcatatgcataatgg

SEQ ID NO: 25655 - DNA, 120 bp, Homo sapiens
ctacgaactgactcacactgattgcccaacttcctctctcgaggtctcatcctctttccctgcagccgtctccctcttgcacgcacacacacacacacacaccacacacacacacacacc

SEQ ID NO: 25656 - DNA, 120 bp, Homo sapiens
ggtcgatgccatctaccctggacttcatcttgaactccttcgagtgtgagtcattactcctttgtgcacctctgctttctcttctcaagatgttcacctgcttgaggtcagttccttgag

SEQ ID NO: 25657 - DNA, 120 bp, Homo sapiens
gagcgtcttccacttgccatgttcaccacagtgctcaacatgcctgaatgcatggatggcgacttctcagatcctcagtctcctcatctgggtaataaggcattgggttggcgggtccat

SEQ ID NO: 25658 - DNA, 120 bp, Homo sapiens
attcgttccacaacacttcaccaattaaagagagggtacaaaaggtgaacatccttggctcccagcagatgctcctcaaaacctgaaaaatcagataggtgagggaagattgaatgaaag

SEQ ID NO: 25659 - DNA, 120 bp, Homo sapiens
gcccgcatctggaacatgaaagaacctgtctgatgtgttctagtcaggaaagcaggtagccaatactatttatagaatttacagaaactgaagattttgtttctactgattttcaaaata

SEQ ID NO: 25660 - DNA, 120 bp, Homo sapiens
ctgcggttcccatttcacatattgttagaattctgcatggtggctttgccctttaaccactaactgataaatgatgtagttagcttttaaatgtgtggaaaaatataatttcaggttcaa

SEQ ID NO: 25661 - DNA, 120 bp, Homo sapiens
acacgtgttttgttagtctatttgtctctcagtcatctcatggaaaattctcagcttttggtatggaaataattttcttgaaggcaatatttgttgagtgactgacggaatgaaaaacgc

SEQ ID NO: 25662 - DNA, 120 bp, Homo sapiens
ttgcgtaagtgtgaaaaagatctgggtgttttcattggatccaaattccacatgagccaacaacagcgtggtgtggaggctggagcacattaataagaacagtgtcctaaattcaggagg

SEQ ID NO: 25663 - DNA, 120 bp, Homo sapiens
agacggtgtgtgcagtgcagtatgtaacccagggcacatttcaggggcccacagggagctgcagcttgtaaggtggagtgcagccaacagagcagagagtcagaatccccgcagagtggt

SEQ ID NO: 25664 - DNA, 120 bp, Homo sapiens
atgcgcagcaaggaagacagacttataggtggtgcgactgccatcctctggtactgaaggtgctatcatggagggagggaagtagattgaccctcctggctccagagtacggaactcaga

SEQ ID NO: 25665 - DNA, 120 bp, Homo sapiens
aaacggtcagaagcttacagggaggccaattttggatcaactttaagaagaattttttaaaagctagagcaatcctaaaatggaatttgctctttataaagttgcgaatgcctcaccctg

SEQ ID NO: 25666 - DNA, 120 bp, Homo sapiens
ggacgggcagttgtgagtaatctcctttccaatccatacccgcaatcaccagaaacgtggacttccctgacactgagcacctcttaattaagcatctcataagtgaacaaaacccagccc

SEQ ID NO: 25667 - DNA, 120 bp, Homo sapiens
caccgaggtttgagagaaaggatatgtgtgtgagaggtgtggtttcattagaacatattatttgacttcatgttgaatcaacacttttgtgcaaaatgcagttttaccagcctctttcct

SEQ ID NO: 25668 - DNA, 120 bp, Homo sapiens
tctcggtacttgattttctaacataaaatgggattgagaggggaattttgaagttcccatggtctgtcctctacattctgacagctcattatctctgcggtattgttctcacatttaagt

SEQ ID NO: 25669 - DNA, 120 bp, Homo sapiens
tagcggaggcagaggcctctcaggcctgaagatagcctctgttttcagggaaatactagactgtgagatctgtgacactgaagcactaagttcatctcacaaaagcaacgtgctcttttt

SEQ ID NO: 25670 - DNA, 120 bp, Homo sapiens
agccgaaacaagagctgctttaatgtagtatatttaaaatcatatctcaattaagatgttattcaaatactatttgacccaccaatctcattactggatatatacccaaaggaatagaaa

SEQ ID NO: 25671 - DNA, 120 bp, Homo sapiens
ttgcgttaggggtcattcttggtggtgtacgttcttcaggtctggacaaatctataatgacatgcattcaccattactatatcacgcagagtcgtctcctggccctacaagtcccctcct

SEQ ID NO: 25672 - DNA, 120 bp, Homo sapiens
atgcgttacatcgtccttataagaaagcagtcattctcaccgagatgtgctgagcagatactggacatgttctgacccagataagggctgggtggaagtagggctggagacacagagacc

SEQ ID NO: 25673 - DNA, 120 bp, Homo sapiens
cctcggaagaactgaaggcagagaggtcctctcagtgtggactgggcctctgctggcagccaccagcgggcacagagctgatgtgtgttatgccacgtggggaaaacctacagacgattc

SEQ ID NO: 25674 - DNA, 120 bp, Homo sapiens
ttacgtttcccttctggattatttccttagtatctagttcaagaagtgaaatcgctggattcttgtggtaaatttttgaatttcacagtataatgctgattttctcaaagtctcacattc

SEQ ID NO: 25675 - DNA, 120 bp, Homo sapiens
taacgatgcagttccctgtgaaagggtatgagtaggttttggggctctggataccgtgtggcctgaagagacaagggctcaatgccaactctgcctgtttccaactgtgtaaccatgtga

SEQ ID NO: 25676 - DNA, 120 bp, Homo sapiens
gagcgtcaaaaatcatggacgtgctctggttaacactgagtgggagctcaacaaattattatttttaattgttacttggacatggccaagttgactacactttatgttctgctacctgcc

SEQ ID NO: 25677 - DNA, 120 bp, Homo sapiens
tgacgccacagaaggtgaaccgcatgttgggagatgctcctcatctgcttaaatgaggtgcaaacacagcccatgcgcctgctcttcatgactgtatctgtaccagcaatatttgtattg

SEQ ID NO: 25678 - DNA, 120 bp, Homo sapiens
agacgtgtaggtctcttgtgtggataaggattctgccttttatgtaagatatgtgttgcaattcagctttcaggtcccagccccgggaaggctccaggccttcacaaactggcccaccca

SEQ ID NO: 25679 - DNA, 120 bp, Homo sapiens
ccacgagaaggaaagcaattgtccaaatgtgggtagcttttcttcccactgttgtcagctgcttccaattagcccccatatacataatcccagtttgtgtctgtatcagtacaattctcc

SEQ ID NO: 25680 - DNA, 120 bp, Homo sapiens
cctcgtctcacacctcttgccctgcatgcatttctttgctctgattaaacgagcattttataagccacatttgctgtgtgaaaggcaaagtcttccctcccacggatgacggtctccagg

SEQ ID NO: 25681 - DNA, 120 bp, Homo sapiens
aaccgagacaaatggaacttagctaaaagatgggaaaggtagactgactctgacttaatctacttaacctaccaggcaatttataacttgatggcctaatttttgcagcacccagaagca

SEQ ID NO: 25682 - DNA, 120 bp, Homo sapiens
gcacggcaaaggctcagctgctaagtgggcagcattgttggaggtgagcagcttaggctgactgttcatcaaaggaccaagcgcttgaggttcgctcatcgctggaggccagagtgggga

SEQ ID NO: 25683 - DNA, 120 bp, Homo sapiens
actcgatccccaggagataagtgaagagtaagaagtctatctttagaaacaagagatgtccaaggctagaaagatggggaaggagggtggaactgttctggaagtgggtctcaatctcag

SEQ ID NO: 25684 - DNA, 120 bp, Homo sapiens
tttcggcacactctcttgcgtcataggccactgtgttggaggcaggagtgttggctttggaggcatagagattaaaattagagtaacacgtgagcactgaaaaggttaaacagtagagac

SEQ ID NO: 25685 - DNA, 120 bp, Homo sapiens
tcccgacccccatgtacccctttcttaaccctttaattaagatcacagccctagaaatagcttgcaaaataattaactactgatcatttataccttagtgcttctgtgagcatgttttct

SEQ ID NO: 25686 - DNA, 120 bp, Homo sapiens
gcacgttcccatcgctattttatgtgaaggtggtcctgggggctgttctgaattctcagtttccttttttcccctccccagttctttgaaaatatcagaaacggacttgtggcatctttg

SEQ ID NO: 25687 - DNA, 120 bp, Homo sapiens
atacgagatgaatcttaccatgtggtggatgcccgtctcatgccaggcactgtgctctaagcccattggtttatttcagtgcttgaaattggctttcgagagaggcaccacggttccctt

SEQ ID NO: 25688 - DNA, 120 bp, Homo sapiens
gcccggaagcaagaacgaccgacctcattaaactggctcccttcacctcctctcacatctttttctgccttttggccaagttttctctcccccgcatttcctccttgatctcgtttgaat

SEQ ID NO: 25689 - DNA, 120 bp, Homo sapiens
gatcgaaccacatgtgctgatgtgattgaaacgatgtggaattctctggacagagatagaattatggaggggttagtgtgtgtgtttaagattaaaagaccaggtgtatgggaggaaata

SEQ ID NO: 25690 - DNA, 120 bp, Homo sapiens
tctcgcaaagcattttaccatcagcacacgcagtttttctcagttttctgagatggggccatcttgaatccaacagacaacacacagcatcagccagactaacacaaaggacgtcatggg

SEQ ID NO: 25691 - DNA, 120 bp, Homo sapiens
ggacgtaaatactggtgtcaacactaggtctgcacctcgagaggagtggagcaaaaggatggagtggcagatgaaggtatgctgttcagaaaggaggcagaaatgaaaggaagaccatca

SEQ ID NO: 25692 - DNA, 120 bp, Homo sapiens
gtgcgctccacagcttgaggaccgtcctggagggcaaatgccagctgctcacttctgaaaagaaaaattccagtgaaatgagtacagtcattcttaggattactcacttgatactgtgta

SEQ ID NO: 25693 - DNA, 120 bp, Homo sapiens
gcacgttaagtcttccatggactaaaagaaaacttgtaaacctaagagaacctctatttttgatatacaaaataatacatttccttaaactatgatcttgatactagaattttaattaaa

SEQ ID NO: 25694 - DNA, 120 bp, Homo sapiens
tgtcgtgttcttccccactagaagccaattatgcaagcttcaccattcacacatggaaaataatttaatggagtactcattgcaatttcacttatccagaattggctgttgttctcagag

SEQ ID NO: 25695 - DNA, 120 bp, Homo sapiens
gtgcgcatttactcttaatttagatacggtttaaacctaattagaaaccagaagctcttgtatttccacaaaggattatgacagccccaagaaaagatagtgaaaccattatataacaag

SEQ ID NO: 25696 - DNA, 120 bp, Homo sapiens
ctgcgtcctcctggaagaggtctgccactcaccataccacaaaccaaatataataaaatcagaaggcacactatagtgaattttttagaggcatgtattgaaaagcatctcaaaaagcat

SEQ ID NO: 25697 - DNA, 120 bp, Homo sapiens
tctcgaagcttccagaagtcaactcaagttatctgaaaagtgacacttttgatgattgctcgcttaatactgggagagccagatgaagattcctccccacttcctcagatgtgcaactct

SEQ ID NO: 25698 - DNA, 120 bp, Homo sapiens
ggacgaggagtaagctttgctggtgactcatgcgctgtgtggaaactccctgcacaagtgagctgcgcagggtgagtctaaagggttaatgcactttcaaaagcctctaatttgttattc

SEQ ID NO: 25699 - DNA, 120 bp, Homo sapiens
cagcgatgagttcaagcgtccccagaaggtgttgggggaattagggacatggctgtgtttccccagagaaaagtggccattttactttccctcttcactaacatgcttttgacatgcatg

SEQ ID NO: 25700 - DNA, 120 bp, Homo sapiens
ctacggctgcattcctttcgctcttgccttcctttagaaccctggagaaggcctcctgaagcctggccctattatgtatcctgacaaagataaacttttccaaaaagctgcatgttgttt

SEQ ID NO: 25701 - DNA, 120 bp, Homo sapiens
cctcgcagtgactacgtgatgaaagtaccatgcagaggaggtgtctgactgaggcgttcgtggtgtgtgacagagtcccctgcacaggacagccgcactcccctcttgcgtcctttcctc

SEQ ID NO: 25702 - DNA, 120 bp, Homo sapiens
taccgtggtcataatagtgtggcatttgataactaatgaggcactgtcgtgccagctattattttcagacatttacagtccttttttaaatacaaagaaatatttggtgtgaaatgttcc

SEQ ID NO: 25703 - DNA, 120 bp, Homo sapiens
ccccgggagctggtgcaagcagaggcgacagggcaagggagcttgggttgtagcctcgaattcctccggccagggctaccgtcagcctgcggcacacaagtaaatcaaatataaaaccaa

SEQ ID NO: 25704 - DNA, 120 bp, Homo sapiens
taacgaattatctttcgcacatcacagaggcatctcttttcactgtcgagtttggtttgcttggttacaaaaagggcagttcaaaagctttggttgctattgtgaaagtcagctgaattc

SEQ ID NO: 25705 - DNA, 120 bp, Homo sapiens
caccgtgctggggtggggtggggttcacgcaggttctcttttgtcaccaggggtgctgtggattcacaagtaagcaagaggctcctcaggtcaagcctctggctgctccctgaggtcagc

SEQ ID NO: 25706 - DNA, 120 bp, Homo sapiens
agacgggaacaaagtctttgatgtgtgcatttctcaagcttgacaatgatacagctacataaaaacccatgatttcatatagatattccaaaacgtaaaagtaaaccatgcatccacaga

SEQ ID NO: 25707 - DNA, 120 bp, Homo sapiens
aggcgtccttgccattggtttatgcctcagccccaccatgcagtggctggccaggtgacctaggccagtcctgcatcctcggctcctcacctgcctggtgggacagtgacatctctcctg

SEQ ID NO: 25708 - DNA, 120 bp, Homo sapiens
gggcgcagtttcagaaaaccattgggctgcacctgcgtgagcacagctgcaggagcaaaagtcagaaaggtcagcaaaggatttcaggagcaaaggtcagaagaaaccctcaaggtggtt

SEQ ID NO: 25709 - DNA, 120 bp, Homo sapiens
tgtcgtctcctgcaatgctttcaagactattcagaagcacagtgtgaagggagagccggagcccatggggaaatgactccagagtgttccacgtgttggaaggcatctgttggaaaacgg

SEQ ID NO: 25710 - DNA, 120 bp, Homo sapiens
caacgcagaatgactgggaaagccccaacaagttacctactggtaaatgaggtgagaagcttaaagtgagaaccccattgctgcctctttttcactttaaaaacatttaagttttgaatt

SEQ ID NO: 25711 - DNA, 120 bp, Homo sapiens
acacgtaagatttactactgtaaccatttttaagtgtacggttcagtagtgttaagtatattcacattgctaaggaaccaatctgctacttttgtttattaattttttcctgaggggaaa

SEQ ID NO: 25712 - DNA, 120 bp, Homo sapiens
gcacgtacattgtatactcattaccacaatcaaagaaattaacacatccaacccacccatagttgccattgtgtgtgcgcggatgtgcgtgtatgtgtgtgtatgtgtgcacgtgtgcgc

SEQ ID NO: 25713 - DNA, 120 bp, Homo sapiens
ggacgtagagttttccttgactatggttatttctggtagtagcagctccagattaggcaatggttttcttcagagatagcttagagtgagccccagaacaaggtcaatgcgaagattgct

SEQ ID NO: 25714 - DNA, 120 bp, Homo sapiens
ctgcgtgtccagggcacagtgatcctcatcactagccggggggctccgtgaggatctgctcctggtcgtttctgttctgtatcttctctgcagcccttactgaagccgttaccaactggc

SEQ ID NO: 25715 - DNA, 120 bp, Homo sapiens
gaacgctccagtgaccgggaggcaatagtctgtccacatctaagaacacacttggaataaccttagagaagagagagagagagagaatgcatggttagtaggttatcaaactcctatgac

SEQ ID NO: 25716 - DNA, 120 bp, Homo sapiens
tatcgaggtggcccttgagtgccaaacagcctgtcctcagctgcaaaatgagtcgttgatgatcctccagcaagggatactttttagctcgtgtggtgattgctgcacacgggatatgtg

SEQ ID NO: 25717 - DNA, 120 bp, Homo sapiens
gcacgtactttacccccaagaccagactccagcttggcttttgtcctcctctccaggattggtgacctcctaggtcgtgaagctgtgatgagcaaagacacactcctctccattctccca

SEQ ID NO: 25718 - DNA, 120 bp, Homo sapiens
ttccgagcaatgaaagctctgggttttttccttgcttttcagggcacaatacttctctttcttcctggttagacaggataagttctgagtcccctggtatcatcagcttacttcttctct

SEQ ID NO: 25719 - DNA, 120 bp, Homo sapiens
cttcggacaaattgccccaactacggtgggaaaagaaccaatgtgttggactatttatctaatttttgtttagttcggggatacaaataaatgcatagatacatacaaacatgcgtacat

SEQ ID NO: 25720 - DNA, 120 bp, Homo sapiens
agacgactgggatgtgcgcaggcgattatttgcaaacggccctgagtcccccagtttatgtcttaattcgcagccagggctgattgtagaagcaaatttgcaaacatgtgcaagaagaaa

SEQ ID NO: 25721 - DNA, 120 bp, Homo sapiens
cctcgtttcttgctatttctatccgtagacagaaccattgctgagctgttaaatttgtctccttcccctataccagtcttgaaaaaggaaaggaagtggagcaaagaaaaagaaattaat

SEQ ID NO: 25722 - DNA, 120 bp, Homo sapiens
agccggcagatcctaggagaatcttatttaatccaagctttgtaaagttttgctttattccatggcaacatgggtatacacatcccaccggctgtttcagtggctcagagcaggtaaggc

SEQ ID NO: 25723 - DNA, 120 bp, Homo sapiens
aaacgccgctagcaggaggaacaacgtggagacagccccagaggtggaacgttggcccttctgtggctccggtgtctcaggacctccctaaagcccagccctgacactgagcaagtttcc

SEQ ID NO: 25724 - DNA, 120 bp, Homo sapiens
ttgcgtgaggtagagaactcatagaagataggaacacatatgctgatttccaaaattgcctttgtatattttcacgtgaagactttaggggcaaaagaaaagaagcaagcattttgaata

SEQ ID NO: 25725 - DNA, 120 bp, Homo sapiens
attcggaaccttcaagaaataaattaagttctctcaaaaatgtgttttttgaaaagaggactaaaacagatggcctggctgtgttaaacacagggaccagaccagcacccacctctccac

SEQ ID NO: 25726 - DNA, 120 bp, Homo sapiens
ctgcgtaggcacacgcacagctcccaaggactctaaaaaaagatatttttctgcttatatactaataatatgttagagatttatgtttcaaattagtacagaatcacatggttctctcca

SEQ ID NO: 25727 - DNA, 120 bp, Homo sapiens
tttcgcacacactgtggtcagtgcagcgtccactgtgtgccacagtaatactagaaactccctggttaggccttggaatccagctctcatttcgtatgtgacctgcagggaagtaagtta

SEQ ID NO: 25728 - DNA, 120 bp, Homo sapiens
acacgttttatcaagttcaaatgcaaacttaattttaaatgtatgcaacatcagtttaagcgttgtagctattactagcaattgtacctattactagtctgtactctgcacaactttgga

SEQ ID NO: 25729 - DNA, 120 bp, Homo sapiens
tcacggacaaaagcacgttcatcagagtcagaggaatgtggtgcaaatcccagctgtcccacttaccagctgtgggacttgagtaagctcctgaagcagctgcacctgcattttctggtg

SEQ ID NO: 25730 - DNA, 120 bp, Homo sapiens
ctgcgggctggatgaggtttgctggtgcatgtgaagtgtcaatcattgctctcatgagtggtgatgctgatgccgttcccttttttagggaagtgattttcccttacaaagttaccaaca

SEQ ID NO: 25731 - DNA, 120 bp, Homo sapiens
tgtcgtagcacaagcagttgcttcattgtgtttagataaatattgacggctgcttttaacagtctgctgttttgtctccttttgaggtccttaaagtaatccttaaaaagatagtgcaga

SEQ ID NO: 25732 - DNA, 120 bp, Homo sapiens
tgtcgtttctcttcccttggaatgaagcaaatatctaacttctcactcattgtttctgctattttaccatttagtcatctgtgatttttctaaatactgaaagacttccctcaattcaaa

SEQ ID NO: 25733 - DNA, 120 bp, Homo sapiens
tgccggatcaaggaaagggcagttggatattgcagacagcatagtgcaattgtgaagagtgtctgcttaccagccacgctgccttgcacaagttatcaagcctctcaacccacttcctca

SEQ ID NO: 25734 - DNA, 120 bp, Homo sapiens
acacgttaccagaaactccctagccaggactttgattgcagctcacattttgtatatggcccatagggaaatgaagtgtgtattttttataaagttcaagtgttaacttaatttggaatt

SEQ ID NO: 25735 - DNA, 120 bp, Homo sapiens
cttcgtcccatgtgtcccatgaggaaaccaaggaacagaaattaaagttctttctggagtcccctgaatctcgttcctgttcttttgcaccctgttaattacatagagacattcacagct

SEQ ID NO: 25736 - DNA, 120 bp, Homo sapiens
cagcgttaaggaaaacagaaaaccagcgtgctatttgttctgtcccttagtcaagccttctcaacatatatttttcttccaagattttgcatgtgcacagggatgcctatcctctacaag

SEQ ID NO: 25737 - DNA, 120 bp, Homo sapiens
gggcgaggcccatgggtactgcaaacagcctgacgttgtcaggggcggtctcaacggctcattcaccacatctgcctcgcgaaggctaagccatgtgctgttacccctgctgcgctctgg

SEQ ID NO: 25738 - DNA, 120 bp, Homo sapiens
acacgctattaaccttgtgagaaaacaaagaggccagccccacccttcctgctcactctgagtcacggtgaaaatgtttcaggatctcgggttcgaccatgagtcctgtccaggtccagg

SEQ ID NO: 25739 - DNA, 120 bp, Homo sapiens
attcggaaggaccacatgttcactctgagatcccactttcatttccctcctggttgagcagcattaatactctggctagatttaaattctggctttctccagttagaactgaaagttatg

SEQ ID NO: 25740 - DNA, 120 bp, Homo sapiens
caccgaagtctttccagaattatttttgagaataatatgaatttttaaaaaatacctaattattttaaatatcgtcttgcttgctccccaaatacctactgttttcaacttggatatacg

SEQ ID NO: 25741 - DNA, 120 bp, Homo sapiens
gcacggtgttctctttggaagatcatttcaacaaaacattattttcatccagaatttgaaccttgagattgcatggtattttagaaatctattttagaaatctttggcaaaggttactat

SEQ ID NO: 25742 - DNA, 120 bp, Homo sapiens
ccacggttgcagcctgcattcttctaaagggcagagcaaattaaagttgaagcaggagctaaaaaaaaaaaaaaaaatgtttcaaagaattccaccaaccagaggatactacctaggaca

SEQ ID NO: 25743 - DNA, 120 bp, Homo sapiens
caccggtggccacttttcattcactctgaacccttctttgtatggaggtcattttattaattgagctgtgaccaacatgacagaatttcctgttttagggcttttataatatagatagtt

SEQ ID NO: 25744 - DNA, 120 bp, Homo sapiens
gctcgagttcctgtaatggatacactcaggcagcagaacctaccaccgtagtgaggacagcacccagagccctcagaggccatcacaagtgcaccacagctgccttctctggcacgctca

SEQ ID NO: 25745 - DNA, 120 bp, Homo sapiens
catcgcgtggaaatttccattcaactggaaatgtccaagcctgtttacctcaattaattgtccttgttcacttgtccagcctagcaattgtccattagtaatttgttataaatgagacat

SEQ ID NO: 25746 - DNA, 120 bp, Homo sapiens
atacgaaatccaagctgcatgagggctttatttttcaagcctacaccttgctgaaattctgaattaaaatatgattctcagtacaaatgaataaatcaacagaaatggtaacgcatgtca

SEQ ID NO: 25747 - DNA, 120 bp, Homo sapiens
cttcgcctattatcatctaggtgattttcaatgctcattgcaatgaaacctacttattgtgcatggcacccacccccactgaggaatactgtagtttctttccctttgaacttcattagt

SEQ ID NO: 25748 - DNA, 120 bp, Homo sapiens
cttcgtatgtcagaatatatatactacaacataatttccatcagagctctgaccacccgcttatctattttcataatgcctgccactccatcattagctgttgtcatgtaggctatcaat

SEQ ID NO: 25749 - DNA, 120 bp, Homo sapiens
tttcggtcagatcttcatcctttgtaagcctagcagaaaatatggcagttttattgactactattctttgctgggtgtggtatttttaaactgagacatcagtgtgcctagcacagggcc

SEQ ID NO: 25750 - DNA, 120 bp, Homo sapiens
cagcgcaatataaatcatagtacaatttcatcactaaattttctgatcttgatcttgtcattttacattggaagtaaaaatgtgtcctcctttttttctctgacagtgaaaagtgtgtgt

SEQ ID NO: 25751 - DNA, 120 bp, Homo sapiens
caccgaaagaccaagactgctagagaactaggaaacaggcggtgcaagaactccaggctctcatggaagagcgggaggcttctatggggctgcagaaactctttggtgcttggggaaaaa

SEQ ID NO: 25752 - DNA, 120 bp, Homo sapiens
gcccgtcttttcttttaaacagaggcagctccgaagagctggacattgaaccctgagcaggaactggaggccgtcagcgcagctttgtttggcgagcggagctttgcaagggtgtaatgc

SEQ ID NO: 25753 - DNA, 120 bp, Homo sapiens
agacgctatctgcagggaccggtgacgccgtgggtgtggagggggaggcagtggctggccctcttggggtaaggtacgcccaggaacagtttagaataacgtgcgcgagtcaaagggaag

SEQ ID NO: 25754 - DNA, 120 bp, Homo sapiens
caccgtgccgtgttcctgtcctggggtatttgggtgtgtggcgtgtggggaggggagaaggagcaaggcggcagggaggggatgaggaccaccctgtccatgggacaggccctgggcccc

SEQ ID NO: 25755 - DNA, 120 bp, Homo sapiens
ccccgcacacaccccaagccccgcgtcccgcgtcctcactgtcctgggacaccccccaccccaccccaccgccacagcccagagcggtgccaggaagccgcctcgacgcagccgtatctt

SEQ ID NO: 25756 - DNA, 120 bp, Homo sapiens
ccacgccacgtagagacactatttttcacttcgtgtttgtcactcctaaagcatgtgtgctagctgcaccaaccctgggatgcctcggtgcatagggtttatgtgcgtcctcctccttcc

SEQ ID NO: 25757 - DNA, 120 bp, Homo sapiens
ccccgtggggaactgctgcccagactgacctgcgtccttccgcacgtgcaggaaaatgtccacgtgcacttgtcagggtgggggccacacgggcaccaccactgatcatctgtgggatcg

SEQ ID NO: 25758 - DNA, 120 bp, Homo sapiens
ccacgtgcagggcccagtcgctttggtgagagagtggacgctgtggtgactccacggtctgtggctgtgctcaggaggacagagaggggacatcctgagatggtttgggcagcccgcgga

SEQ ID NO: 25759 - DNA, 120 bp, Homo sapiens
gagcgtccactttctccatggagcagtggagtggcgttgctgagacagaaagttcaggttctccactccccatgcagcccccactcccctgtctccggccaggcacgcgtctggggtgga

SEQ ID NO: 25760 - DNA, 120 bp, Homo sapiens
tcccggtgcccggggccctccagacctctttccccaccccagggagcaggcgggtacttctattccgtttggcttcagaagggaaaagagaacgtaagttcagggagttctcgtccattc

SEQ ID NO: 25761 - DNA, 120 bp, Homo sapiens
tcccgtgggccgggcaggcagcagggacagccttcaggagccaggaggggctcgagctgcgaggccctggaatgaggcaggcatgggctgaggctggagggaaagccccgctaaggctgg

SEQ ID NO: 25762 - DNA, 120 bp, Homo sapiens
gggcgggggcgggaaaacttaccaccaggggactcgagatggggaaggaaaggtcagaagaggagaggccaggcacggggtgtgggcggcctgcagagctggagcaggtgctccgcccag

SEQ ID NO: 25763 - DNA, 120 bp, Homo sapiens
cagcggggaagaggggcgggtcggcgtgctgctgaagatgcaggagctgcggcctgctctgtgcgtgctgaaggtgtggtgagaagcacttacaaaaagaaatggactgtgttaggattg

SEQ ID NO: 25764 - DNA, 120 bp, Homo sapiens
atacgtgttctttgaatttttttccttccagggccaggactggagtgatggttgagacaggcacgcactgggtcttgtctgcatttacattttgagattttgttcagcatggattttatg

SEQ ID NO: 25765 - DNA, 120 bp, Homo sapiens
tggcgtttttttgtttgtttgtttgttcgttttcaaaatactgcacggtttatcgtgaagacagggtcctttgctgccgtcttaagttttgggcccaagaacgtgccccaccctaggccc

SEQ ID NO: 25766 - DNA, 120 bp, Homo sapiens
gcccgggcctgctggcttcatagctctcatcattcccacggaaccttaagacctgaggacagaaaggaaggaaacaagcccagtagtccgtgaaaatccagggtcccgccactccaggtg

SEQ ID NO: 25767 - DNA, 120 bp, Homo sapiens
acacgtaggctcttgccaggaggggcatttgtatgtgctgagcattccttatattctcaatatgacgcctttgaaagatctgtggtttgcaaatatttactctcagtccataacttatct

SEQ ID NO: 25768 - DNA, 120 bp, Homo sapiens
tgtcgtggatgtggtggggacaggtgtgggatagccctccctgtacaactaggacccaggggtgatctagtgacactagccatttatcaggacgtatgggtgccagtcaggatgataaag

SEQ ID NO: 25769 - DNA, 120 bp, Homo sapiens
tggcggcagaaggaactgtattgtttggtacagtctgggccagggccacacaccgtaacggagatactctattctgtggacggttggagggggctgtgctgagcagggtaactgcatctt

SEQ ID NO: 25770 - DNA, 120 bp, Homo sapiens
ccacgaaggagtcttgtttagactggacctggctttcttcttcgcaatgagtgttgcagactcccgacaaaggccaggtggtaaagtgtggtgtctgtgagcgagagcctgagatgcctg

SEQ ID NO: 25771 - DNA, 120 bp, Homo sapiens
catcgtgcagaggtgagagcagcccctgaattctgcccctcggtctctccatagctaaagcaaaaccatccttccgtgctcccaggacaagcaggctattaccaaatcacccactaaccc

SEQ ID NO: 25772 - DNA, 120 bp, Homo sapiens
gggcgaggaggggccatcactgcacaattcatcagtgtctgtgacaggaagagattgttttagactggtttttttttttttatttgcaagcttttttctctctccaaaacgtgctgtcag

SEQ ID NO: 25773 - DNA, 120 bp, Homo sapiens
ttacgatatcactctgatattgtctattcttttctgtttatttttctttttgttccttgttatgctggttgtgacccactccagtgatttcacaatgcaggctgggtggtgtcccacagt

SEQ ID NO: 25774 - DNA, 120 bp, Homo sapiens
tttcgctccagtgtagacatacaatagaccactcgtccctgtggctccgggcagcagcctcatctgagaccctcctgagacatctcgtgcagggcagccgtagtgtgtggcttccccagg

SEQ ID NO: 25775 - DNA, 120 bp, Homo sapiens
ctccgatctccacctctatcctcacagtgagttctcctgcatgtctgtctctgtgccttcacattcctctctgtgtgtctgtgtttccatctccttatgaggacacccatcactgaatca

SEQ ID NO: 25776 - DNA, 120 bp, Homo sapiens
actcgttcttggagacgttgactttatttagtagcattaaccatggcaatgtcaccagcatcgctgacagcctgaagcatatgatctccagaatgtatttcaatcatcatgttcacttcc

SEQ ID NO: 25777 - DNA, 120 bp, Homo sapiens
agacgcctgacgtcagtggtctagacctctctgctgaatgtcatctttggtgaatgtcttatgagaaaacacatggttggtcactcttagaagggcatgaaagcctgtctgcagtataac

SEQ ID NO: 25778 - DNA, 120 bp, Homo sapiens
tggcgaggcacactgtgcgcatgtgtgtacaattaatatcatggttttaaattattttcaggccaaggggagatctttgctgcatctactgaagaaagcgaatctttttcttcctgaaaa

SEQ ID NO: 25779 - DNA, 120 bp, Homo sapiens
agtcgaatttgtgttttaaaaatatgtgaactaatataatgcagacatgcattaatgtttaaatatactggaagtttttggtaaaatgaaacccattgtctctgttgattactttgatga

SEQ ID NO: 25780 - DNA, 120 bp, Homo sapiens
ggccgcctgcttctccaggcccagtgggaaagcatgtgcctccaggagggctcagtccattcttcatggcttttacctggttaagtcaggcccactcaggataacttcattttgtattaa

SEQ ID NO: 25781 - DNA, 120 bp, Homo sapiens
tgacggatgaaggcaaatgtggatatttatctgggagaaaactaagaggagttataatagctgtcttcaaatatttaaagggcttttattaggaagaggaatttggcatattggattttg

SEQ ID NO: 25782 - DNA, 120 bp, Homo sapiens
tctcggtagcagggcagtacagccccatccgtgatcttccatagtcaggcatattgtcacactcagtgagcggagagtcaaccgggaggaaggcacagtttctctggaatgacctacgga

SEQ ID NO: 25783 - DNA, 120 bp, Homo sapiens
gtacgctcaaatgcaaattctccttcccttccccagtccttgtccttcagatggtaatttaggagctgaaggtcagggcaccagcagcctttggaagcctacaggacaacagtcagcctg

SEQ ID NO: 25784 - DNA, 120 bp, Homo sapiens
gggcgtcagaccccaggtccactgtgcacgccctcttgtagagcccgttccgttgtccatgagatgaggagtgttcttatctctaaagtattatcatgaaaacctaacaatgtagaaaga

SEQ ID NO: 25785 - DNA, 120 bp, Homo sapiens
gtgcgtggtggaattctgctaacgaaaattgcgaaggatcaaggcagagtacagagctggtgtgtagcgggtaccttctgtctgctggcactaggtattttacacattaaatcagctcgt

SEQ ID NO: 25786 - DNA, 120 bp, Homo sapiens
ctccgtgttttgtctcctgagcatgctgccccaagtttgacaataccaagatttgtactggaacattccctcccatccccaccccctagaagcccctcttcctcccttagatttgacaca

SEQ ID NO: 25787 - DNA, 120 bp, Homo sapiens
tcccgtgccgtgcaatttttgtgaattatctcgtgtctacagtgcctcacaatttctctgctcaatacctccatgttactgccgaggaaagggaagctcagagagagtaagtaatttgct

SEQ ID NO: 25788 - DNA, 120 bp, Homo sapiens
gctcgagttaaagagctggccaggacagccaggggcttgcaccccggagccttcatccactacactgtcagctggtatctcaaccagccattacaggctgtaaaaaaattatataagata

SEQ ID NO: 25789 - DNA, 120 bp, Homo sapiens
cctcgttaatttcatgccctgcccaggcgggctactgtgctgcccagtcacccgggtctggggcggccaccgctggccagcaggcaggccctccagaggcagaggtggccacgcttaggt

SEQ ID NO: 25790 - DNA, 120 bp, Homo sapiens
ggtcgctcccgctgtggaggcggcacacttgggtggcagcacagctgtgatgtggcggcagctggcagccccatgggaaagatgtgtgaagtgtggggtttgacgacccatgggagaaca

SEQ ID NO: 25791 - DNA, 120 bp, Homo sapiens
agccgtgagtcaacctcaaattctctgtcttttttctccaccccctcgtgcctctctccctcacgctctgcatctctcattgcaagcttgcatttttttgcacacaacactatcttaata

SEQ ID NO: 25792 - DNA, 120 bp, Homo sapiens
ccccgcgctgtgagtgtgctatttagagctgaccacaagcggggggaagagaggatggctcggatgctgcatttccactgagaacacaaggctggcaaagcttgtctgctgcccagcaag

SEQ ID NO: 25793 - DNA, 120 bp, Homo sapiens
ctgcgtagggcctactgagttagaatattagagagcaggtctcagaaacattctatccggcagtcttattctatgcacccgaagggataagagccatgctttcatgaaacatgggttgtg

SEQ ID NO: 25794 - DNA, 120 bp, Homo sapiens
agtcggcattttcttgcacattctttgtgatgttgtgatgagttggaaacttcccgattgggtttattagagcatgaacacccaggcacccagcttctagccagccctgtcaggcagagt

SEQ ID NO: 25795 - DNA, 120 bp, Homo sapiens
cctcgaagatgtggaaaggactgaccaacagctgaggcctacaggaacctgagcaggcaaggggagaggcaccccggaaccaggagcaatggccttcccaccctccctcgtcctctcctc

SEQ ID NO: 25796 - DNA, 120 bp, Homo sapiens
ctacgctgaaggtaggagcggatgggggaggcccccttcgcacaaagagccccatgaaagagtgcacagtccagtctataaaacagacgcagaaaatgtgtgtaggacttcttcctgaaa

SEQ ID NO: 25797 - DNA, 120 bp, Homo sapiens
gagcgtggtgcgtccagtacctccatgttcatggaacttcccagtctgcagtttacccttttgtgcaactcccttttggtaaagccctggtcacacttctggttgttcagattatacagg

SEQ ID NO: 25798 - DNA, 120 bp, Homo sapiens
atccgcacttgcaaattagatgcctggcacatgcttgtgttaaggtaataattcattacaatacaaattacaggggagttcctctgggcatgcgacctttcccgtcatttggctttccct

SEQ ID NO: 25799 - DNA, 120 bp, Homo sapiens
catcgtgctgctaatgggaccttaaccatgtgtcaacccatggctgtaatgctgacactgttttctttctggaatgaaaggccttcgcaattgaaaccaaaatgttatccaactcagtcc

SEQ ID NO: 25800 - DNA, 120 bp, Homo sapiens
tgacgatgaaaacatcaagttctggagactggccatccagcctccctgcctcatctcccacgccctccatcattttttgtctctacttacttatttatttggctgtattttacgtacatc

SEQ ID NO: 25801 - DNA, 120 bp, Homo sapiens
ggtcgatcatttaggttttgtttatatttttgtatatatgagcttatgtcattcatacatattgttttgcctcttgcttttttttaacttaattttactttgcttgagagctttttgaac

SEQ ID NO: 25802 - DNA, 120 bp, Homo sapiens
gtacgtgtaagtcagcctatgcatgtaatggctccctcatcttctgtgaggctgtcactaaaaaggggatttagcttgttctgggctttgcagcccgtacactgggcactgttcatacgt

SEQ ID NO: 25803 - DNA, 120 bp, Homo sapiens
gcacgcaaaggagggcttgctagggaggcctggcagagggtgccattcaaataggattttcaatggaggaatttttaaattttcagttatttgaataagttttaatatatatccagaacc

SEQ ID NO: 25804 - DNA, 120 bp, Homo sapiens
ctccgtttcatggttatgaatctctaaaagcatgatttttaaaacataatcacaatgctgtcatcgaacttaaaaattagccataaatctcttatgttacccaacaaccagcctactgac

SEQ ID NO: 25805 - DNA, 120 bp, Homo sapiens
tgccggagcccatgtttctttccagccaggcttggagaccaccacacgggatttgcttcttggggcctccctctaaccagctatgcaggatgccctctttcctgtcaatacaagctgctc

SEQ ID NO: 25806 - DNA, 120 bp, Homo sapiens
cctcgtgatccacccacctcggcttcccaaagtgcttcatgttttcaggagctgtacgtgcatttttagttttgatgaccaggtcctttttctgttttttaaagaacttcaaatgatctc

SEQ ID NO: 25807 - DNA, 120 bp, Homo sapiens
cagcgcttgtgtgctgatgaaaaagctggcagtacaaaggccaccagccaaggtcacacagccaaaaagcccctgacctcgggccccttcccagaccctgggtcttttgctgccacatga

SEQ ID NO: 25808 - DNA, 120 bp, Homo sapiens
taccgtactaaaccctgattgaaaatcagagctcagacatacagcctgagatgccaaaaaatggccaggcttgtctgttgagaaagccatatgtaactaactgtttggaaattcaaaata

SEQ ID NO: 25809 - DNA, 120 bp, Homo sapiens
ctccgggggtcaggcactgtgtttagcactttgtcctgacctcatctgacttctcagctgtccctgagaggtaccagtgtgcaagatcgctgagttggcaagtgatagtgacaatatttt

SEQ ID NO: 25810 - DNA, 120 bp, Homo sapiens
ccccgatttctagttttgttttgtattggatttgcacaatttcacgttctgaaagaggatgccctcaactttgcaaaatgggccttttgaatgaaaaggatcagtcatgtcaggaaaagc

SEQ ID NO: 25811 - DNA, 120 bp, Homo sapiens
aagcgctacaatgatgaaatatgataaataagtcagtctttcatctgtaattatctactatggggtaaaaagtgatgaaaactaccatcttgaaaggttctggtgatagtggttcctaat

SEQ ID NO: 25812 - DNA, 120 bp, Homo sapiens
aggcgaagccatagctggtggcgggggccacatctgggtgtggggaggccacagttgggttgggggtggggcctgcagttatccacacccctcccacctcccttcgacagtacaggcttc

SEQ ID NO: 25813 - DNA, 120 bp, Homo sapiens
tgtcgaagctattggtggaaagagttccattaattgacaatacaagtccctactacattctaaaatctggtcctgactagtggcaagccgggcccaggagtagcacttaaacaatggcag

SEQ ID NO: 25814 - DNA, 120 bp, Homo sapiens
atgcgggctacctctgttcttccatgctgcttgtggttcctgctctgctcaggacagaatggggaggaaaacaggctctgcggcacaatattggcaagtgaaattttgtaaaccggccct

SEQ ID NO: 25815 - DNA, 120 bp, Homo sapiens
ctccgccagatcaaaacaagctcgtagtattagatgtcaccgagcaccatgacaggcagatgaacatcatccctgtgcccggctaatgatagctcggcctgccccggcgtcagccgctcc

SEQ ID NO: 25816 - DNA, 120 bp, Homo sapiens
cagcgggcggtgtgggaccggcaccgtatctccagcaattcgcagataacaaatatggttctgatgatgttactaaagatctgtccctttcaagattggattagacattaggaatttgga

SEQ ID NO: 25817 - DNA, 120 bp, Homo sapiens
gtccgctgggttccttccagcgcctaagcctgtaagctcttcctgctggaaccaagctttaaatgcacttgtcagtcatgtcccatgagaatagatactgccttccatgtttttttgttc

SEQ ID NO: 25818 - DNA, 120 bp, Homo sapiens
ttccgtgtttgaaatgatgaaaatcatttttctgtgctttttaaaaatggaattgcttttgtgttgggaattgtgctgttcatttttactctacctcgttttggaatcactaatgtggcc

SEQ ID NO: 25819 - DNA, 120 bp, Homo sapiens
tatcgtagagtgagcaatgaatggcatggtgactgtgtgagcgaattcatgccctccctccccaccgctcgccccgcgtctcagtcctcagtgatggtaaacagaatgaggaccttctcc

SEQ ID NO: 25820 - DNA, 120 bp, Homo sapiens
tcccgaccgtgatgcgcctcagccctacttcccttgtcctttcctatcataaaatcttctttcatagaaatggtcatttctgttcatatctgtggactgtaaataacaaggaagtcattt

SEQ ID NO: 25821 - DNA, 120 bp, Homo sapiens
atccgaggtctcacttccatacatttctctcgggcagtgtggctgcctgaatcatgcctggatgccacaggtgcttagccagctggtcctgtcgtaactgtcactggtagctcagggagt

SEQ ID NO: 25822 - DNA, 120 bp, Homo sapiens
cctcgtaaagcatcagttatgttgtgatggtggcaaagctgcaggcgagatgggaagtgcagccactgagaactcacagtagagcgtgtgtaacgtaaaaagatgaaacccattgtacac

SEQ ID NO: 25823 - DNA, 120 bp, Homo sapiens
ccacgcagctgcctggtgcaagagccaagtttgtgcagcctgcagagcactcttcctgagctgtgggctgccaggtcggggggcagggggggcctcactgtgcagcctcctgccacccac

SEQ ID NO: 25824 - DNA, 120 bp, Homo sapiens
agacgcagttgcccagacgttttcaagggcctaagatgtaggcagttgatccacagatttttggagagtccttgagttggagattacaggtgacctcagaggagggagtgagaacatctg

SEQ ID NO: 25825 - DNA, 120 bp, Homo sapiens
ttacgacaagacagtccagcaacttcctttctaacttctcctttcacatatgctggatactccaagactttgcatttacatggacatcacagatccactttgagagaagtagggtaaaaa

SEQ ID NO: 25826 - DNA, 120 bp, Homo sapiens
cagcggcaaccataaacctctccataggtgctgaacccaggtgatccctggcaccggcagccttatgtcagggctctcttatcgctggtttttatttctcctaataaaagtgattaaaag

SEQ ID NO: 25827 - DNA, 120 bp, Homo sapiens
tgacgctagcacagctcatgcccaagccactcctgcagggctctggtctaagtgcaaaagctggaaaagctgcaggtcccgcaagacacagagcaaccctgcaagccaggtcaccttccc

SEQ ID NO: 25828 - DNA, 120 bp, Homo sapiens
gtccgactggccctccaccatgtgacattcaaaagctcaagttacttaacctctcaaaactcagcatccttttctgtacagtggggaagatactggactgttgtgaggattaagtgagga

SEQ ID NO: 25829 - DNA, 120 bp, Homo sapiens
aggcgtgccacagtcattttactgaagctgcttcagtgggtcctgaattaggccctgtcctttgggagagacagtcctggttcaacacacagctccctgcccagggcagcttgggagtgt

SEQ ID NO: 25830 - DNA, 120 bp, Homo sapiens
tttcgcctttagaaccacaattctctgatatgtgcaatgagagaattaattatagactcaaaggattgcatgcagacacacacagatacaaacacatacacacaacacacagagttacac

SEQ ID NO: 25831 - DNA, 120 bp, Homo sapiens
acacgggcacacacagagacacacagacacacacaggcacacacgtgcagataaggtaatattagctagttcaggaggagaaagagataaagataaagtaatattagctagttcaggagg

SEQ ID NO: 25832 - DNA, 120 bp, Homo sapiens
attcgatttgaggtgagttcagcacaaaagcgtatcccaggccctctggctccaactgcagccctttctacctcattcccagaccccacctaagccttttctcttcaaaatcttctcagg

SEQ ID NO: 25833 - DNA, 120 bp, Homo sapiens
ctccggttgtgttcaccaggtgcttggtcatgattaagaattccgtgatgtgtaccccatgtgtttaaatttgctgctgagttaactttgtggcggcctgtggactagacctctgcacat

SEQ ID NO: 25834 - DNA, 120 bp, Homo sapiens
gaacggcagggccagatttgaaatcctgctatcttttcggctgccttgtaaaaataacatcaggcgatggggatacgatgccagaggtcacctgtgataagttctgtttatggccatttt

SEQ ID NO: 25835 - DNA, 120 bp, Homo sapiens
tcccggccacgcagccctgtgggaactgccgcacggccacttttatgaagtggacacgtgttggtcccactgaaaagaaactccccacccatggctccctcacgctgcagcagaggccct

SEQ ID NO: 25836 - DNA, 120 bp, Homo sapiens
gggcgcaggcgcagagcggtttgtgcccttgctggagccagggaagggcacagggtccctcctggagtcatgggaggtgcagccgaggttctatattaaaatacagaggctagcacatgt

SEQ ID NO: 25837 - DNA, 120 bp, Homo sapiens
gtccgttccttacccccccagctcctcacctgtcctccacacgcatatccctggctccctttccctagtaaggagactgaattgaaattgtggcttgcccgaggctgcatacctgtgctc

SEQ ID NO: 25838 - DNA, 120 bp, Homo sapiens
ccacggcccaggaatctgcagttttcacaagcacccccaggtgattctggtggtgtctttgcacttcttcaaggcagtactgcctggaacgcagaatcccagcctcctctatcctccttg

SEQ ID NO: 25839 - DNA, 120 bp, Homo sapiens
catcgcaatagtaacctcagctgataaatcctcccccataaaacttattccccagtgttttttaataggaaacaataaaactgtaaccagcccaaatatccatcaaagagaaaatggaga

SEQ ID NO: 25840 - DNA, 120 bp, Homo sapiens
catcgcacattcacctggaccagatctattgtaaagccaataatactgaagccccttccaaggccctgggagtcctaacagtgcactggcagtgtctataatttatattatgaaatttgc

SEQ ID NO: 25841 - DNA, 120 bp, Homo sapiens
atacgtgtcactttgtacctgatttctataagacccaggacctacaaaccctgtgtctgcccctgcagccacccagggaaggactgcacagcagcaagacagattgccatggagcatgtt

SEQ ID NO: 25842 - DNA, 120 bp, Homo sapiens
cagcgcagatagattctgtaatttgcctaacaatgtctataggatgatcccatttgtcaaaaaaaaaaaagaactgggctttattgatgtcacctaaatgcacctaaacttcttttttgc

SEQ ID NO: 25843 - DNA, 120 bp, Homo sapiens
cttcgttagaaactgaaagctcactgattttttcaaaacctaaatagcctgtgtttctccaaataactaatttgcagccttcggcagccaggactggcagggatggggctagggggactg

SEQ ID NO: 25844 - DNA, 120 bp, Homo sapiens
acccgacagcacgcatgaccttcccacagtcaggaactgctcagagacgtgatggcaactccatagaatgaaatactcttcagccagtaaaatgtatttttggataaatatttgctttaa

SEQ ID NO: 25845 - DNA, 120 bp, Homo sapiens
ctacgtatgcataaaaagaatcctgagaaatataagtactgtatgcatattgttgttaagtattttttctgtttgcttatctataattctaattttgcttcaaagaacaagttactccgg

SEQ ID NO: 25846 - DNA, 120 bp, Homo sapiens
ccccgagtcttctgatttcgaagcagtggggagtcagacaggagcctcaggtggcctctcctgagaggccctggaaagtgatgagaacctggcctctggcagctcttcataaacgtccat

SEQ ID NO: 25847 - DNA, 120 bp, Homo sapiens
tctcgtatctctccttttcacacatcgtggtggtggctttctctgtgttcctctgttgattcagtctctggaattaacggatcaggattccatgcccagaatgctacaaagactgtgctt

SEQ ID NO: 25848 - DNA, 120 bp, Homo sapiens
aatcgctaagcaggacatgcagtcccagatggaggggggaattcgggagctggttggaaaagagtatttggcactttgcagccttgagaggtgcagaagagacaccgaggggttcaccac

SEQ ID NO: 25849 - DNA, 120 bp, Homo sapiens
aggcgtccagctgtgtccacctgggactctgccttcagggcttcttgcctggctgggagctgcacaggcagactcctgggacggtgtgccgacagctctgggcacccccttctaggatct

SEQ ID NO: 25850 - DNA, 120 bp, Homo sapiens
aaccgatgcatcaaatgtgctggtgtttacagataatacaaggggggctgcatcttatggtttcaatccttttttaaatttttgttctgagagacccagccagcagactgccgccagtct

SEQ ID NO: 25851 - DNA, 120 bp, Homo sapiens
cagcggagactgtggtggctttgcctttcagcacgcatcctttctacgatgcctgacagtgcccagggaatgggcagagctgggagctctgaagccctttcacctaaaccaccctgggtc

SEQ ID NO: 25852 - DNA, 120 bp, Homo sapiens
aaccgccatctctgccccagcagatgctgtgtgtaaacagttgtattaattacatctcaaaaacatggttcttgccagatcctcaggatttgggtgcagcctctgaggtgggtgggaggc

SEQ ID NO: 25853 - DNA, 120 bp, Homo sapiens
cctcgagggagaaatgtctgcaggaaattcttcccctacgagaggtctgttttctaagttatctaagagctactgcagctgtttactgcagagtgaccctgctcaaagctgtggtcaccc

SEQ ID NO: 25854 - DNA, 120 bp, Homo sapiens
ttccgccctgggtggagcaccgtgctggagacccacgcctgccaaggcctcattgtcatctccacacgccgtccttggggtgggccactcctgggacacgcagacaggaagccggccacc

SEQ ID NO: 25855 - DNA, 120 bp, Homo sapiens
actcggaggctctatccagagtcagctgccaagcctcacgtcacacatcactgttagtcttggagggctggcggggccctgaagtcaattgaacacttggatgacagggaacttgccact

SEQ ID NO: 25856 - DNA, 120 bp, Homo sapiens
tgtcggcgtccctgcctcacctttacctggtgcttttccaccacacaaaactgtttctcctcgtgctggccttgggcttgcagacagctgattcttctcctcccgcggctgagcagcctc

SEQ ID NO: 25857 - DNA, 120 bp, Homo sapiens
ctccgagcaaccctctgacaactctgctccttctgacaacctctgcaagggctgccagatgtgaacaaggggcccgggcagaaggtatccaggaagactggaaactcgaggaagcctgcc

SEQ ID NO: 25858 - DNA, 120 bp, Homo sapiens
ttacgcttgcgtcactgggctttgggacctaagtcctcgtcatttgttccttttgcagttcctactgttctcagcacttccttccagcttactgaggtacactcagatgtgatatgccat

SEQ ID NO: 25859 - DNA, 120 bp, Homo sapiens
catcggtacagacacagttctgctccagcatttccccgtgttctttctgtcgctctatttactgaattaccgtgaggatgtggagcgaggctgagttctgtattttaacaccattttaat

SEQ ID NO: 25860 - DNA, 120 bp, Homo sapiens
tcacgaatccatgaaatcctatcagccagcctgcatacttccttttaaggtgcagttgaatcaggagaaacttgccgcacatgctgcgtccgggcacagcattggctgaggctgctgccc

SEQ ID NO: 25861 - DNA, 120 bp, Homo sapiens
gtccgctttgtagtactgcccagctatgaaacaggttagccacacatgacctgcatttaggagtaacaagtctgtctgtacatgcacatacagcaacttttttaaactgtctatattttt

SEQ ID NO: 25862 - DNA, 120 bp, Homo sapiens
caacggaggttcagcaattttgacttaatttcttcccatcccttttccacgcagcccagaagccttggatcacgtggtgaggggaagaggttgtgctatgtcgggaaactctgtatcgaa

SEQ ID NO: 25863 - DNA, 120 bp, Homo sapiens
gctcggctcagatcatgacattctcttgactaaaaccctcagtttccatcaaacttgtcactctggcattaaagcctgtcactgtgtggctctgaaaacctctctgaacgtgttccctgc

SEQ ID NO: 25864 - DNA, 120 bp, Homo sapiens
cttcgacctccagcagggcactccactccacattctcctggtctgtctggctcatcttacctgagccatgctctccaggtgaaggactatgtctaactcaactctgctttaaaagcagct

SEQ ID NO: 25865 - DNA, 120 bp, Homo sapiens
cagcgtctgctgcttcttggtggcccagctcgtcaaaagaataagatttcagcaaaacaatgtaacaattttttttaccaaaagtaatgttaacaatatatggttttcccctgatgtttg

SEQ ID NO: 25866 - DNA, 120 bp, Homo sapiens
ttgcgtcaaaatgctttttggaaaaaacatttttcaactctttagggtcagaattaagcaatgaaatttatataccacatgtataatgtgtatgtttatctaagtatctgttcatttata

SEQ ID NO: 25867 - DNA, 120 bp, Homo sapiens
ccacgtgctttgacttctgtagattttaaaaatacttctgtatagtttcttcttcctttgaagaagtttggggagtttgggaagatggagaaagatataagaatagactccccatatggg

SEQ ID NO: 25868 - DNA, 120 bp, Homo sapiens
ttccgaatgtcctccccttctttgaggcatcctctgttggtgaactttgagagcatccatttatgaagttgatgacctttcccagtctctgcaagcccttcagtgtgtgtcctctctgag

SEQ ID NO: 25869 - DNA, 120 bp, Homo sapiens
tgtcgtgggtgtttggatattggatggtccacattgggccacattctttcaaacataagagtctgtagaaatatgacctgtaaaagactcttaaatattctggaaactgtttcttccttg

SEQ ID NO: 25870 - DNA, 120 bp, Homo sapiens
aatcgaggcccaactcaaatccaatttataggagttataaagggcgtgtgcctgttttgtctagaagcagtgttgggcagcactgagtaggatagaccacctgttgctaccgataaagga

SEQ ID NO: 25871 - DNA, 120 bp, Homo sapiens
tctcgaatgctcctgtctggtaggcactatcccgagtgctttggcccctcatccacaatctgtgtggcaaaaggcattgcaggcaattcagtgaggagaccgaggcatggagagcaagtg

SEQ ID NO: 25872 - DNA, 120 bp, Homo sapiens
ggccgtgcagggagcaggttgccaagctgggttgaaaccgtcctccgtaggctcccaactccgccgtcgctgctactgtgctggatgatgcctggtagatgcagatgtggagccccatgg

SEQ ID NO: 25873 - DNA, 120 bp, Homo sapiens
ggccgggtttcagtcctgccctagctgcctattggctggatgaccttggcaagttgactttcgtgagcctcatttgtctcatctctcaattaagaaaacctagagcctatctgtgggggt

SEQ ID NO: 25874 - DNA, 120 bp, Homo sapiens
taccgcatgcggtaactgtttcacaaatgatgaggagcgatttatgttcttagtggaaatatgtcggcgtgtgaagtcccaaagctctgccctgcctggcttgatccagtgcctaggcac

SEQ ID NO: 25875 - DNA, 120 bp, Homo sapiens
caacgcagtaggaagtgggcagactgtcaggaaaagtgatttatagtcatgtattgcttgtgctttggcttcatttgatccaatgcagatcagctgcactcagaaaactactcaagtgaa

SEQ ID NO: 25876 - DNA, 120 bp, Homo sapiens
ttgcggttgttacatgtctgcctttattgcttatttttagccatctcccctgatgtcaaatgctcaggcaagaatgatacattcatttataatgtggctccttcagaaatataccacata

SEQ ID NO: 25877 - DNA, 120 bp, Homo sapiens
cagcgctaagattttaaaatggttttctgttgttggcagagagggaattactctattactttctgataaaacagagtctttcatgatcaaagagaaccaggctctagtagttccagtatc

SEQ ID NO: 25878 - DNA, 120 bp, Homo sapiens
taacgtggacactaattgtttccctccttttcttcatgaaaacagcttctgcacaaatgatagccttgtgaactagccatgggcacaactggagaagcatttagggagctttagtgcaaa

SEQ ID NO: 25879 - DNA, 120 bp, Homo sapiens
tagcggcaagggctgaatgtgggatgacatcagcagaaactcacagccactgctattccaaaaacccagcagcagctcagtgcagggcagtgctgatagtacagtgcctgcaatcctgga

SEQ ID NO: 25880 - DNA, 120 bp, Homo sapiens
gtacgcacacgctcactgctcccccagcagtacgttgaacagtgtgcgtccaggtgtctgtagggcccctcgccctaactcacaaaaccattctgggtcagaagccaccaatattgtcat

SEQ ID NO: 25881 - DNA, 120 bp, Homo sapiens
agtcggttttaaaaaatcatatttagagatcctggtaaaaatctatcaagtcaagacattaccttattacccatggaattgtcttcaactcttacagttcaaatattcctgaattggctt

SEQ ID NO: 25882 - DNA, 120 bp, Homo sapiens
aaacgttctgattgtgcatacagactagttaatgtggtaacaattatgtatttcttccctgctccttgccttctttccctccccagtttttttcttcctgatagtaggtgtgtacttttt

SEQ ID NO: 25883 - DNA, 120 bp, Homo sapiens
aaacgatcactcgaagaatattgttccctcaatcaagaaaaatgcccattgggttttgttatttgatgttatttgatgacagagacctattgtttttccatttttctttttttgttttcc

SEQ ID NO: 25884 - DNA, 120 bp, Homo sapiens
ttccgtggcacctatggaattaagcaatataaaaaatctattatttcagatgttcacgtctaatgaatttcatgtgaaatactggcagtataaccccaaatagaggaaatttgtgaagag

SEQ ID NO: 25885 - DNA, 120 bp, Homo sapiens
tcacggcagtgaattccagttgttcagagcacatttgacttccaaattctcaaggccacagatttgaggacagaacaatatttgcatttgaaattggaagattattttttgcacaagtgc

SEQ ID NO: 25886 - DNA, 120 bp, Homo sapiens
ccccgttatctggcacaagctattcaaaagacacgcctacttgtaaaataaatggtttgcaaactaaggaaaatacttaaatctcatgtaaatggtactatactatgtataaaaatgtga

SEQ ID NO: 25887 - DNA, 120 bp, Homo sapiens
gttcggaactgtccatgttcacgcacaggggccgtatcactccgccagagctgccctgggtgccggtgtgcagaggggtccgagagtgactgtctcttcctctgttgtcgaatgtgtggg

SEQ ID NO: 25888 - DNA, 120 bp, Homo sapiens
agtcgccatgcctggaattcatgaacactagttgaaagaactggcgtgagttagtcatgacaggagagatggggaagggagttgcaggtaggagggccatcttcaaattctcaaagtata

SEQ ID NO: 25889 - DNA, 120 bp, Homo sapiens
attcgatttaatctgtaggactccattctcaaagcacagtcactccaaaccgaaattcgatttaatctgtaggactccaggtggcagaataagaggcaatggatgggtggaagcgaaaca

SEQ ID NO: 25890 - DNA, 120 bp, Homo sapiens
ggacggtcattgctcagtgagactgcaatagagtgatacgctggagggggctgcaagggagaaggtgggagggacagcatttagcagaatgagcagcacagtcccataggaagaagaatt

SEQ ID NO: 25891 - DNA, 120 bp, Homo sapiens
aatcgggtgttgggatgtgttcccaggtaataatgactgcaggctgatttggcccttgaggtgtggcctcatggccctctccaaaaaaaatcaaggacctgctacaaagcacaaagccga

SEQ ID NO: 25892 - DNA, 120 bp, Homo sapiens
cagcgaccaagcagaaagcaagacaagacaggttctgaagcagtaattcaaagccttcctcgctttcccatgtgagtcattgctagtcagaatattacctttgcagagaggcttaattcc

SEQ ID NO: 25893 - DNA, 120 bp, Homo sapiens
ctccggcaggcgacctctccgcgctgagaaggttatccggataaccaagtaagaaagtacatgaggaggcacagaaagaaaaatgtgagagataacagcataaacacacagtgtatgttg

SEQ ID NO: 25894 - DNA, 120 bp, Homo sapiens
gcccggtctgcggggcgtcctcacacatggggcagctctcccaccccacacactgggaaaggcggacagaggctgggcaaagcccccaattttcgttggcactgaccccgatgatttata

SEQ ID NO: 25895 - DNA, 120 bp, Homo sapiens
ttacgatcattaaattatttatagctcaattagcatgtgtccaaaaccaggaagttcataggagactgtgtgactgggaattaaggagcaaagcaactttccagtctgtgatttactggg

SEQ ID NO: 25896 - DNA, 120 bp, Homo sapiens
gttcggatccggaagtagaatttcaaatattgcttttcatgctttatttgggaccgattttagccccgctctcctttctcttgccattcgctggccattagccaccagcctctgcacaat

SEQ ID NO: 25897 - DNA, 120 bp, Homo sapiens
agtcgctggagaagcatttcagggccaagatgggagtgatttcattttccattgacactatgcagaaatgaaggggattcaagtgccttcagaaaagcttccttccagcgaatggagttt

SEQ ID NO: 25898 - DNA, 120 bp, Homo sapiens
aatcgctgaatgctagcagacagctgactgcactcttcccaagaaaccctgccagctgggttcgggtatcgcgcggtgtgtgctctctctgcctggcccgctgagtcctctaactctaat

SEQ ID NO: 25899 - DNA, 120 bp, Homo sapiens
aaccggtttcagagcagctgcccagcgaggcaggtttcatctcgcttgctagacgttttgtttttttttttttctaaacctcacaccttttatttattagacttggattccagtttcctg

SEQ ID NO: 25900 - DNA, 120 bp, Homo sapiens
gctcgggagtgagtgggctcagttaagtgagctaagatgagatggtgcacaggcgagcacccacctgaggagtgtttggatgttatgatagccagctcctctgtaaagacctgtccttct

SEQ ID NO: 25901 - DNA, 120 bp, Homo sapiens
tgacgtgtaaataccacatttaggagggcttatgatgatgccaattaatggagacctttttgaaacaggaaggaggtgaaacatattcctttgcttctacatcactgtgtgccaggcact

SEQ ID NO: 25902 - DNA, 120 bp, Homo sapiens
tctcgtttaaccagcagtcaccacctgacggatggctgatgtggggtggggtcccagggtgggattgcgtgatgggcttggggtctctggctgatgggtgccagagctgggactggaact

SEQ ID NO: 25903 - DNA, 120 bp, Homo sapiens
tggcgtgactgaggcagacacctgggctacccagcctcacccacgacgccctcactaagtgacccacaggactcaccggaagcagggcagcaaggtccccctacagaggtccccactgca

SEQ ID NO: 25904 - DNA, 120 bp, Homo sapiens
aaccgatacccagcttagacagcagttctgcagtcggcgtctcaccccttcgggtctcattgtgactcactttgatagccacacgatttaagggtggttcagtagtgatttgatgagtgc

SEQ ID NO: 25905 - DNA, 120 bp, Homo sapiens
aggcgactgaggcagctgcccggggtggcacgttgctcaaacccatcatttggagtcaaaacaaacagatgattagctggggtggtcactttcaatcaagagttttcacatcgcctagac

SEQ ID NO: 25906 - DNA, 120 bp, Homo sapiens
gcccgagggccatggctgccccctcagaaggccctgtggagtggctggccgagcctcagcagcctcctgtgaagcgaggaagggtcttcctgccggcctctggagatcagtatgggaatg

SEQ ID NO: 25907 - DNA, 120 bp, Homo sapiens
aaacgctggatgggaatccctctgccctgtgataccaaggcagtgagtttgtagactatggaattgctgtcggagggctctgtaaccggccaaggtcacacaggtagccattggtagagc

SEQ ID NO: 25908 - DNA, 120 bp, Homo sapiens
tgacgatccagagatagtcatcaaggaagattaaattatccccttagactcagagtgaccatatcattttccctccacacaaggacacttttgagaatgaaaaggaggagatgtctgtac

SEQ ID NO: 25909 - DNA, 120 bp, Homo sapiens
agacgctggatgacaggcaccgacaggctgtctgccaggggagcagcgattcctgtatgttgtagaaagtttttcaaaagtcaccttggaaagaggttttgttccttaaccttctgttaa

SEQ ID NO: 25910 - DNA, 120 bp, Homo sapiens
ctccgtgaatgaaaacaactcccttccctaaacattctagtaatgacccaacactgccaagcctgccagctctgcctcatggtcgtgttgactgtgtgagactatgtgagtgcctgctac

SEQ ID NO: 25911 - DNA, 120 bp, Homo sapiens
gtacgctttcagtaaacatggtattgcctcgataatcccacaaaaatgtcctattcaaatcacctggcacccaggaaatttccttcttttttttcccaggtgaaatatacagttgaaaac

SEQ ID NO: 25912 - DNA, 120 bp, Homo sapiens
gatcgataaggaaaaaaatcattgacaatctcaattagattcactatttcatccaaaagcatagcttagaactctagtttttgttcaacactcttgccctatgagtgcacagaactttaa

SEQ ID NO: 25913 - DNA, 120 bp, Homo sapiens
acccgacactctgatgggcacggccatggtggcaggggcttggacgctgccaggtgactctaacttgtggccagggtgggaagcactgctccacagaggtgccaaaaccaggttccttcc

SEQ ID NO: 25914 - DNA, 120 bp, Homo sapiens
taccgcctgtataaatatcagcttttgagagaaggacattgtgtagaaataatgaaacactgcaacttgtatttgtattattcttttttttttttttttttttgagatggagtctcgccc

SEQ ID NO: 25915 - DNA, 120 bp, Homo sapiens
aaacgccaagcacattgcctacacaaactaaatattcagtcaatggctgctattttcatgagttcgttttaacatatatttattgtcctctactggatttaagaagttatatttattatc

SEQ ID NO: 25916 - DNA, 120 bp, Homo sapiens
actcgcagttctctgaatctcaaggggttcctggaagccttcctgaaggtatagtgaaatttcagcttcacattcccatccatgagctccctgcaaatatcccggtctgctctcaggacc

SEQ ID NO: 25917 - DNA, 120 bp, Homo sapiens
tgccgtcatacagtagcaggcaggtgtctttgctgggtagttggactggatgtccctgggattgcagaactggaatggggagtgacatcaggaaactataatcatcaggacaacatggtt

SEQ ID NO: 25918 - DNA, 120 bp, Homo sapiens
aagcgaccgcagattatgcggagagagatgcatgcccacagccatgcttcccatgtaactggagaggggtctgaagtttgaaacaagtgttcctaggcacgggttacagtgtttgttatc

SEQ ID NO: 25919 - DNA, 120 bp, Homo sapiens
aatcgaaagattctcctaggaaaagaaaggcttgacaacatcgattcaaaaagggcatgcattttcctcatttaaataactctaatgtgcaagtagatcccctgacctcaagctcagaag

SEQ ID NO: 25920 - DNA, 120 bp, Homo sapiens
ccacgcaatgcgcacatcccacccctggccgctgtccacaagaaatccagttgcaccaagcaccccactttttgcacctctcatttatgtactcctaagagcctcaccacaactcccttc

SEQ ID NO: 25921 - DNA, 120 bp, Homo sapiens
attcgatgctgcccaggcagctttgctcagagggagcagccttctagaaatgtttcaagtaaactttcaagtataactaaattcaaaaaaaacacatacacacacacacacacacacaag

SEQ ID NO: 25922 - DNA, 120 bp, Homo sapiens
ccccgtgctgcctcctgggacagggctaccaccatcctaaggccagcacgatgggccagctttgcctgctgttgaattttgcttacatagaatcctccagtaggtactcctttgggtcag

SEQ ID NO: 25923 - DNA, 120 bp, Homo sapiens
ctgcgttcgtccattctaccgccaatggacatatgggttctttctcttttcttgcagttacaagtttatgaatattgtcccacgtgtccctggtgaacttttgtttgcatttctgttggg

SEQ ID NO: 25924 - DNA, 120 bp, Homo sapiens
tggcgttgctgggtcagagggtactggtcgctttagtagctttgaaagatattgccaaaacattttccagcgcagttatagcaaattatacaccaccagcagtagaaaacatctcctaat

SEQ ID NO: 25925 - DNA, 120 bp, Homo sapiens
gatcggtaaaagtttgttgaatgcaggcaagaaaagatgagaaataatggtacccaatgaaagacatagcagtctacaaggaggggcatttcccggggtgggggggacccacactctgta

SEQ ID NO: 25926 - DNA, 120 bp, Homo sapiens
aaacgaggcagcttgtcaaagaggaacggctcttggccatggttgctgccctaggaggatatttgatactagcagagctggggcaaccctggaggaaaccacctggaatgatgggagaac

SEQ ID NO: 25927 - DNA, 120 bp, Homo sapiens
ctgcgatcaagtcctaggcggtattcccttctgcgccatagaccctgtgcagagtgccctcaacgaaggagcaaggaagaccaagtctcccgagggtttgcatatgtgtatgtgattctg

SEQ ID NO: 25928 - DNA, 120 bp, Homo sapiens
ctgcggaaaagcattggtaaagtgtatatttgaggcttcagaagtttgaaaaggctagatttcctaggccaaaacactgaaaatttgcaattagaacttcagtgctgatgctgggaagac

SEQ ID NO: 25929 - DNA, 120 bp, Homo sapiens
actcggcgtgtctataaattagaattgcgttacaattacactttgacattttagtggtttttaaagtgcccagcacaagttaatttttcattaatgaatcctttattcataaaatgctta

SEQ ID NO: 25930 - DNA, 120 bp, Homo sapiens
ccacgggcacaaccatcacctgaggcatgttggagatgcagatggtcaggccctcctagaatctcagaatctgcattttagcaaagtcctgggtaattcctatgtccattggagtttgag

SEQ ID NO: 25931 - DNA, 120 bp, Homo sapiens
ccccggctgtgtggaaggttgccacctttggggtagtcattcaacaaacacgtgtcaactgtccactatgtgtcaggccaccactgggcactggctgtggctagctggatagacaccatt

SEQ ID NO: 25932 - DNA, 120 bp, Homo sapiens
ggccgacaaaggagctgtgatctcacagatccacagagaagtgtcccagggcgggcgggaaccaggactgcacagggaggggtgaagtgacacataagaagtcagcccatcagcctgaaa

SEQ ID NO: 25933 - DNA, 120 bp, Homo sapiens
actcgtgggaaaattggttattttacttaaaaaactcatactagaaagctagtttaactttaaaaataaattttaaaaacatttttattaacaaatcctacctttcctccaaagtcaagg

SEQ ID NO: 25934 - DNA, 120 bp, Homo sapiens
ttccgagtggttccagaaacatataggggataatgttggctctgatgctgtacatccccaacaaccatcaactatttggaaactagaatttcagcataattggagttggtgttaccctag

SEQ ID NO: 25935 - DNA, 120 bp, Homo sapiens
cctcgctctggcgtggcctggcccctctgcatttgacaatacggtcctatgcttttgtcttcctgggctgcgtgaacccaccctgccctggttcacctctcctcttgacccatccttatc

SEQ ID NO: 25936 - DNA, 120 bp, Homo sapiens
acccgaggccgctgacgtgggccaggacaagctactctttttcagtgtttctgttgcatcgctgtgtctctctgtgatcaggtgctgccctccctggcaggaggactgcagacaggatga

SEQ ID NO: 25937 - DNA, 120 bp, Homo sapiens
ggacgccacccaccctcgtggttcctgttcatctgcctacacgtggagggcccaagagggctaatatgtgactatctccacttcctggtaccctgtgtgaataacttcacttactaaagg

SEQ ID NO: 25938 - DNA, 120 bp, Homo sapiens
ggacgtttacatggaaatgaaccatctgcaaagcatcccccattttccttttaaatcagccaatgggtggtggtgggagaaatattcaccagagtatttaacatctatcccccttcctag

SEQ ID NO: 25939 - DNA, 120 bp, Homo sapiens
atccgggcggagactgttggtatctccacagcacacacagggcctggcacacatccggggctcagtgagcacttgctgaatggtgaacagattagctctcctgggaacgttgttgacaca

SEQ ID NO: 25940 - DNA, 120 bp, Homo sapiens
catcgggctgcatattcctatttttaattgtattctccactggttacagcacctacagttataaagacattgttaacattgcttataggaagacatttgatggaaatgagtccaaaggca

SEQ ID NO: 25941 - DNA, 120 bp, Homo sapiens
ttacggttagaaactggccaggtgtcatttttgagagattagataactgttttccggtagagtgaattgcctgtttgttgcaagttgggactttgctgggctggtttacagggccaaggg

SEQ ID NO: 25942 - DNA, 120 bp, Homo sapiens
aggcggctctcttctctcattgctgctgctctttcagaatccatttcaacagaggaggagtcaatgggagccccgtgcctctggcagatatcatatggcgtttcagtggcattgtgtgtt

SEQ ID NO: 25943 - DNA, 120 bp, Homo sapiens
cttcgagagctgtcatttgtcctagtagccagcagcgtgactgtgctgtcttctgctctgtctccctgtcagccttctgcccagccaccaccactatagttttgttctctccattggaac

SEQ ID NO: 25944 - DNA, 120 bp, Homo sapiens
aatcgaagttaatattagaagaacttcctcttactagaatcgaaaagcatttaagtgatgcagtcaagtttgtaccataagtaattcagtcatttaacaaatatatatggcctctgtgcg

SEQ ID NO: 25945 - DNA, 120 bp, Homo sapiens
atccgcattaggggctctttactgattcttcactatccaaaaagacttggaggggagacctgagcccacttctggaaggaaatgataacaatttatttagataatctttgtgcaacaagt

SEQ ID NO: 25946 - DNA, 120 bp, Homo sapiens
cttcgggccacatttctctctggcctgctgtcttcccagcactctcagccttgctcatggagcactctagtcctccgtcgaccttggcctttggtaacgtgatttttcacctggcagctc

SEQ ID NO: 25947 - DNA, 120 bp, Homo sapiens
catcgttagtgttccctcactcccctcttactgcccaacctgcaaagtccatgcctgggccagtgcagcatgtgtcctcaatgggctgctggtggcagtggggggaaccgcacagccacg

SEQ ID NO: 25948 - DNA, 120 bp, Homo sapiens
cctcgccctcaagaggcagccatggctgcgcatttctgcccttctgagctccgctcacttttggcagcagccgttccaacctgcatgggatcttcactctctcacagatgtgctgactcc

SEQ ID NO: 25949 - DNA, 120 bp, Homo sapiens
cagcgtgcagtgtcttgtattcagtatatagctgattaattgatgaattgattaattaatggttcacactagcacagtgcaaccttcaatgcaaagatctcatcaaaataattcacatgg

SEQ ID NO: 25950 - DNA, 120 bp, Homo sapiens
tcacgtctgggggaagaaaatgtgatatgtgattacagacctttcctggtacaacatagtacgtttcagattaactcaaggtattgtggtgatattgcggtcaaagccaggtgattaaag

SEQ ID NO: 25951 - DNA, 120 bp, Homo sapiens
atgcgtgtagttctagagtctagttagagaaagtgcataaagaaatagggaaattaacaagaaagctatagcttaaattataggaaaaacttttctccctatcagtcatggttttaaaat

SEQ ID NO: 25952 - DNA, 120 bp, Homo sapiens
cctcgggggcaattcaactggctgattccagccaagatgacaacagtcaggatccgttcccttctgatcatccattgggtgccctgatttcctctacagccctagctgaaagaccagaca

SEQ ID NO: 25953 - DNA, 120 bp, Homo sapiens
actcgaacattcccgattctgacctggagatgtcaacagctacttgatgccactctcttctatctttctgtagctaagccatccccaagtttgtcgattcaccctctttaacccctgtcg

SEQ ID NO: 25954 - DNA, 120 bp, Homo sapiens
gagcgtcacctgggaaccttaataaagtgcagatgttgattcagcaaatctgggatgccctcgggctgcatttccagcaggctcctggggatgtccccgctgctgtgctgcagatgacac

SEQ ID NO: 25955 - DNA, 120 bp, Homo sapiens
tgtcgcctcctaggggtttctccacactccctggaggcctaatgggcccttctccacatggcagtaagatctgtttttgtgtttgtgtttcaagttgggagaaggagattatttaatact

SEQ ID NO: 25956 - DNA, 120 bp, Homo sapiens
atgcggataaatccagcgtaccagctttccccacggagacgtcttgcagcgtcacagccaggatgaggcattgacccaggcgaagtccagagcacctgtgcgctacagggccccttgcac

SEQ ID NO: 25957 - DNA, 120 bp, Homo sapiens
acacgcccacttccagatgccatctaggaccccctccaaaaagcagaggcattcttaaaaacacacatctgcacatgttcctcttcatttgaatctgtcagtggcttctcagtgcctttc

SEQ ID NO: 25958 - DNA, 120 bp, Homo sapiens
tggcggggccccgcttgtccttagaagcccagctgaactgcttcctgaaggaacccctccagaacctctcagaccaggtcaggtttctgcactcttagatcatccccatggcataatcac

SEQ ID NO: 25959 - DNA, 120 bp, Homo sapiens
gttcgtttttgcacatactaatcctaaaaggacgatgacaacagcaaccacttacatgacctagatgctcttctgggtgttgtgcaaatattaacaatttaatccttgcaacaatccacg

SEQ ID NO: 25960 - DNA, 120 bp, Homo sapiens
aaacgcaggcttgtgaagccaggacccatgcattcaaagaccatgccaggtgcccccactgcacacctcatccccacataccagtgagggggagagaaatgctcctgcactgcctctgat

SEQ ID NO: 25961 - DNA, 120 bp, Homo sapiens
taccgtagtatgaaatagccacaaacattcagtgaaaccaaacacccccgcttaacctcaaactaacactaaataataaggaatagacttgggggcagtgcaagtgtatttctaatggtg

SEQ ID NO: 25962 - DNA, 120 bp, Homo sapiens
ccacgcacatcaatacttacatcccaatggtgatgtgacattttgggttttgtatttcttttgcaaattgagctagcatttttgatgagtggcagggctctgctacccaacctttggaca

SEQ ID NO: 25963 - DNA, 120 bp, Homo sapiens
tcacggccttctcagttgtttcaccaaccatctaaatgttttagtaattctaaaaattgatgcgctttttccacgaaaggaagtgttaccacattttccaagtgggaggcatctatatcc

SEQ ID NO: 25964 - DNA, 120 bp, Homo sapiens
tctcggcttcaaggaaaaataatacgctttgaatggctgttcaacagcatagaaattagctgagtagaaggcactcatatagccattaggaccaatcctttctgccgccaacacccccct

SEQ ID NO: 25965 - DNA, 120 bp, Homo sapiens
ccccgctctcagccccgggaaaggccactggaaaccacctcacatggtagggccttgcgggagccagtaataaccttatctccgtcaacatgttctgtcagattgaatggggcagccaga

SEQ ID NO: 25966 - DNA, 120 bp, Homo sapiens
gagcggttgagcctggattggtgcttagacctataatgggtgcaagcagcgttcattcatagtggctttctagacccagggacttggccccagccctgctgctccactcctcttcttgct

SEQ ID NO: 25967 - DNA, 120 bp, Homo sapiens
ccacgagtctcctagaccaccgaacgatgcctgcatttgaaagacacttctgctgatcaaagcagctgatgtgtccctttgcggttcatttctaattgtccccaaggaggagaaattcaa

SEQ ID NO: 25968 - DNA, 120 bp, Homo sapiens
tggcggagcagcttcaccttagtcattgcccttaaatatgaaagctatttaagaaagtttgcccttaaatatgaaagctattttaaaaagtttaatgaaagaagagaatcacaaaacatt

SEQ ID NO: 25969 - DNA, 120 bp, Homo sapiens
atacgacgtgtgttctgtgactcacccctgcaagttatttgtgtgtattcccttgcatagtaattaataatgaagcaaagcatggcaatgatatcttttcttgtctagtattctagaaga

SEQ ID NO: 25970 - DNA, 120 bp, Homo sapiens
taccgtcaggcctactattaatagatggaatacagattccattttcattactcaactgccatattcattattacactgtacagaaaagggaatcacatctgttgaaaacttatatatgat

SEQ ID NO: 25971 - DNA, 120 bp, Homo sapiens
agccgtggggactacagaagccaagaagcagatctagctggggaggcctttgcagaggatgtagttgtgtggagaggccacacacgtggaattcccaggagggctgtggaggcggggaat

SEQ ID NO: 25972 - DNA, 120 bp, Homo sapiens
aaacgtgatgagaaacaattattgtcttaaaatatctgcagggctgtaaggtagagaagcaatacgttgcatctgtgttaagtcaaacaaaattatcaagggactggtttcagcttaaca

SEQ ID NO: 25973 - DNA, 120 bp, Homo sapiens
gcacggagctgcaacactgccctgcacacaaacacacacaaataacaatccccagcccctgcatttccctctccggtttcaggaccttgtatcttacttcaattcctttatttagctgat

SEQ ID NO: 25974 - DNA, 120 bp, Homo sapiens
aagcgctgcttcaggctcatgcttcactagattcaggcctggggcagtaaagagccagctcaggatagcactcccgactcactcattttttcaggcaggggagccatctaatgtcaagtg

SEQ ID NO: 25975 - DNA, 120 bp, Homo sapiens
ctacgtgcaggaactggtctgttaattagcagctctcctcatggaagggataatatattctagaaacaggagtgcggccctattgcaagaatgtcctgagccaaaattaagattcttcta

SEQ ID NO: 25976 - DNA, 120 bp, Homo sapiens
caacgaccccaggaatgagtttgggattacagggtagccagggaaagggaaagcttcacgcccgcccccgggacaaggtctgtcttcacactgctacatcccttcacccactttaaaatg

SEQ ID NO: 25977 - DNA, 120 bp, Homo sapiens
aagcgttaaatgaaaacccacacacactcagagcacacaaatccaaccacgcttacaaaaccatcacagagggtcaggcgaggcccttttctaaatgaaaaagaacaggggtggagactg

SEQ ID NO: 25978 - DNA, 120 bp, Homo sapiens
ccccgcacaggatccctgctagacacaaggccagctgccttcctttcaagccgcagacgcatccctgtgtccaggcgggctggtcagctgcggtcagcaccagcttccccgctccatggt

SEQ ID NO: 25979 - DNA, 120 bp, Homo sapiens
ggccggcaacctctgagtgcttagagaaagggacgggattcctcctgtgcaacccctctagtctcactcagactcaagtctgactaaggggccaggtgctttgaccagggactctcccct

SEQ ID NO: 25980 - DNA, 120 bp, Homo sapiens
tgtcgactaaactgccggcagaggctggctttccaccttctttttttttttttcactcttcaaacactttatgacatgaacataaactactggctgcatcgttctgctgacaacatgaca

SEQ ID NO: 25981 - DNA, 120 bp, Homo sapiens
ccccgcagtaaagaggacaagatgacgacgactcagggaacacctccagcctgaagcagcaccatgcgagcttagaccttagggtcggcttagaaaccacaggcggggcggcttgggccc

SEQ ID NO: 25982 - DNA, 120 bp, Homo sapiens
cctcggacactccctctcgaagctgcttctccccaagctaccccaaaggcactgagcgccctctgccccccagcaattcaattcactggctgtcctgctcctgtcagtactgagagttgc

SEQ ID NO: 25983 - DNA, 120 bp, Homo sapiens
cctcgggggaaaagtccagaggccctggggtgtccagcatgctctgaggtccctgctgctgaccccttgcgctgtcagcattcagagacattcacacagcacagcctcccaggctaacag

SEQ ID NO: 25984 - DNA, 120 bp, Homo sapiens
agacgtggccattctgtggcccagtgctgcagaggtcaaagggacaagcgcagggagcatctttgctttcagaaaaaaaaaaaaaaaaaagaagcacactggtgcactgacctgctcctg

SEQ ID NO: 25985 - DNA, 120 bp, Homo sapiens
tttcgatttttggttgtctttttttttttgaaagaggggcttttatgcttttttcctaatgttcatgggtaaaccaatgtaaatgtgtgtatgtttatagagatggctttaaatcgcaat

SEQ ID NO: 25986 - DNA, 120 bp, Homo sapiens
ccacggaagccaaacaaaatctctctgcagataaacatttgcaaaaagaatttccaatcccaatttttgagtcagagatcttttatttccttgcaaattacatatctgtttcaggatttt

SEQ ID NO: 25987 - DNA, 120 bp, Homo sapiens
attcgaatccagaggatgggaaggcataaaaaaaagaaatggaagaaactttatttttagtggtaaatggtgggactatgtattttacgtatggtgaagtcaccaagcccaacacttggc

SEQ ID NO: 25988 - DNA, 120 bp, Homo sapiens
tttcgtcccagttctcgagctgactgacttctctttctgacgtgtgttcctttagcacacctctacactgcatggctctgagatgtcctgtgactgtttcatgtgtaaagttgcctcccc

SEQ ID NO: 25989 - DNA, 120 bp, Homo sapiens
cttcgcgctactttactagatatgttgtagttgaattaatgaacaaaagaacaagcaactttggtgcctggtgtgcatctcagagcagggtggagtgagcctggccaaagggtcatcatg

SEQ ID NO: 25990 - DNA, 120 bp, Homo sapiens
ccacggagcttctcagccatgcttggtattcacatgacttctagggcgacagctcaaccagcaaataaacagcttcatatgggaaatattactcagcctttgtcatcaaggagtgagtca

SEQ ID NO: 25991 - DNA, 120 bp, Homo sapiens
tcacgggcctgaactgaatagaagatagaggagaaaaggtgtgtggactgggtgagacagcgcccagcgaggtgaactcccggcagccctgcctgtctttacctgcacatcaccttgcta

SEQ ID NO: 25992 - DNA, 120 bp, Homo sapiens
cttcggttgtgagggcctgtctaggaagagaagagttgcaccctggcaggcagcactgagctgtctcatgcaaagctgaggaagaaagagtgagctgcccagtgagcctgctggggtggt

SEQ ID NO: 25993 - DNA, 120 bp, Homo sapiens
ggacgtgaagtcagaggggaagggaggtagcacagggcagtcttgactttgaacaaagagctggcttcctgaagtcagctggccgggttttgaagccgattttccagcagtgatctttga

SEQ ID NO: 25994 - DNA, 120 bp, Homo sapiens
ctccgtcatccccacgtccacactgccccattctgtcccaccccgggttctgtggtgctgtcggctccccagcgagccaggaagggagaggccagctctgctggggctcctgccgccctg

SEQ ID NO: 25995 - DNA, 120 bp, Homo sapiens
aggcgccactggaggagccacacggccctgaagcagcaaggcagatgccctggacacagtggaggcacagagtgcaagcaccggcctggcccacagacttttggaggggaagtggtatta

SEQ ID NO: 25996 - DNA, 120 bp, Homo sapiens
cagcgcagagattagacaagtagaatgctggcccgagaggaggcgtttactcaccctctgtctaggaaggaaagccaggcccagcacgctcactgctatctatcctctcacacagaggga

SEQ ID NO: 25997 - DNA, 120 bp, Homo sapiens
aatcgaagccagcatcctgtcctttctccaatgtcccctgctcaggagtcaggactcagcaaggcccaccccagccacacacagatacagttccaggactcagaactcagcgaggcccac

SEQ ID NO: 25998 - DNA, 120 bp, Homo sapiens
acccgagccacatccaggtccagttccaggactcaggattcagtgaggcccaccccagccacacacaggtccagttccaggactcaggactcagcgaggcccaccccagccacatgcagg

SEQ ID NO: 25999 - DNA, 120 bp, Homo sapiens
ctccgtccaaaagccttgtttcctgtgtgtccttgtgtttaaaatggaaacgttatgagaaactgcctgccagggcaaagggtgctgcccggcacacagtagggactcaaaatgaaacta

SEQ ID NO: 26000 - DNA, 120 bp, Homo sapiens
caacgggtattgctttctgaaatcttttttagcccaattttgtttcttatagtccaataacaggtcaaattcatttctgatttactagccattcagttgcccataaaaaatggaaagtga

SEQ ID NO: 26001 - DNA, 120 bp, Homo sapiens
attcgccgagctggccccatgtcaatcagagtacactgagcactgagacccagcatgttgagataactggctagagatcatcccataatggtaccatcacaatcttcacactgtagaagt

SEQ ID NO: 26002 - DNA, 120 bp, Homo sapiens
tgccgcagcttggcatgtttagtccagaaggcatattataatgtacatggaagattgtcagaaattcaaaaggactttttgagtatcacatgtgtattttcaagttccaatatagattca

SEQ ID NO: 26003 - DNA, 120 bp, Homo sapiens
acacggtgtatcttcctcctgtcatgcttccgtgcatttgagcacatttgagatgtgtatacatgttcactttgagattttagtatagcaaaagaaatgaccggtcctgattcaatgaaa

SEQ ID NO: 26004 - DNA, 120 bp, Homo sapiens
actcgctatattttccttacatatttttaagttcatcctataaatgaactatccattcatcttatttgagattttcttaaatctttcagcaagaaagcgggaaaaaaatcctcctctggc

SEQ ID NO: 26005 - DNA, 120 bp, Homo sapiens
acacggaaacgagaaaggcagagaaacccaggacaagtcatccaagactttggtcacatggccatccattgctttcacaacaaaaatataaatccaacatgtgtgtgtgcatttcatacc

SEQ ID NO: 26006 - DNA, 120 bp, Homo sapiens
ttacgatggtgtgaaagcaatgcacattcaatggaaaccatacttctaatgttgaattttttatcttttcttgggttagttgatgtctgatatgttactttcttgcgatgccaggcaatg

SEQ ID NO: 26007 - DNA, 120 bp, Homo sapiens
tttcgactgctattttcaatttagggtgggtttatcaggacataaccctatggaaagttgaggaccatctgtatatctggtagggaaagatggataacaaattcataggcaaataataat

SEQ ID NO: 26008 - DNA, 120 bp, Homo sapiens
aagcgtacctcgaagatgcaaaggaagcaaagatgcgaagatctgggctggggatggaagcagagacaacttggaggccaaggggagagactgacaacagcccagctcatacctcagcag

SEQ ID NO: 26009 - DNA, 120 bp, Homo sapiens
agacgattctaagtgtctaagtggatttgggcaaatctggagaaacttgttctaatactgtgtcttaataagtaatatagatttgcccaggcttgtgggcagagtggtatacaccccata

SEQ ID NO: 26010 - DNA, 120 bp, Homo sapiens
taacgagaccaccggcccgccctagatgtccaacaagaatgcacagataacttcgtatatccactttcctgaacctgcccctgacagccaagtggagcacaacaacagagatgaacctca

SEQ ID NO: 26011 - DNA, 120 bp, Homo sapiens
gatcgactgggaggggcatgagggatgacagttagggtttcgatcatgacaggaattcagattactccagcatgtgcatttgttaaagctcatcaaatgctacacttaagattaatcctc

SEQ ID NO: 26012 - DNA, 120 bp, Homo sapiens
ttgcggtacaattctttcagcttttctatacatttataaatcataataaaattttaggacaaaaagttagtgctttgaagtcctaagtcatagggcctgctgctcttgatgcagtagaat

SEQ ID NO: 26013 - DNA, 120 bp, Homo sapiens
taacgtgggtccagatgcatgttatgttatgtttctgttgcattctcaatagttaactttaataaaagaaagtcaaaagcttatatattttttcaatcttcaaaacatttctgggaggtt

SEQ ID NO: 26014 - DNA, 120 bp, Homo sapiens
aaacgcactttggaaaacacattcaaaccacagcagagatcaacgttattgtcaccattttcatatttgaggaaagcatggcacagagagcttggagaagtacttcaaggtcacccaatg

SEQ ID NO: 26015 - DNA, 120 bp, Homo sapiens
atacgtttcccaaagtggaatcatcatgacgtagaatttaagcatacttacttgtttaaacaaattgtccagttgcttcccaaaatgttttgtgaattaagatttacatcaagaatatgt

SEQ ID NO: 26016 - DNA, 120 bp, Homo sapiens
tgacgtccttgattatttaaaatgaaagcagctgcctgttttcatctctctgcatcctgaggaaactcttctgcaacgtgttccagccctaggttctagctgaccctgttcatctgtttg

SEQ ID NO: 26017 - DNA, 120 bp, Homo sapiens
gcacgaggggcccaactaacacttgcggctacctggacgacagccaatctagttggaatgagagttagaggccatagtctgtcagctgggaaagcagcttttattccaaggtgtgccaac

SEQ ID NO: 26018 - DNA, 120 bp, Homo sapiens
aaccgaaaggccacatgttattgtcacaacctggtacctacatcagtgctgacatctttaagaaccttagaattgggaaatcagtttagccctatctgcatgtgtagccgacaaccacac

SEQ ID NO: 26019 - DNA, 120 bp, Homo sapiens
agacgctgggtcaatccagagttatggttggaaaaatgatggaataattctgcccctggtgataggagagagggactccatcttgtcaactgtcatggttcccatgtgaaagctatcatt

SEQ ID NO: 26020 - DNA, 120 bp, Homo sapiens
agccgggctgcactcacacccttggcatgtcatctgtctctggacaatgctggagtcattttactttgaacgtcatcatctcctcctcagtgggagtcttggcatggtttgaaagggagc

SEQ ID NO: 26021 - DNA, 120 bp, Homo sapiens
acacgctgtgatgttaactgacaatcaccccttctcagtgagctggcccagccccacgggtgccagggggatggccaggcagcctgtattcttagcaggacctgccacctctctagccca

SEQ ID NO: 26022 - DNA, 120 bp, Homo sapiens
tggcgtgtcgggggggtgggcgggggggctgggccaatctttcctggggatgcaaaagagtccggcaggccgcagagggaggggtggaaatgcagggagaaggagaggcagctgacagag

SEQ ID NO: 26023 - DNA, 120 bp, Homo sapiens
ttccgaccctggtttaccaggctgcaaacctgggagctcccacagttcatccagcctgaggatgagggccgggcatctacttggtgcctgagaccatgagtcctgtacacagccccgtgg

SEQ ID NO: 26024 - DNA, 120 bp, Homo sapiens
gggcgtgtgcaggcctcagtgcgatgcaggactagagagaggaggtcgctcaaactggacacagaggagcggggatgggtctgaggaagctgtgaatgcgtcctcagtcctcagctaggg

SEQ ID NO: 26025 - DNA, 120 bp, Homo sapiens
tgccgcagaaaaatagcacggccgatgtgcttctgttttttgttttttaagacccttctgatagccaagtggaagacagaggagctggtggagaccagtggccagcaggcactgctccag

SEQ ID NO: 26026 - DNA, 120 bp, Homo sapiens
aatcgcctggttgctggggattctcccagacagatggagcggggttaggtggggtgtggggctgtgcagaacagagggatgggaccagaaaggagtgcacatagggatgcattctcttct

SEQ ID NO: 26027 - DNA, 120 bp, Homo sapiens
agtcggagtaaaatattcagggtgcgggtctggagatagagttggtggggactgtaacttttttggggagttcgagaatccaatcctttctcctgcctgcaggattaaccctcagcaaac

SEQ ID NO: 26028 - DNA, 120 bp, Homo sapiens
gcccgcagcacatacttgaaggaggcttcccaatttagaagcaggaagtacattcaggcttatcactggccttcgaattagctacctatgagaaattgggctctccagagaaactaaaca

SEQ ID NO: 26029 - DNA, 120 bp, Homo sapiens
ccccgtctcacggtcccataaaagaccaacccaataggaccttagacaggcaaacccaaattaatttcaatcgagcacaaaacacccttttaataatttcctgacgccttcgagaggtcc

SEQ ID NO: 26030 - DNA, 120 bp, Homo sapiens
tggcgactgtcctgacaagcccacctcccatctctcacccaggtccttctaaaaatctcagcctggtgggctgtttgtctctgggcacactggtgcccagggcattcctgcctcttccct

SEQ ID NO: 26031 - DNA, 120 bp, Homo sapiens
acggtgaggtcacctgctcatcccccagtgaggcaagcctggcaccgcagcagaggctgggccacgccgggctttccccatcccacacccagaactttagcaagacaattcccagagaaa

SEQ ID NO: 26032 - DNA, 120 bp, Homo sapiens
cttcgaaataccagcaatgctttttggcttctgtgcactgcaaatagaagcaagaaaaagtttgtcagtactcaggaatctgcatgttgttgagaagctctcacaaaggcagaaagaagg

SEQ ID NO: 26033 - DNA, 120 bp, Homo sapiens
aaacgccaaaatgaggacacagaagtcctgataattgttgttgttgaggctttccttcaataaatgcttgctaactgaacaccaggtgtcagagtcagcttgcccaattgaggaggacgc

SEQ ID NO: 26034 - DNA, 120 bp, Homo sapiens
cctcgtgatgggaatggagaccaggaggtggagaggcacacgcctgcctgaggagcccagggttgagagccgggtgctgccaagtcgaagtctgatgagaaaggcagtctctgcctacca

SEQ ID NO: 26035 - DNA, 120 bp, Homo sapiens
gcacgcagatatggcctcacaagcaagcgggaagaggcagaaagaaggccccgtgctgggtcacgtggaagcaccagagtcgacgggcaaaggggaacccacagggaaaggaggagccaa

SEQ ID NO: 26036 - DNA, 120 bp, Homo sapiens
acccggctttgatgatctcatacatgtctgagaagagtaacaggcttgttgtttccaactactatgcccccaaaatgaaataactgagatatgtaccaaaagactactctcctccagttg

SEQ ID NO: 26037 - DNA, 120 bp, Homo sapiens
tgccgcatgcctgcttctgtgcctgaacagtgacccaaccatggtcaggtcaccgaaggtctctaagctttggttctttgtctacagactggagagaggtatttctgtcttgccttgagg

SEQ ID NO: 26038 - DNA, 120 bp, Homo sapiens
atgcgaaccacctggcgcatgcccactattctaagagcctcctgctaagtcgttacattgtgtgctgtgtcggtttattcttgagaatcatggtcaagtaaagctcaacctaaagatgca

SEQ ID NO: 26039 - DNA, 120 bp, Homo sapiens
caacgtacttttgtgtctctatggagagtgagaatatggaacctgtgatccaaaatgaaccagaaaaacaaacaaacaaaaaacagaagtttagaaactacactagttacaaccaccagc

SEQ ID NO: 26040 - DNA, 120 bp, Homo sapiens
ctccgtacaaaatgcctctcctcccaagaagctcagactatcgcaaaatgctgttctcttcataggaatggggtgggaaatagtttcccatttctgtcttaaatcaaatggctgcctcta

SEQ ID NO: 26041 - DNA, 120 bp, Homo sapiens
aaacgctaagtgattgatgcctcaaaagaaagtgctggaaccaggtctgtgtggctccaaagttgcccttttcctaccatatgacaccgccttccaacaatggggggcactcaggtcctg

SEQ ID NO: 26042 - DNA, 120 bp, Homo sapiens
ctccgaaggcaggagtctggtcgccaggttgccggcacacggagttcacgcagagaggcagcaagtggagcctgttctcctaggaaacctcccatgggctgagtcactcagccatgctca

SEQ ID NO: 26043 - DNA, 120 bp, Homo sapiens
tgacggagcactatggcaacacaacaggatttcctcctagactaaactcctgaacccgaagaaaaaattatacgtgctgctagctgcaaattgctgacaaatgctaaggcgctgtaggaa

SEQ ID NO: 26044 - DNA, 120 bp, Homo sapiens
aaccgaaatctgtctgctgcaccattccaatcaaagtcaggtgggagctttttgtctgagtttcagtgttattgctacagcaaaaatgacaaatgcttgacaatataattatgactgtca

SEQ ID NO: 26045 - DNA, 120 bp, Homo sapiens
ggtcgtttcaactttgcagacatgatctgaactcctattaagaggatacattcctatgcaacgaaacagctattttggaaagaatggagtcactgaggccgtctaggctacatatagggc

SEQ ID NO: 26046 - DNA, 120 bp, Homo sapiens
cctcgcctcgccctcacggtcctcccacatgctcttctgccttgctaaacagcttgccattccagacatatgccattcagtgtcatgactccatgtccctgtacatgttgttcccattga

SEQ ID NO: 26047 - DNA, 120 bp, Homo sapiens
gcccggcatagaatgctgacttgatttcaagtctagtgttttgtatagtgcacccttccttatcctctggaaagtgccccctaccatcttggcgattgtcactgtcagttaagaacccag

SEQ ID NO: 26048 - DNA, 120 bp, Homo sapiens
agccgttggcatagctgcgactcgaatgactagataggttgggcatgttaggcagctttggtcacctgacactcaaagatttcagtttgacggttgggggtagtactggccggcttgttt

SEQ ID NO: 26049 - DNA, 120 bp, Homo sapiens
agacgattgctgcccaagttcacaagcaaatgccactcaggttcttttgtgtgtgctgtgttgatttagtctcaccccctgctctgcatttttcgattactagcattgtcacatccctta

SEQ ID NO: 26050 - DNA, 120 bp, Homo sapiens
ctccgttctgctttctgtctctgtgggtttatctactctaggtatccatgtatattttttctgtgtcaaaaattgctttgaaaaacacatagtgcaaattgcaaagataaatgtgggctc

SEQ ID NO: 26051 - DNA, 120 bp, Homo sapiens
gaacggtgcctagaatagctgctcactgtgtttgccagattaactgatggatatatgaaaacagtatactgcgtgacaacacctttgttattccataggacatggacatcttccagcaac

SEQ ID NO: 26052 - DNA, 120 bp, Homo sapiens
tctcgagaagacagctggctaaaatccttatttgtccggaaagttgatccaagaaaagatgcccactccaatctcctagccaaaaaggaaacaagcaatctatacaaattacagtgtgag

SEQ ID NO: 26053 - DNA, 120 bp, Homo sapiens
tatcgttgaattttcttttgtttcagttcacaatgttaaaccggaatgcctagaagcatacaacaaaatttggtgtgtataccaaactatcctttacttggggaaaaataatgactttat

SEQ ID NO: 26054 - DNA, 120 bp, Homo sapiens
tgccgaaggcgttttgattttaagcactcacacagctaaatcatcatataggctatcagactttagaatgttaccagactcttgtgtttggaggaactttgccaggctgtctagtccatc

SEQ ID NO: 26055 - DNA, 120 bp, Homo sapiens
ttccgctgattctcctatgatttgcgatctaaacctgcttacagaatttgtaaactttaagacgaaaggggagaactaagcttaccagcttttaagttaacagaaatagtattttaatga

SEQ ID NO: 26056 - DNA, 120 bp, Homo sapiens
aaccgttgaagaaagacggcacttctcattaataaaatcatcagggaaggcaaaacgtttgagaggtaaaccccaaatatccagaacacagacctagaagaaaagagggtacaggaagtc

SEQ ID NO: 26057 - DNA, 120 bp, Homo sapiens
gggcgcatcgcaagaggttgaaagctgaagaaaacagcgggagtccattaaaagttatctgacgggctcagctttaaagatcatgaaaaagagatggaaagaagggcatgtaaccacaga

SEQ ID NO: 26058 - DNA, 120 bp, Homo sapiens
catcgattgaacatctggctctaccaggaactgaacaaagactttccctcaagtgtgagcttgagcgttaggttcttcagttccttctgattccctgtgatccagctcgtgcttattgtc

SEQ ID NO: 26059 - DNA, 120 bp, Homo sapiens
agtcgtgcctttctgaatgaagtcaatgtctgtgccagtcaatgcacaattgtcgcttatgaccttcctgaggtttcctgtttcctcctaatacattagaagaacaaatcaataaagtct

SEQ ID NO: 26060 - DNA, 120 bp, Homo sapiens
gggcgcttaaccccaggagcagtgggaggactgggttgggctcattggagtctcacacagggatggtgaaatggctcctggctgatatagaagcacaagactcccccaccacatggtgat

SEQ ID NO: 26061 - DNA, 120 bp, Homo sapiens
aaacgattgatgtctctgctttctcaccctctttaaattgagatggggacaagattaaaagttcaggcaggaagccaagtggtgatttacaacactgagcaaccagcctagtgtgtgagg

SEQ ID NO: 26062 - DNA, 120 bp, Homo sapiens
acccgatatattgtatgttatatgcaatgtcctgtattttataattgttatctctaaattcttacaatgatagtgaaaggcaggtacaattacccccattttatagataaggtaactgag

SEQ ID NO: 26063 - DNA, 120 bp, Homo sapiens
taacgacatggttggcttttctcaggacatagatacagttgaagcacagtctcaggacacagatacagttgaagcacagtctcaagttggtgtgaccacctgcttagttaagggttctct

SEQ ID NO: 26064 - DNA, 120 bp, Homo sapiens
aatcggagcattaccagctttgaggagcctctgtgatcctccgagtctgtctctctgccccctgtcttctgaatgcatttagaatctaatgattcttctcctggcatgaattgaagtgat

SEQ ID NO: 26065 - DNA, 120 bp, Homo sapiens
ccccgactccagtcagcaaggatttgtcagtgaaccccaaaaacggtaggcagcaagagcataggatacaggaagataccagggtgccccagattctaacccttcaatataataaataac

SEQ ID NO: 26066 - DNA, 120 bp, Homo sapiens
catcgaggtcaccatgcccttctctgctcttttcagagaaaagcttttctttatacatgcacgccacactcactcacacatgcacactccctgcaagaagccatcagagcattttggtca

SEQ ID NO: 26067 - DNA, 120 bp, Homo sapiens
caacggtttatgtacctgcataagcagatgaaaaaagggcttggggatgtattaaaaaacatgcatgtatatgatggatggggagagagagcacgcaagaatctgatacagattaatggc

SEQ ID NO: 26068 - DNA, 120 bp, Homo sapiens
tggcgtattggaagggttctggaattttagaacacaaagtagcagttttaaataatgagagaagattccacatggaacgctcatctggctgtggcagcctgtgactgaatgagagaaaag

SEQ ID NO: 26069 - DNA, 120 bp, Homo sapiens
ttacgaattcactggaagctctcaaacgaggctggcagaagctgaaattgaagtggtctctgacctaattttcttctgcatgaaacatctgcatcaaggctctctttgatgtattccact

SEQ ID NO: 26070 - DNA, 120 bp, Homo sapiens
ctacgggattgtatcacatggactcggtgttgcctccttattgaaagacatttccagcctttgcaaggtaatgcgatgttactgttacccaagctaatcactcaatgtgctcctaaaata

SEQ ID NO: 26071 - DNA, 120 bp, Homo sapiens
ttacgtctttcatacctcagctcagatttcacttccttagtgacgtccttcctgacggcccccaaatgcttgttttcgtagtatttactgcatagttcttatgaggtttaaatgagaaat

SEQ ID NO: 26072 - DNA, 120 bp, Homo sapiens
ccccggtgtaccctcacctagcctcgcagcaaactgccagtcacagagccggctctcaaacatttattgaaggaatgaatgaaagtgagtgcctcttggctgtcaaaggagttcaaattg

SEQ ID NO: 26073 - DNA, 120 bp, Homo sapiens
ttgcgtgtctcaaacacttgcctgaaaccggtacagaatttcatctgatttctgatgactcccatccctccttcttccctcccatcccttgatctccctcgcattttcctgtttgtattc

SEQ ID NO: 26074 - DNA, 120 bp, Homo sapiens
caacgcgtccctgcttgtgcgagaaaagcaaagaatcccacaaaactcttttctttatcctctttccagaaaaatgggccaattcacagctgcaatggttgggagaatttcctgtctggg

SEQ ID NO: 26075 - DNA, 120 bp, Homo sapiens
cagcgaggcctctgttgtcactggcccaaacaacaacaaaaacaaccgcaacaacaacaacaacaacaaaacatgccacgtgtgcactggcatatacaaacacgcccacagaaccaaacc

SEQ ID NO: 26076 - DNA, 120 bp, Homo sapiens
aagcggacaaggcttcaaggagagcttctgggcggctcattcccgcggcgaggcatatcccttggcatggtgccactgcagcccagctcccagcccccccgccatctgtcatcagcgctc

SEQ ID NO: 26077 - DNA, 120 bp, Homo sapiens
tgccgacacagtacacggaggctaacaagtagcaaatggaggggaagaaaaaacaaagccactgcagtcagtgggagaggtggctagggctttgacataaactgacaaaaagctgggaaa

SEQ ID NO: 26078 - DNA, 120 bp, Homo sapiens
tgccgtatttttgatggaaagttaaccattgtacctttcccccatgcacccacaccagaagcctgaaagccaccatctccccgtcggtctctggatctcctcgctgcctttgtcccttct

SEQ ID NO: 26079 - DNA, 120 bp, Homo sapiens
agacgtggaggcttggagaggaggtttggtttccaaggattggagcgctgtgaagggcggggccattccaagtccatctcccctttttgtcctcttctcccgggacgggagggtggagcc

SEQ ID NO: 26080 - DNA, 120 bp, Homo sapiens
ccccgcggccggttcgggagctttctctatctcggtcgctcgaggtgagtgtgaaagggcggcagcccgtttaattgcagcgcaggttaatttcttgagttcaccgcagtcggtccgcca

SEQ ID NO: 26081 - DNA, 120 bp, Homo sapiens
agccgcttccccggtctttgccaagtgggtttacgaggtctgaggcgtgttggggcgcgctcacgttctcgcaaaaggctcctccccagggctcaattccccgactgcgggaagcccttt

SEQ ID NO: 26082 - DNA, 120 bp, Homo sapiens
cctcgtcgctcctttctccctccccaccgcctggttccctacgtccctgcccccagggaaggacggcccccatcttaggacttacgacccaagccaacccagaaggtaccttcacgtcga

SEQ ID NO: 26083 - DNA, 120 bp, Homo sapiens
tatcgcagcctccaaaacccagcagtaataggagctttcaacctgaaatacgattgttattttcccggtgcagagcttgacagaaaaagtcagctttttattaaagacaaagaggtaaat

SEQ ID NO: 26084 - DNA, 120 bp, Homo sapiens
agccgggacagtggagggacggcggagacctggcgcgcttcctccggttgccacgaggaatttatggggtggcggcggccagcgctcagacaccccccgggtcccggtggggaggagctc

SEQ ID NO: 26085 - DNA, 120 bp, Homo sapiens
gctcggggcaggaggacttccctaggtccctccgggcactcggaagggggagtcctcccaaagccgcacaaagccgggatcatttcaatccggaacagcctcagcgtcctcctcctctct

SEQ ID NO: 26086 - DNA, 120 bp, Homo sapiens
ctacgcagatgtttgaaaattagttctattctttaatggtcatttttggaacatggtgcagattctcttaaaagtgtgggtgccgataccccctccacccctttttgtgatcaccatgtg

SEQ ID NO: 26087 - DNA, 120 bp, Homo sapiens
ctacggtatccgagagagtagcttttctgcaaatggtggttggacattagttgctgaatagactcttcagcccccaagaaactagtggtggttttataaaatcctaacattgctatggat

SEQ ID NO: 26088 - DNA, 120 bp, Homo sapiens
cttcgtagaaggataaacacatgtcctgtttataaagtgtactagagaaggccacagagtcatccatttttacttctcatccatatcattatctaccaaatttataaaaaccgttatttt

SEQ ID NO: 26089 - DNA, 120 bp, Homo sapiens
aagcgtgttgttctctgggcagaatttctaatttagaggaatagggactccattcagccttggacagcgtaaactgtgaccctaggcagtagggcctagcattctaggataatccctcag

SEQ ID NO: 26090 - DNA, 120 bp, Homo sapiens
ttgcgaacacattcaatttgaggggctccataggagaggaagcttgggatatgttctaaggaggtaaacgtagaaagtttatgtatgcaggcctggcaaaggaatcattcattctcttga

SEQ ID NO: 26091 - DNA, 120 bp, Homo sapiens
gcacgtatttaaggaggtggaattgtatccttccacttgtgtggaagtttttgtcattcattccatcttctcccgtggctttgcctccaattagcaattttgcaggcctgagaactgaag

SEQ ID NO: 26092 - DNA, 120 bp, Homo sapiens
caacggtaaatatctgatgtttccaatgtgcttctgcctgttctttcttcccctcttgccccctttccatgatctttcccccatcttagtagaaaggtcgtggcaatattattttgtctg

SEQ ID NO: 26093 - DNA, 120 bp, Homo sapiens
agtcgattgaatatgattcatttgaatagatcttttactttataaggcataatcttaaaacgaaaaagagagtcatctgtgtttaagataatgccttagcaacatgatcactaagatttg

SEQ ID NO: 26094 - DNA, 120 bp, Homo sapiens
aatcgagaacttttaactttatatcaccccttcctttcctccaaattatgaaatttgctgccagtgtattctagtataaaaaagaacgtgtcattactagggacgttgtttactgtttat

SEQ ID NO: 26095 - DNA, 120 bp, Homo sapiens
tggcgtcttcagtatcagatagctccgtatatgcagtgccactgtggtctgttgccattggctactccacatctgtcactcttcccaccgtattagctaataatgagagagagttaacct

SEQ ID NO: 26096 - DNA, 120 bp, Homo sapiens
cttcgctgtgctcgggtagctcagagggttgtgatcgttaacgagctcagggtgttactgtcactgctgctgtcttgtggatttgaaagtaatgccgtgatgggatgtggtataggtacg

SEQ ID NO: 26097 - DNA, 120 bp, Homo sapiens
ccccgctcacactttccttggttagttgaaaagaaacagcctgttttcctgttactgaatgctggaccgtgggcttacttgttttttactctttttcattcatttgttcattcatttaaa

SEQ ID NO: 26098 - DNA, 120 bp, Homo sapiens
gtgcgttttaatgcattttatttggcttatgtactatctttatttgctgacgatcaactcccccaaataaagctatttggatatctttcttgttatccattctttcagacatattggctt

SEQ ID NO: 26099 - DNA, 120 bp, Homo sapiens
ttccggctgccatccagttaacatacccacaggattcttagactaggcatacatcattgtatatattctgcctaaaagtttgtaaaatctagtggtggcatttagctcttttggcaataa

SEQ ID NO: 26100 - DNA, 120 bp, Homo sapiens
tttcgtggccttgactgagctgtgtatggcctcactcttcaattctgttgtcagcctatgttccacaatcatttgtgtgtgtggacctcaagaatttcagtcaacccggcaacacatgca

SEQ ID NO: 26101 - DNA, 120 bp, Homo sapiens
gaacgaaattgaacattagatcagtgaggtcgactgattgatgaaatattttgttcaaatatgtgtttctgctaaaccttgctgtctcttgtataggatacacctgctcctgtctgaagt

SEQ ID NO: 26102 - DNA, 120 bp, Homo sapiens
tcacgtgccaacattattttgtggattcatattaagtatttaaacaccaaagtgatcacacacccacacattccctaaaatgtgggctgacttgttggccaaccattcatgaacctgggg

SEQ ID NO: 26103 - DNA, 120 bp, Homo sapiens
tgtcgatctttgaagacttactttttttttttagtaattccatggaaataaactatttggagaccagttcttttcagttgtgatgcttctcatcccctaaatacaccagtcttctggaat

SEQ ID NO: 26104 - DNA, 120 bp, Homo sapiens
attcgcctccagccacaagccagtccctagctcatggccatatgggactgaggctaaagccgtgctctaattctgatcctcagcttctccaccagccctctccctccccctacaaacata

SEQ ID NO: 26105 - DNA, 120 bp, Homo sapiens
tttcgtcagtgctaagttgcacttttccccacatttatacatttctcaaaagggatgcatgttatcatcagtttatatttaatgtgcatggagtcctctcttgaaactttgttattaaac

SEQ ID NO: 26106 - DNA, 120 bp, Homo sapiens
atgcgctgtggggaaagagacaactaagtggatggtgctgtgtgaaaatgtttgggagattcaggggtccctaggaagggtctaccccagccttgaggtgccaggaaaggccttctagag

SEQ ID NO: 26107 - DNA, 120 bp, Homo sapiens
ccccgagtttgagaaaccctcctgtaagttgagattgagggatgaatacaaattggtggtgctgggggaggaggtcagggtggagagagtcataggtgtccaggaaagggagttatttgg

SEQ ID NO: 26108 - DNA, 120 bp, Homo sapiens
tggcgggcctgtaagaatgctgtacaatgtcaacacctccccgctccggttacgtctgagcagtgagttggaaggatggacgatgaagctgtggtttgtctccttcctccttcacaggag

SEQ ID NO: 26109 - DNA, 120 bp, Homo sapiens
caacgaataagtagtactaaaggcagtgactaattaggatggtttaggggtttcatgttaggaggaccagtcacattaggtgccagttattttagaatgaatctgtgttcaccttgcagg

SEQ ID NO: 26110 - DNA, 120 bp, Homo sapiens
cttcgggattgatgaagaagatatgcagagcttatttctcaccttttttttttttcctcggttttggtttcttagaggattaccatctgctgcaaaaacatatgaatgggtcatcgtcat

SEQ ID NO: 26111 - DNA, 120 bp, Homo sapiens
ggacggtcaaaggggtactcattcattatcagaagaagcaccgagacttcaaggccaatgcagatgtgatccggcagcatacggccaccattcgaagcctctgcgaccgaaatcagaaga

SEQ ID NO: 26112 - DNA, 120 bp, Homo sapiens
ctgcgtgcttgtctccccctctaatctggagcgggacaaaacgaaactccgagcactcaaatgtaggcagtgctcatatacctccccctacttctatgcactgaggaagcatatcaagaa

SEQ ID NO: 26113 - DNA, 120 bp, Homo sapiens
ccccgccctgaaagccacagtcacgtccatcatgcgatgggcatttctagatggcttgatagaagctggctaccactgcgagtggtgcatctactcccatacggagcccaacggtttgct

SEQ ID NO: 26114 - DNA, 120 bp, Homo sapiens
caacggaggcatccagaacactatgttgattacacctacatggctactaaactgtgggctgggccagacccatcccctccctctctcacaatgccagccgaagccaaaacctacagatgc

SEQ ID NO: 26115 - DNA, 120 bp, Homo sapiens
tttcgaagctgtttccatctgggacatcactaatcactaccaagcattccacccctgggccatgaatggtgatgagtcagtgctactggacatcatcaaggagaaagatgctgtggagaa

SEQ ID NO: 26116 - DNA, 120 bp, Homo sapiens
atccgaagagttggcaggccctgtgaattgtgaaaacagtatacccacccctttcccggagcaggaagctgaatgtccagaggatgcaagactgtcccctgagaaaagcctgcagctagc

SEQ ID NO: 26117 - DNA, 120 bp, Homo sapiens
ccccgccatatcctccaccccataccagtgcacggtatgccaatctgagtataacaacttgcacggccttctcactcattatgggaagaagcaccctggcatgaaagtgaaggctgctga

SEQ ID NO: 26118 - DNA, 120 bp, Homo sapiens
tgccgtctacaaatgcaggcattgcccatacatcaacacccgcatccacggcgtactgacccactaccagaagcgacacccgtccatcaaggtgaccgctgaggactttgtgcacgacgt

SEQ ID NO: 26119 - DNA, 120 bp, Homo sapiens
tgacgtggaggagacgagcaggatcttcaagcaagggtatggcgcctaccggtgcaaactgtgtccgtacacacacggcactttggagaaactaaaaatccactacgagaagtatcacaa

SEQ ID NO: 26120 - DNA, 120 bp, Homo sapiens
agtcgcccccgaagctgccagtccccctcgagcccgagatgaccactgaagtgagcccttcccaagtctccatcactgaggaggaggtgggagaggagcccgtgtccacttctcacttct

SEQ ID NO: 26121 - DNA, 120 bp, Homo sapiens
ttccggtgccagctctgcaagtacttctgctccacgaggaaggggatcgccaggcactaccgcatcaagcacaataatgtccgagcccagccagaaggcaagaacaacctcttcaagtgt

SEQ ID NO: 26122 - DNA, 120 bp, Homo sapiens
atccgcaaaggtctggcagcccactaccagaagcgccacgacattgatgcgtattacactcactgcttggcagcctccaggaccatcagcgacaagcccaacaaagtgatcatcccatcc

SEQ ID NO: 26123 - DNA, 120 bp, Homo sapiens
ccccgcccaaggacgactcccctcagctgagcgaggaactccggcgggcagtggagaagaaaaagtgctccttgtgctctttccagtcgttcagcaagaagggcatcgtgtcccattaca

SEQ ID NO: 26124 - DNA, 120 bp, Homo sapiens
aaacgccacccaggggtgttcccaaagaagcagcacgccagcaagttggggggctacttcacggccgtctatgcagatgagcatgagaagcccacactgatggaagaagaggagagaggc

SEQ ID NO: 26125 - DNA, 120 bp, Homo sapiens
agccgaggtggagggtgaagctcaggaaatcgagtggctcccattccgctgcatcaaatgcttcaagctgtcctttagcactgcagagctgctgtgcatgcattacactgaccaccacag

SEQ ID NO: 26126 - DNA, 120 bp, Homo sapiens
agtcgggacctaaagagggacttcatcattctgggcaacggcccccgcttgcagaactccacctaccagtgtaagcactgtgatagcaaactgcaaagcacagccgagctgacctcacac

SEQ ID NO: 26127 - DNA, 120 bp, Homo sapiens
aagcgtgccaaacgtcaggagaggaggaaacagcttttgagcaagcagaaatatgcagatggtgcttttgcagatttcaaacaagagagggtaaggatatgttttgatttcccttccccc

SEQ ID NO: 26128 - DNA, 120 bp, Homo sapiens
cttcgttgccagccaaactgctgcaggcttcctagtgacttagcttgccagagagctcaataagtcaattaaacatttcgagcttgattatctcccattctgtgctcacccctctccttg

SEQ ID NO: 26129 - DNA, 120 bp, Homo sapiens
caacgctcgctctttcctaaggcagtgtgggctgtctcttggtaccattagcacttctcagccatgtcttggtcttcagtgtttgctacatgaacctaacgtctccaggagtagatttta

SEQ ID NO: 26130 - DNA, 120 bp, Homo sapiens
gttcgttgtaattaaataactcccttgtaaattgcttctggaagacttacagcaaacatggttgtgtgtatcagaagggatgtgcggccttttgaccacgtggctcctttaaacatgcat

SEQ ID NO: 26131 - DNA, 120 bp, Homo sapiens
cttcgaaacctcccttcctcactctagtgttcacaatgaaagtagaattagaattcaaaaagaaagtcagctcttttcaaatgctaaatttctctaattcccattctgttatttgaataa

SEQ ID NO: 26132 - DNA, 120 bp, Homo sapiens
atccgtacacaaaagtcattgggcctgtactgtttttaatgtatataaatgacctatatcaatggatcagcagtgattaatttgatgacataaaagctgattagatgaggtaaacaaaaa

SEQ ID NO: 26133 - DNA, 120 bp, Homo sapiens
agccggatggtggattcctagaaacagctaagtctacaggatggaaaaacagctgtggggctagatagtagcctgtaaattaggccttgaatggtgtttgaaacactcatgtgaaatcca

SEQ ID NO: 26134 - DNA, 120 bp, Homo sapiens
ttccgtagtgagggatgtgaataaaacaagttgacatgctcctgttatttgcagtggtcaaatgcttgccgtcttgagagtgagccagtcttctctggcagagggaaacagcctgaaaag

SEQ ID NO: 26135 - DNA, 120 bp, Homo sapiens
acacgaatcctctatatattcatgatgatcagttgttggaaagaaaagcaacggctctatggtattggttttgtgtataagataatgggcaatgacatgtaattgctattctaaacaatg

SEQ ID NO: 26136 - DNA, 120 bp, Homo sapiens
atccggctatttccaagtctctgctttcagtacagaaaaatacacatataggcacagctgtaaaataacaaagaaactaggacagcgtagtttagctatgagatttgttttaggtctgag

SEQ ID NO: 26137 - DNA, 120 bp, Homo sapiens
ctccgaggtcagggaccatttcctattcatttctagagccctagcactgggtaggccattcaatagatatttcttaaattgttttgaattaggacagcaaaagcaaccgcacacaaggaa

SEQ ID NO: 26138 - DNA, 120 bp, Homo sapiens
ccacggagacaagtgggtaccttccttactttctgccacctcttcagagtacttctacttcctttgtttaatgatcctttttcaaatgcctgcttcctgcttattttcttcctctctttt

SEQ ID NO: 26139 - DNA, 120 bp, Homo sapiens
agtcgcctaagctagggaaatttgtctccttcctgactgtcctccagctgcccacctgtggccaaattcaccataacagctccgtctccagcacctcaaatttgcctttactctgaccac

SEQ ID NO: 26140 - DNA, 120 bp, Homo sapiens
tgacggggttcatgctgaggtgggatccgaagtcagaggagagggatgagtaggcagagaggtgaagggttggagctgctgctgagggctgtgtagaagagaactggtggaagtaaaagg

SEQ ID NO: 26141 - DNA, 120 bp, Homo sapiens
aaccgattagtcagtattatgctcttcatacgacagagaaagcttacccagagggtccagggtaatagatcttttgctgggacttccttcccaacatccctccacacacatacaaatgca

SEQ ID NO: 26142 - DNA, 120 bp, Homo sapiens
aaacgagagagagtcactctaggaatctgaggggacactacctttccccacctacctaattatgtggctttttgaattagggctggatagcaaacttgccttgtttctactcacaatttc

SEQ ID NO: 26143 - DNA, 120 bp, Homo sapiens
caacgctacaacagcttaaccacattgtttaaagagaggagctggggcagccccagtgcttctgaaatccatttaagatgtgtgaaaacatgagactgaaattctgacctttccctagag

SEQ ID NO: 26144 - DNA, 120 bp, Homo sapiens
tgacggggcatcagcctggttaagagtgcagtctctgaagccaagttgccttagttcaagtcttgactgctccatttatagtgtggccttgggcacttaaccttcacacacttcagcttc

SEQ ID NO: 26145 - DNA, 120 bp, Homo sapiens
ccccgtcaaattaatgaataaaggaggaaattgtgactctggcttgaccctgcgctcaaaattgagataggaccacatgtcagtagtaatatttaatcgtgtcatcctgagtaaaagtca

SEQ ID NO: 26146 - DNA, 120 bp, Homo sapiens
ctccgaattcactgtgggaaagagaagacctttagctttttaaaactaaccagccatcctgcaaccctgagaacctgaagtaagcattcctaagacattcctaagaaaaacatgtgcgag

SEQ ID NO: 26147 - DNA, 120 bp, Homo sapiens
ccccggcagccagaggggccatctgcagagaaccacaaactccatctcttcaattacccccaattcccagctgctccgggaacacatgagggcagaaaaatggcttgaaatctgtatgcg

SEQ ID NO: 26148 - DNA, 120 bp, Homo sapiens
gggcgtccttccagaggaggaaaatgacttgctttgaaagagttgaagaagaaaagtgcaaaatgttccagcttaacgtgaggggggagaaagtcagcagctgtgtactgccacgtccgc

SEQ ID NO: 26149 - DNA, 120 bp, Homo sapiens
ccccggctgcacgactagggcggccctgccagctacatctttctgttggatccacaggctgaggagggcgcctcttagcttaagtgggggcagatagtgggtgtttattcctagggaaag

SEQ ID NO: 26150 - DNA, 120 bp, Homo sapiens
agtcgagccagctcctctcggcccaggtgtgcctgtgggtgtgtatacctggatgtagagttgctgcagttcccacttattgaaatctgctttaccttcaaagacaatggggacctgaat

SEQ ID NO: 26151 - DNA, 120 bp, Homo sapiens
cttcgtctacctttccattttcagatttggcactgctacaccaagctccttgcaactttctgattgtgcaatttcatgaattcctgtcctgtgccctggtgcctttgcacatgctgttcc

SEQ ID NO: 26152 - DNA, 120 bp, Homo sapiens
cctcgggggatgggggaggaagagggaaacaaaagtggaaaaacattttaaaatatgaattttattttccatagcagtatatcagaaaactcaaatataactccacaactttttcaagag

SEQ ID NO: 26153 - DNA, 120 bp, Homo sapiens
taacgggagagaaaataagctgtcattatcggaatgatcaaacacagagagaaaagaggcagaggtaagtaaaacaccaattacagtgttgccaatctgtgtgaattgggattcttccaa

SEQ ID NO: 26154 - DNA, 120 bp, Homo sapiens
atacggagggggcagggaagagagagctgccaaaatacaagacagggaggcttagagaaattgccccttggcgctctggcagcagtttaatcagccagagccctgtacattcccatgcac

SEQ ID NO: 26155 - DNA, 120 bp, Homo sapiens
tctcggaaagtgacagaagaggcctgcacctctggcataatttgcgtctccccagcatctcactgttcctgccaatgacaaacaggaacccccgacaatttttcctctctctcctggcaa

SEQ ID NO: 26156 - DNA, 120 bp, Homo sapiens
gctcggtagatattgcatgaatgaaggacaagaaatttggaaaaatactgcattgtctactgttttcagaaatatttatgcagggtaattttaatgtctgccattttcccttgggtcagg

SEQ ID NO: 26157 - DNA, 120 bp, Homo sapiens
tatcgtgttacctactaggttcaagacacattcaggagtgttctgaaaaacataatagaaattgacagaaaaaagtgactgaatagactttcagaaaatatgaaagattgaatacagaag

SEQ ID NO: 26158 - DNA, 120 bp, Homo sapiens
cagcgcccagcagcactctgctccctttcttgtgctgagctgccactcggcttggccactttcctgcacagccgaggcattcatatttgaagtggacttggaaatggaagtgaaatgtct

SEQ ID NO: 26159 - DNA, 120 bp, Homo sapiens
acccgcaccctggcattgtgccctcctctctgtcctggtgcatgttgctgttctgattcatgcgtcccgtgaacaaggagcaattgctatgtggtttggaatttttcccacctcctttat

SEQ ID NO: 26160 - DNA, 120 bp, Homo sapiens
tcccgtgacccccttttcccctctaatttgggccaggaactcctctgggttccctcagctgcttctaagtatctgccataaaagtgaacaccctgaactgggattatctgcatttggtgt

SEQ ID NO: 26161 - DNA, 120 bp, Homo sapiens
gaacgagagaaaactggtgagctctctcaaattcagggctgtgcctttcatctctgtatccccagaacctggtgaagggctggaccaaagaccaaaggagatgctgaggcatcattggat

SEQ ID NO: 26162 - DNA, 120 bp, Homo sapiens
ttccggaacccttcggttctgaaagtggcctaagatggtcaatgaacagtgcctcaaaggcagctctgtttttccttcctcagctccaaagacttttccaccaggttctgaaagacttga

SEQ ID NO: 26163 - DNA, 120 bp, Homo sapiens
ctacggtaagatttaaaaaataaaatgagcctagggagaaaaatccaggcttgctgaactaataaatcagtgggagaggtgagcgcttgctctagtgaggcatttatgattggctgcctt

SEQ ID NO: 26164 - DNA, 120 bp, Homo sapiens
acacggcgagctcattcggtgagcagaaagcccggcagagcaggcctgcgatctggcagactgcggggtccagtccaggctgtgctaatctcttcatctttctgagtctcggcttcctta

SEQ ID NO: 26165 - DNA, 120 bp, Homo sapiens
ttccggggccacgatcgtcttcccctctttggcttgggctcctctggcatgcaggaaccgggtggcatgagctctaggggtgaagaaggtggggtgagcatcatcccgtgtgtcccgaag

SEQ ID NO: 26166 - DNA, 120 bp, Homo sapiens
gcccgagctacaaatccccgggactgaccttggtaatggagcggcgggacttgcggctgcatctgatcgggcaggaaggatgggtaattgggccccgggtggggatggaagccgggagga

SEQ ID NO: 26167 - DNA, 120 bp, Homo sapiens
aagcggcagggcagggtgacagtccctgctgctcagcacttcctcaagacccagggtcggggtagtcctgctggggagctgccgccccagggggaagtcgtgtgcagccggccggtggcc

SEQ ID NO: 26168 - DNA, 120 bp, Homo sapiens
cagcgcccaagtgggtgcacgaagagaccgcctcctgcttgatcttggggcacgtgcgcggcggcccgccgttgtagggcgccaccaccaccgggtggctgccgtcagggctgcctttgc

SEQ ID NO: 26169 - DNA, 120 bp, Homo sapiens
tgacgctgatgaccgacgggctgccgtactcgctgccaggggcgctcagcgacgccttcagcacgaacttgcccatcagcccgccacctggcggctgcggctgctgcggcggaatgtaca

SEQ ID NO: 26170 - DNA, 120 bp, Homo sapiens
caccgggtccaattctggccgcaggagctcggccacgaagccgcccgaggggctcacgtcgttgatgtccgccaggttgaagggagccgtcggagggggagcggactccctgccatagag

SEQ ID NO: 26171 - DNA, 120 bp, Homo sapiens
ctccgcccgtgccgcccggcgccacgcccgggtcgttcccggcccggatcggataggtgaagctgcaggtggagggcgcgctggcagggccgctgctcgacggcgacgacgaagaggagg

SEQ ID NO: 26172 - DNA, 120 bp, Homo sapiens
tgacgctgacgaggacacggtggcggccactgactccggaggatgggtcagcgaattggagagaataaagtccaggtccaggagatcgttgaactcctcggtctctctccgaggtagggg

SEQ ID NO: 26173 - DNA, 120 bp, Homo sapiens
gggcgccaggttgctaccgccgcaagccgcaccggctccgccgctctccaggtctgtggccacggtcgccgccgccaggtcataggggcggccgggaagcactgggggaagtcgcttcat

SEQ ID NO: 26174 - DNA, 120 bp, Homo sapiens
tcccgccagcgctgcggggacagggcgggagagacctgtcagtggtggtcccctgttgccacccgacatactgacgtgctggcgggccacgcgcgactgcaccgcccagacatggggact

SEQ ID NO: 26175 - DNA, 120 bp, Homo sapiens
cgatactcacgttattcggggcacctgcttgacgcagtgtcttctcccttcccgccgggccagacgcgaacgtggagaaagatgggagcagcgcgtcgctgacagccatgtcagactcgc

SEQ ID NO: 26176 - DNA, 120 bp, Homo sapiens
ctgcgagcaaggcagggagcggagacaggagagtcaggggcggctttcggccgtcgttccggcgcgtcccaccggtcctcacccctccctgctcccagcgccgcgcgcctcacctacctc

SEQ ID NO: 26177 - DNA, 120 bp, Homo sapiens
cctcggcagcccgaagcagctggggcacctgaaccccaaagtcaacgaagagaagaaacgaagccaaaacccaaaaccccaaattggccgagatccttcttctttggattaaatataact

SEQ ID NO: 26178 - DNA, 120 bp, Homo sapiens
gttcgagttggatttaagaagaggcagagtggtaccaccagtttgccccacgtgggtaagggagagattttctggcaagactgaagacattctgataccctcctctcccctaacatacac

SEQ ID NO: 26179 - DNA, 120 bp, Homo sapiens
agacgctgtctagctgtctcaggatcttgtcctgctcagggttgagcacaaggagaacacaatccttgctggccgggccctgttctggaatgactgagctgtccagcatggccagtgtgt

SEQ ID NO: 26180 - DNA, 120 bp, Homo sapiens
tatcgtgagccctcccttggtcaacttgaatgtcaagaaaccaatatcaaataaataaagagcctgcactccatgctgcaaaaataagcatgtccatttgcttgaaaaaaagattttttc

SEQ ID NO: 26181 - DNA, 120 bp, Homo sapiens
agacgaggcaggaccagctttaaaagaaggctgtaagctcagacaacaagtagcaaaagaaacactgaccactcacaggctgggtaattgcattcgttgcttctttttatttcttgctcg

SEQ ID NO: 26182 - DNA, 120 bp, Homo sapiens
tgacgggggacatggtcattgtcagggctatgactttgcctggtgctccatatacattgttatctcattctgttctcatagcaattctataaggtaggtggtatttgtattattttattt

SEQ ID NO: 26183 - DNA, 120 bp, Homo sapiens
cagcgcctggtgaaatgtggcaaccccaagaaaggaggggctgggaagtcacagatagttcccaaactctgaaagattctgagaagcagagtcaatatctcctctccacgaggttggctt

SEQ ID NO: 26184 - DNA, 120 bp, Homo sapiens
gctcggctgagcagttcagagaccttcagagtggcctcaggcaggtggccccagcttcttcgagagcgcaggagaggggcctgtggtttctctttcatgacatgcacccactgcgctggt

SEQ ID NO: 26185 - DNA, 120 bp, Homo sapiens
gtccgagaaccccctgcaggattcgtcttcgccccagggtgtatggatccccatcaggactggttgcatctctggaaatgacctcagtctttggaatatttgttctttttggcttatcaa

SEQ ID NO: 26186 - DNA, 120 bp, Homo sapiens
tggcgcgagcacatgtccagctttcccgccccccactgcatcattgtcccactgctgattaataggtcagagctaactttaaactggcatttcctgaccagcccctctccctgccttcga

SEQ ID NO: 26187 - DNA, 120 bp, Homo sapiens
tcccgcggcctccgcctcacactgtgttccaaggtgactgcgttaagtctggtcaaagcagtctgtgctattcctgagttggcagaataagggctgaggcagaggggtgggcgcacagct

SEQ ID NO: 26188 - DNA, 120 bp, Homo sapiens
gttcggactgtctcagggtgtttgagccaccgctggcctatctagtctcagaagcacataccagggcatgatcagaagggctgcgtggagagaggatgtgacaacaagtatgacatggtg

SEQ ID NO: 26189 - DNA, 120 bp, Homo sapiens
ctgcgactgtgtggtgtctcaaccatgcaaaataatgtagaagagtgggtcccaacatgaagatgttcttgatgttgactgagaaaggtaggatacaaaagttgagtatctctattatct

SEQ ID NO: 26190 - DNA, 120 bp, Homo sapiens
tgacgaaccaaggttcagtctgggaagcccgcgtctttagctatgatcccatactgtatctcactacggtgtgtggtaagccagtgcgtgtgaagtcctttctattcccttaagcaagtc

SEQ ID NO: 26191 - DNA, 120 bp, Homo sapiens
tcacgttttcctgccagaacaggatctgtcctatgagagttgacacatgaaagccaaatacgaaaaatcagggtggagattcacagtcaccttaaaaagattctcaggccaggcatggtg

SEQ ID NO: 26192 - DNA, 120 bp, Homo sapiens
aagcggaatggctctcttcctctctcccttctccctctgcatccccttcccttcctcctttgtttacctcctaaaggggagagtaaggcagagaagaaaacaaagggtaaggagaaaggg

SEQ ID NO: 26193 - DNA, 120 bp, Homo sapiens
aggcgtcctgacagtgctgctgggacaatatccttccctggagggacagagcaccccagccagctttcccccaggtcgctgtccccctcctcaagtcctaagctagagcctggcaaccct

SEQ ID NO: 26194 - DNA, 120 bp, Homo sapiens
cctcgatgtgcagaggtcaaccactgacctctattggaagccccgctccccatactggtgccagagaagaagcagacaaaaattcagagtcaccacctatggaatctcatccctgaggaa

SEQ ID NO: 26195 - DNA, 120 bp, Homo sapiens
caacggtgactcatccaatttcttcagctactgtgatctgcttatgcttcttcttacaggagtgctgatcctaaagggttgtggggctcctgcctttccttcccctcacacctttcccca

SEQ ID NO: 26196 - DNA, 120 bp, Homo sapiens
atacgaatttgtcgttatccacgacaacgtttatttgtgcccaacatgtatgtgtggaatgaatacacacaggaacaaacaagatacttcagttaggaagcatgtacagccttctgcttg

SEQ ID NO: 26197 - DNA, 120 bp, Homo sapiens
acccgacactaagagggatggaagacagggtcctgcccttggggactggggattctggcatcacagtcctgctgtcgatcgcatgtccctcagagcttcagtttcttcagctcttaagaa

SEQ ID NO: 26198 - DNA, 120 bp, Homo sapiens
catcgtaggtcaaaaatgatgggctattactctcatgatcatattgcactatatatgactccatcttagtggactgaagcaggagattctcctgctggctttgaagaaacaaattgccat

SEQ ID NO: 26199 - DNA, 120 bp, Homo sapiens
atacgcaacgtagtcactcactgcctgctcccctggctcagtgtgggtttgtattaataaacttcatggtcacatctcaggcctttctgcttctcagtaacttgttcaggcttcccctgc

SEQ ID NO: 26200 - DNA, 120 bp, Homo sapiens
ctgcgcccgcaaagcctaaaatatttactatctggtcctttacagaaaaactgtatgcaccctgctctagaatggttactactcgcttggatcacatcctggtaatccagtctggagcta

SEQ ID NO: 26201 - DNA, 120 bp, Homo sapiens
gctcgtggcttccccatgggtgccccgtcgctgccagcacgtggcttggctctcccccgtctcccaaggaaaaccgcctgctgcctttattgttctgggcattcccattcacgttttcac

SEQ ID NO: 26202 - DNA, 120 bp, Homo sapiens
ctgcgtggcttgtaaaatctgatgggatctctgcccaaggaggcatggctgcaggcacgtggaagtgccactcagaagaggtggtaacatgtgagtagagagcagtctgcagagagatgg

SEQ ID NO: 26203 - DNA, 120 bp, Homo sapiens
cctcgctttccgtacacttgagctatgatcattgagctcctgggtttcctgaacatgaaactcacacactgcttaaaacaactcattagcatgcctggggagagttgaacagttcaggct

SEQ ID NO: 26204 - DNA, 120 bp, Homo sapiens
aagcgaggtaaacagttccattacacatacgccacatgaggagtgagagatgtcagagctgggccagtatggaggcagctgaggtacactggaaagaataccagtgcttgatgccaggag

SEQ ID NO: 26205 - DNA, 120 bp, Homo sapiens
aaacgcgaggggttattacaaggcagcttgtgagaatcattctttttagtgccgtgtattgacaagggagccactctctggttagtactgggccaacaaagcttggcttttgacgtctat

SEQ ID NO: 26206 - DNA, 120 bp, Homo sapiens
tgacgaccttccctgtcgcctagcatatgaactggagtaatagtcctatgtgttgaatatgttgcccacaggactgcccctgcagcatgggcgaaaagttagaatttctttctctcaccc

SEQ ID NO: 26207 - DNA, 120 bp, Homo sapiens
tcacgtggaatgactcctacattcactccccgagctccaggcacacaggctttcttctgattcctggaacatcccaagcttggttttacatgaggctcttgtaagagaagctgcctcttc

SEQ ID NO: 26208 - DNA, 120 bp, Homo sapiens
ccacgtcaatgaaggactcatgaattgacttctagagtctctgttcaggacacagcgttttatggatctatgtaatgacttccttcccactgagcaaagaaacgaaataaagttgctaga

SEQ ID NO: 26209 - DNA, 120 bp, Homo sapiens
ttacgtggaagttaggcgccaggaatataaacatgaacaagataaaatctcaccctcttctgtagacaaggatagagacatctaagcatatggtgacagtattaacattttagtggtcat

SEQ ID NO: 26210 - DNA, 120 bp, Homo sapiens
ttacgagagaagacagaatagactcttgtttcaatgatactctggcctccctagttcttgttaacattcctgaggcaacattttggttgactctttcaaactggctgtgtgtgcttgtgc

SEQ ID NO: 26211 - DNA, 120 bp, Homo sapiens
tttcggtttgaggcaatacaggctgtgtagcaactacccaactttgccattgtagcctgaaagcggctatagacagtatatcaaccagtgagtatggctgtgttcctacaaaactttatt

SEQ ID NO: 26212 - DNA, 120 bp, Homo sapiens
attcgtatatcagtctttgcctgggcctggctctatgctaaactgtgtatagatacagaaaagaaggaagtgttttgtctctgccctcaagtaactgggagagatgagagaaggcatcat

SEQ ID NO: 26213 - DNA, 120 bp, Homo sapiens
cgtctcacattcatagtcctatttatttcttttaaaaactggaattagagcattaacccattttacatgattccttcaaggtcacacagctggtgttatggatttagaagttaaatccag

SEQ ID NO: 26214 - DNA, 120 bp, Homo sapiens
gcacgttcacagcatttttgctttgttgagtccaaatgacccaatgaagcagcaatccagagtgaggcaggaagaggcagagttccaggcatgtccagtgacccagcatcacctccatcc

SEQ ID NO: 26215 - DNA, 120 bp, Homo sapiens
tctcgttccaaaccaaatggtaattaagaagggatgcattttcagactgctgtggtctggtattcttctggcaacttttgaaggctgtcaaagctctgccaaagataaagagaaggaact

SEQ ID NO: 26216 - DNA, 120 bp, Homo sapiens
ctacgatgaactgggcactctgctaagtgatctacatacatggtgacattcaatcttaacaatatccctgcaaaataggaccttctagcctcatttttttaggaagatgatattataata

SEQ ID NO: 26217 - DNA, 120 bp, Homo sapiens
aaacgcttctagtcttggaagatctgtatttgccatgaattttattttgagtcatgactaagccacttattagcaatattggtgatcaaggtctcctacagcacatggatgaactaagta

SEQ ID NO: 26218 - DNA, 120 bp, Homo sapiens
aaacgtaagctaatttgtttaaagccaggcagtgaatacatggcacagttgggattaggagcctccagggtggttctcccacacctacctcgctgtggatagaggctgacatccagggaa

SEQ ID NO: 26219 - DNA, 120 bp, Homo sapiens
gagcggcctcaggcaagcagtccacctggtgccactcaatctcaccactcaccggggctgtcaagtcccttcttccaaaaactagtgtccagaggactggtccacaatgcccctgaagca

SEQ ID NO: 26220 - DNA, 120 bp, Homo sapiens
ctccggacaaaatgacttgctttagagacaagcagggaaaatatgatttgttgtagaattcctgttagtccagtcagctcccatcctcttgagaaaccggatttgtaggcacatgcactg

SEQ ID NO: 26221 - DNA, 120 bp, Homo sapiens
ccccgctctccttttgaatgggtaaagaagagccttggtcttagaaatacatgtgggtatgtttgaaagggtaataaacaatgcataatggaactgacatcaaagaactcctcttggaga

SEQ ID NO: 26222 - DNA, 120 bp, Homo sapiens
agtcgaatgctcgatactcagtttgccttggtaccaatgagctacaggtaaacactgtaagatcaaaggcaaaggtgggtgtacggaggagcgtgtgatgacattactttctcagcaaag

SEQ ID NO: 26223 - DNA, 120 bp, Homo sapiens
catcgaacaagaggcacgctgaaggtggcacgcactgagggaagaggatactgggaaggaaaggaataaatggccccattatgggccataccaatcctgcctgctttcttctccctccca

SEQ ID NO: 26224 - DNA, 120 bp, Homo sapiens
gcccgaacttgctgctgaatcaaagcatttccacaggctgaagctgtgaacaggataggccatcaacagtgagaggagctctgtgcagctcccatagagaaactttaaaattgacttatc

SEQ ID NO: 26225 - DNA, 120 bp, Homo sapiens
tttcgtgccacgacagagccatcatgaacagtgaacatgaaggatctccaccaagcttgatgtctgggaactattcaaccctcggtggaagtttgttgggttcccatgtttatctgagtt

SEQ ID NO: 26226 - DNA, 120 bp, Homo sapiens
aaacgaaatgagtgagccactacatcccaggggaaatgccgcttggatctttgagaagaggccaagggggtgcctgacaagacccaaagggaaccgttattatgggcaattcacagggtc

SEQ ID NO: 26227 - DNA, 120 bp, Homo sapiens
atgcgcacagagacattcatcaaattagctgccaaatctgctcgttcgcaatgaggaaactcattgtcaaggggatgggtgctcgtgtcagcctgaccagctgtgggcagcctacaggga

SEQ ID NO: 26228 - DNA, 120 bp, Homo sapiens
tttcgtgggcctcaccctgattagtggcagagaattaactggatgatcaaaatgtttagtggtcagaggcgggataacagatgacacttctgtctcattgcaggacagacttatcagaga

SEQ ID NO: 26229 - DNA, 120 bp, Homo sapiens
ttccgtaccaactccgttctgacagacacattctgaactacatttctgaatgtcaagtttggctgtagccaggactaattctggcccgtgagtcattctgattctttaaagagattttgc

SEQ ID NO: 26230 - DNA, 120 bp, Homo sapiens
cagcgtacaaactcggagcaagtggacgaggacgctgatgtggacactgccatggctgcccttgacgaccagcccgcggaggcccagcccccgtcaccacggtcctccagcccctgccgg

SEQ ID NO: 26231 - DNA, 120 bp, Homo sapiens
ggacgccaggtatcagctggccggggactgcgggaggaacctcagcctatggcccagtacctaccgggtgctgagcgccgacctgcagtagcccccgggggacgggttcttcactagacc

SEQ ID NO: 26232 - DNA, 120 bp, Homo sapiens
acccgaatgacagtggggaagtcagcctccgggggggctcagtgatgtgcccagggtcccctagctcataatgctggagcccaattcagagccctctcccagagccctgagccttccagc

SEQ ID NO: 26233 - DNA, 120 bp, Homo sapiens
agccggacatggattggacaggtctgctccggcctgtgtgctggggccaggagtgggcacatgacagaggagacacattagggtcaggctttcgtccctttaggaggggctggcaggtca

SEQ ID NO: 26234 - DNA, 120 bp, Homo sapiens
actcgtggagctggcctggctgccctggcccagcatggtaccctctctgcccccagagccggacaatgatgctcacctacgcagctcctctcgcccctgcagccccgtccaccaccacga

SEQ ID NO: 26235 - DNA, 120 bp, Homo sapiens
gctcggcccagctttgtccctggagcccgatgctacccctgtcagacagaggctgcggcctgggccagagtcagggagtagctgctgcttcacggcgtctccactgtgcgattggcccgg

SEQ ID NO: 26236 - DNA, 120 bp, Homo sapiens
ccccgaagactcggagggagctgctcagggccggtgagcgcagccagaagccctggccagtgaggagctcacaggtcctccctggtggtcccgccgcacctctgcatctcctgggcgtca

SEQ ID NO: 26237 - DNA, 120 bp, Homo sapiens
tcccgggctgctctcagcacttctcctgcagactgaagactctggactcattgctgattggaacaccaggaggaggttggatttctgccagtgggggatgtttctggaggcagctggtcc

SEQ ID NO: 26238 - DNA, 120 bp, Homo sapiens
caccgcgtcctgctgagcctgccccctggattggctgtaatttgcctcgaagttcagcagttcatcttcatgggaaatttgctgagcccccaccagggaaccggatgatgaaacagggat

SEQ ID NO: 26239 - DNA, 120 bp, Homo sapiens
tcccgagctgatgctaaagaagacagactttcccttcctcccagcagcagcagtgcagagcccacctggagggatgtgggggctgtgcagggtgcagcgctcaggtggatcctgggaagc

SEQ ID NO: 26240 - DNA, 120 bp, Homo sapiens
aaccgccagggcgaggtgcgaccatcatcaggatcaaagcagacggggcgtgggtggggaaggggctctgggaccagaccccccacactactgcgtctttgtttctatcagtctttgtag

SEQ ID NO: 26241 - DNA, 120 bp, Homo sapiens
tcccgcagaggccctgaggcctcacttttcggatcttctgtcccagatcctgctccctccctgctgagcctggggttcccctggcattggccccagccttctgaaagccggcgctgcagc

SEQ ID NO: 26242 - DNA, 120 bp, Homo sapiens
ggccgcacgctgcactgtcgcgacgcagagaggcttctgtgcaggctgggatcgggccccatgtctgtgctgtctagtttgtgttcaaaatgtcagaataaacacagaataaatgttccc

SEQ ID NO: 26243 - DNA, 120 bp, Homo sapiens
ccacggccacacagtcgtctctccttcactgcagttctgttactggagggaaggtgaggctctccgccacgcggacagcccgccaagccctggggctcacattgcacatcaccaggccca

SEQ ID NO: 26244 - DNA, 120 bp, Homo sapiens
tcccgtgacacggagccacaagttatattttattttaacacgagattaacatatagttacaaggtcaatacaagcctccagtggaagctctttatttggtttaattccatctccagagac

SEQ ID NO: 26245 - DNA, 120 bp, Homo sapiens
ccacgcaaagacctttcagctaatgttctcaaagacacacccatcagacacactgactgactctctaatgtgtgtgtgtgtgtgtgtatgtgtgtgagataagagttgagtgaaaccaga

SEQ ID NO: 26246 - DNA, 120 bp, Homo sapiens
caacgtcctgggattacaggaatgagccaccatgcgcggcctcttgctacagtcttttgttaaaatatcagagcactttcgacctcagaaaacagaatctctctatctgacctccacgtg

SEQ ID NO: 26247 - DNA, 120 bp, Homo sapiens
gcccggggagggcatggatgctctgtgccccctcccccacaccttgccctaagcatctcttcatctgtatttttaataatatcctttgtaataaaccagtaaatgtggtggccaggcgca

SEQ ID NO: 26248 - DNA, 120 bp, Homo sapiens
tttcgctatgaatgtttaaaaaaaaattcccattagacctcaaatttctaaaacagtctctattttattcacaaggcttcctcagaaagtctcacaaaaatccagtgggggatttcttca

SEQ ID NO: 26249 - DNA, 120 bp, Homo sapiens
ccccgtttattttgaagattctatctaagtgagtttttaaaataacttaagatctcaaacaggcatcacatcagaatgccatcattatatataatatgtatgcatgtacttacacgcaca

SEQ ID NO: 26250 - DNA, 120 bp, Homo sapiens
tcacgccaatattttagaatattttacccaagtagaatattttacccatgaaagctggtgccagaggtaccccacccagcaccatttggttggaagtggctgtgatcctcttcctgtagc

SEQ ID NO: 26251 - DNA, 120 bp, Homo sapiens
caacgagtcagtgtcacagaatttcaagataatgttctaaaaagtccagaataacccccgctgcctaggctgggtcacagacgtcttagaatcagatctacgctgcttttgttgtccaac

SEQ ID NO: 26252 - DNA, 120 bp, Homo sapiens
aagcgacagaaacaagatttgaacccacttccacgtaatacaaagatcaggaacaagctcttagccatgggctaggccatttactatcattgaaaattaaaataccttattaaatgactt

SEQ ID NO: 26253 - DNA, 120 bp, Homo sapiens
ctacgcagctggcttcacttagaatagagccaactccatcctgttggcttcacagagttggcaacactgattccaaccgaagaaaacctaaactactaaatttcgtttgttttcttaaga

SEQ ID NO: 26254 - DNA, 120 bp, Homo sapiens
cttcgagaagtctgtatacaaaaaatggaaggcaaactcccaaagaaactgatacactgttcagtgctcatggtcagattttaacttaagttttaaagcatttcctcaaatcgggttata

SEQ ID NO: 26255 - DNA, 120 bp, Homo sapiens
tctcgcactgtatagagagctcttctggccatccagtactcagaattaattgcaatgaattagaatgaagaggcaccattaacttttggtggaaaacatcggctcataaattgagactct

SEQ ID NO: 26256 - DNA, 120 bp, Homo sapiens
gaccgataagaaaaggaagaaattgttactggcgtttaaaaaacataacttgaacttaactaacaatttctgcagctgtttgtaaccactaactgcagattctgttagacaatatcctat

SEQ ID NO: 26257 - DNA, 120 bp, Homo sapiens
ctccgtctcaaaaaaaaaaaagaaaagaaaaaaagaaaaaacaaaaggcaagttcctcagagtcaaggatcgtgtgattatgtgctggcatctatacccgcataccttgccagtagatag

SEQ ID NO: 26258 - DNA, 120 bp, Homo sapiens
caacgggcaagggaatgaatggatacatgtgaatacttcacgacttaggaatcccaccagtgagttacttttttttttttgaggtggagttttgctcttgctgcccaggctggagtaaaa

SEQ ID NO: 26259 - DNA, 120 bp, Homo sapiens
caccgtgcccggcccacacttgagctttcacctcaccttttcaacatccgcttttgtgacattgatgtcagcgtccattttctcaaagtactgctgcgccctgtccgcctctttgcaatc

SEQ ID NO: 26260 - DNA, 120 bp, Homo sapiens
aatcgcgttcaaatcgccttttactctaaaatcagaggaaaataattatgaaaccataagagtcctacgagaagatgtaattttatctaaagctcccaaagagcattgttctttttcttt

SEQ ID NO: 26261 - DNA, 120 bp, Homo sapiens
gcccgcctcggccccccaaagtgccactgcacccggccaagaaatagcgagagcatgctgagcagtaatccacagtaggaactccatgtgtcagcatctcagtcctcacttccttgttaa

SEQ ID NO: 26262 - DNA, 120 bp, Homo sapiens
tgacgggagaggccaccggcttcagtacaaagggcattgctctgggaatcaagagaccatgtgcccggacagcatgacctcagcaaatgagccagtctgtgcttcccattcctaatgtgt

SEQ ID NO: 26263 - DNA, 120 bp, Homo sapiens
ccacgtaggccatgtgacatggaccacagtggcagcagtggaggtgataacaagtgtcagatcctggataaatctgtagagaagtcaagatttcctgatggcttgagctggggagtgtga

SEQ ID NO: 26264 - DNA, 120 bp, Homo sapiens
cctcggcctcctgaagtgctaagattttaggtgtgagccacttcacttggcctagacatgtggatttttaagttggggagatccggagttcagtttcagacatgttacatttcagatcat

SEQ ID NO: 26265 - DNA, 120 bp, Homo sapiens
caccgcgcccagccaagtttttagacatttctaagtggagactttgagcaagctgtttctggaattcaggagagaggtctggcttagagatccatatctgtgagtcattgccatatggat

SEQ ID NO: 26266 - DNA, 120 bp, Homo sapiens
tgtcgtgggaagaataccagtagcccgcttgagagctcgcacgtagcccattttcacatgaaagacaacattgcatgactaatagtgcagcattcaaataatcaacgtgaaacagaccat

SEQ ID NO: 26267 - DNA, 120 bp, Homo sapiens
gttcgaaaagcccctgacgtgttgacgagactgatatgcacacagggcactagaaactgatctggattctccacttataaaaattatttcattgtgtgatgttttacatgttattcactc

SEQ ID NO: 26268 - DNA, 120 bp, Homo sapiens
gagcgccccatcattatctcattatacatgtgcatgattccaaagccaccattcaaggaaaacccttaatcactgccctccgctgggctacccaatgtaccgcacatcaccaagtctctg

SEQ ID NO: 26269 - DNA, 120 bp, Homo sapiens
caccggagaaactggggtttacttttcataatccttcattattctagtttttttaaatctcaaaagctactaagccttatacatctttgcatttcacctgaaaacttagattttgcattt

SEQ ID NO: 26270 - DNA, 120 bp, Homo sapiens
ctgcgcccggcctctctcatttattttcaatcactcctaaccctgccttccttcccacttctgcaccctcaaaaagaaatgtacagaataatgcaagcaattgccgctgttttagcagtt

SEQ ID NO: 26271 - DNA, 120 bp, Homo sapiens
ctgcgtgatgaggaacctgccctggtttttggcatagggaagtagtttcctgaagaagtgacattaaagctgagactggaagagtaagaattagccagggcaggccgggcgtggtggctc

SEQ ID NO: 26272 - DNA, 120 bp, Homo sapiens
ctgcgaaagcccctctatccccataagcactgttctgatttctttttccatggatcattttgcctgttcaacaatgtttgtatgttctttaagcttagtaaccatcattttcgtcgccat

SEQ ID NO: 26273 - DNA, 120 bp, Homo sapiens
taacggttattgagaacttgcagggtgctcatttgctcagaaccctccaacagctttccatctgtcttggagtaaagcccaggtcttcccactggtctgcaaggcccatgtggtctagcc

SEQ ID NO: 26274 - DNA, 120 bp, Homo sapiens
agccgccttgctttttctcggacagatcaggctttaggctctgctctcgctgttcccacaggcaggaatgctgtctctcagaattccgtaagtctttgctgaaatgtcaccttctcaaca

SEQ ID NO: 26275 - DNA, 120 bp, Homo sapiens
agtcggtattgttattttttctcttttaccaatgagaaactgtgctcagagaggtaatgtaacctgccctaagcaggggattcagatccacgtttgtttgactccaaggcccatgtgttt

SEQ ID NO: 26276 - DNA, 120 bp, Homo sapiens
actcgataagtttgcatggtgctgtatgttcacagctcttagacctagactctagaagtcagctggtgactttcttctagggtttattctctcctggtggcaggtgagcccagtgatgct

SEQ ID NO: 26277 - DNA, 120 bp, Homo sapiens
tcacgctctggtccctgctagacttattgccacagatttggccagcagagggcgactttacctcagacgtgttgatatcaaccatttccccccctctacccgttttagggagagtgctct

SEQ ID NO: 26278 - DNA, 120 bp, Homo sapiens
tctcgtgctcattttgtgttgctcagcttgctctgaacccacgtgctgcggcactgcggaggagtggaggcagcctatggtgtcaagatgctgtcttcctgggaggagagctaggggagg

SEQ ID NO: 26279 - DNA, 120 bp, Homo sapiens
cttcgtgagagcagccaggggtagtttggagaaggaggtgttgagtcagttgtataaggaggaggttgggggtgactgctgcttattaagatgattcatttcatttccactcgtggttgt

SEQ ID NO: 26280 - DNA, 120 bp, Homo sapiens
cttcgctgtgagaacaggagggataatggattggagatggctatgtgtaaagcagccctgcctgctgatttaacacactttcaaaatagatgtgtcagtattcatttaaagcaagactct

SEQ ID NO: 26281 - DNA, 120 bp, Homo sapiens
gaacggtctctggatccatggtatcgtacacccagtgtggatattaacattctttaatgcaggttatgaataataaataaaacaggtttttgttaataaagttttgttgctgactctatt

SEQ ID NO: 26282 - DNA, 120 bp, Homo sapiens
tagcgagtgtggggtggctgtggtgactgccactgggaccatttattccacctgaggttggttggtagctgaggatcttagtaaggtgctctgtctggagtagatggcacagcaggtgag

SEQ ID NO: 26283 - DNA, 120 bp, Homo sapiens
cagcgttgtcccccagcatctgtagtaaagggtaacttcctttaacaggaacgcttttgtcatggcctgggcacacaaggcagtttctcatttttttccaccaggtgacagcatgggacc

SEQ ID NO: 26284 - DNA, 120 bp, Homo sapiens
gagcgaatctaagagcaggaagtcgcataggtaaaccagggttcacattccccattcttaggaagacatctgctaaggaagcacccatttctcatcagcaaatatcacaaatactctgaa

SEQ ID NO: 26285 - DNA, 120 bp, Homo sapiens
gaacgggattgtcattttggttcatgttcttttccctgaattgattgaggctgtgagatgcttttgggcatcactctgtaccctgaaaagtggttatgcttgcgacactcccagagccag

SEQ ID NO: 26286 - DNA, 120 bp, Homo sapiens
agccgtgttcccagctggagcctcccctgcagagaggtctcaggaatggcctgtgctggagctgccctcggttgtgactacagggcggctatgtgctgtgaagcttgcgggaaagcggga

SEQ ID NO: 26287 - DNA, 120 bp, Homo sapiens
agtcgctggtgctgggatctgtggccccattggccctctgtgccccctcagttcactcctgagatctggaggcaactaggagcacaaaggctacaggcaataatgtctcctattagattt

SEQ ID NO: 26288 - DNA, 120 bp, Homo sapiens
ttccgttttggggtgaatacagctttcagttttggggtgaatacagttttcagttttggggtgaatacagctttcagagagtgtttgtttggcttttactttgttgtctctggattcctt

SEQ ID NO: 26289 - DNA, 120 bp, Homo sapiens
actcgctgttccattccagtggaagtggctctaccaggtacgctgctcacagggcagaatgccagagaatttatgcctgaggataaagtcttgaagtgtaacttaacagttgttactaat

SEQ ID NO: 26290 - DNA, 120 bp, Homo sapiens
gaacgctgtcctcattcatggttgctgttcacctttcaccactccctgcattatttcatgtgggcgaggaacgtgtgtggaaatggggattggggactaatagacttgtctcttcaccag

SEQ ID NO: 26291 - DNA, 120 bp, Homo sapiens
ctccgagggtgagagtcgtggtctctgggagttgttttctcacctctggcttagaagggtcaggcagaaaccacaggatgtggggtcacactcactgtcccaagtttgggaacctgaaaa

SEQ ID NO: 26292 - DNA, 120 bp, Homo sapiens
aagcgggtgttctttttctgcactttgattcgccatctgggttctgtagggtgctctgaaggtgtgatctgccttctggctgatgtggaggaagagcaagcgccttcccaggccacagct

SEQ ID NO: 26293 - DNA, 120 bp, Homo sapiens
tctcggcagatattttaggcaagcatccgtgtgtcttcccatcttcaggagaaaggtaaatgcaccctaagtgttcacttctggacctttttcaagttcacttgggactgtgtgacagaa

SEQ ID NO: 26294 - DNA, 120 bp, Homo sapiens
tttcgcagaaatgtgtctcaatctgtgactaccaaagccctcctcagtccttccctcagagggacacatttgctgtttctcccgcaagcagatgttgtggatgaggcgatagactccttg

SEQ ID NO: 26295 - DNA, 120 bp, Homo sapiens
gaacgaaaggtgtgatgaaacctccctgctcggaagggtctccgtggaggtgtcctcatttcacatgctgggttttgcaagcgaggaagccaggcagtggaggaactagagagaggcagg

SEQ ID NO: 26296 - DNA, 120 bp, Homo sapiens
aggcgtgtgtgtggacaagcgctggagccgcagccctcagactggcacgggaacgccagcgttgggtgttcagattccacgcgtatgtctgggctcactcacagcatggccgagtgtctg

SEQ ID NO: 26297 - DNA, 120 bp, Homo sapiens
cctcgtccacactcgcatcaaagcccagcggctacttccaggggggatgtccttgggcccggcctcctcctcagtcctggtggtgacgacatgtttcatagtcccccttgattcagctgg

SEQ ID NO: 26298 - DNA, 120 bp, Homo sapiens
tctcgtgttcattcctggcagacaagggctgtgtggaagggaggaggagctggagtagaggagctggggacctcaggagcgctgccggggtggaaaggaggctgtgggcaccgcgggtgc

SEQ ID NO: 26299 - DNA, 120 bp, Homo sapiens
gtacgagcctggagtctgtgggcgtgggggtgcggcgaaggctaggacccactctctgctctgagactgcagctgccctccccttctgcagctctggctctctgggggtcagtgaagggg

SEQ ID NO: 26300 - DNA, 120 bp, Homo sapiens
tgtcggctctgatttctccatccactcctcaacaaccttgacaatggctctgcctggtaggagtttataccccatcctacaggtgaggacttggaggttcagaggggttaagaaacttgt

SEQ ID NO: 26301 - DNA, 120 bp, Homo sapiens
gtacgagcctgggcctgcaggcctggaggcagagtgtgatggagagagttcgttttaaaaattggccaaagccagatgaaattgtgaaggtcaatgcatgagaaacacgtttgaggatgt

SEQ ID NO: 26302 - DNA, 120 bp, Homo sapiens
tctcgcacttgctgggtgctggacactgggccgagcaccagtccctcctcttcctgctagatgcctgagtcccattttacagatgagcaaaccaaggctcagagatgcggggtcactcat

SEQ ID NO: 26303 - DNA, 120 bp, Homo sapiens
gaccgctgtacttcaccactgctcccccaagcccagcctgtgcccccttggtcagacccccgttggccctctgtcgtggaacccatgggaagacagacctcatgtgaagggggcttccca

SEQ ID NO: 26304 - DNA, 120 bp, Homo sapiens
gcgcagctaggctttgaaagatggatggggtttccctgggtggaacgggtgaggtgaggaagtgttcctggcagagcacaaaggcctggaggctggaacggtcagaggaactccagtggg

SEQ ID NO: 26305 - DNA, 120 bp, Homo sapiens
atgcgggccagtgacccagggaacaagctgtgcaaggactgcctgcgttcctaccctgccctgaaccctgagccctgaacccagagcccagagcccagacccaccgagggaggcagaggc

SEQ ID NO: 26306 - DNA, 120 bp, Homo sapiens
aggcggaggccctgttaatttcacatgcagttggaggctctgggaggagggggaaaatgggccgggctgggaaccagagcctgggaaggtcactctggcatctgggtggaggctgaggca

SEQ ID NO: 26307 - DNA, 120 bp, Homo sapiens
tggcgggaactgctgggggcacaggaccttgggcaggaccccccagccctcctggcattgtgcagtggggaggggaggcaggcacagtggttatggggtgaagaggacaaacatttccct

SEQ ID NO: 26308 - DNA, 120 bp, Homo sapiens
cctcgagtccccggctctgctgcatctgtcccctctctttctacatacgtgagtgtgtatatttctaaaccatgtcacaagaggctgcaggcgtcttgaccctcacccctgaatagctca

SEQ ID NO: 26309 - DNA, 120 bp, Homo sapiens
cagcgacagccatgataacagttttttcctgctgatctggacccgatccaggcatcttgagttacatttggttgcctcgtctgtttagactctttttttctggaacaatcctccaacttg

SEQ ID NO: 26310 - DNA, 120 bp, Homo sapiens
tctcgccccccattccttcgagcctgccctctccacctgagtgtccattggccacagtgtctggagcctgcgactgcccctcgcccgtcccgaggttcagcctgacccggtggcctggcc

SEQ ID NO: 26311 - DNA, 120 bp, Homo sapiens
ggccggcactgactgaggcaatcccctctctctcctgtcaggacgggcgaattgagttctccgagttcatccaggcgctgtcggtgacctcacggggaaccctggatgagaagctacggt

SEQ ID NO: 26312 - DNA, 120 bp, Homo sapiens
cctcggccctcaccaggcaggggtgccagacacccactgcagtgaccacagatggcgtcccagctgtgtctgcagagggcaggcctgggccctgggcaggtggccctcacacggccacgt

SEQ ID NO: 26313 - DNA, 120 bp, Homo sapiens
cagcgcagacatctgtgcttccaggtgggagggtttcctggaggcaccggcagcaggaaggagctcgctgaggcaggtggacagggagggctgggggcagaggctggcaggagccttggc

SEQ ID NO: 26314 - DNA, 120 bp, Homo sapiens
actcgggcaggtgcagacttgggccgcaggagggtcggtggggacccaagacccaggttcagtgccggacccacctctttcatagccattgctttgattcttgctttcagtcattcactt

SEQ ID NO: 26315 - DNA, 120 bp, Homo sapiens
taacgactgaatgcagccacgtgttggtaccagggatccactgggggataagatagatgggtccctgctctcagggcgatcagtctagagtggcagcaggatttaaaaaaaaacctcagg

SEQ ID NO: 26316 - DNA, 120 bp, Homo sapiens
aggcgcagagctggggatgagaggagctggggatgagaggagctggggagggggcgttaagggctccagccagggggcccgcgtgtgcgaggcccagtggagggaggctgagagggagtt

SEQ ID NO: 26317 - DNA, 120 bp, Homo sapiens
tggcggcattaggaggaatgcagggtgcgtggaggggagggaagatggaaaccagctggccagaactccctgctcagtaagactttcacacttcagtccatcggcagcaagaagaccctg

SEQ ID NO: 26318 - DNA, 120 bp, Homo sapiens
gatcgccaccaccttccaggcaaagctgaaggcccaatgtgacttccgctttggggttgaagcaaccgttgagaagtggatgcagcgatgtcaccctctgtggccacgctgggcatccag

SEQ ID NO: 26319 - DNA, 120 bp, Homo sapiens
gtgcgttgctctggcgggtcctagagtgaagatgccagaactccccagaccctcaagagggttccaaaggcagcatggaaaggcagtgtgggacggtgattggggccacaggttgtggaa

SEQ ID NO: 26320 - DNA, 120 bp, Homo sapiens
gagcgagactccgagactccgtctcaaaacaaacagacaaaaaccccatggaccctcaatgagaggcaggcgatggctcgacagcccctgccccacaacctcgccagaggtggaatgttg

SEQ ID NO: 26321 - DNA, 120 bp, Homo sapiens
caccgaagcactgaaagtaaatctgtgcacgggcgcctgtctttggaaataccaagctctggttcagaaggccgttgtgagggcagctggggcaatgtttccagcagagggtgagcttga

SEQ ID NO: 26322 - DNA, 120 bp, Homo sapiens
tgtcgtgtcctgaagcccagaccagggttcctgagactgtcctcgctgccccatttgtggccatgagcctcaggaagcccacctcccacccctgctcttccctctcctctctgggcactg

SEQ ID NO: 26323 - DNA, 120 bp, Homo sapiens
ttccgagtgacacccccaggttcagacgtcggggagacttcagcaccatggagcccttgatctgtgtagagcccagggaggctcacagtgtaaaggggcatggttcattccacggggctg

SEQ ID NO: 26324 - DNA, 120 bp, Homo sapiens
ggccgtttgcctggcagatgccaggtgctgggaacacagcagggagagaggactccctggggcatgtggagctggctgggtaaggaccgggggatggacaggagggctgatgtggaggga

SEQ ID NO: 26325 - DNA, 120 bp, Homo sapiens
gcacgggaggagtggagcgggaaagtggggaagggcaagattggacacagccgtgagtgcagggccgattgatgccttggcggacttggatttccttttccttctatgggctgtgaacag

SEQ ID NO: 26326 - DNA, 120 bp, Homo sapiens
caccgagggcttctgagcagcagtttggaactgtgatttaggcctggctgtgccttttgaatcagcaaatagaatcccctttggtggaagaggaacttgagaaacgggttgtagctgttt

SEQ ID NO: 26327 - DNA, 120 bp, Homo sapiens
cagcgggagggttttcttaaagtaagcccctctcctaaaccccaagaggcgggtgcggggcaaatcgtggcggttctagactgttcctgcttggagacaaactaagatccgtgcttcgga

SEQ ID NO: 26328 - DNA, 120 bp, Homo sapiens
acccgctggagcctggccaagggcacgctcacgttagcagtgcctcttcccatttgctgagcctttgctccatgccaagctgcgtgctaagctctgtgccaggggtttagctacctggtt

SEQ ID NO: 26329 - DNA, 120 bp, Homo sapiens
tggcgttgttacatgtctcgttctacagatgaagaaactgaggcttggggcagtgaagtgagctctgcctgagagtccccatagcccaaaaaggataaaggaagggttccagtcagatct

SEQ ID NO: 26330 - DNA, 120 bp, Homo sapiens
ggacgtggtggggatggccagggcaggcgagggaggacagggtgggacgagacggataaacacagagcagaggggccggggccacgggggaagctggtgtcagctcatcctcgatcattg

SEQ ID NO: 26331 - DNA, 120 bp, Homo sapiens
ctccgccaactggttgctgagaatgaaagtttgtttacagcaactggaatttagaattcctgaactaaaaatagtctgttattagagttcactgaggctgggcacagtggctcacacctg

SEQ ID NO: 26332 - DNA, 120 bp, Homo sapiens
gtgcgattattaaatgtcactaggccgtgaagtttccagggactgggctgtgagtcccgatggccacagccttcccagcactttacatttcccagctcagagcaggtgctgggtaaatag

SEQ ID NO: 26333 - DNA, 120 bp, Homo sapiens
ttacgagctgcagagagctatctccaggagtgtgtttagattagcgtgccttaactccctgttgacagatggcgtttatggttctctgcgacactttaggcttcattttttggcatgtca

SEQ ID NO: 26334 - DNA, 120 bp, Homo sapiens
cctcgcaccgagtcacccaagcaagggtgggaggcattttacagtggaaggatgggttggttcttgctcctggggagaactatctggccaattgcatgggaacttggttcctgccagggg

SEQ ID NO: 26335 - DNA, 120 bp, Homo sapiens
actcgcccaggtgtgaggctgggctgtcctaagcctcttccttgaggctgggaacctgggcaaatccactactcccagctgtggtgccagctttctgctgtgacagtctggccgggcagc

SEQ ID NO: 26336 - DNA, 120 bp, Homo sapiens
attcgaagccacccaccagggtccgaggatgcctgcatgcccgctatggttctgctgggagaagcctgggcaccgaggcaggtttctggtgcgggctgcctgagctccacgccagaaaat

SEQ ID NO: 26337 - DNA, 120 bp, Homo sapiens
tttcgagtctgtctgctctaatgtttgttattcttgtcagcccttgccggttttcctgccaggaccaggagtcacatcttgaaagtgaaaaggggctgcttgctcagtttgtttgttttg

SEQ ID NO: 26338 - DNA, 120 bp, Homo sapiens
tgccgatagcagaaagggaagaagcagggaaactttgattctactgttaagccaggagagctaagatatcctatgtgtagtgatggcgcggggactgaaaactggcctgtccccagtgga

SEQ ID NO: 26339 - DNA, 120 bp, Homo sapiens
gggcggtggggagacattctgagtcctggtccccgcctacaggcgctcccctcgtcagcatggcccccaggatccatggctacctgcaccagcccctgctggtctcctgctcggtgcaca

SEQ ID NO: 26340 - DNA, 120 bp, Homo sapiens
ttccggctgcagctgcggcgaggtgaagccaggctgggcgaagagaggcactttcagtgagtggcccacggcagctgattgtccccagccacagggctcctggctgctgaggccctggag

SEQ ID NO: 26341 - DNA, 120 bp, Homo sapiens
ttccgagactcccaccactgctgggccatcagctggtgaaggagccgggggccttcctcagctcctggaaaactcaacccatgtgtcagggcaggaaggatgggagcccaggactcagag

SEQ ID NO: 26342 - DNA, 120 bp, Homo sapiens
taccgcatctcacagaggaattggggtctctcgtttgggcaggattcaggggactgaagtcgggggggaccctgagtgggggtcagtgtgattgtgtgtctcccactgttccctgtttgc

SEQ ID NO: 26343 - DNA, 120 bp, Homo sapiens
agtcgggaaacagcagctgggagatcctgcgggcctccaaggccgaggagggcacgtacgagtgcacagccgtcagcagggctgggaccgggcgagcaaaggcccagattgttgtcacag

SEQ ID NO: 26344 - DNA, 120 bp, Homo sapiens
ctacgtcactccatgtctgagagagctggcggtggcttgcctgccgtgcctgggttccatttcctgtccccttccaaagctgcgcgggtcacactccagccttctcatctgcagctcccg

SEQ ID NO: 26345 - DNA, 120 bp, Homo sapiens
tcacggcccttctcctgtccctcccatgggccccagagcatcggatactgatgagaaacatcccagatgggcttcaaatctcatcaaaccccagctatgggctgcaggaaatggccctgc

SEQ ID NO: 26346 - DNA, 120 bp, Homo sapiens
tctcgccccctggaatgccatctgcctaaacaagacagctggcgcattagtcagaggaagcacccccctgtgcctgcatcatccgtttgattagcgctaaagagcatctgctcacagatg

SEQ ID NO: 26347 - DNA, 120 bp, Homo sapiens
tggcgggcagcggctaggaaaccagcccacccggccaggccagctgcagggcagccagggccagcagcactgatggaatggggctgttcaggtgatggcacccggctctggctcggtgcc

SEQ ID NO: 26348 - DNA, 120 bp, Homo sapiens
ccacgccatcgtgggctcccggcatttcagagacccacaggtcttctgtgagtttgtggtcccgcctcctcattttacaggtgagccaactcaggtgtggcttgggggcctgaggtggcc

SEQ ID NO: 26349 - DNA, 120 bp, Homo sapiens
ctccgccctgagcccagggttcctcctaacagcctcccttcccttttagagccaagatcccctgggcgttgagtccatgaccccttagctgtgtgtccttggacaagtggaggtgaactc

SEQ ID NO: 26350 - DNA, 120 bp, Homo sapiens
ctccgagcctccatttactccttcacgaaatgggaatgacagcctgcttgtgctgtgggccccggggtggatagtcagtggcactgtcattctttcccttccttacaggggagccccagg

SEQ ID NO: 26351 - DNA, 120 bp, Homo sapiens
ggccggaaatttggcgtggccacactcaacaccagcgtgatgcaggaggcacactccggggtcagcagcatccacagcagcatccgccatgtcccagcaaacgtgggtgagtggaaggca

SEQ ID NO: 26352 - DNA, 120 bp, Homo sapiens
cagcgagcatcctccagaacatgctggacctaggaggcgcagagcctgtgccccgagacttgctcaaggcctgatgaccagagcacgtctgaccatctctcaaagctgagtgcaatccaa

SEQ ID NO: 26353 - DNA, 120 bp, Homo sapiens
aaacggtcagtgttctgggggtgcgggcgctcagattgtggtttcccaagccaccgatggctccctgaggcttttccccatttaagttaaagctcaggctgatggaagtggagggatctc

SEQ ID NO: 26354 - DNA, 120 bp, Homo sapiens
tgacgggaagcgggaaacatggagaattgaattgcctagaaaacctagaggactaagaagagtcacctgcacacagagctctcatgtacggtgtctgagcgatgaatgctctgagagact

SEQ ID NO: 26355 - DNA, 120 bp, Homo sapiens
ggacgtcactgtctctcccttcccaaggaatccctggcccctcgtgggggtccaggaggggcagtattcatggagtcttcactgaaagtagctcctctgaagctgcccttggccatggtc

SEQ ID NO: 26356 - DNA, 120 bp, Homo sapiens
tcccgcatgagcagtgtggggtcaggggattttgctggggaagtcactctgagctggctgtcagcagacagcagatgaagcgagacgctgcccagacatggctgcttattctagctgcag

SEQ ID NO: 26357 - DNA, 120 bp, Homo sapiens
gcccgtggaccaggctttgttccatgaaacagacgcacagagaggctgggaaggtggtgcccatgcacaggggcctggccagctcctgtgaaccttgcaaagctggcaccgtccctgact

SEQ ID NO: 26358 - DNA, 120 bp, Homo sapiens
gagcgggtgtgttccccttgcccagtccatggccccacctggtcctgcgtggagggcggggcatcacatgaagaagatctgagaatccacgtccagggccattttttggttcttttttca

SEQ ID NO: 26359 - DNA, 120 bp, Homo sapiens
aaacggtttggaacaaaccggggctggtccagaagggatctgcaagttagaaaagttggttcacttcaactcagcaaatatataatgacagtctgtggagtccctggctccgtggtgacc

SEQ ID NO: 26360 - DNA, 120 bp, Homo sapiens
ctgcgtgctggggaagcacagattcttgtgccctctgtgaccttgagcctgccactgacctctctgagccctgctggctgcctccccaataggaatgacaactcctacttcatgaggttg

SEQ ID NO: 26361 - DNA, 120 bp, Homo sapiens
tcccgctgaggctcccagggccctgcctggtgcttggcaaggagcagttctgatgggggatgtgtcagctgccagaggctcagagccaaggcccctcccacatctcctgcctgcgtgcat

SEQ ID NO: 26362 - DNA, 120 bp, Homo sapiens
agccgccttccctcgatgctggaggatcaggtccaagagatgcctctccccgaccagcctaggactgcagtcagcattcccaggccccagtgtggtctgtggggctgtgtgcagagtgtg

SEQ ID NO: 26363 - DNA, 120 bp, Homo sapiens
gtgcgaggtcagggttcccgggggtggcaggcactgaaggtgaacatcctgttcccgaccttcagtggcagcttgcccaggagacaaggctgtccaaggccaaggtcggggctgggctgt

SEQ ID NO: 26364 - DNA, 120 bp, Homo sapiens
cctcgtgtggctgaaggaacaaggctatgacgtcattgcctatctggtgagggagcgacctgggtgtctgtcttcctgcgtgtcctgcaacctgtcctgtctgccccctgccagcctctg

SEQ ID NO: 26365 - DNA, 120 bp, Homo sapiens
caccgtcactcattcaagcctggcctcttctctcgaagcctgtcttgaactggaactaggaaaatagcttctcgttgtactgcctcactttctccatctgcaaattggccatccttgaga

SEQ ID NO: 26366 - DNA, 120 bp, Homo sapiens
aggcgcggggagggcacagaagtgaacttggcagtgctgctggcttagcctgcttgcagagaggcatgggctgggacctgctgccagccctgggaaggcacacagtcttcccatctccag

SEQ ID NO: 26367 - DNA, 120 bp, Homo sapiens
ccacgtgcagagccccggggcagtccccagaagacaggtaaaggccccagctctttcttacaacctgcagctccacgggtgactatggtgggcccagaatgtttcaggcaggttggcagc

SEQ ID NO: 26368 - DNA, 120 bp, Homo sapiens
ctccgcagctacgaggctggaatcctggagaaccccaaggtaatcccccaaaccccatctcctcccagctggccacctttggtggtagcagctccatgccgatgctgtctgatgtattta

SEQ ID NO: 26369 - DNA, 120 bp, Homo sapiens
tcacgggggccagccgtggggctggggccgagccctgcctgtgttccccgacccccgcactggcccccctctgcccaccgtctcctcgctgcatttgaagacctccccccgcccttcctc

SEQ ID NO: 26370 - DNA, 120 bp, Homo sapiens
atccgtgttgcacacccgccaccaccggccaccctgatccggtcccaagcttcccgggcgggctggactgggccctcagctctgtttgaagtttcgggtttctctcccgggggtaggggg

SEQ ID NO: 26371 - DNA, 120 bp, Homo sapiens
tcccgggcccagccccacaccccggggaggctggtttggaggcgggaaaagtgtgctttttgaggggatgcagctgggcctgggggaatcaagaagaccagctggaggggagggtgcccg

SEQ ID NO: 26372 - DNA, 120 bp, Homo sapiens
gagcgccagagccccgcccaggatcccccagggcccgggcgtctgtcactctcacgcccgcgtgccgccccctggtcggtgttggctgtaatatcacatggcagccaccatgtctgggga

SEQ ID NO: 26373 - DNA, 120 bp, Homo sapiens
gagcgggccgggggtggcattgtcctggctcagttcctaggacactggctgggagcatcctcactttatggttgaggaaactgaggcccgggcaccggctgctcagggcgagggaacggg

SEQ ID NO: 26374 - DNA, 120 bp, Homo sapiens
ccacggcccctccctgtccaaacctgtcactcaggagagctgccacccttgccccctgggggctgatggcccctgtgtgtggctgctgcctgctggtcacaggtttttctagttcatgct

SEQ ID NO: 26375 - DNA, 120 bp, Homo sapiens
ggccgagcctgcagggtggcttccaggcagggcatcctctcaggcccgtgggccccaagcatgctgggcaaccactcccggccattctccaagcagcctatggcctctgcaagcagccta

SEQ ID NO: 26376 - DNA, 120 bp, Homo sapiens
cctcggaccgtgcaggagggcatccggggcctggagcaggttactgagctacggtgggcaggtcctgcgccctcccaggcctcctgtctcatgagggcattgggtggagaagtcagtact

SEQ ID NO: 26377 - DNA, 120 bp, Homo sapiens
acccgagtctaaatcccaacttttcttcttattgctgtgcaacctcgagcaagttacccaacctctctgagcctccagtactccttgcccaaagtgggaaaacacagcacctccctccta

SEQ ID NO: 26378 - DNA, 120 bp, Homo sapiens
aagcgcttggcctgtctcagggcaagccctcagtcatgcagctgggggtcccatgctacctcttcatgggaggaagggtccaaggtcctctcagggacccctctcaagaaaggctgggct

SEQ ID NO: 26379 - DNA, 120 bp, Homo sapiens
catcgttcctgctgagaggcccggggcacccagagtcccacccaggcacccagagtcccacccaggcacccagagtccagtcactctggaaagaagtttgccccagccatgcagactccc

SEQ ID NO: 26380 - DNA, 120 bp, Homo sapiens
caacgtcaggacgcacccttgcatccctggacctggcagccctgtccccctcgggatgagctcaggggaacagagcctggggaacccgtgcccctccccctctccaaaagaagccaggag

SEQ ID NO: 26381 - DNA, 120 bp, Homo sapiens
ctgcggaagggagggcttgaaggcagatggctgagccattttctgcctccgtgagggctgattgaagggcaatgaggcagctaatgcgaagaaagatagaaatttacttgctttaacttc

SEQ ID NO: 26382 - DNA, 120 bp, Homo sapiens
atacggtccacagtgaaagagttcattcagtcgccggcccgccatagctgatggatgaataaaccatttgcggcatcgatcatgcctctacatcatggtttagttcatgggccatttgct

SEQ ID NO: 26383 - DNA, 120 bp, Homo sapiens
tctcggggcctgtttcatgctttctttcgccctctccccctagcccccaccccgactctctctctctctttttcttcactctcttccctcccccgcacccccccccccccacagatgaca

SEQ ID NO: 26384 - DNA, 120 bp, Homo sapiens
tcccgctgggagggataaatagatggcattgatacttggcaacaaactatttgtcattagaactgggcttttaggaaggagagtaaaaagaaggcaggcgctcgagccaccgcggaatgc

SEQ ID NO: 26385 - DNA, 120 bp, Homo sapiens
aatcggcgctgtcaggtgcctgcccgacagctgcctctgacttccgctgcggtctgcagaaactcgtcctccagtcttcccatcccctctccttccaaatgcacacactgtcagcctcca

SEQ ID NO: 26386 - DNA, 120 bp, Homo sapiens
cttcggtctggggctccctcaggaagtgtggcgggagagaaagtgacaagcaacgcattgaaaacagttgacagtcgggcccagcgcaggtggaggtgggagagagctgggcttgggtgg

SEQ ID NO: 26387 - DNA, 120 bp, Homo sapiens
cctcgtaccggcaccctggttggaggcttgggggagtcccaggcagctggagatggggctgtggagttgtgtggtcaccccaagatccagtccagttcactttacctttttgctgaggat

SEQ ID NO: 26388 - DNA, 120 bp, Homo sapiens
acccgtctgtgcccagggaatgctgcagttggcagggtgggccagccctgatgcctacctgtggctgtgatgctggctggctctggccacaggcctcaccctgtttctcagcccaggtta

SEQ ID NO: 26389 - DNA, 120 bp, Homo sapiens
tggcggaaagagtccctgtgtttagcttccaaagcatggtttggagaagccacctctcagccttggctttccctgtggtccatagaggcatcaggctgggggtccctcagggcccctcct

SEQ ID NO: 26390 - DNA, 120 bp, Homo sapiens
catcgtaccttggaggtgggggtggaggatccaccacagtccctgtcttagaaggatcaattgtcctggtttgcccaggactaagaggtttcttgggacaaaggactttcagtgctaaaa

SEQ ID NO: 26391 - DNA, 120 bp, Homo sapiens
gctcggtttctaaaacaaggtctgttgaagggatctgaggaggttggtggtctagtttggtctagctcttcctaagcactgactgcacagaaaggggtggccagcaaaagtctggtatct

SEQ ID NO: 26392 - DNA, 120 bp, Homo sapiens
ggccgtggaggtgtggaggagggaggaagggacatcaaggaggtacaggagcatgggagtgactctgcagagagttccacgcacccaccggcttcaaggcctggtgaaggtcagggcccg

SEQ ID NO: 26393 - DNA, 120 bp, Homo sapiens
caccgacccccgctacccctacctcgagaaccttgagtcagctttgtcccaaggctggaattctgcagacaagggtctgattcagagcaggacatgacaagggaccccatcctctcagag

SEQ ID NO: 26394 - DNA, 120 bp, Homo sapiens
ccacgtgccctaagtgcttagcacaaccataattaatgaaggcaatgggtgattgattgcttcggtctggcccctccctgtggacaccactcttgctcttccttccttggcacctggccc

SEQ ID NO: 26395 - DNA, 120 bp, Homo sapiens
tcacgcatttcacaagtgcaaggctgaggctccgagtgcaggaatactggcctgggctctctggtggcgggtggcggaaacaggacgcaaaccccagtcagctggctggagtgactgcca

SEQ ID NO: 26396 - DNA, 120 bp, Homo sapiens
tctcgctgtgaatgctggaggcctccctgcagcttgcgaaatgcccttgtgctattgcaattcacaccccaaggcctcctgagccttcaggtcactgcatgccatccacacagtcccaag

SEQ ID NO: 26397 - DNA, 120 bp, Homo sapiens
ggacgagttacccatttacagacagagtgctctggttggtggaattcatagggctagttctggggtggctgctcctagcctcctgccacattgtgtagcagggaagaggctgctgtgtgc

SEQ ID NO: 26398 - DNA, 120 bp, Homo sapiens
agccgacgtgcagggagggtttggacccacacaggggaaatgccctggcatctgggaggtggggctgcttctggccccagcagtcctcccttcaagcagaggccagggccaggctgagct

SEQ ID NO: 26399 - DNA, 120 bp, Homo sapiens
atgcgaccttgactgctgccctgccctgccctgccctgccctagacaaaccccactttcctgtccatctgcccatagcatcctcagaagcatgctttgatagccgacagtaacagagggt

SEQ ID NO: 26400 - DNA, 120 bp, Homo sapiens
caccgggtgcctctgatacttgccctcccctcccgctaagccacagggactccactatgagctcctttgcagggcaggttaaacaaggaaatagcatagaggtggagagaagcctttgtt

SEQ ID NO: 26401 - DNA, 120 bp, Homo sapiens
ccacgtggatctccatggcccaggagggtggtgcacgtcatctgaagtcactcagacctttgatcctctgtgagtcaccagtaagagtgtcagctgtacctgcctcacagatgcagtgaa

SEQ ID NO: 26402 - DNA, 120 bp, Homo sapiens
atgcggctcaggcttagaccctggcatgcaggaagagccaggggcagtgccagcagcaagcacactcagcccagggccggtgtgctcaagggcaaacagggtcgtttgtcaccagcagct

SEQ ID NO: 26403 - DNA, 120 bp, Homo sapiens
ccccgggaacaggctgagtggttaagtaactttccaagggtcacacagctaggaggtggtggagctgagtccggagggcctgtcctgctgtgggttctccatcaccagctcccttctcat

SEQ ID NO: 26404 - DNA, 120 bp, Homo sapiens
ccccgagagatgttgaagcccgcccatctgcccagggtcctctcccttcccctccgtcacctccacctcccctgcctcctgcgccctctgtttgtattttatgactctataaaccctttt

SEQ ID NO: 26405 - DNA, 120 bp, Homo sapiens
aaacgctttgtcttcaacaatgacaaacaatgttttccccctaagataaattaattacattatcctgattggagggcaggaggggccagggcgggagagggaatagaaaaaaaggcaact

SEQ ID NO: 26406 - DNA, 120 bp, Homo sapiens
tttcggacctaagtgctgccgaaggccgccatttgccagacagcctgttaatctggcagtcgacccctctccagcaaaaactaggaatccagaagtgccgcctgggtccgatcctagcca

SEQ ID NO: 26407 - DNA, 120 bp, Homo sapiens
caacgcacagccctttctctggacatcacttttactcacagcccacagggagcttctatagagggtggccatgagtgaccctaggacacttaccacagctgcatggcctaaagcagccta

SEQ ID NO: 26408 - DNA, 120 bp, Homo sapiens
gcccggaacttggcagcatttctcattgtccacaaaccaggccctaaagcagccatgtttgtagtgtggccctggccccccttggtcatatctgattggaccgtggatggacacctgact

SEQ ID NO: 26409 - DNA, 120 bp, Homo sapiens
actcgagctggccaatcagaacccgcaggaattgggcctcggcacgtggccgaagtgaggacatgtaacacaggcactcaccgctgggatgctgtggacctggggcacagagcaggtgta

SEQ ID NO: 26410 - DNA, 120 bp, Homo sapiens
tggcgtccatatttctgtactggtgcttcatgaaagctggtggcatctcttggcctggtttccctgacacctgatatcataacgaattcaggactccagctcagtgagagagtttctgct

SEQ ID NO: 26411 - DNA, 120 bp, Homo sapiens
tgccgcttgctctgtgctttgccctggttctgaactcagaacctgacctcagggatcgcttcgccactccgctgcctgtgtccatgagggtttctcgcaaaagaagttttacctttaaaa

SEQ ID NO: 26412 - DNA, 120 bp, Homo sapiens
caacgggacctttagaagcaagaagatgcattgtcaaccagcacacaccattagtggaaacaggactgattttacccagcatttttccttttttacaggaaaatgagtgtagttccattc

SEQ ID NO: 26413 - DNA, 120 bp, Homo sapiens
ttgcgaagactgaggagaggttcctgttcctggagttggacatagaagttggccatatgagtacccagcgcccctgatctaactgctggttttcatttttaggcagcaaatgggaatgtt

SEQ ID NO: 26414 - DNA, 120 bp, Homo sapiens
ttccgaagggaatgaaactgcaatcacatgtttcagccttgggtggactccagcatttgcatggaggagggagatgatttatccttcctaagcatctgccagctcagagttgactctgga

SEQ ID NO: 26415 - DNA, 120 bp, Homo sapiens
atgcggctctcagcagcccatctatctgtgggatgatagtgtgaacattttcatctctggtcattatgagtgcctccaccgtggctggcaggaatggtgtcatgtgcgtggcacctgtaa

SEQ ID NO: 26416 - DNA, 120 bp, Homo sapiens
catcggccctttgacatcctttaccaaacaacgcagtggaccagaacccacggtgcggcctcattcccccagctgaggaatgctgagcacctctcctctgtgttctcatcatttcaagac

SEQ ID NO: 26417 - DNA, 120 bp, Homo sapiens
tgtcgttgacattctcctttggtgtgtttcttttcctccccactgccctatgtggccaacatacctccctcaggaatgtctcagccccaacattattcaggggctgagtctgtggtgagg

SEQ ID NO: 26418 - DNA, 120 bp, Homo sapiens
cttcgtttgctttttgctagcattgttttgctttgctttttcttctttttaaatgtcacggtctgctttttttcctttgtctctttactgtccagtcggagaatgacagcagtgagtttg

SEQ ID NO: 26419 - DNA, 120 bp, Homo sapiens
aatcgatcctttgcgacttagctcatgtccttagaataactttccccaaagacgtatttctgaatgccctttttagcatgttgtaaggtgcatttggttctttgtgatatgtttaggatt

SEQ ID NO: 26420 - DNA, 120 bp, Homo sapiens
caccgttgtctttgtgaaatgggcttgaaaggcagttgctcattcttagtgtccgctgcacatggactgctctggtgggtccgtgacgaggcctgtggaggtaggaggctggatcctctc

SEQ ID NO: 26421 - DNA, 120 bp, Homo sapiens
ggccggcgaggggggcaccagggggcgtctcctcccccgtggccaggaggagcatatgtgcgtgttcctcatgactacagctgctgtggagcagtccttaacaatgcatccaaggagggt

SEQ ID NO: 26422 - DNA, 120 bp, Homo sapiens
taacgcattcatttcagccactgagcctaaattactgtttgctttctttctgcctttcttttccaccccacccgaaatggtaagaatggtaaggatgaagttagtttatccgtgctaatg

SEQ ID NO: 26423 - DNA, 120 bp, Homo sapiens
ttacgttttattatttattgatcatttctaattgtttattgatccaccatctgtactagagtgctagaaagtcagaggttgagaatgtgaaaaagcatgggttaggcttctttaagactc

SEQ ID NO: 26424 - DNA, 120 bp, Homo sapiens
ggtcgtggccgtggcgactggagcgtgggagcccctggtggcgtccaggagataacatacacggtgccagccgataagtgtggcctcgtcataggcaaaggtaagaggcagctggggttt

SEQ ID NO: 26425 - DNA, 120 bp, Homo sapiens
tcacgggacctccagaacctttggtgaggtccctttgctgctgcaggctggggctgcccggtctggaggcagtagccaccttctgccgaaaccctgcttggcatggttctctgaggctgc

SEQ ID NO: 26426 - DNA, 120 bp, Homo sapiens
tgacgggcctgttgtgaggagcaaagtgtattatttctggtgagtatgaagagacagcagtaaaactccctgcctgttgagggcagcttagcttggtgaaaagataccttgcgcaagatg

SEQ ID NO: 26427 - DNA, 120 bp, Homo sapiens
aatcgactgattggtaattaactcacctccaaggaacttagagggacggttgagacagtatcctcagtgaaaattccttctcgacagtgtgtcacttgtttcccttaccaggtttgagta

SEQ ID NO: 26428 - DNA, 120 bp, Homo sapiens
atccgcgtaacatgtgaaaatggtttttatcctttctgcatatttaccgtgagtcacggactctctgtggagggaaataaacattgatgtgttagttttttctgggcattttggagaaca

SEQ ID NO: 26429 - DNA, 120 bp, Homo sapiens
ggccgaggctgtggggccttcccagtgtagcagcagggctcggcttccgtggggctctgagccaggcctcgctgccagcgggggactcccgttgtcactgggtttcgtatttgccttcat

SEQ ID NO: 26430 - DNA, 120 bp, Homo sapiens
agtcgtctctccagagtttctcaaatttctttgatcaccaaataccccttagctgcttgaggggcgctcgtattggataggcaggacttggggatgcttcaccagcagagacctccagag

SEQ ID NO: 26431 - DNA, 120 bp, Homo sapiens
ccccgacactcacctcccaggagctgccctcgtccctgctcacagacactgtgggcttatgctcttgcaaaatgcaagaaaccgtgttgtcttttagactgaaccactcagagttggtat

SEQ ID NO: 26432 - DNA, 120 bp, Homo sapiens
gttcgtgttcatttgccggcaggtgtgcgggctggtgagtgtttggggatattgcaggctgcaccagatgctgccagaagtcccacactacccaggccgtcagcctgaccgctgtgagac

SEQ ID NO: 26433 - DNA, 120 bp, Homo sapiens
tgacgattagctagatctagatttcttggccttttgcaaactattttgtcggcgaagttttcatttgcttgtgtctctaaaccctgactgagcattgttgcctcaccatgacaggttctc

SEQ ID NO: 26434 - DNA, 120 bp, Homo sapiens
cctcgtagttggtcctccacaaagtcatcctgagtgattcctagaaaacagtgatgagaacgaagcagtaactggtctgtgtcccatgcttgaatagcagcctaaagaagcctaattagt

SEQ ID NO: 26435 - DNA, 120 bp, Homo sapiens
gggcgcctgggcaagggagagaggagccccacgcagccaggcccatctttccttggcctctggcctggacagacacagagcctccctggcccctgctggatttccatgataaacacagca

SEQ ID NO: 26436 - DNA, 120 bp, Homo sapiens
ttacgatttcacgtccagccagggggccactggtggggcacttctgccccccatcaggtagaagaatggagcgggctgctgaatgagtctatagacagccaccatgtgccaagctagtga

SEQ ID NO: 26437 - DNA, 120 bp, Homo sapiens
ccacgaggttttgtggcgcctcctcaccttattagcatgttcccaaggcctggggatgaggggcccagtggggagggccggggcctcggctgtctggggactgcaggattctcagtcgca

SEQ ID NO: 26438 - DNA, 120 bp, Homo sapiens
ctccgagtaaagggcagaggtaaaggtcccctaggaggggcttgtaccggcccagaggaaatcagagctgtgggtgctggcccggtgtccccagacaggcgggtctggccagggtggaaa

SEQ ID NO: 26439 - DNA, 120 bp, Homo sapiens
cagcgggaccttaaggaaatcacaagcacaacatttggttttgttagttgttttttaaatttaaaaccaccctaaacttaaccaacgtcttctgcatgcgaccttatctgcatgccatgt

SEQ ID NO: 26440 - DNA, 120 bp, Homo sapiens
tcccggcgtcttttctcccccgtaagggcagcccctgctgccttcaggaaggaccacctgcctttttcattcctggacctctgtagagtccttgcaagacgcccttgtgtctgcctttag

SEQ ID NO: 26441 - DNA, 120 bp, Homo sapiens
tagcgtcccctccctactggcccgataggctgttgaggcagggcttttctggcagtgggtagagagaagcttggagtgtttggaggattgtggacggtgtcttggtgaggtgccacatgg

SEQ ID NO: 26442 - DNA, 120 bp, Homo sapiens
ggccgacactggccccggtctttgcttttgatcacccaggctcgctgctgccctataccagctttggagcagattacctttttctccacttttccaaactgtgctccaagttatccttgt

SEQ ID NO: 26443 - DNA, 120 bp, Homo sapiens
atccgcaagttctgtgaatttcagaagaagaatccaactattgttacgctgctggagcttttattacgcaaatttcattaagagactgagactctccgcaggtttttgaaagagaccaac

SEQ ID NO: 26444 - DNA, 120 bp, Homo sapiens
gcccggctccacccaggtctttgtgacctccaccccatccttgcactgcctgtgtagaccgtcaccccatggaggaggcagggacttgagaagtgacagggtgggatactgaaggcccga

SEQ ID NO: 26445 - DNA, 120 bp, Homo sapiens
aggcgcccttggctcaccattcttgtgctaagaagggcagtgccatccctggctgggcgggagccccacagctggcccccaagggtgagctccatggtgtagacccacaggcctcagccc

SEQ ID NO: 26446 - DNA, 120 bp, Homo sapiens
tcacgaccttcacatggaggtttcacatggcatctgtggcctcagcttggccttgagagaaagtccagcttcactccaaacagctagttttgcaagtgagagagccctgggtttagttgg

SEQ ID NO: 26447 - DNA, 120 bp, Homo sapiens
tgccgacgtgcacaaaatccccccgagttgtcttctggagccaagtgccccagagcctcaggagttgccgcagtctctgcttactcttctgcctgtgttgtgctgtccgcagggggtgag

SEQ ID NO: 26448 - DNA, 120 bp, Homo sapiens
gggcgcacgtggagcttcagaggaacccccctcccaacagcgaccccaacctgcggagattcaccatcaggggggttccccagcagatcgaggtggccaggcagctcatagatgagaaag

SEQ ID NO: 26449 - DNA, 120 bp, Homo sapiens
tggcgtacgtacagggtccttcccccacctggtttactcatagctgttttcttgtggatgtccaaggtaccagcttttcccaccaccttgtgctgcttgtgcctgtgggttctcacatca

SEQ ID NO: 26450 - DNA, 120 bp, Homo sapiens
acacgagggcaagccccctcctgctttgccgaaggggagggtcggagacccagggagtgccagagccaggcccagaagcaatgaaggaagcctggcaggactcaccaaggccgcagcagc

SEQ ID NO: 26451 - DNA, 120 bp, Homo sapiens
agccgaggccccagagccgttcccctgcgggcttagatgagcggctggggcggcagcctccccccacgctgccccgggactccgctggcattgccctggcggccagcccagcaggcagct

SEQ ID NO: 26452 - DNA, 120 bp, Homo sapiens
ggacgtagaatggcagaaagagccttgggccagcctaagttgacgggagagtcaagcaggttggtccctacccccagggtgatgccagggcagttgtggtggtgccaggactggctgtgt

SEQ ID NO: 26453 - DNA, 120 bp, Homo sapiens
ggtcgctggagggcagaagccatttctgcagcgcagcctgctgtgggaaggaaggctagtgtgagtgcgtaggtgtccttacttcactcgactccatctccccaaaagctgggctttgcc

SEQ ID NO: 26454 - DNA, 120 bp, Homo sapiens
ccccgccttggcccgtgtcgcagatgaggacactgagggcggcgtccctcacccaggccacgcagctggtgcggctgttcggccgcctcctctgggagggggtccccctgcctggcctcg

SEQ ID NO: 26455 - DNA, 120 bp, Homo sapiens
ccccgagtctccctgctgctgtagagccgggcgcccaggccggcatccccctcgtgggtggcaggagagcggacttagagcccccgagggcccctcagcagaggaaggggagtcccctcc

SEQ ID NO: 26456 - DNA, 120 bp, Homo sapiens
ctccgccaccgagagtcctgtgcttcggaatgaagggagggcgacctccttgtccgggtgtggtcgggcgcgggggttgtgggggcgccatctcctcttccggcccctgggactggtgtc

SEQ ID NO: 26457 - DNA, 120 bp, Homo sapiens
tgtcgggagtccttacgcaaccttgacatgtgcgggctactggggtccatcggcagcgggaagagacccggagagatgcatcttctgggcccttctctcctttaggccagcttaccccca

SEQ ID NO: 26458 - DNA, 120 bp, Homo sapiens
ggacggatgaggaaggagctctttgcagtgcaccaggcacgttgagagtggaggcacaatggaaatcctctgtgggaccccgagcaagaccctgcacctctttgggcctcagtttcccca

SEQ ID NO: 26459 - DNA, 120 bp, Homo sapiens
catcgtgcctgggaaggcgaaatatacccccagccccttccaacacacacactccagcgagaggagggcaagactggaaccgctgcccgagaggttaaggtggcttctgtggccacgaag

SEQ ID NO: 26460 - DNA, 120 bp, Homo sapiens
aagcgcttccgagctgtgcccagtcccgggaattccgcccagtctgcccacacttccctcggtccctgcccgtttcctcaaattcgggccgtgcgcgccctctggtgtcgcctctcacac

SEQ ID NO: 26461 - DNA, 120 bp, Homo sapiens
taacgcagtgggttaggacgagcgtgaggtcagagacaggcaggagtcaagaagtgctggaagcagagaagtgatttaatctgtttttaaagctctctctggctgctgtgcggagattgg

SEQ ID NO: 26462 - DNA, 120 bp, Homo sapiens
tgccgttgatcagcctggggcagtggctgcggagatgcacagatgtgtggcatcagtgaatcttagaccttttccgccattgaaattacatagggagttaaaacacgcacagacttctgg

SEQ ID NO: 26463 - DNA, 120 bp, Homo sapiens
tggcgactagaaatgggggtgacattcacagagtagggtggttccctgtagttcctccttgtgcagaaggtgaggctttgcttgtcgacctgcttcagtagtagcattgacagaacagtc

SEQ ID NO: 26464 - DNA, 120 bp, Homo sapiens
gttcgtggtctctggaaagaatcaactataatgatcagaataattgcctggtaggacgtatttcctttgagttcagcaagacgtgccccctcacatggtgttcctgttcattcataaggc

SEQ ID NO: 26465 - DNA, 120 bp, Homo sapiens
tgacgttgccaccagccctgaagctccttttcctgggtttgtaggggttggtggaatcctggcagtctgccgctcttcctggcctccagagatcagggctgtgactttccatctgcagat

SEQ ID NO: 26466 - DNA, 120 bp, Homo sapiens
ctgcgaggttggtggccgaggaggacgaggacacagctcagggcctgtccttcaagggcttccgtgtgcagcagcagcactctgtaatatcatagatgaatttttgtcaaaacacagaga

SEQ ID NO: 26467 - DNA, 120 bp, Homo sapiens
agacgtggttagcagagagctttctcattcggttttcctggagagagctctgcctcttgggcttcctgcatttgtatggaagttttaattttttttttttttgtcaaatgaaaggttgcc

SEQ ID NO: 26468 - DNA, 120 bp, Homo sapiens
tttcggcgttgctatattccaagccactgagctctgttttactctgacattttctcttcacttttgggattctgctcactgtgtttaaggcagctcgatagcattttgccaaaaaagaga

SEQ ID NO: 26469 - DNA, 120 bp, Homo sapiens
cagcgtcagcctgacactggcctttgcagcatcagccttggttgactgtgttctaatagggatgcctgatctgtatcctctttaacttggctataagaaggttttggagaatgtatgtct

SEQ ID NO: 26470 - DNA, 120 bp, Homo sapiens
gggcgacagagtgagactcagtctcaaaaaagaaattgaacagcccattttgtgaaccacttcaaaaaaaagcaaacacattttcctctggcttttggctgttttaggaagaagccatac

SEQ ID NO: 26471 - DNA, 120 bp, Homo sapiens
atacggtgaaccaggtgatgctgaggttatctggatccaggccatgcagatgaagccatatttacctttgtgatattggggctgatcttggagctgtctggatctgaccagtctccagat

SEQ ID NO: 26472 - DNA, 120 bp, Homo sapiens
tttcgtttttggatagtgctcacctcgtatctgtactcgtacctgctatttctaggcgaattgtcccctttctcctccctcttccctcatctccctctctcctctgcctggctgacacca

SEQ ID NO: 26473 - DNA, 120 bp, Homo sapiens
tggcgtaccttaaacacatgtagaatgatttttttctttgcttttcccatttagccttttgaaacaggatacacagtagggtgattggtttgggagggcactggtacagtaattctccac

SEQ ID NO: 26474 - DNA, 120 bp, Homo sapiens
gcccgtgtgggtgccccatccccaccctcaggcacacacgcactcttagctgcttttggactcctcccgcaatgtcacaatagttttctttgaacattcttgaccctcagtcatgttgac

SEQ ID NO: 26475 - DNA, 120 bp, Homo sapiens
gggcgaggtgatggggaggaggaaggaccggttagagaaggtttatgggagatggggaggccaggaagagcagaagaggctggggaacgaactctagggagagtaaatggcacttgtcac

SEQ ID NO: 26476 - DNA, 120 bp, Homo sapiens
ccacggcacttcagacttgaccccagactgaaaagatgagaggacctgtagaagtcacggcctgtctgtcccgggcccatgctcctatctttttctcccccttggcatttagataccatg

SEQ ID NO: 26477 - DNA, 120 bp, Homo sapiens
ccacgaccacgtgccagaatagttcagcatcctctgttgctactgtactttgagacatcgttcttctttgtgatgcaatacctctttcttgtcatgagggtctcttcccttaaatcaggt

SEQ ID NO: 26478 - DNA, 120 bp, Homo sapiens
tcacgtttgtggtgtttgcccgtatagctctcccacacccccacgagctccaagaggtggggaagcacatgtggcctgcctagcaggcaccagaagcaggttgtcggcacatgcaagcca

SEQ ID NO: 26479 - DNA, 120 bp, Homo sapiens
aaacgcagcccaggacgagtatgcgctgaagctccattttgcattaactagtcaagtacttacccactgaaaagcacttcctgaaataatttcaccttcgtttttttccttctgcaggag

SEQ ID NO: 26480 - DNA, 120 bp, Homo sapiens
gcccggggctctgaagagagggtctcgcgccgcacccccagggtgacacaggcgctggggaagacgcacgggcggctcactgcacaaaacctcgttggaatatttgtgctctgccgacgt

SEQ ID NO: 26481 - DNA, 120 bp, Homo sapiens
agccgcgggtaaaatgaggcctgtatgggatgggtgtgtgcgtgtgtgcacatatgcacatgtatgtatgagagggagaatgtgattattttaagtggatacctaaaagcagtcaaatgc

SEQ ID NO: 26482 - DNA, 120 bp, Homo sapiens
tgacggtggtgaaggtcatttgaggtggggccaggtctgcgtctgaattctgtggcagcctctccctgcgtaaattcaagttcactggcttgagaagaagaaaagagcctggccatgtcc

SEQ ID NO: 26483 - DNA, 120 bp, Homo sapiens
ctacggcagcccttcaaaggcagccctggggcggctctgcggcattcccaggagtctggctttcccttaactcctttctggacacctctgggcagtgcccccagggaggcctctgggctc

SEQ ID NO: 26484 - DNA, 120 bp, Homo sapiens
ccacgtgacctcggacaggttgcagaacctttctgagtctgtttctctctgcataagcccgcgcagggccggtggggaagaggcaatcaagtcaatgcgtaaacggacggcgcacagtag

SEQ ID NO: 26485 - DNA, 120 bp, Homo sapiens
aatcggacccactccttgtttttgactgaaaacggtacccccaggcttggcgccctgccgtcattcccaggcttggcagtcggcgcctgccggctcttggcacagcactgccaagctgcc

SEQ ID NO: 26486 - DNA, 120 bp, Homo sapiens
tgccgtttctcgggtgctgagccacggcgggcgcggggctgggccctgcacgtgcattgtcctgtttctgttcaaagtttgaaaaacccaaactgctccccacggaggcacgctttcttt

SEQ ID NO: 26487 - DNA, 120 bp, Homo sapiens
gcacgatgaacgaaggaaatgtgagggtgttgtccccggtcaccggtcacctcgccattatgaatgtgtgtgtgctctgaggaccattccccaggcagggtgtgggccaggcagtagcgt

SEQ ID NO: 26488 - DNA, 120 bp, Homo sapiens
ggccggccgcagctgcagcccaagtaggaaggagctaacatctcatctgttggaccccgaggtcctgctgctcagcctccccggcacaggggtccaggctggcacctggggaggccccag

SEQ ID NO: 26489 - DNA, 120 bp, Homo sapiens
tgacgttctccatgtgagggcaggattttcctcccggcctaaagagctcaggtggggggatgtgggggctcctttccaggggagccaattacaggcagatgtgaactggctgacctcgca

SEQ ID NO: 26490 - DNA, 120 bp, Homo sapiens
tggcggagaacagggctgcaaagaacagggtttgggccacttggcaccgtggtgttgggggacgttggctgtgcctgggagcggagcaggtaggtatggggtcctatcatggccactcca

SEQ ID NO: 26491 - DNA, 120 bp, Homo sapiens
tcacgtgtgtgaccccagccagtgactatgcaatgttgagggcttggcagtcaggcctggggggcagcactgcccccggcagattgcagtggggacaagactgtgcggcagggcagggag

SEQ ID NO: 26492 - DNA, 120 bp, Homo sapiens
gggcggggagcccaggcactgaggctgagcaggggccctccttccgcccacctgcaggttctgggcacagccagcccattccccaggccctgaaaggcaggcaagagggccgccccactg

SEQ ID NO: 26493 - DNA, 120 bp, Homo sapiens
tcacgggtgacaagacccagcccagagaggggaagcaacctgcccggcatcccacagctggcacagatggggcctggactggatcccagctctgcggactcacaccctcagggcagaatg

SEQ ID NO: 26494 - DNA, 120 bp, Homo sapiens
agccgtgaccagcaggcctcagggactacacatgagaatcaaccccggctggggggctgcagggggttggggatgaggcccaggaacttgccttttcctttttttgagacagagtctcgc

SEQ ID NO: 26495 - DNA, 120 bp, Homo sapiens
tggcgattccaacccaggctgcctgtaggcacagctttgagaaacccacatctgtgctgatcagctgagggtctgggaagcttggaagggaggagttaggagcacggctcgctgcctctg

SEQ ID NO: 26496 - DNA, 120 bp, Homo sapiens
aaacggaaacgaagggcaggcgcgataaaaaactgtgttggccagaagccaggaccaaggaacagcttgtggtgagcggaggtgccagagcgtggccgcacacgctctcggaggcccaga

SEQ ID NO: 26497 - DNA, 120 bp, Homo sapiens
actcgctcatggcccctgagcattacacacaagggaaaactgaggcccagagagggcaaggggctctcccagaatcacactgcaaataaaagcagaactgggattaggccccgagcctcc

SEQ ID NO: 26498 - DNA, 120 bp, Homo sapiens
ttccgaatttgagacttgtcttgaaatgacttcgtatattaaagcacttggagccgtgcctggcacgttgtgctggcacagtaaatattagtggctttcattatcccatgatcaatgtgc

SEQ ID NO: 26499 - DNA, 120 bp, Homo sapiens
tgtcgtcaatgctgggacgcatgttctctttttttcacgttttagcatctccaacatggggggacatcttacaatcgtaattgacagcttgcttgctttcttagtgatacattgaacaga

SEQ ID NO: 26500 - DNA, 120 bp, Homo sapiens
tgccggatgacctacttggcacccgaagaggacggggtggaggggacatgcgcctggacatgcagacccccgggaaagagatctgctttgttgtcaggatgcggaagagagtttcttggc

SEQ ID NO: 26501 - DNA, 120 bp, Homo sapiens
atgcggctgccaggactcagtgctccacgcctgcccagttctcttgggggccgcgtccattccgggctccacgcatcaagacaatttactccagccagacccaaatgcacagttcccctc

SEQ ID NO: 26502 - DNA, 120 bp, Homo sapiens
ccccgttagggtgcttacaagacagattgttgtggcctttgacttcttttactcactcattcattcaactgcctctgtgccagggccgctaactgggccgttctatgatttccttccctg

SEQ ID NO: 26503 - DNA, 120 bp, Homo sapiens
gcccgtcgggagacaccttgccccgagcagctcagggctgcatcatcagactgtgtagcattaaggtcccctggcgggcgaggctggggctggcgtggcagagaggtcatccgtctcccc

SEQ ID NO: 26504 - DNA, 120 bp, Homo sapiens
caccgaaatggggaggggctcgaggaagccgcagggggtcccctagaggcagggggacagcggagcttggagatgaaacagggcactcagcagaggagaattagtcttcagagatcacct

SEQ ID NO: 26505 - DNA, 120 bp, Homo sapiens
gttcgcttttatgggctgccgtttacgtgccttgcgaagaaatctgcccgagataacaaggggggctctgggcgctgagcagcccaactggtatgcctgaggctggagctgattcatccg

SEQ ID NO: 26506 - DNA, 120 bp, Homo sapiens
ctgcggaatggggaggatgcacacagagcccccagctcccaagacagggcatctcgggcaagtgagcaggagagagaccggggcctgagccgggagccctgggttcaaagcccacttctg

SEQ ID NO: 26507 - DNA, 120 bp, Homo sapiens
actcgcatgagcttccagctggagggacccagcttggttcctcgagtgacccccagtgcccacccagggttcacggctgcctacgaagccttggccaaaaggaggataaagctcatgcca

SEQ ID NO: 26508 - DNA, 120 bp, Homo sapiens
ccacgtttatctcctttgtagcccagcctgtggcccctgcaccaccgagaaggggacatcctttattcttctgaaccccctgaacttgaagggctgcccagggctgactcatccaggccc

SEQ ID NO: 26509 - DNA, 120 bp, Homo sapiens
ctccgtgagggtgacagctgaggggccccctgtcagctcccatcagctccctctccatcctgcctcccatctcatcttgcaggtctccagtgagctgtcacctcctctgagaagcctccc

SEQ ID NO: 26510 - DNA, 120 bp, Homo sapiens
ttgcggctcttaccgtgatcagtcactaactaattcaccaggttgcttcctgggtcactgtctgtcttcctgattctctggggagcaccatgaggtcccagacagtctatcccctgtacc

SEQ ID NO: 26511 - DNA, 120 bp, Homo sapiens
aggcgcacaggctctggggccgggcacactggggtgtgtacacggctctctgttgctgacgagcagagtggtcctgggcaaggagctgtctctggctgggcctcagtttccctgtctgca

SEQ ID NO: 26512 - DNA, 120 bp, Homo sapiens
gggcgtgggcctagcagtgggatcctgggggctgatgtcgccagttgctaacttctttcttccacagttgtccacaagcccttggcagacctcccagttttcacttcctgcccttgaagc

SEQ ID NO: 26513 - DNA, 120 bp, Homo sapiens
caccgaacagaagggaagatcgagacccaggcatgcggacagagagcacaggcttaacagagcctctgagccagacctggcatcctgggaaccacctagaccaatgctcttgctgtccac

SEQ ID NO: 26514 - DNA, 120 bp, Homo sapiens
agccgccctagaagggcagagccccacccaagataccacagtgagtctgggctccaaagctgcagggtgggggcagggggagctgcctttcccctctgcgctgtgcccccaacgctgggc

SEQ ID NO: 26515 - DNA, 120 bp, Homo sapiens
caacgaggctgcagagctgtcaggagagatcagcagggccctggccgatctccccagatttaattaacaggcctttcatctctgtcctgaaggaatcagctctcttctgtcttcttaatt

SEQ ID NO: 26516 - DNA, 120 bp, Homo sapiens
taacgttcattaagcaaatcagaacaacagggtttttctcccttctttcttctcccggaaggttttaacccttagtaggtgggcttccgggagggagcctgctacctttgctggtagccc

SEQ ID NO: 26517 - DNA, 120 bp, Homo sapiens
gcccgatgaatgagtagactcgaggcaggatttgtaccttcaaggagtttataatccagtgagagagtggagacagcaggcagtcctgacagtgtggatcacattgtcccaagtgtgcct

SEQ ID NO: 26518 - DNA, 120 bp, Homo sapiens
ccacgtgctttgccaagtactttactcacactgtatggctgagatccccaaacacttcatttactagtgaggagtcaggctcagggagcagaaggacttcctcagtgtcatgcccaaagt

SEQ ID NO: 26519 - DNA, 120 bp, Homo sapiens
acccgcccccctcccagtcttcacctgctggctgagccagcagctgggcacagcagagcctcccccggccgggccccgcaccgcccacgccaaacagcaggagcgccaagctgtgtcctc

SEQ ID NO: 26520 - DNA, 120 bp, Homo sapiens
caccgggacagtcataaaatcaagctggcccacatccggcactgaccaagcagaatgagctcagtacgaagaggcttattttgggaaaatggaaacaaaacaaagccctataattggagc

SEQ ID NO: 26521 - DNA, 120 bp, Homo sapiens
gggcgggaggggctagggtggaaagctgggctgggaatgcatgggtgaggctgccctgcccacctcgagcatcagaaccaggtgggtgagctgctcccagcctacaggggagtcacaccc

SEQ ID NO: 26522 - DNA, 120 bp, Homo sapiens
agacgaggggctgagagaatgacagagaggagggctaacacaaggaattccagagaatgagctagtgatctggtgaatactgaggtcacttgcgagaaggaggtgattcaccagcttctt

SEQ ID NO: 26523 - DNA, 120 bp, Homo sapiens
ccccgctgtcctcttgggcctgggccactggcgaccagaactggggctgggccgggggcggcttgttctgagggtggggcactgtctgcaggagctgccctcgctggcctgcctccacca

SEQ ID NO: 26524 - DNA, 120 bp, Homo sapiens
tcacgtctgtctctcagtcagcagcctgggagccagggtttcaggcttgacccttcatccccaccctcacccgcagctgagacagccccgagccctgaattccgcctcatccacatcgct

SEQ ID NO: 26525 - DNA, 120 bp, Homo sapiens
gcccggggcccagagcacctctgctcactcagccagctcacttaccttgctgtcacctggaggtcccgctaaactcctgctgctgggtgttccctaggaatttcgtgctcatgggcatcg

SEQ ID NO: 26526 - DNA, 120 bp, Homo sapiens
agacggcagcctctctggtcacacgtgtgtgtatcccctccgttcaccctcggactccgtgttccatcggacgtcacttctaaaacccaagttcaaagataaaattattaagaatgtgaa

SEQ ID NO: 26527 - DNA, 120 bp, Homo sapiens
gggcgtgtgtgactgcagaggtgtgggtgggccccctgcagggtctgctgtgcaggaagcttttgattttctacccactgcacttttatcttttttgaatgtttagttgccgataaaatc

SEQ ID NO: 26528 - DNA, 120 bp, Homo sapiens
cagcggttcagctatgggcagcccctcatactgaccttccgggtgccccccggggactccccactccctgtacagctgaggctggaagggacaggcttggccctgtccctgaggcactct

SEQ ID NO: 26529 - DNA, 120 bp, Homo sapiens
tgccgggcatcccagggaggtagagctcaggttccagtaagtatccccttctgtcctgagagatggggaggtgagaggggtggtctctgaggtccgggcacatttcagatgcccctgtag

SEQ ID NO: 26530 - DNA, 120 bp, Homo sapiens
tgtcgggatctcactttgaccgcttctctcgccagcctgcaggagacctccgaggacgtggcccctccactgccccccttccacttccagcggctcctcgccaacctgaccagcctccgc

SEQ ID NO: 26531 - DNA, 120 bp, Homo sapiens
ctccgcgtcagtcccggccccagccctgccggtcagtaaagacaaccacatgcccaagacccgagtgcttgccaggtctcagaactgggctgggctccggcggtcacagtcttgtcaggg

SEQ ID NO: 26532 - DNA, 120 bp, Homo sapiens
ttgcggccgggtggttattgtcctgttttgccaagaaggaaccttagtcaaaagtcaggacagttgccagaggccatataacctgtgaaggcaatggggatggtggctgaggtcagatgc

SEQ ID NO: 26533 - DNA, 120 bp, Homo sapiens
gtgcggccagcaagccacccagacccgctgggtgtgctcactccaccttcactggatccaccaagccccctgtccccgctggacacagcccacagccggcagtccaggagtcccctggca

SEQ ID NO: 26534 - DNA, 120 bp, Homo sapiens
tggcggtattgtacctaagccaccctaggagggtctggtcttcccaaagagggggccaagccatcacacatcattgatgggggtctgtcaccacctcccaccctggtcacagtgattgac

SEQ ID NO: 26535 - DNA, 120 bp, Homo sapiens
aagcgagaccttgtctctaaaaaaaaaaaaacaaaacaaaaaacaaaacccctagtgtatgtgtgtaaaatgaagctgagctctaggctcagatgtttacaaaggggtttttctaccctt

SEQ ID NO: 26536 - DNA, 120 bp, Homo sapiens
ccacgcaggacatttgaaagtcatgtggggagtttctgggaatgtcaatttctgggaactttaggcctcttcatccacatgacaaccaacatgtcctcagatttgcttccaggggaggga

SEQ ID NO: 26537 - DNA, 120 bp, Homo sapiens
tagcgaccctccccagcacccgcaatccccaaacttcctctttccatgggtaatgttttgggaggcctctctctaaacctttctgtgtgtacgtacttaacatctgtatttttttaaaaa

SEQ ID NO: 26538 - DNA, 120 bp, Homo sapiens
gtacgatattctgggacttgctttttgtcagctaacagtgcgtcgtggaggttgttccttgtcattacgcgtagaaagcctggttttctgtgtctggtgtgtaagattctgtggtatggg

SEQ ID NO: 26539 - DNA, 120 bp, Homo sapiens
aggcgcttaagtggcctccagttttccccattacaaccgtgtcacagggaatagggaccagcctcatagaaaggtcttggtattccagtataagtgtcgctttaggacagagtgctggaa

SEQ ID NO: 26540 - DNA, 120 bp, Homo sapiens
tgtcggccgcctccagtctccctgttctgtgtctacagatggtcattttcatattttgcccagagtttatagttgttttctgtgggaaggttgatctgccaggatcccctgctcctctgt

SEQ ID NO: 26541 - DNA, 120 bp, Homo sapiens
gtccgcgccaccttctccctgggctggcccttttcccaggaaggaccagggaaagacctcaggggtctttacatgcagagggtgctgtgaggaagggcagaggcaccagcatggcaggtg

SEQ ID NO: 26542 - DNA, 120 bp, Homo sapiens
agacgctcaggctctgaaaacacaggcctgggttgcataggagctcagccatagctaactgggaatgccttagggaagcgcagataatgaaagtctctacttttcaggacacttgggaaa

SEQ ID NO: 26543 - DNA, 120 bp, Homo sapiens
ctgcggggccgggacccttcctgtcccatctcacaggtgaaggccccacgctgcagtgcagatgcatggccagcaggtggcagagccgtgcctccctccagcctggactcctgaggcctg

SEQ ID NO: 26544 - DNA, 120 bp, Homo sapiens
ctacggtgggggattgacatgattaaactgagctaggagtgacttggtccctagatgtctgggcagaggtggagaggccgaagatgggggagctgctgctgcacagtgagtttggtgatt

SEQ ID NO: 26545 - DNA, 120 bp, Homo sapiens
tggcgtctggtgtaagtgatgtcgagaatatggagttcttccaagacctctgggatagggtctgatgtccccctcccgcctccctccagtttctcagccgatggcacacagtcgtcctgg

SEQ ID NO: 26546 - DNA, 120 bp, Homo sapiens
agccgtgggatccagctcagctcagtcccagcatccccgacgggtggagaactcgggcctgacatgttgtgactcacgcagtctgatcatgcctggtgcatgtgctgatctattctctgg

SEQ ID NO: 26547 - DNA, 120 bp, Homo sapiens
ggccgctgccgggtggaatgcggcagctgttgaacatctggctagcaatgcagtccagcagctgagcagaaggtggggtggcccctgccctgtaggatggctgactggagccaaccagcc

SEQ ID NO: 26548 - DNA, 120 bp, Homo sapiens
aaccggccagggcaataggctgttggagcctggagagggaagtgcattatgagggctctgtcctaagtcagctcccatccaccaagggtggtaacgctaagcttttactctctgcttaaa

SEQ ID NO: 26549 - DNA, 120 bp, Homo sapiens
gtgcgttctgggttacttcattgtgaagatcaggggactgaagctcagccagatcaagtgcctcgcctaaggtcatgcagcttggccaaatccaaacccttgggtgagtggacagaggag

SEQ ID NO: 26550 - DNA, 120 bp, Homo sapiens
gagcgtcagctaggagaggtgggcgctggtcttactggggaggaggggcctgccccctggactgctgccctgacctcagccccatcccattctgcctagccccttgctgggcacttccct

SEQ ID NO: 26551 - DNA, 120 bp, Homo sapiens
cctcgaaaaaaataaataaataagaaagatgatctcagggtccctaccctaggagtcagatgcacggtggggccattcctagcgctgcctgccctggacagcgcctgtctatgcctgtgg

SEQ ID NO: 26552 - DNA, 120 bp, Homo sapiens
cctcgcatttcatttgtgtggcagggacttgctgaggtccggggaggggcagagaggaggggtgcggccgccccgcgctttgcactttccgcgtcctccagcagaggggtcggccggcgg

SEQ ID NO: 26553 - DNA, 120 bp, Homo sapiens
ggccggcagcggagggaggggtgtgtcggccgcccgcgccgttcctccgcccctcggtcccgcggccacacgcagctagccggagcccggaccaggcgcctgtgcctcctcctcgtccct

SEQ ID NO: 26554 - DNA, 120 bp, Homo sapiens
cctcgccgcgtccgcgaagcctggagccggcgggagccccgcgctcgccatgtcgggcgagctcagcaacaggttccaaggtaggcgccgccgtccccgagcagccacctgtgcgcgccg

SEQ ID NO: 26555 - DNA, 120 bp, Homo sapiens
agccgcaagatacataagttacctggcactgtatctggcaggtgttccctcattggtcgctttttgctgtaaggtcagagaccaggccagatgaacacctgcaatctgcccacctttaaa

SEQ ID NO: 26556 - DNA, 120 bp, Homo sapiens
ctacggggactcaggacagagggtgccacacctgcccagggctggagacactcagggtggacaggccctgggcctcctggctggcatttcagtggccctgaagtctgtctttccattgta

SEQ ID NO: 26557 - DNA, 120 bp, Homo sapiens
attcggcagttgacaagttgcttttatatacgttgattctctccttattgcatcctgctgtgcagctactggcacttacgttctggtaggagaccatacctggacctcacccgcaaagaa

SEQ ID NO: 26558 - DNA, 120 bp, Homo sapiens
acccgcatcaggaatagctcaggagaggatgttttgtcttcctgcctgacaggcatcaccagcaatcagagtagggtgccctgtgcgtgacctgacccttgtctgtgtggccacctgtgt

SEQ ID NO: 26559 - DNA, 120 bp, Homo sapiens
caacgttgcagaaggcatctgaactctagggctgtcctcactgttgacttattattttattagatttatgcagcagcctgcctccaaagaagaaatttggtgtgttttttcattgggaag

SEQ ID NO: 26560 - DNA, 120 bp, Homo sapiens
gagcgagagaaagggagactctgatgagagacgtaggagccatcaggctgtaaataaataaaaagcacctggctgggcgccagcatacacgtctctgtctctgctatgacccaattcagg

SEQ ID NO: 26561 - DNA, 120 bp, Homo sapiens
caccgagtgggctcttggaggtctgctcacacggcttcacagtgacttcacagggtctgcaggagctctcctgagtggaccccagagccctctgctaggaatggaggggagtggtttggt

SEQ ID NO: 26562 - DNA, 120 bp, Homo sapiens
gggcgggggggagggggggtgttgccctttactctagttcttgcatttgaattgctaacatcctcttttcccttttttcttcctattttgatttggtttctcattgctcaatgtcttctc

SEQ ID NO: 26563 - DNA, 120 bp, Homo sapiens
cttcggtgctgctccagtgtttggcagccctcctacttttgggggatcccctgggtttggaggggtgccagcattcggttcagccccagcctttacaagccctctgggctcgacgggagg

SEQ ID NO: 26564 - DNA, 120 bp, Homo sapiens
gttcggagagggcactgcagctgccagcgcaggaggattcgggtaagccccctggggagggcccttgggaacccacacgccagccaaaaagcactaggggcctgtactcttgctctgaaa

SEQ ID NO: 26565 - DNA, 120 bp, Homo sapiens
tttcgttcaagccaggctttgttgaattcatggtggacctcagctgtgttgctgttccctggtatgagaaatgctggtcatcagagcccctgttctcctgctggggctaaaggaaggcac

SEQ ID NO: 26566 - DNA, 120 bp, Homo sapiens
ccccggtgtggagcttctgttaggaagtcctcaatgaatggttttcaccagattctttcctcttgggattattctgtgttagacccgttgtccttgaacaaacaactccctgtgtcccct

SEQ ID NO: 26567 - DNA, 120 bp, Homo sapiens
cagcggcctgagacccgcttcctgaacccccagggtcctgtccctgctttagtgcaacaaagacctgagtggagaagtctccagtgaatgaaagctgagtcccagccctgtccccaccca

SEQ ID NO: 26568 - DNA, 120 bp, Homo sapiens
tgccgagagccggggaggccttcccgggggcatcagcacagtgagatccgcccgctggagagggtagaatggttgtatcttgctgaatgactgaagagtgagtctgagttttgttttcag

SEQ ID NO: 26569 - DNA, 120 bp, Homo sapiens
cagcggtattattatttgtgagtctaacctagcgggtggtcctggctgtcaccggtgcttgggcgggatcaccaccagcggctgcccgtacttgggccgccacatgaggacctgggcatc

SEQ ID NO: 26570 - DNA, 120 bp, Homo sapiens
catcgttggcattgggcttgaccagggcgctgggcgggatgggctcattcttgctcaggattttgggctggtcctgggcgatgggctcccgcagccgggcgcgctggcccaggggccggt

SEQ ID NO: 26571 - DNA, 120 bp, Homo sapiens
cctcgatgctgagctgcatgcgccagtgcagcgtctgcaggatgatcatgtcgttggtggaggtgttggtggccaccagccaggtggtgaagctctggtcccggtagatattggtgagct

SEQ ID NO: 26572 - DNA, 120 bp, Homo sapiens
ccacgttgctctcgctgacgggcacggcccatgtgacgctggggtaaaagttgtcattcatgctgatgatgaacttggagtccctcttggtggggcccacgatggtgcaggtctctgtgg

SEQ ID NO: 26573 - DNA, 120 bp, Homo sapiens
tgccgtaccaggggtagttcaccccatccgagtcgctgatggcttggatcttgccctcctggaggtcggggagctcccagctggacctgaggacaaggaaggccagttcactcactcggt

SEQ ID NO: 26574 - DNA, 120 bp, Homo sapiens
gaacggacccagcagaccacccggtcccctttgacgttctgggggcagggggtcagacagtagctcggagtcactgtcatcactgctgctgttacaatcataaccctcagacagaagaag

SEQ ID NO: 26575 - DNA, 120 bp, Homo sapiens
ggccggcctggcccaagttgctctagggacatacagatcccacactcccatgtggccatggatatagtagcatctgggagcccaccccagactgtaggggccccttactttaacattaca

SEQ ID NO: 26576 - DNA, 120 bp, Homo sapiens
acccggcagatacagaaagtgaagtggtgggctgggggtggagagtgaggctacattttcctaaggacatttggccaagcggtggggcctgggaccccggcgcatttccaccaaggcacc

SEQ ID NO: 26577 - DNA, 120 bp, Homo sapiens
gtccggaagtacccagcaattcctaagatctaggggggccccacagcagcaggcaggatgacaacagggtgagcctgctcattcattcccccgcacagatggagaagcgggtcagggtct

SEQ ID NO: 26578 - DNA, 120 bp, Homo sapiens
aaacgcccactctgtcctcacacagtgcttacacttgcttggaaaagttttccgtttttttggtttttcagggcaggaagcaaacttgcataaggaaccccgctttggccttgccccctc

SEQ ID NO: 26579 - DNA, 120 bp, Homo sapiens
tttcgtttgcaaagagctgaaggtctggtttgggggagcaggactgagcagcaaaatagccctcctcttcctgaccccagccttggggttttctttcctttcccagtcctgaaactccca

SEQ ID NO: 26580 - DNA, 120 bp, Homo sapiens
ccacgacatcccctctatggccgcacagtctgagtggagcacgctggagaggaagagtggggaatgaggcaggtctagcctgctccagcccagctggacccagccagggcgtctgcaggg

SEQ ID NO: 26581 - DNA, 120 bp, Homo sapiens
aagcgggcactcaaaaggaagagacggctgtgcctcgtttgtcaaatgaaatcaattactaacccacagggctgaaattgattcctaactcactctgcagcagggactcagctcagcgtt

SEQ ID NO: 26582 - DNA, 120 bp, Homo sapiens
acccggactcacgagagccctaagaggtggacactgtcattcccatgcgacaggtggaaacaccaaggcccagggaggccaagtgagttgctcaaggtctcccagctggttgatggcggg

SEQ ID NO: 26583 - DNA, 120 bp, Homo sapiens
ccccgtctgtctgactccagagcctgggtgcccatcccccatggccagggaacacccactccctcccagggcagcttcctgttcttgggaggctctaggtgggcctgaggcaccgtgggc

SEQ ID NO: 26584 - DNA, 120 bp, Homo sapiens
gggcgagcagacaggccttggccactgagaatcaggagacggaggagctcacttctgactcttctggtcagcttaaattggcagcttcccccatcgagcccaggcccaatcagccctaaa

SEQ ID NO: 26585 - DNA, 120 bp, Homo sapiens
cttcgggttcccacaggtggtccagatgggagcagggatacctccctcacatccggaatcctcagctgggccctctgggtctgcgttctgggtttgcagcctctcgtccccttgggcccc

SEQ ID NO: 26586 - DNA, 120 bp, Homo sapiens
acacgggcctcctgggcctcctgcaaggcaggctgtccccgaatgggactccccctttgttcttccttcctgggggcagccgtccctgattcccagaccagacccagagcccccagagcc

SEQ ID NO: 26587 - DNA, 120 bp, Homo sapiens
agtcgtatttttattggccagaggaggtctgcttcctgtgagcagctgaacagctgtggctcctgagaacgcagagacctggccagcgcactctgtgcggtgcctgaccccactgccctg

SEQ ID NO: 26588 - DNA, 120 bp, Homo sapiens
gtgcgacggcctctcagccgccggagtcgctgccgcagccgggtttgcagaaatctgtctccaatttgcagaaaccgacacagtcaatcagtcaggaggtaggtgctgggaccccatccc

SEQ ID NO: 26589 - DNA, 120 bp, Homo sapiens
acccgatgagtgactttagaaaaccgtcatgggaaaccgtcaaggtcagtggttaagaaatttaatctgcagcttttagaaaaagacctcagatacagactaggatacaggcacctactt

SEQ ID NO: 26590 - DNA, 120 bp, Homo sapiens
taccgtgaggcagggtcactcaggctggactgcagactagttcagggtgaagctccatggaagcgtcacgtgagctccatggaagcttgggtcacaggaagacaaaaagtggcaggtcac

SEQ ID NO: 26591 - DNA, 120 bp, Homo sapiens
aaacgaagcgagctcctttactgcggtacttctcagtgcctttcatatgctaatacctaatgtgactctctgagaagaggatataatgggcagcagtccctgaatttatttgtcccagga

SEQ ID NO: 26592 - DNA, 120 bp, Homo sapiens
taccgaatgtctctagggactaatgtctctcagaacacgctttgggaaatacgaagctacaatccttcatttgttgatatgttttaagtgtttttctaagcagaaagtaatgatttcacc

SEQ ID NO: 26593 - DNA, 120 bp, Homo sapiens
agacgtagatatctcatattcaccagctctcttgacagcgggaatgaacatattttggttttgctttgctgcatgggcaatataaggtctcaaatgtcatcccctctctgctttaaccat

SEQ ID NO: 26594 - DNA, 120 bp, Homo sapiens
aaccgtgcttttaaaattaaagacaagaaaagaggtctataatcatgcaagatgcccttttccttggcctaaatccactgggacccataggctagtcagagtatttagagttgagttcct

SEQ ID NO: 26595 - DNA, 120 bp, Homo sapiens
gtgcgagttttagaacatctaccagtaagtggggaagtttcacaaagcagcagctttgttttgtgtattttcaccttcagttagaagaggaaggctgtgagatgaatgttagttgagtgg

SEQ ID NO: 26596 - DNA, 120 bp, Homo sapiens
agacgggtgagcttagtggttagagactcgaaagggcactggacataggcaggctggagactggtcctggtcctgctgttctgcatctgactcagtcactcttctctgagcctcagtggg

SEQ ID NO: 26597 - DNA, 120 bp, Homo sapiens
cttcgcataatgctgaccctggcgagttttcagcagaggtgacctcctagggttctcaggaggggagctgtgccttgtagagtcacggtcactacagaaagtgctgcagccagcccaccc

SEQ ID NO: 26598 - DNA, 120 bp, Homo sapiens
tcacgttcctcattagcagctgcgcagttttaaagacacatgccggaactgggccttagtctttgtcgctggagcaaaataaagtagctctctgtggacacgggaggttccagagcaccg

SEQ ID NO: 26599 - DNA, 120 bp, Homo sapiens
tctcgtccctgggaccgctgtgtggagtgtgcgttacagggaaggttcagggctttgctgctgctcagaaagtggtggtggatggatccgtatagggtttgaatctaaggtgctggcctc

SEQ ID NO: 26600 - DNA, 120 bp, Homo sapiens
acacgaaggtggtaagtgcgcacgtgtgtgtgttgtttggggacgctggggagagggaggtgaatgccttttccagaatgtctggttgggtctaggcacccagaagctttgaggactctc

SEQ ID NO: 26601 - DNA, 120 bp, Homo sapiens
taccgtctatggagcccttgcctgtgcacagcgggcgctgactctgtagaggtgccagctctttggtttctttggatgtgtgctcttgctgagacagaggagtgctgactgggctgtgct

SEQ ID NO: 26602 - DNA, 120 bp, Homo sapiens
ggtcgtggtgtgggcagacgattcaaaggaatgtactggggaaagcccacaattcactttctcctgtaaagcagcactggctgccctttattaccctttgccaccatcctgatatcgcct

SEQ ID NO: 26603 - DNA, 120 bp, Homo sapiens
gagcggctgtgatgtcttacctctttccatttgtaagcaggcactggtccttgcaggtcagctgggaaggggcatgatgctgtcagcagcagtctcccttgccaccctcagcaccctcgt

SEQ ID NO: 26604 - DNA, 120 bp, Homo sapiens
acacggctttcaaggtgtggagctgggaagcagacgactgttgactccatctcacttcctccatgtctaccccgtcttcttgacaggtttaaggggctcaagccgactgttatccttctc

SEQ ID NO: 26605 - DNA, 120 bp, Homo sapiens
tcccgaggaatttccgacgctgaaagcagctggagggcaggacaaggctggcaaagaaaagggcgtcttagatctgtcgtatgggccaggaccaagcctccgccctcagagtaagtgact

SEQ ID NO: 26606 - DNA, 120 bp, Homo sapiens
actcgatggagtaacagaacttcctcctctcatctctctgcactcctaaaagggtgctgatgccactggggtctccggttcgagctggaaacgtggctctttgactcgccacgtgatctg

SEQ ID NO: 26607 - DNA, 120 bp, Homo sapiens
atccggttgttaattttgctgtgcctggtggctgtggcaaggatggacaaaggaccaattaacttaggtccccggttcaagagcttgttttctaaagctcccaatcctagctacatctag

SEQ ID NO: 26608 - DNA, 120 bp, Homo sapiens
agtcggaatcactggggagtttgtgaatgagtctgatttccagtcctcccctcccccagcccaattaggacctgtatttttaacccattcctctggggattgttacataaatcagcctgg

SEQ ID NO: 26609 - DNA, 120 bp, Homo sapiens
ttccgtctgtgagctacgcaagtgccccacacctccactggaaggacagcagctgcgccttgcctgtcttgtgggctgggggatctttattaaaaggtgccactgctaaacaaagcctga

SEQ ID NO: 26610 - DNA, 120 bp, Homo sapiens
gcccggaacttgctcctgttttaatgtgtagtccagtgctgaccctaagtgggctggtcagtgtttgttgaaggaatgacccaaggctggtttcatcagggccatcttcatctctctggg

SEQ ID NO: 26611 - DNA, 120 bp, Homo sapiens
atacgatccctccttccccctcctcttccctctccccttttgccccctttcaatttccagatgtgacaagctggagggagggcggtgggcgacacataatttctgccacgtctctgagca

SEQ ID NO: 26612 - DNA, 120 bp, Homo sapiens
actcgagtacgggagatggagccccctcctcggcatgtaccagcgattctaaggacccctctctccgcccggctcagcctgtccgaaaaggggcttcacagttcatgggaaatgtatacc

SEQ ID NO: 26613 - DNA, 120 bp, Homo sapiens
actcgttttgcattttctctccctgctttttaaatcttcagggcctctgacttctttccctggtgatgtggatatgattttagcctttggttctttagaaacaggagaggcaggttttcc

SEQ ID NO: 26614 - DNA, 120 bp, Homo sapiens
ccccgccgaggggccgctgcagcgaggaacgttgcctgtgcacagtgccaggtgccggtcagtccaccagagtcctctgctccggagttgctgccaggcggcgtcctagggggcatcgct

SEQ ID NO: 26615 - DNA, 120 bp, Homo sapiens
cctcgtggctgcatggaagtggctcttcctagatggttctgcttctccactgtgaggagacgtggccccacggtggggttgccacctcagcatggcaggagcccagcaaacgcagagggg

SEQ ID NO: 26616 - DNA, 120 bp, Homo sapiens
tggcgagcacctcttccacagccagaggcattcgggtgatgacctctgctcagggaccaggagagggtcccctgcacagtctgggttgactgactgcacttggcttgtgcctcggacagg

SEQ ID NO: 26617 - DNA, 120 bp, Homo sapiens
caccgactctttcaggtggcatctaatccagctttccaggcgccagaggctgacccttggcttcacctcagttttctgccccaagggccctccggcagggcagtcctggagaggagcaga

SEQ ID NO: 26618 - DNA, 120 bp, Homo sapiens
tggcgtctccattctgagcatattccccttgtctctctcccccctacactctgaacatagcatgtgggagagccctggggagccactttccccaggagcaggcagagccggtgggggcag

SEQ ID NO: 26619 - DNA, 120 bp, Homo sapiens
acacgtatgtttgcacacggacatggatgcactgtggccagcctgccgctcctccccacccgaggagtcagctagaggaagtgggcctagatcagggtgccgggcttgtgtgcaggctgt

SEQ ID NO: 26620 - DNA, 120 bp, Homo sapiens
gcacgtgcggtgttttccctccttccccagctctggttaacaagatcctctttcccttacagatccccagacgaggccttgcctggaggtcttagtggctgcagcagtgggagtggccac

SEQ ID NO: 26621 - DNA, 120 bp, Homo sapiens
gagcgggcagcccatgccagtgctgaccttcccgaagcctccagtaaaaaggcagagaaggaggccaagttggctgctccgagggcaggtgaacagggagaggccatgaaacagtttgac

SEQ ID NO: 26622 - DNA, 120 bp, Homo sapiens
cctcgggcctcccgagtttgcccttgcactgagtaccttagctttcggaacagctcggccaggccctgggctgggttctggggctgtagaggtgagcagagtaggtaggattcccaccga

SEQ ID NO: 26623 - DNA, 120 bp, Homo sapiens
cggaggtgagtgtggccgctgcccacatgctgcccctgggatgagtgtgtgagtgtgtgctcaccatccacacggccagcttgctgtggcccacccaagcccctgccacagcagctgagc

SEQ ID NO: 26624 - DNA, 120 bp, Homo sapiens
gggcgtgcatgagcaggagaaagagaaaaggggtaacaagggaggacccaacgctgggtgggaagagggattcagggcctcctctgaactggtgtcagcagccacgtagtctggtttggg

SEQ ID NO: 26625 - DNA, 120 bp, Homo sapiens
cctcggtctggggcccatagaagatcctgtggtcacgagctctatcggggttggtgtgtttggccacacgtaagttgtcaggcatcctcagcagggcaggatcaagatcaggaccagact

SEQ ID NO: 26626 - DNA, 120 bp, Homo sapiens
aatcgagttgggagtttgaggctataacccattttgtgctctgcacagcagggttttaagagcagccagggagatagtggcgttgacttgagtgccgagtctcgggagtcgtctgcgacc

SEQ ID NO: 26627 - DNA, 120 bp, Homo sapiens
cctcgcagcgcagctccccatatgggactctgaagccagaggagatgagcgggcccggcctggcggaacccaaggccgacagccacaaggagcaggctccaaagccatctgagcagaagg

SEQ ID NO: 26628 - DNA, 120 bp, Homo sapiens
ggacgttccagtcacagtggccagggcctgggtggaaggggccatcgtctcatcatcttcctcaattcctgggacagtagaagctagagagtgtggtcattccagtctgtgtgtctccac

SEQ ID NO: 26629 - DNA, 120 bp, Homo sapiens
catcggcaacgagcgttctctgaaaaacagaaagggctcggagggggccgagcggctgcaaggggctgtcgtcccgcctgttaacggggtggagattcacgtggactccgtgctgcctgt

SEQ ID NO: 26630 - DNA, 120 bp, Homo sapiens
cagcggctagagtgttggtgtggagtcctgcacatggccagtgctctgttgagttgctttaaagattgcttcactgacaccagacaggccagtgatcttccctgtttctgtcaggccacc

SEQ ID NO: 26631 - DNA, 120 bp, Homo sapiens
tggcgtcctgtctcctgtgccgtggggaaaatctggccatctcgctcatatgtggctccagtgaatgctgctcagtggagtttttgagtcggggaaactgcatcacgttaatgtatgcct

SEQ ID NO: 26632 - DNA, 120 bp, Homo sapiens
ctccgatttcagcttgccacctggttctgcctctggtcctactgggagtccagttgttaaacttcaggatgccttggccagtaatgtaagtccacacttccacttttggctccactcact

SEQ ID NO: 26633 - DNA, 120 bp, Homo sapiens
gcacgtgactcagttgctagcagctccatgtccttaaaaggtgcttaaatgttcctgcccaggttttgtgaccttccagtggggatcatacagttcctaagggctggtttatttggctct

SEQ ID NO: 26634 - DNA, 120 bp, Homo sapiens
gtgcgagcccagactcaggctgccttttctgtggccaggggtaaggggcacagattgagtaggagagccctcctcaggaggccccatctcaccatccaagggtccctgccgcctgcaatc

SEQ ID NO: 26635 - DNA, 120 bp, Homo sapiens
tggcgctctaccatgggctcaggagctggcagttgcatctgttgtggccactcggggctgcagctgaggctgtcgcagtgacatctggttcactgctctgtcctcaccacctgcaggggt

SEQ ID NO: 26636 - DNA, 120 bp, Homo sapiens
gaacgagtatcatttgggcagcgtttcccagaggattccaaggaatgtgagtgctgtacaatattcataggtgttgaatgaaaacaatgttttggaagtgctgggctctacgaggttctt

SEQ ID NO: 26637 - DNA, 120 bp, Homo sapiens
actcgagagtctgcggtctctgtcacatgcagatggacaccggggatctgcaggaagcgggggcactgttgcatttccagcctctgttaccagagccctctttttcagtttgctgagggg

SEQ ID NO: 26638 - DNA, 120 bp, Homo sapiens
gtgcgggctgccagtccatatttatactgccgggacatggctctccctgtctggagggcactatggagtgtggatatgggggtggctctctgcagacttgtgtggaggaaactgatggag

SEQ ID NO: 26639 - DNA, 120 bp, Homo sapiens
acacggagctgtaggtgcttttgggaaaagccatggatgggtttgggcaagtcatagatacatttggacgagccttgagtgtgttcaggagagccatggatgggtttgggcaaagccatc

SEQ ID NO: 26640 - DNA, 120 bp, Homo sapiens
agccgtgtcgcctcggctggtgagcagctcttgccgagccacagtgtcctctcctctcttacatgaaactccgtggggtggccacacccgtgaggccaggtcttacctggaaagggcttt

SEQ ID NO: 26641 - DNA, 120 bp, Homo sapiens
cttcgagtgtctggggtagttggtgagtgggaggtgggaagggtaggccagagcccacctgcctcctccctcctcctaggtctgacgctgcaccctccctacgttccctgaggtgcgtgc

SEQ ID NO: 26642 - DNA, 120 bp, Homo sapiens
aggcgtgttgtgagcaggcgtgtgcttccggcacacagggaacctagcagcctctgtacacacgccctcgtccccactgagtcccctgggtagagcagacctgtagactgtttccctcag

SEQ ID NO: 26643 - DNA, 120 bp, Homo sapiens
ctacgtcccttttgccgctctgtttccaggcagccacctcccgcccctgtacctggatggccatgtgtttgcaagtcagccccggctggttcctcaaacgatacctcagcagcagagtta

SEQ ID NO: 26644 - DNA, 120 bp, Homo sapiens
gggcggaattggcttgctcatctatttctcattgtctgtctggttttccatccccctcacatgtggtgaccagcacctggcccgccacggcagccaggaggcatttgttaagcgaataat

SEQ ID NO: 26645 - DNA, 120 bp, Homo sapiens
aatcgagacagggaagaggagtggagttggctgctccagactctgcttagttttcctttctcaaagttctccctcctgtgtcctagccggggaattagctaaaatggaattttctttggt

SEQ ID NO: 26646 - DNA, 120 bp, Homo sapiens
aggcgttggttatttatgcaggactggcatactttctgtgctgccaaggggtgatttttggaagtctcccctctaatgctggtgctgggcctttgggatggtctagccgcccctcagacc

SEQ ID NO: 26647 - DNA, 120 bp, Homo sapiens
ccacgacagtggacttccaggcagaatctgctccaagtgcaggcttgctgatggaggatgtggcctctgctgacctctttttaaaaacatgttcttaactgctgtattgtttggttacca

SEQ ID NO: 26648 - DNA, 120 bp, Homo sapiens
cagcgttatgtttttggaactcacctctgttgacgtatgtgctaggatccatttttgttgctgtgtagaattccagggtagggatatgctgtggtttggggttgctaccagtttttcatt

SEQ ID NO: 26649 - DNA, 120 bp, Homo sapiens
ttgcggttacctccccgaccccgttttcccgttcacaggccgccgctgcccagcagatcccgatctcccttcacacatctctgcaggcacaagctcagcttggactgaggggtgggcttc

SEQ ID NO: 26650 - DNA, 120 bp, Homo sapiens
ttgcggagctggcagctcacagccagggccttggccctgtgtgcagccttcgtcctgcagctgtttggtgcttgtctgctttggggccagtggggcggggaggggtgggagtttgctctg

SEQ ID NO: 26651 - DNA, 120 bp, Homo sapiens
tccgcagctggactcatccacctgatcccgaccatctgtctggcttttgcagatctcaggtgtacatgcaccccagcctgtcaccgcccagcaccatgatcctctctgggggcacagcct

SEQ ID NO: 26652 - DNA, 120 bp, Homo sapiens
actcggcgttcccaggcatgcagcccttggagatggtgaagccgcagtctggctcaccctaccagcccatgagcgggaaccaagccctggtctacgagggccagctcagccaggctgctg

SEQ ID NO: 26653 - DNA, 120 bp, Homo sapiens
tcacgaccttgccttttcttttcacccgcctctcagtgtgtgctggcctatcgtgctgttggttggtagccaccgtgcccattcctcagcgtgcaggaaatcagcctcttctgagtagcc

SEQ ID NO: 26654 - DNA, 120 bp, Homo sapiens
actcgattttcctcccggtccttctgcttgtccagtccacatcctccttggctccctgctccccctcacctcacccccttacccttcagcaggcctgtcagctctggctttaaaaggatt

SEQ ID NO: 26655 - DNA, 120 bp, Homo sapiens
cctcgcatatcttgttctagttagttaggccctgcagctaccctgttctcctgtcagcatgcttcaaaggacccccacagtctggaatccagcccagtcttgtttttaccaccacttgat

SEQ ID NO: 26656 - DNA, 120 bp, Homo sapiens
gaacgtgtgtgctgtacaaaggaatgcagagatatacgtccgatgcagctttcatcttttgggacttggcttcgccattacttctgactttcctcactcgtcctctccttgcccaccccg

SEQ ID NO: 26657 - DNA, 120 bp, Homo sapiens
ccccgtgtgcacccataaatctggtgtgcacccacagatcctatgccgctctgcatcccgagtgtcctgcagctgtgtccagtgtgtgacacactatcctggcagtgtgcaggcccatgt

SEQ ID NO: 26658 - DNA, 120 bp, Homo sapiens
tgccgcttccttggcaccttgtatgctttcagtaagcacttgctggacaaaggcagaaagggctgaagatagacgcagcccttagcagagatgtggatgagacacacttaacgctgttag

SEQ ID NO: 26659 - DNA, 120 bp, Homo sapiens
gcccgttttctcaccacctactctattccagcaagaagacgtgcctctgccatcgaaggtgtgaaatcctgggcgatctctcctgtgctgcagtagaaattagagcatgtcctgctttat

SEQ ID NO: 26660 - DNA, 120 bp, Homo sapiens
gtgcggtcgctctttggtgcgtttggggtttctccatagcatcattccccctcctgactgtcattgtcgcccagcagctgaccatgccactgcctcggtacggctccgggcagcagccac

SEQ ID NO: 26661 - DNA, 120 bp, Homo sapiens
ctccgttggggccccccgaaggattcctccgcccgggtcccagccgccagtcctgaacaccagcagagaggtaaggggaccccatctgcctctgaccctagggagggggccttgtgtcac

SEQ ID NO: 26662 - DNA, 120 bp, Homo sapiens
tggcgtgggactgccagggcagaaaggaaggtgaccatgtgtggggccatcacagaggcaggtcctggggactctgaacatgtcgagggctgagggccaggaatcagcattcctccccag

SEQ ID NO: 26663 - DNA, 120 bp, Homo sapiens
ggacggccatgtttcattggctctcccacttcactttaaaaagaacaaaatattgtgatggttcttgcttctaagaagaagccctcttgagtctggcttagagggaaagggcttgcagat

SEQ ID NO: 26664 - DNA, 120 bp, Homo sapiens
tgccgacagtaaacagaatgtcccttcaggaggccccgtgccatcgccacagacctacaggtaaagccactccctggggactgcgtgctgtgtagctgagcagttgccagagctgcggcc

SEQ ID NO: 26665 - DNA, 120 bp, Homo sapiens
agccgccagagacctggtccctctatgggccatgtgtcactgtggtgtttcagcactgggatgcacttgtgttccagttaaatttgggggagtgaggagtcaggagagtggttttggttt

SEQ ID NO: 26666 - DNA, 120 bp, Homo sapiens
gaacggctgacatttagtaggcatcaggactgacgtgacttcccattagatcctaaaaacaggacccactggccacagggctgcatcctggcaaggggaggagcgtggcctttcccagcg

SEQ ID NO: 26667 - DNA, 120 bp, Homo sapiens
tgtcggatgttggcgagagcctctggtccactgccttttctgcccgtgctggtgtgtgaaggcagcacgctctggccctgggctccgagggcttgtacagtccacccttgttacatgtgg

SEQ ID NO: 26668 - DNA, 120 bp, Homo sapiens
catcgctgcagacgccatgaggtatccccacgactacacaggtacttgtgggcctgaggagcgctctgcaagccgggcccccatggtctgcaagttgctccagctgcaccccctctgcct

SEQ ID NO: 26669 - DNA, 120 bp, Homo sapiens
caccgccctttgcctgtcctccatcacagcattccactcttgtaccttcatttccagagaaaggggtttttgtagattttcctcccattccatcttttctgttcttattttcactctcct

SEQ ID NO: 26670 - DNA, 120 bp, Homo sapiens
aggcggctgcaggtctcagcagacgctgtcccgctgctgccacaggcagattccagcagcctctggctacagagccttcctcaaaaagcaaaacccagagacagagcctcacgggacaag

SEQ ID NO: 26671 - DNA, 120 bp, Homo sapiens
gagcgggcctaggttgagagtcctgttgaactctgcacacggcacttaggctttttgaccgcagactttttttttttccacgtagcacctaattaacatccctgggaactaactagtggt

SEQ ID NO: 26672 - DNA, 120 bp, Homo sapiens
actcggcacagttctggctcagcgtcaggcttctaggccttttgtctggggcactgcatcgtgttggtccagaccctgagacggccagtgtcgctttctgcacagcaggacagccatgcc

SEQ ID NO: 26673 - DNA, 120 bp, Homo sapiens
ttgcggtgcgtctccttgagctctgtcctggaggtgccagggtggtcagtgacagccaccccctcacccttctgcgttctgggctgtcttaggtctgtggttgttttccatccaagagat

SEQ ID NO: 26674 - DNA, 120 bp, Homo sapiens
ccacggaccgtcccgagtgagcgcctctggccgcaggcccttccttccttgtgcctcctccatgtgctaggctttgactccatttctgtggtgacacgttgtgtattctcaacccctgcc

SEQ ID NO: 26675 - DNA, 120 bp, Homo sapiens
catcgtgaacaccacttggtgatggagggagtggacccgtgtgtggtccccaagtgaggccactgggagtttgtccttttcctcctttgcttcactcccagcagcagacccaggttgtca

SEQ ID NO: 26676 - DNA, 120 bp, Homo sapiens
tctcgtttgtcttcagacggcgggggcaggtccagggtgaggctgggtggagggctgaccaaggtccaaagggcctgcgcagcctccgggagggcagcttctccagccagaggcttgtgt

SEQ ID NO: 26677 - DNA, 120 bp, Homo sapiens
catcgtgtgctgggcttgtttttaagtaagaaacaaggaaatcactccagattctgtcattccaaggaaagggaaggggacagttcaggtttctcagctgttcttaggggtcactgagcg

SEQ ID NO: 26678 - DNA, 120 bp, Homo sapiens
ggccggggatgcaccccccaccagaggctgccttcagcgtctcacgggtgcaggacagcgctcaggcttgggctctaagctctgtgtctagtgtagaacatggggaaggagcatcttagg

SEQ ID NO: 26679 - DNA, 120 bp, Homo sapiens
aagcgggagaacggcctcctaccaacagcgcccaccccagagctgcctgggaaagggcagttttactgaaaggtgctttactgttcacctgcatctttcagcagctcccctcctgccctc

SEQ ID NO: 26680 - DNA, 120 bp, Homo sapiens
acccgacagttccaggcattccctacctgagcttcttgtctgcttttccttctcccactgcaagcggctgcttgtggggcctgggatgagccctctctgtccccaccggccctccttgcc

SEQ ID NO: 26681 - DNA, 120 bp, Homo sapiens
ctgcgggagccacacattcatctccacctggacacttgagccgcatggccagacccctcccacctgatgcggtggtgcgtgtgatttgtcaaaagaaagccttctggatgctgttaagat

SEQ ID NO: 26682 - DNA, 120 bp, Homo sapiens
gttcggtgcagtcaccacctgtgtgtgacctgagctgcagtctcttcgctgagatgcaggttttaaatgagacttggggggctgagggcaggcctcaggcctcccagcgccccaacccct

SEQ ID NO: 26683 - DNA, 120 bp, Homo sapiens
tcccgtggttttagagccaagctcaaggtagtaggacgtagggtcttattttgttttcaaacccccatcctcagagcgcagatacatgcagaggcttctgccaggataccacggggcctt

SEQ ID NO: 26684 - DNA, 120 bp, Homo sapiens
tgacgctggcagctctgccttggtcactggggatgcggctcgttgctcagccaccagtggccttgcggtattgtccaccatccactagagtgggatgaagtccagagtgtgggtatacat

SEQ ID NO: 26685 - DNA, 120 bp, Homo sapiens
cagcgttttttgtttttttttaaacattcatattgttttcaaacttggaattcatagacactctggctctaggttccttaagggggaaaacaaaagatgactttatttcacattcaagaa

SEQ ID NO: 26686 - DNA, 120 bp, Homo sapiens
aaacgttgacatcagtgctctccagccgtgctgtcaccctcctatcttctggatctgccttcgcgatggtcagtgacagcttctggaagctgagcacacacaggtgcacagccatgctgt

SEQ ID NO: 26687 - DNA, 120 bp, Homo sapiens
ctacggcagcatggcagctctggtggagccttctcccttgccatttggttcccctgtgccaagtagctgcaggctgcccctcaaatcttcatttgtcccttttcacttcctgcagaacaa

SEQ ID NO: 26688 - DNA, 120 bp, Homo sapiens
tgtcgtgttctgtgatgaatgggaaacgtaggcttccagaaagccagctctcttctgaaatgtgacggacctaagcaggaagtcatccaggacaggagtggctcagtgttggggatggac

SEQ ID NO: 26689 - DNA, 120 bp, Homo sapiens
ggacgctgtcgcccagccatgctccaccagggccaccaatgtgtagttggctggtggtcttcgggcatgtgagacctgctcttcactgtttccaccccacttggtggcctccaggatggt

SEQ ID NO: 26690 - DNA, 120 bp, Homo sapiens
ggacgcctttctcccgtgatctaaaggggacactgtactcaagcttttgacctcatgccttgtgtagtaaaaaaggatttgggggttttgtttggttcctgagagggttgtgttttgttt

SEQ ID NO: 26691 - DNA, 120 bp, Homo sapiens
agacgatggctagaggtgtaatgtgcagcttgtttatacggtattttgggaaacttaccttggatgggaaatcgaatcgtggattcaccaggccggtgctggcacactcaccctcgccct

SEQ ID NO: 26692 - DNA, 120 bp, Homo sapiens
cctcgtttcttggtcatttgaccagagagacctacagatcaaagaattctaattttacagagttcacacggaaattaggagtggcacggctgaaatgccttaacagaagctgtgtgggta

SEQ ID NO: 26693 - DNA, 120 bp, Homo sapiens
acccgtggctaagaagcatcttccaaatgcggcagcatcaagcactccaccctcttcccacggatggcatctggttgtgcacagtgcctgcctgtggccccgtcacttgccgtgagaaac

SEQ ID NO: 26694 - DNA, 120 bp, Homo sapiens
aaacgagctggtcagaggaggtaagcatttgatgtggcgtgttgtgttgtcacttctagcggtgcttttgcaggaagtggaggaggattatgctgtgctttggggtggggagggagcaag

SEQ ID NO: 26695 - DNA, 120 bp, Homo sapiens
tagcgaagggtaaaaggtaagaatgggctgaggcagcagttctcggttttgccattgcctcactgacctggggaaagacgtttcaccacctgagtcagtctccttaatcataaaacacag

SEQ ID NO: 26696 - DNA, 120 bp, Homo sapiens
tatcgacctcatggcgtagtgtggattcaaagtcaccagtagcttttagcttagtgcctagaaccagctaagaaaacttataaattacccccaagaaataaaacgctgtttccatgagga

SEQ ID NO: 26697 - DNA, 120 bp, Homo sapiens
aaacggagaccagccctgaaagaggctagtcctaaggttgggggcttgcaagatggaggctgtaagtcctgaggcaccaccactgttagcatggcatgaaccaaagcttaacagcccagc

SEQ ID NO: 26698 - DNA, 120 bp, Homo sapiens
ccacgaaattctaactggtgtcatctaatgctatgttgcccaacatggaaaaaaagtcttgcaggcagccaagaaccataatgaaggttattaaacctgcagtgtgcccttttggtctgt

SEQ ID NO: 26699 - DNA, 120 bp, Homo sapiens
gagcgaggctgagaagagtgatccatcagcctggttgcgttgctgtcagttaccctgctctgggtgccgactgttcagggaaaacatgggaaggggtgcattgacccaaccaaaagtacc

SEQ ID NO: 26700 - DNA, 120 bp, Homo sapiens
ccacggagtttaggggagatgcccccactggagcctctgatggtcatgcagcccccactgatgtccaggtttttttggttttgttttttgttttgagacggtctcactttgtagtccagg

SEQ ID NO: 26701 - DNA, 120 bp, Homo sapiens
acccgccttaaggaccacactcaactgtgaccttcattcctatgaacctcgcagcagtggtagaaggtatcagtagaggtggtcaggactgtggttcctgaagtcagccaagcctgccga

SEQ ID NO: 26702 - DNA, 120 bp, Homo sapiens
cgacggccagtgctgtagtgctgtgtgtttcagcaagttgtttggctcaccctagtcttggttttctcatctcttagacagacatcatcattgctcttacctcattggatgcttgtaagg

SEQ ID NO: 26703 - DNA, 120 bp, Homo sapiens
gtgcgcgtggaaggctgaactgagtgcctggcccagaggcagcatttgatcagacttagtgctcattatggttctataatgtaacgtgatgtgattaaatgggagatcattaccactgtt

SEQ ID NO: 26704 - DNA, 120 bp, Homo sapiens
catcgggaaggctggcttagggtcatttttctttctgtctctcactcatcaaccttctgcttctgtctcagggaggactagctcggatcactcagggtcagccactggaggtggcctttg

SEQ ID NO: 26705 - DNA, 120 bp, Homo sapiens
gaacgtctttgggaaacctgtgccctgctggcttcattcccaccaggacacctaccccatgatgtaaggtgatggttttactttgaagataattaaatgctttatttgctcgtagatttg

SEQ ID NO: 26706 - DNA, 120 bp, Homo sapiens
acacggagcacttgctcacacggagcacttcctgacatggaatgtttgaaactgccgttgagaataatcatttttcctttttttcagtttacccagttgaggttggatatttagaataat

SEQ ID NO: 26707 - DNA, 120 bp, Homo sapiens
attcgtacataaagtcacagatgttttcacagggaaccgatgcgtcttccttggtggaactggggaacctggtggtttcctgcatcagaggcctgtgttcactgagattctaaatgcttt

SEQ ID NO: 26708 - DNA, 120 bp, Homo sapiens
gtgcgcttgaggctctgccaggtgaaagttctcccaacctgtttagcctcaggagcaggtcctgaacacaggacacgagctccagccacccctctgccaccatgatccaggagaaattcc

SEQ ID NO: 26709 - DNA, 120 bp, Homo sapiens
cctcggggggtgaccgtgtggacagcagatgccaagagggtgccgggcagggaagccgcagtggtcagccaccctcccccacgctgctctgacctctgcaggtcccagctccagaggagc

SEQ ID NO: 26710 - DNA, 120 bp, Homo sapiens
cagcgccctggtggtggcctggtactcctccgcgtgccacgtgtccaacacgctgcgcccactcacctacggggacaagtcactctcgccacatgaactcaaggcccttcgctggaaaga

SEQ ID NO: 26711 - DNA, 120 bp, Homo sapiens
atccgaaaacactagaacaagagtgtggcaaagaacacccgtgctggggtcgggatgaggttgaagggtcttggtcaatgtacgtaatgagcagggtgggccccacgctgggaggacacg

SEQ ID NO: 26712 - DNA, 120 bp, Homo sapiens
tctcgacaataaagatattccgtgtctttacccctgaactaagacacagggagtatttcagaggccagcgtaggagtcattgacaacaaaaagccgagaacccagggccagcagtggagc

SEQ ID NO: 26713 - DNA, 120 bp, Homo sapiens
acccgatcctccttcatgaacacccagcaacctgagcaagtcccggccctgccctcagcgagcccggcaggcgtcctgggacagctcagtgttggagggccacctgaaccacgagccagg

SEQ ID NO: 26714 - DNA, 120 bp, Homo sapiens
cagcgtcaagactggcccttggcaccgtgctgtgtggaaaccctcccctctgagactccactgagacgtggctgagtgaaatcttcctcgtcagtggtcaaggtgtgtcatccatacagc

SEQ ID NO: 26715 - DNA, 120 bp, Homo sapiens
tggcgtttgtagttggtgtttgttatttattgattctccctccaaaggggcctaagctcgacaaaaccgttacagttgtcagaacccagccacagggctcagcccccttcccccacgtca

SEQ ID NO: 26716 - DNA, 120 bp, Homo sapiens
tcacgtctgcatcactactgtgggtgagcctggacggacgggggctggggctgcccatggcagcggcaagggatgctttccagagacagccaccacgcaggagggaggatcaccccaggc

SEQ ID NO: 26717 - DNA, 120 bp, Homo sapiens
ctgcgcaggcttcatgcccgtcttcctcagcctgctgacccgtggccctgctttgctcggggccatcctcctcaactgcatgtcttttgcaacccggcctggaaaagttgatgtcctgag

SEQ ID NO: 26718 - DNA, 120 bp, Homo sapiens
aatcgtccactgtgccaagaaccacgtgaggtgtcttcagatttgtcaactgctgtgtttccaaggggcactccttcagagttccatgctggacaaaccatacaggcccaggagcaatga

SEQ ID NO: 26719 - DNA, 120 bp, Homo sapiens
ggccgctctgatagtaatccaaagctctatgtctggggctcatctcagaatttaaccaaaggatatatgaaggacatgttggcaccgtactgaatcccttctctgaggttccggcatact

SEQ ID NO: 26720 - DNA, 120 bp, Homo sapiens
tgacgtactcataaccaaacttaattaaaacgtcctcgaatttaattttgtagcgaacagtccagttcattcatagtcctctaaccctaactgctcaaaagggatattgtggaaactcta

SEQ ID NO: 26721 - DNA, 120 bp, Homo sapiens
gctcggattgtctaaaggccaagtttcgcaagatttgtgaaaggagcttgccagaggtgcctctgaggaaaccaggggcttctgtgtggccacagcagggtgaggggagcgcatcttccc

SEQ ID NO: 26722 - DNA, 120 bp, Homo sapiens
aggcgtgaggcctcagtacccattgggagaatgcactccaaggtcctcagacaggcaggaccatcttggtcgaaggcactgggcattggactgcccaccctgggcacagatggaaaccag

SEQ ID NO: 26723 - DNA, 120 bp, Homo sapiens
actcggtccaaactcatcatttacagagggggaaaaaaggccaaacaggttaactctcatgtgtaaagttagaaacagaacaagactagaatccagaactcttattactaagacaatgag

SEQ ID NO: 26724 - DNA, 120 bp, Homo sapiens
agacgctgaagcatctttggcggggggccatggggggagaattgcactgcccaaggccaaacttctttcaagtgggactcgaaattgttctagagttctttcccctgtgctaagtttcat

SEQ ID NO: 26725 - DNA, 120 bp, Homo sapiens
agacgaaagggagaatggtggccattttggttcctggacatgcgcagatgccagtgaaagactcccctcttcagtgtcagcccctaggcttcagcagtaaactgtttacccaaatggctg

SEQ ID NO: 26726 - DNA, 120 bp, Homo sapiens
ccccgtgcaacatgacttagtagcaactaccatcaagaggcagaagcaacttccctgctccctgaatctgggctggccttgtaatttaactgagcaaatgcaatggaacaggcatcacac

SEQ ID NO: 26727 - DNA, 120 bp, Homo sapiens
gcacgcttccatttgttatttttggaagcccgccagctgtcatgtgaacaagcccaggccagcctgatggaagtgacagactacatgggtcacagccaaatcagccccattgtctcagct

SEQ ID NO: 26728 - DNA, 120 bp, Homo sapiens
ctgcgctagtgaagcctgctctcctcgacctggctttctacgtgaggaatagtaccacccatctactcatccatctcatctatcttatctatttattttgagacagggtttcactatgtt

SEQ ID NO: 26729 - DNA, 120 bp, Homo sapiens
aagcgagattgggataaaaaggctaaaatgtctctgtcagtttatgccagactggtgatgctcccaaggtggccactcacatttcccatgcctgcccctgcctcacctggatgcctcatg

SEQ ID NO: 26730 - DNA, 120 bp, Homo sapiens
acccgcagaagggcaggggccgcgacgggcagcagaacacatggctgaggcacacgcttccaaggaacggccctgttcacgcgtttccaagtaaagaacagcagggagcaactcaccgag

SEQ ID NO: 26731 - DNA, 120 bp, Homo sapiens
gcacgggcaagctgccgtgccggctgagaaaggagttagagacggacacactgaggccctgagcggcactgccgtcctcgggggtgaaggccactttagtttgctggacacagtgggaga

SEQ ID NO: 26732 - DNA, 120 bp, Homo sapiens
gtccgtgcagggaaaggccgtggaggttgctctccacatcctctaacagacgttctggagagggatggcttctgggcccagttcagggactaaaaccagctgccgaaggccatctgcatg

SEQ ID NO: 26733 - DNA, 120 bp, Homo sapiens
ggacgagggggctggagccacacagaactgggctgactctgggcttggagctgctcctctgtggggagtggatccatgtgtcattcacacgtcttcagaactcagacggggctccggcag

SEQ ID NO: 26734 - DNA, 120 bp, Homo sapiens
acccgtttggccttgggcactacttaaaggtctccgtgcctcaggttttccatctgtaaaatggggataaccctagtgtctcctgtacagggctgttgggaggatgaaatgggatgatac

SEQ ID NO: 26735 - DNA, 120 bp, Homo sapiens
atacgtgtgaagcacttgaaatattgcttaccacactgtacatgggccaacaggtgtgtgtaatgagcaccatttttgtctgtgaagtgtggataacgcttcctgcatctgcatttgaga

SEQ ID NO: 26736 - DNA, 120 bp, Homo sapiens
gttcgctggctctgtctgcctcaatttacttataatggggatgccaggagctgtggcagggaccatgtagagccagatgagagccctggtgcttacctggggaggtgttcaacacagatg

SEQ ID NO: 26737 - DNA, 120 bp, Homo sapiens
ctccgggggctgagctcgccactgccctgcaggcgtggtagaacaggttctgattccacgtgctccctaggggtgtctccccaaatattcagaagcctgtggactccacagtatggagaa

SEQ ID NO: 26738 - DNA, 120 bp, Homo sapiens
gtacggtaaatggtataaaagattaaaaattccacctgtgaaaggcactatcacgaatggaggctgcaggcctagaagttgctctgagtaaatcagggagtaaatgtgaaggtctaggac

SEQ ID NO: 26739 - DNA, 120 bp, Homo sapiens
gaccgcaaacctagcccatagccaaaagttgccaagacactggttagcttcccctcctgagcctggaactaaggaccaagcacaggtgcaaaggcacaggtgggcatttcagagagggag

SEQ ID NO: 26740 - DNA, 120 bp, Homo sapiens
ccacgcagctctctctctcactctgggctgcagtaagtatgccctcctcttacccctgggggaaggatagtaacagctccgcccatgggcactagcccaggtactgccctagtcccttat

SEQ ID NO: 26741 - DNA, 120 bp, Homo sapiens
cttcgaattcttaaatttcagacacccactcttgtaaacaggagatctgttacaattaacagatgcagctgtaactcagattcagttgtgtcgtatcaatcactccgtttaatgctccaa

SEQ ID NO: 26742 - DNA, 120 bp, Homo sapiens
tgacgctctgacttgtgaagtggggtgtgtgtgtgcgctcgtgcacacaagaaatatttgagtgggtacagttcaagagctagggacgtggctcataatgatccagcaaagagtctctct

SEQ ID NO: 26743 - DNA, 120 bp, Homo sapiens
cagcgttaaagtcaactgcttagaattgtgttaatataaaggattacatgtaaaatgggagataatcattccattttggtaaaaacacgtgtagtaccaacatgaataataatgagggat

SEQ ID NO: 26744 - DNA, 120 bp, Homo sapiens
ttacgaaaatagctaccaaaagacatccaaccaaataaatgaatacagcagtaaactaagctggtcctgtctctaatctacaacactattatctaatcaggaaagactgaaaaacagatc

SEQ ID NO: 26745 - DNA, 120 bp, Homo sapiens
ttacgctttaagaacactataattaaaagaggccttccccctttctgctctcccaaaccctgatcacaacacggttatttcaagattctacttgcaggagccccatttaaacaggaaaag

SEQ ID NO: 26746 - DNA, 120 bp, Homo sapiens
actcgttattccaatcatgattcctggaaccgtattcaaaagttgcttcttcaggaactccgcgtgtgccacattctctgcctgaagcccctacgcagagcagaatggtgaccatcatag

SEQ ID NO: 26747 - DNA, 120 bp, Homo sapiens
tggcggctctggaaccaaaggcagtcaggtcaaagcctggtttgtgggaagtagtactgaactgaaagtgagaaaattcaggctctagttaccacttgtcattactactgcagccttaga

SEQ ID NO: 26748 - DNA, 120 bp, Homo sapiens
gtccgactccttgaaaaccatcgttagggcaatctgatttgatttctccaacacagcccttgttcccagtcaactctctgggtggcgtggaccactctgctctgcggctggctgtgaaga

SEQ ID NO: 26749 - DNA, 120 bp, Homo sapiens
ctccgtctcaaaaaaaggaagggagggagggaattttgaagaaaacagtaactttccactacccaaaaacaagtataaagtaaaaaagttcacccagtactaaagtaatttttcaaatcc

SEQ ID NO: 26750 - DNA, 120 bp, Homo sapiens
agtcggaatgtccaacaactgactgtgaaattgattaaaatagagaaagaacttcacaacaccattttgttgaattaaaagaaaaaaggttccattgtaaacagagaggcactttaaaaa

SEQ ID NO: 26751 - DNA, 120 bp, Homo sapiens
attcgagtgatttttactttcttctttatttttgactactattcatatgctttatgtaaatggttttaaagcctacgtaattttttaataagaaaatccagaggttttccttagagacaa

SEQ ID NO: 26752 - DNA, 120 bp, Homo sapiens
taccgcagtacaccatgaccacgacatggcttatcatacacagattcaaacatactatcagtctgcattcagaaccactgagctatcttttcaatggttaaattacaaatatcaatcata

SEQ ID NO: 26753 - DNA, 120 bp, Homo sapiens
aatcgaatggagaagccaatttcaagtccatggacatgcaattggaacaatgtcatggaggtaaggaagcagcatgctttaaatgtgtctggtgccagcatcccttacttgatccctgga

SEQ ID NO: 26754 - DNA, 120 bp, Homo sapiens
ctccggtctgtactgggaaaaacgcccagaaaagacagccttgtgttattcctgggtctgggagtgaagctgccacccagggagtcttatctctagggcacagaccttgttattgatgac

SEQ ID NO: 26755 - DNA, 120 bp, Homo sapiens
ttacgaaagcaaacacactgctttctaggtgctcactgtcaagatagaaccacagaagaaaccttttttcctcttattccagttgcccagaaagtgggtatgttcacaggcttgagcttg

SEQ ID NO: 26756 - DNA, 120 bp, Homo sapiens
attcgcaggaggacggtgggccatacagggtttgccttaatagctctgtcccgcggggataggtatgctgcatctttctaactggaggtactgatgtttatcttcccttcggcaacagaa

SEQ ID NO: 26757 - DNA, 120 bp, Homo sapiens
cagcgatcccccctggatgagagctggcccatgccaagcaggcagccacgttcccatcaccagcctctcctggctcctgcttgtcatgatagaactcttcactctgccctcctgcaggcg

SEQ ID NO: 26758 - DNA, 120 bp, Homo sapiens
agacgaaatgttgaagcactgcgctgggcacaggtgaacgctcagcaaaggatggcagtaacaacagatgctgctgctaggactgaggagcgcgccacacacaatcacgctcacagaccc

SEQ ID NO: 26759 - DNA, 120 bp, Homo sapiens
ctccgtttatcacagagaacagtaagctgaagtcacaacgcgaataaacacgcttgaagtgtaatcctaatccatgagcttactatatttacggttactatacactggtatctttctcaa

SEQ ID NO: 26760 - DNA, 120 bp, Homo sapiens
agtcgcatatggtggttttcaagcccatggttcagtcagatacctaggtactagttcattcagccacagtgactgcccaacgcgcctacacaacagaagagtaatctaggcttttaaaac

SEQ ID NO: 26761 - DNA, 120 bp, Homo sapiens
aaacggtgattctaacagttgaaagactagttactggcatacaaaacaaacagtaagccattgaaatccttggagcggttggtaattcatatttcaaaatctaaagcttggatggtaaag

SEQ ID NO: 26762 - DNA, 120 bp, Homo sapiens
cttcggtggcaatgacagaaaaccggagctaccctgctggtgatgggaaatgacaatggcattgcaaagaggctctggaaacatcaccaaatgaaagtgggcaaaacagtcaggctttca

SEQ ID NO: 26763 - DNA, 120 bp, Homo sapiens
caccgggcagctgtagactgggaaaagtgctgtgtttctgacacatgagctttggctgacacacaacatgtcccgaccccagacaggagctgcacctagatctctagatctagcaatgca

SEQ ID NO: 26764 - DNA, 120 bp, Homo sapiens
ccacgaatctcacatcctagggtgcgtgagggtggatttgtgatgcattgacgcaaccaatatgcaaggaatcaacagaagttacaattgggagggtgtatgtcatctacagcagtacaa

SEQ ID NO: 26765 - DNA, 120 bp, Homo sapiens
ttacgtctcagtatccccaactgtaaagcaggagggaggaccctgatgtcaaggcccctctggcgcaggactgtgaagtgcctaggatgggctcccatggaccggctggagtccccagat

SEQ ID NO: 26766 - DNA, 120 bp, Homo sapiens
ctccggcagcacaccctgcgggctgcggctccctcccctgcccaagtgggtgcttctgagggaagggtccagatagctctcctgcctctcctcctgccttgacagggagcaggctgcatg

SEQ ID NO: 26767 - DNA, 120 bp, Homo sapiens
gggcggggcactgaggtgccatgtcttgctccattcccaacaccctctgtgaccttgggctggtctctctctctctgcctctctctctgtctgtcctcaggccctttgttcttgatgcat

SEQ ID NO: 26768 - DNA, 120 bp, Homo sapiens
gtccgaaaaccacatgtgcttctggaagatgtggaaactctcccagaagccctgggaggcaggctggcaggaaacctcctggggatcagagagcccagggctgccggatatgatattgtg

SEQ ID NO: 26769 - DNA, 120 bp, Homo sapiens
actcggtggcctctgcccggggctgctgctaccggagccctcccacacctgcctcccatgcttgcaggggagggagacagagaacccctcagccaggcccctcctgccccactactctgc

SEQ ID NO: 26770 - DNA, 120 bp, Homo sapiens
cttcgtcaaaagcagggcccatcagggtggaggcggcgatgtgtcagctggtattcaggctctggttgtgcgctcagatcgctccccctccccatctccccaaatccacccacccacccc

SEQ ID NO: 26771 - DNA, 120 bp, Homo sapiens
ccccggtacccactgcttggggccttctgggtggcagcacttcacagagagagaccgaggagcagccctgagcccttggctgtggggggtgggggaactgactcacttggcccccctccc

SEQ ID NO: 26772 - DNA, 120 bp, Homo sapiens
cctcgtgccgatggggcagcccccacacccatgggcgctggcaccccggcaggcccccgggttttggaagaggaagctgcagcccggctgcgcctgaccggagccggctgaggatgcgct

SEQ ID NO: 26773 - DNA, 120 bp, Homo sapiens
gaccgttgctccgtggtgggatggtgtgttaaagccacacagaggaagttacgcagcccggatcagaccgagagataaaagccccgatggtgatcgtgagtgatggcaagaggatttagc

SEQ ID NO: 26774 - DNA, 120 bp, Homo sapiens
cctcggcattaacttggagcggagtgcaggggggcagtgaagcgcccgccatctggcccgcgccgcgccggggggatgccccggctccccgacgagacgccgcgaagcccacccgggccg

SEQ ID NO: 26775 - DNA, 120 bp, Homo sapiens
gcgccgggaagccgctccgagccggggtaaggcgggcggggagagcccgggaggcgggcggggggagaggctgcagcttggccaggccggtttcatttttaaagggcttcggtgaccatg

SEQ ID NO: 26776 - DNA, 120 bp, Homo sapiens
gcccgggcccgggagccacttacagcggcccggcaaaggctcggatgcaaaagttgtttggtggcggctgctacgagctgagaactggagtcgccccagaggggtgtgtgagggtgcgtt

SEQ ID NO: 26777 - DNA, 120 bp, Homo sapiens
gctcggatgtgtctcggaaaaggaaactaaccctgctcccgcgcctctcccccaccccaattccaccgccaccgcttagagccacccccatcccgtgccctcccatctctctgcaaactg

SEQ ID NO: 26778 - DNA, 120 bp, Homo sapiens
tcccggccagtccggctggaaacttctcccggcgccgggagggggtcgggaggtgagggggcgcaggcactggtttggggccggcgtggagtcgaacctggaactgagcggcgcgcaggt

SEQ ID NO: 26779 - DNA, 120 bp, Homo sapiens
aggcggcgggaaggcgggaagagaggaccgcgggctcgcggggtccgcccgctccggagtaagttggccgtctgggctgggggcggcggcggccgggtcgccacaggcggcagcgccggg

SEQ ID NO: 26780 - DNA, 120 bp, Homo sapiens
agacggtaccatgaagctagagcatgccaagcactgagctggccctttgcatggggaggtttgacggaggctcagaggggattcacgcaggatgaagttgggggttaagctgggacagac

SEQ ID NO: 26781 - DNA, 120 bp, Homo sapiens
agtcgggggaaggcagacattcaggcgttgtcccttgcctccctagctagagaaggaggggtcctaggggcacggagtacttcagtactcaagtaatgttaacagcaacaacaacagcag

SEQ ID NO: 26782 - DNA, 120 bp, Homo sapiens
ttgcgtgcgagctgtctgagtgtgtgggccgagcctgatgccattgcgaggagtcctcccctcagctagccaggtggattctgtgttgtataaagcaggagcgtcaggggagggctctgg

SEQ ID NO: 26783 - DNA, 120 bp, Homo sapiens
tgacgtctgtgggcttctgttctgtcatctgcaaaatgggcacactaagagcacacactcctagggtcattgtgaggagtttgtggtttaattaacgtaggtaaagtgttcggaatagga

SEQ ID NO: 26784 - DNA, 120 bp, Homo sapiens
gcacgcagatgttagccgttgtcattctggtcatacaggtggggtaactgaggcagcccaggggtgacgggtaaaggcatctggccaaggtcacactccaggaggtggcgaagctgtgat

SEQ ID NO: 26785 - DNA, 120 bp, Homo sapiens
ctccggaggccgtccctggcagggcagggcagagctgggtagggcagccaggctgcagaagctcacaggaggggcttgatgccatcccccaggcagctggtacctctgcgtgtccttgga

SEQ ID NO: 26786 - DNA, 120 bp, Homo sapiens
acccggtgcccccacctcagagtcctgaggacttgatctcatgggccggctctgctcacatcacagggcagtcagcctgagaaggtagcttcttactcaggcttgtcagtggtgatgagg

SEQ ID NO: 26787 - DNA, 120 bp, Homo sapiens
aggcggcacgaagccaggagctggggctggatagtctgtggccataactgccccggggaccgcagggccaagcaagggggctgggctctggaagccaggaggaaggccaggataggggct

SEQ ID NO: 26788 - DNA, 120 bp, Homo sapiens
agccggtgggagggttctccacacgctctcgggcacggtcaacctctgtctctcgtattagagtctcgactgtattttctctcttaaatattaatcactgccttaacgtgcttgggggag

SEQ ID NO: 26789 - DNA, 120 bp, Homo sapiens
ggtcgagggcttgaggtggggagatgaccctcagagtcaagtccgaggccctctccttgccaaagctgtctagggtgtcattggccctggacctctgccctgcccccaccctcagacaga

SEQ ID NO: 26790 - DNA, 120 bp, Homo sapiens
gggcggctgttctggggaggtggtcacccctcccagtcccagtgccggcagagcctcatcccaggcagccagcctcaagccctggggtctagaagagtgctctctcccatccccatcccc

SEQ ID NO: 26791 - DNA, 120 bp, Homo sapiens
cctcggcgtctcgccacctgtgtgatggacttaaatatttcatcatgggctgccatccagctctgctttgattacaaatgtgtgtccgatgaggacggggaggccgccgtggcaggtgga

SEQ ID NO: 26792 - DNA, 120 bp, Homo sapiens
ggacggcagccttttgcagggctggcttttggagggctggctttggagggctggcttttggaggggtggtttttggagggggtggttacttctagatagatctgggttcaaaccctgatg

SEQ ID NO: 26793 - DNA, 120 bp, Homo sapiens
caccggccaaatttcagccccacactcgaaggagggagcagtggggtttcacctatctgccttctgtggtaatgaaacccctgtcgctagaggtatgcaagagaaggggagccttaccct

SEQ ID NO: 26794 - DNA, 120 bp, Homo sapiens
agacgcccatgtgtctggtccattctgtcagtcgcctgtggggtgccccagggatgcacgggcactcttcaactgggatagaatttcctgccccaaacattcctggaaatctggctgtgg

SEQ ID NO: 26795 - DNA, 120 bp, Homo sapiens
ccccgcccaccacactctggtggttcggctgacggaggagatcagtcattcaggggtctgcggtcctgatgagcagtgggtgcccacaccaggcctggcatttcatccttgctttctgac

SEQ ID NO: 26796 - DNA, 120 bp, Homo sapiens
tcccgggcagctcgtccatcagggcagcccaatgccctcaggtcctccgaaaggatctcagggtgttctgtgggggcaacccgaattggtgtaagaagactaagcagtcgatctgctgga

SEQ ID NO: 26797 - DNA, 120 bp, Homo sapiens
aagcggagcgaagcccgcggatgcccaccgcctctcccccaggcagcgtcctacctggatagaactgcctggagccactgcagagggtcctcgctcagttagggaatgtttgtcatatac

SEQ ID NO: 26798 - DNA, 120 bp, Homo sapiens
taccgctgtgtgcaaacagctgttgggagtgtggcacaaaggtgggtaaggcccctgctctcccagagttcacactcacagaaggttctggaaggaggaacactgtgggcagggttgaaa

SEQ ID NO: 26799 - DNA, 120 bp, Homo sapiens
atgcggggtgaggggcggtgaggagagccgctctgagcaaccaaggaactgagatgcattttctgggtctccttttgagccgaggcaggttcgagaggcagccagagactctgggttcaa

SEQ ID NO: 26800 - DNA, 120 bp, Homo sapiens
gggcggtcgccgtggctttgggaggctcattgctgggacaagcgagtccctggggaggcagcgcttggaggctcgcttgcctgcccctgcctgagtaattgcttggagctgggaggaaaa

SEQ ID NO: 26801 - DNA, 120 bp, Homo sapiens
agccgccttggccagctgcagctccagccctaaaatgccaggttggtttacgctgattcacgagcggggagggtgaccttgctgtctgttgtccagggcctgtgcacgaagagaatctgg

SEQ ID NO: 26802 - DNA, 120 bp, Homo sapiens
gcacgctggggaaggaattagcagcacagagagcaagagggacagcgatcaatgaaaccatagaaggagaatgagaaacacacacacagagagcgagagggagcaagagagagagagaga

SEQ ID NO: 26803 - DNA, 120 bp, Homo sapiens
gaccgtcagggccgctagaattagaatcagctctgaacagaatctccgtttccgctttgttaataatttattccctctgcaacttttcttaccaataaataggaagtaatctgttaagga

SEQ ID NO: 26804 - DNA, 120 bp, Homo sapiens
ccccggctttctccctggagtcaggggaggaggatgtgtctctgtgcccttcctccctagcagcatgggggcctgaggaacacgcagaacttgagactttaggatgtcagggtcagaggc

SEQ ID NO: 26805 - DNA, 120 bp, Homo sapiens
aggcggacagcccactcctgcccggtcattttgtgaacggggaaaccaaggcacagatagggcaaggccctggccaaggtcacacatggtgttaggggcagtcccctgagtcctaattcc

SEQ ID NO: 26806 - DNA, 120 bp, Homo sapiens
ccacgggtcagggcacctattgatttatgcacctgcccaagccatagggtttcccccgaaatggcagaggccacatccaaggaggagggtggggctagctcggctgcctttccttgcctt

SEQ ID NO: 26807 - DNA, 120 bp, Homo sapiens
ccacgattgcttcccccgtgctcgagtcctggccctctacctgggcacccacacccagggcctctcctgggcagcctccagccttccaccttgtatgcggcagcagcctcccgtcctggt

SEQ ID NO: 26808 - DNA, 120 bp, Homo sapiens
ttccgttggcaaatcagcaacagcagtcaagagacgtgccgcctgcctccccgtggaacccgagtctgcgggagcacagtgcggcccaggcaacagcgtcctttcccttttgggtgaagg

SEQ ID NO: 26809 - DNA, 120 bp, Homo sapiens
cagcgcaggcttgggtgcaaggccagctgcatgacgttgtctgttcttcttcctgagacttggtgaccattccagtgaccgcccctccacggcctccttagtcaggggcctggaagttca

SEQ ID NO: 26810 - DNA, 120 bp, Homo sapiens
tgacgaggcttgaaaagcatggcatgaaatggtttctccatagaatatttcatgccaggagctcaggcttggcatctgtgtaggaggctcctcctcacccggttctctggtgctatgggc

SEQ ID NO: 26811 - DNA, 120 bp, Homo sapiens
tcccgtggagtccaggggatgggtaagtgatgtgcggccatgggtacttagtgtcttatctgagacgtggagctgactgtagcacctgcctcctgtgggttgctgagagggtgcagggag

SEQ ID NO: 26812 - DNA, 120 bp, Homo sapiens
gagcggctgtgaagtgcccaacccagcccgggcacagggctggcactcagtgaatgttacaatcatcacactcttctgagtcagccgttcccgggacagtccacgccatgaagttccagg

SEQ ID NO: 26813 - DNA, 120 bp, Homo sapiens
atacgaagctgctgtttcaaaataatcgctcccatttggagacatttcctagggattctaggtaatgtgagacacagaccatctcacatggcaatcaataagaaaatagagactcagaga

SEQ ID NO: 26814 - DNA, 120 bp, Homo sapiens
cagcggtatgatttttgttgttgttttaattttcatgaaatatttaaagaggcagctactacttctgatactatcaaagggcggctttggagccatgctgaaaggctagaggtgtgccta

SEQ ID NO: 26815 - DNA, 120 bp, Homo sapiens
aaacgcgcagacccagaggaggctggcaaaccttcacccccactcagaggagacactcccagtctcagccccacccccatgacattatcagctgtcagatgctgactggggactggggtg

SEQ ID NO: 26816 - DNA, 120 bp, Homo sapiens
gcacgtggcaaagggggcttctttcttcttctgtggctgcatttccttggctgtggctgggccacagaattggtaagcagggccatgggcagcaggcatgggggcatctggcttagtggc

SEQ ID NO: 26817 - DNA, 120 bp, Homo sapiens
ggacgcgaagccagcactgagagagacgcaggcagcaggtggctgtgagatccagctctagtgccatgcagccccgagtgccaagcctgcttcttccacccacagccctggcccttgacc

SEQ ID NO: 26818 - DNA, 120 bp, Homo sapiens
cctcgcattctcacctgtaaagtgggaaggacagtgccttctgcgttttcacgaggatttgtttaataatgcatggcgtctgtccacgtaggagcactcagcaaattatttctatgtgct

SEQ ID NO: 26819 - DNA, 120 bp, Homo sapiens
tcccgagggccttccagaatagggcagagaaatcacagaaggcaggcagcctgaggcagggaggggaagggtgtgcctgtgtctgggggagctgtggggtggctgcagttccaggagcct

SEQ ID NO: 26820 - DNA, 120 bp, Homo sapiens
gaccgtctcccacttgatccttccaacaactccatgaggcaggtgttactgccatccttattttacagattagaaaacaggccaagtgaaattcagcaactttcctgaggtcacacagtc

SEQ ID NO: 26821 - DNA, 120 bp, Homo sapiens
agtcgttggcagaacatcccaggccagtggggcccaggggatggggttaccatctctcagtcacccagaaagacaaaaggaaggcacacaaaccccagtgggcaccgctctgtgccaggg

SEQ ID NO: 26822 - DNA, 120 bp, Homo sapiens
aaccgtgatgagtgtgggtgatgtggccggtgtggtccatatcgctcctcagggccagtgtcactggtgtgcgtggcagcctgtggcatacacaagatattgtttcccgctcttcaggtg

SEQ ID NO: 26823 - DNA, 120 bp, Homo sapiens
aagcgagactcaggttggctaagaatttgtgcaggccacacagctgtgtgcaccatgagctgggcagaagccctgcccaccagcaccatgggggctcccggctcctgccacacaggccac

SEQ ID NO: 26824 - DNA, 120 bp, Homo sapiens
acccgggagtgcagacactaagtgtggctctgaatcgagctgcttggattcaagtcctgcgtctgccccttaccagctgtggaacctcaggcagctcacttcaccaccccaagtctcagt

SEQ ID NO: 26825 - DNA, 120 bp, Homo sapiens
tggcgagaacttgcttcccacacacctgagtgtgtccctgggcagccaagccaggactctctccctccccaagaccctggtccctgaaagatcctgaatacccccgagtgcctcccaaca

SEQ ID NO: 26826 - DNA, 120 bp, Homo sapiens
cttcgggctctttgaacagagtccagctgggcctctgaactcctgggccagatgtttctcccgcctgccaatgtcaagctgtctggaggacagcgctgcgggcggaaaacgccgctggag

SEQ ID NO: 26827 - DNA, 120 bp, Homo sapiens
ccacggaggatggagggagacaggctctgaagcaaatgccttcagggctggctttctcatggctctaattaagcccttgccaatttgggcctggcggcctcatcttcccactgaacatca

SEQ ID NO: 26828 - DNA, 120 bp, Homo sapiens
ccccgctcccagctggaaagtcttccgcacttgttagctggtagcttttccttttctttccccacagccaccgttgtgtataatcccttcaagaagcggaaaacagcagcgctcccctgt

SEQ ID NO: 26829 - DNA, 120 bp, Homo sapiens
tcccgttagtctacgggctgagcgttgtgtcactggttcatgctggggtccctggtgaaaatgggccaggccaggggtcaggaaggtagaagggcagtgatcagggaagcaggtcagatg

SEQ ID NO: 26830 - DNA, 120 bp, Homo sapiens
ctccggtccctggattgcggctggacaggaaggacaccttccaggacacttctggacacatgtaagatcttggccggaacacatgtcccacttcgcagccattagccagagacatcagct

SEQ ID NO: 26831 - DNA, 120 bp, Homo sapiens
aggcgggacctggtctagctctgtccttcagtcagaacggggacggcacagggagtgtagaagggtctcgctgaagaatatgcagattctcaggcatgggttcacctctcatctatcggg

SEQ ID NO: 26832 - DNA, 120 bp, Homo sapiens
gtgcggggctgtgatgcctcagtatgtacccagcttccctcagcaccaccccctcgcataacttggtttcttctcttcttccccccaagagtggaccaggccatctacggctgcccctct

SEQ ID NO: 26833 - DNA, 120 bp, Homo sapiens
cagcgtccatccatgcattcatctacccgaggataccacggcgagcgccgtgaacccaggcgtcgccctcccccagtgcacagccaggtggcatgaccctgccctccttgcatgaatcac

SEQ ID NO: 26834 - DNA, 120 bp, Homo sapiens
ccccggcatgtgggcatccttcagcgagcgcttggccctggtgcccagccaggcattagcaggagctgcccactggccctccctggttccctgcccacagggccaggtgggaatccctgg

SEQ ID NO: 26835 - DNA, 120 bp, Homo sapiens
atccgatggaagggtgggaggcctagggcaccttccggtaccttttccaaagatgccttcctccgtccctgcatgacctggggtgagtccttcctcgccctgtccctcagtttccctgaa

SEQ ID NO: 26836 - DNA, 120 bp, Homo sapiens
gctcgctgaccattggtatttctcccacttggccggcccagactgcgaatgctacggtcactccaaccgctgcagctacattgacttcctgaatgtggtgacctgcgtcagctgcaagca

SEQ ID NO: 26837 - DNA, 120 bp, Homo sapiens
acacgcgaggtcagcactgccagcactgccggctgggctactaccgcaacggctcggcagagctggatgatgagaacgtctgcattggtgagagggcacggacacggcacagggaacttg

SEQ ID NO: 26838 - DNA, 120 bp, Homo sapiens
atgcgtgcagggtgcactgccctgcgaggtggcctctggggccccctgcatcagaatcacctggggagactgtgggaattctaactccagggccctctccagttgagcatctctaaggac

SEQ ID NO: 26839 - DNA, 120 bp, Homo sapiens
ttgcggttctccggtaagttttgcactggagttgcaaaacttaccagtggcccttccctctctgggcaactggaggggacactgacccttcctggctccaaagagctgtgactctggcag

SEQ ID NO: 26840 - DNA, 120 bp, Homo sapiens
gatcgccttgctgcgtgcatttgtgcaagtcccttcccgttcctgggcctcagcttcctcattcatcaaattgggaggcagatcagatcaaaggttttcagctcttttttgtggctgaag

SEQ ID NO: 26841 - DNA, 120 bp, Homo sapiens
gaccgccaaccaaaacgcaccagcctggaatggttgcccctgtcgtcagtagaggccaggtctcggcctcaggggctgtcccccaaccctgcccagccaggccccttgggacaccatcac

SEQ ID NO: 26842 - DNA, 120 bp, Homo sapiens
tgtcggtctgaattctggcggcagccttcagataattccatcaactctaagtgatcaaagccgctgacgtcacagggggccagctgcagggacagggcagggcctttggatccaattaga

SEQ ID NO: 26843 - DNA, 120 bp, Homo sapiens
ccccgagagccagcactgagctgcaaggtttctcagggtggacgatattcaccctctcccacagagccccaaggcaaccaactgggcccaccccgggagcaggaataggctgttcctcca

SEQ ID NO: 26844 - DNA, 120 bp, Homo sapiens
tgtcggagtcatagctctttggagatgggaaggacagcgacccctctagttgcccagagaggggaaggggctgacccaggccacaccagtgccagggcggggaaggtggggctgggacgt

SEQ ID NO: 26845 - DNA, 120 bp, Homo sapiens
gcacgcgcctgcaaactctctctggcattaagctgggccaataacagccacatttactgagtgtttactaagtgccaagcaattgctttggcactttacatctgtgggtttaatatacct

SEQ ID NO: 26846 - DNA, 120 bp, Homo sapiens
aggcgaatggttcacgtgtacacaaaagctcctaggaagaagttgctggaaaacataacaaccattattttgtaatccagaaatcatttacactttgatggaaaataagaacaaaaactc

SEQ ID NO: 26847 - DNA, 120 bp, Homo sapiens
gtccgaggatgaagaggctgtacttggctcgtgtgatggtgacattcaatctctgcaaacttgccaggaatctaggcaataaaaaaagagttccttctttgtctagaatgacttaacatg

SEQ ID NO: 26848 - DNA, 120 bp, Homo sapiens
tttcgaaggcttgtcctgagaattctcacctcttcattcagtactctttctgggcggcctacttcaaaccactgcttcaactactgcctagattgaagctgcccagactgagaatgtatt

SEQ ID NO: 26849 - DNA, 120 bp, Homo sapiens
gaacgcaacccactggagattctcggttctcctgtatcgattcaggaaaactccaaacaagtccacactggtagccaccaagagtttcttgaaagaaaagtacaagccgagccgggctct

SEQ ID NO: 26850 - DNA, 120 bp, Homo sapiens
tggcgtcccgtcgccaaggagacgggccgttgcattcgtcctccaggggtggtcttggttttctttcctctcccagtctgcaacgcggggcccaggagacgccctgaggatcccgcgggg

SEQ ID NO: 26851 - DNA, 120 bp, Homo sapiens
ctccggggctctttgcgatgaggggccggcgcgagcggggcgcgcctggctccggaggggtcctggcatctgagtttccccctcaggatcccggtggtgcggcccgggccgcccggcagg

SEQ ID NO: 26852 - DNA, 120 bp, Homo sapiens
cttcggagctccaggctgtgcccgacgtggggaagcgcgcccaaaccagcccgcgggccggctccccggcgacctcaaggatgccagaggccaggagctccggcccggacctcacgcgat

SEQ ID NO: 26853 - DNA, 120 bp, Homo sapiens
gtgcgccgcacggtcagccaggtctgcccgcccccgcggcggcccctgaccgtggcggacatccgttccggcatggagaacgagcggctgggggtcgtgcgggactccatgtttcagaac

SEQ ID NO: 26854 - DNA, 120 bp, Homo sapiens
tgccgtgggccagatacagggctcggtctctgccgcctcctcccagaactctcccagcatctcccattttacaagcgaggataccaagtcttggagaggtgaaattgctcaccccaattt

SEQ ID NO: 26855 - DNA, 120 bp, Homo sapiens
aaccggacgaggcagaactgtgctgtcttcagagcctgttcctgcaggccacacaactgtggaacagcacaggcccaaagggtaacaatgcaagccttgtgcaagccctctaggtggtta

SEQ ID NO: 26856 - DNA, 120 bp, Homo sapiens
caccgcagactgccagcaaccaccagcagccgggagagaggcctggaatgagtcccccctcggagccccagaaggaaccactgctgctaacaccttcatttcagacttctggcttccgga

SEQ ID NO: 26857 - DNA, 120 bp, Homo sapiens
gagcggtgagatttctgctgccttcagccaccaaggtggtggcgatttgctgcagcagccacaagaaacggatacagaggcgatggtttggggccaggaatgcatgatcaggtcttccca

SEQ ID NO: 26858 - DNA, 120 bp, Homo sapiens
agccgctggtgctgtgacgccaacctcctctggtcttggggctgccggagctgcaagcagcctcgtacatctgcctgtgtgtctcgtgccaggctgactggtttctctgtgtgccaggat

SEQ ID NO: 26859 - DNA, 120 bp, Homo sapiens
tggcgattagcaaggtgaccctgggcacatgtcacctctctgactaatctgtaaacccggcacaagagtagacctgcttcacaggtcataacgacgagccttctgttcattcattcagca

SEQ ID NO: 26860 - DNA, 120 bp, Homo sapiens
ctacgtgccaagaactacaggccctggagacagcgcagtgagcaaaccagccaccaaaccccatcccacagagcttgttttagggagaagagaaagatgatgacccaaattcatcagtag

SEQ ID NO: 26861 - DNA, 120 bp, Homo sapiens
tagcgagttgttgattggtgctacaaagaaacacaaagccaggcaggggtgcagttcccagtgggaggtcgggtcaggaagggtcaggggtcagcaggggtcaagcgcctagccttgggc

SEQ ID NO: 26862 - DNA, 120 bp, Homo sapiens
ggccgtaggctcagacgggcagcctaggagtccagaccctctgagtctggaccagcattcacgagggaggagccactgagacaaccaatctgggggcagcggggccctgccacagctgcc

SEQ ID NO: 26863 - DNA, 120 bp, Homo sapiens
atgcgcctcttccctttgctgattttagcctgtagctttttactatcataaaccataaccgtgagtacagtggcttttctgagttctgtgggtccttctggcaaattcctgaagctgagg

SEQ ID NO: 26864 - DNA, 120 bp, Homo sapiens
gcacgaggctcacaggtgaagacgcggcactggttccccccatttgttctgtcagtgccagtggctccgggtgtgcattcaaccctccagacttcagaggctgtactcgccgagaacagg

SEQ ID NO: 26865 - DNA, 120 bp, Homo sapiens
tgtcggcgtgaggtgtcctatttgaaaagatataagaggccagggacaaaaaacgcgaggcttctccaaggcagatggggcccggcgtgggctggaggtgacgaggaggggactcagaat

SEQ ID NO: 26866 - DNA, 120 bp, Homo sapiens
ggccggagatgctcatctcagcctagccctttaaaaccaaaatgatggagttcatttgcatttagatctccttggctccctcttttcatctaaagacaaatcctcacaaaaggctgctta

SEQ ID NO: 26867 - DNA, 120 bp, Homo sapiens
ttccgctctgcagcttgtcattcattacagaatgctgttctttttctattttggtaattataggctggtctataaaccagtttgtaagcattcactccagccattgaatatgactagcat

SEQ ID NO: 26868 - DNA, 120 bp, Homo sapiens
catcgctggagtcttttacaataatgggtattctcactcctaattctttaatgattaattgtaggagcagcacagggcttggtaattttcaagactaaaagctaagtacaaatagatttt

SEQ ID NO: 26869 - DNA, 120 bp, Homo sapiens
tttcgcatgtagcaattatgccacatactcagaatctttaccttagtgatgcaaccccatggcatctaagaagccacccattaaagcatttacagcacaacccctcatgcccagctcaca

SEQ ID NO: 26870 - DNA, 120 bp, Homo sapiens
catcgtgcatcccatcctcccaaccacagaaccacagagtttccagttttcagtttcagatacagacacagctgggtgggtgcatgggggagggccttggggggctgggcctggtttggt

SEQ ID NO: 26871 - DNA, 120 bp, Homo sapiens
tggcgttcttgaaatactcttcattcatccaacctgctgcagcgcattgaacctgctgatccaatcacctcccaccagtgatgctcctccgagtggctggagggatgtgctgcagagcca

SEQ ID NO: 26872 - DNA, 120 bp, Homo sapiens
ccccgttggctttgctcaggccatcctggttgaaagcgtgtgggcaggtgggccgagctggccaccagggacagatgttgctgatggagtttggacacgtagcatcaactccctctaata

SEQ ID NO: 26873 - DNA, 120 bp, Homo sapiens
ctacgtgagaggcagtgaatattctcatctgacaccaagcctatgaattgggtggtgtccagagacaggctcaagggtgaggtccttggccaaagtgacgcggctatcaagcaggagagt

SEQ ID NO: 26874 - DNA, 120 bp, Homo sapiens
gtgcgcctctgcctccctgagcaggagaagcagatgatgcggctctggatgacacggatggagacgcgctccagataggaaatggcagagctggtgggggggaccctgaaaatcaaccgg

SEQ ID NO: 26875 - DNA, 120 bp, Homo sapiens
cctcggctgctctcctggaccgccctccccaggagccaccagactccctcttgctcctggtccctgcccacctgctagtcatgaggtgggaaactgctcagctcccctgcccacccaccc

SEQ ID NO: 26876 - DNA, 120 bp, Homo sapiens
tcacgtgagcatcccagagcatgtgctgaagacctactgtgtgccgggcaccggagacgccacagcaaatgagacaggtctgtcccgtgctcacccagctgacctgccgcagagtgagac

SEQ ID NO: 26877 - DNA, 120 bp, Homo sapiens
agacgtggcagaaaccaccatttgaatgatccattcatctcaaagacgtgggtccaggaaggaaaataggtgacatcctgtggctggggtttctcacggaggctacagagtccgggggct

SEQ ID NO: 26878 - DNA, 120 bp, Homo sapiens
tagcggggccaggcgccggtgaggagagggatgtgtcagcctgagcacagacttcatgcaggaaggggcctgaaagttccaggagccgaaagaaggcccagggcagaaagcggacggtga

SEQ ID NO: 26879 - DNA, 120 bp, Homo sapiens
tcccggcagccaccaactgggcctggactcaggggtccgggcgggtggccagggccactccccctaggcggagctgctgtctgtggtgtctgtcacgtgtgaagccccgggagggccttt

SEQ ID NO: 26880 - DNA, 120 bp, Homo sapiens
ctgcgcctggctttgccgctgatctgctgcccccaccccggccccattatgaagggaaaagcgcttccagaaaagttgagcctgtcacggtgatggataacctaaatggactctccccgc

SEQ ID NO: 26881 - DNA, 120 bp, Homo sapiens
tcacgagcagatgtcgacgctgaactctgtcagaaataattaaacacctttcacactgaaaagcagcaggcagggcgcggctgctgcaccgacaccgccagccacgagggggctgccctg

SEQ ID NO: 26882 - DNA, 120 bp, Homo sapiens
tgccgagacccccgcgctggatgacccgggccacttacagggtcgagagaggagagggaccaaagagggaagaggacacatcccccactgtgcattccctccaggcagggcagtacagag

SEQ ID NO: 26883 - DNA, 120 bp, Homo sapiens
tggcgaggggccctcctaccaggacagttatgcctgggctctctctccagacctctgtttcctcagctgacaatgagtgggtgggactagttcttgagcgttccttccaatccaagattc

SEQ ID NO: 26884 - DNA, 120 bp, Homo sapiens
aagcggtgcgggctgcgggagcatcttccaggcaccagcgctcaggcagtgcgcccgtgctcccaggctgccatccacccaacagagcagaagcccacacccacaaatgcagcctacaca

SEQ ID NO: 26885 - DNA, 120 bp, Homo sapiens
caccggggccacttctacagctcctccagacctgtcccttcacaaacaccgtgggtctggggtggaggaaggcaaccactggtgcgtacattgcgccactgaataggaacaggagggccc

SEQ ID NO: 26886 - DNA, 120 bp, Homo sapiens
ccacgtggtggaagaggacgccgttcgaaagcaccttttggagatgggtcctacgtgccttcagttatcatcaccacctttcctggctatttcatcatgttagtcaatgtccttttgacc

SEQ ID NO: 26887 - DNA, 120 bp, Homo sapiens
ccacgtgcacaacacatactgtatacccacctatccacacatagtacacgaagcacacaccctcattacacaaacacatctagcaaacacacctacatacctacaccgcacccacactgc

SEQ ID NO: 26888 - DNA, 120 bp, Homo sapiens
attcgcttcaaactgcccggtgtaacttctttccttcttcaagccctccttgaaattgatgtcaagatgagcatcagtgttcatgggggaggctggcatttgcttctctttctcctgtgg

SEQ ID NO: 26889 - DNA, 120 bp, Homo sapiens
tcccgcccctcctgaaggatcccaataggacccaggaggtccagggaatcttacaaaaggaacaggactgtggaggaggaaaaggggttgcttttggttttgttttttaatttccatttc

SEQ ID NO: 26890 - DNA, 120 bp, Homo sapiens
aagcggggctcgcatcccgccaggggctctactctaggctgctgggaggtttgcccaggccctgacttaattcaaggaaagccgaacgcctcccatctctggaggccatcactctcggga

SEQ ID NO: 26891 - DNA, 120 bp, Homo sapiens
tcccggcagctgggcctgcaagcccgtctcgctgccgtcaccagaaatcctgcgtgccctgaaggccctgcagcgccccagtgccaggacctggcgccaggtgtttctgttggtgatgcc

SEQ ID NO: 26892 - DNA, 120 bp, Homo sapiens
tgccgtttgtttgttatttactaccacctgctggtgaaacatgggttctgcatcccccaagtgaacgccgccagcaacgcacagaacatttccaaaccctggagaagagaatgaggagaa

SEQ ID NO: 26893 - DNA, 120 bp, Homo sapiens
gatcgggctcagacaccaagaggccttaccggaagcaagcagcagagcctttgcttacaagaaaacccaatttccatttcccggctgttctccccaattttgagcccctgaatgttcaga

SEQ ID NO: 26894 - DNA, 120 bp, Homo sapiens
agccgcacaaaaagaaagttctctctggagcctgtaaggtcatgacagttagtgggaacgtggcctacctgccatctccttttcaaagaagggctggatgagctcgccaaacgtggtcct

SEQ ID NO: 26895 - DNA, 120 bp, Homo sapiens
agccgggaaataaataaaagagagaggtggaatgaaaaggaatgcatttggcaaagaacacattaaaaatggacggcgtggggaagacactaacgaggatgttgcccacagaggagccct

SEQ ID NO: 26896 - DNA, 120 bp, Homo sapiens
cctcgctgcacctggaattgctgcgcagaactcggcgccctccagggtgctgcggaggatcagcgttctggccgggggctgctcatctctgggcgatgtgcctcaagtgcgtccacattt

SEQ ID NO: 26897 - DNA, 120 bp, Homo sapiens
tcacgtccaggagtggctggatgtggaggtatcagtcaatccctaattagaatacattatccatcttcctgacacttcagtgaaatgtctattccactctgagctgcagctttgttcaga

SEQ ID NO: 26898 - DNA, 120 bp, Homo sapiens
cttcgctcaccgtacccccgtggctcggttctgttttatcacacatcaaaaaggccgtatgctcagggcactccaggcaccagtgcagagctggaggtctgcacagctgcgaggggtatg

SEQ ID NO: 26899 - DNA, 120 bp, Homo sapiens
agacgccagtcagcctggggaacttggcgaggcccagcagagcacggcctgatgcggcacgagccgtccggctttgtgcgaacactggcctcttttgccctcctgactattattaaagcg

SEQ ID NO: 26900 - DNA, 120 bp, Homo sapiens
atgcgttgcctttccgctcctcccctctcctcccaggaccagagcgtggggctccctgggtgttttccccagtcctgcctctgatctggctcgcagctccgactgcagactccaccggag

SEQ ID NO: 26901 - DNA, 120 bp, Homo sapiens
caacgaggcaagctgaggctgaagacttggactcgataaatcagtttcgctcagttccaagtctgaaccagggcaagcctcacaagaggcactgcaggctgaacgcggcctaatgtggtt

SEQ ID NO: 26902 - DNA, 120 bp, Homo sapiens
tcgccgagcttggaagtcaggtgactgggagggaacttagttaaaatgaaagtctatggggaagctggcctttcttctaacactcctgtttgcttttttttttttttttttttgacacgg

SEQ ID NO: 26903 - DNA, 120 bp, Homo sapiens
ctacgcccagccggaagtttgctttttattgagagctcaagagaaagggcagaaatgttttcatgatcaatgtgaaagtgttacttagaacaggggttggcaagctacagcccgcgggcc

SEQ ID NO: 26904 - DNA, 120 bp, Homo sapiens
agccgtgcccttttgtgtctgtgttgtgtacggctgcctttgtattacatcagagctgagtcgttgtgacagaagccatatagcctgcaaagcctcaacgagtgtctctccatccttttc

SEQ ID NO: 26905 - DNA, 120 bp, Homo sapiens
ccccgatttagaatagcctctgggctctggatatctgcccacacctgggcagaagaccatccactcacagtgaacaatttgagacaattcagatgtaaacacactgttcagagccagtgt

SEQ ID NO: 26906 - DNA, 120 bp, Homo sapiens
gcccggccggcagggtgtttgtgatggagatcccatggctgagggccatgcagaacaagctcgtgagaactgctactccctcgccagcatgctggaaagattcctgcttcaggtttgggg

SEQ ID NO: 26907 - DNA, 120 bp, Homo sapiens
tagcgagagaacgagggagggggcacctctgctgggaactggatgaatatgttcactttaaagttatggggtcaccatgtttctacgaggtagacagccaaagtcaagatcgagagcaag

SEQ ID NO: 26908 - DNA, 120 bp, Homo sapiens
aggcgagccagcatccagtccctggctccaacatctgctgagatagccctgtatccttatcctaccgcccccttcccccacctttcttccctaagccagtggttctcaatttgattgtgc

SEQ ID NO: 26909 - DNA, 120 bp, Homo sapiens
ggacgcggacgctgctggtcagggcatcacacctggagaaccactggcataagcccacctacacagggcccccggggtctgggggaagctgctagagagggagggtgtctttccgccagt

SEQ ID NO: 26910 - DNA, 120 bp, Homo sapiens
gcccgtttccctcaggtctccaggggagcttccccaggctggcaagggaaggggtggacaggaagcagccctgtcccttccctctgcatcccccctccgtctcatcctctcccctcccat

SEQ ID NO: 26911 - DNA, 120 bp, Homo sapiens
ggacgcagggggtgccagccagtcaaagagcaccggctgaaaggcggacagccccggtggggcacagcaccccctgcagcctgcacagcaggggacaggcctgcggctttgagcgcagct

SEQ ID NO: 26912 - DNA, 120 bp, Homo sapiens
gagcgccccccgctgctccccgccactgtgctgtctccacgccagctttgatgtgtcacgtcagcagcagggctttcagaggccgcttctagaagccctgccaaactgtcttagcaggaa

SEQ ID NO: 26913 - DNA, 120 bp, Homo sapiens
ggccgctcctggccacagagaaggctcagccccgactcaggcccctggccccgggtctccctgctcggtggcaccgcagcacccagttgctcccgtgctgcttccgtgcacttaagggca

SEQ ID NO: 26914 - DNA, 120 bp, Homo sapiens
gtgcggctttggtgggtttcccggcctgggggcagactcgctgatctcctagccctccaaggtgccgcccgctgttttgctgttctgaggcagccaagtgtgcaggtgccaaccctggct

SEQ ID NO: 26915 - DNA, 120 bp, Homo sapiens
gggcgtcacttgacttctccccagtgggctttctcacactgggatggcatgagcctgcatcttcctgtcccatctccaggccccactctcagggatcctaatgtccctgtgtcaacatgg

SEQ ID NO: 26916 - DNA, 120 bp, Homo sapiens
tcccgcactcttctaggacacatgaggattgggcttagctgattcgaggcttctcccactcctagaaaattcacctaggcggccgggtatggtggctcatgcctgtaatcccagcacttt

SEQ ID NO: 26917 - DNA, 120 bp, Homo sapiens
aggcgtgggcaaagagagagaaacccatgggtgtcgctctcttctttccatttcagtggttggggcttgagccaaaggacaaaatgttctaatatccataaaagctgccagctgagggcc

SEQ ID NO: 26918 - DNA, 120 bp, Homo sapiens
ctgcggtggagtgcagggctgtgggaaacaaatgaactctccaaaacagtggttcctgggacccagtgactcgactccctgagagcatccgggcaaaaagctggactcagctattcagga

SEQ ID NO: 26919 - DNA, 120 bp, Homo sapiens
ccccggctggaggctggcccccagctagagacggcacgaggcaggtctggagcctaagcctctgctcgagaacaacagagcaggtgcagtgcagagaaaggagcaagggctccttggagg

SEQ ID NO: 26920 - DNA, 120 bp, Homo sapiens
cttcggatgaagggaaaggggcgctaaggagggtgggaggaggagacaaaggcagggaggtggcagcggaggtggctgtccagccaacatcaactgcactccatccaaaccagaaagatg

SEQ ID NO: 26921 - DNA, 120 bp, Homo sapiens
aggcgtatgcacacaaagggaggccagtagacagaagggtttaacaaaaggcccagcaagctgagatggcctaaaggtgcagttcctcatgctcaagtgcttctcgggtaacctctccca

SEQ ID NO: 26922 - DNA, 120 bp, Homo sapiens
aaccgttgttcttctagacctgctgctttagatgctgaacttcagaatcaaaaaagcagtcggaaagtctcatgtaaacgctttcatgtaaagacaaccagctttgcaggctatgtcctc

SEQ ID NO: 26923 - DNA, 120 bp, Homo sapiens
cttcgggaaagcagaaagtggtgtgttagactcaaagattaaatttggcctcatattgcacaggttcaaaggacgcaaccatttgggggggaaaggaagaaagtaaagctactgaggaac

SEQ ID NO: 26924 - DNA, 120 bp, Homo sapiens
ctgcgaggtaaatgagagggggttagggcgggtggaggggaaggtcaagaggcatttcaatgccagatccaaaaaccgttctgcattcagtcagctgtccaaaggacctccgtcccattt

SEQ ID NO: 26925 - DNA, 120 bp, Homo sapiens
aaacgtgcattcacacctcctgttctgtgccaacaatatgcaagttaacactgattgaccatcattccttagctgtgttcatgatgagtctcattgtagtccatgatatgtagctgtcca

SEQ ID NO: 26926 - DNA, 120 bp, Homo sapiens
gtccggggtcgggggagacgggtgagggccatctaggttcaggggaatcttggcttccacacccaagtctttgcccagttctgtctttaggctctcagaaaggctactggtcatgccgtc

SEQ ID NO: 26927 - DNA, 120 bp, Homo sapiens
aggcgtgaaccactgtgcccagccaataataattttttaaaaagatgtttctttccaccaagagagaccacagagctgggagcagtggtctgctgtctgtagcctggggctgggactgac

SEQ ID NO: 26928 - DNA, 120 bp, Homo sapiens
cctcgcctgaaacacccctttttcttcattttgaaccttggacttgcagtttaaattggggcttcctgtcaccagacttgttttctttatgagggaaacataatatctccagcacccggg

SEQ ID NO: 26929 - DNA, 120 bp, Homo sapiens
tggcgttctcatcttatgcaaaacctcctgaaataaatcagtcatcctgcaagcgggaggaggcgggggccagaggaggagggagaaggtggggagccaggggatgggacgccctgccaa

SEQ ID NO: 26930 - DNA, 120 bp, Homo sapiens
taccgccctcactccccccagcatcaatgggacaccccagaggcccccactggcctccccatcactttgtctgccaccagagggcagcacacacgggctctggcacctggccttcaatct

SEQ ID NO: 26931 - DNA, 120 bp, Homo sapiens
ggccgagcgtctcctggcctccgaactcactgccacacctccagggtgcctctacccgctcaaaggtcatatctgggggaaatgcaaatttgatgtctcttctgagatatgacctctgca

SEQ ID NO: 26932 - DNA, 120 bp, Homo sapiens
cagcggggcacaaagccctgggggagacaagaggcctcccctgcccccagctcttgcccaacctgttagggagcagtgctctagccagcgccttctcagggcttcaggaggccagtgtgc

SEQ ID NO: 26933 - DNA, 120 bp, Homo sapiens
ccacggtcacggtccctgccttcccatccctgctggctcgtgggatgtctacggggcttgcctggcacccccggccctcctctgcactcctcaggaaggaaggttcaggatccctgagct

SEQ ID NO: 26934 - DNA, 120 bp, Homo sapiens
aaccgtcacggttaagggtttcctcccggtggctccccagcgcccctcagcccggcctgagacttatcactgccccccagctggtgcccccctcctcctccaaccacctcaccctgggtg

SEQ ID NO: 26935 - DNA, 120 bp, Homo sapiens
tcacggaagtctggtcaggggacacagggccctgccaggagctgagggcccacagctcggccactgtgcagagctggccaaagaggaagtgccacggccagcattgatgttgccatccca

SEQ ID NO: 26936 - DNA, 120 bp, Homo sapiens
gtacgactgcagcccagctgtgttgcagaagtaaaggtgtctgcccccatgaagccagcccagaggagggaggagctgggatgccattcctgggaggggggcctcctctggggaggcctg

SEQ ID NO: 26937 - DNA, 120 bp, Homo sapiens
ggtcgagatgcttgtgagccaaagagtcatgctctgttgggtggcaggacaggtgtgtgatgggacctttgcagccagccttctcgatgggagtcccagctccttcccaggagctccgtc

SEQ ID NO: 26938 - DNA, 120 bp, Homo sapiens
gagcgttaaataagtgaatcgcatgtaagcagatgtgagtgagtgcagctcttgtccctgttttgacaacggattgcgttctctcatgcagctgtgctgggtgatttcaccattgccagc

SEQ ID NO: 26939 - DNA, 120 bp, Homo sapiens
ctgcgtctcttcctctgtgaatacaggttcctttagcagccaactctggggtcctttcccagcacagatgtccagagagaggcacacggtggctgtgggccttggggggttctgggctcc

SEQ ID NO: 26940 - DNA, 120 bp, Homo sapiens
cagcgggtgcctgggatggccttggtgctcctgttctcacctgtactctctgcccccagggaaggctacaacaatccccccatctcaggtgagaatctgattggcctgagcagagcccgg

SEQ ID NO: 26941 - DNA, 120 bp, Homo sapiens
cggcgcccccacaatgccatctttgtcaactttgaggatgaggaggtgcccaagcagccactggaggctgcagcccagacgtggaggagagtctgcactaaccccgtggaccggaaggtg

SEQ ID NO: 26942 - DNA, 120 bp, Homo sapiens
ctgcgctgcgcctggccccggtggctccagcctctctgttggcttcccgtgtttacccagctgctccctgttcctggctgtggggttggctgcactgacctttacccattccttagtgca

SEQ ID NO: 26943 - DNA, 120 bp, Homo sapiens
tgtcggtataagttctacattcccaaggttgaaaatgcttcttagagttcttaagaaaaatatgcgtgcgttgttcagatgtgacataaacgtggagctctgggatccactgagctctta

SEQ ID NO: 26944 - DNA, 120 bp, Homo sapiens
taccgttagaactggaaccgtgctgccaggcagccctccttccccgggcttgcgggtgccgtggagtcctgcgtccccactggcatgagcatcaggttcacaggccactgccacctggag

SEQ ID NO: 26945 - DNA, 120 bp, Homo sapiens
gcccggcgcttcccttacgcagtgtgcctgtgggagaccacgtggatgtcttgttgatttccagcagtcactggggcacactgtcagtggctccttattgcccaccaggcacagcccaca

SEQ ID NO: 26946 - DNA, 120 bp, Homo sapiens
gctcgtgaggcccgctgccccagccccctggccctctacactccggccacactgacctttgcagtcctccccgggccaggctgtccccttcagccctgacgatgtcccacctcaggcacc

SEQ ID NO: 26947 - DNA, 120 bp, Homo sapiens
agccgtactccccaccgcgctgtgggctctatgaggacagcgaccatgtctcttatcgtttgagagacccagccccacaactgcacttggcacaggctgggcatgcagcccaggcttctg

SEQ ID NO: 26948 - DNA, 120 bp, Homo sapiens
acccgctccacgggccccaggaaaagctcgtacagataaggtcagccacatgagtggagggcctgcagcatgctgccctttctgtcccagaagtcacgtgctcggtcccctctgaagccc

SEQ ID NO: 26949 - DNA, 120 bp, Homo sapiens
tccggccttcccccagcacctgcccagaagctggagtcggggtgccccggccatcctcaggcaacaggggctgaggctgaccatgggtcatagctgctggccctctggagctggccccct

SEQ ID NO: 26950 - DNA, 120 bp, Homo sapiens
ccccggcctcacctctcagtctcgctgagccgctccacggcccggaaccaggccccaaattgctcatctggcgcgatgctgtagttgttgcaggccgactgcagcagcttgatctgggcg

SEQ ID NO: 26951 - DNA, 120 bp, Homo sapiens
cctcgaactcctggggccagagggaagcacagggcggtgacaaggccccccgggcagcacaggggccagtctctgggtctttgttcttggggtcccttcctcccctctactcccatccag

SEQ ID NO: 26952 - DNA, 120 bp, Homo sapiens
ggccgtcagaaagtgaccccttgaccattacagtctccccacctcatgctgcactatcaagagtgcccaccagggggcagggcacgcacacccctggattgaagccggtgctgggcacca

SEQ ID NO: 26953 - DNA, 120 bp, Homo sapiens
gggcgggtcctgcccagtccagccatggatgagaccccagtcccagcctcccttgagacctgggggcagaggcacccagctgagctgccctggatctgggtccacagaaactgtgtgatg

SEQ ID NO: 26954 - DNA, 120 bp, Homo sapiens
ccccgaagcctgccccacgcctggactccagccaaggcatgtaaggccaggtggactcagcagtgtgaggcaaagcacggtgcccggcttggatgccacatgtgttgagccagctgtgct

SEQ ID NO: 26955 - DNA, 120 bp, Homo sapiens
catcgcgctactggatcacctctaatcattttttcctttttttcttttttttatccaaagcccagctggcccatcacagggtcatgtgtgaaaagagggctccatgcaggtgttcagaag

SEQ ID NO: 26956 - DNA, 120 bp, Homo sapiens
tcacgcagcctggggaaaatgtgccaaaatgtcagcatggaaaggattcacagtgatctctaatttctttctcagacctttatcaagttcttactatttatgtgtttgtttatggagatg

SEQ ID NO: 26957 - DNA, 120 bp, Homo sapiens
aagcgatcctcccgcctccacctcctaaagcgttgggattaaaggtgtgagcctccatgccgggcattactttttaagagcatatataacttagccacgagaaaaacagcagcatttttc

SEQ ID NO: 26958 - DNA, 120 bp, Homo sapiens
aaccgtgggcagtgggagcagcgaccccaaattcagccccgggccccgcctccaggccagctcctggcagggtggccccaccagggtgaagggcggctgtccgcggcctccaggtcacca

SEQ ID NO: 26959 - DNA, 120 bp, Homo sapiens
ccccggccgatctagaggttagggctctagatggggcggggattcggttagagagggcagggtggaggggaggatagacaggaaccagggaggtccaggcccagtgggggctgagctgag

SEQ ID NO: 26960 - DNA, 120 bp, Homo sapiens
gagcgggggaggcggggccgagaagggcggggcagaggagtgggatgagcgtggttggggcagggccagtggggcagggtcaaggctgtgttgaggggtagagtgggcgtggtcggagcg

SEQ ID NO: 26961 - DNA, 120 bp, Homo sapiens
agccggtgggcgggacccggcggtgtggagctgcacccggagtttgtaaggatcaggaaagctgcctggagctgggcagacaggctgacccagggaccctgaccacctacctgagcttcc

SEQ ID NO: 26962 - DNA, 120 bp, Homo sapiens
gatcgtttcttagccaaggtgaaaggccctgagccctccagtgggctctgagggtttgaatgtttattctaaatgggctccaacacggagtgcgcgtgcgctcaaggaccagctggctag

SEQ ID NO: 26963 - DNA, 120 bp, Homo sapiens
gagcgccttctctccccgaggggatctggaatgttcatccgcggtcttcccagtggtcctctcctgagcaccctgggcatggggttgggaagtgggcacacttcttcagtgcgtggtact

SEQ ID NO: 26964 - DNA, 120 bp, Homo sapiens
gcacggcagcgccctgggcagaggagagaactgcccagctcagcggggagaaatcccagtggtgctttccgttccccccaggctcgatgactgccatacttaccagctgggggcgctggt

SEQ ID NO: 26965 - DNA, 120 bp, Homo sapiens
agacgctgtggaaggcaagagctcttgtcagccccggtgccttcccagggcagactagggggctctcagtgcttgctcctgagcgctaccctgtgagtctggacacatgcaacaatccaa

SEQ ID NO: 26966 - DNA, 120 bp, Homo sapiens
tcccggagatgcatgacttgacgttaggccctctggggcagatcctatagggcagcagccctaacactctgctaccgtgatttcccccagtgcctcggcaggcaactacagtcttccaag

SEQ ID NO: 26967 - DNA, 120 bp, Homo sapiens
tttcggtcaaaggcatttacaagttggaatcacagaatgacatctgaaaaggcacttagaggtcatctatccaacgtttctgcacctcagcactactggcatctgaggccaggccactct

SEQ ID NO: 26968 - DNA, 120 bp, Homo sapiens
tgccgtgggtcatcctgggtgctgcaggctatgacgcacgacatgtctgcccacgacatgccagcagcagcctccctcctgaggcaccgctgcactttgccaggcatctccgctgctctg

SEQ ID NO: 26969 - DNA, 120 bp, Homo sapiens
cagcgggaaggggttcccctaggcttcgcagacctgatggtgcaatgccaagacttgaccccagcctgcaggtcacacatggctgaggtgccaagggcctggacctcccagcctgcccag

SEQ ID NO: 26970 - DNA, 120 bp, Homo sapiens
tgacgcccagagtaccctgacagaacaagggttggcttaggtgacagccagggtgccacacctagagggccacatggttgactgaatagtaagatcacgtttacagttatccgaaaatct

SEQ ID NO: 26971 - DNA, 120 bp, Homo sapiens
cagcgcatgtgtgctgttgcaaaccagggctggcgcttcccagcccgacggagctctcccctgcaagctcaggatctgacgtggggactgtgtgtgcagcaaccgtcagcgcagcatgaa

SEQ ID NO: 26972 - DNA, 120 bp, Homo sapiens
taccgctaatggctagaaagcgctgggattttgtcaaagcctgcataatctcgagcaaattaaaacacactaacaaatgggatggacagctgtttcaacagcaatgaaacgcaagtgtgt

SEQ ID NO: 26973 - DNA, 120 bp, Homo sapiens
tgacggctgggttaggtagccaacatgcactatcggatgccaggtacaaatgtcacgcaggttcaccccatgcacttttctcttatcacccatgcaaaactgagatataaagtgaaagaa

SEQ ID NO: 26974 - DNA, 120 bp, Homo sapiens
cttcggagaaagatcaggggacccatccaccaacgcatgttgggaagccagagtctaaagagcacccgagaggctgacccccacgggaggcgagcgaacgtcagctgcacaggcctccta

SEQ ID NO: 26975 - DNA, 120 bp, Homo sapiens
atgcgtgtttcttatttttcagcattttttaaagttgcttcaaagtcctagacactgctgaagctgcccatctcagttaccacgcccctgggtgttcaggtcaccctccagcctgtcagg

SEQ ID NO: 26976 - DNA, 120 bp, Homo sapiens
gaacggaggcagagattacaaagccaggtggccattctccccaaacccactgcgccctgcagtgtcagttctgcacacatttactcagcctttgactccacggaagtgatgggagaaatc

SEQ ID NO: 26977 - DNA, 120 bp, Homo sapiens
gaccgacagatacccagagaatcaccaagtgggtttgggagatgaagtgcaggtggaggttctgaggccctgtgatctcatcctgccctggtaccatccagccagcacaccgtgtgacct

SEQ ID NO: 26978 - DNA, 120 bp, Homo sapiens
acacgcccagttacttttttgagagtgtctctactatcctgcagtagagtgaggccacctgaactaatggttggtaagatgctttccaactttactaggaggaagaccttgtttcacttt

SEQ ID NO: 26979 - DNA, 120 bp, Homo sapiens
ctgcggactctccttgccccagccagtgcctctccccactgacacctgatacccttgcccccatccagccaactgtgggtgtggggacccggggaagcctcagccccacctagtatagac

SEQ ID NO: 26980 - DNA, 120 bp, Homo sapiens
gagcgctccagggctgggatgacaggggatgtgtagaccagggcatacccaaagctgaaattgccgagcactgcggcgaaggtggccaggaacacccttttgttctgcagggtcctggtg

SEQ ID NO: 26981 - DNA, 120 bp, Homo sapiens
tggcggacaaaaagaccagggtctctgagtccctcctccagggaccattgccttttctgaacccagtggctgcccggctcagcgggcagtgctagggaggcctgggtccaaggccattca

SEQ ID NO: 26982 - DNA, 120 bp, Homo sapiens
tcacgttcccagggcctgagccccagctcccctgggaaattcccaggccattgttagctcatccgcagtggctgagcctctggtgctggggccttttctccggaagaggaggctctggtt

SEQ ID NO: 26983 - DNA, 120 bp, Homo sapiens
ccgtggccagatgtgcagcgaccttgggctgtaacctcagggggttcgcgccccccacagcctgctggggactgaccaggcctgggggagactgggggagcgaggggctgggagggaata

SEQ ID NO: 26984 - DNA, 120 bp, Homo sapiens
ggccggacgaggcccacaccgccctgccagcctggcatctctgctctcccaggctcagccaacacccgctctaggactcagccaactatttgtgggctgctaagtagcatgacagctgct

SEQ ID NO: 26985 - DNA, 120 bp, Homo sapiens
ttccggatggccgggcacttcctggcctgaagtgtgctaagtgacagcctcactctgtcccgctgccccccgagtccctgcccgcctccctgctttgtccaggctggcttgcagggccag

SEQ ID NO: 26986 - DNA, 120 bp, Homo sapiens
ggccgagacccgtcctggcctgtgttcagacagagcctagtacgggcccccagggctgcaggtggcccaggaaacttccccggggttatttttggcctctgtgctggcccatggactccc

SEQ ID NO: 26987 - DNA, 120 bp, Homo sapiens
cctcgggctgggggatgtggggctcgggagcccagctgtggccgggtccccggaatagatctctggggttgctggcgagaagaaggaggacaggggagccggggcctgtttgtttgtagc

SEQ ID NO: 26988 - DNA, 120 bp, Homo sapiens
acacgcacagcgtgctcggctggtggtcatgctccctgcgccctctgccagctgtgcgtgtccttctctcccactttacagaagaagaaacaggttcagggaaagggccgagggcatgcc

SEQ ID NO: 26989 - DNA, 120 bp, Homo sapiens
tgccgcacttccagcgcagaaggatttccctggctcaggggtggcagggactgggggctggggaggccacggggaacaaggcagggtctgcccaggccctcttctcactgcccggggcga

SEQ ID NO: 26990 - DNA, 120 bp, Homo sapiens
gtccgaaccaatcagatctttcctaagttaaatgtctgtgttgcgggcttcggctactctgttcatcctcctgggaattgcccaaatggcagccaggtggatgcaggagaaggttggagg

SEQ ID NO: 26991 - DNA, 120 bp, Homo sapiens
ggccgccctcaggcttctgtccatctgcaggggccccactggcaagcagcacctctccagaactctgtgtcccttcctctcccctccgcagcagccctgggaggcagatgctgccatgaa

SEQ ID NO: 26992 - DNA, 120 bp, Homo sapiens
ccacggtgccctcaagaaacctggccatgagggggcttcctgcctgcccacggccctgcaggtcatggtaaggggtggtcctggagtttgtgccctggcacttccattccagagtcactg

SEQ ID NO: 26993 - DNA, 120 bp, Homo sapiens
ggccgagcagcgtgccatgtctgcaccccttgggccacagtgggcaggtgctgacacctgtgagctgctctgtgctcggcccttccctttatggggcgggcttgggtatagggacgctgt

SEQ ID NO: 26994 - DNA, 120 bp, Homo sapiens
ctccgtatgtgccctggggtctgagtgcccctgccccagcaggtctgtgctgcagatgctggctccaccacccagcgccctgggggctactccctggcccgagcggggagccgggcctct

SEQ ID NO: 26995 - DNA, 120 bp, Homo sapiens
tctcgccaggccagttgctttgtcgcttgcttgctgggagagtggagaggccaggaaactccacattctctgagctggctgcaaagctcttgctcttgaaacagacgcgtagaaatacca

SEQ ID NO: 26996 - DNA, 120 bp, Homo sapiens
aggcgtgagccaccgcgcccggcccacagtttccttcttctgcgacgccctctatttccccttagcctggcttagcacctcagaggggccaggtggctacctggtgaggtgaccctggtc

SEQ ID NO: 26997 - DNA, 120 bp, Homo sapiens
aggcgtgagccacctgccttggcctgtctgctcttgatgatcaagttcaatcacccagccaggacggccactcgtttccatgctgctggtctcttggcacaaaatgcccaaacagaccgt

SEQ ID NO: 26998 - DNA, 120 bp, Homo sapiens
ggccgcagcctaaagtgtaatgaaactgttgcttcgtctttgggtggaaacgttccccatgtgcaaaccaaggtctccagaccacagaccccagagctgcagggatggggaacacacagt

SEQ ID NO: 26999 - DNA, 120 bp, Homo sapiens
gatcgctactgctactgcccctcctgcatcccagacccatgtcttctatgtgctgggcacacagcaccaggactaggcacagggccagagggtatgagacagctgtgtcagcaagggacc

SEQ ID NO: 27000 - DNA, 120 bp, Homo sapiens
aaacggcagtgaaggaaaatcctttgatttatgtgggtggtgcctcatgggagatgccccatcctcacgggcgtgctgcctttcagctggcactgtggctccccgctccattgctccatc

SEQ ID NO: 27001 - DNA, 120 bp, Homo sapiens
atacggcaggcccagtggatctcacagtcatgcgcccattgtggcacgtcctctgctataaagcgggtccctttgtttaatgccatgttctcggtaccctgtcccattcaatcaaatact

SEQ ID NO: 27002 - DNA, 120 bp, Homo sapiens
gggcgttggggctgtggctgagcttctgtgggcaggaaaggcaacttttatttaggaccagattcagcacttccccttccaggatggaaggggtctgatgtgatcagcttgtcacccagt

SEQ ID NO: 27003 - DNA, 120 bp, Homo sapiens
ggacgttcaggagcggaaggagctatggtggctgtggtgagtgagaagccgtgtgctggggccacatgtagcttccatcccttcctccacgctgattcattcacccgttgtgcctgcagt

SEQ ID NO: 27004 - DNA, 120 bp, Homo sapiens
tctcgcatggtgacacttcctggtacaaatgaacaaatgaaaggaagacctccatcctttatgcctactccctagatccagccacaggtacctcctccagacctcctggtccccaacctt

SEQ ID NO: 27005 - DNA, 120 bp, Homo sapiens
tctcgggctgccctgcctcccatcacaccgatgcttacatcacatgcactgcctgaagcccatggggaagattttccttcactgctctttttccaggccagtcctggatggggctttagt

SEQ ID NO: 27006 - DNA, 120 bp, Homo sapiens
tgccgacccatctctgaatcaagtttggccatttttctctgctctcccttcatcataagggcccccccacacacagccatagctgcgagctggaaaggggatgtgtgggtacaagagtct

SEQ ID NO: 27007 - DNA, 120 bp, Homo sapiens
gctcggatgtgcccacggttgagccacctgtctcctctccagaccgcaacgtcacggggactcctctcaccggggacaaggatgacgaagaggttgacacccacttcgcctcccaggagt

SEQ ID NO: 27008 - DNA, 120 bp, Homo sapiens
tctcggctaacgccatctctgaccagctgctgggcgcaggctctgacttgaaggacttcaccctcaatgagactgtgaacagcatctttgcacagggcgccccaaggagctccctggccg

SEQ ID NO: 27009 - DNA, 120 bp, Homo sapiens
cttcgtggattatgaggagaacgagggggctggcccttacctgctcaacgggtcctacctggagctgagcagcgacagggttgccaacagctcctccgaggccccattccccaacgttag

SEQ ID NO: 27010 - DNA, 120 bp, Homo sapiens
cctcggccgggaacaggactcacaaggccaggtaggaggcactttcctgagccctgtccagggccctcagggggcaggatggggccgaggccaggtagaaagtgaggccccactgggggg

SEQ ID NO: 27011 - DNA, 120 bp, Homo sapiens
tcccggggttctccactcgctgccccgtggatctgagcacaaagtcagaggcctgggctgcagtgagttttccccaaaagttatgtccatggattaggatccagggctgagcccctatgt

SEQ ID NO: 27012 - DNA, 120 bp, Homo sapiens
catcgtcacaaccgcccttagtggtggggttgctatttgctattgtgggctcagagagagctagcggtgtattcgaggtcacagagcctgagaacctgggaccccttagttttaagcctg

SEQ ID NO: 27013 - DNA, 120 bp, Homo sapiens
acacgcctgtaggaggaggcggagctccaggcagctccccaagtgcagagtggctcagtcccaagcctcagcaagggctggagaggatctagtggattcctccatgaggggcaagagcct

SEQ ID NO: 27014 - DNA, 120 bp, Homo sapiens
gggcggcgtggtgggcaccggcttggccaggcttgcaccgcctggttgaccacaccatgggccctgggcaaattgccaaagccttccgagccactgttttccacaggtgaactgggacgc

SEQ ID NO: 27015 - DNA, 120 bp, Homo sapiens
tgccgttctgagggtggctgccaccacctgatgcagggtgcggcttccaccatacccaggagcagctggccttggaagtgagccatgtgacctgccttccgggcagacccctagcggagc

SEQ ID NO: 27016 - DNA, 120 bp, Homo sapiens
ttgcggacctgccctgagttcctccactcttcctggccaggggactccaagcgtgtgggcgttgtcagtaagtgtcaagcctgtgggcgttgtcactaagtgtctgcaaacatctgtgat

SEQ ID NO: 27017 - DNA, 120 bp, Homo sapiens
ttcgggaaggagcatgctgaggcctggagtctggtcacggtcacgtcaccccagggaggcactgagctgggacttggattccagtctctcttgaccaaggcctgccgcgtttccactccg

SEQ ID NO: 27018 - DNA, 120 bp, Homo sapiens
tgacgaggagcgaatgaataaccaggcacttggcgatggtctgcaagtccccagccccgcacctccctgggccccagagcgggtgtctctgaggcttggaacattccaagcagacctggc

SEQ ID NO: 27019 - DNA, 120 bp, Homo sapiens
gcggttggggttgagcgcctgcaggcccccgaagccccccgggggcagctccacgtcctcctggctcacgctcttgtagagcacgcgctccccgccgttcagcacgtcctcttcctcctc

SEQ ID NO: 27020 - DNA, 120 bp, Homo sapiens
ctccggcggctcctgcaggaagaaggtggggggctcgcagtgggagcagctgcggcagagggcgcgggcctgcggggacttctggctgaaggaggtggaggcggtggggtagagcgccgg

SEQ ID NO: 27021 - DNA, 120 bp, Homo sapiens
gcccgttggtcagcaccaggttgcggttggagtgcagcgggggcaggtgcgagtgaacggcgaagtctggttcctcctcgtcctcctccgactcgtccttcttgcagcagtagtactgcg

SEQ ID NO: 27022 - DNA, 120 bp, Homo sapiens
ggacggtgaccatgcggccgcccgctcccaccccagaaccgacatgtgggaaaggctacccctgactggggaggggagataggcacggtgggagtggggtggcccaagcccaggcctgac

SEQ ID NO: 27023 - DNA, 120 bp, Homo sapiens
aggcgcagtgctgagcacttcacaacgatccactcatctcttccgcccagcaacgtgcaggtgtgactgttatctccattttgcaggtggggagactgaggcgtggaggggttcgcagcc

SEQ ID NO: 27024 - DNA, 120 bp, Homo sapiens
agccgggggtcacaggcactggcagctgtgttgcctcgccctgccccgatggctccccctcatctctcagggagacatggagactctggatggccctggagtgcaggtgggaaggattgc

SEQ ID NO: 27025 - DNA, 120 bp, Homo sapiens
tcccgtctctgagcctctttataagctctgggtgaggggagtcaggcgcatcttactgagccccatggtagggtcctgctgccttctgctgtgtgtcttctctgccacagggctcttccc

SEQ ID NO: 27026 - DNA, 120 bp, Homo sapiens
tcccgggccgtgacccttgtgaccttcaggcggggctccctcccgaggtaggggcaccctctgggcctccctgccctgtccccttccccgccgcccgggaatacctggagccggcagtag

SEQ ID NO: 27027 - DNA, 120 bp, Homo sapiens
cagcgatgatgcagagcaaaatcacagtcgccaagatgcccccggtgatgaccacggtcccggctgtcatccgcccccttctccatcaacagcctgcaacacacgccgccagctttagag

SEQ ID NO: 27028 - DNA, 120 bp, Homo sapiens
tcacgcttcctcaccacaaaagtcactcgtgctattctagagaactgagaagacaagctgaggggaaaaaagcaccccaggatgtgcctgtgagaggcaggggctctgccggggacgggg

SEQ ID NO: 27029 - DNA, 120 bp, Homo sapiens
atccgtagaaggtggatgctaatagcacagggttttgtgacacttttacaagcgtgtctctccatgcttagtgtagcatgctgtcaatgaatggcgcccttccagcctggctctacaagc

SEQ ID NO: 27030 - DNA, 120 bp, Homo sapiens
ggacggttctccagagacccgggacctgccagcaggcccagctcccagacagggccagcctgttgcacacagaaactgtggacctcctcgtgaggaacggagatggaggtggcgatgatc

SEQ ID NO: 27031 - DNA, 120 bp, Homo sapiens
ccacgatgtggggtttgcctgcttgccaggtgcagaccgaggcctgtgggccccgaggccaccttacggcagagccaggaagtgagcacgggtcggggctgcgtggggtggagctggcct

SEQ ID NO: 27032 - DNA, 120 bp, Homo sapiens
tttcgctagggctcttctcccagtctgctggctgggaggtaagctggcacatcagaggcggatgtaatgattgccattttatgaatgaagaacctggggcccagagaggctgagtaacct

SEQ ID NO: 27033 - DNA, 120 bp, Homo sapiens
tcacgagggacgcatagcttggatggaaacacggctctgctgagctacagaagctgtgctcttgtccactcagccacactgccaccctcagtagccagggaatgtggtggacgaggtggc

SEQ ID NO: 27034 - DNA, 120 bp, Homo sapiens
caccggagctccctagctggtgcagccttcttccacctctgccacctgggaaaactgagctcaagggcagaggtgactagctcggtccggcagggacccactcccacaggcacggacggc

SEQ ID NO: 27035 - DNA, 120 bp, Homo sapiens
ccccgagggctgagagcgcccagagcacaggcggtaacatccagcccagtgggatgatggctctgacactgagctgctgctgaaacaacagtcctcccccagggccccggggccgcaacc

SEQ ID NO: 27036 - DNA, 120 bp, Homo sapiens
ctacgtgcggcccatcccgagcgtccggcgctgcctgagcctgacttaagggagtggtataggagtgacatttgggcagtctcaggccgtctcccatcaccccaacacaaacatccagcc

SEQ ID NO: 27037 - DNA, 120 bp, Homo sapiens
gagcgaaccatgtccctccgggctcccagagcctggttcctgtggactgcggcggaaagcccaaccactgagcagggcttacaagcctggcggaaccggaccccacctgactctccagcc

SEQ ID NO: 27038 - DNA, 120 bp, Homo sapiens
gcccgagggaaggaggaggcacagtctccattttccagcccaagaccttcaggcccagggttccacagccagaaagcagcaaagctgggctttcaactctacctccaccagcccacttca

SEQ ID NO: 27039 - DNA, 120 bp, Homo sapiens
aagcggggattgggccaaggcctgcgggaggattcagcaacggagggagggagctggcaaacactgaggcctcggaactcatcaaatcccctctggagcagatccagaaagactgagaca

SEQ ID NO: 27040 - DNA, 120 bp, Homo sapiens
tcacggttgccccggtgtcccatgtgccagcagggaaggcaggagcaccctcatttttgcagatggggatgcggaatgatgcacccgtggtctggcctggaaaccactctctctgccaca

SEQ ID NO: 27041 - DNA, 120 bp, Homo sapiens
aaacgaaccagtctgaagctgcgagctggttttttcctccttatctgagacccactggtattcgaaggcatctaatttatcctgggcccactgggctgtggtcaggaggccagggcctat

SEQ ID NO: 27042 - DNA, 120 bp, Homo sapiens
agtcgcgtaaggtgccgcagcctggagatccaggaagatccttcccagaagcatttgggagccagattaactgctaagtcaaacatcctcagcaccaagggaaggaagggctaatactgg

SEQ ID NO: 27043 - DNA, 120 bp, Homo sapiens
aggcggggagaggcctggatgactcccaggttcctgactaggtgaatgggaagccaggggagggggcatttactgaggtgaggacccccaaaaagcaacttgggggagcagagtgagttc

SEQ ID NO: 27044 - DNA, 120 bp, Homo sapiens
ggccgaagccctgctggccccaccgttgtcagcattggtgggggcaaaggctgaggggggacctactcctccccctcctccatgctgtccctgtgggctcacaccggcactgtgcactct

SEQ ID NO: 27045 - DNA, 120 bp, Homo sapiens
ctgcgacgatccccatggaacagccctgcacgcccaggatgaaggggccagaccacgcccctgcctgagaccacggtccaatccagccttcttcccccagggtcccctgcatggctgaga

SEQ ID NO: 27046 - DNA, 120 bp, Homo sapiens
gaccgagtggaccacgacctcgtccatttaaacccggctgactcagtgcagggacagcctgcacagtggtccagggtccagccctccgccagccctgttccgcctcactgggtgtggcct

SEQ ID NO: 27047 - DNA, 120 bp, Homo sapiens
ggccggggtgtggaatcaccgggaacgcccccgcccccgccccgctgctcccggtgtgcagcgggtgcgggtgccgcttaaacatttccctgctgagtggctcgtgtttcacagtgggcg

SEQ ID NO: 27048 - DNA, 120 bp, Homo sapiens
ctgcgacggaggcaggaccaggcatttagctagttagagactcgcctgggaaattgctccattcctgagtaaacagatattttcgcccacctaaagggaagccctgacaacaactatcac

SEQ ID NO: 27049 - DNA, 120 bp, Homo sapiens
agacgaggcggcaaagatccagcggggcttctgggcgccggttccacgtggggtggaattattagcaccagcttgcttctctgccggtggggccagcgctgaacagaccggggtggagtc

SEQ ID NO: 27050 - DNA, 120 bp, Homo sapiens
ttccgcgtggttctgccacttagggagtgtgccttgggcgggccatttcacattcctgaccctcacttttctcatctgtaaaaccaggctgatgccgtgcgggctaatgagccaataaag

SEQ ID NO: 27051 - DNA, 120 bp, Homo sapiens
ctccgggccgtcgctccaggagagagaagcttgctcctgagcctcctccctgtgccaggcgtggtaccaagtgcttccccctgagcgtcctgaagctgcctcagctggcctgggtgggtc

SEQ ID NO: 27052 - DNA, 120 bp, Homo sapiens
aaacgctgcccagcctcatggggagagagggagatggatgggcctcggagtcccctcgcatcagctaagcggctgctgcttctgcaaggcacttcacttcatcacagaagggaagtcacg

SEQ ID NO: 27053 - DNA, 120 bp, Homo sapiens
tcacgttgtataaatcacagcttcttgtggtccataagtcacggcgctagcgctgtgaaatgccaggccccagcctggagagccactccggccctctgtcatctttacagcctaggtgac

SEQ ID NO: 27054 - DNA, 120 bp, Homo sapiens
acacggagcaggcccaagaagcctcttcccgcgatcacacccaattgccagcccagagaagggtcccagggtcctgcccaaacacctggggggcacttgtagcctgccgatctcgggcag

SEQ ID NO: 27055 - DNA, 120 bp, Homo sapiens
tagcgtggaccctgctgggaacagagtccccttcctgcttggccctggctgggggcaagggctcaggacccacagggctgcctgttgcccgtcttcccagtggccaggcgctgttcccag

SEQ ID NO: 27056 - DNA, 120 bp, Homo sapiens
gaccgagggaggcccaggcctgcccccaacttgccaggggtcgcctcagggcctctgccagcccatgagcaaacatcctgtctgctgagtgcgggactaggccccaggtcaggagctggg

SEQ ID NO: 27057 - DNA, 120 bp, Homo sapiens
agccgaggatacagaggcacagagaggccacacagaaccctggttggtgggttccagagctggaatccccaagggaggccagggcatgaagactgtccctcctggggagggagctgggtc

SEQ ID NO: 27058 - DNA, 120 bp, Homo sapiens
agccgggtgacttcaggcaagtcacctccattttgctgtttgcagcaggaggggcctgaattggcccttccttgaagtcctttacagttttatcatttccgggacattcctcgcttggga

SEQ ID NO: 27059 - DNA, 120 bp, Homo sapiens
gggcgcaggcccagacgggctctgagtcagccagaggaggcttcactgtgtcgggtgccatggaggggtggcagctggggggcctcagtgtcactgtctccgtggggtcagacattcttc

SEQ ID NO: 27060 - DNA, 120 bp, Homo sapiens
gggcgtaatgtcctcatcaggccaggaaaggactaggtcagcagaggcgaggggcgcaccgagctgagccaggccttctccctccggagcccacccacctactgcctccccagggaggct

SEQ ID NO: 27061 - DNA, 120 bp, Homo sapiens
agccgggagcagagtgggctggagagacccggaggccgggctccctccaagccgtcctgcctcgacagccaccccacaacgcacggggagtggcccgggccacaggccctgctgtgtggg

SEQ ID NO: 27062 - DNA, 120 bp, Homo sapiens
ggtcggagaggccaccgccatgaggacgagacacaggaggagcctccccccttgccggggagcgcctgcaccactgtcctgtgctctgcaagagatggccctgactggcagaaggccatc

SEQ ID NO: 27063 - DNA, 120 bp, Homo sapiens
catcgggataggctgccgtcaccggctctggccaccagcaccccagtccatgcctcggctggggatgacttagcgtttccatgtgcagaccccatgctgggtgcctcaccagtacaaatg

SEQ ID NO: 27064 - DNA, 120 bp, Homo sapiens
agacgaggaagtggcttgcactgggtctcattcctggccgctttgtcagtgtacgattgaacgggacagccggggctgcctggctgcaagccgcggcatacacactcagcacagttttcc

SEQ ID NO: 27065 - DNA, 120 bp, Homo sapiens
ccccgctccctcctgcccccaggcctcagtctccccatctgtgaggtggggtgatgccatcccactgatgactccagagctgtccaggggctcaggcaggaccctgggacaagagatctt

SEQ ID NO: 27066 - DNA, 120 bp, Homo sapiens
gggcgtggacctgccccccagccaccccctcagcactgcccaccttctgctggtggccttcctccctcactgctgccccttccaggaagccacctggatttcaggcaaggctcctttctc

SEQ ID NO: 27067 - DNA, 120 bp, Homo sapiens
cctcgctgtttaccccacgccacctgtcctgagtggcgggccctgcccttaggtcccaatgggcacttacctgatgtcatagccatgcatgtccttctccgggcgcccatggatgatcca

SEQ ID NO: 27068 - DNA, 120 bp, Homo sapiens
gcgtgccaggctcagcctcaagggtgggatggctcattccagcaggacagcggagcctgcctgggacaggctgtggcagagggagagccctctcactctggactgattgttaaagaggat

SEQ ID NO: 27069 - DNA, 120 bp, Homo sapiens
tggcgtcccaggggtgatggaggttgtctgtgtccctgacgttccaactttgcctcccaccgcccctggtctgagaggaaccacagacacaatccacctgggcttccaccccccatacaa

SEQ ID NO: 27070 - DNA, 120 bp, Homo sapiens
tgccgccctggaactcacatggccatctcaaactgctccatccacttcctcttcatatcttctgttttgcagaaaaactggaagccctgctttccttgaaggtgaattaggtagaagccg

SEQ ID NO: 27071 - DNA, 120 bp, Homo sapiens
acacggcttcagacatcctggcacatgtccacgtgtactctcgcctgtgcagcatgtgcacgtgtgtatatgcatatgtgcacaggtgcctgtgcctgtgtgaacacatgttctcacgtg

SEQ ID NO: 27072 - DNA, 120 bp, Homo sapiens
gtacgtgcacacgtgcctctgtatgcatgcatgtatagctgtgtgcccataccctcacgtgagaatacatatgcgcttgtgccttcacctctgcatgcatactagtgtgctcctgcgtgc

SEQ ID NO: 27073 - DNA, 120 bp, Homo sapiens
gcacgcgtgtctatgcgtgtgcacctgtgcatgagtgtgcccagtgctcctgtgagcatgtgcacacacacacttgtatctgtccctgcaggtacacacatgtactaacacgtatgatgc

SEQ ID NO: 27074 - DNA, 120 bp, Homo sapiens
ctgcgcccatgtgcgaggatgctccaccgagtgcatatgtagatgcatgttaagcgggggcaggatcccaggaaggatgagcgcagggccccacccagggcccctccacgaggcctgacc

SEQ ID NO: 27075 - DNA, 120 bp, Homo sapiens
ccccgtgaagccatccccgactgagcaacccacaactgcccccttccctgcctccccttcggccaccccacaggcctcgccatctctccgagctctcggacaaagggctttcaaagtggt

SEQ ID NO: 27076 - DNA, 120 bp, Homo sapiens
tggcgggaaagaggaacgaagggagggatggagaggggaagcgtggagcggggatgggaggaggaaagaaacaaggaaagagagaggaaaaggggagaaagagggagggaggagggagag

SEQ ID NO: 27077 - DNA, 120 bp, Homo sapiens
ccccgagctccagggactgaggatcacggagttttcctttcacactgtcttagcgggcaagcctttcatcatgaatacaaatcatttcatcatcgggaaagggagtggaggacgaaggac

SEQ ID NO: 27078 - DNA, 120 bp, Homo sapiens
ctccgggcagaagtgccagcaccaggctgggatgattgaggcaggtgggaggacctgggcgctaggtgcttaccattttcccgtgagactaggaagcatggagaggagaggaaggggaag

SEQ ID NO: 27079 - DNA, 120 bp, Homo sapiens
cttcggccccgtccctgtagccctggccccacccgctggcagccacaggcccacctctgcagtcctggccccgccccagcagccacaggccccacccctgcagccctggccccaccccag

SEQ ID NO: 27080 - DNA, 120 bp, Homo sapiens
tctcggacaagccacagccagacctacccacagccctcctccaagcaccgcagggtgggacgggagaggaaagcctgcttgctacaagggacaacatgggctagagtcaggctggccaga

SEQ ID NO: 27081 - DNA, 120 bp, Homo sapiens
tcacgtggtccctcttaaacatcctaatagagggaagcagccctgtgtgtgggagccacatcaggccacataagagccacctagacttgggctgacctatgtccctgttcttgggaagct

SEQ ID NO: 27082 - DNA, 120 bp, Homo sapiens
ccacgggtctggccacccccactccggcgcctgcctgccgtgctgcaatcctcgtgctggccaccagagagcagtgcccacttcagtccagaaaacgcagtgtccagacctggcccacag

SEQ ID NO: 27083 - DNA, 120 bp, Homo sapiens
cagcggaacccaagggagccggccacgtgggcggtcctggccctgccccccgagagcagcgggtggaattccccaaaatgcaagtgaccagccagggccagagccagagccagagccagg

SEQ ID NO: 27084 - DNA, 120 bp, Homo sapiens
tcccgcccttcctcgttcctagaagacctcaccattggctccccacccaccccgcaggagggaacttcctggggaggctgcagcacgctgtctgaaaggggtgttccgttttcttgtcgt

SEQ ID NO: 27085 - DNA, 120 bp, Homo sapiens
caccgcggcccctgcgtgcacctggcccaatgcctggcatgaaataggaacagatggaagttgcccgaatgaatgagcaggtgagggaaatgtctgtactttgatacagaggcaggactg

SEQ ID NO: 27086 - DNA, 120 bp, Homo sapiens
aaccgcaattcccttggagacaaacctcaggcccacagcggcacgggggctgattctcaaagacgctgccgtacaaggagtgagccctcagtccctaggggaaatcaagcccaggtacag

SEQ ID NO: 27087 - DNA, 120 bp, Homo sapiens
cagcgacgactcccatagtggctgcatgaatgacttcctatataaattgggaatggatcaaaagacttctaaaatccccccagccctgaagtttcatgatgaggttcggtggctctcaga

SEQ ID NO: 27088 - DNA, 120 bp, Homo sapiens
agacgcacacccgcaagtcaccgagtactttgtgcagcaccgtgagctacactcctgggaaaccatcccgtcgaggggctcagagccactcgccagccagacaccgagtgctgagagtat

SEQ ID NO: 27089 - DNA, 120 bp, Homo sapiens
ggacgcccagctttcaaacaacttggggagtgaactggccttgaccagtcagagctcattcccaagtccagacggctcgccggccgcctcgggacctctcaggccagctccggggaggcg

SEQ ID NO: 27090 - DNA, 120 bp, Homo sapiens
ccccgggaaggcaaactggaggccctgctgcctccacaaagggccaccatccctcgggggagaccccccggttatggcggggaacaaaactcagtcgagacccttcgaggacaagcagag

SEQ ID NO: 27091 - DNA, 120 bp, Homo sapiens
ccacggttggcaagtggcatctcacccactcttgggagcctgggggtctgagggcctgtgacctgccctaccaggtccctgtctcctcattccagctccgctggatccccaccttccaca

SEQ ID NO: 27092 - DNA, 120 bp, Homo sapiens
ccacgcggagcaaactggcgtccgagagattattcgccagtgcctgcttggaaataaacatcctccaaacataaaagacgcacagctggctaattgggccaatattggtctcatcattct

SEQ ID NO: 27093 - DNA, 120 bp, Homo sapiens
tgacgcgtgctgttagaccatgcgccaagttactatcttaaggctccctgggcaggaacaactgaggggcctgcaagcccttggaaggagaatcccatggcaacacgggcgggggtcatg

SEQ ID NO: 27094 - DNA, 120 bp, Homo sapiens
gaccgtggtggtgtcatctctgggcacctgagaacatctccatagagaggaagggcacagagtggaccaggagtcagccagggtttccaaggatgctcctcagaggagctccgtggggac

SEQ ID NO: 27095 - DNA, 120 bp, Homo sapiens
ggacgtccccctgcacccagagcagctccccttcggtggctcagacatggggacagctcggtattgtgttaagcaagggccaggctgctctgcgagggaagggaggggaagggagggagg

SEQ ID NO: 27096 - DNA, 120 bp, Homo sapiens
gagcggggcagggctcaccatgggctgctgcacctccaccttgatgatgtcctcgtagatgtcgtcccctccatcctcacacgggacgcagtcgtagatgtcctcccccaggtcatgctc

SEQ ID NO: 27097 - DNA, 120 bp, Homo sapiens
gctcgctgcacaggaggaggcgggttagaggggaggggaggctcccgccaccctgaccggggagccgcagagcacgagggtccacgagggacgcaggcggctggggccacagcgaggtca

SEQ ID NO: 27098 - DNA, 120 bp, Homo sapiens
gcccgggcctcagtctacaaagtggggtgggccccgcctgcagggcgtctgtgggtgcgaactgggcagcgtaaggcgcatcctccagtgctctgcctgctgcctccactaggtgcattt

SEQ ID NO: 27099 - DNA, 120 bp, Homo sapiens
ttacgtcatgaccagcaggcccagtgtacctgagggccacagctgtccactgggaggaagagggaaccctcaggggctgggctggaggaggggtatactatgagacccactgaggggtct

SEQ ID NO: 27100 - DNA, 120 bp, Homo sapiens
cagcgttctcactagacatgagcttgacgagaactcagcgaagacgcggcacacggaaccagagcgccagccccacatggccctccacgcaatcccacaggggaggggccgggctgtcgt

SEQ ID NO: 27101 - DNA, 120 bp, Homo sapiens
ccacgtctgcaagtggctctggaatctccgtggcacaattacatcactctcctgtggctctgtggcaggctgctgtgtcacacactgatccttttcacatcagtgtctcggctagaaaga

SEQ ID NO: 27102 - DNA, 120 bp, Homo sapiens
aagcgtgtggaggctccgtgtcatcagaggctatacttcgtggaaaaactccacacccatgccacaccagtgtctggtccacagagcaggccagtcctcatcacttcggaacaggcgggc

SEQ ID NO: 27103 - DNA, 120 bp, Homo sapiens
ggccgcagtgggtctcttgttggcaggaacttgactgtcgctcctgagcccctggaggggaggcagcgagggaaactagggttgtctttgtagcccttcctgtttctagctctgtaactg

SEQ ID NO: 27104 - DNA, 120 bp, Homo sapiens
cttcggtttcccatctgcaacaggagagtgacagttccaaggatcagccatcatgtacaagaccagtagaggctgagcatacagtaggtgctcaataagtgggagcatggcctatcaccc

SEQ ID NO: 27105 - DNA, 120 bp, Homo sapiens
gggcgaaaggaggggctcattcaatgagacggcatttagcacaggggccggtctcaacacatagtgtggtcagcattaaaaatgacagattttttaaaacctaggagactaaaaagttgg

SEQ ID NO: 27106 - DNA, 120 bp, Homo sapiens
ctgcgttagttcctgctcagctgtgttgcttttgtgggtttcagggatcattcttctctgtccagtggtccatgaggaggcccgagatggccaggcaggaatgtggaagcccagacgtga

SEQ ID NO: 27107 - DNA, 120 bp, Homo sapiens
ccacggccagacctgggccccagcccagctccctccaccccaggccagtgaccacccctccttccttcctgccccgtctcatcctttcactcctgctgttttctgggagtcagctgcgct

SEQ ID NO: 27108 - DNA, 120 bp, Homo sapiens
tcccgaccattatttttgtcctcacaatagcttgaaatcttccaggaggggccccgagcacggctgtagctctccagggacggcaaaacctgccaccttcaccttctgcccgagaccctg

SEQ ID NO: 27109 - DNA, 120 bp, Homo sapiens
cctcgcccacctgccccgattctgttacagaaaggcagctgctcagaggccattgcccccgccgcccacagaaaatcaaaagaaaaccaacaaactctgctttctgcccctggtgagcct

SEQ ID NO: 27110 - DNA, 120 bp, Homo sapiens
ttacggcggacataaaatagtgttgctgacaggctgggatgcgccgcactggccccgggctgtctgatgctgccaagcagggtaccaagctgccattagtgtgttactaggaaaccgagt

SEQ ID NO: 27111 - DNA, 120 bp, Homo sapiens
agtcggatgtttcctgacctccgtccacacctcagggtgcttcatccccaggggactggggtgggggcagcagagagaaggcgcatcgagcctctgaagaagccggctgggaactggatg

SEQ ID NO: 27112 - DNA, 120 bp, Homo sapiens
ggacggacggagagatagacagacagacagacaagaaccgctttacacatcagggagcttgttctcacacgccctggcagaccctcaccacgacccatgagggagggaggccttgctttt

SEQ ID NO: 27113 - DNA, 120 bp, Homo sapiens
gctcgccaagccacataggcgggtacctgcacaggccccagctaccagattcccggaaggagacccgtccaccggactgtccctcctggccgtaactccctctttttgggggcttctttc

SEQ ID NO: 27114 - DNA, 120 bp, Homo sapiens
tcccgggccacagcacagggtttcatttccccctctgctatgtgaggcatgctgtgtgacctccggcaagtcacctaccctctctgagccttaatttgtgcaactgcaaaatgggggctg

SEQ ID NO: 27115 - DNA, 120 bp, Homo sapiens
aagcggcaaagcccagggcctggctctcaggggacaggagcagggattgtcgaacagcgtatggacctatggctcagatcctccagtatgggaatcgtgaatgctctcgggacctcatta

SEQ ID NO: 27116 - DNA, 120 bp, Homo sapiens
caccggagtggcggggtgccttcccacagcagcctgtgaggttgcaggaccctgctctgcagacaaggatgctcctggtggggcatgtttaccagctggctgtcagacatctagcagcac

SEQ ID NO: 27117 - DNA, 120 bp, Homo sapiens
aagcggtggctaaataaagcttggtctcatgtccatgtccttcctttggcctctcttctgccctgagtgggagctttcaaatttctcccgtgtcccttcaattcccctaagaattctcgg

SEQ ID NO: 27118 - DNA, 120 bp, Homo sapiens
tgccggcaccacgggagggagggcagaggcaggcggcctggccctgctggggactggggtgtgcagcctacttcacagacaggcaagggcaaccctgccacagcggcaccagtgtcctcg

SEQ ID NO: 27119 - DNA, 120 bp, Homo sapiens
agacgcactcatcacggcgctctgtggcacccaatccgggtgccctttccaaatcctcctccatcaaggcctggaagcattcccagggccccccacagactgcagcggaccacgcccagc

SEQ ID NO: 27120 - DNA, 120 bp, Homo sapiens
gaacgctggctgcagtgccaggagggggacagagggccccaggactccaggccagagcaatcagagagatgcttcttgaagctggaaggaagaagccaatgtgccacctaccgctgcgcc

SEQ ID NO: 27121 - DNA, 120 bp, Homo sapiens
gagcggaacaaaaggctggagaaagcaaccagcaagggcaccagatggccgatcccagggttccttcctctcttgtcgaaacgccgctaagcgctgccttcaaaaccaggccatgtgctg

SEQ ID NO: 27122 - DNA, 120 bp, Homo sapiens
gcacgggcccctgggaacatgcctcacgtggagccgggcatctttggggaaagaaagccatgggctgggggtgaggcagacagctctgggcccaggcaggctcctgcgtcgttcaggctc

SEQ ID NO: 27123 - DNA, 120 bp, Homo sapiens
caccggctgtgcagtcacccaggcccgtgtttgggtttgtttccaccacaacctgaatgtatgaccacagtcccccaagacaccaccatgccaagacgtcatcttctgttccgggacatt

SEQ ID NO: 27124 - DNA, 120 bp, Homo sapiens
tcacgtctcatctgcttatgtataaatcccaccacaaaacatgatgtgtcttttcttctcagtctctgaaaatgagccgataatgttacccagctgcgcagatacatttttaatgctgac

SEQ ID NO: 27125 - DNA, 120 bp, Homo sapiens
aggcggccttggtttgttttgcttgttacagagtaaaaccatcttcgctccctaaagggaaggacaggagttggaaagggcttcacctcatgccaatgagcaggcacgggacattcctcc

SEQ ID NO: 27126 - DNA, 120 bp, Homo sapiens
tcccgccccgaacgcaccatgctattatacttgggacagggcactgggaaggaggaggccactgaccccgaaggctcacccctcatccctgctacctggaggggtgtccttgaaccccaa

SEQ ID NO: 27127 - DNA, 120 bp, Homo sapiens
ctgcgggcctcctcctgggccgggagttctcgtggatgccagggctacgttaagaagcactggttagggctcgtgaggatgctggtccggcctccagggagtgcaggcctccaccccaca

SEQ ID NO: 27128 - DNA, 120 bp, Homo sapiens
aggcgtggctgagggaccccctcctggaccctgcgtcccagagctggctgtgaagtgaaacccatgtccctgctgtgtttgtgtcctggggctgcgtaaccaagcaccatcgaatggggg

SEQ ID NO: 27129 - DNA, 120 bp, Homo sapiens
gttcggagggatacagcttttggggaacaccattcaccccatacacccccttctctcaggcttgtctgggatctagatggaaagccaggggacccggatgcatggtcctcaggccttact

SEQ ID NO: 27130 - DNA, 120 bp, Homo sapiens
ccgcaggaacacacgcgaggcccccgctccagtcccctctagcacaagaggctatagaatgaattgacgtttgtgatggctaatgtggctaatgctacggcaccatcctgcctgggctaa

SEQ ID NO: 27131 - DNA, 120 bp, Homo sapiens
ctccggagtggctgggcagcatttccagaggagaccagcatctgagtcggcagccgagtatagcagacgcctcccgtgccctcgggcctcacccaactgcgggggcccaaacaggtcatg

SEQ ID NO: 27132 - DNA, 120 bp, Homo sapiens
gctcggccaaagggcagccgagcacctaacccgcctggccgtccctcctgggtctccgtgcctgaatcgggcgtcagagtccagcagagacaactgtccttcggctccaacagggacaca

SEQ ID NO: 27133 - DNA, 120 bp, Homo sapiens
gggcgaatccgggccaggcttcagctcagaggccattgcagacgagaaaagcggacctggcccagccttggcaataaaaagcattccaggttcttgtaagggggaaagaaagagccaagc

SEQ ID NO: 27134 - DNA, 120 bp, Homo sapiens
tgccgactgccattgcccttccttcctgccagcctggagactgaagcagcacagaaatgacctggaagaccctcagggccctgtgacatctggggagctgatggacaatggggcctgaag

SEQ ID NO: 27135 - DNA, 120 bp, Homo sapiens
agacggtaagtctggaggtatcggcagtccccagtgtggcgtggatcccaaaagctacaggtgctggcccctccatggcctggggctctgtggggaccttcaaacatccctgcacacatc

SEQ ID NO: 27136 - DNA, 120 bp, Homo sapiens
caccgtgtgcctgcactatctgccagggtcaaaatgcccaagacagtgatggaaacgcagggctgttttccacgaggggacctctattaaacgcagccacatctcccagtgtgggaggaa

SEQ ID NO: 27137 - DNA, 120 bp, Homo sapiens
aatcgtggtgttgacaatgtgagccatgtcatttgcccctcctgctccaaatgcaagttctaggcccatcacagtcctccggggagccgcccccgccctgcccactcgccccactgacag

SEQ ID NO: 27138 - DNA, 120 bp, Homo sapiens
agacgccatgtccaaaagtaagcgcattaaacaaggtccgcctgggcggggagggctgctcgtcagcacaggccttcagcaagagcctcagggatgccagttaccaaccacacaccgaat

SEQ ID NO: 27139 - DNA, 120 bp, Homo sapiens
tcccgctggtgaacttagatcagctgcggctacagtcccggcctccaacacacgtgggagaagggctgacaaccaggagtgttttagtacaaaacagacaaaccagaaacctacggcatc

SEQ ID NO: 27140 - DNA, 120 bp, Homo sapiens
caccgtcaccggaggatggtccaagaaggcgggaaggccttccaggtctgggaacatgagacccgggctgaacacgaggctatgtccgtccaaatccccacagtcctgccacacaaacga

SEQ ID NO: 27141 - DNA, 120 bp, Homo sapiens
agccggaggcttctggaggacagtgtgcctagatgaaggaaccaggacgcagtggcgcttttccatctgtaccccaacatgtcagggtatatcaacacccatatgtcactggtgctgggt

SEQ ID NO: 27142 - DNA, 120 bp, Homo sapiens
gtccgagcatgggagctgcagccaaattctgggggtgggggcacacggggagaggttcctgcaccctaacgtgttgcttctctgcccatttcaatcgcggaacacaaattacacgtgtga

SEQ ID NO: 27143 - DNA, 120 bp, Homo sapiens
ccacgtgtgcacagcactcccgaggcgctcccaagctgtcaggcagccatcctcaggggctgcagtcaccggtggttgactattaggggggatagttgtgttcttttatttctgcactaa

SEQ ID NO: 27144 - DNA, 120 bp, Homo sapiens
aatcgtcctgtcctcgttccgtccctctaaaatcagagtcgtcctgtgagccagtgaccactcgtcccaaacatagcttctattcatcagaatcagggctcctgatcctggtgactttaa

SEQ ID NO: 27145 - DNA, 120 bp, Homo sapiens
ccacgggcggtggagtgccatttggaaccgggtttgggaggcaggcactgtcctctgaaggcccagcctgaccctgcacacccagggctgttcgcagaccgtgcaaacctcacctcactt

SEQ ID NO: 27146 - DNA, 120 bp, Homo sapiens
aaacgtcagctttgggtggagccctttgccccctcttcctctccagggagctggcactctgagaggggcgcccccaacacccacctctggtgagacaatgtcccagagcccagtgttttg

SEQ ID NO: 27147 - DNA, 120 bp, Homo sapiens
caacggctcatagctggcgccacggcccccatgagaaggacgataaaaacacgcgttgccaccacacagaacgggagacacacacgaaaggtaagacaggaaggtgggaacgatcgcagg

SEQ ID NO: 27148 - DNA, 120 bp, Homo sapiens
cagcgagaagaagaaaccaaagtccttgtcaggggtggtgcgcgcttcctggtgccccactccggaggcttctatgccagggatgccaatcagaatcttcaagggcggtttctccaaaaa

SEQ ID NO: 27149 - DNA, 120 bp, Homo sapiens
gaccgatcctttgccccatctgcccttggtaaaaaaccaaaggcagagcctgcgcacatggtcccaggaggcgggggaccggacgcgcacacagtaggtgcacaatcgacactcatcacg

SEQ ID NO: 27150 - DNA, 120 bp, Homo sapiens
ccacgactgagaactcccaaccccatggagatgctcagatgccaggccttgggcaccgcgcccaggtcagtgagcctcggggccggctgtacgctcgtgggagctgacactgccattggg

SEQ ID NO: 27151 - DNA, 120 bp, Homo sapiens
attcgggaagcaggtgagcaaaggaggagcaggaggtggagcccgcagcagacagaggcccagcaatgccagcctggctgtcctcagccactcccccagactctgcctcccacctccctg

SEQ ID NO: 27152 - DNA, 120 bp, Homo sapiens
cttcgaaggggtttctgtttggtccccactccaagagccgctggctatgacttaacattatcctgaaacgtaaaccaacaagcaaccaaagacgatgctcaccgcaaacccctgagaccc

SEQ ID NO: 27153 - DNA, 120 bp, Homo sapiens
cttcgagacagatgtgtctcacagcgggctaagcacacatcagaaaaggcagcactcactgggccagacacagaattaccgtgaagcccagcaatcccgctcctgggtatgtacccaaca

SEQ ID NO: 27154 - DNA, 120 bp, Homo sapiens
caccgggacacgaatgtccccagcagtgatcttcacagtggccaagaaatgtagacaccccaaatgttcatcagcagacggatggataaacaaaacgtggtctacctggaccgtggaata

SEQ ID NO: 27155 - DNA, 120 bp, Homo sapiens
gaacgaagcgctgacttagtgagcctggaggacaccacactcaggggaagatgcagactcaaagggcgcgcagcgtgtgactctggtgaccaagggcagtggggatggggtgggggtgac

SEQ ID NO: 27156 - DNA, 120 bp, Homo sapiens
gggcgccagcccccggcagcccagcaggtgctaagttattattactaattccaacaacctggcttgcagctttagatcgtgggtctcccttctgaaaaccccaggatagcaccccaaatc

SEQ ID NO: 27157 - DNA, 120 bp, Homo sapiens
caccgccaccagcctctggacctttgcacatgctgcccctgagacctcccataccaccaccttcacctggtgaactgcagctcacatctcgaaccccagcacctcctccaggaagccctc

SEQ ID NO: 27158 - DNA, 120 bp, Homo sapiens
ctccgatcatctgaggctgcatgtcctggcaccagctgagctaagcagagcacacagaagcagagaggaccaccctcctggcaacagccccactgtggagggatggggaggcccagcacc

SEQ ID NO: 27159 - DNA, 120 bp, Homo sapiens
caccgggcagcctgtcacagacacccgcagcacttctgcaggtgcccacccagcatccagtccttgctttactcaggctgagtccccccctacacatgctcttatcaggacctaccttac

SEQ ID NO: 27160 - DNA, 120 bp, Homo sapiens
acacgaaacctgagaccagctagcccaggagtgggaaacccctggcacatgtacccatgctctcataccacacccacggcagacaacgctaatcaatggctgagcctcgggacccttctc

SEQ ID NO: 27161 - DNA, 120 bp, Homo sapiens
aatcgatcaggattaaccaagtcttcaattaggctcctacctccactgatgtagtaggcacagggaagagatgggaggccacccacggtcagagaacacagcagaggctcagcccagagg

SEQ ID NO: 27162 - DNA, 120 bp, Homo sapiens
tcccgattccacggggcagtcttttcaacaaatagggctgggaaaactggatatccatgtgctaggtggcccgtggggcctggcattcactgaaacactgctcttgaggtcttggccaca

SEQ ID NO: 27163 - DNA, 120 bp, Homo sapiens
gcgccaagaatgaagccatgtcgacatcggccagggcaaaggccctctgagaggacgggcgtgtgggcaggcaccaggtccctcctgccatccctgtacccctttcctcagtggcctggt

SEQ ID NO: 27164 - DNA, 120 bp, Homo sapiens
ggtcgctctggagccaatcagagcctcaaggtccaggttctagacagagaccctgacggttggcagggaccggacccaaggctgaggttgctgcaggtgcatcatggccacaggggccca

SEQ ID NO: 27165 - DNA, 120 bp, Homo sapiens
ggccgagggacagtggcaaagggaggcccagatggtggtcagcgccaggtgaaaagtcccctgtccacgcccaagctatgaaggctggcttcagctgtcacctgtggctgcaggagcaag

SEQ ID NO: 27166 - DNA, 120 bp, Homo sapiens
aagcggcattcttctctctcattgatccaacctggccttcgggaccccccacaaaggcagccactgcttcccccagcatcctggactttaagtccagctgagtggccacagcaagggtct

SEQ ID NO: 27167 - DNA, 120 bp, Homo sapiens
tggcggctatggggtccccactgtgtttgtttagggcactctgagggggcatgggctaccccacctcctgctccccacagccccagactgcagggagggctcccgcccctgggccccaag

SEQ ID NO: 27168 - DNA, 120 bp, Homo sapiens
tggcgctgcaatgagaggcagcgtgtagtgtgccctggaaacgtcagcccctttctctccggcccattcatcggcagccgcagatctaatcaggctgaaatcggattagtgtggtgacac

SEQ ID NO: 27169 - DNA, 120 bp, Homo sapiens
agtcgcccacctccccaggttcagctgcactgtccttcagctcttgcaaggcgccagggcggggtgtcacagacaggagaggcggcgcagggccggagagccaagaccccagagccagga

SEQ ID NO: 27170 - DNA, 120 bp, Homo sapiens
gcccgagggcatcctggatggcaagcttcaccggccaagctcacatgctcacaggacagtcacgtctctttagggtctctgaaacaatctattgtgatggggacacaatggcagggacag

SEQ ID NO: 27171 - DNA, 120 bp, Homo sapiens
ccacggcagcccaccgagagcaggggcgcccttcagcctatgtgggcccttccactgccccttactggcaacgggtcaccggcagtgctggagtgggaaacaggacaggcctgcctcgcc

SEQ ID NO: 27172 - DNA, 120 bp, Homo sapiens
agccggcatgacctgagaggggtacaaaaggggaaactaagccgggggaggcaaatccacttgcctgagtcacatagccagcaggcctcagctggggagctgcagtttgaacacaggtgg

SEQ ID NO: 27173 - DNA, 120 bp, Homo sapiens
catcgacccctgggcaatggtgatggagtaatagcagagcctgacaatgaccacaggcagggaggatgctgacgtgcacaacagccaactcactcaccacctgcagagcctgtgaggtgt

SEQ ID NO: 27174 - DNA, 120 bp, Homo sapiens
ggccgggatgcaaaagggcagcaggcccccgcctaaggggatgcaagaaagtcctgtctcgccaaggacggcagcacaaggcctgcgtcgtcaaggcaggtgccacactgtctcaggggc

SEQ ID NO: 27175 - DNA, 120 bp, Homo sapiens
gagcgtggggccgggctgacctttatgggaggtgaccctcgctgctccctcctcccaggagagctcgggcaagtctcctcatgtgcacagtgaggctctggcacagagctccaggccctt

SEQ ID NO: 27176 - DNA, 120 bp, Homo sapiens
ttccggccaagactggctacgcgtctcggtgcgctgactcacagtgattataggcgctccacggccgccaggttttccagaaggccaggcactgggctaagagctcccttgagtcactgc

SEQ ID NO: 27177 - DNA, 120 bp, Homo sapiens
ttacgctgggccctcctgcttcccagggcacctcccaggatgactaccaaaacgcgactcacaacgcactacaccacctcggcactggtagaggaagccctccaagtcagacccacagag

SEQ ID NO: 27178 - DNA, 120 bp, Homo sapiens
ttccggacccctgtctctgcacacttcccctccttccccgaggacgccctgacccaattccggtgccttccaacactttccacaaggtctcctggccactcccacccccagctttccagc

SEQ ID NO: 27179 - DNA, 120 bp, Homo sapiens
acacgtggctgacacgtggcacccgctagggctctgagcctttgactgtgctgttccagtggcctgaacactgttccctatccccacttcctgaccttgtctctttcaacccaagcccag

SEQ ID NO: 27180 - DNA, 120 bp, Homo sapiens
cctcgaatggcgggtcacctgctcaccacactccaggcaatgctgctgcgagatgggaaacaggcttcccagagaagatgccagaagactcagagggcccagccagctgtctccaaaaca

SEQ ID NO: 27181 - DNA, 120 bp, Homo sapiens
ccccggaggcatggattcaaaatgtctgctaccagagctcagaccccaaactccaacctgcagcacgcaggcagccctgggtccagaatcccaggatcttccccaaaaagggatggggca

SEQ ID NO: 27182 - DNA, 120 bp, Homo sapiens
ccccgacccgggcgtctcctgctgtttaggggtttcacgctcagcttttctcacagtctgctcctgtgcagcctgatttccaaacgagctctgctgcaaacttcaagcgcccagccggtg

SEQ ID NO: 27183 - DNA, 120 bp, Homo sapiens
agccgtgaagtccaggaaccccagtgctggggctcccacccgctgccagggtctgtctgtccacagcccctgagccatgaggagtgggttctcaaaggctgaaaagtcaagatctcaaga

SEQ ID NO: 27184 - DNA, 120 bp, Homo sapiens
tgacggtcaagtccttcctcagcagcactcgagaggaaacccagcaagaaaaatcaattctggagaagcctcatttggaagtctgagtggagcaggtgggcagctgggaggctcctattc

SEQ ID NO: 27185 - DNA, 120 bp, Homo sapiens
acccgcctccagtccacagtcagacaccgaataagaggcacctactgcatgctaggccgccgcccagccgtgcgtgttcagagccagcagctgagagaggtctcagctttccacgcctgc

SEQ ID NO: 27186 - DNA, 120 bp, Homo sapiens
tgccgacggtgggtttaagccaaggcggggggtataaagagtggcccacacaatcgggacttcaaggtcagggtcaaaccaaaggttttctataaagctagcagtaaattgcttttctag

SEQ ID NO: 27187 - DNA, 120 bp, Homo sapiens
agccggcttccgagtgccggagggttcaaatcctactctctggccacctggctctgagcaattagcccagacgcacgcctgcgcctcggccctccgggttgctctcataggacctcagcc

SEQ ID NO: 27188 - DNA, 120 bp, Homo sapiens
aaacgggctcttgtctctgccacctcattttctccatttcttcccccttccggaaagcggcctccgaggtcaacatgagggcattcgcacgctctctggagcgccctatctccagcgcaa

SEQ ID NO: 27189 - DNA, 120 bp, Homo sapiens
agacggacccaagcagagggcgcgattcttcccgttcccccaccacccactaaaatgaaagccaaatggatcccttcacagccagcagacaccggatgatcgctctccagtctgaaggaa

SEQ ID NO: 27190 - DNA, 120 bp, Homo sapiens
gaacgattctcgctattatcccttcctgctgggctaaaaatattgaaggaaaaatgcaaccgcagcactagagagcttcccaagcaggggggtaaaactgagcctccttctatgatcaga

SEQ ID NO: 27191 - DNA, 120 bp, Homo sapiens
aggcggcctcttcccctgcagaaggccacaagccagccatgcgacagcaaagtgtcaaaaactcttcttagtcaattgccaaacgggcaactacgggggctggagaacaagagctggcac

SEQ ID NO: 27192 - DNA, 120 bp, Homo sapiens
gcccgccatgtccccatttggagctcctgctggagcctctcctgcaggtgcctacaaagccccacccactggtgagtggccgtcacccgccaggcaaccccagctggacccaatgtggca

SEQ ID NO: 27193 - DNA, 120 bp, Homo sapiens
cttcgtgaggcccatatgtgggagctgggagcgctagactagaacccctctcagcctggacccccgggacctgcccttcacctctcagagcctcagtttcctcacctgtcaagcaggggt

SEQ ID NO: 27194 - DNA, 120 bp, Homo sapiens
aggcgctttctctaggcccccaaaacagagagtactactgggaacaaatcaacatctttcactccaacactgcgtttggtgccccgtaacaatgacctcctatcagcaggaagtagccag

SEQ ID NO: 27195 - DNA, 120 bp, Homo sapiens
acacgggccatcagtgcccggtggcattggcaacccagggatgctgttctgcagccaacagcctcaggcatccagctggacctgaacctccttccaagggaccacgatgggtgctcagag

SEQ ID NO: 27196 - DNA, 120 bp, Homo sapiens
gcccgccacccacagcctggtgtctgcacggcgcttgctccctggagcctcctaacctcctgcccacggcaggccctcctaagcctttgcctgaatgactcagaggaatgaatggaacat

SEQ ID NO: 27197 - DNA, 120 bp, Homo sapiens
ctgcgggggcggctgcatgcaggcacagggctgcagcctggtggggctctgagcccacgctcagacctgtttcctctacctgggcgacagagactgcgctggcccctggaacactgccct

SEQ ID NO: 27198 - DNA, 120 bp, Homo sapiens
gggcgtgctatccagatggggatagcagggtgagaccctgagcatccggggtcggagaccagcaccacctgtgctgtggctgaagaacaggcgggcacctaagcaccatccaaagagctc

SEQ ID NO: 27199 - DNA, 120 bp, Homo sapiens
gctcggcccttcctctaagtaacctgcccaccccgaccccgaagtaacccagctcccctccagatctcagggtgtagggctgggaataggaccagacactgaggccaggtgacctctgcc

SEQ ID NO: 27200 - DNA, 120 bp, Homo sapiens
caacgagcaggaaaagcagctcacagagcagcctccaggcaccaagaccgtgaggccacatcgcctccagggagcaggtcccacagcacccctaccccagggcaccaggactgggttatt

SEQ ID NO: 27201 - DNA, 120 bp, Homo sapiens
ttccgggatttcgcagtgctgagaactttggagaacaaaatccccggcagctgcctgaacgctgaacggaggtggcgcgatccgcctgatgaatcaggctaattacacagaagccacaca

SEQ ID NO: 27202 - DNA, 120 bp, Homo sapiens
cctcgctcaaattagggtgcagctgcaacccaaacccaaaataaaatgcccaagcacgcgacagggacacacacggctccagatccaccggccccgcccgcctcctctccacagcctggc

SEQ ID NO: 27203 - DNA, 120 bp, Homo sapiens
cctcgtccttcagggccaggcctgcacagtccacatccaggccccacggctccagagggctgtcctggagctcctgggagccaagctcagggtcccctaggaagcctggctctccaacat

SEQ ID NO: 27204 - DNA, 120 bp, Homo sapiens
cctcgaccctccagagaccctggaagcaaacaggacacatcggcagggcaggcaggtgctctgggagcttgaggcagacaggtggggtcggaggaacagagctcccacctcagtccgtct

SEQ ID NO: 27205 - DNA, 120 bp, Homo sapiens
ccccgctgcacagaggctgtgatgaggtgggtgagctcatacctggtggccccagacccaggacacctgttggaccagaaccaggaacgggctcccaaacactaaatcctaaatggaatg

SEQ ID NO: 27206 - DNA, 120 bp, Homo sapiens
atgcgtctgccgtccacccagtgaccagtgcagaggcacggaccggcagctgagtgggacagtcctgagcggaggttgccccagggtccaggttccccatcctctcccccatccctcagc

SEQ ID NO: 27207 - DNA, 120 bp, Homo sapiens
agccggtcactgccttgggcgaacccctccccaccaggacagagccctttcttctggatcctgcccagtctcaggctgtcctgaggccagagaagggggtggaagagcatacctgagagc

SEQ ID NO: 27208 - DNA, 120 bp, Homo sapiens
gagcgggaggcctggtgcggctgcctgtttgttctatgggactcagtttccccgagtgtaaaatgaggaggtagggcggatggtctttaagggctgcctctggtgagggaccaggctgga

SEQ ID NO: 27209 - DNA, 120 bp, Homo sapiens
acccgggggagtccggggtacagcgtgtgtgaggagcaggtgctctgagggtggacagtgacttggtgatgtccttgggaagtgggcacagcctggacgtgctctgagggactatccggg

SEQ ID NO: 27210 - DNA, 120 bp, Homo sapiens
agacgagccggcaggacagtgtcctcagggtccagcctttagctccaggcctcatcctccgggtccttccagacacctgtctctcccaattggccctgcccaccggcccgggacagctcc

SEQ ID NO: 27211 - DNA, 120 bp, Homo sapiens
ccccgctggactgagctggcctccgttgcaacagagattccctgtcacactgcaggcagagcagccgccggcagtggagggatgtcaggcgtcaggcttggggagggagcaggacctggg

SEQ ID NO: 27212 - DNA, 120 bp, Homo sapiens
gctcgggagcggggagctgagctccaggtgaggccaaggcttgcggcccaggcaggtggcttcagctgcagaaagaagaaccttcgtgctgcctggtggtggggggagctctgtggggcg

SEQ ID NO: 27213 - DNA, 120 bp, Homo sapiens
cagcgtggtcagaacccaggccctggagtccataggtcttggtgccaggccttgagcaggcctctgtctttcctgggtgctggaggatgccagccttggtgctatggttcagaggggcca

SEQ ID NO: 27214 - DNA, 120 bp, Homo sapiens
ccacgctagtggtgtccctgagtcagcctcaaggccatcaggccggaaagtggggctccagagaggagctcctggccttccagtttgcaggggtcttcacgggcctctggcctccaggct

SEQ ID NO: 27215 - DNA, 120 bp, Homo sapiens
cagcgcacttcgcatcagagcccctgccaggcctttcctggaaataccacttcccagcagctgtgctccagggcgggcctgggaccctctaggccctgatgggatcaggccctggcatcc

SEQ ID NO: 27216 - DNA, 120 bp, Homo sapiens
taccgcccagcactggccggcaggagggacggctcaggccacagggaactcaggggtctgctgtggcccaggagtggccacagtaacagctcaggaggacagaggtgagtgagaagggag

SEQ ID NO: 27217 - DNA, 120 bp, Homo sapiens
ccacgagggcctctgcttctgttccagtggctggcctgggtgtggcctgtgtcctcgcacccggcagcctccaagtgtgctggtctggttcacccaccgtatggggagctcttgattaac

SEQ ID NO: 27218 - DNA, 120 bp, Homo sapiens
ggacgagcctggtgtggcagtagtggggccttgctgtggggccatctcatgccctcggagggtgttggggggcatctcgggctctcccctgaggctttttgtcctgcttccccgggatgc

SEQ ID NO: 27219 - DNA, 120 bp, Homo sapiens
catcggccctggaaagggtggcacttctgtgtctcccacaaacaatcccaggtttctctgcaacaggaaagtttgtccaagtgtgtcccagccctgcatgggtgagggatgctgaacggg

SEQ ID NO: 27220 - DNA, 120 bp, Homo sapiens
tatcgtgtacccaaaaacaagtgctgtgtgtgcatgtgaacctgggcgctccgtgagccaggcaggcgcaccgtgggcacgtgtgtgagagctggaggaggatgtgtggggcccgccagc

SEQ ID NO: 27221 - DNA, 120 bp, Homo sapiens
caccggtcatgagtctggggaaaggcaggctgggctcagcgtgcccgtgctaggtggctgggtgccaaggcccggttaaatgggcatctttcaaaggtgtcttgggacctctcccagctg

SEQ ID NO: 27222 - DNA, 120 bp, Homo sapiens
cagcggggctggaactgaggccaggatgcgattggcccagggaggtgagaccagtactagcagctggcaagtgtaacaggtttgcaggggacagtggcagggcagaggccgcgagcttcc

SEQ ID NO: 27223 - DNA, 120 bp, Homo sapiens
atgcgctcttgattggcggcgattccctttacccgtgtgtttggagaagggactgttagaccctcaggaagaagacctccgtcttccgccagcgacagcttccagtccatctctcaggaa

SEQ ID NO: 27224 - DNA, 120 bp, Homo sapiens
gaacgctgtgcgcccctgtgggtttggggctcccgcgcctgctgtgagcagggctttctcccggtggctctctgctcctgctctccatggtgctcctgggttggccgccatactaggttc

SEQ ID NO: 27225 - DNA, 120 bp, Homo sapiens
ttccgtatttgctctagtaggttttcagttgattcctcttgggttttccagtaagcaatcatgccaactccaaacagagcccccttcatgactccttgcttttatcctttttctcgcagc

SEQ ID NO: 27226 - DNA, 120 bp, Homo sapiens
gaacgggaatgcccagagcctttggcgggagaagcttgtctttaagcactttgtcagacagccctggctccatggccaccgggaacagatgcagggggagtgagaagcaggcactcctgg

SEQ ID NO: 27227 - DNA, 120 bp, Homo sapiens
tgccgggacctcagtgacgctccttgggctctgggagccacttgtccttgccaggaactagggatggagactggcttctgagaactgttctcaggattccatgccaccacctggcttgcc

SEQ ID NO: 27228 - DNA, 120 bp, Homo sapiens
tggcgtgcagctggctctcagtccatggcagctggcactgagcacagctgccgggctcccctctgatggggttgtcagggtcagtgcacgtgactacgtgtgcaccaaacagctgacggg

SEQ ID NO: 27229 - DNA, 120 bp, Homo sapiens
tgccgtgcccaggtgtggactgcctcgctcattcttggcctctccagatggattccaaaagtcagtgtcccaagcctgagctctctgatgggcctcagctgagcggagggggcacgctgg

SEQ ID NO: 27230 - DNA, 120 bp, Homo sapiens
gggcgccggccaccctgggtcatagcctttgtccataagagctcagccaaactgctggccacgctacacctgctgtagctgaagcactcacctgcaggccctgttccgcgtgcctcaggc

SEQ ID NO: 27231 - DNA, 120 bp, Homo sapiens
tcacgcatgagcatacaggctcagggaggtgaagtgactcgccgggggccgcccagcaggactgatgggccaggactgaactcatgccagcgggactcttgccactctctgggcctgcag

SEQ ID NO: 27232 - DNA, 120 bp, Homo sapiens
cagcggggtgctctgagcccctgggctgccccggccttgtctagggggtgtgctgtgtcccgtcacctcagccctggctccaaggggtgtgtgagtcccacaggttgagctccacacctt

SEQ ID NO: 27233 - DNA, 120 bp, Homo sapiens
cagcgcaagagaagagggggtgcagaattcgaggtgggccccagggtccccgtgtctggctatgccagggttatgttccagttccacctgaaccagcttcaacagggaccagacccccca

SEQ ID NO: 27234 - DNA, 120 bp, Homo sapiens
ggccgatgtaggccttcctgcttgcgaaaagtctcaaccagaccccgaggacacggggagcagctgttttgctgctgtcctcctgcgatgggcccctttcccagagaccctgtagccccg

SEQ ID NO: 27235 - DNA, 120 bp, Homo sapiens
ccccggccctcagccaacacaacagcgaagtattttcaaggtttctggctctgtggggggaacaaggcaggatgccaggaggcctgcaggacacctgcttatggccgtgtgctcgctcaa

SEQ ID NO: 27236 - DNA, 120 bp, Homo sapiens
agccgctcaaaaggcagacggggtggggacgggaggaggcagccacgcctgaggagccggcagtctcttggggttttgccattgaaaggggctttcagtgaggaaggcacaaaatcaaga

SEQ ID NO: 27237 - DNA, 120 bp, Homo sapiens
ccccgacccctggccacgtggttcccctgcctgcctgcacctccccatggcccagccagcttgtgactaaggaaaaacatgcagctacgctgatgcagttaggaaaatgttattttttaa

SEQ ID NO: 27238 - DNA, 120 bp, Homo sapiens
gcacgcacctgctgcctgcagcttcagcctggggtgcccatagctccttgcctgctgcttgtctgagggttaggggacacaggagaggcacttggtgggggctcaaggaatgtgcccacc

SEQ ID NO: 27239 - DNA, 120 bp, Homo sapiens
tcccgacttgaggagagagaggagagttttgtagcatccctggacctggtgttccaaatgagtggcctctgtgcagggcctacgggcacagcacggggagctgggtatggtcagagcctc

SEQ ID NO: 27240 - DNA, 120 bp, Homo sapiens
gcccgtgggggagccagccccctccatcccccctctgctctcctgctggcctcgaagccttgaacaagggccggcctgggccaggtaaggagctccctgcccctcagctcctgcttctcc

SEQ ID NO: 27241 - DNA, 120 bp, Homo sapiens
ccacgatgcccctaacctgcgctgccagctctctgtgtccctttgatccctcacctggtgacagtggcagggcagctcagggcccagagggcctggcagccccccggggttctgacctga

SEQ ID NO: 27242 - DNA, 120 bp, Homo sapiens
ctccgcctggggaggctgcaaacaagggtgtcttcttaggcctcctggtcactccaccctcacccctcaacagcctgagggtctgagacgggggtctctggggctggaccctgaaggaag

SEQ ID NO: 27243 - DNA, 120 bp, Homo sapiens
agccggcctcggcaaagaccctggggacggggaggggagctggggagttgggaggggttgcaggggtgtggcggggcttcagagcagggggagggcctccatcctggctcttgggggatc

SEQ ID NO: 27244 - DNA, 120 bp, Homo sapiens
gtgcgcgcctgtccctgagctggccatgacagctcccgtcccccttacctcctgccaggccccggggccgctttggagggagccccgccccctgcccctgcgcagcccccgccctagccc

SEQ ID NO: 27245 - DNA, 120 bp, Homo sapiens
acacgcacgtggggaccccagccctggctctgtggaaaccccaagctgacctggaggaggggatcagccgcttggaggaccctcctgggtgcttggggtggggtctgatgcctctatctg

SEQ ID NO: 27246 - DNA, 120 bp, Homo sapiens
ggtcgtctgcctggcctggtgggacccccttcctgtgtactgcagtgactcacaggagccgtgtgaggtgggaggacgtgcttatctgaatgcaggagggagtgcaggcggggtctggag

SEQ ID NO: 27247 - DNA, 120 bp, Homo sapiens
tgccggctctgggtgagaaagcccttaggtagaggggaggggacactgggatggggtcctgggctgtggacggaagggctggtgtgcccggacacggcagcacaggctccactcgggccc

SEQ ID NO: 27248 - DNA, 120 bp, Homo sapiens
catcgtggtggccttggccatgggggtgtctcaggtctgggtaaggtggaagtgccgcttggtctctctctgcaccaggggaagagattgaggggcagggagacccaaccatcagcacag

SEQ ID NO: 27249 - DNA, 120 bp, Homo sapiens
tcacgccctccctatttctaccctggggcaggctctgtgagggaagcgggtgctgctgccaacccctggcaggctgtgagcgagcaggtgggcgggcaggactcgggcttcctgtttccc

SEQ ID NO: 27250 - DNA, 120 bp, Homo sapiens
ccccgggagtagagcctctggcagtgagtcaccacagcctccatcgcccgtggccttggacagagaagagctcggcgggccatgtgggcagaggaggctgtactgctgggcaggccgctc

SEQ ID NO: 27251 - DNA, 120 bp, Homo sapiens
cagcggggatgacccagcccatcggtaccgcccggtggaggaagtggacagagttgggagctcactcacctcagggacctgatggtggaccctcaccactgcttaccagatggtgtctcg

SEQ ID NO: 27252 - DNA, 120 bp, Homo sapiens
ctgcgcccaggctctggagccccttgagccatgctgacagtctcactgcccctctgcctgggagtccaggggcaactgatggaggccctggccctcccagccagagccagctctcaagag

SEQ ID NO: 27253 - DNA, 120 bp, Homo sapiens
tcccggaagcctaagtgagcgtcatggcccttggaggacacagacttgggctcttcttctgcagaggggttaacagcccccaaagggcagctcgaggagccagcgggacaggggctgcct

SEQ ID NO: 27254 - DNA, 120 bp, Homo sapiens
tgacggtgtccccgagctgggtcccaggcaccttgtgcagactctggtctgtggcagtggaggtgcggcttccatcctgccctgcactgaggctcaggaagatgctgtgtatgtcggggg

SEQ ID NO: 27255 - DNA, 120 bp, Homo sapiens
ctacgttctttttctagtaacaaatacctactcaacaccaactggccccagacactatttcagatgactgggatacatcagtgagcaaaacaggtaaaaccctgcccctgttgagctcac

SEQ ID NO: 27256 - DNA, 120 bp, Homo sapiens
atacgagaagggatttaatcagagaaatctgctcacatgatcacaaagacagagaaatcccacaacaggccatctgcaagctagtgaatcagaggtggcagcatgcctgggtccaagtct

SEQ ID NO: 27257 - DNA, 120 bp, Homo sapiens
ctgcgagggccaccctggccccggactcactcctgggtagggcctgtggggtcagaccccctccctcagcgagccccaaggaagcgtggggtccgaccgccgccatcctgggactgagtt

SEQ ID NO: 27258 - DNA, 120 bp, Homo sapiens
acacggtgattaattcagcatcagaatgcaagcgtgggagtttccaggaacactgaggttcaggtctgggggcggaagagaaaagcagctcattctcagaaagcactgagaggccgggcc

SEQ ID NO: 27259 - DNA, 120 bp, Homo sapiens
ctgcgggacgtgccgactggggcagcccccaccacaccctgggatgcaccctggctgggaccagtctccaaattcccctgcatccgtctcaggctggaaaactctccaacaaagttgcct

SEQ ID NO: 27260 - DNA, 120 bp, Homo sapiens
aagcggcctctcagctgagccggaccctctctccttcagctggtgctgcagtgactccaagtgaccagtgacaccaggtgtggcagctgcgcacagcctttatcgtgccgcactcaaggg

SEQ ID NO: 27261 - DNA, 120 bp, Homo sapiens
ccccgggaagggaacccaggcagggcccagtgccatggtggtctccacttcgccgtggagagaacggccaggtgacccaaccacagcgaggccttcagtgtgttcctcacttccacctgt

SEQ ID NO: 27262 - DNA, 120 bp, Homo sapiens
tggcggtcgcttctggctgtcaccctgagcacatccatgtggcctcttggagtggcctctccacgtggcctaggcttcctggcaacgcagccgcctcagggcagtgtgacttcctgatgg

SEQ ID NO: 27263 - DNA, 120 bp, Homo sapiens
aagcgagaggccctgagagtcaggcgggcaccacagggccttgctgaggcagccggggactcccgctccctctgctgacaccattggtggccagtgagtcagaggcagaggtgccagaga

SEQ ID NO: 27264 - DNA, 120 bp, Homo sapiens
ccccgcccgaagggaggagatctgagagcctgcagccacaggctcctccaggactcgagcaccggggccgcacagagagccctttctctcctgggcaggccaggcggggatcccccagcg

SEQ ID NO: 27265 - DNA, 120 bp, Homo sapiens
ccacggcaatgtggccttggggatgtgccctgcctctctgggttccagtgcaggactcagggctggccacctgagaagcatctctaggacattccaaagcctggaacagggacagcattg

SEQ ID NO: 27266 - DNA, 120 bp, Homo sapiens
ctgcgtggaagccaagaagttgtcctggcctgtcctggaggtgcctttgcccttgcttcctgtccttgtccccaggggctgcacccatcctactgactctgccagcagtgccagcctggt

SEQ ID NO: 27267 - DNA, 120 bp, Homo sapiens
tgccggcccacaccagaggccccggccacacaggagccacgggacagccggaagggaagccaggaggccttgcttggggagctgggcacacgcctggcctccccgtgatgctcccctgga

SEQ ID NO: 27268 - DNA, 120 bp, Homo sapiens
atccgggtgctaggaacgcgtgcccagggaggacccggaggccctggccaccccacacctcaccctggacatctcttccatctggctgttctggagctgatcctctgtaataaactggta

SEQ ID NO: 27269 - DNA, 120 bp, Homo sapiens
cctcgatttatagccggtcggtcagaagcagcggtggccccaacgggggactggcagctgaggtgggggcagtcctgtgggactgagcctgcctttggggtctgcgcaaactctgggtag

SEQ ID NO: 27270 - DNA, 120 bp, Homo sapiens
tgtcggcattgaactgagttgttaaacaccccgtttgtgtctacagaggcctggagaattggttggtgtcgaaaatccacacatttggtgtcagggtgtggtggtgtacaaacacccctg

SEQ ID NO: 27271 - DNA, 120 bp, Homo sapiens
tcccgggaagtcaccgctagagaggcagagggaggcagagggaggcagatgcaggcacaggggcttcctacccaacccccgctcccctctgcggccagctgggccgggagggcgaggtcc

SEQ ID NO: 27272 - DNA, 120 bp, Homo sapiens
gcacgcagctgtcgtcagttcagtacgacatcactgagagctgggagaacctgggccccgggaggaagaggggtcgcagagggatcttgcaccttctccctggtgcagggtggggtggtg

SEQ ID NO: 27273 - DNA, 120 bp, Homo sapiens
cagcggtggggaaaccacccagccagggcccaggtcacaggctctggggcctccgtcccagcctcgggcccctctcactctgcagtgggttggcgtccagcccccatggtgccttggagc

SEQ ID NO: 27274 - DNA, 120 bp, Homo sapiens
atccgtgcagtgcaggctggactcgaagaacacaaaattcaccctttcatggaacgcatagcctttctgcagagtcctcacatgtgccggctgctggcccttctcagaaagcatttgcta

SEQ ID NO: 27275 - DNA, 120 bp, Homo sapiens
ccccgcctcagcagccctgggacagcctctatcccctcctcagcagccctgaggcagcccccaatcccctgctcagtagccctgggacagcccccatccccccccctcagtagccctgga

SEQ ID NO: 27276 - DNA, 120 bp, Homo sapiens
ccccggtgtctacctcactctctgtgcttctccaggcatcagcccctctgcagggacaggggacaggaaccagcggagacggaaccccgggccggggagtcagttccccatcccaatgcg

SEQ ID NO: 27277 - DNA, 120 bp, Homo sapiens
ttgcgggcttccaactccagactggcaccggcttgcagttgtcaggacagacacctccgagcctgagggcagaggctccgggtggctctgggtggggcgtgaccagcagctctgacagca

SEQ ID NO: 27278 - DNA, 120 bp, Homo sapiens
aatcggggaggaaaatgagtccccagacacaggggcagagccgagctgccggaaaccagcaacagcagcatggccagggaggctgccagccaagcccaggaaacaggaccgggttggggc

SEQ ID NO: 27279 - DNA, 120 bp, Homo sapiens
ccccgtgtcaggccagggtgggtgtttccatctacgtttgtgggtgaggactgtcccggtcacacagtccctgtgtcatggaggcaggacacgcacctgggtcccgcacccctctttaga

SEQ ID NO: 27280 - DNA, 120 bp, Homo sapiens
aggcggccccacgggaggtctcctagggcctcgccacaggggtgggcttcggggcagaaaggagccgcccagtgggaatgcgtctaacccacaccctgtaggtccccaggccagggtgca

SEQ ID NO: 27281 - DNA, 120 bp, Homo sapiens
tagcggaggcggcctccgcttgatgggttgtggaggttgggggagtggggtgcgctggtcggccaccgctcactggcctgtgtgcacaccggagggggtgctgatgggcgcagggctgca

SEQ ID NO: 27282 - DNA, 120 bp, Homo sapiens
agccgagttctggagggacagaggtgagcaacagacatttcaagtcttgggatggggggttcttctggccacacctgggaaggagggctgcccctggacaaggacacaggcctccaaaac

SEQ ID NO: 27283 - DNA, 120 bp, Homo sapiens
tcccggtcatcccctgcctgcagcctcaggcaccctccatccatgcacacccctcaaggcagacggggagcccagcaccgggaggaccgactctcgccctggcccagccctggccgctgc

SEQ ID NO: 27284 - DNA, 120 bp, Homo sapiens
gcccgagcggagtcccccgctccccaggtccggccctgagctcagcttcacacgtactagtcgcccacccgggaccccctttttcccccagtgggagacgagtggtccctggccctgggc

SEQ ID NO: 27285 - DNA, 120 bp, Homo sapiens
gggcgggggagcagggggacgcaccctaacggccacagatgacccaccccaagccatggtgggctggggacagggacacccatcccacccaaagtttttgttctattgagtctgaaagtt

SEQ ID NO: 27286 - DNA, 120 bp, Homo sapiens
ccgggcaggaggagcaggaagggcagggaggaaggggcagggctgggcaccaggggcctggcggcctcccaccctccccaagaagggggagggaagctacacttggaggctgaccttgtg

SEQ ID NO: 27287 - DNA, 120 bp, Homo sapiens
cctcgcaggaggctgccagtggcctaattgtttacagtataatgaatgcatttgtttccttcatcaattttaaatacaagcagaataaaaatcacatttttctcaggcaacagtagcagt

SEQ ID NO: 27288 - DNA, 120 bp, Homo sapiens
taacgcatgcaagcagctctagtactcggtccctcgcgcagccacccagctccgcttacaaggtccctgcataggtgccctccggcctccgggccgcggccgccggcgtctggggcctgc

SEQ ID NO: 27289 - DNA, 120 bp, Homo sapiens
agtcgcgtccgcacggtgcagcctccgggatccgggcgggggaagtgcgcgcatccgcagccgccctggacgctcaggcgggccgtgaaagacgaggatacgggagcgcccttgggcgaa

SEQ ID NO: 27290 - DNA, 120 bp, Homo sapiens
gaacgtctgcggggctccggcgcccgtccctgcggcccgggaactgcaagctgcctggactgggcctggcgctgccttcaggcctggtgtgatccgggcgcactggggcgttgacagtca

SEQ ID NO: 27291 - DNA, 120 bp, Homo sapiens
ttccgagctcctactcgcccttcaggacccagctcgaatgccccatctctgggaggcgccttcaatcttgggctgccccttccgtcacaccccctgtcccctgtctcctgcctccccttc

SEQ ID NO: 27292 - DNA, 120 bp, Homo sapiens
ccccgcctgttggtggcctgtgtctccgctggcccagggctctcttgccgtggccaccgtgggttttggcctcgtgacccagtccatgcgtgcacagcgcaagtagcttcccaggacacc

SEQ ID NO: 27293 - DNA, 120 bp, Homo sapiens
caccgatttcctccccggccgcagctgcttctggtcctctgcccactcccgggttctgcgccttcctgcgcccccggcctggccacagctcggtcaccccagaaccaccgtgtgctgggg

SEQ ID NO: 27294 - DNA, 120 bp, Homo sapiens
tcacgggtttgtcctgacgtgtgaggtccagccggggtccccatagcctccctgtccccgtccctgtccccgtcaggcctcctgctgcgctgtggacagtggcttggcgccatctgctgg

SEQ ID NO: 27295 - DNA, 120 bp, Homo sapiens
tgccgccaagcgcaggagggacccagcggctccaggtctgtgggagactttaagttggggccgaatgtggtgctcgctgccgacgcagagcccccaagctggacgggacccctggccgtg

SEQ ID NO: 27296 - DNA, 120 bp, Homo sapiens
gtgcggctgggaacacctggggttgtcctacctttgcagggacagcgagccaacccctgcttggaaggagcactttccccaccgaggccggcccagggcgcgtgctgagcaggtgggttg

SEQ ID NO: 27297 - DNA, 120 bp, Homo sapiens
gttcgaacagatatctgggaacccagcagccaagtcaagttgacacatgaaattaaccatcactccatcctcacgattctgaaccgcacgcctcagtggcattaagtgcattcacgttgc

SEQ ID NO: 27298 - DNA, 120 bp, Homo sapiens
catcgacacagctttccctctttccaaactgaagctctgttcccaccccctccccccgcccctggcgtacacgcctctgctgtctgtctccagggcctctcggaggaggaatcaggcagg

SEQ ID NO: 27299 - DNA, 120 bp, Homo sapiens
gcacgtccccatcgtagctcgtgccagaatttcctggggtttctttctgaagtgaagaaaatgttccaaaattgactgtgttgatagttgcacacatccgtgagtatacagaaagccatt

SEQ ID NO: 27300 - DNA, 120 bp, Homo sapiens
ggccgcctgccccgtcattccctatcttgtgaggggctgagcgctagagaccagaagctgtggattttccagccaggccctattggctgaggcacacgtgtggctcccccaagacaagaa

SEQ ID NO: 27301 - DNA, 120 bp, Homo sapiens
tggcgcccagcaccgagccagcgagccagcttccttccctgctaagcccatcccaccccggcagagctcccttgtctctgcccaccccaacccggaggctgctcaccctcagctcctgcc

SEQ ID NO: 27302 - DNA, 120 bp, Homo sapiens
tagcgagctttctagagcattctggagctttccaaggcagcaactgcagtcccagccattctccaaagcttaattctgctctcacctagtcccagctgtgaccagtgcccgcctcaagaa

SEQ ID NO: 27303 - DNA, 120 bp, Homo sapiens
gcccgccctccctgcagaccggacagcaacgccacctctgggagactcgtggggacggggcccagggcaggctcacagtgggaggctggcagcacctacccggggcagggcctcctcctg

SEQ ID NO: 27304 - DNA, 120 bp, Homo sapiens
ttccgtttaaatgtcccccacccaggggaggccctccctggcccacgtctctgccccagacaggccctctctcgtctcttcccacctccttttcttcagagccctcataaccaggtcaaa

SEQ ID NO: 27305 - DNA, 120 bp, Homo sapiens
gcccgcctgtctgctggtctgtcagccctgtaacccaggggcactgcctgtgtggtcacctggctctcctggccatggccaacccagccctgtgtctgctcagccggcacccaggaagcg

SEQ ID NO: 27306 - DNA, 120 bp, Homo sapiens
cctcgggtaatcccctccgggggccgccccagacaaaagcccaaattaagtcagcagaatcgcaggggagaggccaaggggctggaatttacccactaagagcaaacaaagaatctcccg

SEQ ID NO: 27307 - DNA, 120 bp, Homo sapiens
caacgagaaagctcccagcccatggattggcacccaaggttcttggcagagcctcaccatggctgcaacagggcccatgggccccacccctgccctgggacagagccacagctgggcaga

SEQ ID NO: 27308 - DNA, 120 bp, Homo sapiens
tcccgttgtgaggggtgctcaggggacctctggaatctgcctcccagtctgagcttcagaggctgttctgaggaggctggcagtggtctcggaggagatgttggacactccaggggctcc

SEQ ID NO: 27309 - DNA, 120 bp, Homo sapiens
tctcgggtgtctggagtctctggggtgtctgggatttctgggctgggctagaggggctggggcaggaggggtggagaactgggaggagagcctctgccctaggggagagttttgtgcaca

SEQ ID NO: 27310 - DNA, 120 bp, Homo sapiens
ccccgtgggctgggcaggcctggctgatgatacccaggatgagcaaggtaacagctgtgaacaggggccaggggccagggtggagcctgctgggtcctctctctgcacctgctccccatg

SEQ ID NO: 27311 - DNA, 120 bp, Homo sapiens
ctccgtggctcctctcactcaggcctatccctatggctcagaacagctcagaaagccctggccagggtgccccccagctggcctgggcggtgctgcagtccagccttcctgaccacctcg

SEQ ID NO: 27312 - DNA, 120 bp, Homo sapiens
caacgcattcctgatcctctccgggaccacttccactttctgactccttttcctccctgagctcaacatgacagaggagggcttaggcctttgttctgagcgagtgagaactgatgctaa

SEQ ID NO: 27313 - DNA, 120 bp, Homo sapiens
aaacgtccatcagccttcccgttcccaggctggtcctccttagcctggggtgacctggaggtggctccccacccctcccaaccaaaacttaaattgaataaatagatgggacttccgagg

SEQ ID NO: 27314 - DNA, 120 bp, Homo sapiens
cttcgaggaggggctctcccgaatgcaatcagccaaaaagggctgagagctttggaaacgatttcattcatcagcctaatggctttgcaaccctgtctgaggaagctcagggttagggct

SEQ ID NO: 27315 - DNA, 120 bp, Homo sapiens
cagcgcctaagccccttccctgggcaggaatgtgggctccctggaccccagcccaaccccaccgccctgaaaccagagccacaggctcagccgggttgactttggctacagggccaaggc

SEQ ID NO: 27316 - DNA, 120 bp, Homo sapiens
ccccgcttttcccaggctctgcgagattttgttccaagcagagcaatttcttgggcactttccctgggatcaagtgttagccagggctgtaaatcttttgttccaaaatgcagacctcat

SEQ ID NO: 27317 - DNA, 120 bp, Homo sapiens
taacgtcctgagtgattctgtggggtgccagccatgaagagtgccgtctgtggaaaggccacaaccttggacctgggatgtgggtttctctcgctcctcttggtctgagagggcaccagg

SEQ ID NO: 27318 - DNA, 120 bp, Homo sapiens
ctgcggctttgctggctcagttctgtccgcacagggtgcaggacctccagccctgctgcttctgttctgggtccgcacagggtgcaggacccccagccctgctgcttctgttctgggtcc

SEQ ID NO: 27319 - DNA, 120 bp, Homo sapiens
gtccgcacagggtgcaggacccccagccctgctgcttctgttctgagtcctagctttggagcacatgggccgcgggcaccctcccccgtactccaggccccgggccagctctctcaggtg

SEQ ID NO: 27320 - DNA, 120 bp, Homo sapiens
cagcggagctggcggagcccccgcagtgtccgacgccccccagggcccactctgtgcagagccaaattcccacatgcagcccagaccagcaccgtcccaaaccttggccaagacagtcac

SEQ ID NO: 27321 - DNA, 120 bp, Homo sapiens
gagcgtcttcagctctgctccggccagggacttgtgggctgccagctccacccgcaggaggtagtgtagccctgactccaggtccaccgtgtacagcttcgacctaggacgggatatggc

SEQ ID NO: 27322 - DNA, 120 bp, Homo sapiens
cagcgtcagggaatgcccaacctttccctccacagcaagtctccctgtcctggctcctccccacggactcccagggcccctgggagggctcctgagcggccctcactggctggggtgggt

SEQ ID NO: 27323 - DNA, 120 bp, Homo sapiens
acccgccctgcaagcacgcagccttcggtctacacgcactgtctccgggggcttcagttcaagaggaacacttgcttgtcaaattctctccaaaccacgatttctgaattttcttctttg

SEQ ID NO: 27324 - DNA, 120 bp, Homo sapiens
aagcgattttttcctcacatccggcaatgacttcaaataagacgaaaagaaggcccgcagaggcttcacgctgtgagagaggggagggcaaaggtgagaagagcctcctttataaaatcc

SEQ ID NO: 27325 - DNA, 120 bp, Homo sapiens
agccgtggcattcaggacagctctgggccacccctttcatcctttgggcatttattggggcatgggagtcagtgggaacagctgacaccccgcctgggctccggctgcgcttccacctgg

SEQ ID NO: 27326 - DNA, 120 bp, Homo sapiens
aggcgttttgtaaagctgggttgagcatctgccaagatgagctttattctgactgcgatttccaacacgcctaagagccttcaccgacgcgcccacaatctgccagccctgagtgaggca

SEQ ID NO: 27327 - DNA, 120 bp, Homo sapiens
agtcggggcctggggtggacgtcagcccctccctgatgtcaggcccctgagctccctgcgtgcccaccctgtgtggacagggtggagctgagccccctgtgtgcccacgctgtgtggaca

SEQ ID NO: 27328 - DNA, 120 bp, Homo sapiens
tgacgtggagcttgtttccaaagacagaatgtagcagtgctatttgcaaaaacattaaaatatctataaaaatattaacattatttgacactaagaagttgtctagatgatacttttaac

SEQ ID NO: 27329 - DNA, 120 bp, Homo sapiens
aggcgcccacgtttctggagatgtccatgtcaaggcacgcaggaggcagtggcacccgcaggtacacacatgctatgcacgggcctgcaacagggtcacaggtacctccgccccctagtg

SEQ ID NO: 27330 - DNA, 120 bp, Homo sapiens
ccacgcatggcagaccaggctgcagtggcagccctgaggtgccccccgccgagtcccagggccctgcaggggcctcgacaggagccgggcctatctctaaagcagagggaatggctgggc

SEQ ID NO: 27331 - DNA, 120 bp, Homo sapiens
cttcgacattccaaaaccccaagccaggaaaaagggcagggcctggtcctagggatgcttactggcagcaagagcagtgcccagtcagggtgggaggtagcaccaggctctgtgaccctc

SEQ ID NO: 27332 - DNA, 120 bp, Homo sapiens
gttcgggatcctaggactggcaggacctgctggagcctgagatgggccccaggggcctgaggttgcctcctcctgtccagacccagccttggcacctcccaagactgccaagggccctac

SEQ ID NO: 27333 - DNA, 120 bp, Homo sapiens
ggccgcacccgagagcagggacaggtgcccgaacacagggtctccaggacgtagcgcccccccgcatacttgaatgtatgtgcgtatttattgctcacgtctgtgccatgttgtcaatgg

SEQ ID NO: 27334 - DNA, 120 bp, Homo sapiens
agtcggccaagtgagtgtggtccgtatgggcttagtcccgggtgggggcctaacccggtaagaggctgcactgtgcaaagtgtccacagatacccactgtctgggccctctgagacctca

SEQ ID NO: 27335 - DNA, 120 bp, Homo sapiens
ccacgggggagctggggcacagaggggtgaagtggctgcctgctgtcaccactgattcctgcacccctacctcctcacgctcccagcccctagggaaacagagcatgctctgagctgaca

SEQ ID NO: 27336 - DNA, 120 bp, Homo sapiens
tcacgtggccgggaccagcccccagaagcagcagcccccaggtcagccccacgaccccctgaggacccagcctgctgccgcccacccagcacccgggggagggaggtcctttcctggagt

SEQ ID NO: 27337 - DNA, 120 bp, Homo sapiens
atccggctgggctcagggtctggacactgagccacagtggaggagccgacggcagatctgcagtcttggggcttgtctgggcgctgcttgtggtgggtggcacccccacggggcccccgt

SEQ ID NO: 27338 - DNA, 120 bp, Homo sapiens
gtgcgccgggcagtcctgctgcccctcgccacagcccacctggccatgttggcagccacagcctctgtgctggttgactccgttgcctcctccaccccagaaggggccttgggaaccaga

SEQ ID NO: 27339 - DNA, 120 bp, Homo sapiens
caacgtgtactccaggtccagggtcccagccagcttgcgtgtggtggtacacgcacacagggtccaagtaaccgtgcagggcccaggaccgcgcacagccagggaagcgcagcagtgccg

SEQ ID NO: 27340 - DNA, 120 bp, Homo sapiens
ccacgctactggctgggacagcctctgaaggtgcggccgaggaacctgcttggagagacgctgtgacgagggatgcccaggccagcaaccgtgcccgggaggcagggatgtcctggggcg

SEQ ID NO: 27341 - DNA, 120 bp, Homo sapiens
ctgcggggagggaagggcggagggagacagggtccagggggcctcaggcaggagctggcgggatgcttctggcacgcggggggtagccataggtcttctctaggaacgtgccagccttgg

SEQ ID NO: 27342 - DNA, 120 bp, Homo sapiens
taacgtccacatcccaactaccagccgccatctccccatccgtaagaggaggggttggcccaagcggctctccttgctctaattctgcacttccaggtccagacggctccctggacctcc

SEQ ID NO: 27343 - DNA, 120 bp, Homo sapiens
ctgcgtcctggagaagggggaaggctcgggctccggccggctcccctgagggaacccgtccttctcacccgccccccactggcccctgtaactgcagactggttgggaggcgaggagccc

SEQ ID NO: 27344 - DNA, 120 bp, Homo sapiens
cagcgccaagctctccctgtgggacctgcctgtacccctggaggtgagccggtgtgggtagcctgcatttcagatgccaagacacacccaggaggccaagccacggctccagcctggggt

SEQ ID NO: 27345 - DNA, 120 bp, Homo sapiens
tctcgtgtcctcacagcagcacttgggacagacaggtccagtgtcttcggtgcctttcaccagcaaggaagccagggcttagcaggctcacgtggctgcttcatggctgaggcgggatgt

SEQ ID NO: 27346 - DNA, 120 bp, Homo sapiens
gttcgtattttccagtttttatagtaactaggtctttactactaaacacaattaatcttaggctttttgtgaatttgtattctggagaggcagattttactctttataaatacgcacgca

SEQ ID NO: 27347 - DNA, 120 bp, Homo sapiens
ttgcgtcggattttcccagggctggctgcagatgggcgctggtgctgcttgttggaggaagcctggtcatgctgtcttcagtcacctgtgtctgtggctcttccccattaggcggcttac

SEQ ID NO: 27348 - DNA, 120 bp, Homo sapiens
caccgtttctgccccacagaaaacgtagcaaagatcaaccgagaggtgctgcattcctacctgaggaactactacactcccgaccgcatggtgctggccggcgtgggcgtggagcacgag

SEQ ID NO: 27349 - DNA, 120 bp, Homo sapiens
cctcgggtggggaacacgtcccctggcccgtggtgtgacctgtttttgtattgattctgagggtgataggtgttgactgcatgtgtagctttgccttaacacatgctgtagtcccacagc

SEQ ID NO: 27350 - DNA, 120 bp, Homo sapiens
ttgcgagccctcattgtttttcacatggcgacacttgcttgttttcttggttacagctagaaagagacatgtccaatgtcagcctgggcccgacccccatccccgagctcacgcacatca

SEQ ID NO: 27351 - DNA, 120 bp, Homo sapiens
tggcgttcctgatgcagtgtggccggctcagccagccctgccctctgtccctggcatccgacagcgctcctgatggggcgtgggcggctcagccagctctgccctctgtccctggcatcc

SEQ ID NO: 27352 - DNA, 120 bp, Homo sapiens
gggcgactcagccagctctgccctctgtccctggcgtctgacggcgctcgtgacacagcgtgggtggctcagctagctctgccctttgtccctggcatccgacggcgctcctgacgcggc

SEQ ID NO: 27353 - DNA, 120 bp, Homo sapiens
ctccgtccctggcgtccagcggcgctcctgacgtggcttgggcgactcagccagctctgccctccgtccctggcgtctgacggtgctcctgacgtggcgtgggtggttcagccagctctg

SEQ ID NO: 27354 - DNA, 120 bp, Homo sapiens
ctccgtccctgcaggaggaggacttcatcccctttgcagtgttgaacatgatgatgggcggaggtggctccttctcggctggtgggcccggcaagggcatgttctccaggctctacctca

SEQ ID NO: 27355 - DNA, 120 bp, Homo sapiens
caacgtgctcaacaggtgggttgcactcttttctgtatcctcaggccaccaggccaggccaggtgtgtttttggaccatgaggccaccttccaggtgacttttctccagtttcccatggc

SEQ ID NO: 27356 - DNA, 120 bp, Homo sapiens
cgccgacccaagacaggtgagggccccgcctgccaccgtcctcagtgcggttgcctgtccagacctgggcgtccctgcctagacgggtcagtaggccggcaggcgcaggccacactgtta

SEQ ID NO: 27357 - DNA, 120 bp, Homo sapiens
ccacgttgtaggagtggccacctgtgggcctggtccctgagcctcagggccaaggtcccggcagggcagggcagggcagggcggccaaggaggcacagcctggggctgagctgctccacc

SEQ ID NO: 27358 - DNA, 120 bp, Homo sapiens
gcccgctgaggctgttcttccctggtccaaaccccgaaaacagaaaaacagaccaccgccctcccccagtgctcggtccactacttctttctctgagccactgggtgagtcgtgggactg

SEQ ID NO: 27359 - DNA, 120 bp, Homo sapiens
ggccgtatttaacaattcttttattttccagagattggccaacatcatttgcattcatttaaactcctttctgagtgaaattccattaatctaagatctagcggtgagtgccaagggaat

SEQ ID NO: 27360 - DNA, 120 bp, Homo sapiens
tttcgatccatgatcttactagacacgtcatatcctgccctccccaccgccgccgccggaagacttggagcctcttactgtcaagccacgtgaacacactccagggtcggaccagaatct

SEQ ID NO: 27361 - DNA, 120 bp, Homo sapiens
ggtcggagaagaggcctaggaagaagccataaaagcggactcatttgaagccccattaccataaacatcttggtacagattttcaatgaattaatttgaaacttagggcacatttgttca

SEQ ID NO: 27362 - DNA, 120 bp, Homo sapiens
gggcgggggccggtgaggggggccaggccaggcgtggggaccctccccaaggttccatcaccagaggaagcagcagtacaacctcctccgcggggtgggggcaggcaggctgctcctcag

SEQ ID NO: 27363 - DNA, 120 bp, Homo sapiens
cagcgtcctgcaaccacctagcctgactcttgttaaatgttaaggctttgatacatcttctgaaacccacccagagaggggatctgtgcagtcctctaccctagatcagcggggctccac

SEQ ID NO: 27364 - DNA, 120 bp, Homo sapiens
gagcggttcagaggcaccggcgagggcaccagggagggagctcgtcatctggacggccatcaagccaccctggtggccaccaagctccttcctggggtctcctctgtgcggtggacacgt

SEQ ID NO: 27365 - DNA, 120 bp, Homo sapiens
ccccggtgcccaggcccgctgtgtgccctcacccaggagggagagacgcctgagcctgacatgccaagggggcagcaggagttgggggcgggggtgggggttctggcggcagggaggtgg

SEQ ID NO: 27366 - DNA, 120 bp, Homo sapiens
agccgcctggatcccggccggggcaccgtcccgcagagcttgtcccgcacagactcagtttcctaacccagcaagtgggagtccactgtgagaagtccagccctacgcagatgcgtgcga

SEQ ID NO: 27367 - DNA, 120 bp, Homo sapiens
tggcggaagcagttggctcctcgtgtcatgcaaagggcggcattttcattcctaacagggaggtggccccggagcatccagttcaaaggagctaggatgatccagggtcctctcacgtgg

SEQ ID NO: 27368 - DNA, 120 bp, Homo sapiens
atccgcgggtggcagggtggccccatctgcagtgggcccaggaggatagcaacaggacttagcagtggtgggattgtatttctgggcccttcttcccccacagcccacagcctcctgacg

SEQ ID NO: 27369 - DNA, 120 bp, Homo sapiens
ggacggacctcaggtgtggagctccctcaccagacagaggggaggagcccaggtccatctcctcaaagggacccaccagcccctcacgcggctgcacacaaggcagtcccagccaggccc

SEQ ID NO: 27370 - DNA, 120 bp, Homo sapiens
tctcggctgacatggcctttgcgggcagccttcccacccacatccccagcatgagccccagctccttggagcccagagtccaagaaatggcctttctgccactgacccctcccgtggaat

SEQ ID NO: 27371 - DNA, 120 bp, Homo sapiens
tcccgagcagggaacctctgctgggacccgtcagctgcaagaaggcccgtccccgagagagccctgcagggcaaggggagagggaccccggggtaggggtggagagcagctgaggggaca

SEQ ID NO: 27372 - DNA, 120 bp, Homo sapiens
tctcggtcacagctgagccagggcagcctctaagcttcctaagtggggaaaccaaggcagagaaccccaggactggggccaccgctgtggtcagccggttgggggtggcctgggcctctc

SEQ ID NO: 27373 - DNA, 120 bp, Homo sapiens
aggcggggctgcaggaactgagccctgcagtcaaggggagggcagagggtggctggagctgggcttcccaaagatgctttggctgcagggagcggctagggtggcggcccacagagccag

SEQ ID NO: 27374 - DNA, 120 bp, Homo sapiens
gaccggccccacacccatccccatccctcactgacacacaacacctgcatgcgcctgcaggagatacccacagccgttcatcccgggacgcagcgggcagggtcatcctgggacgcatca

SEQ ID NO: 27375 - DNA, 120 bp, Homo sapiens
tcccgggatgcagcgggcagggtcatgagcccccagggccctgtttgcaagactccccacctaggccagggggatgaggtggggagcaaaggctcttccagatggcgggaggccagacaa

SEQ ID NO: 27376 - DNA, 120 bp, Homo sapiens
tggcggatgcccagtccctctgtgtggggagcaggctcggcagggcacaggtccctggtctgcttggagagcaagggtgtccctctacatcccaggggacagctgctgcctccctccaca

SEQ ID NO: 27377 - DNA, 120 bp, Homo sapiens
agccgcaggcttcaggggccaggcctgtaccacactacatcatggtcttctctcgggctctgcctcctcagctacagcctgtggcaaattctcctctgaacactcacccaggcaaagtgg

SEQ ID NO: 27378 - DNA, 120 bp, Homo sapiens
agacgcacagaaggggcgccaggggccactgtcacacccacaaagccggcgtggggttcccggggagaatgacattcaggtgtgcacgtgtgagaacgtgtgcgtgtgcaccagtgcttg

SEQ ID NO: 27379 - DNA, 120 bp, Homo sapiens
acccgcatccgtcgctggaatgaccgtgtccgggctgccagcgtctgtcactaagtcatgagtccaggcaagagtgtgctgggtgtgggtgaccctgggcagcccttaaccagcgacagg

SEQ ID NO: 27380 - DNA, 120 bp, Homo sapiens
gcccgagccagcctcagagctgctgggccagctcaccttgcctgcctggctaccccatctgtagcgaggcttcttgggagaaggatgggggtgggaccatgggagggaacacatggagtg

SEQ ID NO: 27381 - DNA, 120 bp, Homo sapiens
cagcgtagacagtcccagctccacctccaccactgaggcccatggggtgaggctccagcccccggtttgggttgcaggggagcgtatggcaccctttagcggccaccttctcctcctctc

SEQ ID NO: 27382 - DNA, 120 bp, Homo sapiens
catcgatcccgtccccactcctcctgcccctccccatgagctgcggtcccagggctgcctctggaaaaccccagtgaagaccccagccgcacctgcctctggagaatcccaggctccagc

SEQ ID NO: 27383 - DNA, 120 bp, Homo sapiens
cctcgctccctcatccttgaatccttggctttgtcctcactgtctctgacagcctcttctctttggtccccagccccagtataccctggctctcagtctcttaaccttctgttcccttgt

SEQ ID NO: 27384 - DNA, 120 bp, Homo sapiens
gtccgtctgtcctgacatggcatcctggggtccgtctgtcctgacgtcgcacccgggggtccgtctgtcctgacgtcgcatcctggggtccgtctgtcctgacgtcgcatcctggggtcc

SEQ ID NO: 27385 - DNA, 120 bp, Homo sapiens
caccgtgcgggaacgtgaaaccgtgcagctcctggaaaaccatttggcggttccccaaaaacttaaacgtagaatcaccacgtgatcccacaattctgactttcagtttatgcccaagaa

SEQ ID NO: 27386 - DNA, 120 bp, Homo sapiens
tcacggggcagatgacgatgctgtggactccctgttggcaccttggccccaccatgatccctccaaggccagccctcagcagcagcgtccctgggcgtctttaagtgtcaacagctccta

SEQ ID NO: 27387 - DNA, 120 bp, Homo sapiens
taccgaatggccctgcacaaactcagtccaagtgaaagcggggactcagactcaaacttgcacacccatgttcatggcagcatcagtcccagcagccaaaggtggatgcagcagagcatc

SEQ ID NO: 27388 - DNA, 120 bp, Homo sapiens
atccggggacgagcgatggagaaacaaaatgccacccgttacgcagtggaatactacgcagccatgaaaaggaaggaaattctgacccacgctaaaaccggatgagccttgaggacatta

SEQ ID NO: 27389 - DNA, 120 bp, Homo sapiens
attcgaatgtgcctagtgccactgaactgttcacttaaatagtgaaggtggtcaattttatgttacgtctgttttaccacaatttaaagaagaacaagaaggaggaggaggaggagaaag

SEQ ID NO: 27390 - DNA, 120 bp, Homo sapiens
tttcggggagtttggatgccagcagagatgggcagggtgactctctgagctggcattctgctgcctgcctcctgcaaaagtgacttcagcctccactgggaggcccttgctgtgggaatg

SEQ ID NO: 27391 - DNA, 120 bp, Homo sapiens
aggcgattcagcaccgagtgccaccctttatgggagcaagttgagaatggggtgccagggtgcgccagggcgagggggagtcaggagcccctcgcccagcagcccctggaggaatgcacc

SEQ ID NO: 27392 - DNA, 120 bp, Homo sapiens
agccgtctgcaggcgcggggggctcgtggatgatgacgtgatagtccactgatgtaacccctaattaggccccaaagaggatggcaggaaaggcctctcagataaggccgattcggtgga

SEQ ID NO: 27393 - DNA, 120 bp, Homo sapiens
ccccgaggggaagctggggggagtatcagctgcaaagtcaaacagaccatgagttctcaccagtgggcatggcaggaccctcagcctcctcatctgtgcaatgggacaatggtagcgccc

SEQ ID NO: 27394 - DNA, 120 bp, Homo sapiens
gcccgcccacaggagtcacgctgcgaaatcatgctcacagcactcggtaaaccatgggagagggcctcggagaagatccagcgtggcgatgaaacgtaagttaaaggaatgtgtttagtg

SEQ ID NO: 27395 - DNA, 120 bp, Homo sapiens
gtccgttcgcgatgtcttgttagcctctcgtgatgtattgttggcagctcgtgatgtgttgttagccgcttgtgatgtattgttcgatgaaaaaagcagtttgcaaagaatgattaaatg

SEQ ID NO: 27396 - DNA, 120 bp, Homo sapiens
tcccgtgagcttccctgattcctacccggcattccaaagggtgaggcagcacctcggccagctcaccttcaacagcacccctggaatgggcccagagccaggccctaagcccccgatact

SEQ ID NO: 27397 - DNA, 120 bp, Homo sapiens
tggcgattttttatcttcctttttgtgtgacattctattttgcttttgtgttttttgtttgtttgggtttttttttttttttttttttcatttccaaagtgctgcagggaatgtgtggga

SEQ ID NO: 27398 - DNA, 120 bp, Homo sapiens
cctcgggtgggttctcctggagaatgaccctttcttttaatgggaagatccggaagtgacacctcccactcctgctctggtcccattgaccagaacttggtcacaggctaagttagagtc

SEQ ID NO: 27399 - DNA, 120 bp, Homo sapiens
agacgtggtctttagctggacagccttgagcccggtgaaaccccttttaccgtgaaatgggagggcacagcttgggtgacgatcagaggtcgccgcggcacgggtggtcctcacccaagc

SEQ ID NO: 27400 - DNA, 120 bp, Homo sapiens
ccacggagccgcaaggctcgtccccgtgttctcacacgcatcaggtcatcactcctttccatttcttttcttgaaggcatctcctggcctcctggagactttgccccacccgtctcctct

SEQ ID NO: 27401 - DNA, 120 bp, Homo sapiens
agccggctgggggtgcagactgtggtgccactgtggccgccgccatcattgtcaccatcatcagcatcaccatcatcagctgccatccctgaaccctcaggctttgctggtggctgggag

SEQ ID NO: 27402 - DNA, 120 bp, Homo sapiens
ggccgaggctggcatggcctgctgccctgacctgcttcctgaacgctccggccacccaggcctgcgtggagtagggtccacgggcagacagatgggcaggccccttaggcagagcagccc

SEQ ID NO: 27403 - DNA, 120 bp, Homo sapiens
tcccggcagtgtgggggtctgccgggcagcctgagagaggagtttccagtcattgcccaggcaggggtggctcaggaagctgcagtcccccccaagaggcctgatggtgctgggcgggtt

SEQ ID NO: 27404 - DNA, 120 bp, Homo sapiens
ctgcgcttggcggggcagaggtcaggcttccggcagcccccaccccttgacgcagttccccttcccctctggggggctctgggggggctctattgttctcgagggctggttcccaatctc

SEQ ID NO: 27405 - DNA, 120 bp, Homo sapiens
ccccgaacactcacttcctgtttcctggctgagaggaaacagagattcctgaccaggcagatgcctttttttccctttctctctttacattttttaagggtattaaataatagtgataat

SEQ ID NO: 27406 - DNA, 120 bp, Homo sapiens
tgacggcagccttggtgctgaggagtgtggactcggggactggaggaagcccagggccacctgcatggggctctgttgaccctccttcgagaatctgctggaagctatggacccctcctc

SEQ ID NO: 27407 - DNA, 120 bp, Homo sapiens
ggccgagggaggcacagggcggctgagggtgcagccagtagggtaagggccagatcccagggtggcctagtgtggaggaggtggggaaatggggttctgcctatctgctccaacctcagg

SEQ ID NO: 27408 - DNA, 120 bp, Homo sapiens
tcccgctcagaccagcggtgcctgggtgccaggagcgcccccttaaaccagctcagtgaccatgaagcaggtgcagaaacaggcccggagaagagtgaggtcctgcctggctgaggccct

SEQ ID NO: 27409 - DNA, 120 bp, Homo sapiens
tggcgcccagagcagacccttcccctggccgtgggtagaggggagctggttcctgcttgagggggaggcgcatcgcgtgtgggtgaggtttccacctgccctccaaagtcccgtggggaa

SEQ ID NO: 27410 - DNA, 120 bp, Homo sapiens
gaccgcccagggccagggaaatgggggtgtcccaggcatcaggccgacaggggctgaccccaaagcagggctcacaccccacggacagcggggttgggagaggccctgctctcctggggt

SEQ ID NO: 27411 - DNA, 120 bp, Homo sapiens
aggcgtgccctccaaagccacccagctcccttcggcaccgtgtcccctcccacccagcccacctttgccacagtggctcgctcggcctgaggctcccactgccgtgtgaacagggaagat

SEQ ID NO: 27412 - DNA, 120 bp, Homo sapiens
ggacgccgggaatctgacagagcaccccctgtgatcacccacagtgtcccgcatccctccccacacccccggccgcagcctgctgccagcccagagcacccctgtgaagtggggctgagg

SEQ ID NO: 27413 - DNA, 120 bp, Homo sapiens
acacggtggcccccacccccctcagcctcctgtttgtccgacgacacgtccccgttatcagcggagaacacacacaggaagtccggctgggaagggcccatcccaatcccgattacccag

SEQ ID NO: 27414 - DNA, 120 bp, Homo sapiens
ggacggagcataaaaagccgcccttcctcgcccggggggagcctccctgcaccaagctggccctgcacggctgcaagggaggctcctgtggacaggccaggcaggtgggcctcaggaggt

SEQ ID NO: 27415 - DNA, 120 bp, Homo sapiens
aggcggaggtcccacagcagcaccgaaagctggtcccgggccccttcccagcccccagacatcagggtgaccaggactgtgcataggcactaacccacaactcctctccaaccagcagcc

SEQ ID NO: 27416 - DNA, 120 bp, Homo sapiens
gaccggggaggcacaggtggcccccaccacccggaggagcagctcctgcccctgtccgggggatgactgattctcctccgccaggtgagtcccagcaaaccccttgctccgagggaacac

SEQ ID NO: 27417 - DNA, 120 bp, Homo sapiens
ctgcgccgggcgcctaccgcgcggccccccagcggctgagatgggcgtcccggggtggttttcagcctggggggcttgaaagctagcaaagggcccgcagccccgtcagtgtgggcgccc

SEQ ID NO: 27418 - DNA, 120 bp, Homo sapiens
gggcggcctctcctggctcctggcggccgggcttggtcgtgcgtccccagcgaccgcgcagcgagcgccctgccgcggggactcgggccccaggattcccggagggggtgctggcgggcc

SEQ ID NO: 27419 - DNA, 120 bp, Homo sapiens
cctcgggaaaacatgactttcaaaaattgagtctccacttagcaccgcttcctgtccaggcgactctcaggaattgtgggggggagctgtgccaatatgtgtggggggcaatgaggtctg

SEQ ID NO: 27420 - DNA, 120 bp, Homo sapiens
attcgcctacccccaggcccgccctggcatccccctgcccacatcaagccgccgggccgctgccctacctcttccttcccgggtcccactccccaatgtcccccgacttcgagtcttgcc

SEQ ID NO: 27421 - DNA, 120 bp, Homo sapiens
ggtcgcaccagacccagcccctaacagtgtccttcatccagggcccatccccagagttaatctccagccagctctgccccctcgacaaactcctgcccaaaaactgctgtgatgcccccc

SEQ ID NO: 27422 - DNA, 120 bp, Homo sapiens
cagcgcacagaggactggaggcccaggaaggacccccagccaccctccccgctgggaccgggtgatgccttggcagtgcccgtgggaagcaggtgtgggatcgtgctccacacccagtgg

SEQ ID NO: 27423 - DNA, 120 bp, Homo sapiens
cagcgactgaggacagtgtgactatttataggactggctgtcagagctgaggaggggcctcagagaccctattctagtgtgtgaggaaactgaatcccagagaagggacagccttacccc

SEQ ID NO: 27424 - DNA, 120 bp, Homo sapiens
ccccgacccgaagcctggcctttccctgcggagggccctgcagtgcctcggaaggaacccacccagcctttgggaagcacccgtgagaggccctgggtgggaccctgcagcatggcaggg

SEQ ID NO: 27425 - DNA, 120 bp, Homo sapiens
gctcgccaggtctccagacccctggctgcgcataggacagaatccccatccccggcattgccacagaccattaattctgggctctcatgctctcaggaagcctcacccgggcccctggct

SEQ ID NO: 27426 - DNA, 120 bp, Homo sapiens
ttccggttccggtgacactgtcgggggctgctcctcacccccaggtgtgcacctggcacagccactgtcccaggatccctggaggctgattgcacacatatcccagcctgggaaggaccc

SEQ ID NO: 27427 - DNA, 120 bp, Homo sapiens
ggccgcccctctggtggtcttagaatgtgtgcaccctccgcacggttcctgctggcttgcagctgctggcccacctgctggggccggttccacactcagatgagaaatcaaattccagaa

SEQ ID NO: 27428 - DNA, 120 bp, Homo sapiens
ggccggcaggtccctggtggggctggatcccagctctgcccacgaacaccccgtttgcatagactggggtgcaaactcacccctgccctgctgtgaggagggccctggaaccaggcagga

SEQ ID NO: 27429 - DNA, 120 bp, Homo sapiens
aaacggccacccgtagctggagccatccttcccggagcctcgggcagatgcccagcaggatccactcgattcctgcaccaagagctctggacagcgtcaccccccctgtgcccccaggct

SEQ ID NO: 27430 - DNA, 120 bp, Homo sapiens
tggcgagggtctggctagctggaagagggggccagcggaggagagagtgggcgccaccgtggggctgtcccaccggtggaggctccagcggagatgagctgggcaggcctcgcggagcaa

SEQ ID NO: 27431 - DNA, 120 bp, Homo sapiens
acccgcgtcctgggggcatctgcggggagacttaggggtcatgctttgtgccccaggccacccagaggagaaggccaccccgcctggaggcacaggccatgaggggctctcaggaggtgc

SEQ ID NO: 27432 - DNA, 120 bp, Homo sapiens
gggcggcacagagcacgcctaccggcccgggtgagccaagccctagcctgggagtgctggggtggggggaccgggagccctcagcacctcctagaggcggccctcagcacctgtcgggga

SEQ ID NO: 27433 - DNA, 120 bp, Homo sapiens
ccccggccacatgttcccatcattcttgggtcctgctctgggactcctgggctgaccccctctccacccccgcagccgtagggtgtgtgctgtccgggctcacggggaccctgtctccga

SEQ ID NO: 27434 - DNA, 120 bp, Homo sapiens
agtcgttcgtgcagcgtgtgtaccagcccttcctcaccacctgcgacgggcaccgggcctgcagcacctaccggtgagtgccccaccacaccgagctcacccagccccagcctcccaagt

SEQ ID NO: 27435 - DNA, 120 bp, Homo sapiens
agtcggccacacatcagcatgtcaggggcgaggcgggggtgaatcctgggacccaagatgggaaactgaggccagagccatgagagggctgcctgagatgggcgacccagggcggccgga

SEQ ID NO: 27436 - DNA, 120 bp, Homo sapiens
ccacgatcacctccagtgtcctaatccttgctcttgccccgacacgtctcaaaggaccgcacctctaagagcatccccatgtttagaggggtcacccatcctgtctgcacccctccactt

SEQ ID NO: 27437 - DNA, 120 bp, Homo sapiens
ttccgggggactaacccctccctaccctggcatccctggctgcaagttcccatatacacagaatggtgcctgactcccctggtcccactccactgggcacccccctccacatgacggccc

SEQ ID NO: 27438 - DNA, 120 bp, Homo sapiens
ctccgatgcccagggcccacactctgccgtgactcgccgtaggccgggcacaccctctcctctgggcctggatgcccccacagtaggagaccagataggtgggggcacacacaggcctgg

SEQ ID NO: 27439 - DNA, 120 bp, Homo sapiens
atgcggagtgtggctgggccttcctgctgtggcttgagtcccggccagcaccggaaggcccaggcagggaaacggctgtgcagtgacccctcagtgccatcccttgaggagaagaccctt

SEQ ID NO: 27440 - DNA, 120 bp, Homo sapiens
gaccgcctaccgccgcagccctgggctggcccctgccaggcctcgctacgcgtgctgccccggctggaagaggaccagcgggcttcctggggcctgtggagcaggtgagggctatgtccc

SEQ ID NO: 27441 - DNA, 120 bp, Homo sapiens
cctcggcgcccggtgttaggagggcgactgttccccaatcttccagcaacgctcctgctgcttttcttgaaccccgagcaaagcaccaccttgccgcagagcacccactccctagcagct

SEQ ID NO: 27442 - DNA, 120 bp, Homo sapiens
ccccgcccacagcaatatgccagccgccatgccggaacggagggagctgtgtccagcctggccgctgccgctgccctgcaggatggcggggtgacacttgccagtcaggtgaggctggct

SEQ ID NO: 27443 - DNA, 120 bp, Homo sapiens
tcccgcaggcatggccgcctgacaccccgtttcctgcagatgtggatgaatgcagtgctaggaggggcggctgtccccagcgctgcgtcaacaccgccggcagttactggtgccagtgtt

SEQ ID NO: 27444 - DNA, 120 bp, Homo sapiens
agacggtacactctgtgtgcccaagggagggccccccagggtggcccccaacccgacaggtaaacagccctggctgtgcctggcctggggaggcgggcaggcagtggacattgccgtgtg

SEQ ID NO: 27445 - DNA, 120 bp, Homo sapiens
gggcggaaggcggtggggactccctctccagggagggaggatggggagggaggataggtgggttcccgagaactgggggcaggttgcccggagcctcatatcagccaagaaggcagaagt

SEQ ID NO: 27446 - DNA, 120 bp, Homo sapiens
ccccgtcccggggtcctgtctgcatccagcgcagcattctggaagacgccacgcctccgctggcgacgggacattattacttttggtacgcgctgtgacacttcaaactcgtaccgtgag

SEQ ID NO: 27447 - DNA, 120 bp, Homo sapiens
atgcgccgtccacggcaccgcatcgaaaacgccgctgagacctcagccttgacctccctcagcgtggccgggaccctgagcctctgcgcagagccacccgccccgacgtacttaggcggc

SEQ ID NO: 27448 - DNA, 120 bp, Homo sapiens
cagcgccaggcaggcagcgggggcggcagaggcctgggcctgagtcttctggctctgcctctccctggggacaggagggagcctgggggtgtgggtggggagccggccggccgtgaccca

SEQ ID NO: 27449 - DNA, 120 bp, Homo sapiens
cagcgcctggctctgcccgcaggagtggacagtgcaatgaaggaagaagtgcagaggctgcagtccagggtggacctgctggaggaggtgaggcattggtgggggggggggggggcaggc

SEQ ID NO: 27450 - DNA, 120 bp, Homo sapiens
tctcggtcccctgcggggagactcgtgggggcgcgcaggccaactggggcgtgtgtctgggcggggctgggttgccccaccctgggtgccagaagtagccttgtcaccagggacgctccg

SEQ ID NO: 27451 - DNA, 120 bp, Homo sapiens
aggcgaggtgggtgtcaggtggcggcgttcacatccgcttggcagcacggccagcgtggcagggcaaggtgcagctgggacaagggcagcagtcacctggcccggcccccacccggcgtc

SEQ ID NO: 27452 - DNA, 120 bp, Homo sapiens
ttgcgggagtgctggccgccctgcgctctaacgggtcagcaggggagcacggcccctcttttttcagatgcagagttgagctgttaaaacatttccctgaacattgtaaccaccccccaa

SEQ ID NO: 27453 - DNA, 120 bp, Homo sapiens
ctgcggtcctgaaggacgtggggtctcgctgcctgggctcagcagcccctgcccaggcggtcccagcttttcttgaaagtggagacacatccttttgccttaggcctgtaggcatcttac

SEQ ID NO: 27454 - DNA, 120 bp, Homo sapiens
cagcgaaacccaggagagcattttccagcccagtctccttccagatccatatgggcttcatctggaatcagcttggagggcctggcttgacctctttccacgcttggagccggaactgca

SEQ ID NO: 27455 - DNA, 120 bp, Homo sapiens
ccccgcagccgggaggtctgagagctgcactgctgtgcctctgagaggctgagaggtggctgctgacggctgcggggttttcatcttccagggcagatgaggtgggtgcaccctgcagac

SEQ ID NO: 27456 - DNA, 120 bp, Homo sapiens
tgccgctgccgggagctgggggatgcgggggtgtgggctggggtcccaggtggacttcctggaggagtggggcttcacagcaccttcagctggaggctctgtgcacccaggtcccgagca

SEQ ID NO: 27457 - DNA, 120 bp, Homo sapiens
caccgacctttccagggtggccaccatcttcctgcacccctaggtgactgtgtgtgtgttggacacctctccctcctctcctccccccggaatggagcccgtggggcctcatctgttttg

SEQ ID NO: 27458 - DNA, 120 bp, Homo sapiens
gtgcgaccagcactcaggccaatgtctggcacatagcaggtgctcagcacacactttccatagtagcaaaggcatccccattttacagagggaaaactgaggctctcaagggtgaacacc

SEQ ID NO: 27459 - DNA, 120 bp, Homo sapiens
agccgggacgtgacagaggaaaagaggctgactctgagccggaagactcctgccagggctggcaggaacagtgccagggcagcacacggtgaccctgttgcctccccagacaaggtgggg

SEQ ID NO: 27460 - DNA, 120 bp, Homo sapiens
gcgaaccacagccccagcgagacgccaccaccagggaaatggctaaaatgtaaaaacctgccgatagcaagagccgcccgggatgcggagcagctggaagcgccggcggccgcggggagg

SEQ ID NO: 27461 - DNA, 120 bp, Homo sapiens
gagcgagtcttggcagctgctggctgcgccccacatccctcaccgtccaactcagcccccccaggtgtttaccgaagtgcaatgaaagcttctgttcacacggaacctgcctatggaggc

SEQ ID NO: 27462 - DNA, 120 bp, Homo sapiens
aggcggcaacggctcatccccgagcaccccacgcggaggcgaaggaagtgtcctcccggcgagtggccaaggcgcggggtctcagccaggagggaagggtcggaccccggggcgggctgc

SEQ ID NO: 27463 - DNA, 120 bp, Homo sapiens
gctcggccagcccagggctccgcgcgtctgaccccatcctgaggacccaggggaaggaccagccctggctctgcggcctcgaaccgggggcgcgcgtggggagccctgaaccccgcagcc

SEQ ID NO: 27464 - DNA, 120 bp, Homo sapiens
aaacgccagagaacaggtggctcgggtagcgcagctcgccagcctgccaaccacgccagaggatgggcctcctgccctcagcaacccgcccagagccgggacttccgctgagacttttaa

SEQ ID NO: 27465 - DNA, 120 bp, Homo sapiens
tttcgggaggaaagaatcttcgtctccggcatctaccttctctgggcctgctaatgtgcctctggcccagcagccggcacagactcagcggagaagaaaatgccgctaacaggaagtgtc

SEQ ID NO: 27466 - DNA, 120 bp, Homo sapiens
agccgggcaccagcgtccccacgagctccccacaccgggagaggcctccttccctgagcctgaggggttgggggtgtaggaggagccccaccaactaagaaggagaagccaccttctgcc

SEQ ID NO: 27467 - DNA, 120 bp, Homo sapiens
tgccggtccagctcctccatggctgctgccacctgcgcccggagcaccacgaggacacccaggatggtgcacggcagcctggcctccgtggcggggtccgggctccgggttcccctgctg

SEQ ID NO: 27468 - DNA, 120 bp, Homo sapiens
ggccgattctatacggacagtgcaggcttgtgcgcccacccgggaatgtcatcaggacagcttggctgctggcagctcagagacgtgggtttctgcacaagcgccatcggccctggtgac

SEQ ID NO: 27469 - DNA, 120 bp, Homo sapiens
ccacgcccaccgcaggggttagcctggcctagacagcagcctgcccagccaccctcctggcatatggacagcggtggacgctgctggggccgtctcggagcctgagaggaagaggagctc

SEQ ID NO: 27470 - DNA, 120 bp, Homo sapiens
gctcggtgacccccaccccacatgacacttgtttttttgggctcgttctggcctgcgctgcgagggctgtgggcactgatgggcaacggaccagagcctccagcactttcctgtgccacc

SEQ ID NO: 27471 - DNA, 120 bp, Homo sapiens
ccacgcctggccctttgaaatgtgtgccagacgcagtgggcagtcagagctccggaggccggaggcacagcgccagcgaccagagtgacagtgacagtggggagggcctctgctgcacca

SEQ ID NO: 27472 - DNA, 120 bp, Homo sapiens
acccgggggcagtgtggagcccggccctggagcctgatcacccaggcttgcagcccgcctggcctcttcctggctgtgcagccttggataagttacccaacccttctgtgcctcggtttc

SEQ ID NO: 27473 - DNA, 120 bp, Homo sapiens
aggcgagaggctgccccagaggccatccctggctccagcacttccccaccttccccggcgcgggaggacccagtgccatgccccagtccctggctgagtggcagtgagccatggcctctg

SEQ ID NO: 27474 - DNA, 120 bp, Homo sapiens
cctcggtgaagggggctgcatggcaagaaaagccccggaatgtccatgaagccaccacagaacccacagcctccacggtcacgcgtggtggcccaggcggggcactctaccccgaaagct

SEQ ID NO: 27475 - DNA, 120 bp, Homo sapiens
tggcgggatggggctacatgttctgcccacagaaccttctggacaagggcgatttggtgttgccccccatgtttcccaacccagcgggggtgtgcagggagacgttggtgcagacttgtg

SEQ ID NO: 27476 - DNA, 120 bp, Homo sapiens
ggacggcgagtctccagggagagggtcctgggagtggaggcgaagctcatggagaggagcagagatgcaggaaacgcaacagcagcacggcagaaacgcaggagaaacagccccgcctca

SEQ ID NO: 27477 - DNA, 120 bp, Homo sapiens
agccgcccacctcctcccgccatgccaggaagggccagtgtccctccagacgccggtgactgtcacgtcagacacgtgacgtgtggctgtgcccagattcttggcggtgagccccggcga

SEQ ID NO: 27478 - DNA, 120 bp, Homo sapiens
cagcggtctcccggcgtctggtttagggggggatctccgcaagaccccgcccgcacgtggctcctgtgaggggcactgcgcgcgaaggctgtggtctgccctcctgggccctgggggaga

SEQ ID NO: 27479 - DNA, 120 bp, Homo sapiens
cagcggggacacagagctgtggattgaatcgtgtccccaaaacttcaggcccacctggaacctccgaacgtggccttatttggaaacggtctttgcagataccactagtttagaatctgg

SEQ ID NO: 27480 - DNA, 120 bp, Homo sapiens
gctcggggaggcgctccctcttgggcccctcttccaggtggtatgggttctaatattaccggggtctgccacgcgtcagtatccccttgttttgtcttttcaataattttatgtaatgca

SEQ ID NO: 27481 - DNA, 120 bp, Homo sapiens
atccgaataatatatattacgaaaagagaaaaatatcaatggaaattcaaggaaaagtgcggccaagacgtccttcagtagatgaatggatcaactccgtgcatccagatggtggaacat

SEQ ID NO: 27482 - DNA, 120 bp, Homo sapiens
agccgtggagaggcctgcatgagccttaagtgcgtatcgctgagtgagagaaattattctgtgtgaccccaactctccgacgttctgcagaagccaaactggccagatgcctggaatgag

SEQ ID NO: 27483 - DNA, 120 bp, Homo sapiens
ccccgcgttcatgagggctggtttccggcagtggcattgggaggctttgttaacattggttcttgtgcttgtctgccttgtttaagttccttacaaagagcatgtgccatttttacaaaa

SEQ ID NO: 27484 - DNA, 120 bp, Homo sapiens
tcccgtagggttgaggagccgagatgcggggaccaagggacgtcagcgcgttggttctggccgcgggaaaacgggcggtcgctgtgaccgtctctgcgctctccgcgttgctaacgcccc

SEQ ID NO: 27485 - DNA, 120 bp, Homo sapiens
tcccgggaaagacccggagacgggaccaccgcatgtggaaaccaccgggaagcacagcgcgtgggccgcctgagcggtgccggggcggggaggcagggccgccgctcaggccgtggacct

SEQ ID NO: 27486 - DNA, 120 bp, Homo sapiens
cctcggggccgcgggacggacgtggatggcgccgccgttctctcgcgggcccagcgaggctatgcgtgcgcggcccgggcagtctctgcgagcccgggctgctgctcatctgggggggac

SEQ ID NO: 27487 - DNA, 120 bp, Homo sapiens
ggacggcggccgcccgactgagcccagagctgtgggccgcgcccgggttcctgcctcgggccggaggagggagggcgccgcggcccgtctcgggcctcccgccgcgctggggcctggctc

SEQ ID NO: 27488 - DNA, 120 bp, Homo sapiens
ctgcgctgagcgcctgcggctccgcttggggctgctgtgctctccacaggccgggccgccgggctggagggcgctgcaggcggcctctgttctccaagttctccgcgggagagggagggg

SEQ ID NO: 27489 - DNA, 120 bp, Homo sapiens
gaacgagggcccagccttccgcggggtgggctcggccgggagaagcgcggagcctcctggctgcccccagccggtgcggccgccaccgtggccgtgagggcgcctgggtcccctctggag

SEQ ID NO: 27490 - DNA, 120 bp, Homo sapiens
tgccgcagcgctggccggcgccgagatatgaccagaggcgttgaaagttggcgcgttgaggtacctaggatgggcgaggaaatgaacaagcttcaggggagaagaaatgactgtgggaac

SEQ ID NO: 27491 - DNA, 120 bp, Homo sapiens
ccccgaggtaccgccacactccgcaagttccctggccagcccctgggtgctccctgcacagtgggaggggtctggggccgggtgacccacagtgccccccgccccgctggccaggcttcc

SEQ ID NO: 27492 - DNA, 120 bp, Homo sapiens
tggcgctgggtggagagccgcggccctgaccacgaccacaccacaggccaaggtaggatgggcgctcagaccgggggtggctttcagacgagagtggggcatctctgcagcacagcccca

SEQ ID NO: 27493 - DNA, 120 bp, Homo sapiens
ccacggagtgtctcagcttctggtaccacctccatgggccccagattggtgagtggacctggaaacagggcagagcctgtggggaggcccccgggggttcagagtcccccgctctgacac

SEQ ID NO: 27494 - DNA, 120 bp, Homo sapiens
ctgcgcctagccatgagacgggaaggggaggagacacacctgtggtcgcggtcaggcacccagggcaaccgctggcacgaggcctgggccaccctttcccaccagcctggctcccatgcc

SEQ ID NO: 27495 - DNA, 120 bp, Homo sapiens
acccgggtgggaggacagggcagggcccctggccagctgacaccctccacccccagctgctgttcgagggcctccgggacggataccacggcaccatggcgctggacgatgtggccgtgc

SEQ ID NO: 27496 - DNA, 120 bp, Homo sapiens
gtgcggccgggcccctgctgggcccctaattactgctcctttgaggactcagactgcggcttctcccctggaggccaaggtctctggaggcggcaggccaatgcctcgggccatgctgcc

SEQ ID NO: 27497 - DNA, 120 bp, Homo sapiens
agacgcactaccccggggccagacggcctccctgacctccaaggagcacaggcccctggcccagcctgcttgtctgaccttctggtaccacgggagcctccgcagcccaggtgaggggct

SEQ ID NO: 27498 - DNA, 120 bp, Homo sapiens
ttgcgcccgccaggctgggagcctgggagctcagaccagggcctgcaggtgctctccccacactgctgacctgggccgcccctgctggcaggcaccctgcgggtctacctggaggagcgc

SEQ ID NO: 27499 - DNA, 120 bp, Homo sapiens
gcacggagctgaccgacgggcattgtctgtgttccgtgagtgtgtactgggcctaaagagcaagcattgcagagccctgctgttccctttcccggcctcacctcagctccccaggccacg

SEQ ID NO: 27500 - DNA, 120 bp, Homo sapiens
tggcgggaattgaggcgttccggttctctttgggctttagaattttgcatctgtacgtttctgtattcacaaataagaatattgcattaaaaatgcagaaaccatccactgggtcagctg

SEQ ID NO: 27501 - DNA, 120 bp, Homo sapiens
tgccgtgtgtgagttccctagagagcaccttccagtctcttcccgtgtcttcagggtttggtgactggagatagccagacctgctctcgtgggtctcctgtcaacctggaaggagggttg

SEQ ID NO: 27502 - DNA, 120 bp, Homo sapiens
atccggtccttccaccagcaccagggggagggttcccatcactcccatccctcccatccctgcccgtgcttcgtgttgttggaattgagatgctgcagcgtgctgtgtgtgaagtgaagt

SEQ ID NO: 27503 - DNA, 120 bp, Homo sapiens
catcgctgtcacgtgcgtttctctgatgactcggcggagtcaggcgtctttaccacgcttacctctcccttggattctctcccgtgcgaattgcctgttgatgtctttttctcatttttc

SEQ ID NO: 27504 - DNA, 120 bp, Homo sapiens
ttacggattctcggttgtgtctttgaactgcgtttctgttgctcctgatgtgcagaagcttaagccttacacatgatcagctgatcttatcctttatgaatggtgctatttccgaccgac

SEQ ID NO: 27505 - DNA, 120 bp, Homo sapiens
tttcgtctaatgattgtgaagttttgtctttaacatactgggcttctatatttggggatttgtttgtatgtgacaggttttgctgggtcactgcagtttgttaaaacagattgattgagg

SEQ ID NO: 27506 - DNA, 120 bp, Homo sapiens
aaacgaaatggaactgtgaaatgagaggaatggaccaaaaaaaaatcctcccccagggacaaagatggggaagaagccaacatcccacaaaggatttgaacccattttggaaggtgggaa

SEQ ID NO: 27507 - DNA, 120 bp, Homo sapiens
caccgggaggccctggcatggagcagagtctaaaagtggatcaactgaaagacggggcagagcagctaccttggaggtcctttgccagagcagccggatggtcctcctggccctcacctc

SEQ ID NO: 27508 - DNA, 120 bp, Homo sapiens
gaccgcaccccccacgcagtgagagcagcatcgggctccaggctgcagaaggggcagaggtctgcactcggaacaattccctaggcactggctgccacaccaagaggctcccacgaagca

SEQ ID NO: 27509 - DNA, 120 bp, Homo sapiens
ccccgtgggcaggcctggcccagccgcctcatggccttctggggaagtgacaggctctgtgcaaacccacagaggtaccatcgtcactacctaattttgggacatttcatcaccctgcag

SEQ ID NO: 27510 - DNA, 120 bp, Homo sapiens
tcccgctcagcccctgacagccagccataaacctaccttctgtctctatagatttgcctactcaggacattcatgtgaatgtggcctttgcttttactcagcaagatattttcatggttc

SEQ ID NO: 27511 - DNA, 120 bp, Homo sapiens
taccgaggagtagagctgctgggccgcttgttcagctcttggaggaattgccgaacttttgtgtcaccttacatctccctcaggaagtgttttttttttttttttttttttttgagacgg

SEQ ID NO: 27512 - DNA, 120 bp, Homo sapiens
tctcgatgttaaacctttgctaatgtacttatgggaatcacaaagattctgtttgtaaatacagaagtgaattgtagacataaaatggttgtgccatgtggataatggcaggcactaggt

SEQ ID NO: 27513 - DNA, 120 bp, Homo sapiens
gcacggtggccttgtctgatgaagccgaattgtgctggtctgttccgagctggtttaagtgttctgatgggcagctgtggatgttggggttcagagcttagtcatcgttgcctgaaatgg

SEQ ID NO: 27514 - DNA, 120 bp, Homo sapiens
cagcggcccggtgattgctccctgcagccgtggcctcccagggaactagggtttcaggtgtgagccgcggtgcccagctgcaagttgaaatgttgtggttcttcgtgtgtcaagcaattt

SEQ ID NO: 27515 - DNA, 120 bp, Homo sapiens
gcccgcatgagtatctttggttagcaggcacttggtcctgggatggtcaggcccacactgctcccacctgcgtgggtgtctttggttagcaggcacttggtcctgtgagggttgggccca

SEQ ID NO: 27516 - DNA, 120 bp, Homo sapiens
ctgcgtggactcctgtcttcagagctgctggtctttggtctgggacccaaggctggtctgcagttccccacgtccatggtgtgatcattagacccatgtgtctgcatgtgagctgagccc

SEQ ID NO: 27517 - DNA, 120 bp, Homo sapiens
gcccggcatccacagccaccccatgtgggtgcttcccaagctccccacgctgggtttggttgctgggctcactcactgtcagttcagacagtgacatgcccttgactgggccgcgttgga

SEQ ID NO: 27518 - DNA, 120 bp, Homo sapiens
agccgcactgagctgtgagggactttctggccccaagtttggctctgatgggttcctgtagccaccactcccactgccatcagggtcacaaaagaatggagaagagggtaaacccagggc

SEQ ID NO: 27519 - DNA, 120 bp, Homo sapiens
ctgcgcatcggcgtgggttcctttccctggcccttagggctgctctgggctttctgcctggccccagcactcacgtccggtgttgcggctgcgtggagttcaggtcatggatgttaggtc

SEQ ID NO: 27520 - DNA, 120 bp, Homo sapiens
tctcgcccacgttgggggttttattatgaactgcagtggtccccagggcttcccagctggagaccaggagttggcagggcagaggctccgtccctctgggtggcgcagcctctctcggtg

SEQ ID NO: 27521 - DNA, 120 bp, Homo sapiens
tcccgtcggtgctcgagctcagccccagggtctctacctgcggcccacgtggctcaggggaaccatcacctcgacactcactcgtctcctctgcgtcctttctctgtacggggttgcttg

SEQ ID NO: 27522 - DNA, 120 bp, Homo sapiens
acccgagtgccaggctctactcctgccatcttccttgtcaccaccatcgccccgggcccccgagctcccggtgcagttccaacaaagcctgtggggtccagctggagctccacctctgct

SEQ ID NO: 27523 - DNA, 120 bp, Homo sapiens
cctcgccggcctgaactgactgtggagaccgccctggcactgggagcgacacggcctgccgactctggacccagcagccgagggactccctcaaggacgggactgtggggggccgccctg

SEQ ID NO: 27524 - DNA, 120 bp, Homo sapiens
tgacgcagcctgccaactctggacccagcagccgaggaactcccttaaggatgggactgactgtgggggctgccctggcactgggagcgacgcagcctgccgactctggacccagcagct

SEQ ID NO: 27525 - DNA, 120 bp, Homo sapiens
ggacgggactgactgggggggctgccctggcactgggagtgacgtggcctactgaccctggacccagacggcaggccctgcatgctgccagccccggcacatgtgccaggcatctccctg

SEQ ID NO: 27526 - DNA, 120 bp, Homo sapiens
agacgcacatgtcacctgtcagcagtgactgcaacattcactccagtaggaccactgtgccagcaataacagcgtcacccgtcagcagtgaccatgaggtccactccactgtgccagcag

SEQ ID NO: 27527 - DNA, 120 bp, Homo sapiens
gaacgggtggtgcgtggacatgcaacacactcgggcccacagcagcgtgaccggccgctcccaagccccgggcgcacaaccacagccaggagcagcccctgccaccactgggccaccgtc

SEQ ID NO: 27528 - DNA, 120 bp, Homo sapiens
agccgaaggtgccccgggccgaggccagctgggtcaggtgtacccctagcctggggttgagtgaggagcggcacccccagtatcctgtgtaccccaagttgcccaggaggccgagggggc

SEQ ID NO: 27529 - DNA, 120 bp, Homo sapiens
ctgcgacggtgaccacaggagactgtgacagtgacggtgaccacagacaggccacccagggctcaggctgggtatggtgggctctggtgggaagcagctcccgcacggctcacggtgggg

SEQ ID NO: 27530 - DNA, 120 bp, Homo sapiens
ttccggtcctcaccccgcgataccccttcgcagagctcatgccccctcggggcactctacccaccgggtaccttccctgggctgccccacaggtcaagcgctccacccacgccctctcag

SEQ ID NO: 27531 - DNA, 120 bp, Homo sapiens
aggcgggaatggaattttcgggtctgggccaggctgtccacaggcccaggagggggaccaggcccagctcctcttcacacttctcagacctggggcgaccggaggctcctgggtatccac

SEQ ID NO: 27532 - DNA, 120 bp, Homo sapiens
agccgcccagcacctgggcccacactgctttcccaggatcaggctgcagagcccctgggcggagtgggaagcacagggtccccttagcgttgttctgtctttgtgggtcctgggcctgct

SEQ ID NO: 27533 - DNA, 120 bp, Homo sapiens
ccacgtgcacctcttgccgtgtgtgggtgaaactcctcccgctgagtgctgggctcccgggtctgggtctgggggtgcagcacacgttcatgttcgcattctcagaacacccactgaccc

SEQ ID NO: 27534 - DNA, 120 bp, Homo sapiens
tggcgcggagcacgaggccgctgggcactgactatggagctcagagctgtgttggtggaccaggcatcccgtgaggccacggatggtggccgtggatctaccctgcctggcccacttctc

SEQ ID NO: 27535 - DNA, 120 bp, Homo sapiens
cagcgcatgactaggcagccagggccctgagccctgcaggaggagttgaggggtacacaccaggactggaaagcctggggctgttgcacagagatgagcggggaggccaggctcctcagg

SEQ ID NO: 27536 - DNA, 120 bp, Homo sapiens
actcgagtggaagccccacccaccagggcctgcagggacagggctgcgaggggactgcctgcagggctgctgggaatgggacctggagccttggctgagcagggcgggggctcctgctgg

SEQ ID NO: 27537 - DNA, 120 bp, Homo sapiens
ggccgcccagctcagctgggcccagcactccctgtccctcaggccctgcctgatccggtctctttatcttggccgagagcagcgccctcccggccaccatctgggcctgctgggccagga

SEQ ID NO: 27538 - DNA, 120 bp, Homo sapiens
cagcgctgcctctgcatgttttctgcaggaggaagaaggagggttgggggcagagtcatccagggactgagtgggcggcatggggggccagacctgtggtgcagagctgagctggagacc

SEQ ID NO: 27539 - DNA, 120 bp, Homo sapiens
ccccggtccctgggaagcacgttttcccagtaacctcctggcgtgagaaacttggccccggctcgccgattccccgagactcaccccacgtgccccatacatacaatgcggggactcggg

SEQ ID NO: 27540 - DNA, 120 bp, Homo sapiens
ggacggcccacagagtcaggacagccaccagggcccccacacagggggacaggtgggctgaggggcccctctctaatcctagggtgtggggaggatctggcctcccagtccccagggccc

SEQ ID NO: 27541 - DNA, 120 bp, Homo sapiens
aaacggggtgctatgatatgaacgtgtccctagatttcacatgttgacatttcatccccaaatccacttttttttgtttttaagacaaggtctagctcagtcgcccaggctggagcagag

SEQ ID NO: 27542 - DNA, 120 bp, Homo sapiens
tgacgttggacttctcagcctcctgaactgtaagaaataaatttactttctttgtacatttccaatgtcaggtattcagttatagccacagaaagctgactaagacgaagggggtgaagt

SEQ ID NO: 27543 - DNA, 120 bp, Homo sapiens
caccgcctgcctaggcgtacacatgccagatacatgtgaacacacagaggcacacacgtgtgcacacaggcacacacaggcacacgtgtacacacacaggcactcacaggcacacccatg

SEQ ID NO: 27544 - DNA, 120 bp, Homo sapiens
ggacgtgtgggccccgttggagaggaatgctggtggaaaaagctattttgttttgcaggaaattgtcttatttcttaggtttgtgtggattaactgggatttgggttttttccatccagc

SEQ ID NO: 27545 - DNA, 120 bp, Homo sapiens
gagcgggtccctggctctgtccccacggggactctgccctgggagggggctcagggttgtagggatcctcaggccggaccccgagttggctgggaggatgccgatgagcgtcttgccccg

SEQ ID NO: 27546 - DNA, 120 bp, Homo sapiens
actcgggacacagagcccagggcctgggagtgctcagggcaggagacgcggcagatgccagcatgaggacggcccagcctggcagacagatgtcagacagaggaagaggaggcagtccac

SEQ ID NO: 27547 - DNA, 120 bp, Homo sapiens
agccggcgggtccttccgcattcaaggcaggcgtcctctttctgtcgatggggccccaggcctgccctggagccatcgctgacctcccaaaccaggaaaggccacgagcccaggagatgg

SEQ ID NO: 27548 - DNA, 120 bp, Homo sapiens
tttcgcagagaaggacgcagaagccaatggaaaagctgccagtagctgcagctggcctgatgtgagccacaaaaccggatgtgacagtagggtgtgagccaaagtgtaaaacacctgagg

SEQ ID NO: 27549 - DNA, 120 bp, Homo sapiens
acacggatgtcagtgaagggctgtgcccacccatgggagagcagagacaaatgatctcggtgcagcaaagttgcaaatgtgtgtggattccccttccgggggaggtgagggccacacaca

SEQ ID NO: 27550 - DNA, 120 bp, Homo sapiens
agacggagaggtgcagggttagggtgggggaacctcagccaggtgaccaaggtcaacatgggcagtgaaggtcgcgctgatggtgtcccccatgtgatgtggtgggaggaagccccgccc

SEQ ID NO: 27551 - DNA, 120 bp, Homo sapiens
tcccgaccatcaccggattcagcgtgagaaactcagcagacggagcccaactgagggacgccccacaaacacccgagcagcgcccctcaaggctgctgaggtcatcaaggaccgggaaaa

SEQ ID NO: 27552 - DNA, 120 bp, Homo sapiens
aaacgtcactcaggaggagcccgtggaagagagacagaatgtcacgtggtgtcctggagagaaagggaccttcagtaactaagggaatctggagaaagcctggatgtcagctgactcgac

SEQ ID NO: 27553 - DNA, 120 bp, Homo sapiens
cgacgtcccaacactggctcactgattgtgacaaagggaccatgagaattaggacgccagcgagagggaaactgggggaggggcacgcaggaactccctgatctgtcttcacattttttt

SEQ ID NO: 27554 - DNA, 120 bp, Homo sapiens
cgctgaggccagctccgtctccaccctgtcccaggccgaacccagacccccagggctgagttaaaggagaaattcaccgccttctgcaaggcccagggcttcacagaggataccattgtc

SEQ ID NO: 27555 - DNA, 120 bp, Homo sapiens
aaccggtgaggggtcctaatctgatggggagaggatcaaggtcagattagaggcaggcaggcagtctcctgactgggggaggcagaggggaggaggtggccccgccctgctcgaggcctg

SEQ ID NO: 27556 - DNA, 120 bp, Homo sapiens
tcccgcagccccttcatgaggagccccctccatgggggacatggagaccaggcgcccactctgtgccaggccccagcagctcccaggatgtggggcttcagcctggtggggggcataggg

SEQ ID NO: 27557 - DNA, 120 bp, Homo sapiens
agacgagctctgcgttacgggaggaacaggaagcccagtgggaaaattggcctaagtctggggttctgacgacagcccctggcttctttcttggcagataagtgcatgacggaacaatag

SEQ ID NO: 27558 - DNA, 120 bp, Homo sapiens
ctgcgatgggatggatcagggccccaggacagcctggtgctgcagacccatccttcccgatggctgcagtccagggccgggcgggagacactggggctgcccacattgatgggtgcacag

SEQ ID NO: 27559 - DNA, 120 bp, Homo sapiens
gtgcgaggccccaggcagacaaggccaaggggctataccacagggaccacctggcagcaagggtgtctggctcctgggctaggaggaaaccagggtgggggagacaggatgggagggaac

SEQ ID NO: 27560 - DNA, 120 bp, Homo sapiens
ggacgctacatggatgccgtgggacagctcggagagcaggctcagggcggattcacccaccacccccaggagggaggcctaggctggagctggagtctgtggaccctggggctgggaagg

SEQ ID NO: 27561 - DNA, 120 bp, Homo sapiens
cagcggggatccaagccccagggatggatcttgctctctcagcggggctcagtggggctgggggcagagaaaagtccccgtagcccgcacctgctccatcgactggagtggaggtgggct

SEQ ID NO: 27562 - DNA, 120 bp, Homo sapiens
tttcggtcacacccctcaggactccccagggctgaagctgggatcccggccagccaggtgacccccacgctctggatgtctctgctctgttccttccccgagcccctgccccggctcccc

SEQ ID NO: 27563 - DNA, 120 bp, Homo sapiens
ccccgccaaagcaaccctgcccactcaggcttcatcctgcacaataaactccggaagcaagtcagtagagctggctcctggctgtctgcgctgtcatcacccgtcctgggcctggccctg

SEQ ID NO: 27564 - DNA, 120 bp, Homo sapiens
acccggacctccccctctaaaatctcagcctgacgtcaacaaaggaacaggccctctagtgtttgctcccagtggggtcttgagtcaggacagctaggagggggtgtccctcactgtctc

SEQ ID NO: 27565 - DNA, 120 bp, Homo sapiens
agtcgtgtgcccctgccccacagccccacacgtcgagccataccccctcagctgccactgccaccaggccggtgctgagctgggggtcagtgactcagctaatcccttaggcaggtgccc

SEQ ID NO: 27566 - DNA, 120 bp, Homo sapiens
caacgccaccctgtcaccccctcagcagtaaaggcctgaggctcgaggccccagaggagctttggacctgttgggtatcttgaggtgtgggattaacgcactgagattgggcagagataa

SEQ ID NO: 27567 - DNA, 120 bp, Homo sapiens
ccccgcatcaggacagactgacagagtgggctggggacaggctaccccatatcccttctggctccctgtgcgccccctgccctctgacctgggcctccagatcacagccttgtccactca

SEQ ID NO: 27568 - DNA, 120 bp, Homo sapiens
ccacggccacaccatgcccggccagtgccctgcccaaccctgctcccttccagattcccacccaggcagccattctcaggtacacaatgtgcaggactcactgtgacctgcccaccaggc

SEQ ID NO: 27569 - DNA, 120 bp, Homo sapiens
ccccgaggcagaccctgcagaggcaccaagcattttgaggctcggaggtgagggtgagcttctgggtggccttcccggagaagggggcttagggctgtgcctgagctcaaggtagggggg

SEQ ID NO: 27570 - DNA, 120 bp, Homo sapiens
ggccgaagaggcaggatgggtgagctgcaggccccctagcccagaggcccgtcagaactaccctcagctgccaggcatccggccccaccccggaggaaaggcaacggatggctggggttg

SEQ ID NO: 27571 - DNA, 120 bp, Homo sapiens
gagcgctgcagggtgcaacttgatcagaagcctgtcacagtgggtgcagtcccaggccagccgccccagggcacctcaggggcgtaaagcctacagaggagccacctcagctctgccctg

SEQ ID NO: 27572 - DNA, 120 bp, Homo sapiens
tcccgtgtccggaggagatgccatcttgctgcatgatgcttcgggctctgctgatcagttccctccttgccctgctctgggcatccccaggccaggcccaggtccccatccaggccaact

SEQ ID NO: 27573 - DNA, 120 bp, Homo sapiens
tcccggctttggtgctgcaccccgggtccctgtccacaccctctttgatccaggctcagcagggctaggggcaggggaaacccccacctcacccgctccgtctgactggagtaggggttg

SEQ ID NO: 27574 - DNA, 120 bp, Homo sapiens
agccgtaccccctgggtgccagctgcagacaggccggtgctgggctggtgggggccagttgctcatgtactgaggcccccctccctcagttctgcatcggggtcgagatgtgtacagcag

SEQ ID NO: 27575 - DNA, 120 bp, Homo sapiens
tgccgtggccaggaagcagctgtgtcggggcagaatgtggtgggctcaggcccagggcacaggggcggcctcccagccttccctgcacttgccctgcagttccagggcacctggtacatg

SEQ ID NO: 27576 - DNA, 120 bp, Homo sapiens
ggtcggggtggtgtcagatgaccaggacttcctggactccaaggacaccatgaagatggctgtggtcttagtgacccccttggggaatggtgacctggccctcaagtttggataccccac

SEQ ID NO: 27577 - DNA, 120 bp, Homo sapiens
ccacgtaagtgaccacacgagcccatcagactcagcctcagaggatggccagcatgaggccacatgaaggtccagagggaccatggtgtccccagcacattgaggtcagaccacgggtcc

SEQ ID NO: 27578 - DNA, 120 bp, Homo sapiens
cctcgacggctctgtgcggcagagccccagatggcagccacacggagtccagagggacccaggccctggaggaagcactgcctgaggcctggtgttgagaaaagtgtctgcatgtctgtg

SEQ ID NO: 27579 - DNA, 120 bp, Homo sapiens
aggcggtgtggtgcctcaccagcctggacagggcagctgaggtggcactgctctcctgctcaccttctccccagggccttggtacgggcccctcatccgtccccggtggaacacactcca

SEQ ID NO: 27580 - DNA, 120 bp, Homo sapiens
tgacgcggtcgacctcagagcccgcaggcgcgtacaggattttggggttgctggtcatgaggtgcacgaggaggcccaggttccgctgctccttgctcgtgaagcccagggagctcatgt

SEQ ID NO: 27581 - DNA, 120 bp, Homo sapiens
ccccgccgcagcgcctcgggttcaatggtgctggggtaggggacagggggccgggccaggccgttagggggcagggccgcgagagtgggaggggcatcgggatggggcaggacttcgggg

SEQ ID NO: 27582 - DNA, 120 bp, Homo sapiens
gggcgccaaatgagacctccagagccagagcctagattcagggctcacgccctgcccctggctgtcctcctcacccccattcccctgccgcccacctaccggttgttgccacacaagatg

SEQ ID NO: 27583 - DNA, 120 bp, Homo sapiens
ggccggcccagagctgtacgaaggctgagcactggccctgcagcgtgtccggggtggccagtgctgcagcagagggtgcgccctcctcagcggtggcgttggggcccatgactgcccctg

SEQ ID NO: 27584 - DNA, 120 bp, Homo sapiens
ggccgccccacccgcaccactggctgggggtccgggggtccggccagtgcaggcaccctggggcagtagcagggccagggccgacaggacatccacatcctgcagaaccttctgggcatc

SEQ ID NO: 27585 - DNA, 120 bp, Homo sapiens
aagcgcctgcagcctccgtgggggtggcgcctgtggcgaggagtccgagccgttgggggcatccaggcccagctgaggggaaacaggcacgtgggcagtgcggggtgagatggactgcag

SEQ ID NO: 27586 - DNA, 120 bp, Homo sapiens
taacgggagcccaggacaggagctgggatggtgagcaggagtggggcaccagccatggtgccattggatacccacccacaggcagcatcccacgcacagcctgggcccaggagccctgag

SEQ ID NO: 27587 - DNA, 120 bp, Homo sapiens
aagcggtcccagcccctccttcaactcaggcagcaagcagcgcagcgggcagtgggcaggcagggcctcacctgctgggagaccttggccacgtccagctggttccggagctcagcagac

SEQ ID NO: 27588 - DNA, 120 bp, Homo sapiens
aagcgcctggcacgcgcagcagcctgcccactgcagacagcatcccggtagccctgcagggctcccttctgactctcaggcacagtgaggatccggcccagctcccccgagcccggcgtg

SEQ ID NO: 27589 - DNA, 120 bp, Homo sapiens
gtccgtggagccacggcaaggactttgtccccaaccactagggcctcaggcctcaccctgccccacccactggctggctctggggctgcctgggtcccacgacatgcctctacccctcat

SEQ ID NO: 27590 - DNA, 120 bp, Homo sapiens
ccacggagcagaagcacccccagaggcaggcagcactccaggcccatcccacacatggatgccctcacctccatccggaacaggggattgccccctaggcggctccagggctcctgaccc

SEQ ID NO: 27591 - DNA, 120 bp, Homo sapiens
gggcgtggctcagatggtgggggcgtggctccgatggacgtgtgggggcgtggcttagatggtgggggcgtggctcagagagtgggggcgtggctcagatggtgggggcgtggctccgat

SEQ ID NO: 27592 - DNA, 120 bp, Homo sapiens
gggcgtggctcagatggtgggggcatggctcagagagtgggggcgtggctcagatggtgggggcaaggttcagacggtctgggcgtgactcaggctgagcatcctgaggatggctcagca

SEQ ID NO: 27593 - DNA, 120 bp, Homo sapiens
gggcgtggctggggcagaagggagtggccagggctgggagctgtccctgccttacctcgggcgggtccacacgggcggccaagagtgcttgggccgtgctattgggcagcgacaagtttt

SEQ ID NO: 27594 - DNA, 120 bp, Homo sapiens
tcgcagtggcgtagtcggccttctgagtcaggcggatctcacgctgcagcctgtggggagtggggcctgagacctctgagcgtgtggcaccctccctgccctgcccgcggccactggctc

SEQ ID NO: 27595 - DNA, 120 bp, Homo sapiens
ctacggagagggcggctgcaccggccacacagaacgccaggatcagcactgcaggagggggcgtgtgagggcggccttctgcagggcgccctgctgcccctgcccacccccgaccaagac

SEQ ID NO: 27596 - DNA, 120 bp, Homo sapiens
gggcgaggccgtcgccttgccctccccggggctccaggggcgacatgtgcaccgggtcggatgacacaggggagcccagggaggtgtggggcgtgggcgtgggggttcctggagtggagg

SEQ ID NO: 27597 - DNA, 120 bp, Homo sapiens
ccccgtgccgagaagcccagggtggctgcgagagaggacaggttagaatgagagcactgggctagggacagggccgtggggcaggggaagcgggggtctcaccaggctccgggagccgct

SEQ ID NO: 27598 - DNA, 120 bp, Homo sapiens
tgtcggtccttgggtaggggcggagttgagtgtccagactccttccgggcaagctcctgggccaggaagtcaatctcatcttccagtctgggctggggccggcccccgcctggggagggt

SEQ ID NO: 27599 - DNA, 120 bp, Homo sapiens
gtccgtccaggaggtagccccaggcccggcctccccgcttctggcaggttcctcccaggagcctgaggactgggtacacgcctggaggccctctccctcccagattgccatggtgacagc

SEQ ID NO: 27600 - DNA, 120 bp, Homo sapiens
cagcgcgggcgcttcctgtgaggggcagtgcttcccggaaagtggaggcagggcaagggaggaggcgctagggaaacgtccaaagaccgggcacggggaggaaggagtggggtctctcgc

SEQ ID NO: 27601 - DNA, 120 bp, Homo sapiens
tctcgggtagaggggcagggactccccaaggagtggggggaagccgaaggaagccaagcacccgggacccctccccaggtcattgggagaacgggggcagctgtcaggggtggggctggt

SEQ ID NO: 27602 - DNA, 120 bp, Homo sapiens
caccggtacccactgtgggctgcacagtctgggtggacgctcccaggttggcaggaggtgcatccacacagacccttacagccacttctcggtgctcctctcaacacctcctccaggaag

SEQ ID NO: 27603 - DNA, 120 bp, Homo sapiens
agccgctgctgctcccacccccagcacctctgagcaaagccctcaccacacctgaagtcactcagtgactggccatcccgacagatgcggctcaggctggcgagcggggcatccccagca

SEQ ID NO: 27604 - DNA, 120 bp, Homo sapiens
aggcggacaggacagtgagtggtggaaaagagcaagctgcctggggacggggaagtgggggcctggagggcttctgggcagaccctgcagagcccaggcccggggagaatgggcccttcc

SEQ ID NO: 27605 - DNA, 120 bp, Homo sapiens
tcccgtggccatcccagcatttcacatcgtgcagcccttctcctgggagggcctgactgccccaggcctgggcccacctccatttggaaaggatgggaggcttcgtggagagtgaatgag

SEQ ID NO: 27606 - DNA, 120 bp, Homo sapiens
caccgcgcccagccggccgcttcttacagggagaggttcatgcagggacatccccccatcgacttccccctttgctctcgtacctggaggccggcgcatcctgggcacacagagcccttg

SEQ ID NO: 27607 - DNA, 120 bp, Homo sapiens
gcccgcctcttcagggcacagtccaggctcccgggacaggcggctacatctgggaaggaagcagaaggcagggccggctcacggccccgcagggctcggcccctgcacacggcagcgctg

SEQ ID NO: 27608 - DNA, 120 bp, Homo sapiens
acccgcccccgtcaccccccgagctggccgggcctggttctggccattgttctggacatgcccttcctccctgacgccagggctcagaacccggaagcgaacagtcctaggacttatcag

SEQ ID NO: 27609 - DNA, 120 bp, Homo sapiens
ccgggacattgcccagaaccggcccaaaatggggcctggccccagccccaactggacactggaccccgaaccccgatgccggctctggtccgagccccgtctgcctgcagggccaggcgt

SEQ ID NO: 27610 - DNA, 120 bp, Homo sapiens
actcgcggccggctcaccgcgcctcccttgcaggtacgtcatgaccagcgagttcactctggggcccacggccgagttcttcagggagcacaacttcttccacctggaccccgccaacgt

SEQ ID NO: 27611 - DNA, 120 bp, Homo sapiens
cagcgcctgctgcctgctgtgacctttgatggcaaggttatcctggagcggaaagacaaagttgccatggccccaggtgtggcccgttcctgagacggggagggaccgcccagactagaa

SEQ ID NO: 27612 - DNA, 120 bp, Homo sapiens
gagcgtagttgggggtccacgcgcccgggttcgcggctgccccgaggctgtgtggtcctgggttaggcgcctctttttctgggccttgatcgtcatttgtcacatggtacaccaactggg

SEQ ID NO: 27613 - DNA, 120 bp, Homo sapiens
ctgcgtgggaggcctgtgggggtgctttctaccccaaatcaggtcctgtcacttggcagtgggatgtgtgctcagggtttggggtgtccagaggaagatgagcttgctgagacaggagct

SEQ ID NO: 27614 - DNA, 120 bp, Homo sapiens
tatcgggactgggggtgctgggggagggctctgggcaggtgctgcaaggagatattgacaagtggactttccctagcttgcccccaaatggagaccctccggccatctgtgagatatcgc

SEQ ID NO: 27615 - DNA, 120 bp, Homo sapiens
gctcgggtggagacggcacagctctacctcggttaaccaatggggtcggtggtttaaatttgcagaagactttccaagatatgggttggggtggggtgaggcatccagaggcctttgcag

SEQ ID NO: 27616 - DNA, 120 bp, Homo sapiens
ttgcggagggaggacaccggcctctgctacctccctgacctcggctgcccttgcccctttctctggtcaggtcagacctgtgcgtgacaggagggtcccctgctggcctagggtcttgag

SEQ ID NO: 27617 - DNA, 120 bp, Homo sapiens
gcacgggtgttgggaacaaggatcaggtgttcacagctgtgtcccagggctggagctcactgggggcccccttagggacaggagttcacacatgaaggccaagactacttggggtgccaa

SEQ ID NO: 27618 - DNA, 120 bp, Homo sapiens
ccccgcggtcccatcccactcttcaccagggtctcaggagggcctgagacaacctgcggtcaggaacctcggggcgctctccagggcaggcttctgcatgctcagctctgacagcctgga

SEQ ID NO: 27619 - DNA, 120 bp, Homo sapiens
gctcgcagccccgtgatcctctgggcctcactcagcagccgatcacagcccacctggagtgcaggggcagcggcgactcagcggggtcccctccaccagctccgcctccctggctcccag

SEQ ID NO: 27620 - DNA, 120 bp, Homo sapiens
ggccgctgaccaccagcctcgggacactccagccggcctctccctgcgccctgggaggcggcgcctcaccttgacggggttggcagggaggggacccaggaagtcagtggggtaggggta

SEQ ID NO: 27621 - DNA, 120 bp, Homo sapiens
gcacggtgaaggcattccgggcgaacatgaagagctgggtcaggtccttctcgtctgacagcggctggcaggtgccgaactcccagcggaccgtgtcgtaggctgcgtggaaggggcaga

SEQ ID NO: 27622 - DNA, 120 bp, Homo sapiens
tggcgctggggcgggtcaggcagtgggaggcggtgggaggacctcacctccctgtaggaacaagtccttgatctgtcggaacgcttcccgcacaccctgggtgcatttgggactctggcc

SEQ ID NO: 27623 - DNA, 120 bp, Homo sapiens
gaccgtgctgactgcagctgctgtcccttagggggcctggaggaccccaagcctcactcaccgccgtgacgtcccggaagaactggttggagtcgccgaggcctgccacagctagaacgg

SEQ ID NO: 27624 - DNA, 120 bp, Homo sapiens
gggcgcgctggccgccagcgcccccgccaccaggtggggatacttcatcctcaggtaggcactgagcatccccccataactgggtgagggacacagggttagggctgctgcccccaacac

SEQ ID NO: 27625 - DNA, 120 bp, Homo sapiens
ggacgacacttctgagacccacaaattccaaccctgggccaggtgcgggtgcagctctcactgggaaaggccgctagtgtggccgcacatccaagctgagcaggtggctgggaggacagg

SEQ ID NO: 27626 - DNA, 120 bp, Homo sapiens
ttacgaaaaggcagcggtgggagtcagaggggagtggggagaagggctgggggcgctgggtcggggcaggggagggagggggtgcggaggccgggggaggcgcccaccttccaccgaagg

SEQ ID NO: 27627 - DNA, 120 bp, Homo sapiens
aggcgatggcgggggcatcctgggccccgaggtcgcgtcgtagcgcgcggagcagctctgcgaagtcggccagggcctgctccaccgtcagcagctccgtgtgcccgcgctgcgtggact

SEQ ID NO: 27628 - DNA, 120 bp, Homo sapiens
tgccgaggtggaagtttggagatgggccacaaactcctggagatagggccagctcagtccccctgagcacccacacacaccctcctgagagccaacagaaggagtgagggccccgaggcg

SEQ ID NO: 27629 - DNA, 120 bp, Homo sapiens
acccgtgtgcctcaacccgaacggggagaggcggggtctgcagcagggtacgggcaggtgatcccccaaggaaagattttcctgtattgagagagaaggggccaagaggaggagcttgtc

SEQ ID NO: 27630 - DNA, 120 bp, Homo sapiens
gttcggctgatggagagaacggcaagcgggagagagagtgtgacccctgtgggcacatgacttcccttgctgcactgctgcacatagcagaggtgtggtgacgaccctgttttgtcccat

SEQ ID NO: 27631 - DNA, 120 bp, Homo sapiens
gggcgtttgctgttaggtctgcagaatcctcagttgctattggaaatggtgacatcactggcaggggcggagcttcagccatccttcaagttagggaggggcacgcacactccaggggtg

SEQ ID NO: 27632 - DNA, 120 bp, Homo sapiens
gggcgctgggagcgcattgcgagggggctggagagggagagaggagcggaagctgagggtgtgaaacggctggccccgaacacacctcgcggcgctccagtgattcctggtgtccgacct

SEQ ID NO: 27633 - DNA, 120 bp, Homo sapiens
gtgcgggtccagtttccaggctctcgcggaaggcctggctgagcacatgcggcagccacggtcaccctccctattcctcttagcccgaggaggggggtcccaagttacatggccacgcag

SEQ ID NO: 27634 - DNA, 120 bp, Homo sapiens
gagcgccccccagagccatggcttagggcctcccccacccctctggagctccagtctgcaagagtcaggagccgaaatatcgctgactgtgggtgacgactcttgcgcgcacacacacat

SEQ ID NO: 27635 - DNA, 120 bp, Homo sapiens
aagcgggcacgacgcgttcggtcctattaaaaggcacgcaagggtgcgggctgcacgcggtgacacggacccctctaacgtttccaaactgagctccctgcaggtccccgacagcacagg

SEQ ID NO: 27636 - DNA, 120 bp, Homo sapiens
gcacgcgctcacacgcacacgcgcgctccccggctcacgcgcgctccgacacacacgctcacgcgaacgcaggcgcacgctctggcgcgggaggcgcccccttcgcctccgtgttgggaa

SEQ ID NO: 27637 - DNA, 120 bp, Homo sapiens
aagcgggggcggcgggaggggcaggagacgttggccccgctcgcgtttctgcagctgctgcagtcgccgcagcgtccggaccggaaccagcgccgtccgcggagccgccgccgccgccgc

SEQ ID NO: 27638 - DNA, 120 bp, Homo sapiens
cccgtgccgcgtgcgaccccaagatcgtcaacattggcgcggtgctgagcacgcggaagcacgagcagatgttccgcgaggccgtgaaccaggccaacaagcggcacggctcctggaaga

SEQ ID NO: 27639 - DNA, 120 bp, Homo sapiens
ctccgtcacgcacaagcccaacgccatccagatggctctgtcggtgtgcgaggacctcatctccagccaggtgccctcccccacctccgccacccacctcccctctcctccatcctgcaa

SEQ ID NO: 27640 - DNA, 120 bp, Homo sapiens
ttccgtgcccccttcctccctgtaagacaccaccccagagtcagctggctgcttccgggaggcctcgtctcactaggaaccaaacaccagggtctgctggctcccctatcttggcctgag

SEQ ID NO: 27641 - DNA, 120 bp, Homo sapiens
agacgtggggctggagtgtgtcagtgtgggggtgggcattccgggtaagagagtagaagcgcctgtccagctacatgcccgccctgcagagctttaaacaggacggggcctggggccatc

SEQ ID NO: 27642 - DNA, 120 bp, Homo sapiens
tttcgtcccttccccctaccgatgggtccgcctgggaagagaaatggctcaggtgccacggcaggacgctttgtgggggtgggagtgggggtgcacacgcgagaggcatcagggcatggg

SEQ ID NO: 27643 - DNA, 120 bp, Homo sapiens
tgtcggcagccagcgctgcgggggaggacgtggctcctgggattttgcctgtcggagctgtccgcccctgggccgagcgcctgctgaattccaatgaggctgcaaggatctgcaatgcag

SEQ ID NO: 27644 - DNA, 120 bp, Homo sapiens
caccgctcacacgtgcctacctgatggacacaccacatctgtggacacacatgctcacactcacaccaaatgttacattagcacacactcatgcacctcagcatcacacaatcaatttca

SEQ ID NO: 27645 - DNA, 120 bp, Homo sapiens
acacggcttggcatgcattcccagaggcacgtgcaaacatgcacatttacacacatggttccagtcattcacacgcatgtacacgaacagacatgccagggcatgtgatgcacataacca

SEQ ID NO: 27646 - DNA, 120 bp, Homo sapiens
acacgcgtgaacacctgcatggtcacacacggacctacgggtctttgccaagcacctctgggtgcaggctggaagcaagagctgggggagggagaaccacttcaaacagctgcagctgca

SEQ ID NO: 27647 - DNA, 120 bp, Homo sapiens
tcccgagatgaagccaccagggtgccccaagagggacccatgaggcctggctgctcagcttcctggggaagggacttggcatgcaggatgggtggacagtgagagcctgtaggcctgggg

SEQ ID NO: 27648 - DNA, 120 bp, Homo sapiens
ctgcggaaagcgggcagagctgatgctgcaaagtctgagccaggagtcccgcagggaacagggagggggaatagcgcagggatcgtgggctgggcaggctggggaagagggggtgtccag

SEQ ID NO: 27649 - DNA, 120 bp, Homo sapiens
cagcgatttggggcaggcagccacggggggcaagcacaaatgtcgtgcaggtgatgggccactttcagagggtgacactgggtcccagggccctgcctggagcgaggccaggtgcagctc

SEQ ID NO: 27650 - DNA, 120 bp, Homo sapiens
cagcggaaccctcacccgagcctctctgggcaccagggaccgtcctctggggccagttctggcatcacgtggcatctggggctggccccgccctgcaaggctgaactgtggggggcactg

SEQ ID NO: 27651 - DNA, 120 bp, Homo sapiens
ctgcgagcttattcagagggaggcgtgggtggggggctcctttgggtagggtggggtcagtccggctgcggagatcccctgcccctgtcctgtggccggtccgggccagggcggcactgg

SEQ ID NO: 27652 - DNA, 120 bp, Homo sapiens
gggcgctgagggctggggtccctggcggccggcggggccagcgggtattgattgttggttcttatttatagagcaccgggggtggacgcggcgctttgcaaaaccaaaaagacacagtgc

SEQ ID NO: 27653 - DNA, 120 bp, Homo sapiens
tgccgcgacgcgctattgagagggaggagggccagctgcagctgtgttcccgtcatagggagagctgagactccccgcccgccctcctctgccccctcccccgcagacagacagacagac

SEQ ID NO: 27654 - DNA, 120 bp, Homo sapiens
agacggacgggacagcggcccggcccacgcagagccccggagcaccacggggtcgggggaggagcacccccagcctcccccaggctgcgcctgcccgcccgccggttggccggctggccg

SEQ ID NO: 27655 - DNA, 120 bp, Homo sapiens
ccccgtcccggccccgcgcgtgcccccagcgtggggctaacgggcgccttgtctgtgtatttctattttgcagcagtaccatcccactgatatcacgggcccgctcaacctctcagatcc

SEQ ID NO: 27656 - DNA, 120 bp, Homo sapiens
cctcggtcagcaccgtggtgtgaggcccccggaggcgcccacctgcccagttagcccggccaaggacactgatgggtcctgctgctcgggaaggcctgagggaagcccacccgccccaga

SEQ ID NO: 27657 - DNA, 120 bp, Homo sapiens
tcccgtccgtccgcccgcccaccccgctgcctggcgggcagcccctgctggaccaaggtgcggaccggagcggctgaggacggggcagagctgagtcggctgggcagggccgcagggcgc

SEQ ID NO: 27658 - DNA, 120 bp, Homo sapiens
ctccggcagaggcagggccctggggtctctgagcagtggggagcgggggctaactggccccaggcggaggggcttggagcagagacggcagccccatccttcccgcagcaccagcctgag

SEQ ID NO: 27659 - DNA, 120 bp, Homo sapiens
ggtcgcccctcctcgggcgcctgcgctcctctgcagcctgagctccaccctcccctcttcttgcggcaccgcccacccacaccccgtctgccccttgaccccacacgccggggctggccc

SEQ ID NO: 27660 - DNA, 120 bp, Homo sapiens
ccacggccgtccctgacttcccagctggcagcgcctcccgccgcctcgggccgcctcctccagactcgagagggctgagcccctcctctcctcgtccggcctgcagcccagaacgggcct

SEQ ID NO: 27661 - DNA, 120 bp, Homo sapiens
ccccgggggtccccggacgctggctcgggactgtcttcaaccctgccctgcaccttgggcacgggagagcgccacccgcccgcccccgccctcgctccgggtgcgtgaccggcccgccac

SEQ ID NO: 27662 - DNA, 120 bp, Homo sapiens
gcccgagcgcgtgccttccccgtgcggcccgtgcgcagccgcgctctgcccctccgtccccagggtgcaggcgcgcaccgcccaacccccacctcccggtgtatgcagtggtgatgccta

SEQ ID NO: 27663 - DNA, 120 bp, Homo sapiens
tcacgcagttttcggtctgtgtcgcttgttgacgccggcagacagtgtaaagggagggcaaaggcatgggggaagcttcgagcgctccaggcggccgcggccgctcaggcttgggcggca

SEQ ID NO: 27664 - DNA, 120 bp, Homo sapiens
cagcggcggggctccccgggtccgcgggcgaggcacagccgtgggggtcgggatcggggttcgggtctggcggtctcggcgggcggagggcggcggtgcggaggcggcggcggcgcgcac

SEQ ID NO: 27665 - DNA, 120 bp, Homo sapiens
gcacggcaggcggtgagcccagagcccagcgccaggcaggaagccaggctgacgaggaaggaggccggcccgagcgtgtaaaccacggccaggtcccgcagggcgagcggctgcgcgcaa

SEQ ID NO: 27666 - DNA, 120 bp, Homo sapiens
aggcggcgtcggaaaaggcagtcagggggctgagcgtcaggcgtcccggccacacgcagagcaccgtctcggcctctgtgggacacagacaaaggcgcggcgtcaggtggcggctgccgc

SEQ ID NO: 27667 - DNA, 120 bp, Homo sapiens
caccgccctgcagaccccgacccgcgtccccagcagctcacctgacgcgggcagcgggtgccggcgcagccaggcgcagagcgggcgcagcgcgcacccgcagccccaagggttgccgcg

SEQ ID NO: 27668 - DNA, 120 bp, Homo sapiens
cagcgcgtctagagcgggcaggcggcccagcagccccggcgcgagtgccgccagctcgttgtcctgcaggctgagtgagcgcagcagcgggagcgcgcctagcgccgcgggctccaggcg

SEQ ID NO: 27669 - DNA, 120 bp, Homo sapiens
gcgcgccagccggttgccggccaatgagaggttgcgcagcgcgcgcagcggcgcgaaagtccctggtgccagtgcttccagctggttggcgctcaggtccagcagctgcagcgcgcccag

SEQ ID NO: 27670 - DNA, 120 bp, Homo sapiens
gctcgcacatgcaccgagtgcagcccgttctcgcgcaggtccaggcgctgtagcgcgcccgctcccgcgaaggcacctggcggcagcgcacggacgcggttgtggtccagcagcagcgcg

SEQ ID NO: 27671 - DNA, 120 bp, Homo sapiens
gcgcgcaggcgcaggctcaggcccgggggcacggcgggcagcgagagtgccgagcagctggccaggcctcccggcacgcacgtgcacacctcggggcagtccggggcgcccagggacccc

SEQ ID NO: 27672 - DNA, 120 bp, Homo sapiens
ccccgagggcgaggccgtggccgacacctgggcccagacaggccaaggcgacagcagcagcaacagcagcagcagcggccgaggccgcgaccaggaagggccccgcatgggggcagcccc

SEQ ID NO: 27673 - DNA, 120 bp, Homo sapiens
ccccgcccccggcacccgcggtgggaggcccgctgcctgtgcgtccctggagcccgtcgtccgcggagcccgttcctgcggcgcctgcacaaatattaactctctggcccgagctcaggc

SEQ ID NO: 27674 - DNA, 120 bp, Homo sapiens
ccacggctggatccacgcttggggcgggggcagggcaaacagccaacgcccggcaccgccagccacctgtccgggagctccaaactactcttggctcagcgccggccacagcgctatcaa

SEQ ID NO: 27675 - DNA, 120 bp, Homo sapiens
ccccgccttgtccaccaccgggcgcccgccgagccctgacctgagcagcaggacaccgcccacctgcacccgcccagctcacggctgcaacaggcgcccacacgcaatgcaacccagagg

SEQ ID NO: 27676 - DNA, 120 bp, Homo sapiens
gaccgagcacggagccgggccacacggatgatttgtaccagaacacagcggggcacggtgcccgcaggctccagagacaccaggctgtatcacaggccagagctcgaggtgtggggatgg

SEQ ID NO: 27677 - DNA, 120 bp, Homo sapiens
caccgagagcaggtgcaagccacacagaccctccacaagctgcaagggacacctggactcttccagagccaagctgaggcctggagggaggcagcaggcattcgccaccatggtcagcag

SEQ ID NO: 27678 - DNA, 120 bp, Homo sapiens
gcccggccctaccacagccccttggcctcctgccctgggggcctccgcctggccctccccttgtctgtctccggaaggaagcttcccccttggtttctaaagtggacacatcgccctgcc

SEQ ID NO: 27679 - DNA, 120 bp, Homo sapiens
ccccgcccgcccgccggcctcctggcggctctgtcctgaggctgctcctcctgcctgggccgaggctggaccatccccttcctggggtacctggggttggggtctgcagactggatgctg

SEQ ID NO: 27680 - DNA, 120 bp, Homo sapiens
ccccgctggggtgcccgcctccccccagtcctgagcactcgctgggcacactggaggcctcacaggccccacacatcagacagaaagccctggaacccgcctgtgacgaccatcccgacc

SEQ ID NO: 27681 - DNA, 120 bp, Homo sapiens
acccgcaggggcacctcgcacccccaccagtgagtgctcctggcccaggggccacagagtacatgggacagccctgccccacagcccaccgtgccgaggccagcaagccattctgaaagg

SEQ ID NO: 27682 - DNA, 120 bp, Homo sapiens
ccgactccacctttggcttccactgtcccgacccaggcggggagcccgcgaggcggttggcagggccggcccggggctcaggggccgagtgcccgttggagagcaggcgggcgcccgcgc

SEQ ID NO: 27683 - DNA, 120 bp, Homo sapiens
cgccgcggtgcagaccccgggggtggacggtgaaggagttgctgccggtcttctggaggaagtcgctgcgccgggccccggggctcgccccgccaccgcggggcccgggcgcggcgggcg

SEQ ID NO: 27684 - DNA, 120 bp, Homo sapiens
agccgaggtcagcaggccgcgggccgggacatcggggcaggcaggggctgggtgggccccatggctccaggacagggcgcccagggaaggcagctagccgaagcgctggctgcaggagga

SEQ ID NO: 27685 - DNA, 120 bp, Homo sapiens
gaccggggcggcaggctccgcggcaggagcagaggcgaggcctgggccaggcctgagctgcaggtgagagacggcatgagggcagtgccccggccacccccaccctagccctcgccctgc

SEQ ID NO: 27686 - DNA, 120 bp, Homo sapiens
gaccgggcgcccgacctctgaccctgacctcagccgtgggatcccgacctccgcgggcctcagaacccaaccccctccccggtccccgcctccaaggccagacgcaccttcccgagggcc

SEQ ID NO: 27687 - DNA, 120 bp, Homo sapiens
ggccgacccccgtcgcgtggggaggggcgctgagtccgcccccggcccccgccccctgcgctcacctgccccagcctggcgtcccggccgcgcgccgccgccgcagaggttgtctcaaag

SEQ ID NO: 27688 - DNA, 120 bp, Homo sapiens
agacggagacagagaaggggccacacttacccttttatcaggagccactcctgtgctaacagcgagaacgctttggtgaggacggagccctcacgacctcagcagtgttgcgttggggat

SEQ ID NO: 27689 - DNA, 120 bp, Homo sapiens
ttccgatggtgaacttggggacacgtccacaccacagcacgtgcctattgtgtttctcggtggctggtgtgtttgaggatggcgcgtgcatgcgttttccagctttctttgtggaggaag

SEQ ID NO: 27690 - DNA, 120 bp, Homo sapiens
gaacgaatgaccacagacagtggcattagacagcgcaggcagacatgacctcctgggcttctgcgggtgccaacactgccgctccttctggaggctcagggaggctcttgagggcattgg

SEQ ID NO: 27691 - DNA, 120 bp, Homo sapiens
catcgtgctgccggccgccgggcagagccggtttgtttattttttgagacttccgggaacatagttataaataactttaatttgccttggcctgcccactgcagtacagtcacgtgtcac

SEQ ID NO: 27692 - DNA, 120 bp, Homo sapiens
taccgtggaccacatatacgaccacgcggtcacataagctgacaatactgtatttttactccactttctctatttagatacacagttgccattgtgtcccagcagccttcagtactcagt

SEQ ID NO: 27693 - DNA, 120 bp, Homo sapiens
cgggccactgtcacatctgagccaggttcactgccgctcctctgccgactgactgcctgacagtggctgcgcttctccaggtgtctcctgcctgctgtgtggacggtcccgtcagggttg

SEQ ID NO: 27694 - DNA, 120 bp, Homo sapiens
atgcgcctgctgtcccctctcctgtctcgcagtcttgggttccccggagttgcaggaatcagggcatttgcccagtggggccttgctgctggatcccctggtcgggactgtgtgcctgcc

SEQ ID NO: 27695 - DNA, 120 bp, Homo sapiens
ccacgtgtcccgtggccacctggccatgtggccggccaaggccctgtgagatgtggcaggcaggcacctcgggggcctgggtctcctggaaatgtttctgtcactctgggcgcaggtggc

SEQ ID NO: 27696 - DNA, 120 bp, Homo sapiens
tggcgccagctgggttgtcctcataaaggccccatccgggatactaggaaggccatcctcaacctgtccgcacacgtcacctccatgtggcctggccacagctccttcaggcatcagtct

SEQ ID NO: 27697 - DNA, 120 bp, Homo sapiens
aggcggccgccctccctccctgcaggggccccgtttggggcgttgtgctggctcttggcaaatgtctgccaacaccgtggcttctgtgctgtggtcgcacgtgaggcgtctgtgggcacg

SEQ ID NO: 27698 - DNA, 120 bp, Homo sapiens
tttcgttctctttcctgtggttcagtgtagctggcagtcagggagaactctctgcagctggcgccggccctgtatttgttaggcttgtttctcctgggctcggctgctgggcaaggcctt

SEQ ID NO: 27699 - DNA, 120 bp, Homo sapiens
cctcgtttttctgtctccttcttcctccaccctcctcctgtccccgggctgtctccccctccctccaccctcctcctgtccctgggctgtctccccctccctccaccctcctgtccctgg

SEQ ID NO: 27700 - DNA, 120 bp, Homo sapiens
tggcgacttggcctttggcgacatcttcctccacctgctcacgggcaaccttgcgctgctggccgacgaatttgcccttgaggacttctgcagcagcctcttcgatggcttcttcctcac

SEQ ID NO: 27701 - DNA, 120 bp, Homo sapiens
caccgcctctccaaggtaggcctgctgggtaccatccggcccgctctgtcctctcagctcttgtccgtagcagcctgagaggtggctgctgtccccagcctggggcggagggtccgcagg

SEQ ID NO: 27702 - DNA, 120 bp, Homo sapiens
gctcgcatgtggccctgcagggtgcctgggcacagctggggagggtcccaaaggctggccatgtcctgtctccaggggccttggccacctgcatctgggctgggcctgggcagacagcag

SEQ ID NO: 27703 - DNA, 120 bp, Homo sapiens
gcacggccttttccaggaaggagaacgtgcaccggcacgcgctgcggctcctcattcacctgcaccccagggtggccccgtctaagctggaggcgttgcagaaggccctggagcctacag

SEQ ID NO: 27704 - DNA, 120 bp, Homo sapiens
gcccgggggggctgcatctgaaggcacctggtccctaccagcccgtgtgtgcttgccaagctgcccttgtggtgcttgtgtgtggtcggtgggcacccacccctgtgccccctgggcctg

SEQ ID NO: 27705 - DNA, 120 bp, Homo sapiens
gaacgaaaagcctatccatgaagtctggggctccctgggccacccatcccagcttcattgggctgagaagtacactgtgttttgacaccactactatttcagttttgtcatttctctttg

SEQ ID NO: 27706 - DNA, 120 bp, Homo sapiens
gagcgttttatccatttaaacacatagcgggtgtgaaccaggtctccaggctccattctccgagcacgcgagcgtctgaacagagttctgttctcgcgcctccggcacagccacttccgt

SEQ ID NO: 27707 - DNA, 120 bp, Homo sapiens
gtgcggcggggcagccaggacgagcctgcaattccagcgccggcctcctctgctgcggctccatggctaaggtagcggcacctgcggcccagagggcccggctctcggcggtcctgaggg

SEQ ID NO: 27708 - DNA, 120 bp, Homo sapiens
gggcgccgggtcctgctcccgtccgaagtgtgacctgtggttggtcgcgtccacgtggtcctgctgactatctacttactcgttgcggctcagggcctccctttcccatcggaccgcgtg

SEQ ID NO: 27709 - DNA, 120 bp, Homo sapiens
gaacggcacaccattgccaactgcttgtttaggactatgaaggggtcacttttccagaccctcgtctgggggtccttctaggggctgcagaagccacgagtcgctaaggggtacctgccg

SEQ ID NO: 27710 - DNA, 120 bp, Homo sapiens
gggcgcccctgacctccgggcattggggcccggctccccgcagcctcccaccccgccccgctcccgagctagcaaagcccacatggccccgccgtctaccccggcgcccgccccgcctcc

SEQ ID NO: 27711 - DNA, 120 bp, Homo sapiens
ccacgagtaggcccaattcccacccccaccaccaagggagcgaccacagctgaaggggccagcgctgggctgcagaatgtgcctccagcagtgtctgtgtgcccacctgacctgacctgg

SEQ ID NO: 27712 - DNA, 120 bp, Homo sapiens
ggacgctcccaggcagacaggactgggcagctgcacatagcccctgcacacaacacccttggaccccacccacccctgaggccttgggtctcgacaagtcggaggcttgagggaaagagg

SEQ ID NO: 27713 - DNA, 120 bp, Homo sapiens
tgccggccaccctggggactcccacagcccctgctctcctagcccagtggagctcaggtcccaccaccaggctgggaatgagcccaggtccctcgggtgatctggcctgaggggtttctg

SEQ ID NO: 27714 - DNA, 120 bp, Homo sapiens
gtccgtcgggctggggccctggcctgggtggaactcctgcaggagttgccaacctgggatttccaaccctgcaggcaggtccaggaggagtcaaggcctgaggccaccaggcagggcgat

SEQ ID NO: 27715 - DNA, 120 bp, Homo sapiens
aaacggcaaagcatgaaagagcaaagataaaatctcactccgtcccaccacccaccacacgaaagggtgcccagcaccttccctggacaggcctctgcacggctaggactgtgtgcggag

SEQ ID NO: 27716 - DNA, 120 bp, Homo sapiens
catcgggaagagggatgctggcgggggtcgccagtgtgccgtcccaggatggacattgcacatttggtccctggcaagcccctgggtgggtcctgaggcccccaggctgccctgtgcact

SEQ ID NO: 27717 - DNA, 120 bp, Homo sapiens
agccgcccaaccgatggtggggactggggtgtgggcctgacaccttgctggacagggcgagccagcggcccaggaagaagcaatcaggcaccaacctgcccgccgaggcctgggtctggc

SEQ ID NO: 27718 - DNA, 120 bp, Homo sapiens
ccacgctgtccccagagtgccttgcagccctgggctgcccgccccaaaggtgacccgacactgtcccctgctgtggcactgtgagcctcttcagagagaagggagttgcgagtttgccaa

SEQ ID NO: 27719 - DNA, 120 bp, Homo sapiens
cagcgtcggcggcgagaaggtccctgggggtcgggacaactgggcccacagccctcaccccagagcccccaaaagccagggccctgagtgtgggagaggagtgaaagggcacgtgagtct

SEQ ID NO: 27720 - DNA, 120 bp, Homo sapiens
ctccggaggccgggtctgggcacacgtgcgcaacagccagcccctcgtgcgcggggagacgtctctcagaagcaccagggacacgggcgtctgcatgtgggtgggtgtcagggtgtgagc

SEQ ID NO: 27721 - DNA, 120 bp, Homo sapiens
aagcgtgttactgcctcacggtgtggacacaaggacatgtggccgcccgtgtcagggtctccacttcctgcagctcccttggaatgtgccccctggagccaccagccctgcctggcccac

SEQ ID NO: 27722 - DNA, 120 bp, Homo sapiens
tagcgcctggcagtgggtcaccatgcgacaccttgccctccttggcccagcacccctctgcacaggtcaccccagaccaagttcccgtgaggggcctcagcctttccctgggcacccccc

SEQ ID NO: 27723 - DNA, 120 bp, Homo sapiens
ccccgaccgggctttcgggcctgggccctgatgaaggaaggccaccccaccctgtgccctcagaccttggtgtccaggcctggggcttggctgcctttgcccacctcctcccagcctgca

SEQ ID NO: 27724 - DNA, 120 bp, Homo sapiens
caccgccaccgccggagagaccacgcgtgtgggcctgacccgctggcagctctgaagcctgtggccccagccccgggtgtctggcacccctctgggtgtggcccctgttgcagcagactt

SEQ ID NO: 27725 - DNA, 120 bp, Homo sapiens
ccccggctgacccggtccaggagggctgggggtgagccacagggcctgggcaggaggccgaggccccggcaccgggtctcccactcacatgggatggtcagcccccaccccgggggaggg

SEQ ID NO: 27726 - DNA, 120 bp, Homo sapiens
ccccgtagtgtgaatttcagataaagtgcaggatacttttttatatgaaaaaatgaccgttttctgagattcttgttagcaagcgcctgtgtttgtcagatccccggcctgccctgggcg

SEQ ID NO: 27727 - DNA, 120 bp, Homo sapiens
ccccgcccagacccgggccgctcccacctgccttgggtcaaaccaaacagaagccgggccacacagggtcccaacacggtgccctgggcctcgggctccctccgggggctccggggcgcc

SEQ ID NO: 27728 - DNA, 120 bp, Homo sapiens
caccgtccccatcccaggggatggcagctcccccctccccctcgctgtggccccctcccgtctctgagcctcccaagggaagtcccccttctccccctccccggggctccagagcttccc

SEQ ID NO: 27729 - DNA, 120 bp, Homo sapiens
ccccgaggacagcctgcccatcccatccatccaggctgagtggagccaggccccggggccacctgaggagggcagtgggtctcggcatgctgcgtggccctctggtcctcaggcactacc

SEQ ID NO: 27730 - DNA, 120 bp, Homo sapiens
tcacgaacctgtggtccccaggccggtgggtccaggtcctccatccccaggggccatctggtgggaacccaggctgggctctggctgagacccacagcttttctggaaggctgctaggaa

SEQ ID NO: 27731 - DNA, 120 bp, Homo sapiens
tgtcgtgctaggcccacccgctgctgaaacttgccctgcagttccatgccctggctggagggcccgtcttcctccagagctctggggctgggcccctaccgccaccttaggagcagggag

SEQ ID NO: 27732 - DNA, 120 bp, Homo sapiens
aagcgtgggaatggggtctgggctgagacggacagagcctgggaggggtggggtctgtggccgctgcacctcttcctgtctgtccctctgtctatcaactgagcacagagaatgtaaggg

SEQ ID NO: 27733 - DNA, 120 bp, Homo sapiens
ccacggcaggaatgggcggcactggggcccccaggctggatcttgggtctgggctctgaagcccctgtccacggcaggctccaggtgctgagtgtgaacgctgggggcagctgtcctgga

SEQ ID NO: 27734 - DNA, 120 bp, Homo sapiens
cctcgagaaccccctcttggacccctgtctgctgggctggggtccaccaccctccccagggtccctgcccagccccacagggcttcccaggcgcccatgagctgggccccggctgccggc

SEQ ID NO: 27735 - DNA, 120 bp, Homo sapiens
cctcgtcccccccataatggccagctctgcccgggagccctcggaggcagggtcaccacagcctcctgggatgcccacttccaaggggctgacgccactgtttcaggacgtgtccccgtg

SEQ ID NO: 27736 - DNA, 120 bp, Homo sapiens
gcccgctcctcaaccatgctgggggggtggggactgggacggtaaaaatagacggtatgcctggccatgtcaggggttcatggtaagggtttttttttaagcttgagcttctttgataaa

SEQ ID NO: 27737 - DNA, 120 bp, Homo sapiens
atgcgtcccgtccccacctggctctgcccgaggggtgctcactcccccaccctgcccctgcttaaccagcaggttccccttgtgtccctgtgatgtgcacgaagtcccattgtagaagct

SEQ ID NO: 27738 - DNA, 120 bp, Homo sapiens
gttcgaggactgtgtcatctgtccggaaattcacagttaggtgactgcttcccccagcccactgcacggtggaggcgtgcagcagaggagggtcccagaagcacatgggctgcgtgtcct

SEQ ID NO: 27739 - DNA, 120 bp, Homo sapiens
cctcgaggcagctggtgcccactccagggaaggggtggccccagctgctgcacggagcacactcagggcttcaggggacagctggacacggggttcgtgtacgtgcggctgcgtctgatt

SEQ ID NO: 27740 - DNA, 120 bp, Homo sapiens
cctcgccggcccccgatggccctgctgtcccccactgtggcttggtggactcccgacctccaacaaacactgtttatagagacctgggcgttatccaagtttgaacctaaacaatttaca

SEQ ID NO: 27741 - DNA, 120 bp, Homo sapiens
agacgttcaccttttcaacgccaagctccgactgcagcttcaacgtcgcgcccagcgtggctgcctggcaaacacaaaggcggcagattactcagggcctgggaggggccaggcagcacg

SEQ ID NO: 27742 - DNA, 120 bp, Homo sapiens
cggcgggtgagggggctaccacccttttgcaccagcacctggtcactgaggccggagtgcagggccttcccgtgttcagccacgtggccctcaggccgaggggcctggcctggcagacaa

SEQ ID NO: 27743 - DNA, 120 bp, Homo sapiens
ccccgtgctgagccaggccttgcataggctgggacaggtgggaggcctgggcttggcctggatggggcagcagggactcaagggggtggctggccacacagcctgggtcccagggccttg

SEQ ID NO: 27744 - DNA, 120 bp, Homo sapiens
gctcggggattgctgatgagccagaggaaggctaggaggtggggtcaaggcaaggcgcaaagccgtgacctcccacacgacccatctgcgggccccagaacacaatggtgcctgcagtgg

SEQ ID NO: 27745 - DNA, 120 bp, Homo sapiens
cggggcctcagggccgtgggaaggggcgcagggccggggaggggcacggggccaccacatggggaggggcgcagggcctgggaggtgggcttacggctgtgagcatgggcgcaggggcca

SEQ ID NO: 27746 - DNA, 120 bp, Homo sapiens
acccgcagcttcacacaagggctctgatcccttctggatcagggaccccctgagaagctgccagagctccggaaggcaggggtgcagggccggacacctcaccccgttcagaaccgcagg

SEQ ID NO: 27747 - DNA, 120 bp, Homo sapiens
acccgcccgccctctgctcctcctgccgcatgtggttattgtcaggtgcagggaagtggaggatggggctgcgcccggcacctccttgggaccaggccctgagcaggtgacgctgggacc

SEQ ID NO: 27748 - DNA, 120 bp, Homo sapiens
caccgctgctgtccccagcctccctccgagggacagacttcaggctccagtcccagccctcggcgggccccacccaaccaggaacccctctgagcccaagaaggccgcctcaggcttgca

SEQ ID NO: 27749 - DNA, 120 bp, Homo sapiens
ggccgtgctccccaggtgggtggcttctgcctctgtgtcccgcacgctgcgaccccgtcagaggcagttcaaagtgcccagctcagcccttctcttcaccacggccattcagagcccagg

SEQ ID NO: 27750 - DNA, 120 bp, Homo sapiens
acccggggcctcttgaggccaggtgggctttctggacatgcaggcgtcctggggcccccagcatctgtgtccacattttgtacccggagcccagtgggggctctgtggcctcgcagcttg

SEQ ID NO: 27751 - DNA, 120 bp, Homo sapiens
ggacgaggatggagctcccctagctccaccctggtaagggcagagcccaggcttgctcatgggcagccctggtgacaggggtggggggctggggggtggctagtagcagacccacccctt

SEQ ID NO: 27752 - DNA, 120 bp, Homo sapiens
cagcgtctggtcatttctgtctgaacttccctgagaggacggtgtacagctgcccactgtccatgcctggccacttgggaaactcagcaggcacaaaaaggtcacctggccccagagcca

SEQ ID NO: 27753 - DNA, 120 bp, Homo sapiens
cagcgcctctgttccctgcctggccctcggcccccgctccctgcctggcccccggcccctgcccttctgcccctgtcgcttcactgtggcctcaacgctgagccccagggcagtgaccgc

SEQ ID NO: 27754 - DNA, 120 bp, Homo sapiens
ggccggtgcacgatggacactccacggtgcccgccccagccattccagggccagccgtgcacacatggtgctcacagcccacgcaactggggagccctggggagccctgagtctctcggg

SEQ ID NO: 27755 - DNA, 120 bp, Homo sapiens
tggcgggacaagtgtctgccgtgccgggctcagacacggccatgctgacactcatcccacacaattgctggcttcctgttcatacaacagaagaaaaacaggatgtccaggggcggcttc

SEQ ID NO: 27756 - DNA, 120 bp, Homo sapiens
gaacgaagaagacaagcgagctctgtgagccccagggctcagcagtgagaggacagggtgcctgggagagccctgggggacacaccccactcagcacacagcaccccacgcaccccaact

SEQ ID NO: 27757 - DNA, 120 bp, Homo sapiens
ccacgcaggggcacggggtccgagaagggcgggtggggcttggagctgacaccgagggacctcccagacccgctctccggccccagaagccccagccagccctccctgaggtcgcctcct

SEQ ID NO: 27758 - DNA, 120 bp, Homo sapiens
cctcgtgcagtagcttctgggggcctttggtccccagcgtggatgtttggccggagctccgtgggtggcctctggcccccacctccacacccaggcccaagttccctgaattcgccaagt

SEQ ID NO: 27759 - DNA, 120 bp, Homo sapiens
caccgatgcctgggacctgcagacaggcaggtctaggacgctgagacagatggccctggccaggaggctgggccctgaccctggaccctgccccttggaaccatgtgggtgggggcagag

SEQ ID NO: 27760 - DNA, 120 bp, Homo sapiens
gagcggggcagctgtgtattaggaggacacctagaaaaaactcaagctcaagaataaaagtcccacagtcccccgaatgtggattcacatccaagagctgggctgcttctctctgggggg

SEQ ID NO: 27761 - DNA, 120 bp, Homo sapiens
aaacgtgcctgggagggctcaggaactctgtggggttggcctgagggtgtccaggcagaggcggccaggacggctccaccatctgtccccaggacggctccccagctgacacccccgcgc

SEQ ID NO: 27762 - DNA, 120 bp, Homo sapiens
cgccggccgacgggaggacggatggttgcagggacgcaggatgggcagaacacagggacgccacttcctccaaacgacacccggctaatggggctgccttcaccttgagacacagacgca

SEQ ID NO: 27763 - DNA, 120 bp, Homo sapiens
gcacgcgggaaactgtgggctgtggagtgggtggcgccgaaggctctgttattcccgacactctaccataaagcggggatgagaaacacagggggctttttatccacagggttgggggca

SEQ ID NO: 27764 - DNA, 120 bp, Homo sapiens
ggccgaccccagcagcgggcgccaggcagaggacaccaggcagcggatgctggcaggggacacccggcctccaggcaggaagtctgtgacgtggtcttcacaaagcccccgagtgggtct

SEQ ID NO: 27765 - DNA, 120 bp, Homo sapiens
ccccggcagctggctctcctcttggggcctgggtcacaaagctcacagcccgtctccaaggccgtcccacacctgccagcagcatcagaccccgcggcagtgagtgtagaagagcccggc

SEQ ID NO: 27766 - DNA, 120 bp, Homo sapiens
ggccgcccagaccagaccccacgcgctgtggtgacctgcatgtccacgggtccaggcacctgctatcagcacagcaccccgcctgggtcagtcctctgaccgcccacggacagcagaaag

SEQ ID NO: 27767 - DNA, 120 bp, Homo sapiens
ccacgtccccagccccaggcacctcagcaggcccaagctgtagggcatgggtctcctccgggaagccagggcagcctcagccttggaggctcccattgtccggagcccagcaagatgggg

SEQ ID NO: 27768 - DNA, 120 bp, Homo sapiens
gagcggcggatgtggagggaaagggaacccaggccggcaggcttcctggagctgctgcatctgccagagggccggcctccccgccccaccccaccgcccgccggccctggtgattcctgg

SEQ ID NO: 27769 - DNA, 120 bp, Homo sapiens
ggtcggtaggccgtcccgcagcctagcctggggctgtcgcgagctcgcaggggtgctcttggaggcgccccgggcaggagccgctcccacctggagcagaagggagcaggccctccctga

SEQ ID NO: 27770 - DNA, 120 bp, Homo sapiens
gctcgggactgatgacggtgcggccgtcaggaggccaggaagccccgacacctccccgtttcccgacagacgcggccagaacacgcccaactccacgggagggtctgaccaaggggaccc

SEQ ID NO: 27771 - DNA, 120 bp, Homo sapiens
cctcggcctccctgtgggcctcagaacaggcggaggcggcaacggcaggagagggcgaccctcgtgacgaccgagctcccgggcaaagccggggccgcgttgcggggtttcatccccgag

SEQ ID NO: 27772 - DNA, 120 bp, Homo sapiens
ccacggaagacgctgcatccgggctctttagcagaggcctctacccgtcctggtcagaggagccctcagacagttttgggaaagccagactggggtgtcgatgccgcagtgaggactcgt

SEQ ID NO: 27773 - DNA, 120 bp, Homo sapiens
gaccgcatgttccaggtgaggaccaggcagggcaggggctctgcagcgctggtaacccggtgggaccacagggagggagtggccggcacagggccaggcaccaaggctcagctgtgggca

SEQ ID NO: 27774 - DNA, 120 bp, Homo sapiens
acacgtggacatgtctatttttggtttttctgtgggtgcttcctatcttggaagcagtttctggtgcttctacaaagtgaaaccaaaaccctgtacatcattaaaacttacaaccaatta

SEQ ID NO: 27775 - DNA, 120 bp, Homo sapiens
gtacgatgaaccaggtggtgcaaaaataacaatgagggtgatgcaacaagtgaaaaggaaactaaatgtgaattgtcgaattggaattgaagaatggagcgggtattcccctttgccctg

SEQ ID NO: 27776 - DNA, 120 bp, Homo sapiens
caacgagaggtctgtttcctttccccgttatgacatcccaaaatagcattttgctccttgagttctagtaggaacattcaaggcctggttggcctttcccatctctcactctggacccct

SEQ ID NO: 27777 - DNA, 120 bp, Homo sapiens
gagcgatctctgcgaagttgaaaccctgcgttactgtctggggaattcacacctgggcaatttacacacacttactgattaacttcttcagttaacaattttgagcagattacctcagta

SEQ ID NO: 27778 - DNA, 120 bp, Homo sapiens
ggccgctgtcttggtgcattttggtcatcggtggctctcttttcctgtaaatgttttaacagcctcagagtaaaatggagcctattgtggaagactgagtgctggtggcatggggctcaa

SEQ ID NO: 27779 - DNA, 120 bp, Homo sapiens
ttccgaattaagactccacagaacctgccttttatttcccctttgcaaagctactgttacatcattataaaagggacattccctctttttccagaaatattcctaagaaaagaaaaacag

SEQ ID NO: 27780 - DNA, 120 bp, Homo sapiens
ggtcggctttaatttgcagttttgtattcataaggggaaagtgatgggcaaaccccacaagagaacagaaatcagctgtgtgaataggcactgcaggctaatgaagagtgaagaggagag

SEQ ID NO: 27781 - DNA, 120 bp, Homo sapiens
gagcgtatgctggaattctgagagccagaaaaggaacgtgccaggtgccagaatcagttaataggcattatgtgtcttctgcatttcaatctacatgctgcttcttttctttcaggtatt

SEQ ID NO: 27782 - DNA, 120 bp, Homo sapiens
aagcgatccgcccaccttggcctttcccaattcttacagcaaaaaagagtatacagttgatatgaaccattctctgaacatcatttgtttttactgtacctgcttctgtcataatgaaca

SEQ ID NO: 27783 - DNA, 120 bp, Homo sapiens
cagcggacaggtgatgtgcaaatatatgaaactctcaaatatataactggctctgcttcttagaagcttgtagacttgaagtaagcaacctacccgctctaggctttttctgtgaaaagg

SEQ ID NO: 27784 - DNA, 120 bp, Homo sapiens
actcggctcattgcctgaaacatagtgagaacccaataaacatcatagcacccaaaaaacataaataccttttagcagcagtcaaaaaaggtaaaacatttgtgttctacctcacaagga

SEQ ID NO: 27785 - DNA, 120 bp, Homo sapiens
tcacgtctcaaacagaaacatcatgtggatctttcactcaaaccaaatggaagttgttttcctttccacaacaatatgaattcccttggttagacagtaagaaggtcactggacaatttc

SEQ ID NO: 27786 - DNA, 120 bp, Homo sapiens
taacgcctcaacttctggattcagggaacggccctctctctgctgaggacattcatttcaaaggtgtgcttttaagtgaattgaaaaggaccctaaagagaaaggctgcctttcatatct

SEQ ID NO: 27787 - DNA, 120 bp, Homo sapiens
tctcgtctctctcttcagtgaatctggacacagtgctttcatcttctcattgcccagcttaggtccccttttgttttgtggtgccctgttacgttgctttgttttggtttctctgggagg

SEQ ID NO: 27788 - DNA, 120 bp, Homo sapiens
gctcgaaatgatgagatcaaatgttttgagacagtgttacatttcctttttttccccaagcttttctttgtttagctctatgcctcctgtcatcttaaatcttctcttccttatgtagtg

SEQ ID NO: 27789 - DNA, 120 bp, Homo sapiens
tcacgtactttgaagtaatttcttgagagtaatgaaactcagctacctgacagaaaaatcccctttatgataactccaacccatgcttatgctcaaatatgacttgcacacacttcatac

SEQ ID NO: 27790 - DNA, 120 bp, Homo sapiens
gagcgcttgcatcatccaagcttctctgactaaaatatagagtcactgtattagttcgctaggcctgctataacaaagcactacagaatgggtagcttatgcaacagaagcattatctcc

SEQ ID NO: 27791 - DNA, 120 bp, Homo sapiens
cagcgctggaggttagaagtccaagatcaaggtgagatcaaggtggatttcttgtaaggtcagtctgcttggcttgtacatggcaatgttctccatttgtcttcacagggtcttccctct

SEQ ID NO: 27792 - DNA, 120 bp, Homo sapiens
agacgagggagataggaaaaggaaacaaaaaagagacaaactttgcttcataacaacccactctcactggaactaatccaacccaatgagagcaagaacaccctcccctgggactgcatg

SEQ ID NO: 27793 - DNA, 120 bp, Homo sapiens
aaacggcaaatacagtcacattctgaggtactgagagttggaacttcaacctatgaacttaggggagatacaattccatccataaccattacctacaagggtggcctacagagggggtgt

SEQ ID NO: 27794 - DNA, 120 bp, Homo sapiens
ctccgtctgctgtgcttgccaaaattgttatggcaaccagagctaaaggactgcagtgctcagatcgggctgtgccagctccagctctggctcgcttaccttatcgtgagcttgaggcac

SEQ ID NO: 27795 - DNA, 120 bp, Homo sapiens
aaccgcttggggtgatggtattttgaaaatgccattatagagtgctgggttccttacggcagtgtgcccaggcctcaaagtgatggtgaatggtttctgggacaaagaagggttggtaaa

SEQ ID NO: 27796 - DNA, 120 bp, Homo sapiens
aagcgcacatacactaagacatggctgtcatagaacagattgtgcgtgaataaagggttcacaccacttccaccctttacacagtaacagaaggctctaggccacctacctcctccttgg

SEQ ID NO: 27797 - DNA, 120 bp, Homo sapiens
caccgaagtatacctgtgaactgctctgagatgcccttgatcagatcctagatagcagtgttgttgccagtgaaggtggccggacatctttagccctgagggtgggaagtcacacacagc

SEQ ID NO: 27798 - DNA, 120 bp, Homo sapiens
ttacgtagcaaccatggcagaggttgcaggcagccatcatattcttggcatcaaagaactgccaagtgggctcacgcaccatgagggcccagtactgctggttgtcccagctggtcagca

SEQ ID NO: 27799 - DNA, 120 bp, Homo sapiens
ttgcggccagcttctgcaagtcagcattgagttggccagggaaatgcagacagatggtgaccccactcatggctgcagacaccaggtggttcaagtcactgtaggtaggtgtgggcagct

SEQ ID NO: 27800 - DNA, 120 bp, Homo sapiens
gtccgtggaaaagtgtggcatgagccactagcttttaaaatctgtcaaggaccttgattgactccctatttcagaactctatcttgtgtaataaagaagtcctggctgggcagaaattcc

SEQ ID NO: 27801 - DNA, 120 bp, Homo sapiens
tgacgcttcctgcccaggaggcctggcaaggtcttgtcattgtttcctgagggtggatgaggtcattaagaaagagttttcctcccctctgagatgattcactcagatacctggagtcac

SEQ ID NO: 27802 - DNA, 120 bp, Homo sapiens
cttcgtcatgaacttgacctctctgagcatgttgtctcataacatggagacaaataacttttctaataaggtataatgttatggaggactccaggggatattgggagagggcacatcata

SEQ ID NO: 27803 - DNA, 120 bp, Homo sapiens
ggacgaggtttttaatttttgtgcttctctttcttcgtttgtaaaacgggtaacattctatagggcccatcttatggtcctgatgatgaaataaggtaaggccactgaagcacttagcac

SEQ ID NO: 27804 - DNA, 120 bp, Homo sapiens
tggcgacattggccacatcttggccctgctggcctccatcttagaggtccagtttcctgggatggcgggactcagttgctacacttgtccctgtatccctcgcacaatgtaggtttccgt

SEQ ID NO: 27805 - DNA, 120 bp, Homo sapiens
cagcgggacacctggttagcatttctcaacaactgctacaatgctgggcaagttcacctaaactcagagggtggctccaaacaaagcccaactcgatttgtgtatttgatcccgagcatc

SEQ ID NO: 27806 - DNA, 120 bp, Homo sapiens
ccacggaatgaaggataagatggagaagccaggctaaggaaggattgggatttcctaaaacagtatgaatttttgttattttctattgaagtgccgtaatttaaatgtattgacttaagt

SEQ ID NO: 27807 - DNA, 120 bp, Homo sapiens
gttcgttgacataaaagtatgttaacctgctgtggttttaataatatacctccacaagatggcgccaacatcaaagcctggctttgccacttaaggaaattgtggtggacagtcacaaat

SEQ ID NO: 27808 - DNA, 120 bp, Homo sapiens
tcccgtttttgttgcacagggacgagtttcctgatgcttccttgccataggccctgggctctgtgtgtagtgttcttcccaaaccaaaaattaaaaataggaaaatcagaatctatacca

SEQ ID NO: 27809 - DNA, 120 bp, Homo sapiens
cagcgattaaacagtcagtttgaactggggaaagtatttgacctttagtctgtcctaaaagaatgtcatcaggctgtttatacattaaaaggctctcataagatatgtactcccagattc

SEQ ID NO: 27810 - DNA, 120 bp, Homo sapiens
caccggacttgtaaagctcgacttcgatgatgcattataaagtggtgcacaggattggtttttaatgagatttttgccattggagcaaagcaagactgtttccctgccagctgctttatt

SEQ ID NO: 27811 - DNA, 120 bp, Homo sapiens
tcccggtgctaaacagtttctataaaatgtggctaataacatattggcctgttgtgcctaaggcctgtgtttgggttatgccttctcaaagaatgcagtggaagaatctcagcttagaag

SEQ ID NO: 27812 - DNA, 120 bp, Homo sapiens
tgccgtgaaattcctttgtcacttagtgtcctcatctgctaaatgagggtgttgaattgattcctaaaagttctggtatcctcccctcttcagattatttcttcaacttattttcttggt

SEQ ID NO: 27813 - DNA, 120 bp, Homo sapiens
gttcgactttgcttttgtcacgcattcttactcatcaggaaagtcccgctataaacacagtgctgagggatcagttatgtcagtctgtttccttctcccagagaccagccctgccttggg

SEQ ID NO: 27814 - DNA, 120 bp, Homo sapiens
gcccgtgtctgggccctgaggttgggagtatgctctgatgtcaagtatttgatcattctctttctgcctcttgatgactagaaagcgttttatggtaaagagttacgcaagaagcctttg

SEQ ID NO: 27815 - DNA, 120 bp, Homo sapiens
ttgcgtccctgttctttgtcatcctcttgtctgtagctgtccttgaagtggtgtccactattcccctggatgaggttcattcttacgttctgttccataacctagttgtgttattaactt

SEQ ID NO: 27816 - DNA, 120 bp, Homo sapiens
aaacggaaccagtgaaactatttctcagtgctgcctcccacccctggaagaggacatcatgttatctacctgcccctgttggcttcccttgacccatctctcccatgctgtcccctcctc

SEQ ID NO: 27817 - DNA, 120 bp, Homo sapiens
attcgagagatctgtacgcgcgtggctcctcattcctcttccttggcttcccaagcccccagggcgtcgccaggaggaggtctgtgattacaaaccccttctgaaaactccccaggaagc

SEQ ID NO: 27818 - DNA, 120 bp, Homo sapiens
ttccggagaatcgaagcgctacctgattccaattcccctgcaaacttcgtcctccagagtcgcccgccatcccctgctcccgctgcagaccctctacccacctggatcggcctccgaccg

SEQ ID NO: 27819 - DNA, 120 bp, Homo sapiens
attcggtgcgttgggcagcgcccccgcctccagcagcgcccgcacctcctctacccgaccccgggccgcggccgtggccagccagtcagccgaaggctccatgctgctccccgccgccgg

SEQ ID NO: 27820 - DNA, 120 bp, Homo sapiens
ccccgccgcccgctgcctgctctccccctctccgcagccgccgagcgcacgcggtccgccccaccctctggtgaccagccagcccctcctctttcttcctccggtgctggcggaagagcc

SEQ ID NO: 27821 - DNA, 120 bp, Homo sapiens
ctccgaccctgtccctcaaatcctctggagggaccgcggtatctttccaggcaaggggacgccgtgagcgagtgctcggaggaggtgctattaactccgagcacttagcgaatgtggcac

SEQ ID NO: 27822 - DNA, 120 bp, Homo sapiens
cgccctccggcctccctgctcccagccgcgctcccccgcctgccagcaaaggcgtgtttgagtgcgttcactctgttaaaaagaaatccgcccccgccccgtttccttcctccgcgatac

SEQ ID NO: 27823 - DNA, 120 bp, Homo sapiens
caccgagaatcgaaatcacctgtacgactagaaagtgtccccctaccccctcaacccttgattttcaggagcgcggggttcactaagtcagaaaccctagttcaaaggattccttttgga

SEQ ID NO: 27824 - DNA, 120 bp, Homo sapiens
agtcggactgctctctccttcccctccccttcccctcctgcgtgtaaaacggctgtctggggcaagggtttctcagacgtgtacattgcctggtataagagcagactctgaaaagatgag

SEQ ID NO: 27825 - DNA, 120 bp, Homo sapiens
atacggacgggggagaattctgcctgtaggcagataggaaaatggggagggagtcattggaaggacggactccattctcaaagtcataattcctagaccagaaaaagtgctcagtgttct

SEQ ID NO: 27826 - DNA, 120 bp, Homo sapiens
tttcgtaattataaagggggaagggaatatgagtgccccctgctttataggggttgttgtgagtttaaatgatgtattaatacatataagccttaagaacagtgccacacatcctaagct

SEQ ID NO: 27827 - DNA, 120 bp, Homo sapiens
gagcgagggctgaaatactacctactgtgggtactgtgctcactacttgagtgacagattcagtcgtactcgaaacctcagcatggtgcaatatacctttgtaattaacctgcacatgtg

SEQ ID NO: 27828 - DNA, 120 bp, Homo sapiens
ctacgaggcactatatttttaaaaataccactatgtacaaggcactgtgctatatctggaactacaaatattagttaaatagtccaagattcagtgggttcagagactctaagtatttgc

SEQ ID NO: 27829 - DNA, 120 bp, Homo sapiens
aaacgttctttggtccaccaagccctatcgttctgctctttggaaattctccctcactttcttcataatgccgtccttgactaactctcctctagcaatactattggttttgtatgtgat

SEQ ID NO: 27830 - DNA, 120 bp, Homo sapiens
cttcgtacaagagattcacattcaacaaatagaaaaaaaacgctattgacatttggtagcttcgacaattgtaaacacatgtgggtttgctgaatacacattaaaatagcatgaattagg

SEQ ID NO: 27831 - DNA, 120 bp, Homo sapiens
ttgcggtcccaagttggtgggtttttctaggaagagtcagaccctttaaaaggaccttttatcatctaccaaacaaatccttcatttattaattcccaaggttttctccatcggttggct

SEQ ID NO: 27832 - DNA, 120 bp, Homo sapiens
catcgtcactggaaaaatactacgggccactctctataccatcctgcacccccagatggagaaactgagggaagtcgtggcctttcaacactcttgggtctccatctggcttggaaggga

SEQ ID NO: 27833 - DNA, 120 bp, Homo sapiens
gaacgaaatggctgtcaagagtctcagaagcgcactttccccgtggttcctccgggtaaccctgactcacttttcatctacccatcccctccaaaacaaggcctagccagttccaagctg

SEQ ID NO: 27834 - DNA, 120 bp, Homo sapiens
tttcgtctcgagtccactaaccccactcagactctgtctgctcccacccccaccgcggccagtgaaatcccaatcgtcttccacgtggaaccccaggtccgcagttatgataacggatca

SEQ ID NO: 27835 - DNA, 120 bp, Homo sapiens
catcgctcctgcggaaagtgcgcgcggtggagtgataattggacctagcgtctaaattcttgttggaggacctcgttccagctgccagttaagcctctgggatccgcagcgtctctagga

SEQ ID NO: 27836 - DNA, 120 bp, Homo sapiens
cagcgtgcatctcatctcttgtcgccgggcgggcgctctttcgggtccagggcccttgcacccccagcgtggctccggaggcggcgagacctgcctgaaattgattggaggggactagag

SEQ ID NO: 27837 - DNA, 120 bp, Homo sapiens
gggcggagagaagagatcccaagaagggcgccaagtgctgtgaccagaggcctaacacgaggcaccttggaaacaggtatagctacggatttatgggttttaaaatggaacgtcttggtg

SEQ ID NO: 27838 - DNA, 120 bp, Homo sapiens
tagcgtgcatttcacagtctgacgtcacagccctcgcaggttttcccagaccttaaagccacgttctcgtgtatgacacttaaacaactcagtttccttgtctttcctccctccctaccc

SEQ ID NO: 27839 - DNA, 120 bp, Homo sapiens
gtccgaaaggtgctttccttgtgaagcttcttttgtcctctgcttttaggactctctgcacactgcatcctctatgtcaccctccagtacatctgctcttacacaaggggccccacaggg

SEQ ID NO: 27840 - DNA, 120 bp, Homo sapiens
aagcgtttcatagattggccagcatatagtaaacatttaataattagtagctattattatttttccttaaatattttttttctggcttcctagcaatcataaaatttagtcttgtataga

SEQ ID NO: 27841 - DNA, 120 bp, Homo sapiens
ttacgtatagagccagggagtcctgaccccttttcagtttttcttcctctgtactgctgtgatgactgtggaagtgaagtacttctttggctgccaaggaagtcccagctgaaaggtaac

SEQ ID NO: 27842 - DNA, 120 bp, Homo sapiens
tcccgttgggcaatttctcgttaattgacaacaggaattgctgtcactgtcctgtctagccactttcaaacggtggggatgttagcaagagctcccagtgaatgcttcctaggagagcag

SEQ ID NO: 27843 - DNA, 120 bp, Homo sapiens
tggcggtgaaaagtctgtactaagacaattggaggtggtaatcattttctaataaccacctcaggcttttggcacctaattcgctggcactgtctagggaagctccttatgctaactcat

SEQ ID NO: 27844 - DNA, 120 bp, Homo sapiens
aaacggctaccgtttttgcagctttttcactgtggttccatggtgtttgaaatcagaatgtaatattgagttaatgacacaaggaaacacttggatgttcatattgtctacttggttttc

SEQ ID NO: 27845 - DNA, 120 bp, Homo sapiens
tatcgtccaatcccaatctcagattttctttttctattttttaaacccgagtagcacttttccaactagtgtgtagtttttctttcaattctctgctcttcacagtaattaaacaagagc

SEQ ID NO: 27846 - DNA, 120 bp, Homo sapiens
catcgaaacactccagggattttgttttcagcctgcatataccacgtatatttattatctggatagataaattagacgtatacatttaaaggagtttgcatcagctgctgctaggaagtt

SEQ ID NO: 27847 - DNA, 120 bp, Homo sapiens
tttcgaggctggatggggggcttcaatgtctgactcattaagtgttctatatacaaagccctacatggtccctagagcatagcaggcattcagtgaatgaaatgaatgaatgaaaagcta

SEQ ID NO: 27848 - DNA, 120 bp, Homo sapiens
acacgtttctacaaagagatgcatgacagataacacttctcaagaagaaggaatttagcttctgtcatttgatctaggttttcaattacagaagcattgagaatttcctgtggctggata

SEQ ID NO: 27849 - DNA, 120 bp, Homo sapiens
gggcgaatctttaaggcaagttgaagacccaggctgcccatgtggacatcaatactcccacagagcactcttcatgaagaaaagtgtgggcttgctgtcttttcatcaaaactcgtagaa

SEQ ID NO: 27850 - DNA, 120 bp, Homo sapiens
tcccgcatttgtttattcagtccagagcaagtgaatactgccattttctcatctcctttgttggcaacactttgttaacctgaattgggttctcaacataaaatgaagtgactaatcttt

SEQ ID NO: 27851 - DNA, 120 bp, Homo sapiens
tggcgccagcattaagaaaaggagtttccaaactttttagttttgtgagaaaatgttagaggaagagggaggttaggttgactatttatacttatgtaatcttctgtgaatttgcagtag

SEQ ID NO: 27852 - DNA, 120 bp, Homo sapiens
ggacggagctggaggatggacctgaacagaatgtatattctttatcactaggttatttatctatctacagatgtctagaaagacctgggcttttttagcaaacgtttgagaatctaggtt

SEQ ID NO: 27853 - DNA, 120 bp, Homo sapiens
actcgtagccagagctaccttccagatgacttctttctaccactttctttcttcccagtgtaagagaatgcaagtatatgctgatgtttggagcaagaacattcaaaaattttcttatta

SEQ ID NO: 27854 - DNA, 120 bp, Homo sapiens
tatcggaatgtttggggctcctcaataatgttggcactctgagatacagaccaaaagtgaggtaaaaagcgagtgtttcctttttttcagaataggactttactccagattttcttactc

SEQ ID NO: 27855 - DNA, 120 bp, Homo sapiens
gatcgacattcacctcagatgcccatgtcccttctccaccggcatagcttgttttcttcttaatcttcttgtgttcatctagcctcacattgcatttgtcacacttcgttgaaaacctac

SEQ ID NO: 27856 - DNA, 120 bp, Homo sapiens
tttcggtagagtcatacagagcagcaatgccttatgaaaacgaattttacagaatctgcctgttcatcaaaggaggccagacaggaggtgagaaaaaccaggtgtgtcccacaccagtct

SEQ ID NO: 27857 - DNA, 120 bp, Homo sapiens
aggcgtgagctgttaaggaatcccagtttggctggctctgtgcagtcagatgtagccagccctgtttatgtgtgaaaggattgggttttccccaagctgtttggtaatgttgcaagaaca

SEQ ID NO: 27858 - DNA, 120 bp, Homo sapiens
taccgaccactagaagagagtaacaagggtcctttgatattttccgtgttcactatgatcaagctggcatcgtttccttctgagctaaagattctgagctatcattggctgatgtgagct

SEQ ID NO: 27859 - DNA, 120 bp, Homo sapiens
cagcgggggcagccctatttgggttgagagtctttaaggagagctttacagatgagttctagtgaagcccatcagggagaagaaaatcaaacacaatgggaaatgtttaacaattaaaac

SEQ ID NO: 27860 - DNA, 120 bp, Homo sapiens
ttccgtacagacatagctttaaaaagtgcaaatcctattctgtacctgagccacaaccctaaaagggaacttgtttacaattctaagaataatattgtcctttaaaggtgaaggctcgct

SEQ ID NO: 27861 - DNA, 120 bp, Homo sapiens
ttacgtcttgctgatagttcagagttgtgatgtgaagcaataaataaaatccctccttccacatacttgtctccttgattagaatcattctgggcaaatttagaggctcataaagtccat

SEQ ID NO: 27862 - DNA, 120 bp, Homo sapiens
taccgtgttcagggcactgtggcaatcttttgtaatgcaagaaaaataagagtagtgaagacagtcaaggaaacaaagaagcctaatactaggcaagaagtgcttttgatggaattaagc

SEQ ID NO: 27863 - DNA, 120 bp, Homo sapiens
gcacgtctagagcatagggtagtagagagaaaggaggccggaaatgggaagagacttgaatgccacattcagttatgtggacttcatcttgtagcaatgggagcctacaaaattttaagt

SEQ ID NO: 27864 - DNA, 120 bp, Homo sapiens
tgacggggagctgggtttgatagcaagaaactgtttgggagactgttctaattacatattttcttgtttttagatgcacatatacgtacttttttagctggtcatttctttctgaaattg

SEQ ID NO: 27865 - DNA, 120 bp, Homo sapiens
gctcgtgggagaggagaggaggattcatacatctcggactggtttgccttagcaagtgaatcatttaaataggaaaaaacagggggctgactcagcttgagcaaactcttgctatcccct

SEQ ID NO: 27866 - DNA, 120 bp, Homo sapiens
gtccgcacttgctgtggcccctgccgctctcctcggaccttgctgccctcctcctttgtcactgtggagaaacaggaaggaatgtttattagcaagactgactggggtcacacccaaggc

SEQ ID NO: 27867 - DNA, 120 bp, Homo sapiens
tcccggttagagtgagaggcaagttcaaacctttgaaaaataaactcacaaccagcatttggcacaggcctctggagtttacagaatgtatctgcctgtgtgtgatttcattagttcctc

SEQ ID NO: 27868 - DNA, 120 bp, Homo sapiens
ttacgtcctgtaacagtgaggcaattggagtctcagcagggaaaggaacttgcctaaaactgcaggatgggtagcgcttggatcctgactttctgactcctaggactgtgctgtcttcag

SEQ ID NO: 27869 - DNA, 120 bp, Homo sapiens
gtgcgaataggctcactcttatgctaacatgtactaaaagtgaaaatggggagagagagagagagagagaaagagagacacacagagagagagactcatattatggtatgttccctgccc

SEQ ID NO: 27870 - DNA, 120 bp, Homo sapiens
actcgagacaacaaggaacctgttttcctgtcatcattccttctcagtccttggctttgggaagggtaactttatggagagagaagaacctctgtggagttaaaaggtttatgaactttt

SEQ ID NO: 27871 - DNA, 120 bp, Homo sapiens
tcccgccaaaagctagaagagcgtgttgctatctcattgagggatcctggagctggagctcagcttcttggcagtgagacccatacatggtggaaaccaggggatgacaagtagaactcc

SEQ ID NO: 27872 - DNA, 120 bp, Homo sapiens
ttgcggccctaagtaaaattggagatcttttagtaatcagggagagaaaagtatgtgctggatttgtagctggtagatttgtagctggtagatttgtagctggtagtattcgccatattt

SEQ ID NO: 27873 - DNA, 120 bp, Homo sapiens
acacgccaggcctcaaagtggagctgttagcacctctaacccctaagcctaacggagaagccattgcttctctcccttgggtctcctctcacagctcccactgggaacccagttgaaaac

SEQ ID NO: 27874 - DNA, 120 bp, Homo sapiens
agtcggttgcaccactcattttggagaaagggctctcggcttaaccctttggaccatgttctgctgaatgctccttcctgaccttgctcagcctcctcaattcctctctgtcttcctctc

SEQ ID NO: 27875 - DNA, 120 bp, Homo sapiens
attcgtcagccctctgcaacccaagaaagcagtccaggccccatgccccttcttgtcccccttcttgctggcactcttctgaccaaaagcctagagcagaactgcagtgcactagtgcag

SEQ ID NO: 27876 - DNA, 120 bp, Homo sapiens
gcccgggatttgctggctctgaagtggagggctgggctctggccccaaaaggaggggagtagggggaaggtggacgcctggatccagctcaccttcttcatcatcaggaagctgccccac

SEQ ID NO: 27877 - DNA, 120 bp, Homo sapiens
gcacgcatcctcatggcgagtattcatgttcttcctacaatggcccagtctggccacgtgtgagcagagcagagagtcctcatgataaaacggatttggtcgtgtgtttgtgaaataagc

SEQ ID NO: 27878 - DNA, 120 bp, Homo sapiens
ttccgtatgggagctctttgagagcaacacatggctgacttgtctctggacccttagcacacaatatgggacatggcacaggggaagcactcagagagcagatgaacagttaaatggagg

SEQ ID NO: 27879 - DNA, 120 bp, Homo sapiens
gttcgaggatgttggatggatggatggatggggatcatttcagatccaaattggtatggcttctgttcactattgatcttgcttgcttttggcttcacctacttattctctccctaacca

SEQ ID NO: 27880 - DNA, 120 bp, Homo sapiens
agacggggagaagatcagcccaaactcatacttttaccaggagcccagtcctgtgataatgccctctaatcacctcttaaagatctcactcctccgcatggttacattgacaattaaatt

SEQ ID NO: 27881 - DNA, 120 bp, Homo sapiens
ccgggaggggcactgaggacggcccgagggtctagagtggggcttgggcccagattggaggagatcagagaggtaagtcctttctgtaccttctcgcgaatgcctgggcgagatgcaagt

SEQ ID NO: 27882 - DNA, 120 bp, Homo sapiens
gtccgggtggggctactgggctcttttgcctccccctccctcccgcccgcggcgctccagctggcgcttatccccttcttgcacgaacagcagttccacagacgccccacaggactccgg

SEQ ID NO: 27883 - DNA, 120 bp, Homo sapiens
ccacgccagccaggaatctgtccgagtctgcgggcaccctcctctctccccgcaaaggactcgcaggggtcaggaaacccccccagctgttactgggagtcggagacagtcttctggcct

SEQ ID NO: 27884 - DNA, 120 bp, Homo sapiens
ccacgaacgccggcgctgggcgaactggtgtaatatgagtaagaaaacggcagctagcattgattgagctttatgacaagcccactactctccagtccttttctcatttaaactctaata

SEQ ID NO: 27885 - DNA, 120 bp, Homo sapiens
tctcggtttttggcttctgcctcctttagtgtgaaatgtctgcagtttttaaagaaagtgcttgaaacaggttgcaagtctctcgggtcttgtgagcataattcaccctattgtttagcc

SEQ ID NO: 27886 - DNA, 120 bp, Homo sapiens
aaacgaaagctgggtgtcatgaatacacccagatctagttactttggatatgattatagacttggtcatgttgagtctcctcaatatagccctgccccctgaaagccacttcatgaaggg

SEQ ID NO: 27887 - DNA, 120 bp, Homo sapiens
gtccgttggcaggaatatgtgctttgtaattaggcagccaaggatgttccaacatgattattttagaattgagggttctgtgggtacttatttgtgccttaaaaagtcttgaattgactt

SEQ ID NO: 27888 - DNA, 120 bp, Homo sapiens
aaacgctttcattctcatatcactactcaccagcagctgggctttaatgccctacacttagagcccttcttggaagcagcaaagagaggatatgtggtgttgcttccctcagggcaggca

SEQ ID NO: 27889 - DNA, 120 bp, Homo sapiens
ggccgggctgggccatatgatatctgaggccaccccctgcagcacagccacctgcagccacatgctcacctgttcttaggatgctctgggccttcgcattgccaagtttcgcagcttgga

SEQ ID NO: 27890 - DNA, 120 bp, Homo sapiens
gagcgcacccacagcctcatcttttggcactgacatcccttccaccaagagcaggtcctctgaacagagtgagaaggaaaagcagtcactaatgagctgtggggaggccaagctcaccac

SEQ ID NO: 27891 - DNA, 120 bp, Homo sapiens
agacggtgttttcttttcacaattgcaaagcttatcgttcacaaacatctctatacactgcccctaaagcctttgctaccctcttgctaattggttgtacataacccagaacctatcttc

SEQ ID NO: 27892 - DNA, 120 bp, Homo sapiens
tgacgacagcctcctacccctctggctccctcacttctcacttccagtagcagacagtctttgaagtgttcttttctccaaattatcaccctcctcccacattcactccttccttactca

SEQ ID NO: 27893 - DNA, 120 bp, Homo sapiens
cagcgccacgcgttctatggcagcgaggcacagtggctgaggaacagacacaggcctggggtcagtgccagctctgccactcccagctgcatgaccccatgcctgtcacctcacctgtac

SEQ ID NO: 27894 - DNA, 120 bp, Homo sapiens
gaacggaatgagatcatggacataaagtatttagttaagtgctggccacagtaaatgctcagtaagcagcaggtatttctgtggttatctgtagtccttgtcttctgcccgtcaccaact

SEQ ID NO: 27895 - DNA, 120 bp, Homo sapiens
ctgcgcttttctataccttcaccaccttcccagtccttctacccccactgccaacagacgagcatacttcttacctctctcatagggggcaccaccaggcagtgatcccctacctttttg

SEQ ID NO: 27896 - DNA, 120 bp, Homo sapiens
tctcggctcgccatgccctctcgtggaccctctgcctggctttgcagctcatctcttcccacctcttcagaaccctactgtagggctctatacacttctctcctgcactctcggcctcca

SEQ ID NO: 27897 - DNA, 120 bp, Homo sapiens
acacgtgggaggtggccatgtgaagacagaagcagagattggagttatgtctacaagccaagataagccaagggttgctagcagccatcagaaactaggaaaggcatggaatgaattctc

SEQ ID NO: 27898 - DNA, 120 bp, Homo sapiens
gctcgcggagctgagttaggttgtgaatattccttagcaaggacctggacctctctttgtgtgtgttgaacaagaataactgaacgtgagctctttttcctgatttgtttccctaactaa

SEQ ID NO: 27899 - DNA, 120 bp, Homo sapiens
gaccggccttattttggtagatgagttgttattttcctctgattcagcttaagtttagtactgatgtccaaaagcagaaaaggagaaaaagagccaattaggatgtctggataccatact

SEQ ID NO: 27900 - DNA, 120 bp, Homo sapiens
ctccgagacccatagagctaagctccgtatagaattccctgagggaagccttttcctttccatctcaagtccggcatattgctctataacactggttatggtgatgctgcagttttaatt

SEQ ID NO: 27901 - DNA, 120 bp, Homo sapiens
cctcgcttccctgcagccacagctgcctggctccagggcactcagacggcactgtcgcctaggcaacccagaaaggggcttcaatctactgtctccccagaggggttgggctggccctga

SEQ ID NO: 27902 - DNA, 120 bp, Homo sapiens
tgtcgggaaataaacagactactggtgtgctgtctgcattaagagatagggggaatgtcatgggtgtgttgtctgtgtgttatgtaagcaaacagccaaggatgccactgcccgctgaga

SEQ ID NO: 27903 - DNA, 120 bp, Homo sapiens
tagcgttctccctgtttgcctctgttttcatgtggccttcttcatataaggacactagtcatattagatttagagcccacccttgctccagtatgacttcatcttaactaattacttctg

SEQ ID NO: 27904 - DNA, 120 bp, Homo sapiens
tcacgctctggcatggggatttggacttcaacatatcttttttaggggacacaattcatcccataacagcctcccagatgggtatgaaatgatgggagagatggttttagaagttcccat

SEQ ID NO: 27905 - DNA, 120 bp, Homo sapiens
gatcgccagccaactgctggcttttggaccaatagcctcagcaaacgcttacagaaatggaattcagtgcaaatacccaaaagaggagctttcagaatgccggaaacattttcatatttg

SEQ ID NO: 27906 - DNA, 120 bp, Homo sapiens
atgcggccgctgaaaattgaataactccacttgcagacggtgcatcaatttcattcaatttgtaagcacttgtccctgtagtcaggaggaaaaatgaattcagctcaatcaatcagcctg

SEQ ID NO: 27907 - DNA, 120 bp, Homo sapiens
cttcgttgtttttgtggcaaattggggatagtaggagcttcattgattaccttattctatctctgtactaccacatcagtacctgcaaggagcgactgtaagtaggtgtctcagcctcat

SEQ ID NO: 27908 - DNA, 120 bp, Homo sapiens
ctgcggccacagctcagtgccaagggagtaacacatggggaggagaggggcgtgtccacccaggaagagcaaagagaagatggaagggaaccccaagaggcagccactgtctcacttggc

SEQ ID NO: 27909 - DNA, 120 bp, Homo sapiens
ccccggggcatgcccttggccatggtcaagcacagaaatattatttatttgggcatggacgtcgctgtggaggaactcgagcactgggtctccaatacccaccttgtcattcctcttgag

SEQ ID NO: 27910 - DNA, 120 bp, Homo sapiens
ctacgtttctataaacggaacgctcaagtacaatgtttgctactgaaggcatgaagaagtaccgacgtatcttcccagttcctggccactgagtgctatgtagcgatgggtaggtgagaa

SEQ ID NO: 27911 - DNA, 120 bp, Homo sapiens
acggcctcccgcttccctttaggcttggggcaggggagggactggggtccccaccctggtctaggaggcccagccgaggaggccccccggggagggaggctggcccacagctggcaggcc

SEQ ID NO: 27912 - DNA, 120 bp, Homo sapiens
tgacgctctctggccttggccttgggccgcctcttccggaaaatgggacgaggggaggcaccaacaggaacggggtaatggggctgttgctggcagagggagtaggggggccgggctggt

SEQ ID NO: 27913 - DNA, 120 bp, Homo sapiens
tgacgacatggagcagggacgagggagctgctggaagctggtaattaataaatgaaatgccctgggactgccgccgagccgcctcagatgacatatctgtcgcgggctcggcaaaccatt

SEQ ID NO: 27914 - DNA, 120 bp, Homo sapiens
gaacgacttccctgccgctgcgagctgccaggacttgccgggactcattttctcttcgcgccctcttttctcgtccattccccccaccgtgcctctggcccttcctggaccgccccctcc

SEQ ID NO: 27915 - DNA, 120 bp, Homo sapiens
cagcggcaacgcctctgcccccactcctgggccacctgtcctgcgtgcctctctccagctgtctctcctcactctgtctctgtgtgtgcttctgcctctctgtctctgtgtgtgtctttg

SEQ ID NO: 27916 - DNA, 120 bp, Homo sapiens
ccccgctccctgtgtctatctgggagtctcttccttctgccttcccagtctctcggtctctctgtctccgtctatctctgtgtgtctctgtctctctcctcccgctctcaccctggtgtc

SEQ ID NO: 27917 - DNA, 120 bp, Homo sapiens
ccccgcgtcccccctccccggctgcctgacggctccagttcatttctgcctgtttaattgggccccggatgagtttggtcgacagggccattcatcatgtggccgcggctggcggcggag

SEQ ID NO: 27918 - DNA, 120 bp, Homo sapiens
gcccgggggagcggggctgacagctccgccaggctgggatgcggcctgcgtcgggaagttcacatatttgggcattagtgcagctattagtttaacaagcttcgtttatccttgtcacta

SEQ ID NO: 27919 - DNA, 120 bp, Homo sapiens
cagcgcaggacgcgcagggtggagggagtgacacgcagcagctcgttagggccgccttcccagtcccatcccttcccaagcaaggctttgattagcttaatattcgcatgatttcagtgg

SEQ ID NO: 27920 - DNA, 120 bp, Homo sapiens
tgccggtggaggtgcctggggtgcgtccaggtgagggttcaggtcctgccagggtggggtctagtggatccaaaggtcccccccagccctgcaaggaaacacgggggtggccagggcctg

SEQ ID NO: 27921 - DNA, 120 bp, Homo sapiens
ccccgggaatcccttctgaaggggtcttccttccaggacgaggtggctccagcccttggttatctcctttctcctctccctgatcccagtatgctgcctctctgtgtgacctgagcaaga

SEQ ID NO: 27922 - DNA, 120 bp, Homo sapiens
gtccgcgtccggaaaatgggggttcagattcactcgtgtgggttcacttcccccattcggctggcgagctcaccataccttagttcctctgaaggagtcacctgcctcctgccggatttc

SEQ ID NO: 27923 - DNA, 120 bp, Homo sapiens
ggacgacaagccctgggactcccttcagttcttccaggccaggaatgtgcttgttctccaagcccgggttcagcgtgagttcacgcgagagcaggacaaaggtgaggagcagggggctga

SEQ ID NO: 27924 - DNA, 120 bp, Homo sapiens
ctccgtgctctccttttttgcaggcctgatgcagacaaacgaggtaaacttggaagccataaggttgaagacggcggagctaaaacaagaaaggaggctggatccctgagtcaccttgtg

SEQ ID NO: 27925 - DNA, 120 bp, Homo sapiens
tatcgccttaaccaatataccagtttgcactgtgaatgagaaaatgagtctgcatccacaatgtccatgctttaagagcttctaggagttttaggagtttatttgccatgctctataaag

SEQ ID NO: 27926 - DNA, 120 bp, Homo sapiens
actcggacaattactgctcttgattaacaacaagaactgatgagttggcctttctagtgtgctaagcaaactcagccaagcagaaaatatcactgaaggggaaacaacgggaagtgattt

SEQ ID NO: 27927 - DNA, 120 bp, Homo sapiens
atgcgccgtcgcgatatttacacatgtttgtggataatgtgggaacctctgctgcttgcatgcccttccagatgacaccactgggcttgaaacgccatgtttcccacctgacctgggctg

SEQ ID NO: 27928 - DNA, 120 bp, Homo sapiens
caacgagtggggagcagggcaggacttgaacttgatccttgtggatgtgcaggtgggaaaaggttgtccagagtcctcatggggccactgtcagaacccaccagctgtgagggtccccgt

SEQ ID NO: 27929 - DNA, 120 bp, Homo sapiens
agccggaccctgagtcaggggaccccaactccaccctcacctgcccccatcggcccaggccagctaaggctggtgggcctgagcgtgggccagcctcccccctcagcccaccggcctgcc

SEQ ID NO: 27930 - DNA, 120 bp, Homo sapiens
ctccggcctggccagcatggtggcaggccctgcctgctcccctgggagcctgccgccagggctgatggcgctgacggagggagggaggccgccaagctgtcagtctagaggtgcccctcg

SEQ ID NO: 27931 - DNA, 120 bp, Homo sapiens
ggccggcgccggagccgggctgtcagggccttcacagagacgaggccagagaggcgctgcctgacagctcgcccaccgaattaggaccatttgcatgctaatttccagcactctaacggg

SEQ ID NO: 27932 - DNA, 120 bp, Homo sapiens
aggcgggctggggtgtggagagtgtgcagagagaggcaccgcggccttcccgcccgcgaaggaacaatgcttgactgatctagctgcgttaacgagcaaattatggtaattttgttatta

SEQ ID NO: 27933 - DNA, 120 bp, Homo sapiens
gcccggccagagcatccatcgagtcagcaaccctcagcttctgagctccccacaccttgccctcttgtcccccagtagtctctgcctagcccctgggcctagcaatcctgcagaacctcc

SEQ ID NO: 27934 - DNA, 120 bp, Homo sapiens
gggcgattctcctaggtcttgagaaattcattcagtcatttctgtgcccattctttgaactaggcccagcacccaggagggactcagggattgtctgatgaatgaataagtgagtcaagg

SEQ ID NO: 27935 - DNA, 120 bp, Homo sapiens
cagcgggagaggctggggagagagggagagaaggaagaaatggaggaagaccagaacatattccgcaaatgaagataatcaggagaccccacacggccagctcactggtggtataattaa

SEQ ID NO: 27936 - DNA, 120 bp, Homo sapiens
tcccgccctcaagttctatgtctctggtggctttaaaggtggagtcgtttctgctgctcatctgcagtgccgagtggcagtgcctcatcccactctcagtccgtgacctggagggtgggt

SEQ ID NO: 27937 - DNA, 120 bp, Homo sapiens
tgccgggttctcagcggcccccatcttggtccaaggctgggcctctcacctgcccctctctctcccctcagtggtggctggacctcgtggaagcccctctggctgtgtggctatggactc

SEQ ID NO: 27938 - DNA, 120 bp, Homo sapiens
tcacgcagagcactgtcggcatcatcgggctggggcgcataggtgaggctcccaccggcccgcttgcccgccccggctctcacagcgtggtttgcatccctggcaccacgtgtctgaagg

SEQ ID NO: 27939 - DNA, 120 bp, Homo sapiens
ttccggctccataaagaacagatgaagactacaaatgtgttggggccgttaggagtggttaccgtgagagagcccattcccccgacacctactccggcttgcgttctggaaggtatgtga

SEQ ID NO: 27940 - DNA, 120 bp, Homo sapiens
actcgggccggagggctcagtgggcagagttgatctgcagttctgcagatgaggcagagacacttttcttccagtggcccttatttggagaagcctggcagaagggcgtgagcctagcca

SEQ ID NO: 27941 - DNA, 120 bp, Homo sapiens
gtgcgggtgagggtggagagtgtggagaacctgtctagccaacgaacagccctgcctctcactagagagttgcttggaggaacccaacagctttggggcacgttctgagcctgaaaatcc

SEQ ID NO: 27942 - DNA, 120 bp, Homo sapiens
tgccgaatagaacgcctacacggagttcactggaagggcacataaacacaaaagccgctgtgttactggggtgggatgatgagtgaagtctcttctctgcttgcatctgtacagttgttt

SEQ ID NO: 27943 - DNA, 120 bp, Homo sapiens
ttccgtaaagagtgttttcaaatggaggagagacagggaggaggttaacaaagatgaaggagggaaacagcagcacacacctcacaacggggtttccgtggtacaggatgtaaatgccag

SEQ ID NO: 27944 - DNA, 120 bp, Homo sapiens
ttccggatgatgcctttcccattgccaaggacgacaatgccagagcgaaggccatggtggatctggttacactgcaagtgaaaatgagacaccacagaagccagatcagacacgtcagcg

SEQ ID NO: 27945 - DNA, 120 bp, Homo sapiens
tgccgcccacacctccgcggcaggatgaacacagtggagaaaatgacgtcactgtaagagccctagcccgtgacaaagggaatgggtcacactgccgccctgcccttcctgcaccagtac

SEQ ID NO: 27946 - DNA, 120 bp, Homo sapiens
cttcgctgcccagcctcttaggagggctcttggtcttcacctgcaaggcaggctactgaaagtttcagagcctctaatgagtcccctaaacacataatcatttggccaggccataacttc

SEQ ID NO: 27947 - DNA, 120 bp, Homo sapiens
cagcggaagatgcagacactggggggccaagctgtcccatggggcataaggtcttagaaggtgtatgagctacagaatgccaagagatatcttttttttttttttttggtagagacaggg

SEQ ID NO: 27948 - DNA, 120 bp, Homo sapiens
aagcggagctcctggtcctgctgcctttcacccgagagaacgaggggacacagtatgtctgcttttgtttcccatctgctctatttaatctcttctagagctgcagcgatgtgctccagg

SEQ ID NO: 27949 - DNA, 120 bp, Homo sapiens
gagcgctttgctgtagaaatgaaatgtagctctgcactccgactcgcggctctgcacatccaggaacggatctacgcctgtgcccagccacagaagatctctttaaagtatatagagtga

SEQ ID NO: 27950 - DNA, 120 bp, Homo sapiens
tcccgtggatatgaaccagttcctattgcattatgtctccactagagcagtttcaagtcctacgattccagcaccttctgattcttagcttagaattgttctggacagcatcactcaggt

SEQ ID NO: 27951 - DNA, 120 bp, Homo sapiens
taacgagagcaaaaccgtctcaaacaaacaaaacttccttactactgaactgtttctctgctgaatcatgtatctggaagacacatgcttttctcagtccagtaaatctggttcagtatt

SEQ ID NO: 27952 - DNA, 120 bp, Homo sapiens
gatcgatgcggaaggcgagtgccaggagggagagatcctggccacaggcagtacggcatggtgctcggtgagtgcgtgaattgcctggccataggccttgaatgatggaatgtctcaaga

SEQ ID NO: 27953 - DNA, 120 bp, Homo sapiens
cagcgccctggggttgacccaggcagggctggagaggggggtgggccttggggtgcctgaggatggtgctgtacgcagcccaggctcagggccacccagacctgtatctgagtccctgcc

SEQ ID NO: 27954 - DNA, 120 bp, Homo sapiens
aggcgcggatcggaggaaggccctggggaccctctcccacccaggggaccagtggcccaatcctcgggagggactgagtaaagaatggaagaaccaggggactcgttagaactgttgctg

SEQ ID NO: 27955 - DNA, 120 bp, Homo sapiens
acccggttccactcccaaggctggtcgtactcatcggcgggcctgtcgtcatcctggggcagcttgctctcccgcagtcgggggctgactgtgctctccgagtctgagtcaacactttgg

SEQ ID NO: 27956 - DNA, 120 bp, Homo sapiens
gttcgtaaggggtgtcatataactggatacctttatgctgggaccggacactttcctgcctctgaaattctgcaggcaaaaaggaaggaagcagagatgaaatggatactgcacttcctc

SEQ ID NO: 27957 - DNA, 120 bp, Homo sapiens
cagcggggaggtgagaacgacagagagacagacccctgtctgggttttacccaccccaccaacccccagtgccgcgtctctgctcttcctgggccaggcttgctcacaaggctcacatgc

SEQ ID NO: 27958 - DNA, 120 bp, Homo sapiens
gctcgcaggcctaatgacagccctgcctccatccactcatgaatctcaggcttaagaggcagagcccagatgtgaacatgatgctccaggtgtgtcctgatgcccacccagaacacgcag

SEQ ID NO: 27959 - DNA, 120 bp, Homo sapiens
ccccgcaaagcctgagtgaccccttccctttatttctacctcccccagaccatcttttaaatagactgaatttatttagggatttgagagggtgtccagcttcacttctgaataaagaaa

SEQ ID NO: 27960 - DNA, 120 bp, Homo sapiens
agacgaggtcccagacaggaggtgttcattttggctgctgctcagtcctgggaggccagtagtggctggaaggatggatgctaggatgctaaaatcaggcacttcccagtcaaacaggga

SEQ ID NO: 27961 - DNA, 120 bp, Homo sapiens
aagcggggaatgtggggaaggtttaccatggaggttggtttcaggaacctcactgttcccagcagacacaacatgtgcctaaattaccatcatgcttggcggcaaagggggctcagtgta

SEQ ID NO: 27962 - DNA, 120 bp, Homo sapiens
ccccgcggctccccgtcccacgagggcagggttctacacccacacatgacagcagtcataagccacatcccagtggacagccctcctgaggggagggccaaggtgggctccacctcccag

SEQ ID NO: 27963 - DNA, 120 bp, Homo sapiens
gctcgttgcagtgcccagaacagcagggcttccatggattctccacgaagaccctccagagcttcaccctgaaggggaggacaggagcatggggccgggctgcccctcctctatcttaca

SEQ ID NO: 27964 - DNA, 120 bp, Homo sapiens
ctccgtaaggtaaaggacacagcacagaaatggaagcaaatcctagaagaggtcaaggaagggaggatgctgtcgcccaccggctggttcccaattgtgtggggtggtgaggctgttgct

SEQ ID NO: 27965 - DNA, 120 bp, Homo sapiens
gcccgggggatctatctcaggcccatgtgcttccctcagcccagggtccatccggcccattgactgcctgccctgctcctgcctgggctttggaacacaactcccaggttcctggaggtg

SEQ ID NO: 27966 - DNA, 120 bp, Homo sapiens
ttgcggaagcctctgctccaggtttcttactggaaaatggaaacaacccaggcgctccctccctgggccttagggaggcttaggagagatgctgtgaagggcatgagagcacagggcttc

SEQ ID NO: 27967 - DNA, 120 bp, Homo sapiens
gatcgggagcctgaagcatgcagaggcttctggggaaggtgaacctgagctgctgggggctgcgtgggactcggaagggaagggccgcggtggagctgagtgaataaagatctgctgagg

SEQ ID NO: 27968 - DNA, 120 bp, Homo sapiens
gggcgccccccagcccaccctcccagggctgtgctggcaaaggtggggggaccaggccagaggtgttctgaactgggcagcaagaggctagagctgaaggcaggcatgatgaaggccatt

SEQ ID NO: 27969 - DNA, 120 bp, Homo sapiens
ccccgacctggtgaggagttgccagagagggtagcttcacggagggctgtgtggctgggggcacgggcacatgagtgcatgtgccagcgtccacgcagagactcgaggcttagcagatgg

SEQ ID NO: 27970 - DNA, 120 bp, Homo sapiens
acacggccacaggccagcaagtgagagatcagctgaggtgccagggacaggatacacactgccccattggccagggcagaggtgagccggcccagcaggcatgagacccagttctgggag

SEQ ID NO: 27971 - DNA, 120 bp, Homo sapiens
tctcggagccttagggagagtcctggtatcatatataaaaggtaccctttaaacacagactgctgtcatctctgtaagtttccagaaagccagcctgagccctacttagaggagagtact

SEQ ID NO: 27972 - DNA, 120 bp, Homo sapiens
tcacggaatctcctccttcaggcttctgaaaggcaggaactgtggccggctgtctccttggccactccctgcatactactcctctccccagaccagaaacacaggccaggacttctcatg

SEQ ID NO: 27973 - DNA, 120 bp, Homo sapiens
cctcggaaccatagaacctgtctccctgcctcttgctaggcgctgcaagattccatcccacactcccaggcgggcctgttttcctaaatgacttcctaatcgtgccacacccctgcagtg

SEQ ID NO: 27974 - DNA, 120 bp, Homo sapiens
ttccgcaaggtttccacaccctgcccagcacgcagggagctgggcgggtacaggatgcaggagctttgctgcagattaatctgagtctccctgagcctatttcaggacaggtatctccat

SEQ ID NO: 27975 - DNA, 120 bp, Homo sapiens
gcacgtttctctcacagctgccaggaaagacaaggagttagggatgtgttccgaggggcctgagccctcgctgacaaacgctcagcaggactgcaatctgtttgttgggccctcacatct

SEQ ID NO: 27976 - DNA, 120 bp, Homo sapiens
gcacggggaaaaccaatggcaaccctcagggcccgtgctcctctactggggccaaggacagaggaacacacctgccagccactgggccacagctgtcccccttatccccagaagacagca

SEQ ID NO: 27977 - DNA, 120 bp, Homo sapiens
acccggagccacagcatctagtaaatgagtttcggggaatcatgggtaggctactgccaccttggtccctcactcaactgttaactccatgagaacaactttgttttgttcatgcataga

SEQ ID NO: 27978 - DNA, 120 bp, Homo sapiens
acccgggagcatagaacggtgccagcacatggcaggtgctcacaaatagccacccagtcaatgaatgaatgcactgcatttttcccctgacccaggccctgtgacttcaagcaagcaagt

SEQ ID NO: 27979 - DNA, 120 bp, Homo sapiens
aatcggtgaatatttactgggcccagaagagaaatgaagatgggtgaggaccagtcccttccttcacggagctctcggcccagagagggaaggaaaagaggcagaatcagctatccctat

SEQ ID NO: 27980 - DNA, 120 bp, Homo sapiens
gtccgccggctgcggagacagaactggtcagaacgcccacccaactcccaccctgacgccaaggcagcctccctgcccacctagcaagtggctaaactcagactttccagatctggcatt

SEQ ID NO: 27981 - DNA, 120 bp, Homo sapiens
cagcgggggtgctatcaatgactgtctgctctccttggcctattccaggcctgctgcaactttcctgaaaacctgaacgtgctcagtgtcaggggtcaaagacaagaggggagccggggt

SEQ ID NO: 27982 - DNA, 120 bp, Homo sapiens
gcccgctggtcgccatggaaacccaggcttcccacttctctccccgcccacagctctgcgggtgagcaccactgggctgggtgtgtgagccctgctgtttcttaagaataggaaagtcat

SEQ ID NO: 27983 - DNA, 120 bp, Homo sapiens
gtccggtaggtaagtcattctggcaaatgacagaccagccagggaactctgcacagtctacgaccaagcctgctacctgccaggcaggaggattgacaacagatttcacaacatttcaaa

SEQ ID NO: 27984 - DNA, 120 bp, Homo sapiens
cctcgggcaggaagcctatatggggccagaagcactgctcctcaaggacagttccatcctgccatgatccagctgggggagagctgtgaccaccaggacaggctgaagcctgtggtgtct

SEQ ID NO: 27985 - DNA, 120 bp, Homo sapiens
ccacggcactacagagctggggctgggaatggcctggactcaggacccagacagaaggccctttgctttcccagctcaggggaacagtgctgcctggaaccaggggtcagggctgacggc

SEQ ID NO: 27986 - DNA, 120 bp, Homo sapiens
tgccggtctccgggagagttcattccagaatgagagaacaggagccctaggaagggcctctagagctggctgtccagaatggtgtcctgtctgtcctgagagcagagacagcagcatgca

SEQ ID NO: 27987 - DNA, 120 bp, Homo sapiens
gaccgcagaggcgggtaaccaaaggatttatgaagtcactccagacccatgacctctaagaatcctcttgacacccagtgaaggaggcagaatctgattttagagatgagggaactgaag

SEQ ID NO: 27988 - DNA, 120 bp, Homo sapiens
gatcgagtggcccacactgtccctattgccccatggtcaccttcatgtgccctgctgtctgtgggacagcacaggcctgtgtcacacaccacactgcatttttagacaggtgaataatga

SEQ ID NO: 27989 - DNA, 120 bp, Homo sapiens
gcacgtcgcatctgcacatccgccaccctgctaaggcaaaggagagagtgtcttgctggctgaagggtctctgtgctgctctcctctccccggaaagtgagggggcagcaccccacaagg

SEQ ID NO: 27990 - DNA, 120 bp, Homo sapiens
aaccgcatatgaatgcacttgagaatgttctcaatgctcccagtcagaccattttctcactgattcacctttaagactatacattaatttccttaacagtttgggggccactaatctctt

SEQ ID NO: 27991 - DNA, 120 bp, Homo sapiens
tgccgggagccctggccctctccccagctctgagggtcaggagggctccttgaaggtgagcaaatagcatttggggacgtgaggcggcagcagcagcacaagtgcctctgtccccgctcc

SEQ ID NO: 27992 - DNA, 120 bp, Homo sapiens
ctccgaggcctgaagtcccagtcctcctttgggacccccccataacacaggccctagcgggcctgatgtccacaggaaggaggctctgttgccatgccaacaaagatgacattacagaaa

SEQ ID NO: 27993 - DNA, 120 bp, Homo sapiens
ggccgctcagagaagcggtagtggacagatgttctgtgcagacccagaagccatacagacacaagccaggtgattcaggaaagacatcgacagccagtaaaggaacacgctgcctgggaa

SEQ ID NO: 27994 - DNA, 120 bp, Homo sapiens
aaacggcacaaggaactgctgaggtctcactcttgggtaacgcagcccaagagattttctgacacccgatccacaagccgaacaatcacattgcaaaatgctttcaatgtccaggaacaa

SEQ ID NO: 27995 - DNA, 120 bp, Homo sapiens
aatcggccatcatgtgcctgtcatctggtcctgagtgcttctgagaagggcagtttggcctttattctctgcaaacctttctctttcagaaaccactacatttttctagacttcttccca

SEQ ID NO: 27996 - DNA, 120 bp, Homo sapiens
gtacgttggctaggcattttcttaggtgaagagagatgctggtttagttctagacaaataactataattagtcagagtggtttaactgttcattgactagtctatactctgcagcaggaa

SEQ ID NO: 27997 - DNA, 120 bp, Homo sapiens
ttgcgtgcacacacacacacacatgagcgcgcgtaatacaaggcagtatacaaatgtcacatgagggatagaaaccaggcaaacataagcaactggagaagggagacatctctctttgag

SEQ ID NO: 27998 - DNA, 120 bp, Homo sapiens
tggcgagggtttagacacacagttaagtttgtggggattttcaggaggagaagagtcacagacaaagatagaacccaggatgcatagcctggtatcagagtgttggtagagaaatccaag

SEQ ID NO: 27999 - DNA, 120 bp, Homo sapiens
ggacgggcactaagtctctgatgaaaagaattcagcagaagctgtgtgattgcaaaggtcagtcagttcagtatgtaattggaatatgggcagcaggactgtgagatgaattgaccacgc

SEQ ID NO: 28000 - DNA, 120 bp, Homo sapiens
acacgtgcattttcgaatcttggattgaaagagagacaaaactcttccgataaaggaatcacaattataaagtcatctgaaaaggaaggcaggaagaaaggaaaggaggtaggaaaactg

SEQ ID NO: 28001 - DNA, 120 bp, Homo sapiens
cctcggggcagggatgcacatatctgtccccagaacccacagctgaaagagaagtcactaaggaagaaagcaagatgaattacttctcttgctggttgtttcccataaactaaaggaaca

SEQ ID NO: 28002 - DNA, 120 bp, Homo sapiens
ctgcggagggtgacacagagtagtttccaaatcaaaggagcaatggttctcaactgcgttccacctaaactctgagatatgatagtcccttaggaacagctttgtcagtgatgcccaatc

SEQ ID NO: 28003 - DNA, 120 bp, Homo sapiens
tctcgcttagaaaagcaagtgtgaataatctttgaatgtgacaggctgaggttcaaattccaggtattttactctgtgtgccccctctgggtctcgaagtcctattaaggcatgaggtaa

SEQ ID NO: 28004 - DNA, 120 bp, Homo sapiens
ggacgccaagtcattagagcttgcttgaaaagaaaaaaaaaaaaaaaggtacagtgaaaaagagcgcaaaccccaagagtggcaatcttggaaatatcaaaagaaatggctattcttcta

SEQ ID NO: 28005 - DNA, 120 bp, Homo sapiens
ccccggagccacaatgctctcagctgtggttctctgcattcacagcttcccagcccctccccttcccacagccccactcaaggtcccaatttaactcctgcattttaatccctttaagca

SEQ ID NO: 28006 - DNA, 120 bp, Homo sapiens
ttacgtctttggcaaggggccagaggtggttctgtcagaattaatttttttttcaagtatgaagtgtagagtgttgagcaagaaatccagttttcttagttttgaggtgggagatcaggg

SEQ ID NO: 28007 - DNA, 120 bp, Homo sapiens
gtacggctggtttggggtgactggcaggctgaaggctccatcagtcagtctgtaggaagggctgggaaggggcctttaaatcatatcctaaagaaggagaaggtcagcaccatgagtttt

SEQ ID NO: 28008 - DNA, 120 bp, Homo sapiens
agccggctgttgtcaccaacaatggaaggcaatatgatgggccttgtcaagagcacaggtaagggccaagagggcagagcaggcaaacatcaccaatagggtccggcacagaagagaaaa

SEQ ID NO: 28009 - DNA, 120 bp, Homo sapiens
cttcggaacagtgtgtggctcttaactctacctgtgaaaccagacactctccatcccctagtgccaagttcgactaaatagacataaagcatttatgcatatgattatacagatctgtac

SEQ ID NO: 28010 - DNA, 120 bp, Homo sapiens
gtacgaagactgtaggagatattaagtaatctcccaacgccccttagcacgtcaacatttgttttcctgattgttcctttcccttaggaaaattaacacatagtctctctctggtctctc

SEQ ID NO: 28011 - DNA, 120 bp, Homo sapiens
ccacgcctggtcctattcctatttttcagtgaaaattattcacagagaaggaatccaatgggtccatcttatcctatgtgggaaagagctttttgctggccagcacatggagtgactgtc

SEQ ID NO: 28012 - DNA, 120 bp, Homo sapiens
agacgagatttcagacattttttctctatgctttatgctaagctgtcagttttccaaactagggaatatttctctcagctttaaagcacaggaggctgctttttaagtcattaaaatatt

SEQ ID NO: 28013 - DNA, 120 bp, Homo sapiens
ttccgaatgcatccttcctcctggaacccaaggttcctggccaacctggtcaactcatgtgagcccatttggtagccctggtagcgcatatcaagcattttactgaaagatgtctcaggc

SEQ ID NO: 28014 - DNA, 120 bp, Homo sapiens
tctcgtcaccttcagtggtcatccctttcaactgaacctaactttacttcttcccagctcactaataggtggtgttatgatttaatatttgcccccgtgttgaaacttaatccccagtgt

SEQ ID NO: 28015 - DNA, 120 bp, Homo sapiens
ggccgttaagctattgcatctcagcttaagaaaatatccttctatgctgttctttgagacactggaaatctacaatatttctcctttgccagggtagtccctgtcggcctctaccaacag

SEQ ID NO: 28016 - DNA, 120 bp, Homo sapiens
gggcgcgggggggtaagtgaaggaaagagaaagggcgggctggtcctgttctcttgtcagcgtccctccactaaaggttcttcatcttggcagcagcagtggattccagtttgtcatttt

SEQ ID NO: 28017 - DNA, 120 bp, Homo sapiens
gatcgggccgcaaaaggaagccaagagatctttgccagccaggcagggtaaagcggtggagaaaccattatgattgtggtgctgccattcctgctgttaggttaaggacaggtcagcatt

SEQ ID NO: 28018 - DNA, 120 bp, Homo sapiens
taacgcaaggctcttcagtggcaatacctgcagccaggccttccgttggatcatcttgacccccgggcgtacatcgtacaaccttcacacccccttcacctctcaaggaaacggtgtttg

SEQ ID NO: 28019 - DNA, 120 bp, Homo sapiens
gggcgtttttccagtcttgcctggcttgtccttgattacggcagtagagggtagaatctgccccagaactgtttggccattagctattcctaggttacacaatgagcttcatattcagtg

SEQ ID NO: 28020 - DNA, 120 bp, Homo sapiens
tgtcgcatatacttactgcaatggcagaggctgccagctgtgtagtaaattagactacatttcccagcctcccttgcacctacatttggccatgtacctgggttttggccaatgggatgt

SEQ ID NO: 28021 - DNA, 120 bp, Homo sapiens
acccgctgtcagtcctctcatgaggaatcctcattttctttgctctttatctggctaaatggagaaaacactgtggacccccacgatactggaacctaaggtggatggagcctgggtccc

SEQ ID NO: 28022 - DNA, 120 bp, Homo sapiens
acacgtgtaaagccctcccaactagttggaaatatattttgattgtgctaagccactgtgatttggagggactgtaatagcaaccagcctatcgtgactaatacatttccccaactagac

SEQ ID NO: 28023 - DNA, 120 bp, Homo sapiens
aatcggatgcatctctgttttctcaacagtgagctgcactgcagtacaattctatcataaattagccaccataatttccctccagaagccattatatacaagcaattctacaatcattac

SEQ ID NO: 28024 - DNA, 120 bp, Homo sapiens
tggcgagctgcacatctccaacttgttggggcagaacatcctttcttccatctgcctgccaccagaagccacagagaactgatattgcctctaccataaattaagagtcaaaaggaaaat

SEQ ID NO: 28025 - DNA, 120 bp, Homo sapiens
ttccgaagttctgaattcttgaaaagtgatagtgacacagttgtttgttttgatttactatctcaatagagtaagcagttggagtgatttctcccttattcagattatacagctctgttc

SEQ ID NO: 28026 - DNA, 120 bp, Homo sapiens
acacgatcggggtgacccaagctgtaagaagttagagtcctcaccagcagtgggtcaattcactaggctgctgggggaaatacttgctacagggagggacaactagagataattacaata

SEQ ID NO: 28027 - DNA, 120 bp, Homo sapiens
tgccgcaagaacctgaatacttcccacctcaatttacgatgcagtttggagctttcagaaacaaacggcacctgtcccattgtcacacctttataacaacttgtatcccagtacaccttc

SEQ ID NO: 28028 - DNA, 120 bp, Homo sapiens
tttcgacaagcactgctgaatcacttgagatgggccaaaaggtcagggccctgaaactttgtcagcgtgattatctaaagccactggaaagcactccatgtgtttcagagaacaggtaga

SEQ ID NO: 28029 - DNA, 120 bp, Homo sapiens
atacgtgacgcctcctaattagaatcaatgatttttttttattgtcgctcctgataagcttgtttgcctagcttcattttcctaaaacactttaaacgtttctaagaagggcgaatgccg

SEQ ID NO: 28030 - DNA, 120 bp, Homo sapiens
tcacggcttagaaagatgacgagcagcggggaattgtgccccaagaacatgtaatttggacaaggtgggaaaaactgagtaatccacttgagatagggagcattttcccagcagtggtga

SEQ ID NO: 28031 - DNA, 120 bp, Homo sapiens
ggtcgccactcatggaaagctccaagatcaagattgaaatgtgttttcttttcaaggagatatagaaaactgaggtaagtcagagaagaagcagggggcacttctagttccttgtggcag

SEQ ID NO: 28032 - DNA, 120 bp, Homo sapiens
actcggtgtttaagtgtcctcctggacacacaggaagaccactctttttccaactgcccttgcagttagttgaggtcatgtgactgagtgctgccgaatgggataagagaagtcaagcct

SEQ ID NO: 28033 - DNA, 120 bp, Homo sapiens
agccgctgagatttgggttaaattattttaatgcattgcaatagtattcacttcttatcatttgcctctttaaatatcatgttactgcccaagagtatctttcatctcattcctaagcac

SEQ ID NO: 28034 - DNA, 120 bp, Homo sapiens
aatcgttgagccacgtgctatggttaggactcaaaggtgaataattaatgatctttgaatatgtagtaggaagaagagagtctgaatctcaaatcccagaaattacttagctctgagggt

SEQ ID NO: 28035 - DNA, 120 bp, Homo sapiens
tctcgttaaaatgtagatacccttgggagagccagcacactgaatcttttctcagctgttcaccattatatatatgaatttctctttcccacagttctttcccaaaagcaagcctcaatt

SEQ ID NO: 28036 - DNA, 120 bp, Homo sapiens
attcgatggagagcaaaaataaggagcaaggcatggggcctgtgaagcagcatggaaactctgagggaagaaggtagtaggggtcaccacaaatgagatgaaagacagatttctatttca

SEQ ID NO: 28037 - DNA, 120 bp, Homo sapiens
ttccgcttcattacaactgttctcccaaccccaaatccattctcttggctaataaatcaccatttgcttttctgggcaattttcatactagccactgggacgagggatgtggaaagagag

SEQ ID NO: 28038 - DNA, 120 bp, Homo sapiens
ctccggtcaacagacaaatgactctacaaccttgggtggctcaaaccccaggggagggctcgtgctgccagagaaagaagctcaagtaacaaaaggcaagtcttcctttcatgctgcctt

SEQ ID NO: 28039 - DNA, 120 bp, Homo sapiens
ccccggtctagagagacatggggttctatggtgttcaggactgagtcactgggaatgggtgccattttgatgggaattgatttaatttgttctcctctaaacagctcaagcatttcactc

SEQ ID NO: 28040 - DNA, 120 bp, Homo sapiens
ttacgtgtttccctagctgatcacttggcataagataaatgtgtgtttcatatgatagctgccaagagatatgttttaatgaggaattaaactataaactttaagagataatggagaaga

SEQ ID NO: 28041 - DNA, 120 bp, Homo sapiens
caccgtgtttcagtcactgaggccccacaatctcaaattaggtattcatgtcactcacaccacaagacagtaggtattaaagcattcctcccaattaagatgataagatggcacatactt

SEQ ID NO: 28042 - DNA, 120 bp, Homo sapiens
gaacggaaaacacttgtggggtgtgtttataccataaagaaaggggaaaaaaaagttaacttgagacctggtatctgaaggaggtatattcaggttggctgcattcattgccctctgtaa

SEQ ID NO: 28043 - DNA, 120 bp, Homo sapiens
agtcgctgaaccatcatgggactgctggtgaccactagattgttgcagctgccttttccaatggacttgcactgaggcccaaagccaagagcccctaaaaacaaatgaatcaggttagct

SEQ ID NO: 28044 - DNA, 120 bp, Homo sapiens
gcacgcttatatcaggacccatctttagagacagtcctcagatcatttttttttttagtattggtgatagcaaaaggctttctccaattccaatgacaaagccataacgctataatagaa

SEQ ID NO: 28045 - DNA, 120 bp, Homo sapiens
ctacgagaatgtatttttatgacacctgtgtgcttaaatttaggctctgatatgcctagtttcttccttgtacactttccaagatcatttgctccaaaagaaatttctctgattttcttt

SEQ ID NO: 28046 - DNA, 120 bp, Homo sapiens
tcacgtacctccattctattattggaatttcaataatggaatttcaatttggaatttcttaacaaatttcttaccattattcttcctgaaaaatgatcaaaatcatcagcaaaagcatct

SEQ ID NO: 28047 - DNA, 120 bp, Homo sapiens
ctgcggggcttccatatgcagtgtctgcttgtgtacctgtgtgggtatagattgtttatatcttgcccttggctgggggcctcagacagctgtgcagagtacttggcatacatttccagg

SEQ ID NO: 28048 - DNA, 120 bp, Homo sapiens
cagcgctggccagcgcgaacaatacttgggcaggtcattaacttgcctgggtcagagcaggtgggtgaactcacccacccacctttctggaagcaaagtttcacttgctgagttcatacc

SEQ ID NO: 28049 - DNA, 120 bp, Homo sapiens
tgtcggctgtttcattttgcacacatctctataatagctacgtatgtattatgttgaaaataagcaaacacattagcaaaccaggattttttgaagtgaggtggttaccactgtattatg

SEQ ID NO: 28050 - DNA, 120 bp, Homo sapiens
catcggtttccttgctacactcacaggagtttgatttcagcctgaattcaccactatggttctttcagacatactccactccaggcagcctgaaatccctggtcaccacatccccacgtc

SEQ ID NO: 28051 - DNA, 120 bp, Homo sapiens
tcacgtcttcctctaaacacaaaatatgcaaaggtctatatgctggttttaatttcccggatgttatgagtccacatttaactgcctccttcaaatgacagtgggtcatttagtgtcctt

SEQ ID NO: 28052 - DNA, 120 bp, Homo sapiens
gcacggagacgacagggataagaggtaggattaactcgactgtgaaagggtcagactttctgagttcctgctcccctcacttctccccacagctgccttcatcttcaccaaaactgattt

SEQ ID NO: 28053 - DNA, 120 bp, Homo sapiens
gggcgttatgtatgatctaaaattagatggcaaagaacatcccatgagcatgcaacaaacaatattggaaagcaaaagatattgtataaagtgagaggcttactgaagaatgaaaatgaa

SEQ ID NO: 28054 - DNA, 120 bp, Homo sapiens
ctacgtgccttacacatagtaagatcttcacagacattattgcctttaatctccacagcccatactatgtgtgacataagcataatcgtactcattgtgcctgcatcgcagatgagaaaa

SEQ ID NO: 28055 - DNA, 120 bp, Homo sapiens
cttcgctttctttatctggctaaaatacttccacttcagctgccccaaaaatgctatatgtccctggaaccacgttgggggtagcggtgtgctttaaacagcacagttagtgtgtgtgac

SEQ ID NO: 28056 - DNA, 120 bp, Homo sapiens
taacgtcacattaacctctttgcctgccaagagcaggcctaaccaggcctgcagttttcatttgagttcagtcccctgggagaaaagcttttatttgacaaagcagattcttgccacaca

SEQ ID NO: 28057 - DNA, 120 bp, Homo sapiens
atacgacaacaagtagacattctccccaagttaaatgacaaaggagatctgataattaagcggcttgggcatgggggatggagaggactcctgttttaaatctcgagactgcaatggcca

SEQ ID NO: 28058 - DNA, 120 bp, Homo sapiens
tgacgtcaatggcaaggggactgagcaaggatcatgcctctgaacagcttccagagagtggtcttaagaatataaagtcatgctaagttgctcaacatggtgtaacatgagtgtctgaaa

SEQ ID NO: 28059 - DNA, 120 bp, Homo sapiens
gcccgtttgggagaggggattttacaatttaaccatgtcctgtgctctctgtaaagtgtgactgaaattgtctgttagggaatagtatgttccgcacttgggtagagaataatttgaaaa

SEQ ID NO: 28060 - DNA, 120 bp, Homo sapiens
tagcgtttaaagagtctaactctgtgtgacaaagataggtgtccagttttgcccaaagccttatgccaccctctaaatgcctggagatggaactcaatgggtggctggctcttggtgaca

SEQ ID NO: 28061 - DNA, 120 bp, Homo sapiens
cagcgggatgggggcccaagaggctaaatcggaggttctcaaatgttctcagtccatgtcactctggcgtctcaggtatttttttcattatacttctaggcagagaggaatacctaacag

SEQ ID NO: 28062 - DNA, 120 bp, Homo sapiens
ttacgtcctaacaacttagtaactatttgaaaagaaaaagatataaattgatgagaaggtggtatttttatttcattcttatatagccaaaattttcaatgagacctatgtgctgctggg

SEQ ID NO: 28063 - DNA, 120 bp, Homo sapiens
caccgaaaggaatgtagtgatctagtgttaaaactatgaactaccttaagcccgtagttcacatggtagctgacagatgttgattgtttcagtgtttgcctcaaaaaaaaaaaaaaaaaa

SEQ ID NO: 28064 - DNA, 120 bp, Homo sapiens
tggcgcccgttccccagcattagccctgaccctagctcagcagtaccaggacatgttcttccaggtatggggttctagaatgcaggcctcttagagcagatatctcgtattacctcttgg

SEQ ID NO: 28065 - DNA, 120 bp, Homo sapiens
ctccggtttccacccataccccaaagtgtgcatgctaggtgaatcagcatgtctaaatggtcccagtgtgagtaagcgtaggcatgtgtgtgagtgtgccctgagatgggacggcagcct

SEQ ID NO: 28066 - DNA, 120 bp, Homo sapiens
cttcgaccatctgcaaccctgaactggaataagctggtacataattatcttagttatttttattaatcttttaaaaatgtatgcatagctcaaatttatttccgtgtttaatatgagaag

SEQ ID NO: 28067 - DNA, 120 bp, Homo sapiens
tttcgactgcaaggttaagctcaaaatatattcttgcatactttaagtaccggtctttacatcagaaatgaggtggagatcaagttctcttgtacttagcctgtgacccaagctgccatc

SEQ ID NO: 28068 - DNA, 120 bp, Homo sapiens
ttccgatttaatcactgtgggatgcagcctccacacacatttcccgagacattcttcttgcagccacacttgagaaccactgctttaaaggcatttgtaattggtatgtctttaggaagc

SEQ ID NO: 28069 - DNA, 120 bp, Homo sapiens
tcccggagtgagctgctgaggacacaacagtatttacatggtattcctgccaaaaatgcacaacctgaatctaatcataaggaaatgatcaagcactcaattggaggggcattctgtaaa

SEQ ID NO: 28070 - DNA, 120 bp, Homo sapiens
gggcgcagcagaagttgctgtttgaatgaatcatgaaaagaagcatttatctctactattcagtacatctaactaaacatattaagaaataagtaactgaaaccactttctctgcatgac

SEQ ID NO: 28071 - DNA, 120 bp, Homo sapiens
catcgtcattctttcatttactcagtttcaaaaattttgatattaggtctgtttctggtctttttgggacccttcacatctgttcatttactcaccttcgttaactcttctttgaaaatg

SEQ ID NO: 28072 - DNA, 120 bp, Homo sapiens
tcacgggattgttttgagaaccatatgagataaaacaggtgaaaagttctttgtcaactataagagacaatacacattagttacattatggtagttattattatgattcgtattcttcct

SEQ ID NO: 28073 - DNA, 120 bp, Homo sapiens
aagcgggaagcctgccaatgactcagcaagcaccattttctgtaaatcacttgatttgctttgtaccattttctgtaagtcatttcatttgttttggctctgagtgacttgtttcaagtt

SEQ ID NO: 28074 - DNA, 120 bp, Homo sapiens
ttacgtgctaaatagcagttaacatttactgagaacttactgtgtgctaggtaatatgtcaaatagttccatttaatcctcaacaacggcctggtgctgtaggtactatttttgtccaca

SEQ ID NO: 28075 - DNA, 120 bp, Homo sapiens
ggccggaaaggaccttcagacccactgaataaaggccagtcagtgccaccacatcacacaactccagggggcgccatccactttgcagttaatggggcttgagcccctggaattttgcac

SEQ ID NO: 28076 - DNA, 120 bp, Homo sapiens
cctcgaggtgcatctgaaggttgcgatcagtgaccggtgtagcagaagcccagtggaatcaagtttctcagttgagctgtccaagttaattctgctgaaattgcatcaagagcctgggcc

SEQ ID NO: 28077 - DNA, 120 bp, Homo sapiens
tctcgggaaaaaggaaagtaggaaggcaaaagcctccacatgcacgtgactcatgtcgaatgcatgttcctgtgttgttcactctcccactcctcactgttattagggctggcagagccc

SEQ ID NO: 28078 - DNA, 120 bp, Homo sapiens
tcacgtggcccactgatggaaaagccctggatgctgctaccccggggatccagtgccagtaagtcatgtcctgttagaatctgccccaagacccgagactgactaaccctttgcagcttc

SEQ ID NO: 28079 - DNA, 120 bp, Homo sapiens
agtcgtcctgaagccagagagcctgggctggaatcttgctctgcctctctatagcttgtgaccttgggtgaatttcttaggctttctgtgcctcagtttttccctgcgtaaaacaggtat

SEQ ID NO: 28080 - DNA, 120 bp, Homo sapiens
ttgcgaggactgaaagcattatggcacatgcagcatttagatcagtgcccggcacgtgacaagcatccaataaatgttcactgttattactattagaagaggagtgtgactcagctccca

SEQ ID NO: 28081 - DNA, 120 bp, Homo sapiens
tatcgttttaacacttagagaaatagcctagacctttttcaatccaccaatatactgccgacttgggcagctgtgtgagatcgaagaattttctacctctgtggcccttcatttccttga

SEQ ID NO: 28082 - DNA, 120 bp, Homo sapiens
catcggctgattcagcgcttgctcaggacaaatcctggctgactgggacaggaggcatttaagtaaccatagtgcactgtagggaaataggcatggctgagtcagtccctcttatgggct

SEQ ID NO: 28083 - DNA, 120 bp, Homo sapiens
ccccgaaggcccactccacttcttccactggatatgacctcagtcgtcctaagccccaggctcctcctccccataagtgctaagcctttcctttgaacttctgtatgtggcctgtgttgc

SEQ ID NO: 28084 - DNA, 120 bp, Homo sapiens
actcgaaggttggagtcttgttcacaaatcctggcccagtaacagcagttcagatggttttcgctgcctagacttgccaatggggacaccctaccacccctaacccccagcctgtgcccc

SEQ ID NO: 28085 - DNA, 120 bp, Homo sapiens
ccacgttacttctcttaggctttaaagtgggtccccatctcctacaaaatgaatttaaaatccttagcctggctccagttgccctgaagatctgaacttttgcttcaaagatagaggcca

SEQ ID NO: 28086 - DNA, 120 bp, Homo sapiens
aaacgcatccagaattgaactgtgtcctcccacctacttcgatgctcagctctgcctgtctgctcaccccttctctggccataattgcacctgggtttttgtcagcccccttctggtcca

SEQ ID NO: 28087 - DNA, 120 bp, Homo sapiens
gggcgatctgtgtgaacaagagtgtgaaagcaaaaaagcatgtaaacaaaaaagcatggagcatctttaagaaatagcaaggagtttgctgtgactggatctgctgggattggggggtga

SEQ ID NO: 28088 - DNA, 120 bp, Homo sapiens
gagcggcttcaagatccaagcgtcctgggagaagcagcaatccctcttcctgggcgcagagatgctggtttaacacagtcatgtgtcagagaaaactagtttttcctgcaggcccaaatc

SEQ ID NO: 28089 - DNA, 120 bp, Homo sapiens
gaccgaattcttaattgtaggtgatagaccaaaagggaaagatgactcaatgtaaataatcgttgctattgacaaaacagtgcaaaccacatttcctgttgatggtggagtcacccatga

SEQ ID NO: 28090 - DNA, 120 bp, Homo sapiens
tgacggaaaacatttttattgctttaataacacaattatattattttttaactcttccccttcaaatcctctagcacttaatatagtgcttgggatatatttggatattaataaatgcaa

SEQ ID NO: 28091 - DNA, 120 bp, Homo sapiens
ccccgcctgggccagaagcactccagtgggcacagctgcgcctcctggtgtctgctgtggctgccactaccccggtgacctaaggagttccgctctttgctcctccatcctaagacagga

SEQ ID NO: 28092 - DNA, 120 bp, Homo sapiens
ttccgctatcacacaggccatcctgtcctgacctggagtgacctcttcctgggatgcttgccattgtggaatatccacttcagagaaaacccccctcacggccacagggggatagccttt

SEQ ID NO: 28093 - DNA, 120 bp, Homo sapiens
cctcgtggaccccatcaggagccttccatagactccataccatagtacctgctgggttattgcaaccaccctgcttgtagaacctgggagtctgtccaggtcaggctgggccaagtccat

SEQ ID NO: 28094 - DNA, 120 bp, Homo sapiens
tgtcgcagctctggatttcctaaaaacgcctgctcaaacaagggcacacacagctcctcaagaaacagcaccagtttgcagctcagtggatgtcaagccaagcagatatcaagccaagaa

SEQ ID NO: 28095 - DNA, 120 bp, Homo sapiens
agacgtcaggagaaaatatttgcgttttgtttatcaatgactttcagtttccaccagacactggttgggtgactggatttacaattgaggatcttctccaaagataaatttaacactcta

SEQ ID NO: 28096 - DNA, 120 bp, Homo sapiens
gaccgtatgtaaatgattgagggtgactgtgtgccaatgaaacattcatttacaaaaacaggaggccagccaggagctgacccctgcccagctagactctgacactccagatgcaatcta

SEQ ID NO: 28097 - DNA, 120 bp, Homo sapiens
ccacgtgcctccccgagacaaggttcagttttattcagctaacatttgttaactccagctgcatgaaaacagactaacagaaaaccaggtataagagggtgaggccctaccactcacatg

SEQ ID NO: 28098 - DNA, 120 bp, Homo sapiens
cctcgttagcaagaattgcaagacttgaagacgcatatcactttgttgtacaacttgctattaaatgtaagctactgttcataaacataggtggctaagagcatttaatgtcaattttag

SEQ ID NO: 28099 - DNA, 120 bp, Homo sapiens
ctacgagggaggagtatgcattcttttcttgaaacattggtggtccattatacagtttagtttctatgaaaattgccattcaaggtggtttataaacttaaaactccaggcaggaagaca

SEQ ID NO: 28100 - DNA, 120 bp, Homo sapiens
aaacgaccacatagtgtataaggaagagctcccataatgaacatgccatttgcaagtaataaaatgaatagtggcaagagataaatatgccctgctttagtctttcctgagacagtgaag

SEQ ID NO: 28101 - DNA, 120 bp, Homo sapiens
attcgttcatttatttatttattcattctatctttaatgagccaggctctgctagacacacaaggtgtaaaattaagtcttatctcagcaagaaagagtacattacaatgctgtgtgata

SEQ ID NO: 28102 - DNA, 120 bp, Homo sapiens
gtgcgatgctggaaacgtgggcaagaggaatgggatggaaagggggagcacaagggtttactggcctcgtgtgccttgccaaggggactggacttgagcctgcaggcgagggaagcaatt

SEQ ID NO: 28103 - DNA, 120 bp, Homo sapiens
gagcgtaagcatgtcagttactcagtgaatcaattaagtgatggttgattacagagctttctatacttgggtgaagctcagcaggaaaaaagaaatctcaatacaaggaagtattacgca

SEQ ID NO: 28104 - DNA, 120 bp, Homo sapiens
ccccgtgaaaatggcagcaggaagtaaacctgtgactggccaagtttaaggtgatgtctctgttttgtatgcagcctttctggctcacagtaaggtgcatgtcacaatttacactgcttc

SEQ ID NO: 28105 - DNA, 120 bp, Homo sapiens
aatcgttgtatccccattgctggagctctacaatgcagtgtaacaaagccatgatttttttttctgtaggaaaattgaacaatctcttcactccatttacttcaagcctttccctcctat

SEQ ID NO: 28106 - DNA, 120 bp, Homo sapiens
tgccggcctccacgagggacagaacctcctctattacagggggcctttgcagatcagtcacagtggttgtttgtaaggttctcagtgttggcagagcctggtagtgggggacatttatgc

SEQ ID NO: 28107 - DNA, 120 bp, Homo sapiens
tgtcgtttattgtgaaagtgaaggaacattttgacataattgaatggtgatcgtgggagtcaggggtttaaatttctgcctcgcttttagttccaaaacctgatgggaggtaccgttgac

SEQ ID NO: 28108 - DNA, 120 bp, Homo sapiens
aagcgtgaagaagtgaagcctcccagcgatccagagatgaacatgacagaagagtccttcacagctgtcatgacaactgcaatttccaaggtaccattcttatttcctgttcctcttccc

SEQ ID NO: 28109 - DNA, 120 bp, Homo sapiens
cctcgtcattcacagaatcgcatttgcaaattcacctacttgctaaaatttatgtgtgaccccaaaatccatacttaaggggctttcatggtcatcatctcgcacacaaagagcggcaaa

SEQ ID NO: 28110 - DNA, 120 bp, Homo sapiens
acccgacaggcacgttcccagctaaggtgaaaaaggctgtgctctgctttcttgctttgattctcatgctggaaacaagtgtcccttttgcagtgtgtttagtgtcatattttttgcatt

SEQ ID NO: 28111 - DNA, 120 bp, Homo sapiens
ttccgcttccagtgcagggcttcttatcctgtgattcctggctatctcaggggtcttaaacctcctgaaatggtaggcagcatttcctacatgtgcatatatgcatttttccaggaaaag

SEQ ID NO: 28112 - DNA, 120 bp, Homo sapiens
cagcggttccccatctacagcaaaaagaaaggctacctgggttgtcagacaaggcggcaggtaagaaaagagggcctgttctctccgtcacacccacactcccttattagagcaaaagga

SEQ ID NO: 28113 - DNA, 120 bp, Homo sapiens
aaacgaaaaaacacccaagaacatgaaatgatctggattatttcagtagtagtgcatttccaggtcaatgattttttatttcttttaaagcatgggcccagtctcaagacccaagaaata

SEQ ID NO: 28114 - DNA, 120 bp, Homo sapiens
taacgttggaatgacaggtgactatttcctgccaagattccagttgccatcaggtggcgctgtgtcaacaacaaatgcttttacctgaagcgaggaggaagtttggttgatttactcgaa

SEQ ID NO: 28115 - DNA, 120 bp, Homo sapiens
ctccgtttgtttgcaattgtcccacttgtatgaatacattgatttttttttctcacctggcccagaacaaagctgagtaaattgatttcttaaggcatgaagccttagacaagaaaagcc

SEQ ID NO: 28116 - DNA, 120 bp, Homo sapiens
agccgtggaaggaggctggtggcagcagacagctgggcaggtcatgaaggtcaggggaaggaaattagcaattacccttatttccatcttcagtgaggaaaacctgctccccaccagcac

SEQ ID NO: 28117 - DNA, 120 bp, Homo sapiens
ctccgggcaggacagagctttcaggcagcgacctcctaggaggaaggcggggggagggtttgcagccttccctactctgggcagacagaggaatgtggtggacaggaaaaagggggagga

SEQ ID NO: 28118 - DNA, 120 bp, Homo sapiens
tctcgtggggtggacagctgggaactcatttagagagattacaaggatgaatacccttgggctcgatagaggtagaagcaaagtgcttagtgttagagagcgtttcttgaggagggaaaa

SEQ ID NO: 28119 - DNA, 120 bp, Homo sapiens
gaacggaaggggcagataggacaactaattggaggcggagtgagaggaaggggccatagatgacttcatgatttctgtcctggttgcaataaaggatcatgatcgtaaagatcattccca

SEQ ID NO: 28120 - DNA, 120 bp, Homo sapiens
tcacgatcttacctgctgatacttaagcctctaggagtatgagattgattaggctgaggttgaacactggtgggtttggctgaattcatctttcacgtgtttttcctttgacatgtacag

SEQ ID NO: 28121 - DNA, 120 bp, Homo sapiens
tggcggtggtggtggttgttggtagtggtgtgtgtatgcatctgaattggttgttcatgtttgaaactccagattttacattatgatagggcagtgtgacaatactgaatggtggttcct

SEQ ID NO: 28122 - DNA, 120 bp, Homo sapiens
cgggagtgtgacaaggagggcagaccagaaagcctgcttgtcagggcgggggtgggtgcttaaggtcgggttttgtgttctcaggaggtttggcaatggtattacttggaggaagaaagg

SEQ ID NO: 28123 - DNA, 120 bp, Homo sapiens
tagcgtggactgtcttttcagaggcctcgaatagcttgaacagtaagtggtgaagggcagggagtagggtgggctgcagagccatgtgcagagagagtgctggttaagatagaagctcaa

SEQ ID NO: 28124 - DNA, 120 bp, Homo sapiens
aagcgcccagccttgtgtgtaccaggagagaacaggcaaaaggagaaatggttcctttcctaggagcccccaggttgatgcatagttacattgcccaggtgactttctaaggtgatattc

SEQ ID NO: 28125 - DNA, 120 bp, Homo sapiens
atccgaggagctggaataaggttaattaggttacaaagaaatggaaatgcaatgtaactaggtgtgtgtttttgaaaccaaatgtgccttttctacttgaattcattcttattaacagat

SEQ ID NO: 28126 - DNA, 120 bp, Homo sapiens
ctgcggttaatggctttaaccacaacatttttggcaatggtgaaaaaaagtgtaataagtgtataggaatacactttccaatacattccaataagtgtacaggaatacactttcagtact

SEQ ID NO: 28127 - DNA, 120 bp, Homo sapiens
tggcggccgtgaactttgtttggaatccagtctctgtagtctggaaatgtgatttctggcagtgtgctctgttttgacacaatcttgtcataacaacatgggtttcatcacagtggggtc

SEQ ID NO: 28128 - DNA, 120 bp, Homo sapiens
ggtcgtgtcctttgatgatgatgctgggaaatggggaagggctttccaggggagaacataaaagttaaaagagctgtagtgccgggcaccttgggtgtaactatgttcctccctggcttc

SEQ ID NO: 28129 - DNA, 120 bp, Homo sapiens
gatcgccctcttctccagttttggagcctgggaaaaaagagctgcctttggaaaaagcttgagttggttttgtggtttttttccttgcaaggctggttgactactggactaagcttggag

SEQ ID NO: 28130 - DNA, 120 bp, Homo sapiens
ttgcgttctacaagatgacctaccagccagggcccagagggagctggtgttggttcctgccagcagctgtgactacacagtagttaccttttacttaatgccacccactctttctcaccc

SEQ ID NO: 28131 - DNA, 120 bp, Homo sapiens
gggcgtaagagaaaggaacattctgttttagttttgcagtgctgtcctaggagctcatgatttggtacatgagaattaagtgaaaaagctggcagtaaagggggataagttggaattcgt

SEQ ID NO: 28132 - DNA, 120 bp, Homo sapiens
ggtcgtctgggctccataatatcccttgtgtatctgcagtctcctttgccatggatcaacacaataggaaatcttccggcactgatggtttttccaagggggagttcttcctggagcaaa

SEQ ID NO: 28133 - DNA, 120 bp, Homo sapiens
tttcgtgaacggagtcaggaaagcctcaagttgggtggctaggaagggtagaggagttgctattagggaaccgaggagtgaatgtggagatggtgaagtgagacaggaggctgcttcctc

SEQ ID NO: 28134 - DNA, 120 bp, Homo sapiens
acacgcatgttcatgcacacacacatacacaaacacatgaagctattgaaaagaatatgcagcaaatgtgttttgtaagtgagctagtatctagttgaagtaccatgatcatctttaaaa

SEQ ID NO: 28135 - DNA, 120 bp, Homo sapiens
cctcgctgtggtatccataattgaaatgcactgtgcctcatctccagaccagcccttacagcagtgccaatctccttcttgtccactgcacaatagctcgctgactctgcctactctttg

SEQ ID NO: 28136 - DNA, 120 bp, Homo sapiens
tcccggatatccttgtctcttcattcttagtacatcacatcattactcaggcctcttgcctgggcccctggcagctttaggtacctcattcagcgcaactgttttcctgttttcttgagc

SEQ ID NO: 28137 - DNA, 120 bp, Homo sapiens
ttgcgtgaagtaaaatgtttattaagtcagatgaattaataacattttcaggaagttcataattgatggagacaaattacatatgtaccatacatcaacacacacacacacagaatgtgc

SEQ ID NO: 28138 - DNA, 120 bp, Homo sapiens
cagcgaggtacaggaactagagtcgacaaagaagaaaagcaaagatgcccacatacatcctacttttaatgcaaagcttgtctctgctggataacatcacaaatcccccaactaaaatca

SEQ ID NO: 28139 - DNA, 120 bp, Homo sapiens
gtccgactttagagttgttttcctggaagtgctgataccaaacttggcagagaagaatggtatcgtgtttctatatagctgcctggacaagggagttcggcctttgggagataaagcggg

SEQ ID NO: 28140 - DNA, 120 bp, Homo sapiens
gtgcgcacacatgggccaattgtcagtattatgagggagaaaattagggaccctaagacaggggttacccaaggtatccactttaggaaggatgacccctgccaacagtgaatgacttga

SEQ ID NO: 28141 - DNA, 120 bp, Homo sapiens
agccgtgtaatggagcctgtgggctgcgttgcgaacaatgccggcttcattaacataaaaacagcattcttcttggacatatacacatgtgccccaagacaagaatgttaatccaaactg

SEQ ID NO: 28142 - DNA, 120 bp, Homo sapiens
caacgaggggcatgatttaaaaagcacatcatacacatgagacaagcagcttcaaggacgttttctccggcaatgcatacttactgtgctctttctattcagacagatccacagaccacc

SEQ ID NO: 28143 - DNA, 120 bp, Homo sapiens
caacgtttcacatttcctaatgataaaaagaaagcttgcacagtttaccattgatctcaccaatgccctcactgctggaaccaaaaagccatgagaggtactgctgtgatacaccttaca

SEQ ID NO: 28144 - DNA, 120 bp, Homo sapiens
ttacgcaggatctgaaccacctacacgtacagtggtctcattccagtataagccacaacctcaagtctcaggaaagccagtctgctggatagtaagttactgagaaaaactaatctattc

SEQ ID NO: 28145 - DNA, 120 bp, Homo sapiens
ctacgaaaaccagaggggtatgtggccaaatattccccttttcaacttggtaagatggagaggggtaacagacatgtttcagaggaaaacaggcatagaaaaccacctcaggaaagcagc

SEQ ID NO: 28146 - DNA, 120 bp, Homo sapiens
tgacgtgtgtgtagtggcagtacccacatgtgctgaagtgccaaaagactggcattttcaagtgtcaacaggccatgcatcactgcgccacagctaaacccttatagtgcttggccctga

SEQ ID NO: 28147 - DNA, 120 bp, Homo sapiens
ccccgcttctagccactgctttgtttattttgcaggaacagtgaataagtagcagaacgctttctgaagtttttgctgatgcagagccgaagatctctgctacaacaaatgttctgaaat

SEQ ID NO: 28148 - DNA, 120 bp, Homo sapiens
ccacggacagtgttgcacacaccggggttgtaaaactcaaaggcagagttacagccctcctggattttagaccaagcctggggatatgcagctgtatttactcttcttgtgtgtcctggg

SEQ ID NO: 28149 - DNA, 120 bp, Homo sapiens
aaccgtggctatggaaaataacgagcactcctccaccccctggccaataccggcacagacttaatttgaggggtaatgttctgtgaagtatgatggcatttccgggagaagaatctcagt

SEQ ID NO: 28150 - DNA, 120 bp, Homo sapiens
gaccggggacgcccgcttccttgcttccccagcctcaattcctggcttcacccgtggtgctttctgctctcccccttccggccctaggacccggacgccggctctctctcgcctgggttc

SEQ ID NO: 28151 - DNA, 120 bp, Homo sapiens
gttcggcggataacaaaaaggaaactcaagtgcaaagtaactcaaacagttgcttgtgtggttgcagttaacagcctgacctaggaatgtgtaacattttcaagactttaggatatgtgg

SEQ ID NO: 28152 - DNA, 120 bp, Homo sapiens
atccgggctatagacaccctcacgccgcccagcctgctactcttaataaattttcaaaatcctgctccaatgataattcaagtctagttttgtagtagttctccctcaacaccaaagctt

SEQ ID NO: 28153 - DNA, 120 bp, Homo sapiens
aaacggtggttttaatcctggatgcatttttggttgttttccttttgtagtgatagcccacaggcatttctgcctgggatcgggatcataatgaggggaacagggcactccagatttccc

SEQ ID NO: 28154 - DNA, 120 bp, Homo sapiens
ttgcgcttctcagagcgtatgtcctgtctttcctctagatggcactgtggagcagaggcgactgtcttagggacccgcttcttcctctatcagccattacccacttctctgcaggtgaaa

SEQ ID NO: 28155 - DNA, 120 bp, Homo sapiens
tggcggactaggaatgcgctggccacgcgcgcctgaacctgcagtgggtttctgatggattagtgactggtgagaagaccccatcacagtagggcacagttagcgaaagttccggattta

SEQ ID NO: 28156 - DNA, 120 bp, Homo sapiens
gtgcgcacagttaaacaagacaatgaaacaggagagctgtgatctggatctgccaagaaagaagcactaatctgtatggcaggaattcctaggtacattctttcagccaagagggagaat

SEQ ID NO: 28157 - DNA, 120 bp, Homo sapiens
ggacggatgcataagtgttcaaatagaatgatggcctcactagtttctggattgtttgtaactttacaggatctccctttttcattaggttttaaaagcatttctttggattttgtaggt

SEQ ID NO: 28158 - DNA, 120 bp, Homo sapiens
tgacggcaatcaagaagaaagttcagtttctttcccatcttattctttcccattttccaaactcttatatttcaagctctgattacagcagttttcacactaaagtaaacactgattaat

SEQ ID NO: 28159 - DNA, 120 bp, Homo sapiens
ctacggccaaagttggaacattggcctctgtgttcccaaaggttcgtgcagaatctgaatttttcaaattggatgaggaagtgggacagaaaaatttatttaaacagatgttttaaaaag

SEQ ID NO: 28160 - DNA, 120 bp, Homo sapiens
ccccgaaaaactctccaataaaaaagtgacagaaattaaccattttcactgaactctgactgatttcttcacaggcatccttaagaaattctcctggaaattcagccttccactttctga

SEQ ID NO: 28161 - DNA, 120 bp, Homo sapiens
tatcgaagggctttctggtgttagaaatatactctcctatgatcccgcccccaaaatactacacttgattgcttaaatatgaagttagatgtttgatgcttatgttttatacttgatgaa

SEQ ID NO: 28162 - DNA, 120 bp, Homo sapiens
gggcggacactcaattactggttaacttgaacatagagaccttgctagttggcacatacagataatttcttttctataaagctcacctccacaagcttcctgtttactgtgagtgacagc

SEQ ID NO: 28163 - DNA, 120 bp, Homo sapiens
agacgcttgctcctggccttccactcaactagcatttcccaaacctcaattatctgtgtaccaaccttgtgatttttctcatacgcatatgtcacctgtgtgattatttaatatttagct

SEQ ID NO: 28164 - DNA, 120 bp, Homo sapiens
ccacgatcaaactaaatataacaaatgacttcagcaatatttcaaataaaaacatcctgtctatcaccagtgatctgggaaccacattttggaaaataatacacatgaattatcatttct

SEQ ID NO: 28165 - DNA, 120 bp, Homo sapiens
acccgtttacttttcatctttaaaggagattcctccactcttctctctcgagtcttccgaaattctacccatgaacctcatcccaatacaaaataaccaaggattgaaactcatataagt

SEQ ID NO: 28166 - DNA, 120 bp, Homo sapiens
ttccgaaccaatattgaccctaggtcaagtataaaatatgcctgattcttcatagggcttatcatgtaaaagaaaattatgttggcttcacctcagatggcactaacactgtaattgcca

SEQ ID NO: 28167 - DNA, 120 bp, Homo sapiens
catcgctgtctttccaacacattctccttttcagctatgctgtccaaggacacattggcaatgcagagcaaggctgaaagaaaaacaagtagaagtcaaatgtgcatgtagttttaaaag

SEQ ID NO: 28168 - DNA, 120 bp, Homo sapiens
acacgagagtctgatcatactggagctgccttatattgtacaatgaatggttcaccatttagaaagtgctttgtagaactgcttcctttttgcctaatgtatcagaatctaagaagccag

SEQ ID NO: 28169 - DNA, 120 bp, Homo sapiens
catcgtggcacagagtgaataaattgaaaacagttacagggataaggaaataagtcagcagcaacacagtggagcaacagagtcaaaaagtcttgagtatagaactgggaattcagaggc

SEQ ID NO: 28170 - DNA, 120 bp, Homo sapiens
catcggctccgagtgtggaaggaaaaggcaagtttccatgaactatctactgctgtggtctccagctggccctaaatagaacaagcaccaaaaacaaatcaaaatgagttttacacccaa

SEQ ID NO: 28171 - DNA, 120 bp, Homo sapiens
actcgaagctatcaagcttgtcagttggaaaaatgtcctttttcctagtctctctccattgtgaaaggggccccacgctcaatttgaaagtgtaatggtttggctgttgtctctaaaagg

SEQ ID NO: 28172 - DNA, 120 bp, Homo sapiens
ctccgtgtgcatgggagagcagcccacattgaataagtccatgctcactctaaacacctgtttttgtttcaagcaaggagagactcatgttgtctaggaacactgtgggcccttgggaac

SEQ ID NO: 28173 - DNA, 120 bp, Homo sapiens
cctcgctcatttcaccttttacaagaaaccatctctgaccacttccaaacagtcgcactttccaccccttgcttggcactggttacagaatgctatagggtggagctgtttgccatgtct

SEQ ID NO: 28174 - DNA, 120 bp, Homo sapiens
cttcgtgagcacagaagatgattcttcatgacaaatgccttcaatatttctttccagctctttgtgaatactgagaaccaccatttattgagggctgctgtgctgagtgcaacatacaca

SEQ ID NO: 28175 - DNA, 120 bp, Homo sapiens
aaccggaggttatttaacttctctgagcccttcccacagagttaggaaggggcaccagtgggttttggcctcaaagcccgtttttatccagcccatcatactactcccttccgaactgtt

SEQ ID NO: 28176 - DNA, 120 bp, Homo sapiens
tctcgaagcaagatgctgattgtgtgattataaaacattgcgcttctcatttcctttcccttcctgctactctcaactaacccacgctatcacttgacaggcatgtgaataggataaagt

SEQ ID NO: 28177 - DNA, 120 bp, Homo sapiens
agacgcactcaaggcagttagggatgttttcaaaaaacaagcacctcttcatggactgggctaattttttttaaaagcaaaaacaagatatgagtcctttggaagattgcccaagcacag

SEQ ID NO: 28178 - DNA, 120 bp, Homo sapiens
ctgcgtataaaaaacatctggcatcacacatgcttctgaacataaaaataaaggccacttcatatttttctgcaatatgacagccttctctctgaatgccagttacacctaagctcatca

SEQ ID NO: 28179 - DNA, 120 bp, Homo sapiens
gagcgttgctggccccgggaagatgcgcgcgccccttggcacaggagccggacagcagtcgggggcgcagacgagttggaacgtcggtgctcgggggagagtaggatctcctgggcctag

SEQ ID NO: 28180 - DNA, 120 bp, Homo sapiens
aggcgggaggtaggcgcggagtgggttggaggcaaaggacctggctggcctttgcctggaaagttctgaaaacctcagcagtgaccgcagactaagactgagtggaaaggttcccgctag

SEQ ID NO: 28181 - DNA, 120 bp, Homo sapiens
tagcgtttgtggctctaagtggcaggaggaggcggagcatcttgaacctgcagccctggcgtctgctggacttgcccttctgggcaccccaagccgaaggcgcctggaagtgaaagggga

SEQ ID NO: 28182 - DNA, 120 bp, Homo sapiens
ggacgagcagggggcgcggagctgggggtgggagctggcacctctaggagcagctcccacacttgcctccctggctggggcgtcccggccaaggtttgctgtaatctgcgcgtctggccg

SEQ ID NO: 28183 - DNA, 120 bp, Homo sapiens
caccgggttccgacaggtgagtgagtttcgccaactcactcgctcggagaaggcggcagcaggctggaagaggagcggcgccaagcgtctgttgcgggacacaaagccccggacctgaag

SEQ ID NO: 28184 - DNA, 120 bp, Homo sapiens
ccacgcacacccggatttcctagactggctccttccgcttcccggacgccccggcccagctcgggcttggccaaagcccttggtcagctcggcaatttgcctgtaaagtgtggctgggcc

SEQ ID NO: 28185 - DNA, 120 bp, Homo sapiens
gctcggagaaggagccgccgctgggttcagttataagagaactgcaagagcccagggtaaatatcctctcggtctccggacgagggggctggggagaaagggaacggctgattgctttgc

SEQ ID NO: 28186 - DNA, 120 bp, Homo sapiens
aaacgaggcaaggaacagacagacctccaaaaaacaaacaaacaaacaaacaaacaaaaaaaacaaacgaaaaaaacaggtcactgaagtgaagttactatattaattctaacttctaac

SEQ ID NO: 28187 - DNA, 120 bp, Homo sapiens
atgcgaaactgaatctaaaatgaggtgccactgtcctgaaaaatgatggttgaggtacacagtgctcatgttcaggctgtgtgatagactcatctatcaaagagtgcttgtaaatgcttc

SEQ ID NO: 28188 - DNA, 120 bp, Homo sapiens
gcacgcagtgggaaggaaaaattcattttttaaaacctgtagtcactttaagttaatcactctgacaagtatttctgtttgcagttgaattgtcaaacagataataaaacaaaataaaca

SEQ ID NO: 28189 - DNA, 120 bp, Homo sapiens
cctcggtaaaaatggcaggagtattccaaagtattacagaaatgtgaaaacttgaaaagctgaaaaaggttaagatgagttctaatgtttcatttagatccttattaggaagtgactact

SEQ ID NO: 28190 - DNA, 120 bp, Homo sapiens
tcacgtgctgcaataacttgcaccgggaggtagagtaggtactgaatgtgtgcttcacacttcccctcaaggactcagaaatgaagctagaagggaatatggagttcattcacatccaat

SEQ ID NO: 28191 - DNA, 120 bp, Homo sapiens
aaacggggatctctcacttccttcttttttgctaccctattattgggatatttaatatttattattaacctaccacactgcaatctctgcctctaacaggatatcaatggtgtcttcccc

SEQ ID NO: 28192 - DNA, 120 bp, Homo sapiens
ccccgttcccccaacacacacatacacatgcacacaactacagctcagaagtacagatttctacatcccttaatatattccataatcgattcatcgtcaggtctttaccatcctgaaaat

SEQ ID NO: 28193 - DNA, 120 bp, Homo sapiens
ggccgcatcaccaagatattccatggttcataatgaactgatttagagcccagctgcgaagtcattcacatttgccaagagagattttgagtactctttgggacacacccatcacacaaa

SEQ ID NO: 28194 - DNA, 120 bp, Homo sapiens
agtcgtcataaaattcaggtaaatcttcgatgtgttgatgtttccatgtttgcttctgcaaagggaaggaggaactgaggtcctaccaaagtgggtcttacccagcccacagcaggccaa

SEQ ID NO: 28195 - DNA, 120 bp, Homo sapiens
aggcggctttagactggaatgtcacacctacccagaagtagaaagccaaatggtaacttccacatttgtggaagctcttagacacaaatatccagcttattaggcctgctctgtctgaag

SEQ ID NO: 28196 - DNA, 120 bp, Homo sapiens
actcgaagaagagccagacacttaaggctactagttatttaaaatgcaaaaaaaaaaaaaaaaaaaggaaaaatagtacaaaaaatataaaccatggtacaaatacctactagattcttg

SEQ ID NO: 28197 - DNA, 120 bp, Homo sapiens
ggacgtgaactgtatttatcagactgtttcacgttttctgacttcattagaacctgaaccctgacctttcaggtgcattatatgcagagtgacagttgttgttttatctttttctgagca

SEQ ID NO: 28198 - DNA, 120 bp, Homo sapiens
aaacgaaagatcttctgtgtggagtctttaagtggtaaggatctactgattctcctttactaagcttccatgtccttcttaaacttggcattagatggagactactgaatctcaaattag

SEQ ID NO: 28199 - DNA, 120 bp, Homo sapiens
cctcgtggtgaacagcaatatgttgttagctgctacagcagctggtgaataatcaaagttcttactgaatcattggttaatcaaaactagaagttagacttgactgatcaagagcttcaa

SEQ ID NO: 28200 - DNA, 120 bp, Homo sapiens
tcccgaaaaaggtaacgttctgcattccagtatgtgcttccctgtggtactgaaatcctcatggcactgccagtgatagagcagcagcatgggctgcctgccctgaagcatcatgtgggc

SEQ ID NO: 28201 - DNA, 120 bp, Homo sapiens
gaacgaggctccaagaactggagataaccagaagggcaagaaggtatgggttgatcactagcgtggctatactttaacttggaggaaacactgttattaaatttaggtgggtggaagctt

SEQ ID NO: 28202 - DNA, 120 bp, Homo sapiens
acccgtgcgttttcctctgcaaatgctccaaagtacatgtttcattttttaagaaaatgttatagttcttcctttgccattttggatgcatagtgtattcagtaaatggttggttgaata

SEQ ID NO: 28203 - DNA, 120 bp, Homo sapiens
caacgcagagacaggactttgaccacataacctgggagatcttttcaatacaatacgtagtctgacctagttgaagaccattgctctaaatccataggaatgagtgaatcaaagaaggga

SEQ ID NO: 28204 - DNA, 120 bp, Homo sapiens
gatcgtaagttgttgtctttacttctccctattcccttaatcaccctctctcaatcaatcttctgctctcagtggacatggaaacaactctttcagaggtctccaaaagcctacgtgtgg

SEQ ID NO: 28205 - DNA, 120 bp, Homo sapiens
tgacgccatcagtcacccccttcttcttggaaatgctgcctagttctccaccagcctctccagccatgcttcctttctctgcttggctctttctttccttttactgatcccacgtgcaat

SEQ ID NO: 28206 - DNA, 120 bp, Homo sapiens
tgcgtaattggctataaggaatactaatttttcttccctattcgctagatcaggataaagcacagagagcaatctccagttcattcacatctccttccatcagaacaaacatcaaacaca

SEQ ID NO: 28207 - DNA, 120 bp, Homo sapiens
aatcgtggactcattggttccttctctcacttaaactggcttcttgggctattatgttatcaaaagagctgccaaggccaaaccacatatacagaagcattgctcaatgcttaaaaaatg

SEQ ID NO: 28208 - DNA, 120 bp, Homo sapiens
ctccgaaggatggtggtgcccatttccatacaagggctctggaaaacaatcactgaatactaccaggaacttcaagggtctacatggtttatcatctttactctgaagaaaaaaaagggg

SEQ ID NO: 28209 - DNA, 120 bp, Homo sapiens
tcacggatgaaaaatatatcctcttagggaaaaaaacccggttgccctaattatacatggatgatctaattaaactgtcattcacaattcattaaagctattaataaatcataaatgggc

SEQ ID NO: 28210 - DNA, 120 bp, Homo sapiens
ggccgcatctaaaggctctagactgcctcctcgtttataaatgaggaaactgaggtctactgaagttatgcgaatcacccaagtttacatcctctaactttcccactacttataaggttg

SEQ ID NO: 28211 - DNA, 120 bp, Homo sapiens
ggacgagagcttgataatcattcctggaatagttcacagaacaaaatattagatgggaagttaactgacgcagaggagagaggaccaaatggtgaagtggtaacatcactatctacagaa

SEQ ID NO: 28212 - DNA, 120 bp, Homo sapiens
aatcgttgctaacaatttggacgtggagaaacagaggtcccaagaggttaggtaaggccaagtgctcctaagctgctgctgctggtctgggagttacacccagcctatctgaaaggtgcc

SEQ ID NO: 28213 - DNA, 120 bp, Homo sapiens
agccggaattagaaatggcttcaagggcccggcgaaggtctcccaaaaggcactaccaggcagtgaatccctgcacacccaaacctagtggcaggccttctttcttaacacaaaaacaaa

SEQ ID NO: 28214 - DNA, 120 bp, Homo sapiens
tcacgtacacagcattcagctgagtttcactgcaagaggcactgtaactagatgactatgcggtctggaatattttggactatttttccttcctaatttgttcagctcaaccatgtgcca

SEQ ID NO: 28215 - DNA, 120 bp, Homo sapiens
atacgatgtcaacctaggcacagcaccaccatagtacggcttaaggaagagaagaactgagagcactacaatttttagatttgtgtttcagaagcatcttgatgcttgataaaacaggag

SEQ ID NO: 28216 - DNA, 120 bp, Homo sapiens
gaacgatacaaagagtcacgctgttgggcacacccactgtgtcacctcctccatgcctcataatttcctggccagtttaacatcaaatcctaattaattcagatcagcactcaacaaagc

SEQ ID NO: 28217 - DNA, 120 bp, Homo sapiens
caacggcgctattaagctgacaaaacgtcaccagtcattcctgtgttaaccaccaacacaataacaaaaaccttctgaggaaggcaatagtagtcaccagagaaaattccatattagcac

SEQ ID NO: 28218 - DNA, 120 bp, Homo sapiens
tatcgggagagattaaaacagttcaccaacaatgtgcactgccaggggtgccacccgccacctgccaccaccaccaccaccaccacagctgtgacatgtgagaagcccactccagaaggc

SEQ ID NO: 28219 - DNA, 120 bp, Homo sapiens
ctacgacaggagagtgtgccatagtcaaggaagagcagacgtccctctctcttgatttctctattcccttttataccaacacaagtggtgaagtcaaatgtgggtagcctattattggct

SEQ ID NO: 28220 - DNA, 120 bp, Homo sapiens
acacgaatgtcagggaggaaagacagaattatctactctgacttcatcaaggcacacatcaagtgctgggtttcattacaggtaatttttaaaagatgagaacaatcaggatattaagga

SEQ ID NO: 28221 - DNA, 120 bp, Homo sapiens
tcacgatggttcataaaaggaagaaagccatccccaagggtgtcatgaggccaacttcaattactgggagaaacaaatgtgttccagtgggttccagtctctccgtgttccccaggaata

SEQ ID NO: 28222 - DNA, 120 bp, Homo sapiens
gagcggggaccatgtttttcataactgttttcaaggcaccagaaagagagcctagcctagaacagctactcagtaaataatgaataaacaaaagaatgctaccacctacatcatcaacaa

SEQ ID NO: 28223 - DNA, 120 bp, Homo sapiens
actcgttgctaacatacagtatggaaaatggattgctaacaaagttcaagagaagcagttccctaagctgccattcaaattaacccagagtatgaggaagcacacgctggtcacccagaa

SEQ ID NO: 28224 - DNA, 120 bp, Homo sapiens
catcgcagatcctacaagagctgggaaagagatgtctggccaagtaataaagtggacttgctcgtggggaagaaaaagaagccgacctagtgagacgctgagagctgcaaatggcgccac

SEQ ID NO: 28225 - DNA, 120 bp, Homo sapiens
ctacgttttctcttgtcgtgttgtttctctggctctttggcattcagttgcctttgaccagtgaattggctgccttcctggatatggcagattgctaactctcccaggccaattcacagc

SEQ ID NO: 28226 - DNA, 120 bp, Homo sapiens
ttccgtagctaaatggaggagaaatgctgatggtatccttgccagcccctgttttcaatccattgatatgtccaaagtattaaagtgacagggcctcattagaggagtctctcattagca

SEQ ID NO: 28227 - DNA, 120 bp, Homo sapiens
tcccgcttccaagtctgcaagcctctgtgtttcattgactagctgcccattaaatcatagtttgtcatttactacatgctttccctaggtgttagccttaaattgtggccaagaatcatt

SEQ ID NO: 28228 - DNA, 120 bp, Homo sapiens
aagcgcattttgctgtatgaataagaataaaaggaatctttcttaataggatccaggaaccatagcggtgttatgactgttgtcatgggtccagtaagctttcctagggggcgcctatgg

SEQ ID NO: 28229 - DNA, 120 bp, Homo sapiens
cctcggcctcccaaagtgctgtaattacaggtctgagccactgcactcagcagatcaattctgacagatatgttacagtttgctacaattgcacatttgtcctccctttttcgttttctc

SEQ ID NO: 28230 - DNA, 120 bp, Homo sapiens
gcacgcatcaggctgtgggaagaggcctgggcagcctcccaacttccctcccttctgccttgaagaccagaaaccagaagtgagaataagcaggttaaaaaaaaaaaagtaaagggaatg

SEQ ID NO: 28231 - DNA, 120 bp, Homo sapiens
caccggcaaaaaattgctgctgagtacagattcaaatacctttgtatggttgagtgctttttttgtgttcctggatgactgaggcctatttattttgggaggcatattgttattcatttc

SEQ ID NO: 28232 - DNA, 120 bp, Homo sapiens
ctccggacgtttggaagtgcttaacgcccaagaaatcagaaaagcttcttgtgtggtaaagaaatggcaatttgaaaataatctatttctaagtctcagtgttggtaccgtgaacctacc

SEQ ID NO: 28233 - DNA, 120 bp, Homo sapiens
acacgttttcattgagagttgtttgaattaccaataggttcccaagtggaagatcagttataaactgagtcacataaaacaagagatctaaagtaatgtggtatacccaatttgtagggg

SEQ ID NO: 28234 - DNA, 120 bp, Homo sapiens
ctgcgtggtgattaaaataaatctaccccaaaaaaagacaaagttctcatgaatcctagaccaaaggaacttacatgaacttcaagccaaaagtcagatggatatatgactcatagcaat

SEQ ID NO: 28235 - DNA, 120 bp, Homo sapiens
gggcggcgagtgtgagcacagcagtcagctaggggttcaggcgtcggtactgaggtctggctaggacggtggacctgacatgggccttgctgcactttggatttagacaaaccaaatcca

SEQ ID NO: 28236 - DNA, 120 bp, Homo sapiens
cctcgtgtctggaatgcacacccacgtgcatgtgtgctgtgtgctggacttggccactgtcactggtgtgtggtgatagctctgcagtcccactcgcaggggagctagtggctggagccc

SEQ ID NO: 28237 - DNA, 120 bp, Homo sapiens
tgacggtggctctaacccgaggattattgtgatcaataaagataggctgaggccacagtagacttcaggaagtactcattcccttctcttactttctctcttctgtctcttttgtccctc

SEQ ID NO: 28238 - DNA, 120 bp, Homo sapiens
ggacgttagccagagagctaccgctgaggctgtggatattctcaggggctgtttcctcttcctccctgccttccctttctgccagcagccactcttgctctttcttcccagtgctgtctg

SEQ ID NO: 28239 - DNA, 120 bp, Homo sapiens
gcccggtgttggcttttgccaacatgagctggcatgagccactgcacccaggccttgggtcccacttgagacagtgaatgagccagttggtatagggggcttccctgtgacaagctgctg

SEQ ID NO: 28240 - DNA, 120 bp, Homo sapiens
gggcgacctctcctcctgtgccctgagcttttactgagtacacgtggagcctttagcaccttcttaaggagaggggttttcagactggggaaaaccatgcaccgctcctcagtgtttcat

SEQ ID NO: 28241 - DNA, 120 bp, Homo sapiens
ccacgtgccaggccctgtgctaagcgttggtctggcaggaagaagttgaaatacttggttcagaaagggatggtcctgagctgcgggaagggcccaggtgcagctggacttcctggaacc

SEQ ID NO: 28242 - DNA, 120 bp, Homo sapiens
tcccgtctactccctcctttgtatatcttctgggaaaaaaacaaatgtactttctgaaatgtgtcaatttaaggactcctgttagcgatctttgggacaaatactcctgtcctcctcttc

SEQ ID NO: 28243 - DNA, 120 bp, Homo sapiens
ctgcgttatttccctttttaagaaaattcactcctttccttattataagacagatgctgttatcccagagtctgtgaatggaattggctttggcatgggctgactccagtttaaatattc

SEQ ID NO: 28244 - DNA, 120 bp, Homo sapiens
tgccgtgtcttcccttctgtctcttaaaaagagaggtctttggatttagggcctgtccagataatccaggatcatctcatctcgagatccttcacataatgacatctgcaaagtcctttt

SEQ ID NO: 28245 - DNA, 120 bp, Homo sapiens
atgcgcataccttttcagggtcaccattcaatccacaacaataggcccttcaccaaaatgccagatgggaagcacctagtgcggtgccttggatgcagagaagtgtaacaggtggtatct

SEQ ID NO: 28246 - DNA, 120 bp, Homo sapiens
gtgcgcctacacatatacataaatgcttaaactcaccaaactgagaacccccttcttagtggccattgctctttggggttcagtctatagtaacaaaaatatctgcttgatggtaagttg

SEQ ID NO: 28247 - DNA, 120 bp, Homo sapiens
gaccgacaaaacgatgcctctgtcctaacttaggattgtactttttagccaagacttaactaacacatctccataaccacccatgggcgggcagtgctggtgtactttttggatggcatg

SEQ ID NO: 28248 - DNA, 120 bp, Homo sapiens
tggcgggatgccttggcctttgggctcctttcccaggcaccatctcagggaaggggtacacactctgcattactgcctgttctctggttctgtgcaacagagaagcaagtgcaggctggg

SEQ ID NO: 28249 - DNA, 120 bp, Homo sapiens
gcacgatcagcagtaggtatccaaagatttcatagccaagggctaaagaatgtggcatgagcctggaaaagggggatactctttggttggagtgaagagagggcttttgcatgagcttat

SEQ ID NO: 28250 - DNA, 120 bp, Homo sapiens
ccccgcaaaggcactgagggaagagtgtacagtgtgtttggggagcagaacatgggctgcttgaagggcatggtttatgctgggattgggaagaaggtccgtggaagtgtgtgagggcgt

SEQ ID NO: 28251 - DNA, 120 bp, Homo sapiens
agacgtacatgtgtatatctaaaatgatcttcaggaatgcacagcagaccattagggtagccacctcttgtgggaagaggggtggcagatcttcatatttttattctagattttcataat

SEQ ID NO: 28252 - DNA, 120 bp, Homo sapiens
ttgcgttcccttctgagccttaccaccttcgtgggatgggtgtccctggctgaaggtgtacctctgccatgttcccctcctccagtaccttggaaagtcccggtgtgtccctgagcagcg

SEQ ID NO: 28253 - DNA, 120 bp, Homo sapiens
ctccgaggggactgtctggaactctcatccccacaataggaagggtttttcagtcatgggggaacactgcgttcctgtctgacctcctggggttcctcatttacgtggtcggtgagctgt

SEQ ID NO: 28254 - DNA, 120 bp, Homo sapiens
taccgagggcaggtttcccttgacagcactttatttccagaattgtaacaaggcccagtgttgaaaaggggaagaaaagtgtggcagtcaacaataattatggtcatctgataatcatca

SEQ ID NO: 28255 - DNA, 120 bp, Homo sapiens
gcacggcatgtgctgttctattttgagagaacaattttcctgtgttttatgtaataagggccttgtgatgcatggattctgggcatcccaacatataagtgtgcctgtaaggcaaagaaa

SEQ ID NO: 28256 - DNA, 120 bp, Homo sapiens
gcacgctctgattgccaaggaggggccatgttttctttcgcgtctctctcctggacccatgcaataattagtcaaagtaaaatgaatattagctcatgcttaactgcctttaccgcgcac

SEQ ID NO: 28257 - DNA, 120 bp, Homo sapiens
cagcgctgacccagtagtgctaaaccaattattttttgaactttatggctttaaataatcctttgctctaaaattccctatacccctcagctacttaaccacaggcccctctgccctaaa

SEQ ID NO: 28258 - DNA, 120 bp, Homo sapiens
gcacgccattacccggactaatgcctgacttgaataacaagcaaattattgtgcttttaattgtaccctgctcggtcacaaagcacatctgagacaggaatgtgccgagctcttccagga

SEQ ID NO: 28259 - DNA, 120 bp, Homo sapiens
tgtcgccttcccctcccccctttcaatcctttttcttcccagcggcacacacaaaaaaaattaaaaaagacagctaaattatgtttaaaatggaagagtctaaaagaaaaaaggtggtaa

SEQ ID NO: 28260 - DNA, 120 bp, Homo sapiens
ttgcggtggggggactttcccgggcattggacaatatttattggcctcccaagttgtgacaacctaaaatgtaccaagacatttccaaatgtctccggggaggaggcggggggggcaaaa

SEQ ID NO: 28261 - DNA, 120 bp, Homo sapiens
aatcgcccgtggtagagaactattgaccgaatcccacccatactgcgatgtatttgttcccccactgctatccttcctgttcacaaaccccaggcaaatcatggttctcgttgtaaacca

SEQ ID NO: 28262 - DNA, 120 bp, Homo sapiens
gaacgcctgtatttcacgcacttcagaaataggcttgctatggtgagacacgggtgatgatgatggagaggctgctgagataaaggagccacttgcctggaggtactgacactctcagtc

SEQ ID NO: 28263 - DNA, 120 bp, Homo sapiens
gagcgcgggagaactgccccacctcactcagaccatgccaacagtcctgttttggaccagaaaatcagtaccgaggcgagctacccagaaaagagacgttatgcaagccttgaattgcac

SEQ ID NO: 28264 - DNA, 120 bp, Homo sapiens
cctcgctcccggagattgaaagaatccaccctatttttagtaacttactagaaacataattgcttgtcctcactgaccagaagaaaacgcagggaacgaacacgttgcagttatccccgg

SEQ ID NO: 28265 - DNA, 120 bp, Homo sapiens
tggcggtgtacgtcttcctgagaagcccggcctggctgccgctcgcaacaactccttgggttaaggaagacaagtgccactcgtcctttgggagacagccgggtcctctcattgttggca

SEQ ID NO: 28266 - DNA, 120 bp, Homo sapiens
gggcgctgccgtctgctcaggagtgaatgctgggaaaatgaaccaagctgctaatttgcttgattgggggaaaaataagatctccagtaacaatgggcgtaatttatttttccaacaaga

SEQ ID NO: 28267 - DNA, 120 bp, Homo sapiens
tttcgtgggcaggaggggtgggaagggaagggaggtgaaggcgtggagcccattgtagggccctgggcccctgcggtctgggggttatgctggccctgaccctaggagaacaaggggctc

SEQ ID NO: 28268 - DNA, 120 bp, Homo sapiens
aaccgaggaaaaagcatctgctggggaagacatgcccctgagttccttttaaagtgttacagatgtagatgaattggcttaggaaagagaacacagccctgtggggcctggccaccccgc

SEQ ID NO: 28269 - DNA, 120 bp, Homo sapiens
ggccggacaggcggaccccacagggagactcttgaatgccttctctcctgaaacacaatgagggaaattacagcaaatctgagactgagtttggattttagtgcttaagaaatacccaaa

SEQ ID NO: 28270 - DNA, 120 bp, Homo sapiens
cttcgccccttcctcaatggaaataatgaagcatccccacaccctgtggcaggccctctcctggagaaaagcagaacaataggagagtaggtaagggctgagatcttccacacaaaggct

SEQ ID NO: 28271 - DNA, 120 bp, Homo sapiens
atgcgatttatcacaactgtaaactgtcagtttccacagctgttgcctttttcaagcaatctggcaaatgtgtgtgggtaaaaacacaaagaaggttgaggaggagtgggctcaggctgt

SEQ ID NO: 28272 - DNA, 120 bp, Homo sapiens
ctccgccaaaaacatatgctcttcttccttagagggacccacttcaattctagcgcacatctgttgtcttggcttctaaacatccatcccccctctccttggaggagtacctggttttct

SEQ ID NO: 28273 - DNA, 120 bp, Homo sapiens
gaccgagaggtgaatgatcttcccaatcaagtgctgaaagatcaataataattattgttttgttttttttttgaaaaaagaggaagagagtggatgggtgtgcgaaaagagggagaaaga

SEQ ID NO: 28274 - DNA, 120 bp, Homo sapiens
cagcggcagcccccaaagggcagtgtgtaacaacagagcctaattaggatgatttcagtgtaatcattaactcgcatctaacacctacgagagtatttctgtttaaactaaaacatgacc

SEQ ID NO: 28275 - DNA, 120 bp, Homo sapiens
agccggcactgcggtggccggtgcagtgagcctgacgactccactttctaggccttcctgccagcagtagcagttggagaaatcctctaggactaattactaggattgcaaaacaaggat

SEQ ID NO: 28276 - DNA, 120 bp, Homo sapiens
caccgctgagtggcctgctccgcctgagccagtcacctgctggctggcccctgggccagaccaagcctagtctggccttcctagcatgtcctcctgccagccaagccggggaggccttgc

SEQ ID NO: 28277 - DNA, 120 bp, Homo sapiens
aaacgtgtgccgaataaatgtcccccttgtacaagtcatttttttttccttcctttgtctccttatttgttaaatgtagtagaggagatcttgtatgtcatccctaccgccaggttaggc

SEQ ID NO: 28278 - DNA, 120 bp, Homo sapiens
gggcggttccagaaggagaggggcaactaaccaggcagataaactatcagtgccttccgccagcccatgtgcctttagaaatgaagaacctggctccctaccctctcactgcttgaaagc

SEQ ID NO: 28279 - DNA, 120 bp, Homo sapiens
atacgccaaaaccatactgaagagtaattagtacttaacatttaaagtttatctccaaaaagtacatctgctgggtctagcacatcgcctatgcatgatgactgctccctcagcaataca

SEQ ID NO: 28280 - DNA, 120 bp, Homo sapiens
ttacggctagttcctttttaggttcaatagtgacatttcgcttttatctaattcttggattgacttctggtttggctcacattattctagtggattctctcattcttctcttctcctaat

SEQ ID NO: 28281 - DNA, 120 bp, Homo sapiens
ctacgtgttgggctgtctccgcggcatgctgtcacttgagagtggcattgtggaacctcttttgccttgggtggaggattaaaggatgtccccacctactcctttctcatgggatccctg

SEQ ID NO: 28282 - DNA, 120 bp, Homo sapiens
ggacgacttaagtgcaggaaaaaacagcacgtgctgttcacatgtacactacagatgtgagctttgtcagcagcttctctctctttttacggtaaatctggtgttcgtattacaagatca

SEQ ID NO: 28283 - DNA, 120 bp, Homo sapiens
ccacgtgacctaagagagctagagggagaagttccactggtaaaggcattgaggataattttgttagcttaatcttagcatcatgtgatgttttgttctgctgtgcagttgtgaggctaa

SEQ ID NO: 28284 - DNA, 120 bp, Homo sapiens
ctgcgttttcaggatcagacatatcgtaccgtacaccaggatacaggttttctcctaagagggacactgatcatttcctgcatcactattttgaaacatcagaaccgaaatggtttttat

SEQ ID NO: 28285 - DNA, 120 bp, Homo sapiens
ttccgataacccccattaactacaggggtcattgtggcaaaatgaatgggattagaaatctgctaaaagctgcagtatatggtacgcggtgactgacaagcctttcgctgagtagttaca

SEQ ID NO: 28286 - DNA, 120 bp, Homo sapiens
aatcgataaggcaccactttccgcagtgaactgctagaccatatagattgcctggagggaaatactgagttccctcccaggctgccagatgaaagcaggcagctaaatctccaggaagat

SEQ ID NO: 28287 - DNA, 120 bp, Homo sapiens
gctcggggcaattaggcctttcaccactttgaacgatgattataaacgggggagagggttgggagagtgaaggggagacagctctgcatgacaaactgaaagctggaagccattttgggg

SEQ ID NO: 28288 - DNA, 120 bp, Homo sapiens
ttccgttgttcagattgttatacagtgaatgtgctggggctgctgcttttccttcctttcttctttccctttatttttctttagaagctggagaagggaagacaggcagccagagcagca

SEQ ID NO: 28289 - DNA, 120 bp, Homo sapiens
atccgttcaatccctaaagcctggggcctgagtgcgtgtcggaggagggcttcctgttgggtacatttcaaaacaatcacatcccattgttcagtgcctttttgggtagagtcctgcgag

SEQ ID NO: 28290 - DNA, 120 bp, Homo sapiens
cagcgaaagaaagtgcatgttcccgcaacaattacagacaagctgcagattatcagcaggctgcaaggggcaaggtgctggggcccatttggcagagggctctgcttggagaggagcctc

SEQ ID NO: 28291 - DNA, 120 bp, Homo sapiens
gggcgtccaagtgctccgtggctgcctaggctgcgggaagcccagatgtgcaagagaaaggaactgcaggagatgtgcaaagctttgccttggttctgggcagaaaggcagggcagctta

SEQ ID NO: 28292 - DNA, 120 bp, Homo sapiens
tggcgatgcatctccattcccttgtttctgttgtcgagttccattccctttctaacattagcttcatgattgatttgtttaatttttttcttttcttatcaggccctggctcgtagtcca

SEQ ID NO: 28293 - DNA, 120 bp, Homo sapiens
ccacgttccgctaagtattgtttaactgtcaagtggatggggaggcaagatgttgtgggagtaatcccaaagtgctgctctgtggcagggctgtcagtcagaggttcttggaccatttca

SEQ ID NO: 28294 - DNA, 120 bp, Homo sapiens
gcccgcccttacacattttagtgtatttttctctggccttgtctggaacagctcaccttttctggctgtacaagataggagaaaccttttgactgcagctgcttgtttgggatgatacag

SEQ ID NO: 28295 - DNA, 120 bp, Homo sapiens
gcccgagcagacatttattctttttctttctttctttttctttttcctcttctcttctctcttcttttcttttcttagaagacagcctcttcccatccctctggagttacttcatgccaa

SEQ ID NO: 28296 - DNA, 120 bp, Homo sapiens
tcacgcaaaaggcagttacaaggactgaagtcaaggattgaaatgccagaccttaagtgtccctcaaatacatgttttcccaactagtgacttgccacagaaataaacagcaattatgca

SEQ ID NO: 28297 - DNA, 120 bp, Homo sapiens
ctccgtgtggcccacttagtatttcaaagcatagaaatgaaagacagtggggcacacatgctgcagaaccactaaatgacagaatcatcactggcctagtttttgagtcactgtgacaga

SEQ ID NO: 28298 - DNA, 120 bp, Homo sapiens
agtcgctgatgacacatcaggaaaagggaagaagatgtctctgctttagaaaagagacttaaagaatcttactttctgactggaaatgcgttttgaattgagactattttttagatggtg

SEQ ID NO: 28299 - DNA, 120 bp, Homo sapiens
ccccgatagagacaccttatccaacagccggtgagtgtaccagcagagagaatggggcacacattttgagatttagggtgctggggatggcatcagttactgcagaggaaatttcaccac

SEQ ID NO: 28300 - DNA, 120 bp, Homo sapiens
cctcgccatgaacagcaaatgagtcaagctaactaatgcagagggttggactcgttttcttttgaggagtcctgggagaatttccatagtgtctttttgttcatgcaacccagttctttt

SEQ ID NO: 28301 - DNA, 120 bp, Homo sapiens
acacggtcagcttttgatgattccgagagggaagagtgaaggtctcacagtcctctgtatttaatatttggctcttggggaaagctggtagctcaagttgtataaaacttgcacagaact

SEQ ID NO: 28302 - DNA, 120 bp, Homo sapiens
gtgcgcaggccagttagagtttttccagggaccccttccacctggctgtctcatttacactctgggtgggagccacttcttttcttcttaggtattttcatgttcttttttcatttccaa

SEQ ID NO: 28303 - DNA, 120 bp, Homo sapiens
taccgtattctagctgcaaagttagtgtgtgtctttctcaccccctggccattcacacagagggtctggtgttctgtgaagatgctccccttgctactgttatcacagtgtgctcggatt

SEQ ID NO: 28304 - DNA, 120 bp, Homo sapiens
ccacgttttttgactgggttatgtctgctctcatttttccttttcttcctcctgtgtttggaattaaatcttctttagtggaacagggaagaaggtacagaaactccacaagaaagaata

SEQ ID NO: 28305 - DNA, 120 bp, Homo sapiens
tgacggcaattttggtccttaagattgctttttctgttttgtacacttgagtgcatgtgtacactgatggacatgaacattggaatatgcagatcgaattccagaccaccaagtgattca

SEQ ID NO: 28306 - DNA, 120 bp, Homo sapiens
ggccggaattgaacagtgcctggaataagatttggaaagcaaagttttgctaataagtaattctgaggaaaggacagagaatgaatcactatgaggttgaatgattagcaaagtgagatt

SEQ ID NO: 28307 - DNA, 120 bp, Homo sapiens
tgacgatgatgtaactaaacatgctattttaaattacttcctttgaatagagtttcttgtagctgaagaccttttctttgctgctggatgggatatgtaaattagagccagaagcttggg

SEQ ID NO: 28308 - DNA, 120 bp, Homo sapiens
caacggaagttcctaagacaatgcacaggccaggaaatacctaggggatctgcagagctgggaaggagacaatcagtgatgctggacaggaatcagggaaaagcggaggagaagaaacca

SEQ ID NO: 28309 - DNA, 120 bp, Homo sapiens
atacgttaacttatttaagttttgcaactctgtagaagtgggactgttgactccctgctatgtctctgtcttcacctcactccctggattgttctgaacccctaacaggcactcagagag

SEQ ID NO: 28310 - DNA, 120 bp, Homo sapiens
tatcgttccctgttttacagatgagatttaggaaggtaaagtaagccattcaaggtcacacaactaggaagagatggagctagaattccagcctgagactgactctcaaaaggagcctct

SEQ ID NO: 28311 - DNA, 120 bp, Homo sapiens
ctccggatgcaggcagggcaggtgctcactgggcagagtgcttctcatacaccttcaggaactcgagcacgtcgtcgggggatcccaagatcaccggcgccctctggtgaatgtctgtgg

SEQ ID NO: 28312 - DNA, 120 bp, Homo sapiens
tgacgtctaacacggcctccttcccagtggtggccattcccccagccttctccatgacgtaggccatggggttgcattcgtacagcagtctcagctggaaaacaagaccgggtagcggcc

SEQ ID NO: 28313 - DNA, 120 bp, Homo sapiens
ttgcgtaaaaaagagacttttctgcagcaaaacatgcagagctggtgggagtttccaagggaacgaatactgtatttttccttcctgtgaggctgtaaaagtttcctcccaccccaggtt

SEQ ID NO: 28314 - DNA, 120 bp, Homo sapiens
aagcgatcattgccttctctttataccatggaaactggacttaatgagtgattctgtgtgtgttggatggagcttcgcctattctaaaagcaataaaaaaaatccatggtggtgtctggc

SEQ ID NO: 28315 - DNA, 120 bp, Homo sapiens
gaccggctcctccaaacagtgtgatattgtttgcaactctgtgtgcattccttttacgattctccgaaggcttttgggttggaattcagtgtattatacgtcttggcattcacctttaaa

SEQ ID NO: 28316 - DNA, 120 bp, Homo sapiens
gagcgacagctttctgcaggtgtttcctgagtctatttccacataggtgtcatggctagttttgaaaaaccaaaaaaaaaaagaaggagcctcaatatttgtgttcaggaacaatttcgg

SEQ ID NO: 28317 - DNA, 120 bp, Homo sapiens
gcccgaggcagctacagctggatgatggtttcagtaaatagaaatgccttcattctggatgccacatgctgcaaacagacccaaatacatccaaacacataggttttgtgtttaagggaa

SEQ ID NO: 28318 - DNA, 120 bp, Homo sapiens
ggacgggggtggggggaagaaaggcataaggggctgcgatgcctcagggctcacagtgactgctgggggcttcactgctacccctacgcttgaagtttgccagaaccccacacagagagg

SEQ ID NO: 28319 - DNA, 120 bp, Homo sapiens
gcccggcccccaactttcttaataattaaatccaatctcttgctagacagacttttttgttgtagtgccaaggctgcttgaaattttcattttgctgtctaatttgcataaacttgtaat

SEQ ID NO: 28320 - DNA, 120 bp, Homo sapiens
taccgtagtaaaatattcgatgcatatttttcatggaaatattgaagaaacatacattctcagacaagaaacatcaaatgtggccattgcttttgtaccactcaatatgcaactcagact

SEQ ID NO: 28321 - DNA, 120 bp, Homo sapiens
gtacgcttcagaaaactgaaacatgctatactttgcaagcaagtagcaatcaaagggatacattctttcaccttttaaagtagagtgaaatcacttccaatcttatctttgcaacccaaa

SEQ ID NO: 28322 - DNA, 120 bp, Homo sapiens
gtgcgaagatgtgatcaacaaagccagagtcaacacaagctgccatcagggaagccagagttcatcacatcacatcatgtttcagcatagttcagggtagacatatactgatggaataaa

SEQ ID NO: 28323 - DNA, 120 bp, Homo sapiens
aaacgagaagattccatgagagcatctccagattttttccatgtacacaatcctatacccacaagcacttccagatgagaaataactgtctttgcctttacaagcagcttgcctgttttg

SEQ ID NO: 28324 - DNA, 120 bp, Homo sapiens
tgtcgcatctgtggcccaccctccccagagatcaggtcagggcctcatcaagccacacatggggccactgtgggctcattacctccaacctacttctggcagccttctccccagtcacct

SEQ ID NO: 28325 - DNA, 120 bp, Homo sapiens
ctgcgaaaagacaaatgcgtatagcagtcaacggaagaaaaagaaaatatatggttttaagcaatcccttacacgtttggttgcgtagctcctccttaggaagactagcaaacacgttag

SEQ ID NO: 28326 - DNA, 120 bp, Homo sapiens
agccgtggacctgtgtctcaccctgtcctaccctgtttttctcttctttctgattttcattgtcctctcattcccacaactcctgtgcagttaatctgggctccccaaggagtcttccat

SEQ ID NO: 28327 - DNA, 120 bp, Homo sapiens
tgtcgtctgtcatgtgcttatgtaaagccctttataagcaaattaaacaggtgcatgccctccacctttctccctggacccatcctgttcttcctttcttgttcagtagctttgccatcc

SEQ ID NO: 28328 - DNA, 120 bp, Homo sapiens
gctcgggaatctaggagcagcttagccggtgtctcttgctcaaaatatcttgcaaggttacagtccagctgttggccggggctgcaggtgtctcaaggtgtgccaggagctggaaaatcc

SEQ ID NO: 28329 - DNA, 120 bp, Homo sapiens
actcgcgtggctgttgcaggctttggttcctcactgactgttggccaaaggtctctgtttcttaccatgtgggtgcctccctaggctgcctgagtgacttcatgacactcatggcccaga

SEQ ID NO: 28330 - DNA, 120 bp, Homo sapiens
tgccgtcacctctgctgtatcctgttgcatccctgtcccaggtcaaacctttgcattatcacggcctgtatacttgtagaataagtgtactgcaactgcctgtttgctctacacaggtct

SEQ ID NO: 28331 - DNA, 120 bp, Homo sapiens
caacgatgtaaatattaggagtaaggggttgtaaatattggaggccagctcagcagctggctacttcacagaagtcttcctttccttctccctcttcttcagcacatcacttactaagtc

SEQ ID NO: 28332 - DNA, 120 bp, Homo sapiens
atccgattgtttctttggggaagtggtatggaagctgatggaggcagccttgggggccacatacctaagggcacaagtggaatgtgtaataatatgctagcatggcctccaacccagcct

SEQ ID NO: 28333 - DNA, 120 bp, Homo sapiens
ccccgcttcaccagcccaatacccatttcacccgtgactcagaagttgaggagcttccccacagtcatttggtaagttggcaacccaggtggtacaaaggtgtttagactttctgatctt

SEQ ID NO: 28334 - DNA, 120 bp, Homo sapiens
aagcgtacagcaactgcctgtttgcgctgagatccattttctgctcttattgtgatcttctccaagtgacaaggaacttcatttcctaggctctcttgtcttctggcttcctgctaggtt

SEQ ID NO: 28335 - DNA, 120 bp, Homo sapiens
cctcggcctcatacagttaaacctctctttttacctgaaagcctcaccattgctgcttatttactgagctgccaagggtctgaatttttaaaaaggaaattctaatggttcttggtaaac

SEQ ID NO: 28336 - DNA, 120 bp, Homo sapiens
tcacgtgaagggcttcaaactgatccgtggaagagacccagaccttcctggttgccttgaagccatcatccctcctgtgctttccctgagccctgaaatgtgccctttctgctgacgtga

SEQ ID NO: 28337 - DNA, 120 bp, Homo sapiens
gaccgacctccaagagttggctcttaccagcttatcacaaaagctcttcaagtgcctcgagaagaaattatacagcagagcccaggatcatatattggcctcattatggtttttctcttc

SEQ ID NO: 28338 - DNA, 120 bp, Homo sapiens
ctgcgtgatggaaacttctgaaagaaccctctgtcaccccacccgcatcttccaaatagagccagagaggcccagagtcagaaggctaagaagaccaagtgtgtggccagcagctgcggg

SEQ ID NO: 28339 - DNA, 120 bp, Homo sapiens
gcccgccactcttcctctgaatgcctagccctctccgcctgtgttcacaggccagccctccccggggcatacacagcattttgtaaatagtaactgtgtgtcttggttgagataatcttg

SEQ ID NO: 28340 - DNA, 120 bp, Homo sapiens
acacgcaggcattcagcctactgaccccgctcgtggctgtgtgctatagacacacagaaatacagtgatccccaggctggtttggcagggcactcattacatagagggaacagacaaaga

SEQ ID NO: 28341 - DNA, 120 bp, Homo sapiens
agacgagctgctggtcatttgtgtcacacactctagcccctttgcagggccctttgacccctttaaggatgtgttgatcttgttagaagctgaaacagcagcaggagggtcattttgttg

SEQ ID NO: 28342 - DNA, 120 bp, Homo sapiens
ttccgtttttataacttctattttcctattctttagtcatctcagttgctttctgctggagcattttctgattctcttcattgctcggaaattaagaagtctgaaaccagacacaacaag

SEQ ID NO: 28343 - DNA, 120 bp, Homo sapiens
tatcgagctctgaactctgtgcctcgtgttgcgctgagtacatgtcatgtatcatcccatttaagacttgcatcctctatggaatagattccatttgggcattttgtagatgaggaaact

SEQ ID NO: 28344 - DNA, 120 bp, Homo sapiens
tctcgcccgtctcctaagtgatagtgccgaaattctacccagttccctgcctgtggagcctgcagtctgaaccattatccctggtgccacaatttcactcacctgtcccctaatcttttt

SEQ ID NO: 28345 - DNA, 120 bp, Homo sapiens
ccccgtttttgtttcctgttgaaagtgtgatggatgccttggtggaagaccagccccgcatcctgctgttttgcctgtgcctctttacttacgaaggctgggcccttctctccccttgag

SEQ ID NO: 28346 - DNA, 120 bp, Homo sapiens
ccacgttgtcgaaggcatctccagggagatagccagtcccggaatttcttaggaggtgggacctcaaatcccaattagaaacactccaggaaacatacatctttatttgttaaacaagta

SEQ ID NO: 28347 - DNA, 120 bp, Homo sapiens
agacgctcagtcgttttaaataagtgaagtaaacattcccttccaggggagcgccctccctaggcgctgtcactttgaagctcagttttaaggttttcagttggaacatgcagtgttctt

SEQ ID NO: 28348 - DNA, 120 bp, Homo sapiens
taccgtggaagagagactgttttattccattcagggactataattacagggcgcccatcggcatggttaaagttaaggttgtttcagcttttccaatgtaaactcatatttcaggggttt

SEQ ID NO: 28349 - DNA, 120 bp, Homo sapiens
cagcgggcagggcaccagaacatgccctccttgttctccgaagacatgagcctcccataggactgctggcaaagctgtttcgtccgcgggcttcaagttcattgtgacagaactcctggc

SEQ ID NO: 28350 - DNA, 120 bp, Homo sapiens
catcgtgaggccatggccactctcctcttccccgcagccctgtccctctggccctacatgttgggacacagtgagcagcacaggtacagagctataatagagacccactggggggaccac

SEQ ID NO: 28351 - DNA, 120 bp, Homo sapiens
cttcgttcccttttcctgatccacatggtggggaaggggaggagggagtttgcctctctaggaatctctcttcagctcggtggcatttgttgcagtaagtagctttaggtgggtctgttt

SEQ ID NO: 28352 - DNA, 120 bp, Homo sapiens
taccgcatgttttcagggctggaactgtggagtgatcttttcctgacctgactggtctttgtccaaataggacattgagcaagccagaaaccaggccccagcagaaaaaagcaaatagag

SEQ ID NO: 28353 - DNA, 120 bp, Homo sapiens
cctcgtcccagtgggatccctaggctttcaagatcaaaggcctactttgtgtgtgcctgttcataagccagagagaggggtacagaagtaggcaggctgtagtgtagactctggtgccca

SEQ ID NO: 28354 - DNA, 120 bp, Homo sapiens
tcccggacacagaataagaacaagggagagaaccagatgagaacagagaaaaaaagaagaggagaagtaatggcaaagaaaggaccagaggcagaaggcgagggaagcagggaggaggag

SEQ ID NO: 28355 - DNA, 120 bp, Homo sapiens
gcacggggaatatttttataggaggcgtggaggagaatgctgcgatagatgtttatttctcccaccctgtgggctggcttcattttcttgatagtgtcctctgacgcacagaagtcttta

SEQ ID NO: 28356 - DNA, 120 bp, Homo sapiens
caacgacttccatgacaacagagccaagctggcactcaggtctcttcacacctggcctgtgctttcctgctccaccaggctgccaggggtggttcccatgagctgttttaggcccatttt

SEQ ID NO: 28357 - DNA, 120 bp, Homo sapiens
ccccgatataaaaccactgaatgtgcaggccctctcatcagccagtgcttgacgagtagtacacctggtgcagcctggattccacagccatcctccctgtaactgcatgggtcgggtcct

SEQ ID NO: 28358 - DNA, 120 bp, Homo sapiens
ctccgtgcttctgtaggacctgctcttctgaagcacgttctgcgagtgaaggctgcactacgtctttcatgaggctagacggtgctcttcttgtcctcagagttgtttgttgtttggttg

SEQ ID NO: 28359 - DNA, 120 bp, Homo sapiens
caacggctttgtttatgaaaagcagcttactaggaaagttgcttcatcctgtgatcgtggctagtttgtgagtgattaaattccctggcctcctctttggaagcaatgaccagtcattct

SEQ ID NO: 28360 - DNA, 120 bp, Homo sapiens
ggacgtttctttcaaagtcactgggctggctgagcaggacccccacagaaaaacagtgttcttgggcctcaggcatacctcagggcgatgctcagggatgtctgagcaatgtcaagcctg

SEQ ID NO: 28361 - DNA, 120 bp, Homo sapiens
cacgcctctgcctttgctgttgacttgaggatgtgcttttaacctattgcacctggcttcacactgagtgggcaaaggacagagggcccactggtcgagggtccagctctttcggaggac

SEQ ID NO: 28362 - DNA, 120 bp, Homo sapiens
ggacgtcttttgccccagggccatcctctgcacttttatatgatgaggtgcagcagtgtttctaattctctgttgcttgagaagtatggacatttccctagatcttttggcagttcctaa

SEQ ID NO: 28363 - DNA, 120 bp, Homo sapiens
tgtcgtagctgaatgatgtcacttcaagcatcacgtaattttccagctggctaggatggaaaaggggtttattattgtggcatgtttttcacagcgtctgaaaaaaagtgaagcagacag

SEQ ID NO: 28364 - DNA, 120 bp, Homo sapiens
cctcgaatacattaaactcaaaagactaggaggtgggctgcccagaccctggtctcagttctgtccctactgacagagctctaacttcatctttgcctcagtttctccatggaaaagatg

SEQ ID NO: 28365 - DNA, 120 bp, Homo sapiens
ttccgtatgcagggctgaggtctccacaacgttctctcgggatgtgttgccctggggtcagaagggatgtatccgctgctctgctggtcagtagctgagccttctgtatggtctgcagag

SEQ ID NO: 28366 - DNA, 120 bp, Homo sapiens
tgtcgttgccatgctgtttttcctgctagcaataggccacagctaacgctaaagcaaatggtgaagctggctacagtgttttgtgtccccagcctccccttccgccctcatgcctctctc

SEQ ID NO: 28367 - DNA, 120 bp, Homo sapiens
tgtcgtctgtgctgtgttttggagcctttccctggcccccatgagcacccaccttgaaccttgctaggatccaggtatctgtcatttacatctccatgtgacatgaaaccataagcctcc

SEQ ID NO: 28368 - DNA, 120 bp, Homo sapiens
catcgttgtttgcttccctgacgtagctgcccactgccctatagtatcactgctacttccctaacctcagtttctctctccttcatcttgttagctgcctccccagcttgtcttctgcat

SEQ ID NO: 28369 - DNA, 120 bp, Homo sapiens
cttcgtcttattttcttccctcatctttctatctgcttccttcatctccatctttatttccctcatctgctcccccagctcctttctctgcttctttccttgtctacttccctcatcttt

SEQ ID NO: 28370 - DNA, 120 bp, Homo sapiens
gatcgtctggcctctgccagcttccctgcaccttgctccctcccagaatggtagtctgctccaggcctgaccatatgccttgccattctctaagcacatcacacacttcctggcccgacg

SEQ ID NO: 28371 - DNA, 120 bp, Homo sapiens
tcccgaaatccctcctccccggccgactcctccttccctgaggatcagtgctgtcaccaccacctcctcaggaagccctggtgggcaagggggcatctgggttctcccttcacctctccc

SEQ ID NO: 28372 - DNA, 120 bp, Homo sapiens
tcccgtcacctgctctctgatgttagtgttcctgcccatctctccctcccctggctgctgccccaggccctgtctgtaatgtccccatggcctagcagagactcagtaaatatctgttga

SEQ ID NO: 28373 - DNA, 120 bp, Homo sapiens
gaacgaattatcaggaaagtttgatttccagaaacacccgtggatagacgtcttccctccccagtgggtgctctgctgccttccctcacagaggtcggggccgtgtggcccagtgagcac

SEQ ID NO: 28374 - DNA, 120 bp, Homo sapiens
ggacggcagctggttctgactcagtagggcagagtgtgatggcctcccctcccccagagtgagtccaggcagcacttctagttatgtgcacacagaatcatctgggttgcattagcaggc

SEQ ID NO: 28375 - DNA, 120 bp, Homo sapiens
tgtcggtgggatgggtgggttccagaacaaggcgacctccgccaaacagcaggcccagctccacggccagcagcacaagcgagcgtgcacggttggttttttgttttaggcactaagagg

SEQ ID NO: 28376 - DNA, 120 bp, Homo sapiens
gcccgggagcagcaggagctgagggcttgtctgcgctggcgtcgcctccaggacgagatgcaatgctcccccgaggagatgcaggtgttaaggtaaagctgcatggtgatccacagccct

SEQ ID NO: 28377 - DNA, 120 bp, Homo sapiens
atgcgtttcgatttgccttccgtcattttcctggtgactgtttaggaaaaaactagcatgaggccatttccgggggtcagatccttcgtttgaagttctaacagtcactttacgtggtgg

SEQ ID NO: 28378 - DNA, 120 bp, Homo sapiens
ctgcggatgtggcgagggttggggtttggcagcctggcagacagtaaacctataaagccaaaggggaaaaaaatctttaggaaaatattgattcctaagtgtttagtggtcacagatgta

SEQ ID NO: 28379 - DNA, 120 bp, Homo sapiens
catcgtagcccagcaggaagcctctgctgctcccctgtgcagcaggattccatggccagctcctgagttttgtttgtagactgtggcttgtggcatgtgcaggattatttcatgccattt

SEQ ID NO: 28380 - DNA, 120 bp, Homo sapiens
ccacgtttgtccctctctgctttgctccttttctttgtgaaatgtttatctgaaacctggtacctaggctccgggagcactgtggttgctatggcaacaggaggttccatcacctcccct

SEQ ID NO: 28381 - DNA, 120 bp, Homo sapiens
cctcgcctgttcttagatggccgccctgaaggcccatctactttcccaggcagaggcctgccttggatggttctgctgttgttgtttgtttttaaatatacacccccacttcgcctgact

SEQ ID NO: 28382 - DNA, 120 bp, Homo sapiens
taacgcaaatgcaccccagggagggagctggctgggacttttgtgcagcactgcagaatgttggggtatggcaagctgcacccttcccacagcaaagttccctgcgcttgcacgctaagg

SEQ ID NO: 28383 - DNA, 120 bp, Homo sapiens
aggcggactcccaagttgactcatccattgtttcggaaaggagatctagcggagggaagtggagcgggccaggagccaggagacctgtgttcccgccccaaagccattgttccagcatct

SEQ ID NO: 28384 - DNA, 120 bp, Homo sapiens
taccggccggtcacaggtggtgcgcagcactgtgagcagactgctcggtgatgtccatactaactggagggcggcgcataaggaggtggggaatttctctctgaaaatgagctgccttgt

SEQ ID NO: 28385 - DNA, 120 bp, Homo sapiens
aagcggggctggtaactgtaggctctgtgagagggggtgtgttggcccaggaagcgagactgggaaggtagcagagggacatgagggccagagaggtttgctttcaggtagggcgcccag

SEQ ID NO: 28386 - DNA, 120 bp, Homo sapiens
ctgcgagctgcctcactgtgcaaatcccttcacctcttaaaggctcagtccctccacctaagaggtcatttccattacgtctcttagtccctttgatccctttggttttgcataaccata

SEQ ID NO: 28387 - DNA, 120 bp, Homo sapiens
cttcgtattcagaaattttgtttgcctaaatttaggctaaccatgaattgactgcatttgaaaggcttattgcacatcaataaggaaaatattgttatcagatgtacttacaatgaggag

SEQ ID NO: 28388 - DNA, 120 bp, Homo sapiens
ttccgaacctgccctgaattatatagtctaggtttcgtttactcccatcccctagaattctcccttaaatggacacagagaacctggaagttattgaaagtaaaaggaagaaccagactt

SEQ ID NO: 28389 - DNA, 120 bp, Homo sapiens
caacgtaaaaatctcgctttatgtcttgataggtttccacatgttggcggatgcagtggaagcttctcttgagatctttgccacactgttcaacatgtttgaccactctgtcctaaaaac

SEQ ID NO: 28390 - DNA, 120 bp, Homo sapiens
aaacgctttcttcttaaagcactttctcctcctggcttctgtgtgtcttactctccttgagttccctctgcctctgtggccagtccttcctcacctctcttgctggcaggttaacagtct

SEQ ID NO: 28391 - DNA, 120 bp, Homo sapiens
atgcgtctaacctcctctagctgataaagaaccaaggctcagaaagactgaataacgtgtctaacctcctctagctgataaagaagagaacagggatttaaacccagggacggaaactct

SEQ ID NO: 28392 - DNA, 120 bp, Homo sapiens
tctcggttccctataccatattcctgtcttcagggaactgagagcatttagttgcattaaaacaaataaaaaaacaaacaaacaaaaaacctgcaggtatcttgggctctggaaggacat

SEQ ID NO: 28393 - DNA, 120 bp, Homo sapiens
aggcgtgaaccactgcgcccagcccagatgtttcttagattgactttgctgtgtttcctttgtatccgatgtgtctgagattgacttccttgtaagtcattcgttaacaggtttcttgta

SEQ ID NO: 28394 - DNA, 120 bp, Homo sapiens
agacgatttgctcagtttcaaaatgttaggggtcacatgccatttttcatttgttaattattgaagatgtctttcccacagataagaccccaaggactctcccagactcttcatctcctc

SEQ ID NO: 28395 - DNA, 120 bp, Homo sapiens
actcgtgcagcagtggtggctcttgcctgagatgcatggcagcttccgaaaggctcgccatgcctcctgtctccagggtgcagctggattccggcagcttctgcctaagtgctttcagtt

SEQ ID NO: 28396 - DNA, 120 bp, Homo sapiens
gttcgcatcaggcagtggacccccagggtgcatgtacccctgcacttgtctcattggttggaaaaatgtacagtcccaggtgcttccagctccatgtgttcacaggaaagacaggctcag

SEQ ID NO: 28397 - DNA, 120 bp, Homo sapiens
tgacgaagagtcgcagagagcatgccaagggctggtgtgcacacgggtggggtgtgggcatggccggccatacccccttttaagccaaaggctcccaagtctccaccagcagccccactc

SEQ ID NO: 28398 - DNA, 120 bp, Homo sapiens
tgtcgttctttgctttaccctctccctccaggtagctcagagacccctcctgtggtagtcagctcgggctgccataataagttactaaaggccaacataaatttatcttcccacagtctg

SEQ ID NO: 28399 - DNA, 120 bp, Homo sapiens
ctccgacaccagtcacacgccccaggttgtctaccctgtgtttttgaccaaccaactataaattggggttcccatggctggcacgttgggtttattaatttgctagagcagctgacagaa

SEQ ID NO: 28400 - DNA, 120 bp, Homo sapiens
ctgcgttcagctatccagaagctctcctaactttggggggtttatggaggcttcgttatacagacatgattcgtcaaaccattggcctttggtggtcaacttgacctttacccccgtccc

SEQ ID NO: 28401 - DNA, 120 bp, Homo sapiens
aggcgtaattgtgaagatccagaggattttagaaattatatgccaggaaacgaggacaaaaaccaaatatacactccacagtgtgacagccatcttctcgctgtgtcctcaagcggcctt

SEQ ID NO: 28402 - DNA, 120 bp, Homo sapiens
atgcgatatttccaagggccttccccctattctgaaatagaaattgagctttgtgatcatgtgtattcattccaaggtctatgtgttaaccttttgctaggatttgaacctgttattagt

SEQ ID NO: 28403 - DNA, 120 bp, Homo sapiens
agccgacgcagttcacttgctgttgagtctaataagttatttttaaaaacgtttgccatgtcacaagtagaagcagattattcaatttctcttttttcctgcatccactatatttttctt

SEQ ID NO: 28404 - DNA, 120 bp, Homo sapiens
tgccgctttgaaatgtagccattgcttttgattgtctactttgttttccttgcctccgttcatcccctccacattgcccttgcctccagccccgaagggtctgtctacacctgcaggctt

SEQ ID NO: 28405 - DNA, 120 bp, Homo sapiens
attcggtgaagtcatctgtactaactctgctgggggtcacaacctttttcctccgataggagggggcagcttttttcctgccgtgtggaaagcagaacctctgacctgcccgggaaagga

SEQ ID NO: 28406 - DNA, 120 bp, Homo sapiens
ggacggactctgaccacgggcgctgagcaaggagctacacggtagaacggcatcttccagggatgtttgttttccccttaaagaaaatctcgaaggtgctgagtagtaggcacagtctga

SEQ ID NO: 28407 - DNA, 120 bp, Homo sapiens
taacgaatagtgaaataaagtaaattggggactgagatgtaccatgcagataaagtgatgtaaagtgctctgccggcctttccccgccttctgcttccagtcatcccacccaccagagaa

SEQ ID NO: 28408 - DNA, 120 bp, Homo sapiens
caccgttgtgtatgtgacccatcgttgactgaaatgtcgttatgcagcgtgtggctctaccttcaacatttactcctgatgacaaaggtaaagattgctgagtgcccccacagacagcaa

SEQ ID NO: 28409 - DNA, 120 bp, Homo sapiens
tctcgctcttaatgactttcttgagttatatgtcatgtatacgttacatgccaggaaattcatccacagacagtttgttgagttttaagaaatgcttatagttgtgtacctgatacgaca

SEQ ID NO: 28410 - DNA, 120 bp, Homo sapiens
ctcgtgggagtgatgtgggtgctttgtgatcggggtgctttggccgtgggtgtatggagtccaggcgcactatgcctgtggtgcacagtgcattccagcagactggagaattacgtcact

SEQ ID NO: 28411 - DNA, 120 bp, Homo sapiens
tgacgtccatattaatgctttataactcacttttcctttaattctgctttctattatagatagagcattgtattagaatttccctgcccaattgtgtatattatttgtgttaggttatcc

SEQ ID NO: 28412 - DNA, 120 bp, Homo sapiens
ttccgcgagagccattggccccagatgtccgcagtgttttggtccatattactgagatactagcctagtgtgtctggaaggcagcgccagctggtgaggaacgcacatggggcagagttt

SEQ ID NO: 28413 - DNA, 120 bp, Homo sapiens
cctcgtttgctgaaaactgattctctcaggggcttgcctgggactccctaggatgtggtcctctatacttgctgccgtgaccaacatgaaatctcctgtcaccgtgcactctcttgggga

SEQ ID NO: 28414 - DNA, 120 bp, Homo sapiens
ctgcgtgtgttactgatgagccatgccctgtaaaccggtgtggccccttccaaagcctgtgttttctcagtagggtaaagttactcgagatcctcaagtgtaagtgctgtttcttttttg

SEQ ID NO: 28415 - DNA, 120 bp, Homo sapiens
ctgcgtgtcaccctcctgggccctcacacctgccatccattcagtgccatgccagtcactccttcacccccagaatttgagagacgccatgtgttagcagctcctgtttcagcactgatt

SEQ ID NO: 28416 - DNA, 120 bp, Homo sapiens
agccgtggtatgattctggtctctgcataaagtaaccaagctttgttttctggtgtgatacctttcctgtatttttattacagttcagcatatttagtttcttgttttaaaccaactcaa

SEQ ID NO: 28417 - DNA, 120 bp, Homo sapiens
gagcgtgttatatatttgtgactttgactttgtgacttcaaaggtggtttcatgcaggctactttttaaaaaaataattgaattcagttgttttgaaattctgcttttttggaaagatct

SEQ ID NO: 28418 - DNA, 120 bp, Homo sapiens
cagcgtctgagcctcatgaagggatcgtgtcggactgtgagaggaaggtttgtgcattcgtcctttacctttgcctttctgcatgtggccagtgatgtaaaaactggcagcagccatcct

SEQ ID NO: 28419 - DNA, 120 bp, Homo sapiens
aggcgcaatatggaaattatggaagatgagcttcaaggttcagcagttaaccgtgggtctatttctgctctactttatgggttacactgaaatggatactcaacttatttctaagaaaca

SEQ ID NO: 28420 - DNA, 120 bp, Homo sapiens
ttccgacccttctctgctaggcttgatcccaggctagtggaaagtgtggtgttcacagtgtgcagttttaccctgggtgtgcagtcacatgcacccccacatgacatgagctctggtggt

SEQ ID NO: 28421 - DNA, 120 bp, Homo sapiens
gcacgtacaaaatcaactttgctttcccatcctctgtaaaatgtagtgcccagcctctttattatgcattttattactcacatttagaattatattgctatcaggaatggtttcttgaga

SEQ ID NO: 28422 - DNA, 120 bp, Homo sapiens
gagcggaagaaaggctgtgtcccacgatatgtgatcctgctaataaagtggatgatcagacacaaagccaagttcatcttcccaccttggggccaccacagagccacgtggtaaccccct

SEQ ID NO: 28423 - DNA, 120 bp, Homo sapiens
gaacggcattgaggcccaggccatgtgcatttccccctgggctgcctcctctgaccccaggattccagctcttcctcagaagttgtctccatctctgcgatgaaagaggagagcagggac

SEQ ID NO: 28424 - DNA, 120 bp, Homo sapiens
ggacgcctattgctgatgggcataggcattcccagttccctcctggcccaagctcctggaggtgggaccacacatgacagagcgacacccagcttgtcctctcttttgcaaagtgcagga

SEQ ID NO: 28425 - DNA, 120 bp, Homo sapiens
acacggtaaacagtctcccttcctcaaagattgtacctggaaagccatggctggttaattttttccctttagaatacataacattgtgaacttcagaaaataccataatcagggagttcc

SEQ ID NO: 28426 - DNA, 120 bp, Homo sapiens
gatcgtgtggatatgtgaattgcaataaataacaggctctcacgttttaccagttctttttactacttagacattttgtcaggcttctcaaaccaaaaggctctgtgccattcaggaact

SEQ ID NO: 28427 - DNA, 120 bp, Homo sapiens
ttgcgctttaatcagtgtaggaaatggccttatgagaagatggatttgtgctagaaaaattgagaataaggaaactattcagaaataagatttaaaaaaaaaaaatcatccttgtggtaa

SEQ ID NO: 28428 - DNA, 120 bp, Homo sapiens
taccggctgtaataattaaagccatgaaaaaggtggtggggttatgttactcattaactggaatcgctcttagatttgatcaagacgcggtggcccctggcgctttgtttcatgtttgtc

SEQ ID NO: 28429 - DNA, 120 bp, Homo sapiens
acacgctttgcctcggcctccgtggcgctataaaagcagcagagcagttaaagaaccggacccagaaggcccgtagacctcctatctagccgccttttctcccctccccccaaacccaac

SEQ ID NO: 28430 - DNA, 120 bp, Homo sapiens
tgccggctgtgttggggctggtttgtaccttgttgaagtgctgagatgagaacttctcattagagtaattgcctaattgccgggtgggagcggcccatccggggcggggcggggtgaggc

SEQ ID NO: 28431 - DNA, 120 bp, Homo sapiens
aggcggggcctggggcgcaggggcggggcgaggtgccggcggccgagatactcacgggcgcgggacctggccgggagactgacagcaccgggaccgaccacggcccacccctccggccgc

SEQ ID NO: 28432 - DNA, 120 bp, Homo sapiens
ccgcggcggccgggaccagaacagcgcaggctctccgcccacgcctgccctcggctcccagtccgcgctgccgccgcccaggtgacacgcagggacgggagcggggctgctatgtccctc

SEQ ID NO: 28433 - DNA, 120 bp, Homo sapiens
cctcgggcgcgctttgggacgttgctgagtggctactgcttgtgctttcttgcttccaagctggcggtaaaccttttaaattcagagtgattcaagggcataggcgtcggaattgtgatt

SEQ ID NO: 28434 - DNA, 120 bp, Homo sapiens
tttcgtgcgtgttttatttaccaggccttcaaatcaaaaaggccaggcaaacacacgttctggggctatcaagaaagttcacacgaaggacaaatccagcagggagaaagtgacatacct

SEQ ID NO: 28435 - DNA, 120 bp, Homo sapiens
ttgcgggctcaggcttgggatttctgcagccacgcgcgcgttcacccgacgggacctcgcctgcactgccgccgggagaagcctgctctagactccggctccaggggagagggctgggct

SEQ ID NO: 28436 - DNA, 120 bp, Homo sapiens
ttccgagatgagaatctatactgtgaaatcagcagaaaagtggttcttagaaattttaaagtttgtttatccactttactttttgaggatctgtgctcactggtttttcaagctggtttg

SEQ ID NO: 28437 - DNA, 120 bp, Homo sapiens
ccacgtgggtggaagtggagtggtccacatagcatgtcccactccccctgtgcccgccccgggctcctcgtaccacccggtgctgccttgagcacatctgctgatacgtggtctctttca

SEQ ID NO: 28438 - DNA, 120 bp, Homo sapiens
ttacggggagcaaatgtttattttacaaagacaaatgtatggaagctgtttaaccacatttttgcttcaatatgctctttttaaggtctattatcttatcctttaaaaatgttgtaatgt

SEQ ID NO: 28439 - DNA, 120 bp, Homo sapiens
ttgcgaatgaaagatgctttattagttttattgtctgtgtcccaaaataacgtttgttcactgattttttttccctacttttttcagaaactacatttccccccatgagttagaatagtt

SEQ ID NO: 28440 - DNA, 120 bp, Homo sapiens
ggccgcaggttgtttaccaagtgagagtcatttcaagtctattcagaagaatgggactcacagaaacctgggagcatgaagctggctctggcagcactgtggtcgggggccttgttttag

SEQ ID NO: 28441 - DNA, 120 bp, Homo sapiens
caccgagcaatgccgcctgctccgggatgtggggaataccttgcgcaggtggttctgcctgtgtccagagggcggccagggctggcatcggactcttccactgtgtccggagatttgaag

SEQ ID NO: 28442 - DNA, 120 bp, Homo sapiens
ttccgaattcctgcaggtgaacgtttaataaagtgtatcttttaaaagaacagcatccacctttagcttgtctgttttcaatgttgtgcaaacctacacacctgtggatacacagcagga

SEQ ID NO: 28443 - DNA, 120 bp, Homo sapiens
tttcggggaattagagagcagtgtctccgcctcttactgtgtttgttacaaatcagcagcactgagtcaaatctgctgcaggaacttaaggagtggtgatttgaaagggaaccctcactc

SEQ ID NO: 28444 - DNA, 120 bp, Homo sapiens
ggtcggaatgtgcattgaatttcccgttatgctttgcgtttagtatctgtcatcttgcaaaatcatgtttaaaacagtgaaacacccaacagaaacacctgcttttctctctaaagttga

SEQ ID NO: 28445 - DNA, 120 bp, Homo sapiens
ttccggaatacagaggctgcctgtcactgggcccggtgggctgggatgcctgcctgcttgtcgctcactgggctctctcttgttcctccaggttcgccatcggtggtgtgaactcattgt

SEQ ID NO: 28446 - DNA, 120 bp, Homo sapiens
gagcgggaggactgtcccccgctcaggggctggccatgcccatgctgatgggcttggccatgtctgaagaaaggccgagttgtcattacaaatccaaccttgcatcttccttacacacca

SEQ ID NO: 28447 - DNA, 120 bp, Homo sapiens
attcgcagccctgcagccgcctggaaaacctgcctccctgctggccttggctggtgcaccaagagtgggttcaattcattttgagttcaacgactacagaattgaactctgcatctcgga

SEQ ID NO: 28448 - DNA, 120 bp, Homo sapiens
gtccgtaactttctcggcaccaggtaccggtttcttggaaggcaatgtttccacagaccgggagggggagatggttttgggatgaaacggttgctcctcagatcatcagaggacaacccg

SEQ ID NO: 28449 - DNA, 120 bp, Homo sapiens
atgcgcagtcaggatggggctctggttccgtgggaagcgaagcgcggggctctgacaggggcaggtgcgggcgggaaggctaggggctcctctccgctgtgcgcccagggggcggggacc

SEQ ID NO: 28450 - DNA, 120 bp, Homo sapiens
aggcgctattggaaattcaagtcagagtgcatttgatatgactagctttgggaaacactgttcacaggcccccgtcggcaagaaaaaaggaggcgctctgctccggccgtgccctggatc

SEQ ID NO: 28451 - DNA, 120 bp, Homo sapiens
cagcgcccgttgtttacatagcctattccgtgagcaggatgctgacagaacacaattcacagaatttccacacacaggtccaaccataacaaagtctgcagcttttacttttgcttacag

SEQ ID NO: 28452 - DNA, 120 bp, Homo sapiens
gctcgctcattagttccggggggggaaatagagtaggcttcccaaaaaccaaaaccaaaaggctttagaaaataagcctgaatgaaaccatggcattaaaccgtatctataagaatgtat

SEQ ID NO: 28453 - DNA, 120 bp, Homo sapiens
cagcgttggcttggatttctgaccacaacccttgaagggaaggggctcagcagtgcctcacaatcttcttatgcatccttggtcattttgcttggccacttcctgagtaattatttcctg

SEQ ID NO: 28454 - DNA, 120 bp, Homo sapiens
acacgcacaccccccatgtcctgtcttccctcctgttcagatggaaggagtgtctctgctcctataaagtgcagctgtccacttgggccctgatcacctccactcctacctcgccaggac

SEQ ID NO: 28455 - DNA, 120 bp, Homo sapiens
ctccgcagcagtgacccgcgtcattgctggatttctcatgtcaattacaaacatgctagaagagctacctagattaaaaagaaaaaagttctccttgatcctacctctccctccttctaa

SEQ ID NO: 28456 - DNA, 120 bp, Homo sapiens
aaccggtcctgtcccaggaagaagtcttggaagcagcagacccaccccctgcatctcaccctggggccctgagactctgtgggtgagcacatttgttacttatcagaactggcccccaca

SEQ ID NO: 28457 - DNA, 120 bp, Homo sapiens
aggcggccctgcctgcacacacctgttccctgtccccgatgcggccagccgagcccccactgccacggggaggtctgcttcgggtttatgttttagggtaagaaaaaggccattaaaatt

SEQ ID NO: 28458 - DNA, 120 bp, Homo sapiens
agacggagccaaggggaagaaatttgctggtaagcaaagccccacttaaaaattttccctttctttctttttgtttctccttttttcccccttgaagcggctttccctggagtcaaagca

SEQ ID NO: 28459 - DNA, 120 bp, Homo sapiens
ccccgcttcctgtcctggttcctgccccggcttctgcccgggttcctgccccggctcctgccccggctccggtccgcggcgagaaggtgcggccggcacgaggcagccgcggggagaagg

SEQ ID NO: 28460 - DNA, 120 bp, Homo sapiens
gagcgagcgagaggcgccggcccaaggggcagccaggagccagacgaggaaagcaagggagaaaggacaatcacaaaatctctttaacatgtgtctcgtgcaaatcaaggttgtttttga

SEQ ID NO: 28461 - DNA, 120 bp, Homo sapiens
tatcgaagtgaagagcggcacaggaaacacagcattcagccggcctacacgtgggacatccccgtgtcactactgacctcaggatatggtccaaagaaagacaaaagcacgggaagcaaa

SEQ ID NO: 28462 - DNA, 120 bp, Homo sapiens
gaacgccgaggatggtgaggatcgccagcacagcaaagaaatacctgggagatcaagaggaaacgggaacacgcgctgtgacagggtggatcgcgccaccctccgtgtgcccgacacagc

SEQ ID NO: 28463 - DNA, 120 bp, Homo sapiens
caacgccagaaatgaacaaaacccaccccactgaaaaggctgttatccaaccgcagttcacattcaacacaaggtgagtttttgctttttgtttctttaccttatgactttgaggactac

SEQ ID NO: 28464 - DNA, 120 bp, Homo sapiens
atgcgacctgaatggctgggcagactgaaagcacaaacacaatgccgaggggccccgctcgtgaaaacccagcagaagcaaacaaatgaagtgaagggtgtagaatttaaacaatttagc

SEQ ID NO: 28465 - DNA, 120 bp, Homo sapiens
ttacggcagaatctctaattaagtctctagcatatcaggtaaggctttccctggcctttcattaatcacaactttctgcctagaattctgtgagttccagttttaccaaatagctccaat

SEQ ID NO: 28466 - DNA, 120 bp, Homo sapiens
tggcggggctgctctgcgggccaatcttttgttgaacaatttagcatctctgaatactcttgttttgcgtcagccaattcaaacataaaggccgcagcaccatggcagaggaggagagtg

SEQ ID NO: 28467 - DNA, 120 bp, Homo sapiens
ccacgcagggatgcgtttctggaactaatgatttctagggcaactctgatggaagtgggctggggtaggggagaggctcaggatgttctgggaaggggggggcaagatatctatctgtta

SEQ ID NO: 28468 - DNA, 120 bp, Homo sapiens
tttcggctggggcatgtatcagcagccacattaagacatttgcatcccatccatctagctgaagcataaacaggccaattagatttctgacggcttagcatatacagtgtctgctcattt

SEQ ID NO: 28469 - DNA, 120 bp, Homo sapiens
tgccgttgtgtgttccagaccctctggggtcattcagttgacttgctaaacatgatttgccctattataatctcaactataaattttcattaagacaagccttggctgcctgccacaggg

SEQ ID NO: 28470 - DNA, 120 bp, Homo sapiens
atccggggaagcactactcgctgagtctccagccatgtttgcaaggggacccgtcttctttctcacatcctcccttggcccggtatccaaagcatacgctactaatatctccaccagaaa

SEQ ID NO: 28471 - DNA, 120 bp, Homo sapiens
ggacgctgttgtatacagacttttctgctccggtttaaacagctttgacacagtgcaggtgcttggtggcttataggaatgacccaatgtgccaaaaatcccttcaacaccagagttgac

SEQ ID NO: 28472 - DNA, 120 bp, Homo sapiens
cagcgataaaactctgcaatagtaaaataacacttaacctggaggcgtccccggtgttcacagggaacagctggcacgtgagagcaacgcctaatgaacgtcttagcattaaagctacga

SEQ ID NO: 28473 - DNA, 120 bp, Homo sapiens
agacgagacactgatttcccaatgtgatagagtgcgggggttgtatcccattacacatcctcgtctcccagagttttaaacgagaagaaatagattgttctgtttacacttctgaaccct

SEQ ID NO: 28474 - DNA, 120 bp, Homo sapiens
tagcgtcaacggatgaaggctgttgctgagtttggagaaccagggaaggcacctctgtaagttcccagacctcccgataaaacgctacttacttctcagccttgtttcaggcatgtagtc

SEQ ID NO: 28475 - DNA, 120 bp, Homo sapiens
agtcggctttgtcgtggacccattctggtcggtgtggccggatgttggcctgggaggcagcatacgcgacggggtcgttgctgacccaagccgtcaggtagatgtagaaagcgctgggat

SEQ ID NO: 28476 - DNA, 120 bp, Homo sapiens
agacgctgtttagtcaactacaaaaacgggaagaacagaggcctttgagaatggggttgggggtaaacacacttctgccttgagagcacagaagctgagcttcgcacagcattacaacaa

SEQ ID NO: 28477 - DNA, 120 bp, Homo sapiens
tgtcgaaaatcccatcagaacacctttgatttctttcaatgtgcacttatcggaggatgcaatcactggcgtgtttataacaaacacagttctgcagatggcccaggaattggctgaacc

SEQ ID NO: 28478 - DNA, 120 bp, Homo sapiens
gaccgtctgcagccaaggcagagaatgaacaatctggagaaacatatttataggaggggaagggggagaaacctggcaagaatccccatgcacgtctgtgtgcagttaacctctgttgtt

SEQ ID NO: 28479 - DNA, 120 bp, Homo sapiens
cagcgccagaaagtgcaagggacgagtgcacaccctcaagcctcgccaggtgatcttattcccggaggtcgtagtactccgcacgccgcgtcctctgcgtggccaaatgtgctccctcgg

SEQ ID NO: 28480 - DNA, 120 bp, Homo sapiens
gtacgttttatatacatagaaaaattccgtttcctgtttattttagattcaggcctcattcctcgctttgggtcttttttaaacaaaatgaaaaacaccagtgacagcggctcctagaga

SEQ ID NO: 28481 - DNA, 120 bp, Homo sapiens
tttcggggatctggattcaattaatccacaggatatgtaacaactgcatgtcctcaacacatccctggaatcaaacagcgcagcccgtggcctctgtgcatgcagcacgcctttctccct

SEQ ID NO: 28482 - DNA, 120 bp, Homo sapiens
tcccgggaggaggaaatggtatctgggggtctggcccaatcccatttgtcccacagtatccctggtccctcgcccagccctgctgcctgggcactttcctggtgtctctgaggcagactc

SEQ ID NO: 28483 - DNA, 120 bp, Homo sapiens
aaacgtgatggtctgctgcctgctgctgtgagctcagagtttcacactccataacaactctgaacaatgtactttgtaaatctgtcaccttgaatgccagcaaaaaaggggagacaataa

SEQ ID NO: 28484 - DNA, 120 bp, Homo sapiens
tgacggttttctgcctgaaggtgaagcaagcaagctacaaagagccaagggaagaggctccgaggaagctgaggtagcccgggccccgtgcaattggaggagtccaaaacacactcctga

SEQ ID NO: 28485 - DNA, 120 bp, Homo sapiens
aaacggttattactgcaggagtgagcagaatggcgcagccactctgattccaagggtgcacatttccgtttgcttcactcatcacagagcgatctgtctactcctggggccagggccacc

SEQ ID NO: 28486 - DNA, 120 bp, Homo sapiens
taccgagtcctagaactgaaagaatcacacgccgctgcatttctaacattggaaagagcctgcactctcttggctgcactttattctgacaattgttctggtggtaggaacacgcctgtc

SEQ ID NO: 28487 - DNA, 120 bp, Homo sapiens
acacgctgtcaagcagcctccaccagggcagcggccccgcagccctggaagcgccctcagtgcccagcagctggagtacctggctgatgtcgatgggcttatcgcggctgccggtttgca

SEQ ID NO: 28488 - DNA, 120 bp, Homo sapiens
agacgcacctggtcagcatccagaaaacacaggtgccaggttctcagtcagctgggggtgagcagcctgttttccggaagcaccccaggtgaccctgaacctgctgcccaggccgagaag

SEQ ID NO: 28489 - DNA, 120 bp, Homo sapiens
gcacggggtatgcccaaagccagcgcaggagcaggtgaccaaagaaaaccatcaacactgtgactgccaaatgccttttctcttcctctcctttttacatccttaggcccaaggttatgt

SEQ ID NO: 28490 - DNA, 120 bp, Homo sapiens
gaacggttctgggccaagccaagctccgaatgctgcacctgggctgggaggtgtctcagggagatactaatagttacagacccaggaacctagagctcccccactccacagtctagggca

SEQ ID NO: 28491 - DNA, 120 bp, Homo sapiens
aagcgggtctgaattgttcctaaagtcattgataagttgcatgttgactgaaaagcaggcctgcagcgacagtttagaaaaaaactcagtgatcatagctttcccacgaggaggaatcct

SEQ ID NO: 28492 - DNA, 120 bp, Homo sapiens
cagcgggttgtttagttctcttggcatattttataaacaagggggcaggctaaaaagcaaataatgccctcattaggaaaaccagtacaaattcaccgcctggcaggaccctctgtgcag

SEQ ID NO: 28493 - DNA, 120 bp, Homo sapiens
ccacgcggatgccaaggccaggagctccgtgaggtgaggtttaacatactgcgtgtggggtcgggaaggagggaggaatatatcagttggttaataaaaaggaataagacttctgtgtgc

SEQ ID NO: 28494 - DNA, 120 bp, Homo sapiens
tgccgagggccttgccatcaatgtgaagttaaggaaaaatcacaggaaaacactgggaaacaacttgcacagagaagcatctacctactcggctggccttttctgcaagccctgggaaag

SEQ ID NO: 28495 - DNA, 120 bp, Homo sapiens
ccacgcagacttccaaccaattaactgaatttgagccagcccacatcccctagaagtgcagaagctgtatgaggctaaaaagccagttatgagtccagaggtcacagctgcagagctgcc

SEQ ID NO: 28496 - DNA, 120 bp, Homo sapiens
tcccgcatcatgcatttcaaagtatgtgagccattcaagactatcctttcaaacaagaaacccatgtgattctttttttttttttaaatctataaagaatttggtgggtctgacagtgga

SEQ ID NO: 28497 - DNA, 120 bp, Homo sapiens
aggcgagtaagtatagctacccagaggaagaacaaaaagcccacaaaagctttttttagcccctttctaaagctagtcaagcagtttgggaagagttgcactgctgaaaccttatatttt

SEQ ID NO: 28498 - DNA, 120 bp, Homo sapiens
gaacggttagttcctcctcttctaaaggaccaatgctatcccatccagcaaggatatccccccatctaatgtgaaataagacaatgtgggcaggagagtggtggagggaatggtgtgggg

SEQ ID NO: 28499 - DNA, 120 bp, Homo sapiens
tcccggccccactcatctggaccctgcatgaagtacacacacgatttctacagaaagtaatgggatttctgcaagtgtgtgtgagtgtgtgtgttttatagagcagtccctcttgcacag

SEQ ID NO: 28500 - DNA, 120 bp, Homo sapiens
agccgtatctgttatatttctgtctttctcttctgtttggcgtattcaccaacaagagaaaaggaggtaagctttggcggccctgacctgcagctggaacacaatactttcgcacagccc

SEQ ID NO: 28501 - DNA, 120 bp, Homo sapiens
gtccgaagaatcacggattgacatttgctccctttctcttctgattcctgtggtttctggggtatgccacccaaatgctcccacctactgtgccgtcctgtgccaggcggccttgggtga

SEQ ID NO: 28502 - DNA, 120 bp, Homo sapiens
ggtcgcgcggataaccctgctctcgctcaagactgaagcgttctattcgggagcgcccccgctacaatgtctgacattttatctgctcaaccccgccgctggtagacggtgtttcacaca

SEQ ID NO: 28503 - DNA, 120 bp, Homo sapiens
ctgcgactttaaatgggccacattatgaataaagatgaattacagatacaagggcagggtagagggagtgagaacatttactgcagctctgaagagctgactagctggtcttgaaataaa

SEQ ID NO: 28504 - DNA, 120 bp, Homo sapiens
aaccgaagctgtgtgtcctgaaagccgctggtcttcctggccgtctgtcagcctgcctgcccacgtgtgtgagggtctccactgtgaatgccagtgttttgtggaagtgccttagaggtt

SEQ ID NO: 28505 - DNA, 120 bp, Homo sapiens
tttcgtatctaaacactcgcttctcagtgttcttgccaactgctgtagaattctttcatcacttagtgagggcaattttttttttttgtttctttttcagcttttcctgctaaagctctt

SEQ ID NO: 28506 - DNA, 120 bp, Homo sapiens
tcccgttgatttgggtaaacactggaggtgtagtggatgctacagcgtggggcccaggtccctatttgaggccgggcactgctgctccaggctgccaggagtgttggctgatgggagctc

SEQ ID NO: 28507 - DNA, 120 bp, Homo sapiens
agccgcctgacataggcacgccttctccaggacccgctgtaagtgggaatttggggctgttctgatgggccatcaccactccaggactccccacagtcccctttctccctctgccttgtt

SEQ ID NO: 28508 - DNA, 120 bp, Homo sapiens
cagcggcttcccaggaaatccaacctgagacataggaatttgacgatgaataaatccaggggaaagactggtgtgttagtcagggctcttcagagaaacagaaccaacaagaccaatagg

SEQ ID NO: 28509 - DNA, 120 bp, Homo sapiens
tagcgtgtgttggagctgacttgtgcagctcaggagggccaatgttctcttgctgatagcttgaaattggccagggagaaatattcgcatcacagaaaccagaactcatcccctcgctcc

SEQ ID NO: 28510 - DNA, 120 bp, Homo sapiens
ttacgggagccacaacgtgagctgttccctctgcaggggtcaatgtcccaacgtgggatttgttgctcactttgaggcagaggcttttacccgcagaaggcctgaggtccaactcagtgg

SEQ ID NO: 28511 - DNA, 120 bp, Homo sapiens
ccacgttgagtctgtaattcaactttgaaggtggaatctccctttttctgctagttaactgtgtgaccttagaaaagatgtcttcatcctcaggcctccagctttctgtctgtttgatgg

SEQ ID NO: 28512 - DNA, 120 bp, Homo sapiens
gtgcgagaatgaaatgaggtaccacaactgggtcatctgccacagtctgccatagagacgggctccatgaatgtcccttttctttccctttgtctgaaagggggaataaagtacaaaatg

SEQ ID NO: 28513 - DNA, 120 bp, Homo sapiens
tcccgagggtctccttcttggagctgttttctgaatgaccataccctggctctgggtgggccctggccaaagtccagttgggaagtgcagggaagaaccacaaggaactgctccttccat

SEQ ID NO: 28514 - DNA, 120 bp, Homo sapiens
tggcgggcctgggcctggggggtactggaggtaagtttttagctggaaatgactcttccaacgatgactgctttccttgatacaagaaaactgggggctgttggccattgaaagaataaa

SEQ ID NO: 28515 - DNA, 120 bp, Homo sapiens
aagcgcgacattaattacagtctcacccatgacaatttactctgactaagatcttgccactcaccgtttcatatgatctcttttaacctgaaaagcagctcttttgctccctttctaacc

SEQ ID NO: 28516 - DNA, 120 bp, Homo sapiens
ctccgtggcgattcaccataaaagatccgttgcttggcaacttggcattgtggggctgcagtggagggtggaattttttgtctctctgaatcaagggcttaaggaataatgaaaacttct

SEQ ID NO: 28517 - DNA, 120 bp, Homo sapiens
aagcgatacaccgtaaaatgtttcccaagattatcctgtctctgagcgggggatgaccagctctagacgtttttattctctccttgctgctgcaaaattaggtttgcacaactctgagac

SEQ ID NO: 28518 - DNA, 120 bp, Homo sapiens
gaccgtcataatggagcaggtctgtctcatttacaggcatttgccgcactcattagcaaatgcctttttttttttttaatgagctgctatacactctgaatcacttctcatctcagaaac

SEQ ID NO: 28519 - DNA, 120 bp, Homo sapiens
ccacgatctctttgatgaaggggtcaatgttagcagaggcctggagggcacaaaacaggaccccaatttccctctgaggttccctattgactataggcgtttctacgaatgatcaaaggg

SEQ ID NO: 28520 - DNA, 120 bp, Homo sapiens
acacggcccaagctggaggtgtggaggccacggcgagaataatgatgatgatgacagtagctaattgaatacttaccacgtgctttatatatattatctcgcttaattcttgcaacaaca

SEQ ID NO: 28521 - DNA, 120 bp, Homo sapiens
ccacgtgtcatcagctggggggccagaggcagctgccagtgcagtcgagaccccactgatggatacctctcctgccaggcgcctcactaattcctccccactgctgttccaagccaaacc

SEQ ID NO: 28522 - DNA, 120 bp, Homo sapiens
acccggctcagcttctcaccacgagggaaccccagctgccctggttgtaggcctattgacatttcaccctcaccctgggtcaagtttgcctctgtattagatcaatctacttgataacat

SEQ ID NO: 28523 - DNA, 120 bp, Homo sapiens
gtgcgctaggctgtggtgcctgggaacgatgaggatcacctggaggccttgttagcgtgcagattccagagcctcacccctagagaatctaatatagcaggtctggagcgaggcccatgc

SEQ ID NO: 28524 - DNA, 120 bp, Homo sapiens
agacggtcagacagagtgaattctcccttactcagcattttgtggtatttgagtcttgaacatgttggatgagatccacccacatttgggagaactatctgctttctcagtctaccaatt

SEQ ID NO: 28525 - DNA, 120 bp, Homo sapiens
gttcgttggtcctttgattcaacttgaggtaattttggattctgatattccgcccagcttcagcaattgtagtaaattgtaatttatattctcatttacatcattaaaaaaagttgaatg

SEQ ID NO: 28526 - DNA, 120 bp, Homo sapiens
caacgtccagctctgaggcctatgacacatcactaatgaaccgaacccactcattttgattcagtcattcatcgactcagtggcctctaaccccaaatatccccatgttgccaatatttt

SEQ ID NO: 28527 - DNA, 120 bp, Homo sapiens
ctacgtcagtcacatttctctgagctactactctaacaatttggaaaaagaaacgtggttcatctgcaatggcttgctctcagtgagcctatcgaagcttctactactcacccaggtctt

SEQ ID NO: 28528 - DNA, 120 bp, Homo sapiens
gcccgagattgaaattgcatggttttcagaatctacctttttcctctttcaggaaactgaaatgccacttgcccgcctctggtcttcggcccttcttctggccccagttgtcctccgtgg

SEQ ID NO: 28529 - DNA, 120 bp, Homo sapiens
atacgctgtctacactggggtcccactccctcatactaacatttatgttactttttttgacctaaatataactatatttgtaaaagaagatgcaatctccctgcttgctttttgccatct

SEQ ID NO: 28530 - DNA, 120 bp, Homo sapiens
ccgcgaaagtgtaaacttcatgaaagcttgtcctaattgtctccatgcctagggcaggaactggtacatgtagaccttcaataaatatttgttgatagagtaaataaatgtaaaagggaa

SEQ ID NO: 28531 - DNA, 120 bp, Homo sapiens
ttgcggatagttgtcgataaacttgctgtttctcctaactcatgcactctggcaatgcgacagaaccgcccgacggggcactgtttggtcctgtatgtggagttaccagacaggacctgg

SEQ ID NO: 28532 - DNA, 120 bp, Homo sapiens
atacggagtccatcagaaggccagctccggctttcttttgctttgaggcttgtccttgagttgctccaggcaactcaaggggtctcatctccctgctgccttctgccctggatcatctgt

SEQ ID NO: 28533 - DNA, 120 bp, Homo sapiens
acacggtggctaagcttccccataacacttgtccctccccctctctgtctttctcccacaatccaggagaatctgcctgcccggggcacccagccagttactgtgacaatgacctcccat

SEQ ID NO: 28534 - DNA, 120 bp, Homo sapiens
tcccggaatgaatatgaacactgtcccatcaggctgaagtctaaggggcttcagcattcttgattaaaaatatacatatattgactccagtactcataacaagtatgccattaacagagg

SEQ ID NO: 28535 - DNA, 120 bp, Homo sapiens
caacgcagtgtgaggtccataataggagggagagggaagtgtggcttcaagagaatgcaaacagccccattgcagaggcacgatggaggaactcggagacgcaataacaatcctctcttt

SEQ ID NO: 28536 - DNA, 120 bp, Homo sapiens
tgccgcaggtctgtgaggccatgtgacctgagaagcagtgaaggtggcagaagtgggatccaccacatccaagctcaggccatgaaactgcctgtggcatcctccacactcttgctcttc

SEQ ID NO: 28537 - DNA, 120 bp, Homo sapiens
aaccgctcgatagcagatgcttggggccctggaggactgcatggatcaaagccccctccaaccaaccttgattgtgaaatgatgatgaaataaaccttcattatggtgtgtcaccgagag

SEQ ID NO: 28538 - DNA, 120 bp, Homo sapiens
tttcgatagcattcatggggaaggaaaaatgcaacttgatttccagacagcttagaaaaattcaaagggagaaagatttcctctgggtcattttcacaaagaaggaactcggcctgagct

SEQ ID NO: 28539 - DNA, 120 bp, Homo sapiens
tggcggcactcccttggccatcttcactccagccagccatgtccatagatccacacacgtggtaagcatcacacaccagccacaccatgatgcctctttgctttgctggagccacagaag

SEQ ID NO: 28540 - DNA, 120 bp, Homo sapiens
cctcgtagtcctccactgagacgatcgtgaggcatggtccactgtgtgcagggtcccacggcagactgaggtactcactggcaactggcctattaatgcctccttcactgctttcctctc

SEQ ID NO: 28541 - DNA, 120 bp, Homo sapiens
agtcgcaataaccttattggcatgacaaggctggcaaggatgccaaagtcaatagagtaggccaggatgcactaggcaggtttcacgagggtggtgagattttatgtcacaaacctcaat

SEQ ID NO: 28542 - DNA, 120 bp, Homo sapiens
gaacggcagggactgcttaagccaatgatacattgacagtacatgtgtgaaaatctggggttgaaaaaatcaaaggaacatcagtaaaacttaatctagatctaactcctatgaatacat

SEQ ID NO: 28543 - DNA, 120 bp, Homo sapiens
cctcgcctccccaaagcaactgttgctgccactttattatagatacttccagaaacatcctgtggaatgtttcagttcagtgtggaatgttcaatagacatccttgaacacaaataattt

SEQ ID NO: 28544 - DNA, 120 bp, Homo sapiens
agacgtgaacagtaagtcagagtcacactattttaacagcttcttttgctttttgggaccataacagaccaaacagccatctattcatcactgtaacaaacaggcattgagttcttatta

SEQ ID NO: 28545 - DNA, 120 bp, Homo sapiens
tcccggattttattgacaatgggggagacagacaaatgatcacatacaagagctcagaaggaaaagcagcgagtctgtgcggtgtaaaacaggaaggcctgctctgggctggagtggcct

SEQ ID NO: 28546 - DNA, 120 bp, Homo sapiens
ctccgtagaaagactggacaatgcccgatcataagtaagtctggtaaagaactggataataagatccattagacaggcaaagagagaaattaggaatgaatcttcatggttttagttccc

SEQ ID NO: 28547 - DNA, 120 bp, Homo sapiens
gcccggtcccctcttcttaccattgtatcctaaaggaagaactgagagatttggtgctccaaatcccaggagtttctgcatgacctcatcagtgtcaggagagccaagcccagatggatg

SEQ ID NO: 28548 - DNA, 120 bp, Homo sapiens
gagcgacaccatcgtcttcattacaaagcttgccaaacattgctgtttggggcaagagagctcaagaacggggactggagaaaatgtccagatggaacatttgaaaagtccagatctggt

SEQ ID NO: 28549 - DNA, 120 bp, Homo sapiens
caacgtgcacaagtagattcatcttctttcaacagatgtatccaaataacacattcctttaccacagaaatgttacaacagcaataacagaaccccttgggggcctagttatctaggtag

SEQ ID NO: 28550 - DNA, 120 bp, Homo sapiens
ggacggatctccattggtggcctttcttatttacaccacacacatggcgatggctctgacatccagttcctttagtataaacagaaaggatggtctttttctgtggaagttaatgaattg

SEQ ID NO: 28551 - DNA, 120 bp, Homo sapiens
aaacgaataaaagaactacagtgttctgagacttgggcaaaatagttgcattcaaattaattttgcccccttctacccttcccctctccacttcccaccactccctcctcgcctttttca

SEQ ID NO: 28552 - DNA, 120 bp, Homo sapiens
tggcgcagacgggctcactgggtgatccagggctgtcccttaaccgccctgcgcctctgttgatgcagctgtgatatggggacacagatgtgtgtgtgtgtggcgccgatgtgcagcctt

SEQ ID NO: 28553 - DNA, 120 bp, Homo sapiens
ctacgaaagagctcatcccaatatcaggcatttcttatcagtaagctatggtgcagaattttcctctgcaatagtaatatgtttttgtggtgtattttaagaataaagacgaaaaagaat

SEQ ID NO: 28554 - DNA, 120 bp, Homo sapiens
aagcgtgctgcccttgcttctgaatgctctgtagagtcccagtggacttgcatttctttctttccaatggctttccctgctgccccaaagcatttcctccctgttctctgtggctgccca

SEQ ID NO: 28555 - DNA, 120 bp, Homo sapiens
ggccgggatgatgttaaatctaaaacgcacagtacagcccaccacaagagagactagcccaaaatgtcaatagtggcgagatggagaaactgccctgacatctctttctcctgcggtctc

SEQ ID NO: 28556 - DNA, 120 bp, Homo sapiens
aaacgccaagggaaccaaggtctgatgtctctgtggtccattgcattgggaactatttctgagaaaagcaagttgtggggacctgcaaagctgtttttagcacagaacaaaatcacagag

SEQ ID NO: 28557 - DNA, 120 bp, Homo sapiens
gggcgtatccctctggcttccgtctcctggcagggtttgtgcaaagccgcagctagagcaacattttgttataatcaaacctccaaaagaatccgtggagcactgtggcccatctgcaaa

SEQ ID NO: 28558 - DNA, 120 bp, Homo sapiens
caccgctctcaccacctgttctggggcctagctatcagatgggaaggagccagttaataactgtttataagctataaatggaagtggccatggcagggagctgataaacatttgggggcc

SEQ ID NO: 28559 - DNA, 120 bp, Homo sapiens
acccgctctcaactgcttgcagtatgtgtttcaggttacaggacgtccaaatggctgtttgtggggaggggtgtctactgaagggctgtgtctgtggtcttgatccagaccacagataat

SEQ ID NO: 28560 - DNA, 120 bp, Homo sapiens
taccgcttctattcttaaactcatgccagagccaagctacatcccatatagtttcaggggaaaatgcaatcagaaacctagctatggcgatttttacagcgttgaagtttttgccaaatt

SEQ ID NO: 28561 - DNA, 120 bp, Homo sapiens
tgacgtagtattggaggagaaagcagctctgagaggatattatgacatgtctctcctttgactacatgttccttcctccacagccaattgacaggagagaaagggacgatctctattcat

SEQ ID NO: 28562 - DNA, 120 bp, Homo sapiens
aaccgctggctctgtatgaatgatctttttctcccatgagcccaatcataaaggtcaatatgtccacagatgtctgaaacaaattaagttaagctgtaaggaaatagagagacagagccg

SEQ ID NO: 28563 - DNA, 120 bp, Homo sapiens
aggcgtgcatccatatagtaacaggtaatgaaaccgtagcgcttggtttctctcttaacaaaccaggctaggcctgagttctagctccagcgctggcacaagctggctgtgagaacttgg

SEQ ID NO: 28564 - DNA, 120 bp, Homo sapiens
aaacgcagggagagctgccccagagtctgctgcctttgcgtgagatagggtgagggaacaggacacctggagcggttggagcggtggccacccacctgtgacggggaggtgggggcgctg

SEQ ID NO: 28565 - DNA, 120 bp, Homo sapiens
agacgggaggctgtccgagtggccctgacactgcagagcccagagctgagctcacgcctccgcctctgggcttcctgttacccacagcgcaggtcccaggaattgagccaccggtggttg

SEQ ID NO: 28566 - DNA, 120 bp, Homo sapiens
tcacgggaccaactgaagacagtttttggctttcagtgtgcgtggagtaaatacagcatgccctgtctgagattccagcaccagatcttcattcagtgggtagagttctgccaagcttca

SEQ ID NO: 28567 - DNA, 120 bp, Homo sapiens
ttacgctctggctggcatgcccactttgcctctgctgttgaacaaaaggtccccatgcaaggtcaatgcgtaatgagccacagttcagctggaaatacattttcaatggcttccatccct

SEQ ID NO: 28568 - DNA, 120 bp, Homo sapiens
gctcgtgggaagaagcatctttgatccacttggcacaggtggtgaggttgagtcctgtcactgtccgtgcagagctcagccggcatctctgcttagagatatactgcatattatcatatg

SEQ ID NO: 28569 - DNA, 120 bp, Homo sapiens
gcacggcatagtctttccctcagcttgtctttcagcctggtcctcgtctctaattttaaaacgaaatcaacagccacatcacaaaatagaattcactttaaaaatatgctttatttttta

SEQ ID NO: 28570 - DNA, 120 bp, Homo sapiens
ggacggagattggagagaatggtttggtccagggaaggttgttagaaatttctttcacttcacaagcttgcaaaagacctgggtctcaacttccagcaaatcgagatggagaatttttta

SEQ ID NO: 28571 - DNA, 120 bp, Homo sapiens
aaacggttctttatatcggcactattttttttcctctctgacttattcattcatgggtttctccaactgtctgagtctctgggaaatggtgtgtttgcccattaatcaaggaatacctat

SEQ ID NO: 28572 - DNA, 120 bp, Homo sapiens
ctgcgctactaatcaagagaagcaacattttcaacttctgagaagtccattttagacgttccttgtatgactcagttgacatgttcactggtgacagcaatcttgctatgactaagcagc

SEQ ID NO: 28573 - DNA, 120 bp, Homo sapiens
agtcgctgtgtagacatttccctccaggtggtcttcacctagagtataacaagtagccaagtctataatgggaaactttctttcaaagagatctgaatgttgatgtattattgcagagtg

SEQ ID NO: 28574 - DNA, 120 bp, Homo sapiens
cttcgaagaagctgttatccagcatcagatctctgaatgccgctgactgaaaagcgggcttttgcatgcaaggtggaaatctatattcagttgcaggtaaatagaaaactaaactccttc

SEQ ID NO: 28575 - DNA, 120 bp, Homo sapiens
cgaaaatgctggaaacacagttggcctgtgagctctttcagtcgaaatatttttgaggtggacaacacaatctcattagaaaccttgtctcttcacagtgattttcagagggaggggcat

SEQ ID NO: 28576 - DNA, 120 bp, Homo sapiens
cttcgaggccatctatctccctcatcacacatacaccaacttaatataaacccttttcagagaagataaaggaattagctgtttaatgactacattgtggtgaagttttaaagccactaa

SEQ ID NO: 28577 - DNA, 120 bp, Homo sapiens
tatcgcgtcaatattacttcagcacctttaatgaggaaatcattgaaacacactcatcatctttggctagagagatttatgttactcagaggttttgcagctggtgtggcagtgggtggc

SEQ ID NO: 28578 - DNA, 120 bp, Homo sapiens
ttacgagaagaaaagagaataaacaaagagaaagggaaatgaagcaagaacaaaagagactcaatcatagtgttagaaaattcctgcaaacttcttgatcctgaagtctccaaaaaacct

SEQ ID NO: 28579 - DNA, 120 bp, Homo sapiens
caccgatgttacagtatctttcatctggggctcaatctagaatcttttcggttcctggtaattcctctgagtgcttcatgtctgtcatcacagttttattaaagaactttacttgtgttt

SEQ ID NO: 28580 - DNA, 120 bp, Homo sapiens
atgcgtgtctgtagccagttgcagacgtattgtctcagtaagaaaataaatcctatttgttttatgaaatcagtacacaaataacagttgccacagtgtaccagtatttcaatttctaaa

SEQ ID NO: 28581 - DNA, 120 bp, Homo sapiens
agacgagatgtctgataacagaagagaaaacctgtctgacttaggtttaagctcaggcgaaaaagaagtgttttaagcatttgaaggaactgataatacctttattagagttcatctgtt

SEQ ID NO: 28582 - DNA, 120 bp, Homo sapiens
tcacggagctgaactgtacctgtttgtgatgtgatacctccttttctcagtcaactgcacgttttcaacttaagtttacttaaaattttctgaaaagaaatgtacaaagacagccttcaa

SEQ ID NO: 28583 - DNA, 120 bp, Homo sapiens
taacgggtcgctttgtagtaaaacctggattaatagtaagcccctctttatgttattgcagtgtggtgtaaatgagagaactaagcatgctgtcagcctggggtgggaggtagcgtgggg

SEQ ID NO: 28584 - DNA, 120 bp, Homo sapiens
ctacggtgggtttgattgcagtatgtttatacagcttttggagtcagcaaggagggatggactgtttacagtgagcagactttggggagatagagcattccattatcctgtttttcagga

SEQ ID NO: 28585 - DNA, 120 bp, Homo sapiens
acacgaaaaaggtttttgtgtttctacacctagaactaggattgattgtagatagcattctgattcagaatataatacgtcatttgagtagaaaatacctgctacttaaaggaaggagaa

SEQ ID NO: 28586 - DNA, 120 bp, Homo sapiens
ctacgagaagctgtggcatctttccacacagtgatgataccaggattcatgcactaatgtaactgatgagctgatgtgtgcaaaagacattcaacaccttgcaagaaaggcattgaaatt

SEQ ID NO: 28587 - DNA, 120 bp, Homo sapiens
atgcgtaaataagtctctacagtagcctgctattatttttgttgctaatagtactcagaatattttagactaccttaaaaagatatctagtccagtcctttaattttatgtgaagtacct

SEQ ID NO: 28588 - DNA, 120 bp, Homo sapiens
taccggtgaatgaaaggaaatcatgtcagtgaaaaatcatggtggaaagcccctggcatcacatgtgcatgctgtaggcaggacctgagctgcctccgctgcaggttcagatgcaccgct

SEQ ID NO: 28589 - DNA, 120 bp, Homo sapiens
agccgggaactggctgtgctaaagagcactgctatcaagttgaggagagagggcttccgtgtactcaggatgtagagtcattgctcagaagtgaacaaaaaatcaaaaacaaaagtcttc

SEQ ID NO: 28590 - DNA, 120 bp, Homo sapiens
gatcggccaagtatgcttttctttagagcaatgttttgccctagagaattgtaaaatttatgtcatgactcagtacatatgtgttcgtacatatatgattggaataaaatgtttatgaaa

SEQ ID NO: 28591 - DNA, 120 bp, Homo sapiens
gaacggaaactgtcaggtggagtggactccctgcaatggagtgatggaaagatttggtacaaccattgatgacctgagaacagacactaggaaggtttgacaagatccttcctaccccca

SEQ ID NO: 28592 - DNA, 120 bp, Homo sapiens
taccgtttctggctgaacactcaccacacagctattaatattggaaactgaggcaagataccaagagatttttgcacttgaattcctcagggttctcttacagccctgaaaacacctctt

SEQ ID NO: 28593 - DNA, 120 bp, Homo sapiens
acacggttattttctaattaaagttcaatgtgtacgcttttaaattctgaagttatccttcttttatgatatcaaaatagccctcttttttgaaatgatggtagatcataccttttggtc

SEQ ID NO: 28594 - DNA, 120 bp, Homo sapiens
caccgaggatgtcactgaacctgtcagccccaatgacaggcacacaccttcaaagagcaagagtgcccatcactttctaggctccttgcctgctgctcattccatcatcacggatacaga

SEQ ID NO: 28595 - DNA, 120 bp, Homo sapiens
gtacggctggctccacttggtatttgttgcaggagggaagaacatctcacttttgcttggctaaagggccaccccaggagagctattttgcctcagggtcttgcagggtttctctaggaa

SEQ ID NO: 28596 - DNA, 120 bp, Homo sapiens
acccgcattgtgctccagtgttcagctttctcttcctctccgtccaccactccctgccctctcttcccactgccagtacctaagtggccttccttcacctgtgcctggcaaagccctagg

SEQ ID NO: 28597 - DNA, 120 bp, Homo sapiens
aatcgacagctccctctctcagcttcctgctcaccaagctcaatggagcctcaatgacctgcccactgttgcctgaggcagcactctcactgtcccaagaccccatcacaccttcacctt

SEQ ID NO: 28598 - DNA, 120 bp, Homo sapiens
tcacgtgaagggggaagaaaggcacctttctcacagggtggtgagagagaggaagggggacggggaaagccctttataaaagcatcagatcggctgggcacagtggctcacgcgtgtaat

SEQ ID NO: 28599 - DNA, 120 bp, Homo sapiens
acccgggatgctccagaggccaaatcatagggcaggtcatcccaaggacagcagttaattcactgacatgccagcaaagggcaaaccgaatcggccccgcggagcccaggtaggggcgcc

SEQ ID NO: 28600 - DNA, 120 bp, Homo sapiens
cgccgctcacctcctaaaatgccctcaaagaccccttagggcacagccatatgctgagacatgttggggtggacaagcaggtctcaagaagcttagaatgtcccctaggtggacgctaag

SEQ ID NO: 28601 - DNA, 120 bp, Homo sapiens
caccgaggaaggcagctgcagatgatggaatgccctcccaatggcgggaacaagcaaggcttccgcagctcaaaaggagaaacatgctttgcgctggagtcctcagaaaaggccacttcc

SEQ ID NO: 28602 - DNA, 120 bp, Homo sapiens
ccccgcctccaacacccacctcttgcgcccccctcccgcctcctgtgtggtgtgtgctctagttcccggcaaagcaggtgggagacggagtgaccggcaggacaggctgcctggggaacc

SEQ ID NO: 28603 - DNA, 120 bp, Homo sapiens
aaccgggaaggctgaagtggacacaggaggagctggcagggagagcccaggccccgcgggctgcgggaaaggagagggcagcgactgggcgagggaggaaagaccctggccggggcagcc

SEQ ID NO: 28604 - DNA, 120 bp, Homo sapiens
gcccggcgcgggagaggctgcgtgtgcccggctcagtcacccgccctgggagaaggcggcccggttggaaagttgaggcggaaccgaaggcccccgcgtggaggctgcagcccctgcgcc

SEQ ID NO: 28605 - DNA, 120 bp, Homo sapiens
cgccggccgggcgggtccggaaggagcccaggccgcacctccaggccggcgccgccgccgcccagcgcccacccgtccccccggcgccactccacatgcaccttctcccggggcgccgac

SEQ ID NO: 28606 - DNA, 120 bp, Homo sapiens
cgacggcctcggctgcccccgcagcgtttccctagcttccctccaaggcccccggccgctctttctcagcattcttcgcagcttcatctccatccgcgccgccttgccgagaccctccaa

SEQ ID NO: 28607 - DNA, 120 bp, Homo sapiens
agccgactcctcagccttctactgaatctcctccaggctagctcccaggggcgcctgtccaggcccgggacttacattcccagtcctcatgcagagccccgtccccgcaccgaggcagca

SEQ ID NO: 28608 - DNA, 120 bp, Homo sapiens
ggacgccacgggcatggtggtgagcaccttcagctgcatggaagaggtgtcatttcagggcggttctgcacacaatctgccctgcacacaggagctactgtatgaacctcgctcccagtg

SEQ ID NO: 28609 - DNA, 120 bp, Homo sapiens
gatcgattggaaatttaaatgatactagaaataatgacagtcgtactccagattgtgtgagaaacacatctgtaagggacggcagagtcacggagaaaaggaggcagggcctgggtacca

SEQ ID NO: 28610 - DNA, 120 bp, Homo sapiens
agccgaacagccccaccacgaatcctcctacctttagagaagagagaaactcttccctggtttaagctgtcatatttgggggcccatttgtttctcagcctaagctgtaccccgtcgggt

SEQ ID NO: 28611 - DNA, 120 bp, Homo sapiens
tagcgtgtgggctcagctgatggaccagacattccatgtactggcgcataacattctgactcgcgtgcagtaagaacaaaaggaaatacagcccaatttggtaaaattctctcacagcct

SEQ ID NO: 28612 - DNA, 120 bp, Homo sapiens
tcccgaacagtggagaggaagagggagtgaggccctgtggacacagcagaggtaatgagagaggagtgcttggtggatggggattggatggaggctttccatgggcaccgatgagccatc

SEQ ID NO: 28613 - DNA, 120 bp, Homo sapiens
aaacgggtggggatggactttgcaaagagaagggtttcttatgtaaataggttgaaagatatggtcttgggggctagaagaggggctaccatgtgactataaagacttttaatatttgga

SEQ ID NO: 28614 - DNA, 120 bp, Homo sapiens
gggcgggagagggccagcgaaggcctgggaaggtggacccacaaactcgtctcctaatgaagctaaccagcaatgcgagggcacacagggagaccccctagaggctgccccaggccagga

SEQ ID NO: 28615 - DNA, 120 bp, Homo sapiens
agccgcggtgcccagaaaggaacagtgtgcgggtgaggcgggctctccactttgctgtatcctccccaggcccccacccccagcacgtgggcagtgaggtggggaatcctgcccacagca

SEQ ID NO: 28616 - DNA, 120 bp, Homo sapiens
tcccgagacaggctaacacccaacagcaacctgattcatactcaaaatagtgacaaacaggctcctgtctgcaaggctcctcagtgaggctgggggaggggtgcgtggcttcagcagggg

SEQ ID NO: 28617 - DNA, 120 bp, Homo sapiens
aatcgaaagcacacaaaaaagcccattgtagaaaatcaggctctattatgacataaatgtgcattatataaagcaaaacgaaaaggggaaaaaaagaaagggttttaaagaacaaataaa

SEQ ID NO: 28618 - DNA, 120 bp, Homo sapiens
taacgggaaagggtccaacatgctcttctgttctctgccaggcctgacgggagcccccatcaatacaaccagctcctgctcagaactctcttcaggcagacaaatagaagatatgtttct

SEQ ID NO: 28619 - DNA, 120 bp, Homo sapiens
ggacgccccaaatcatcttgagtgcactccataaaagaaagaggcattaaagcagccccctctcctatctcaagccatccttcaacttatagggactttgcacatagttgctgcaggttg

SEQ ID NO: 28620 - DNA, 120 bp, Homo sapiens
aatcgttactttgagtcctaattctgtgatttcagtctctctactcagggtcagtcccagggtaacaggctagtcacaatgttgagatcagcgttctgaggctgacttcctttaaaaatg

SEQ ID NO: 28621 - DNA, 120 bp, Homo sapiens
ccccgagtctgcccaggactttcctaaactgccttcaacttgacggttctgccagcctttccaggatggggtgactagccacccccagaatccaggccagcaacatttagtcagcattca

SEQ ID NO: 28622 - DNA, 120 bp, Homo sapiens
aggcggcagggagtgtgggctgggtgcgcaggtgcatgtatgtgcatatgcatgtgcacagatgtgtatgcacacaccaacgtacacagtgcacctacccatcactgaaagcactgctca

SEQ ID NO: 28623 - DNA, 120 bp, Homo sapiens
tcacgccattgttgacagcccagctaggcagcgcctgatgacatttttggccctggaaatgacaggtgttgatgaccctagccttcctctgggcctctgatgctaagagagctctgtgcg

SEQ ID NO: 28624 - DNA, 120 bp, Homo sapiens
gtgcgtgtctggggggtggggcagaggagcaggaaagggctggctccaggagccttagcttatttcgcttctcctaacaaaggcaggaggcaaacaccactgccagactgggggcagcca

SEQ ID NO: 28625 - DNA, 120 bp, Homo sapiens
acacgttattgtgctgaaacagaacggccagccttacttttgtcctgggtgcgtgggtcatgtcccataggaagaccctgtttctcttttcatttgcaatgtttggtgcagtgtttatat

SEQ ID NO: 28626 - DNA, 120 bp, Homo sapiens
taacgccatgttgttctctcctttccccagatgcttgtgatcagccccactaatacagcagctatttcctttaacttttctgcaagtccagactttgattcatgggtccaggtgtgccca

SEQ ID NO: 28627 - DNA, 120 bp, Homo sapiens
agacggcccggggtgtcatcagtaattgccagatggggagctcagccctatggtctcaaacccctatctgttcataaatgcagctcttgtctaaggagtagcttggacagcgtgagtggg

SEQ ID NO: 28628 - DNA, 120 bp, Homo sapiens
ccccgtgtactgaaaccgcaaggcgaggagagtagcgctcgcttgcagactgcagcagcgcctgcacacagcgctgatccctgccattcctatcagaaaacaggaaacatcgtggccttt

SEQ ID NO: 28629 - DNA, 120 bp, Homo sapiens
acacgtatgcacagtgtgtgttcccaatatagcttttgagaaaacccaagaatttcttccgcctcaggtaacacatggatgggatgccattggctcctttgtctctttgtccagggactg

SEQ ID NO: 28630 - DNA, 120 bp, Homo sapiens
atacgtggagccactctcatttgtgccagatcttgacaagtaggagggaatttaggggaaggagcgatgacacaaagccatggagtttattggttaaagctggaaatcacagcccacggc

SEQ ID NO: 28631 - DNA, 120 bp, Homo sapiens
aatcggtcaccagcatcttaaaattgagatttcacatacaattctggaccttgcagcttctctttaaaaactcagctgttgacactgggtgcacatccccacataatcctaagagccagc

SEQ ID NO: 28632 - DNA, 120 bp, Homo sapiens
gctcgcctaagacagggcacacagctcaccagggcactgtgatccccacgctgcccgcctcagccttgtgagtgtcctgagtctcctgcgggaggcagccttgtgactcctgatttaaag

SEQ ID NO: 28633 - DNA, 120 bp, Homo sapiens
caccgtagcctatttcaagctcccaacattaggtcactgaaactggagctagggaagagatgcacgcaattggctctcacaggctggtgagagccagcctcagcacactgctcggtcaca

SEQ ID NO: 28634 - DNA, 120 bp, Homo sapiens
catcgttaagcaacacataactgtatatacgtagccctcactaaaaaaggtagttatcaataccgtttgctatttcctgacactgcaataaaaattgatatactttttagtctgtgtgtt

SEQ ID NO: 28635 - DNA, 120 bp, Homo sapiens
gaacgtttgtttgtttgttctttttctttcaaaacggaagccctgctttggaagagcaacaaagaaaactgctgctgtttctgtggttagacctccttgagttttccctctttaaacaca

SEQ ID NO: 28636 - DNA, 120 bp, Homo sapiens
cttcggcgaggctgcgtagtgacagagctgggtggccgcccagagcccgcctgcagcccgcagccggcccagctcaggttcagacacgcgcgctggccgggcagctgcgcggcaggcccc

SEQ ID NO: 28637 - DNA, 120 bp, Homo sapiens
ccccgcactcccagtctgcgataaacagctcaggccgtgtctctccctgtgtggtcccaggctgcaggggtcccggggctgcctgcctacatgtttctcatgctagagaagggcattcag

SEQ ID NO: 28638 - DNA, 120 bp, Homo sapiens
cctcgtccagataaagcctatgttcgctccaaaatgttgaagtttgctttgcttccctctcccctccatcctctctttttttaaaaaaattatgttcagtgtcagtctacacaagaggat

SEQ ID NO: 28639 - DNA, 120 bp, Homo sapiens
aaccgtacggggcgaccacactctaattttatgaccccaactttattgccagcacagaggcaataaagagaaataataaatgaaacagcatgctggagttcaggaggcagcacccccaac

SEQ ID NO: 28640 - DNA, 120 bp, Homo sapiens
aaccgaagctgcgtggggcgaggcacagagcctgtctgtgcagcagctttctctttccagggaagggagtgccaacgttccctcaaacacagattccaggtggcttcatagaaagatatg

SEQ ID NO: 28641 - DNA, 120 bp, Homo sapiens
tggcgaaggcggcgtttgcggtgagcctgagcacaagttagctgcatcaatgccaagcatcacagatgggaaggcaaacaaaagggttagggttgggcttggggtgagattgggggcagg

SEQ ID NO: 28642 - DNA, 120 bp, Homo sapiens
tgacggcaccgggactggtgactttatggtccaccataagaggaagagaggcctgagctggcgcactcagcccttgcaccacaggatgccctgcgccactgggactctgcagagtttcca

SEQ ID NO: 28643 - DNA, 120 bp, Homo sapiens
acccgggttagaaatagaaacctggacccaccggtgtgtggatggtcttgcaaaacacggcaacggtgagggcagtcggtggcccagacactcagaccttagcagatgtcctgcctgcag

SEQ ID NO: 28644 - DNA, 120 bp, Homo sapiens
gctcgctgcttacctgccccacgaggccacatctccacgccacatggactcagaaagatctcctatctcctgccaatcattgagattttacaagttatcttttccaacttgatctaaggg

SEQ ID NO: 28645 - DNA, 120 bp, Homo sapiens
cagcggtttccaaacccctctgcccacacaggagccaactgcctgctggtggccgctcagccgaggccagcagctccagtcagggggaaagcgagcatctatctaacagcatctgatatc

SEQ ID NO: 28646 - DNA, 120 bp, Homo sapiens
cagcgccccaacttcctgcccctcctccgaaaaatccctccacacacacccgccccccagcctcagaaagcctctgtattaccatcaccagccctgcgaggagggggcctggccgaggat

SEQ ID NO: 28647 - DNA, 120 bp, Homo sapiens
gagcggccgccccgggcatgtgttcgccatctgtcaggcggagggatccctgccagccctacatggttattcagtattaaaagaatattctttagtttgactgacaccctactctgggca

SEQ ID NO: 28648 - DNA, 120 bp, Homo sapiens
ctccggagggctgggccacccagggtactaggggggaaggggctctccagggcccgggaggagagtgtggcttggccagggctaggcaggcctgggcctgagccggggcttttatgtgtg

SEQ ID NO: 28649 - DNA, 120 bp, Homo sapiens
gggcgggactgaaagaaaatgttcctcacacattatccgtgcatcgtagggtcctttggagaacaggaataccaggcttgtggggtgcctcctgcaatggaatacccaacgttaggcttt

SEQ ID NO: 28650 - DNA, 120 bp, Homo sapiens
aaacgtgtatatacagataaaccttgcttattaatttcaggccagacaccaagaatagacagagggccccttttcagtgctagccctgttgccttccccaaatatccaggtttccctccc

SEQ ID NO: 28651 - DNA, 120 bp, Homo sapiens
tcccggaagccactctcctccaggagggatcttgtggatgtggccccttcccactgaactgaggcacagccaagtgactcccttgggcaatggaacgcaggctgaagtggcatgtccacc

SEQ ID NO: 28652 - DNA, 120 bp, Homo sapiens
actcgtatgcttgccagctcacatcacctgctgtctttatacgcactgtgtggtttcagaagtttcaaatgcaacaagaacatttaaaggtaaaactgagggcagatagttaattaaaat

SEQ ID NO: 28653 - DNA, 120 bp, Homo sapiens
cctcggcagctgtgccccaaggatcaagacaagatgctgctgagggtcacatggctaggaagcaggtggctgcgatgatcattcatgtttagaaatcaccaaggattcttggttccttct

SEQ ID NO: 28654 - DNA, 120 bp, Homo sapiens
tgtcggctgctccgtcagcctggggccctgtgtcagcacagtgagccaatgtcttctgtgaacccacagtggatgtgtcacgtgaatgcaaaataggactttgttgttttaagccactga

SEQ ID NO: 28655 - DNA, 120 bp, Homo sapiens
aagcgaaactccagcttcagctgggagtgggagcacggagaccccagcatggaagcaggaccctctgatgggtcagacggcttctgcatggcagagaaagggactgtgacccggtggcaa

SEQ ID NO: 28656 - DNA, 120 bp, Homo sapiens
gtgcgtcaattccttcaaataaatcaacctttctctcctctccctctccctcccttcctctcccactcttctctctctgtctccttccctctcccttcctccccactctctttctctccc

SEQ ID NO: 28657 - DNA, 120 bp, Homo sapiens
tctcgagaaccatgactaatacattctcaaaaaataaaaaaagccgtatatgtgaaaggaatcacagtttaaatatccaataagaacaaaacctaaccttggaaagcttactctgagcaa

SEQ ID NO: 28658 - DNA, 120 bp, Homo sapiens
aagcgcagaatggatgtgtaacttgtccaaaatctccagacagcatcatggtgaagactggaacccacagctcctgacccccagggccattgctttgtgaaacaataaagaaatgaatgg

SEQ ID NO: 28659 - DNA, 120 bp, Homo sapiens
acacgttaaatgttcctaattgttgaaactggctgatgggcatatatgtggagtttgtcatgtcactccgtctccttctgtatatgtttgacagtttccttgcgtcataacactttttgt

SEQ ID NO: 28660 - DNA, 120 bp, Homo sapiens
tgccggggagacctcagagtgctatgggagaagcccagggaatttcaccccaaaaatatggtaccctggcatacagattattttacatggaaagcctttgaagggcagcagatgctgaag

SEQ ID NO: 28661 - DNA, 120 bp, Homo sapiens
gtgcgcccacccatgagaacacacttgctttccatccccctctctgaaatctactgcagagaagacaaggaatgcagccacatctgggcagactttaaaaatataatgtctgcctctcgg

SEQ ID NO: 28662 - DNA, 120 bp, Homo sapiens
ggccgctctcccgtgatctctaccccaggcatgggaaggtaaatctgtgtgtctttctctcctctcaatctgctcttttgtcagttcctttttttttttgagatggagtctcactctgtc

SEQ ID NO: 28663 - DNA, 120 bp, Homo sapiens
ctgcggtgtgaattggagcactgagaccccagagccagctttcaagcagtaaaactcagcccctggctaggactaggggagagaaaggtacagatgacacgtaagtaataaaccttagtc

SEQ ID NO: 28664 - DNA, 120 bp, Homo sapiens
aagcgctcctgctggtggatctagtttgcatggactgatagtgagtattcaaagattatgataaaattcaatacaagggcttaaaacactgaaccaccaaccaaaattcatttctaaata

SEQ ID NO: 28665 - DNA, 120 bp, Homo sapiens
ctgcgtcagaattgatatccctcataccctgcacaactatcctgtatgtatacatggacagtttcccttctgtattccaaaattggtttatattccatctggctcaggaaacaggtttac

SEQ ID NO: 28666 - DNA, 120 bp, Homo sapiens
ttacgattttctaccacaaacatgcattatttgtctatggtaaaattacaacttttaaaaaatccctcattaagttcttagggaatcacagaagcacaaaactacttttaaatgaataaa

SEQ ID NO: 28667 - DNA, 120 bp, Homo sapiens
gcacggtgaacatcggtaggctgccaggaaaagagtgaagcatgtcagacaccaagggttggttgattggttttatcttttacatgttttacatttttaattaagcttactaattttcca

SEQ ID NO: 28668 - DNA, 120 bp, Homo sapiens
tttcggctcacaacactcaagagctgctcaagtgctgaaagaagcaagcagaagacaagtgcatgccaaagtgagaagaaaagagtctcacgtgtccctcctagagtggctctcagcgga

SEQ ID NO: 28669 - DNA, 120 bp, Homo sapiens
cagcgagaagggactgaggaggaggcctggggaagccaagtgtggacagcctgcaggggagatctcggagaggtgcagttactcgtgttaccgctgatcatccgaaacgggccactcttg

SEQ ID NO: 28670 - DNA, 120 bp, Homo sapiens
cttcgggacagagtcaggttttcattaaagtaagagcacattaggagttgcttttggtttgggatacagaattccagttcccaccactgaggattccaattcagtaccttttattaaaaa

SEQ ID NO: 28671 - DNA, 120 bp, Homo sapiens
tttcgtattttatattcgagaaaagtgagacccacataagctgaatctgtatgtatatataaaaaaagaaagctgatactctaagatactctctaactaagacactctaggtctctttgg

SEQ ID NO: 28672 - DNA, 120 bp, Homo sapiens
gcccgcatctcatcgatgactattgctgtaggttaggtttgccttttccggaatttcaaataaacagggtgctttctagaatttatgaatgagcatgtggtctcaggggttttcactcta

SEQ ID NO: 28673 - DNA, 120 bp, Homo sapiens
actcgaccatgtggtttgtttaatcgttgaatagtatcacaaattgtgtatccattggttgtttccagtttaggaccattaggaaaaatgcttccatgaaaattcgtgggcgtttgtggg

SEQ ID NO: 28674 - DNA, 120 bp, Homo sapiens
tttcgaggtgggagtgagcaggtagcaggttcttcctctctgtggggtattagttattgattttcatgtggaatctcaggaatgttatgctattgtagagttgtcatttacactttggtt

SEQ ID NO: 28675 - DNA, 120 bp, Homo sapiens
taccgcatccttttcttccgcagaactagagtcagagttcggcagctgcgtacaaaggcctctgccctcggcttgagcaaaagttgtaaataactagtatttattaagcacttataagca

SEQ ID NO: 28676 - DNA, 120 bp, Homo sapiens
agccggtacaacatcagggctgtgtcatgagtcagtggctttgaagctgtcacactgtcattttgcctaactgcggctttgaagattagccagagagccctttgaagaaactttccttta

SEQ ID NO: 28677 - DNA, 120 bp, Homo sapiens
ccacgggtcttgcgtcagagcaacagtgaggaaaacgtttcaagtatctgagacaagttctaagcaaactgaccacaacttgcatgttttgctggtgagaggatagagctggagccagcg

SEQ ID NO: 28678 - DNA, 120 bp, Homo sapiens
gaacgccgtgtggcctatgagggacatgcttggggaactgggttgctgtgaccaaggtagaaagatgccctgggaatttttactgaggctccccggcaggcccaggcagggtgaggctgc

SEQ ID NO: 28679 - DNA, 120 bp, Homo sapiens
ctgcgtgggtgttgctgattgatgaatagaccctgccatcactgcatatctccgggggtgccttccacacggcatctgtacaaacagcacacctggggtgtgtggccacagccagcaagt

SEQ ID NO: 28680 - DNA, 120 bp, Homo sapiens
catcgatgcagccttcaaaaatttggtgcgaacttttctggggagatggaggggcctcagcttccatcagatcatcgcacaggggctcctagcctaagaaagtgtcagcagcactgccct

SEQ ID NO: 28681 - DNA, 120 bp, Homo sapiens
ctgcgcctggaatgggcctcctaccatcccagggtgggtgtcagcccggccattcccaacccagtcaggccgaggcccacctaaaggaaggccctgggctgatggctcaatacccagtgg

SEQ ID NO: 28682 - DNA, 120 bp, Homo sapiens
agacgcacctgctgagaggcttcaattgcacctggagagaacttgcagtgggcaacgggcgtgtccaggagagaccttccccgcaggtctagtccttgtggatcccgagccagatcagaa

SEQ ID NO: 28683 - DNA, 120 bp, Homo sapiens
tgtcgggggagctcttgtgtctgagcatctatgtgtctgtgtgtaatatgttagtatgccagtatatggcatgaatgtacatgtgggtttgagtgtgtttgtgtgtgtgtgtgtgtgtgt

SEQ ID NO: 28684 - DNA, 120 bp, Homo sapiens
gtccggggtgtctgtgtatgtgtgtgtacagacctgttgtgataggttgttcctgagactgtttatacctgtgtctctacaagaagatccaagtgtgtgtgtgtgtctgtgtgtgtgtgt

SEQ ID NO: 28685 - DNA, 120 bp, Homo sapiens
gcccgcaaccactgagaccccaccgtgcaaaggcagcctaagttttcatggctctgctcaggatggtggtgcagccaccagctctgggtcaggcccctatagtgctagttcctccccacc

SEQ ID NO: 28686 - DNA, 120 bp, Homo sapiens
gcacgtcctacagtcagtgcagaagcaggaactgtctgcagagctcccaacactggccgcctctgtcctcgccaacaaccgcggactgttccagccccacaaacgcttccgtggctttgt

SEQ ID NO: 28687 - DNA, 120 bp, Homo sapiens
gcccgctgtttgataaaggaaggcttacatctttaataattctcaatgaaggaacatcctgtgaaggaattgtttaattaaaagacaacaatgggataaaaggtaaataagaaggaaaag

SEQ ID NO: 28688 - DNA, 120 bp, Homo sapiens
tcacgtcccagagagcatggggatcccagctctgaaacagtgactccacttctccagggcaaattagagattgctgggaggaacttcagatgaaaactttgggggttcatggttgagggc

SEQ ID NO: 28689 - DNA, 120 bp, Homo sapiens
gtgcggtttcacctccccaacaccagcaaagcccgagtgcagatcccagactccccatcttcaccaggctgaaatgaagtccccatttgcccagctgggtcatatccaaaagggtttagt

SEQ ID NO: 28690 - DNA, 120 bp, Homo sapiens
caccgcccccctacatggtgtcagtgaaggccatctggggagcagtaacgatgcatccctacttctcccagccagggaagggtcagtggtggcttcagtagggagccagaacttccacat

SEQ ID NO: 28691 - DNA, 120 bp, Homo sapiens
ctacggtctccttaaactaagcgactcctcatttccatgcatcagaccctgggagccacctccaggcctcctggccctttctgcctttgagaggctctgatttcactcccctccctgaac

SEQ ID NO: 28692 - DNA, 120 bp, Homo sapiens
ccccggcctccctgcttgattcggagtgagaccatttagcccagagaccctcaaagccagtgccatgtccagggaagccttagagtgtttcctgatggggagaattttctctgtcgcttt

SEQ ID NO: 28693 - DNA, 120 bp, Homo sapiens
tcccgggcctccactggggcccacagcacacacattcccaaagcaagcccagctaccttcctcttcctgccaccagctcacaaagccagactggccaggcttgtctcacagcagccccca

SEQ ID NO: 28694 - DNA, 120 bp, Homo sapiens
ctgcgctagttccaggggaggtatttatagtgcaagaggcatcacgcctgctcaggctgagctgagcccagagctgatttgcacatggaattggccattatcggctcatttccataaggc

SEQ ID NO: 28695 - DNA, 120 bp, Homo sapiens
tagcgcagatcctcagttagtactgatgagtgacacacatggtgaagtgaatagaggcgtgagcgtgtatggctcctacatggactgcagcaagttgggcactagttcttcattgcacag

SEQ ID NO: 28696 - DNA, 120 bp, Homo sapiens
gcccgttcagctatgctgatgccatccccatgccaacaagggctcaggctctgctcccttcagggaccagctcattccccaacaaaccaggccagagggaaaatgggagctgcagcccac

SEQ ID NO: 28697 - DNA, 120 bp, Homo sapiens
gcccgctgtctaagcctagaaacaggttcctttgccaagacccactccctgaggaatagagaagcctctgtgcccaaggcatacaggaagaatgccagagggctgggaggggtggggaca

SEQ ID NO: 28698 - DNA, 120 bp, Homo sapiens
tctcggggcccgagcaggttggcagggctgccctggggctacaggacacatatctattcttctcatcatccatcacccaccactgccaacatcccctattaaagaataaccaaaacagaa

SEQ ID NO: 28699 - DNA, 120 bp, Homo sapiens
cagcgggaaccaagtgtctgacacagggagatctgtggctgaagccccactccgccaggcccagggctctcctgatccacaccagtgaagaagcaggcagatttgtgaaacacccatttt

SEQ ID NO: 28700 - DNA, 120 bp, Homo sapiens
tctcgtgttctttggtatgatggaacccctggcctcctaggctagtgatgggacctttggggaacttctgatgtcaaccttcccactccacctggcctaactagtcggcttccaactccc

SEQ ID NO: 28701 - DNA, 120 bp, Homo sapiens
tgtcgaggggctactctatgccaggcaccatgcaggctgcagggccatggtggtgggaagcacacagccactctcccggacttcactgcatcaccaggcagtccagcactcatggaggac

SEQ ID NO: 28702 - DNA, 120 bp, Homo sapiens
ggacgagcatgtctgcgagagcgtgtaaccaagctgccagctctgtaggacaggtggggctcagggacacctttctttgaggacctgcatcttgagaagagtgagggtaaggagggtaat

SEQ ID NO: 28703 - DNA, 120 bp, Homo sapiens
aggcgggtgggcaggctagagagctgatcacctgccctcccagcggctgaggctcccatcaaggtcgcctcccaggctctaggggaaaactgtgtctgcaggccagattggaaacagagc

SEQ ID NO: 28704 - DNA, 120 bp, Homo sapiens
tctcggggaaggcctggcccctaagagatccctgcaggcagctcggggctgttacaaaatctccaactcctcaccaagggccagggactgagcaggagtgggagggtgggagggagaggc

SEQ ID NO: 28705 - DNA, 120 bp, Homo sapiens
agccgtggggctgccaaccctcatcagtctcccacaccctctaacatgttatggaggtggctgtggctataaagaggtagcacagggatccttgtgaaggaactgctctgtatcctgact

SEQ ID NO: 28706 - DNA, 120 bp, Homo sapiens
acacgtgcactactgaaatatgaacaaggcctacaggctgtatcaaatcctggttgcaatattgtactacagctatgcaggatgttactgtgggggaacctgggtgaagggcacgctgga

SEQ ID NO: 28707 - DNA, 120 bp, Homo sapiens
aaccgcatggcctccctgggaagtgggtactactaccccattctagacaggaggaacaggagcagagatcctaggttacagcattgcctaaaatcacaggggagcctgggttcaaaccct

SEQ ID NO: 28708 - DNA, 120 bp, Homo sapiens
taacgtttgttacatagtaagtgttcaaaaaaggatcaacttctgttgttattcacagccctctcatatgggatcctgtttttagagactcggccaagtagagagtggaggagcttgggg

SEQ ID NO: 28709 - DNA, 120 bp, Homo sapiens
gggcgggcagaggtagtctcagcactgttgagcagaaaagctcttggccagacaccaatcatggcctggccctaggaaagaggcagccggcttcccagaaattccacatgcctgcgggtt

SEQ ID NO: 28710 - DNA, 120 bp, Homo sapiens
cctcgtaagcaacacctctccagaagtcactgggccatgggaacagagaatgtccactgcaccctaaaacaggctcagggagggagctacacggtggtctctcctcctgctggcctttgg

SEQ ID NO: 28711 - DNA, 120 bp, Homo sapiens
aaccggagcctgcagttagactcctatggacaggccacaccacagagcctgcctcagccctccctgcagccccgggccaccgggcctgatcctgtgtccaattctcccctaccccacctg

SEQ ID NO: 28712 - DNA, 120 bp, Homo sapiens
gtgcgcgtgtgtgtgtgagttcatgcacgcaccagcaaaggtatatgcaggtgtatgggtggaaattactccccccaccgcagcctatgtcctgcctccctggtagggctgactgctcca

SEQ ID NO: 28713 - DNA, 120 bp, Homo sapiens
tagcgcagggtctggaggctatgctgtgtcctcatctctgcacctgctgttcccctgccagaagctcactgtcacctgttggcccctatctacctggtgaatccttctcatctacccaga

SEQ ID NO: 28714 - DNA, 120 bp, Homo sapiens
ccccgcatggagtgggacccccagctctggatgccttggagcagcaggcagcaacaggacaatgcgggatgtacatcatcctggcctggccctggtccacccactatcgacagcacagcc

SEQ ID NO: 28715 - DNA, 120 bp, Homo sapiens
gcccgagacagctgtgctcaccaggcaaaccataggcaatggcagccagtcatcaccctgtgggtctgtctctggggtaaaagtcacagggatgcccacacccacctcactccctctaca

SEQ ID NO: 28716 - DNA, 120 bp, Homo sapiens
tgccgctccctggcctgtcacctggtggggaccaagacagaagcactggcctgaagcctgccaatgggcaggtctagcccattccctcaaggggaatgtgccacccctacacccccagct

SEQ ID NO: 28717 - DNA, 120 bp, Homo sapiens
agacgcactctactctcaaagaccccagcccagatggcagctgtcctgcacctccatcaacccgtaggggctctaggaagctaaaggaaggtgtaagctgaggagacagccagctgctat

SEQ ID NO: 28718 - DNA, 120 bp, Homo sapiens
ctacgcagccatccagagcactggccactaaaataagctcagccattgtcacaccaaccaccaagcccatggctctctgtcccttcctcctcacccttcaaagttcaattcaagtgcccc

SEQ ID NO: 28719 - DNA, 120 bp, Homo sapiens
cctcgcaacatccagagctcagctcagccggggcattatcactctgaatcatcaccctctgcctccaccaccaggctgtgagctgttggaatttaggaaccgtgttgaggccacttcagg

SEQ ID NO: 28720 - DNA, 120 bp, Homo sapiens
tgccggaggaatgtttactgaaggagtgaatgaaactattgcattagatcaagcccaggtgcagaggactggtttcacatagaaagcatcgattttgccctacagaaccctgactccagt

SEQ ID NO: 28721 - DNA, 120 bp, Homo sapiens
gggcggggaggaaggtaggggctgacatttcccagcccctcccaggccggtggggagctgaatagctcagtgacttgtccaggagcccgaggtaaaccacagactaagagccaagagtca

SEQ ID NO: 28722 - DNA, 120 bp, Homo sapiens
ttacgaatatttatagcgtttaagcataatcgtattcagatgaggactatatattgctcacggcaatttgcactcttctcaaagcgtgtatttctgcagggaaggaggcccagtggctgg

SEQ ID NO: 28723 - DNA, 120 bp, Homo sapiens
tgtcggcctggagacagcagggtccagaaggtacaggagagctgctagcgtcccagctccagccccacctagacatgaaagacagcatctgccagacaccctgccctggagggggaccaa

SEQ ID NO: 28724 - DNA, 120 bp, Homo sapiens
tcacggccgtgtgtgagcatcaggtcaccatcaaggctgcaggcattcgtggggtcttttctacagagctgggggcctcatggggacccactcattggggctttggaattccacaggccc

SEQ ID NO: 28725 - DNA, 120 bp, Homo sapiens
gcccgattcaattaatagtcacctaatgaaggtgacaagaccctgcaggtggacaggtaggctgatggggcaaaggacagaggcatgagaagcaagaagagcgtaagaacgaaagggaag

SEQ ID NO: 28726 - DNA, 120 bp, Homo sapiens
gtgcgcctgcagctggtggaaaggggaagcctccaaagccacagagtcaagaaagggagcctccctctgatatgggcctgggtgaagccacctgctctaccagggcagcttcccagtggg

SEQ ID NO: 28727 - DNA, 120 bp, Homo sapiens
agacgaaagacaatggcaactggggccgcccctcccctcaaaggggcccttctggggtgtatggtgggtcataggcactgaggtggcccatgagaccagcattaaggcaggggtggtgga

SEQ ID NO: 28728 - DNA, 120 bp, Homo sapiens
acacgtctgagccccagcccatgccagccctctgcctggaggatgctcggcccagctcccacctgtgaagtccctgcttggtcctcagcatggctcccctcccaaggtgagctcctgtgg

SEQ ID NO: 28729 - DNA, 120 bp, Homo sapiens
caccgttcccaccactagactgtgagccactgcaggacctaggccatgcctcatctgtgcttagccccaggccctgcatggtgcctgacacatggtagatacatagtaaacactgaggaa

SEQ ID NO: 28730 - DNA, 120 bp, Homo sapiens
acccgaggctcagttccctcatgtctgcgggagctggtccctcaagccttgcagggctactacctcagcttttcctggaaaaccctagatttacagccctctgcttgcctccctagaaca

SEQ ID NO: 28731 - DNA, 120 bp, Homo sapiens
acacgatttccaaagaagacataagaaactgatcatagctgatcatcacctcaatagaaaaattcctggaactgaacgaagaactgagattagaaatcaaaaggacaaaaccagtcttag

SEQ ID NO: 28732 - DNA, 120 bp, Homo sapiens
gggcgctgatggctggacacaggccaacatgtgctgcccagctgtgcccttaaagctgcaggaggagctataagaacatgaagctgtttcctttgacgacccagccccctgccctagggc

SEQ ID NO: 28733 - DNA, 120 bp, Homo sapiens
gtgcgtgtaaacaatgcgtacagaaagttgaatgtctctgaattattaaagaatatcattaaattatgtaaatacatctatatcattacatacgaggttgtatattaatttaaaaataca

SEQ ID NO: 28734 - DNA, 120 bp, Homo sapiens
gcacgcacatgcgtgtgcaagtctgcacaaatggcaggggcagggaaggaaagacagcagaaggcaaagggaagagagtccagtaaggaaagtgaactgagaggaagaggccagatagag

SEQ ID NO: 28735 - DNA, 120 bp, Homo sapiens
atacgctggcttgtgttcagccaaaaatcagtctcttctgagcttggttagtgtgaactggtctctagctggtcctgagataacagtgagcctgccctcaccccatggaacacctgtgtg

SEQ ID NO: 28736 - DNA, 120 bp, Homo sapiens
ccacgtggcttccttccacttttgggccagcattggaaagcactgattccatcccaggcactcagctacagactgtggatattacttcatgataatacttacaccaatctttacaaacag

SEQ ID NO: 28737 - DNA, 120 bp, Homo sapiens
gcacgtaccagtaacaccttcattttagaaatgaggaaagccaggctcagagaagttaggtaactttccctaggtcacacagcaagtgacaaagctagatttacaagccagatctgcctc

SEQ ID NO: 28738 - DNA, 120 bp, Homo sapiens
tcccggtcctcatagggatgcagacagacacaactggaatggacaccagtagcagatgacatcctagaaggctcaaggcagaggccagggagggctgttaagagctgggccatcggaatg

SEQ ID NO: 28739 - DNA, 120 bp, Homo sapiens
cctcgcccagccccacgtcccctgagcctgattgggaatgagataaccatgataacagacacggacagtgatggaaagcatggtccccagagacaccccttcattcagactccacaatta

SEQ ID NO: 28740 - DNA, 120 bp, Homo sapiens
actcggctccagagctgataagacagccggttccttcacctgtgatggaggaaatgttttgtattttctgctttagctttaatttggagctaaacaaagacccagcaggtgggagaagga

SEQ ID NO: 28741 - DNA, 120 bp, Homo sapiens
acacgttcctcaaaccgaagaaaaagctgggtgtgggctgcaaagcccggagaagcctctgtgcccactccacagggagcaaaacacccagccatgagggctggggcccctgtagcaacc

SEQ ID NO: 28742 - DNA, 120 bp, Homo sapiens
tctcgattttatggatgaggaaactgaggcttacacaagttatgtgacttgcaaaataacaggacagaaccaaatttgaagctacccctatctgagcccagagctctatgctagcagggc

SEQ ID NO: 28743 - DNA, 120 bp, Homo sapiens
tgccggcatggcaaaggggtgagattcaaagctggccacagactatccattgcatagtgaggatcggatgtgaaaagcacttagcacagagcctggcactgggcaaatgctcagtagctg

SEQ ID NO: 28744 - DNA, 120 bp, Homo sapiens
aaccgctaggacccatattcctgccccaagccaggggcgttttcctcttccaacctcttggttaggtcagtgagaaactcgagtggatcaggtaagaaggagcaaggccaaaaggacaag

SEQ ID NO: 28745 - DNA, 120 bp, Homo sapiens
agccgtggagactacaaatgctcctctgtgaacaaaaccagagcaccagctcgcaggacacacccacttccaccactgctgagctgggggctgccctaccactgcggagttgaaccagct

SEQ ID NO: 28746 - DNA, 120 bp, Homo sapiens
cagcgaatgtgggcctgccaggccacaggctctcagtatggcagtcaaggcaggcagaaaagctaagagagcgccctcagtaaacgtggatgctgtggggaaggccacaatgccatccac

SEQ ID NO: 28747 - DNA, 120 bp, Homo sapiens
ggacggggcatagggtcgcagcagagggagatggcagagtgggcagtgggcactgtggtataggggaagaaaattgggctgtggccactcaggtctggctctaccctggtctgcagagtg

SEQ ID NO: 28748 - DNA, 120 bp, Homo sapiens
tctcgagcctccatgtcaagacctaaaccatggggacaacagtaatggggttgctggaaggtacgagaccatgccatgcctctccagcccacaggtggacagtcctccctccacagtgag

SEQ ID NO: 28749 - DNA, 120 bp, Homo sapiens
gagcgagccccccaacccaccccccatggccagggacctttgcctctacccctcctcagcccagggaaagcatccagagtgtccctgcaaacaccacaccagcaccagtagtgtcagact

SEQ ID NO: 28750 - DNA, 120 bp, Homo sapiens
ccccgggcagtaccaggctcaccccacagcagcctcgccagtaccagccctgcctcagcccaggggcacagcacaagactctcactcagcctttgggcttcagcacaggccatccacctc

SEQ ID NO: 28751 - DNA, 120 bp, Homo sapiens
cagcgctaagtctctgtttctgtgttggttcccccaccaaacggagagctccgtgggaatgagtaccacatcagctcatctccaaggctgatgcaaagtgaccattccatcaatgctagc

SEQ ID NO: 28752 - DNA, 120 bp, Homo sapiens
acacggacacagcacagcaaggtctggggcgggggcaggtggcagcaattcaacatgcggccctgatcgaggggttatcatgcccacctgacagaggaaatcaagggcaagttacccagc

SEQ ID NO: 28753 - DNA, 120 bp, Homo sapiens
ccacgacagaggctgcaggcttgtgcaagaaaaagcacgcacgccccagcacagactcaggggaacctgaccaaggggagaagccacaagggcgccacctctaggctctgcctccagccc

SEQ ID NO: 28754 - DNA, 120 bp, Homo sapiens
atccgcaggcctcagagctgcaggaagctcttctttgctcacctgcaagcttcatttcaggagattgtcaggactgacagcagccaagatgcacagggtgacatttccctgttgggaaaa

SEQ ID NO: 28755 - DNA, 120 bp, Homo sapiens
tgccgggaagaaagtctcagttctcaggaagagcagctcctacagcaattgttggtaaactggagttgagctcacagataagcgtcgcccctggcacctcctctggtcccatggagcaaa

SEQ ID NO: 28756 - DNA, 120 bp, Homo sapiens
ttccgtgtgtgcatgtgaatgtgaggagtgtggctgtgtgtgcaagtgtgggtgagtgtgagtgtggatgtgggtgggtgggtgcgagtgtgcgcaggtgtgagtgtcgggagtgggtgt

SEQ ID NO: 28757 - DNA, 120 bp, Homo sapiens
tgacggtgtctgtgggtgtgtgtatgcaagtgtgggtgtgagtgtggatgttaacgtgagtttgtgtgggactgtatatgtatgagtgtgtgagtgtggcagatgtgagtgtggaatgta

SEQ ID NO: 28758 - DNA, 120 bp, Homo sapiens
ctacgaaaatcacagacctcagactcccagaggccctgctgcagacccagtctctcactcctgagcctggcaccatgcccagcccagagctgtgtcctgtgccctagctgtgccggcgct

SEQ ID NO: 28759 - DNA, 120 bp, Homo sapiens
cctcgagctccaacctttcccagctttgttatcactccttctttctttccctgtggcccatgcagggctgccatggctggggggctacacactccaatgccagggagggagaaggagcca

SEQ ID NO: 28760 - DNA, 120 bp, Homo sapiens
catcgcctacctccccatgtctttccctggcccaggcatgccagtcactgagacttgaggagaagggcccccacactgctcaggcccctgcagctacccccacaagctgactatcaaagc

SEQ ID NO: 28761 - DNA, 120 bp, Homo sapiens
tagcgccagcaatgccttggggatggggtaggcatagaagaagagccatttgatttgattacttggctctgccaagcagagccatttacatgttaaagactttttttgttattattctgc

SEQ ID NO: 28762 - DNA, 120 bp, Homo sapiens
aaacgatagggaggggtgggggaggagacactgcagctggggtggaatgcattcattcattcattcattcattcattcaccactcattcctcccacaaacgtcgtcagcgctgtctctgg

SEQ ID NO: 28763 - DNA, 120 bp, Homo sapiens
attcgcgggtgatcactgttatgggtaaaactaaatcgaggcagaggatcaggagagcctagtgtagaagctggaggagtatggagaggaggctaggcaggcctggtcagcaccagaaag

SEQ ID NO: 28764 - DNA, 120 bp, Homo sapiens
tcacggagtcctggggcaagctctggggttgagtctctaagagaggtataccggttctggtgaaggcaaggagaacagcataaggtggcccagggcagtgagccctgaggcctgggggag

SEQ ID NO: 28765 - DNA, 120 bp, Homo sapiens
tggcgactcctgtgtggaccctgacttttcctctagcgagatgggagctgttgggagctttgatctgagtgagctgtgtgcaccagcatctttctggtgccatgatgagaacagaccaag

SEQ ID NO: 28766 - DNA, 120 bp, Homo sapiens
gggcggaggcagggagacctgtcaggaagccattccaagaatccaggggagagacgatggtggcttagccatgggggtggtcagtgggctgagctagaagggtgggctcctggggatggg

SEQ ID NO: 28767 - DNA, 120 bp, Homo sapiens
cagcgacagcaccactccactgagaggtcactgtgggcttgtccagtcaatgatggagatcaagcccccatctgcctttgctctccatccctgaccactccgctactaaaagtctttttc

SEQ ID NO: 28768 - DNA, 120 bp, Homo sapiens
tatcgacaacccatgtcctgctgcaatggatgtccaggcccagcagtgagatataaggcattcatcaagcagggatcaagcccagtgatggaaaagcaccccacagagtacatccaagga

SEQ ID NO: 28769 - DNA, 120 bp, Homo sapiens
gggcgcttacaggttgaatcacccatagctatgttttgtttggcttgtactgtgttgtttacattattttattagttggcaatagctttaaatcaaaatttacattaaggtccagatttg

SEQ ID NO: 28770 - DNA, 120 bp, Homo sapiens
tcacgcccaatggcaaaatctgttaaagctgtgtgacagcttctccttttaatggagatgacctcttcagaccctgtactccaggtgccacaggaaccagctgcccggttcatccttgtg

SEQ ID NO: 28771 - DNA, 120 bp, Homo sapiens
gagcggacgggcatcattcagaggcaaaatgaatgagcttggatactcaacactgcagaggggagccaacagaggtgtgtcaccagacatggaacacaggcagggtccccaccacactgt

SEQ ID NO: 28772 - DNA, 120 bp, Homo sapiens
ttccgctaagaaggccctgccctcccctggctggagcccaccccaagcacctgcaaggagctgtgataagggcacactgaaaagaagtccagaggcagggggtgtctggagatagagact

SEQ ID NO: 28773 - DNA, 120 bp, Homo sapiens
acacgaccagacaccaaagaagggcaggaattcctcttccctgtacctcaacagacatctgacaatggacatctgtcacagctggaagcagcagctcccataataggcagtgttagcctc

SEQ ID NO: 28774 - DNA, 120 bp, Homo sapiens
tcccggtttgtaaaaccacctcaagaaatccttggaccttcagtccccagaagtagtccccggtccctgcccccagagctggcccctttccttcctctgctgcacccaagaataggagac

SEQ ID NO: 28775 - DNA, 120 bp, Homo sapiens
caacgacctccccaacaccagctctgaccccccagacccaggccagagccatcatcgaggcatcctgtccttgcaggcaccggggagactagcaacccatgtgtaccaaagcagcaggag

SEQ ID NO: 28776 - DNA, 120 bp, Homo sapiens
tctcggctcaacgggcttgaggagaaaacaccagccaggagctcttagccagcccacctcccactacacccactgccccctctacacttctctaccagttcctccagcaaggaatccctg

SEQ ID NO: 28777 - DNA, 120 bp, Homo sapiens
ctgcgccactaacttgccccagcactgaggggcgctggccccagagtccccatggttgcggggagcaaggcagagggaaggagaagggacttaagccgggtaagtgtcagaggcggagcc

SEQ ID NO: 28778 - DNA, 120 bp, Homo sapiens
tcccgagctgaaaggttgaaggggagggactagcagagaggagggaaagcagagggggttgctgtcgtgaacgccctcgcctcgcacctgtggcgcctgccgcggggcccgaccggaggc

SEQ ID NO: 28779 - DNA, 120 bp, Homo sapiens
gggcggccccggcgtaggccaggatttccccgcagccggaccggcccagctccgctcctttcctgggcgaacagcgcccacctccggcccaggcggcggcgcctccgcccgcggcgcgga

SEQ ID NO: 28780 - DNA, 120 bp, Homo sapiens
cagcgagagagaaaccggctcctccaaacctggtggaggagcgctgcagagaagcgccgggctgaggctctgggggccgcggggcgcgaaacgccgcgcctaccaggttatgcccgggag

SEQ ID NO: 28781 - DNA, 120 bp, Homo sapiens
ggtcgggctccagccgctgggcgctcctcacctcgaagcgaggaaaacaccgggccactgagatcaggggaggtgcgcccgatacaggtacccggcacgcagacacgcccacccccaaac

SEQ ID NO: 28782 - DNA, 120 bp, Homo sapiens
caccgagaaacaaagactgccccgagccacgcacgcctgcgcggccagcgctgggcgcacacccgcgcccacacagcccgaagggcgccacgcaacccgcaagaacaccagctccccgcg

SEQ ID NO: 28783 - DNA, 120 bp, Homo sapiens
gctcgcaggctctccgtgccggcccgcagcgcagagcagtcccggcgccgctgcctaggtgggccggggaaggcgcgccaccgcgcatggcaccgcggctgccgaggaacagagggtgcc

SEQ ID NO: 28784 - DNA, 120 bp, Homo sapiens
ctgcgcagcccagctcgtcccaacccctccggtgcccactgctgcgacgcctcgcaggccgtgtcccagtgggccctgggcacagcggtcactcaccttcctgcacagcctggaatgggt

SEQ ID NO: 28785 - DNA, 120 bp, Homo sapiens
cctcgatgaccttgatggagtaggtgatcttctcgctctgcaggatgtcatcgttgaggctcaggtcggataccgccaactggaacaccctgtcgtccttggccgcgttctcctcgaaga

SEQ ID NO: 28786 - DNA, 120 bp, Homo sapiens
gaccggacctggacaagaaccctctccccgcttcccttggcccgagggtcaaggcactcgcagaccgatgattgccgggtggtgggaagtctgaactgggatttcagcttggcggggtag

SEQ ID NO: 28787 - DNA, 120 bp, Homo sapiens
ctccgatctccacctgcacaggaatatgttcccctccccccaccagccctcagcgcacacgtgcacacagttgacatgagttacacatgcacatcccacaggctgccaccaggtcacaca

SEQ ID NO: 28788 - DNA, 120 bp, Homo sapiens
acacgtgtctcacaaccaaggcaccacatgtcctagccatgctccacacaagggactaagccaagctggggtggccccaggcagcgcccaaatgccttgacatggttccataaatcccat

SEQ ID NO: 28789 - DNA, 120 bp, Homo sapiens
ccccgggagggtggtgtcccccacccaaatcccaggacagaatgatgggtccttctccatgcacgtcccctgctgagtggagctgagcgaagcaggtctacagttggctttcctgcgcag

SEQ ID NO: 28790 - DNA, 120 bp, Homo sapiens
cttcggatggcctgcagcttggatgactgtgacgctgcccggcctggcgccctgagctcagcctcctactctccatccttccccactcccatttcctgtacgtctgtcgaggggagtggg

SEQ ID NO: 28791 - DNA, 120 bp, Homo sapiens
aggcgcctccacgttcagatctagcggagctgggggtcccagaaggagctgctcttgaagggctttctagaaccgcggacagctcctccagggcgccctccggctggcgctttgtgcgcc

SEQ ID NO: 28792 - DNA, 120 bp, Homo sapiens
ccacggaccctgcgcttccagccgagatcagtgcgaccagcccgagcctagtcctgcaacctggacagctctggagtcagccacccacatcccgcctcaccaagcctcgagggtccctga

SEQ ID NO: 28793 - DNA, 120 bp, Homo sapiens
tcccggagctaggcccagtgatccctcgagctgggggctgggtaggaggagggaggcccggattcctcactacacccggagccggcgccgcaatgctgaccgcgagacccgcacccctcc

SEQ ID NO: 28794 - DNA, 120 bp, Homo sapiens
gggcgggaagcaggtttggtcacgggcccctgaggaggaatcgtagctctccgagcccaggcctagtcctcaccaccccactccaccacccaccctcccgccttgtcccgtcctcctcgc

SEQ ID NO: 28795 - DNA, 120 bp, Homo sapiens
gctcgctggtctttcccaacttccggaaagacgactgcggagggactcccccaaagcgaccgctgtcagccccccaactcggcccaacttcccgagattcctcccgtgttgctcccaact

SEQ ID NO: 28796 - DNA, 120 bp, Homo sapiens
gcacgggaccataagggctagcagaggacaacatgtggaggacagcagtttaaagagagaaatggggtgggcactgtggctcacacctataatgccagcactttgagaggtcgaggcagg

SEQ ID NO: 28797 - DNA, 120 bp, Homo sapiens
ccccgccagcacccatgctgggcagatgcttgcccagtctctttttgttgtcttggagcaggggtcagtaaacaacagcctgtgggccaaatctggcctgctgcctttttgcaaataaag

SEQ ID NO: 28798 - DNA, 120 bp, Homo sapiens
ctgcgaagcctaaaatatttagtatctggccctttacaaaaaaagtttgccaagtcctgttgtggagaactggaactgtgaaggaagcttggtagtttcctctttctaggctgttccaaa

SEQ ID NO: 28799 - DNA, 120 bp, Homo sapiens
caacgaagagtttgtcatgaagcaagttaccactgtgggcagctggagctctgttcccctatggagccctggaagccagtgtgaaacactgcttcagtgctattgcacctgaagagagag

SEQ ID NO: 28800 - DNA, 120 bp, Homo sapiens
tgacgcttttcccgtgccaccccttctctgggcagtttcctttaggcgtggtccccctcctgaggcaccacagtgccacccagtggcagaattgcagtactgagctctccggggagggct

SEQ ID NO: 28801 - DNA, 120 bp, Homo sapiens
aggcgagtaaggggtcaccgtcctggcagggccctcctgcatgccacaactaaggtccaaatggggttgaaatggcagagaaacacagccagtgcctttgtgggctccatgtattgcggt

SEQ ID NO: 28802 - DNA, 120 bp, Homo sapiens
ccccgcccagtcctagtttgtattattattccttagagaacaacactgctggaggcaaggggcatgtctgatccattttatcctcacaggctggtctgtggcaaaaacttaaaagtactg

SEQ ID NO: 28803 - DNA, 120 bp, Homo sapiens
ggccgtgggcatgtcccacccttttctgggcctcagtttccccattagtaagtcaaaggagttgcactagactgttacaaggctgctctgatcctcctgggacctcaggactcctgatct

SEQ ID NO: 28804 - DNA, 120 bp, Homo sapiens
gggcggggagagtggcagggacacaaagtgagctttcagcatttgcatcctgtgtccagccaacaaatgtgtggcattgctcccaatagcgagggaagtgacttcaaagatgagtaaatg

SEQ ID NO: 28805 - DNA, 120 bp, Homo sapiens
gggcggcccagctctccgggaggaatgccagaatatcaaatggggctgggaggcttttaaagataaaaagaaacattcaataaatctaggattttaataaaaataacaaccaaatacaaa

SEQ ID NO: 28806 - DNA, 120 bp, Homo sapiens
ggacgtgctggcaatggcaggcacaggggagaagggaggccaagccctggctccagacctcaccactgcctaggcccttcccaaggccccgccaagcagctcaacccccgagggctccct

SEQ ID NO: 28807 - DNA, 120 bp, Homo sapiens
ccacgtgggtctcacgcaggtctgttctctgctccaggtctgccatgtgaatctggaggggcagccgttctactccaagaaggacagacccctgtgcaagaagcacgcacacaccatcaa

SEQ ID NO: 28808 - DNA, 120 bp, Homo sapiens
aggcggccaaggccgcctgtgctgacgaggcccggagctgctcctgctgctggcaacaaaggattcgggaggctgatgtttcttctgaggggaatggggagagagaggaagcgactgagc

SEQ ID NO: 28809 - DNA, 120 bp, Homo sapiens
gatcgtgcatttgcatagttcagactaggagccaaatgaagactcaaaaccaagctagttattaatccaagactggaattgtacttcagacatttagagcagaattccaagaactcaaaa

SEQ ID NO: 28810 - DNA, 120 bp, Homo sapiens
aagcgatacacttgctttggtcaccagaggaggacagagcttagagcagctgtggagaatctgaagcattctgcggagttcttaagcgctcccctggcaaacaaattgaagtgccaaaca

SEQ ID NO: 28811 - DNA, 120 bp, Homo sapiens
actcgctgcagggtatttttagagtcatagctgagagcttgttagctaagacccattgggctttcctcaccaaaaaaggaagtgttattccattactagcgtcatggagctacctctgcg

SEQ ID NO: 28812 - DNA, 120 bp, Homo sapiens
gcccggacgtccaaagagatgtcttctgggagccactgggcaattgccagggctccaggaagggctctggctcaggttgcagacagctgagaaaagatggccctgtcagccaccctctct

SEQ ID NO: 28813 - DNA, 120 bp, Homo sapiens
gttcgttagcatgagtgtccagtcgtgtgcatgaatttcaccccaacttgtgactgctcacttatgacgtctcccccagtaccctccatctcaaataggcttggtggcctgtggaaaaga

SEQ ID NO: 28814 - DNA, 120 bp, Homo sapiens
caccggaaaacctcctgctatccctttgcagtcacacccctacttcaccccaactctggaaaccagcaacctgtttcctgtcactctagttttgtctttttgaagtaccctcttgagact

SEQ ID NO: 28815 - DNA, 120 bp, Homo sapiens
attcgttcacttttagaaggacttacgtgttgtgtccagtttttggcgatgatgaatagagctgctctatacattcatgtatacatttcttgcttgcacataggttacatttcaccagct

SEQ ID NO: 28816 - DNA, 120 bp, Homo sapiens
gtacgaagagttcccatatccccccaatccacatgtacatagcctgccccactctcaacatcccccactagagtggcacattgtttccaattgatgaacctatgttgacatgtccttatt

SEQ ID NO: 28817 - DNA, 120 bp, Homo sapiens
ttacgcaaagtctttaggcttcattagggttcactcttggtgttgtacattatatgggttatattatatattaaatgcagagtgatgtctattcaccattatggtatcatagagaatagt

SEQ ID NO: 28818 - DNA, 120 bp, Homo sapiens
gttcgtttttggccaagggcagcctcttctggtaggcttctgagtccttctaaagtgactcatagtctgtgatttgtcccctcactaccttataaaatgagactttccgggaacatcttt

SEQ ID NO: 28819 - DNA, 120 bp, Homo sapiens
actcgaaagttctactggccataaaattcttggctttcattttccttccttgagtattttattttctggtataatatgttgctttggaaagtttgttgttaatgtagtttttttccctta

SEQ ID NO: 28820 - DNA, 120 bp, Homo sapiens
ttccgttatgaaacacagattgcctttgaggtctcctgtttctactactgcccctcacttttatgtgggcctcctctttcctttgtttctggagaaccttttcctgttcaattctgtttt

SEQ ID NO: 28821 - DNA, 120 bp, Homo sapiens
ttacgctataggccctttgcaccatctgcatcttcaaatgtgcccactgttcgttccaatgaagacttgtttgttatttggcttgtagagggacatggaagaagcaaatcagtctttacc

SEQ ID NO: 28822 - DNA, 120 bp, Homo sapiens
tagcgataccctggaatctaggactgagatcctgtgcctcacacccacccacgcggccaagtgcctacctgtggcagtgacttcttagtgctcgtccacatctaggtcttctttagtccc

SEQ ID NO: 28823 - DNA, 120 bp, Homo sapiens
acccgtgttggacatattacatgaggcagaaataaatttctgttgtgctaagccattgaaatgttggggttgttaccacagcatcacttagacctgtgctgtctaacatggcagccacta

SEQ ID NO: 28824 - DNA, 120 bp, Homo sapiens
tcacgaagttttagtagaatttgtacaagtggtagaccaaagttttggaaatctccgtggtttagaagttgtctttgtggttgcttatcactgctcactattaattgagggtttgatcct

SEQ ID NO: 28825 - DNA, 120 bp, Homo sapiens
gaacgggctgcaagagcttcagaagcaaaaggagtgttctctgtaggctcagatgctcacatgacccaagacacgtgaagggtctgcccatcattcacccctctatccccacaagtggtc

SEQ ID NO: 28826 - DNA, 120 bp, Homo sapiens
cagcggctgggtgaaagtccagagaagctctcctgaataaacaagtcaaacaaaggcagttcccagcagtggatggggctgtactccagaagtctatttgcaaatctgtcctttagaact

SEQ ID NO: 28827 - DNA, 120 bp, Homo sapiens
actcggaagacattccccaggaggagcaatgttatgcagtgtggcaaggttcccaggctagcccacacctctgatttaacccagaatgggctggggaaacagtgctctagaactcatcat

SEQ ID NO: 28828 - DNA, 120 bp, Homo sapiens
ttccggcttttctttggtttgtttcttcaagataacctggtgtagggaagggtgagagtcctggctctatcattacacacagcagcatctccaagcttcagtttctcctctgaaaaatag

SEQ ID NO: 28829 - DNA, 120 bp, Homo sapiens
acacgaccttaacctggtttgaggcttgaatatcttgcctgggctagaaaggtggcccctctggactggctttaattttaggatcagtccctttagagggagtagatcttgtaagctggg

SEQ ID NO: 28830 - DNA, 120 bp, Homo sapiens
aggcgctgatgtaatttgttttcacaaaaactgtagcagccttctgagttaagcatttgctcagctggtctttgccagacgacagatgctttgtgtcattgcctgttgacagtggcctta

SEQ ID NO: 28831 - DNA, 120 bp, Homo sapiens
aggcgagctgctccagagatctggagggatcacgttgggtacccagccgggctggccccagggattctactccaggtgtaagagaattggttaaacaaaggaaatgacaatcagttcagg

SEQ ID NO: 28832 - DNA, 120 bp, Homo sapiens
gcacgaatgttctcagagctgccatagatattttaatcaggatgtccttttcacttgaatgagaggaatgcaggttctatatttacttgtttgtcccttctatcagattgtgaggcccaa

SEQ ID NO: 28833 - DNA, 120 bp, Homo sapiens
aggcgcctctaactgattcatcagcctgtgcctgctgcgtagcacaaagccaagcacaaagccgggcacaaaggactcacttggcgaaagtttgtgggatggaagaatgaatgcggtgtc

SEQ ID NO: 28834 - DNA, 120 bp, Homo sapiens
cctcggagtcccctcttttcaggctccgctttataccctttctctggcgcaggtccctgctcactgcaggtgtctcctaagagcttatgtccctatgtttccttctcatcctggaaacgg

SEQ ID NO: 28835 - DNA, 120 bp, Homo sapiens
gttcgtccggcttgtaatcccaaactgaatgggactgatttgttgtatgcttggctggtcttcacaacgcatgtttttgtgatatgtaacatttccttttagatcaagtgtggcctggta

SEQ ID NO: 28836 - DNA, 120 bp, Homo sapiens
gagcgtccagggcagctggtgttctgaatttcagccttcccattttctattgttttatttttttaattattattattatattttatagagatggggtctccctgtgttacccaggctgat

SEQ ID NO: 28837 - DNA, 120 bp, Homo sapiens
atccgtacacatttttgtgtttctaaaaagaggaaacgtctcagaaaatgcttcttataggccgtatgcaaatatagagaaaaaaatcttaccttgggatgggggaagttctgctactat

SEQ ID NO: 28838 - DNA, 120 bp, Homo sapiens
ttccgttctttgaagaaaagactccttatgaatttgctatgctatttataatgtcagtggcaaaattgatctgggttgttcttctgggacttgaagtaaataaacacagaggcatttggc

SEQ ID NO: 28839 - DNA, 120 bp, Homo sapiens
ttacggaaggaagccaataggcctctggcaccttcccaatttaaatttaaactgttcactgcaagtacagattcaatcagatacaatcattttcacttttccctgctattaaacataaga

SEQ ID NO: 28840 - DNA, 120 bp, Homo sapiens
tagcgtagaaaactcctataggctacatgtcatatccatgaggtgtagggaaaaggcagaaagattcactcttctttgttctgtatgtgcaaaagaatgactggagggggaagtggtgtt

SEQ ID NO: 28841 - DNA, 120 bp, Homo sapiens
atgcggtcacccttggggaggttgcatacatactagtacacaaggctttcataggaagcacatgccatacaaatactttattcctgacctgcttatttgtcccagaacctccccttgtac

SEQ ID NO: 28842 - DNA, 120 bp, Homo sapiens
ggacgaaggtagcttgagactaggaaaactagaagctacagccagggaggactcctgggaaagagtatggcctaaggggaatgtgtgtgtggtgggcaggtgggcagcaatgggggagac

SEQ ID NO: 28843 - DNA, 120 bp, Homo sapiens
agacggctatggtcagcctagaatttgaagtctgaatttcagatgataaggcagaagagttgaagcagattgagggcagagaatttgggaaattctatttgaagctgtgactctcatcta

SEQ ID NO: 28844 - DNA, 120 bp, Homo sapiens
agacgacaggtcattcttagatggagtaaaggactgctaattttcagacttcagtttgattcagaaactgtgtccctatcagcagacagccatgcctggggagcaccagccccctgccat

SEQ ID NO: 28845 - DNA, 120 bp, Homo sapiens
tgacgagttagggactctaagctcaaggacccaaggttccccgaaacagactcagcccagtcctactcctgagccctcttcttgttgtctcctgacctggtgcccaggacaccccccctc

SEQ ID NO: 28846 - DNA, 120 bp, Homo sapiens
gcacgcactctgtgatgaggcctagctgtcacatgcactaattttcaaagtgctcagatttggttctcttctttctagaaacccatttcagaaaaaaggaaccagatcttaacagtaagg

SEQ ID NO: 28847 - DNA, 120 bp, Homo sapiens
ccacgtggtaggtccaagtggtcatgagatttggccagctcagttcctgagccctgtattgggcctgaggagggttgcaagtggaggatttccaggcctcacagcatgacccacagcctg

SEQ ID NO: 28848 - DNA, 120 bp, Homo sapiens
ggtcgaagacatctggaaaacataggatctccttcagtgtctttagcaccagatcctgtgattcaaactacacacaaccaataagaaaaagaattcaacatgcgtgctaccggttcacct

SEQ ID NO: 28849 - DNA, 120 bp, Homo sapiens
atgcgtcccagctgaggtcagaatgtgttggggagcccaaagtaatggctcttcctctgggtgtgggcattcaaaagatgccaaagggagaacctcatcctcaaggtgaatccgcctctg

SEQ ID NO: 28850 - DNA, 120 bp, Homo sapiens
tcccgaagcagtccagtgcatcacttagcaggaccaggggcaaggggaaggtaaattcctgaaaaggagccacctctgtcttgcaggttaaaatagccttgtcccaaagatgtgataaca

SEQ ID NO: 28851 - DNA, 120 bp, Homo sapiens
acacgggaggagaactgtggttcttgaaaactcggcagtgaggatacctggccacaggccaagaggaagagagctgcttctgggtaagccctgaaacttatttggggatcaactgatttc

SEQ ID NO: 28852 - DNA, 120 bp, Homo sapiens
caccgtggggaggccgggttccactgggggcagacagaaacatgaggtaggagaagagtgctgatggcctcaccttaatgctgggtaatttttctgcagaagagacttgcagtgacataa

SEQ ID NO: 28853 - DNA, 120 bp, Homo sapiens
tgccgatcaatccctctccccaaacagaggtacatatctgtgcctgctctagcagcggcagtcaggatggtacacggcgggctagaggagggagcagcagggctggaggctgggtggagc

SEQ ID NO: 28854 - DNA, 120 bp, Homo sapiens
tggcggtcgctagtccacggtcctgagcactgtctcgactcctttgtaaaacaaggagattggattcattgagcatccctctctcttctggctccaatgccccaaatgtctaactgtgtg

SEQ ID NO: 28855 - DNA, 120 bp, Homo sapiens
gaccgttcatatgttgggactgagagtttgtgttatctgaagccagcatgctgtccacactgtggggaaagcctgcatgatttgctattgtcctcccctctagtgccctgtggttttaga

SEQ ID NO: 28856 - DNA, 120 bp, Homo sapiens
ggccgtgttctatctcaggcagacatgtgtaagaggaaggcatgaataattagaaacttcttaatggtagggccagcaccagtgattaatcatagcaaaattctcctgccacgcacacag

SEQ ID NO: 28857 - DNA, 120 bp, Homo sapiens
attcggtcccagtccctgtctctgcaaatgccgccacagcaagattggaagggccccccggcagccagtccggccatgtctcccacaacccctgtggtcactggagccacttccctgccc

SEQ ID NO: 28858 - DNA, 120 bp, Homo sapiens
gcacgtgatgtgcaaatgtcaggagggagggatggtatgagagagtcgagagagtcagaacagtgtgttgacataactgcaagcagtgtggtgtggttggagctcaggcattgggagcgg

SEQ ID NO: 28859 - DNA, 120 bp, Homo sapiens
cagcgggttgtggggagagtaaggctgcagagatgtggggaggtcctggatcatgcaggggctgtgggtttcccacagaaggcagggaggtgggccggggtgtggtggcgagctgggaga

SEQ ID NO: 28860 - DNA, 120 bp, Homo sapiens
agtcgggatcaggctttgcttggaggagggatggctaaagctgggtggagtcacagtggggttgccatctccacaggagctctgtcccagctgggaacctcttggggacttcttcttttt

SEQ ID NO: 28861 - DNA, 120 bp, Homo sapiens
acacgccaggggtccaacacagactcccacttggatgggatcaagagctttaagaagtgagagtttggcttcagctcatgtgccctgagaggcttacagaagtgttttggggatttccag

SEQ ID NO: 28862 - DNA, 120 bp, Homo sapiens
ttacgtgggcaccctggcattttcaccttcaagcaccatttgttccttctctgtgaggcttaggcgttcagacaggtggatgcctccatcactgtgtgaactcctctcagccctgcccaa

SEQ ID NO: 28863 - DNA, 120 bp, Homo sapiens
acacgcctagcacatgcccaggcccgtgttcaaagaaacgccttgcccagcccgatgcagccctgccctgagcatacgtgaatgctctgggcttacctgcttcctgctgcctggggccaa

SEQ ID NO: 28864 - DNA, 120 bp, Homo sapiens
atacgttagtaacagggaaaagagggaagtcactgaattggaatgggaaaactgaataaaaacctagatggatatgggtctaatgtatctgagtttctcagtagcagagaatataactga

SEQ ID NO: 28865 - DNA, 120 bp, Homo sapiens
agacgagacccacataaacaaaggccaaaggaactgggggtgtttatccttgagaacagaaggttcagtgagaatttgatgactgttttcaaatatttgaaaggctggaaaagagaacag

SEQ ID NO: 28866 - DNA, 120 bp, Homo sapiens
tgccgtgctgcctcaagaaagattttggctactctgaggaaaatgaagcaataggaaaaacttcatagtgattagagccatctgagtatgaaaaggcttgcttttttcaggcagtgagtc

SEQ ID NO: 28867 - DNA, 120 bp, Homo sapiens
agtcggacttggcaaaatgtgggtaagcagagtcttgctattcaaagtgttatctgaggatcagcagcattggccccacctgggagcttgacagactctcaggctcctcctcaaaaccac

SEQ ID NO: 28868 - DNA, 120 bp, Homo sapiens
ggccgataattgtactcccatatggggttgtgagaatttaatgagtttatacatgtacaacactcatcacaattctataccctgtaagtaatcaataaatgtaaaacatcaatggaatta

SEQ ID NO: 28869 - DNA, 120 bp, Homo sapiens
acggttacggattagtagtataaaagagtgatgtgatctttgcagcacccaaattactgccaaggaagccgtctttacactgaatggaatcttgctcctcgtgctgagtattgcaaatag

SEQ ID NO: 28870 - DNA, 120 bp, Homo sapiens
ctccggaaagaaatgtgcaaacaagcctgtatatttttactgagctctcaattagtttaatttagaattgaaatgtgctttttagctcagatgtcataaaactaaagagaagcatgtgca

SEQ ID NO: 28871 - DNA, 120 bp, Homo sapiens
ctgcgggacgtctgaatcagtaattgctgtcttttaagcatctgttgtgtgccaaatactgcactaggcactttacgggcattgctcttgtttaagtcgtctggtcaaagttgcctagac

SEQ ID NO: 28872 - DNA, 120 bp, Homo sapiens
gcccgctaatgaatgatcaggaatgcttgttccctaggaaatgcatggaattcatggagtagctgaatttttgtcacttagtaagttgtctatacttgaacaaggaaaatacgtatgttt

SEQ ID NO: 28873 - DNA, 120 bp, Homo sapiens
aaacgagaaaaatgcgacccatagagattaaaaacctcatccaacttcacacagggagtggcagttccaggcttcaagtgcaggcagtttggattaaaaatctgtgcccttaaccacaac

SEQ ID NO: 28874 - DNA, 120 bp, Homo sapiens
tgccgatgaggacctctcgctttaatctgaatcagagtcagccaaagaaaatagtagagtaagcaggtcctagacagttaacacataacattatacagctatgggcagtcccaacagttc

SEQ ID NO: 28875 - DNA, 120 bp, Homo sapiens
aatcggagacacaaaaatatgcagtgcaatgtctgcttacttttaaagttatagtgaacgcaagaggaaattatacccagatggcctagaacaagtgattaaaaagacaccctaccacca

SEQ ID NO: 28876 - DNA, 120 bp, Homo sapiens
gggcgacacatttggcccaagtctgagttttcttatctgtttccttaccaatatcccttgagctgatagttcagacatctttcccatagggaaatatatctagcctgtgcctcattccct

SEQ ID NO: 28877 - DNA, 120 bp, Homo sapiens
tatcgagatatgtttggtgttaacagtgtttcttagaaatgaaattcaattttcaaaagttttcatactaagaaatcctcagcttctctgagactcttaaaatgtgtgcttttgtttcaa

SEQ ID NO: 28878 - DNA, 120 bp, Homo sapiens
taacggtgtaaattttcattttccattacgctgcatcaaaccattaagcaaagttatagagttcagtttttaaggtggttttttcacattaggctccacggaatgctggaagtctgaaga

SEQ ID NO: 28879 - DNA, 120 bp, Homo sapiens
tcacgaacagaagagcaatgctagtatgctataagaaggtcaagggctttgggctcaaatagacctggctcaggtttgaggtctcgcttcagcatttactggctggtttctcaactttct

SEQ ID NO: 28880 - DNA, 120 bp, Homo sapiens
atacgtacatacatacatacacacacaaacaaaataataaatgtaaagttttatcaatatgcaactcaatatctggcccaccatagctgtttaataagggctatgccccctttactctaa

SEQ ID NO: 28881 - DNA, 120 bp, Homo sapiens
tcacggagaaatgtattttactatgtctctttttctccccaaacatataactgtcaaggaggaaaagaaaatatgcatattagctttaccactgcagtaaactaaagacattttgaacta

SEQ ID NO: 28882 - DNA, 120 bp, Homo sapiens
taacggtcatcctaaggaaggattcaaccaaccagaacagctgctcatcagaaacactgcaaagcttcctttatcgtccataggtttcttcctaacatagttgacatttcaaaatacatt

SEQ ID NO: 28883 - DNA, 120 bp, Homo sapiens
aaccgaattattagaccagaatagacttgtttgtaagcctatttggatttatatcctgactttgcttcctctacatatgtagctggccttggattgctgaatctccttgtagcttagcct

SEQ ID NO: 28884 - DNA, 120 bp, Homo sapiens
tgccgtgagtgcaggagtctggcctttctcatctttgaaaccctggtagacagcagagtgctgggtccctgtgggccactcagccagtatgtgctgcgtgaatgagaggtatttagcaaa

SEQ ID NO: 28885 - DNA, 120 bp, Homo sapiens
gcccgaatgaagcttatttaacatgcgcattttctccataaggcacatcacagccttcttgcacttgcgaacactaaacagcacatcaacactatgcttttgggccatgttaaacagtga

SEQ ID NO: 28886 - DNA, 120 bp, Homo sapiens
tatcgatttaagagtaacaaataaatattagcaaggaggaaaatttgaaaatttagaatccacaaataatgtggattgattataattaaagtgtactctaagtgtttaatttttcaacca

SEQ ID NO: 28887 - DNA, 120 bp, Homo sapiens
taacgttatgaggtaaacagggaaaaagtatcctcattttatagctgtagaaacaagctcagaaaaattgctcaaaatgacagaactctgaaaatggaggctagtgccttatgattataa

SEQ ID NO: 28888 - DNA, 120 bp, Homo sapiens
gtacgatatataaccagaattgaaaattaggacttgggtatttaatgcagactttaaaacaaatgcaataaggatcatctcaaacagtagatctgtaactggactgaaaaatatcacagc

SEQ ID NO: 28889 - DNA, 120 bp, Homo sapiens
taccgttcagactttatttcagactagtgtttgctggacataacacaattaaatttaaaaccactgatctatcacttactaataacaatggccagaaattgttggtttattgtattttga

SEQ ID NO: 28890 - DNA, 120 bp, Homo sapiens
gcccgattcctgattaggagtgaggaaactcaggctttttcagtaactttcagattttttcccaatccttctaccctgagacaagattttataaaggtcctagtccatgaattttcccca

SEQ ID NO: 28891 - DNA, 120 bp, Homo sapiens
tggcgtttattcttattccaggagatgctgtaatgggtgatctacagcgctgagatgaggaaaatgggggcagaccagcacgtttaaggtcattccattcctgttgtctatctttcacct

SEQ ID NO: 28892 - DNA, 120 bp, Homo sapiens
ggacgtgtagctcacacttagttcacatgacattccttctgttcctgaagtatgccaagcactagaagatgcctacatgcttttgcttctgctgtccccctgcttgggatgactttctct

SEQ ID NO: 28893 - DNA, 120 bp, Homo sapiens
agtcgggtaggggctgggcactcaggtgccagggtagtggttagtgacatggggcctccaggttccctgtaacttctctgggtgggcgaaatctgcaggagtgtagggagtgaggaggct

SEQ ID NO: 28894 - DNA, 120 bp, Homo sapiens
gcacgtgcttgtggctgaaaccaagactggctgacctgtcctcatgatcccagagctccagtccctctgaggacacagatacccatccttctgtcaaggactccccctagaagagacacc

SEQ ID NO: 28895 - DNA, 120 bp, Homo sapiens
ctccgttcctataatggcacaatggccaaaggcctgctctctctcacaggaagattatgcaagtaaaaagaaatgacgaatgtgtatgcactttgataagtgtcatatggtctacaagta

SEQ ID NO: 28896 - DNA, 120 bp, Homo sapiens
ccccgaggacatgcagtggaacagtattcacaagggctggggaggttaagaaggggaagcagtgtgtcaaatggcaggtagccagatagagggggcagcaggcagggccaggggcaggtg

SEQ ID NO: 28897 - DNA, 120 bp, Homo sapiens
gaacgccaatggaaactctgactgtgcttatagcatgcgcgggcttctttccctggattttattctgactgtgaaaatttgagctctgaaagttgcctttttcatgtctgtcatatttag

SEQ ID NO: 28898 - DNA, 120 bp, Homo sapiens
aggcgtgagccaccatgcctggcctttgtttatttttaatcttattgacactatctacttctcaaagcaacttgaagtaaccaacaataaaatataagatataaaaacatgagactatat

SEQ ID NO: 28899 - DNA, 120 bp, Homo sapiens
agccgtgatccacgtggcgcagactctgagaaggctcgccttacggaactgttcaacagaaagaaaaccagcatagaaggaacttcattctttactctcacctctcaaagaacatgaaag

SEQ ID NO: 28900 - DNA, 120 bp, Homo sapiens
gcacgggggccctgcctcccaggggagggctggagtgagtactcccagtgaggctaaggatggtgggaggcagaggggaggaaacaggacctacacttcggttgtcgggccggggtctta

SEQ ID NO: 28901 - DNA, 120 bp, Homo sapiens
atacgctagctcttgaaccatctcaggtctgtgagaaaggaattacttgtccattttacagatgaggaaatggagccttagacaagcaaagtgactcgctctaggtcacacagtcagaag

SEQ ID NO: 28902 - DNA, 120 bp, Homo sapiens
agccgagacgcagcccctctccgaggaactggaagtccttctcacggcatcccctggggtagacaggaagcagctgcgactgtgatcatctaagaccagcaggagagagtgttcttccct

SEQ ID NO: 28903 - DNA, 120 bp, Homo sapiens
ccccgcctcctgttcatctccactctgggaatcccagttctccaaagccatggaaataggcccaataaccttgggctgggctgctgggcaaagtctggtgtaaagcatgctacagaaagc

SEQ ID NO: 28904 - DNA, 120 bp, Homo sapiens
tcacgttgcctattgaaagcagtcacacagtaggaagttaggggccttcctggcatcccagggctggaagcagccatcacatccccctgatcacagtgattggctggagggtgagcatgt

SEQ ID NO: 28905 - DNA, 120 bp, Homo sapiens
acccgcctctctgggcctagctttcagtttctgtataacaacttccagacttgactccctggagttctagccagagggatgaaccaactcatggtgagtgaaaacagtggcctggcaaca

SEQ ID NO: 28906 - DNA, 120 bp, Homo sapiens
cagcgactcatttctactgccttttcttgaggcttaaggaagatactttagccctaaagtagatcttcagaagataagaaaatgccatggtgtggaaaactctgtgctggatgaagtgga

SEQ ID NO: 28907 - DNA, 120 bp, Homo sapiens
ccccgaggccagatgaaaagcacatggatgaaagccaaagtccatcccttccttgagcctttgggagcagcagtccaccctctctttcagaaagtagttcccccccttacccttcaccct

SEQ ID NO: 28908 - DNA, 120 bp, Homo sapiens
aatcggtgtaactgtggattgaactgacttttattgatttcccagcaggtgatttataactgcctgcttcctaaaagggcttgtggccagatggcaataaaaacactcagaggccaagag

SEQ ID NO: 28909 - DNA, 120 bp, Homo sapiens
aaccgaggtgggatgactgctcagtctggatcacagggatgggaatcttgcttttcagttcctactgacataaccaattgagatcagcagcaccttgtttttggcttttgcaagaattgc

SEQ ID NO: 28910 - DNA, 120 bp, Homo sapiens
acacgagtcacatccaagggataaggggtttggggtgggtattccagggagaggcacaagaaggctgtcgtgaaggtcccagaaaaggtgatagaggtagggagtagctatagctggagg

SEQ ID NO: 28911 - DNA, 120 bp, Homo sapiens
cctcgatgagaatggaaagggatttggactctattctaagtgctgtgggagccatggaagggttgagaagtggggttgtgaggcgttggctcacacctgttatcccagcagcttggtagg

SEQ ID NO: 28912 - DNA, 120 bp, Homo sapiens
tttcgactctgcttccacagtgaaagtttggaaggtcatgagctatatcacaagaggttggccctgttgtgggcattagctccctctacattcatagaactcttctgatttataacagaa

SEQ ID NO: 28913 - DNA, 120 bp, Homo sapiens
ctccgggtgctggcaggctctgcttctggccctagatttcacacccctgatgtgaaattgcatcctcttcacctctcaaacaagttctctcctcttggtttggacatttcttctccctct

SEQ ID NO: 28914 - DNA, 120 bp, Homo sapiens
ttacgccttgtaatcataaattgtcaatgaaatggccacataggatggtctgagatattacatttggggttttggttagtcttggctttacgcaaagacacaacatggcagctgggtggt

SEQ ID NO: 28915 - DNA, 120 bp, Homo sapiens
actcgccacatttcacgatcacatgaatgaccagtctggctggctctgctgtagtgccatttggaaagatggctgttgttttctgtttttagattattcataattatagcagcctttgtg

SEQ ID NO: 28916 - DNA, 120 bp, Homo sapiens
ctacggtctcccggcctcatggggttgaatgcttcataactaagcccaggcactatcagcttgtcagagggtaggggccaaggacatggcccctccagctgcagacaaactgctgggcag

SEQ ID NO: 28917 - DNA, 120 bp, Homo sapiens
aagcgagaaaacctggcagaaagaaacagagaatttttcttccttcaggcaaacaggctcctctcagatcagaaactgtgacagggttttcatgggaggtacaggctgtgataggaacag

SEQ ID NO: 28918 - DNA, 120 bp, Homo sapiens
gagcggggatgcaggggagcccagaggaactctgagcagggctaggggtagaaaatagcagtgcagagctcaatggtgcctgcgcctcccagctccccagcaacctgcgcttgtgcctag

SEQ ID NO: 28919 - DNA, 120 bp, Homo sapiens
ggacgaggaaagctggcttagcagaggccagggtgcaaagctctggggagctttagctgagtgaacactcattatgagccagctatgtgttgtggctgtcagcaaagctaatgaatctat

SEQ ID NO: 28920 - DNA, 120 bp, Homo sapiens
taccgtcagcttcgattccagatcaaaggggaagataatccctgcaggctttgctttggtcagcccatcagtccagatctgaaaatccatgtccacttctgggcctcacatgtttaaggg

SEQ ID NO: 28921 - DNA, 120 bp, Homo sapiens
ctgcggaataagacaggaggatggtgatagtccgagacctggtgctcacgtgctctatgagatgtctggtaaagccctggggaggacacaggaagagtatggcctagggagcctagtgac

SEQ ID NO: 28922 - DNA, 120 bp, Homo sapiens
ctacgaggacgtctccagatcacagcagcgcctcctaggcagagacacaaagtctgcaggctcctctctccaggccctggggactctctctggggaggagtaagctatgcacattcaagc

SEQ ID NO: 28923 - DNA, 120 bp, Homo sapiens
ccccgcagcagctgccaaacaggctctttgccgaggtacctccctgctgcctgccagccagccatatttcaaaggtcacaatttcctccctgtggttttctacagagctaaagtctccag

SEQ ID NO: 28924 - DNA, 120 bp, Homo sapiens
tgccggttccagggacttattcaataatctgcaaagtatcctggtaattacttttgggctgaccccatggcagagggaggccacctttccatcatttttagggccctgggtacagtagct

SEQ ID NO: 28925 - DNA, 120 bp, Homo sapiens
gcacgaggcagcccacctgctggaacgagtctgtcgggcagacctgggtcaggaacttgcctctctgctgcctctttgctgccctgcctcattctgcttctccccttcacccctcccacc

SEQ ID NO: 28926 - DNA, 120 bp, Homo sapiens
tctcgaaacaccaactctgctggtccccagagcccagatacagctacttgtgcttctatcaccgtgtccctggaaacagatgttgctgctattactggaactgccataaaagattctctg

SEQ ID NO: 28927 - DNA, 120 bp, Homo sapiens
taccgtgaaagatggctctgcctcccacccaaactcagaaagcggggaatttcccaaacattggaaaaccttcagatgtggagtgccctcccactaaaaacattcccatcactgtccact

SEQ ID NO: 28928 - DNA, 120 bp, Homo sapiens
cttcggtaaaccctatttggctgtggtaaattattcttttaatatactgttgaattcaatttcctggcgttttgtctagaatttgcacatttatatttatgagtgaggttggtctagttt

SEQ ID NO: 28929 - DNA, 120 bp, Homo sapiens
tgccgtctctttgccagcctcagtgacattccgggcccttcctcccagggattttgtgcccccctggttgggatttgagccctaaactatttttcataaaccacaggctttacagcagcc

SEQ ID NO: 28930 - DNA, 120 bp, Homo sapiens
tagcgctatcatagggattaagtaacatttataaaacagagtagtgcagggcacatagtaaacaccatataaatgtttgagcaatacattttaaaatctcacccaggtctgggtagtggg

SEQ ID NO: 28931 - DNA, 120 bp, Homo sapiens
tcccggtccctgatatctgtgggatgagggagaggagggaagtgctgacttccataaaccaaaaataactaattgcacatccaaggcctaaacgaagctttgtcagtccctcaaaactgg

SEQ ID NO: 28932 - DNA, 120 bp, Homo sapiens
actcgattattgtcttttcaacacaaaaggttctcaaagttggacttgctgacagcacttggggattggagcaggagaaagtcaaggactcctcctcctcctctagcatggggaaattct

SEQ ID NO: 28933 - DNA, 120 bp, Homo sapiens
attcgtctttgcgtgcgttactcatcttgcatcaaattatcaaattagacctcacaaatcagagccaattgtcccttgacaggcaactttggctaggggctcagtctcttctgggcagtc

SEQ ID NO: 28934 - DNA, 120 bp, Homo sapiens
atccgcaacgttccccacttggaaaatgcatcagcgctgctctgagaatgaagcaagcacagggggctggggtgtggtgtctgccctgcatacccttgaactctaagctcagccttgcca

SEQ ID NO: 28935 - DNA, 120 bp, Homo sapiens
tcccgccaaagaacccagagtctgagggcaacatgaaatacagtctcaacaccctgagatttcatcagatcctcctgtttttaaaaatactcatttaaatttgcactccatgcaatatgc

SEQ ID NO: 28936 - DNA, 120 bp, Homo sapiens
actcggtaattgtgtaaccttgagcaagttacatacctgccttaagccccagttttctcacctgtaaagaatagcagtgcctacttcaaagggccattgagagttttaactgagcttaga

SEQ ID NO: 28937 - DNA, 120 bp, Homo sapiens
gaacgagagaccaatattactgagcccagttctgtgcccgatttggtgctaggcacatgcaggtttgttactttatttaatagcacccgcccccattttactgatcagggaggctcagtg

SEQ ID NO: 28938 - DNA, 120 bp, Homo sapiens
aatcgtatggtgtaattagggcaagtgtgctgctttatagaggaaactgaaccattgaaaagttaactcatcaaacacgaaagaaagacaaatactaataaccatacaaaaggagaaaat

SEQ ID NO: 28939 - DNA, 120 bp, Homo sapiens
tgacgatcagtggttccgtaacccttaaagggggaactgaaattcaaatgaactcatccctcccatttgtacttagttttgcaagttaacagcttgttggttctctgttttaaatgccac

SEQ ID NO: 28940 - DNA, 120 bp, Homo sapiens
acacgaaaccacccagagacattttaacttgcatttgagagcctcacccaggcccacactccagaatagctttataactttataatctaaggaaggaaaagccagaaatctccactctgt

SEQ ID NO: 28941 - DNA, 120 bp, Homo sapiens
aagcgaatggaggcggtccaacccactcagacaattcctgacagcagctcctcgtgaaaaatattatgtttggggtgagcatttatccaggagcagtgctgaaatgagatggtgaggata

SEQ ID NO: 28942 - DNA, 120 bp, Homo sapiens
aaacgagggtgattatgcaggggctgtcctctatgaatacattagctccccaataagcccacgcattttgactgcttccaaagcaatttctcagggtttcaatgaatacagatgtctgga

SEQ ID NO: 28943 - DNA, 120 bp, Homo sapiens
gctcggcttcagacagactgctcatgtcgccagtcctcaaagccctagcattaagtctgggtggtgagtcgggccccacacagtacctgtcaggtcattgcaggcattgtgagatgctca

SEQ ID NO: 28944 - DNA, 120 bp, Homo sapiens
ggccgtccagggccagttgcctgcctggtggggtaggagattgaaggaggttagaggtgagaggagggtgcatccaagctgcaatccttcagtgggaattgagtatcaggaattggagac

SEQ ID NO: 28945 - DNA, 120 bp, Homo sapiens
ctacggacaccagtaggcacagggttctctccaagcatcggcaagcctgtagagtgtgggggtggctggctgctgagggttccccacggagaagacagtgggggccatcgtggggaggac

SEQ ID NO: 28946 - DNA, 120 bp, Homo sapiens
atgcgcaaaatgaggctaggaagagggggccagggtatttatatatcgattccagcagtcattggttaaggactgctccaggggcaggttaagttccaaaacatccagtctgtcctgtgc

SEQ ID NO: 28947 - DNA, 120 bp, Homo sapiens
aagcgctgtgcacacctaagaggtaaggccggagccataccccagccctgacagatctgctacgccgagcctggcatgtggcagaggtgccacaggcgtgtgtttcgttttcataaatat

SEQ ID NO: 28948 - DNA, 120 bp, Homo sapiens
caacgctttctaatgaccaacatttatactcctccaggaagactttagtactgtttttctttggtttcctctgccctttggccctgtatccctcattatgcattgaatgttccactggac

SEQ ID NO: 28949 - DNA, 120 bp, Homo sapiens
agccggagcctggcattcagtagaggtttattgactacatggattcatggcacatgggacagaaatcctcatataaaggttttgaggacctctctggaaaatacgcagaaaaaagctgat

SEQ ID NO: 28950 - DNA, 120 bp, Homo sapiens
cagcgcaggatgtgacaacctctgcaggggattcagggcaagttttacagaatgttatttgcatttgtctcaatggatggatgaaggggctttcctaggaggataaagggggcattaaaa

SEQ ID NO: 28951 - DNA, 120 bp, Homo sapiens
ccacgcctcaatcatggcctcactaggtctctaacaagggccctggcccattgctcgagacagcatccaggacagggatagatataattagaggtggtaccgacaggcggggtctggtcc

SEQ ID NO: 28952 - DNA, 120 bp, Homo sapiens
caccgtaatgggttcctcacttcccctgaacattctgagttagagtagccaggcctgatgctctcaccatggaaacgactcatagaccacccaggtgagaggctgggctggcccagccag

SEQ ID NO: 28953 - DNA, 120 bp, Homo sapiens
ctgcggtataaggcaaagttgatctccaggttcagaactggggttatcatctttcctgaatattcattcactcattcagcaaaaatgtggatgacacagtgccaggcacccatctttaag

SEQ ID NO: 28954 - DNA, 120 bp, Homo sapiens
gatcgtgtccaaccaggagcagaggagccaagaggaaacaggaagaaggaaaggggacaggtggccttggcctgcttcagtgcccactgtgtggcagggcctgtgcttcgtctgcatcag

SEQ ID NO: 28955 - DNA, 120 bp, Homo sapiens
tgacggtctgtgggctgtaggacacagtgctccgtgatgctgcagaagagggtgaggttgctccttgtccttcagtttaattgctgtggatggtacagaggaaacccagccctgctgcca

SEQ ID NO: 28956 - DNA, 120 bp, Homo sapiens
ggtcggaggatccctgtcctcaattcctggcccctattccagaggagtcatgtgcagtgggcaggatccaggcagcctggctcttctgagggagctgtgcccagagataccaggcaaatg

SEQ ID NO: 28957 - DNA, 120 bp, Homo sapiens
gagcgaatgccccgccacttgctggcagcaggaggagagcattcccatgtctcatgggctccccatgaaacgggctttctcttccgtaaaggagtgagtgtctaggggagttcatgcgtg

SEQ ID NO: 28958 - DNA, 120 bp, Homo sapiens
gcacggcatggagccaattatcgctgctccaggaaatggggatggcattgatcactgaattccccaggggagccctgggcttcagtgccaatgcctctgcctcaccatccatctgtgaat

SEQ ID NO: 28959 - DNA, 120 bp, Homo sapiens
acacgtgagcccagatgatcaggctccaaaaggcaaaacagcagcaacccacagacacatatgtgcgtcctaatcaccaactcctccaactttgacgtggtggtgaggcattgaggtgtc

SEQ ID NO: 28960 - DNA, 120 bp, Homo sapiens
tcacgatgtatttttcaagggaatgtgtctttaattaaaaacagccctggtaccacaggctagaggtgaaaccagcatttccttccaaatgctaccaacagatgccactccctgctgagg

SEQ ID NO: 28961 - DNA, 120 bp, Homo sapiens
aggcgtgggaggctggtggctggtggccttctgcccacctgcttctagctactggctcatgggggcagccaggatgctcttctccccagctccctgctcagggtcagcagctcaaatcct

SEQ ID NO: 28962 - DNA, 120 bp, Homo sapiens
gtgcgtgaactccctaaaggcagtctgtatccctgtcctcccacagggcaggcccagcaggtcccagaatcaaagccgcctctgctctctgcacagtctggtctggctaaagggcaaggc

SEQ ID NO: 28963 - DNA, 120 bp, Homo sapiens
acccggccacagtcctgggactcgtcagatctctatcttcaccacaagccagccttcctgtgctcagccaggtcctctaggggaccccggttccccaaagtgaagccccatgatacatct

SEQ ID NO: 28964 - DNA, 120 bp, Homo sapiens
ccccgtatcctctctgcccacccccaccccagctccatgctctccccagtcactagaggcagctccatgcaggaatctctgatctcagccctttctaaagacagtcattgtgccctgcat

SEQ ID NO: 28965 - DNA, 120 bp, Homo sapiens
gaacggggaactaataaggggactggaccaagtcctgagtcccctctgctatgtgagtctcaggtcttctttcctctgtgggctgacttctgtctgtcttgtctgaggtcacctctatcc

SEQ ID NO: 28966 - DNA, 120 bp, Homo sapiens
gggcgccctattagtgatctgtcatcacctgcaggctacagagaagaagctgagctcagccaacttgccagcagtctcacagctggtcaatgaggaagccaggatccaaacccaggtacc

SEQ ID NO: 28967 - DNA, 120 bp, Homo sapiens
taacgccctccaagcctgttccaatgccacagtgctctttatccacatacgtctccctaaggagccaccaggagtgaggcgacgttcgctcagagacagacacatgtaccatctccagat

SEQ ID NO: 28968 - DNA, 120 bp, Homo sapiens
ctacggcactgagtcagggctaaccatggcaccccactctctccacactgcctcctactttacctcctctccacaacagctatttataatccttatttgtacaaacgaaacagtgtattc

SEQ ID NO: 28969 - DNA, 120 bp, Homo sapiens
ttccgagtagatgcctcgtttctctgcctcattatctcctgctctcctttgtgcttctaaacaaaggtgacgtggcatggggccatgacttgcttactgcctgcctggcagatggagtag

SEQ ID NO: 28970 - DNA, 120 bp, Homo sapiens
cctcgggaattatagtacaagacctaacatggattgagctgtgttgctatgtgccagcactatgcatcatctcacgcagcctcatcacaccccatgctagcacccctacgtcacagatca

SEQ ID NO: 28971 - DNA, 120 bp, Homo sapiens
ggtcgagtggcttgcccaaggtcatggaaagtgatgaagccaagacttgaactagggcaaccagactttggtgtccaggcccttagccatgggtaataggttcacgcctttgaccacagc

SEQ ID NO: 28972 - DNA, 120 bp, Homo sapiens
tatcgccaacctgatggcccctgagggaggctgatattcaaagagacacacaatgaccatgagatctgccagaaccctctgaaggaggaagtattagcccatggtaggcataatatgaaa

SEQ ID NO: 28973 - DNA, 120 bp, Homo sapiens
agacgtcagattaccacccctcctgccattctatgtgacttgaaaacttccaccttttcctcaatccattttccattggcacttacttcattctatttagcagacaaatagaacctgtgc

SEQ ID NO: 28974 - DNA, 120 bp, Homo sapiens
gcacgggaggaaaacggcacaatgcagtggggacgccatggggcagggagccagcagaccttgttcgggtcctggctccactactgtcttgctgagtgaccacaggcaaagctgttagcc

SEQ ID NO: 28975 - DNA, 120 bp, Homo sapiens
tcccgtggagtatctgcatggctctcagcccacagtgcagtgctttttacataatacaaaaagaatgagtgtgaacagctgctggtgaggcagaccctggcccccggccagttggagacc

SEQ ID NO: 28976 - DNA, 120 bp, Homo sapiens
aagcgtgagatactgaatgagcagacatggtgacccctggttctgccactgagcagctctgcaacacaaggcaagtcagttaacttagatgagcctcagtttacacagtaacatggtgat

SEQ ID NO: 28977 - DNA, 120 bp, Homo sapiens
tgccgttggccagaccttctgaccacccagccggccgagcttccacagccaatccctgctaggtttgcccgcctgcctagatcctgtgacttcctccagggagtgatggtgctttcagct

SEQ ID NO: 28978 - DNA, 120 bp, Homo sapiens
agacgtgctttcctgcctgttcctcacttcctgtaactgcctctggagcccccagagaagctgtgtgaaatcacaagagggcctttcccatgtagagggtggtccctatccacggaggtc

SEQ ID NO: 28979 - DNA, 120 bp, Homo sapiens
acacgtacacagtaattcatggtttagtctaagcaagcagatctttcaacctaggttctctctccagctattcctgactatagttttaaggggcctgtacaggaaatgacatgaaattat

SEQ ID NO: 28980 - DNA, 120 bp, Homo sapiens
aaacgaagtttccaagatcacacaactggtaggtccagggccaggctgttcaactaggtctgtctgctctaaagccccagtgctaagccaggtttctatcctgcctcccaagacagtcaa

SEQ ID NO: 28981 - DNA, 120 bp, Homo sapiens
agtcgatgaaacccgccaagacctttagcaactccgtatcttagaaatgaaaattgagacaaaaaaaaaaaaacctcctggtccctgcatgccacttacatagatcacagccagaatgag

SEQ ID NO: 28982 - DNA, 120 bp, Homo sapiens
ttgcgtttagcaaaatgacgttcagcttcacatgtggtaggtgcacaccactgttatgccttgtgcattcctgctttgcaaaaacaatgaccagagcttcataaagtggtgcttcaaggc

SEQ ID NO: 28983 - DNA, 120 bp, Homo sapiens
ctccgaataaaggatgagttacagcccagcccagttccatggccaattttaatctaatacaactataatataataacaacaataatgataactaccaattaccgagcacttactacatgc

SEQ ID NO: 28984 - DNA, 120 bp, Homo sapiens
catcgaccttgttttgcagagggtgaaattcaggctggaagagtgggtgactagctaaggattacacaaaaagcaagcagcagagacagaattcaaacccaatctgacaccttgaccttt

SEQ ID NO: 28985 - DNA, 120 bp, Homo sapiens
ttgcgaacagcccgccctgccaccaccatccccagggctatgatggggctgggaaggccactcactaaggccagggtgtcctttacttggcagggagcagctggaggagggctgctcttt

SEQ ID NO: 28986 - DNA, 120 bp, Homo sapiens
tgccgcatgttcatttcagctgagccacccggggtgtctgtccccagacgtggacaccagccaacatgctgggctgactccagctcccagaggcctgggcctgcagggtgggagagacca

SEQ ID NO: 28987 - DNA, 120 bp, Homo sapiens
acccgatagccctggagctcgcggcactcctctcaggggcctcgtcagcagctcctatctggggatgaagcacaggctgacctgatagtgagtcctcccttcctagaggtgcctcccgga

SEQ ID NO: 28988 - DNA, 120 bp, Homo sapiens
aggcgccatctgggaagcacctggccccagggcctgcacatcgcaggcccgctgatctccttactcctgctgctgcctcctttaacttcatggctgtggttcccatctgcacagcactgc

SEQ ID NO: 28989 - DNA, 120 bp, Homo sapiens
tgccgtgggcctcccttttcactcagtcccaggatgtgggcatatccagagcagggacctaactatcttgttctctgtgacatctttgggctagaggagtgcctggcagggagcaggcac

SEQ ID NO: 28990 - DNA, 120 bp, Homo sapiens
agtcgctgaacaaatgggaatggtgcacctgctttgtgcaggtccagtgctgagggcaaacgcatctggggcacagggctctgccctcagatctgatatccaaggctccctctcaagggc

SEQ ID NO: 28991 - DNA, 120 bp, Homo sapiens
gcccggtgccagtaaggcgcccttcccagcacccacacctctgctgccccaaagcatggctagtagccttgaagccacactgcctcccccacagtcttcccttcagccaagcctcccaga

SEQ ID NO: 28992 - DNA, 120 bp, Homo sapiens
gagcgaaacaatcatgatgttgaattgctgggaacacagagggaaactgcccacttgggaggctgcggagggttccatgcaccccgcttctcacctgcaagctaatgggtccatctcaat

SEQ ID NO: 28993 - DNA, 120 bp, Homo sapiens
gccgtcacccttcctctctccctttgcctgccattaggattccagaggatggcatcctttagtatttgctttcacagaagagcaatgcagggggatggagggtgctctgctgatgaaggc

SEQ ID NO: 28994 - DNA, 120 bp, Homo sapiens
ggccgctggcctctgaactctaactgctttgctctcctgtttcaaaaaaggaacgaaagaaaaaaaagaaaggaagaaaaaaaagaaagtatatcacctctggaagaaaacataccaaaa

SEQ ID NO: 28995 - DNA, 120 bp, Homo sapiens
acacggatgaaccaaatgtgaggaaagcagctgtgatattttgggtggagagaaacacaagggcaatttggcacaacgctgctagatactgtgggtttacaatcaaccttttcattccca

SEQ ID NO: 28996 - DNA, 120 bp, Homo sapiens
caacgggtttactttccctcaggtgttcaggtagcttgccatactgaggctctgatgtggatttgccaagtggcttccctttcatcaggcctcttctgtcaaggattttccagatacaac

SEQ ID NO: 28997 - DNA, 120 bp, Homo sapiens
gaccggaggtcacctgcatcctctggagccgtagctcacttctgtcgctatgaaggctagagcacctgtaacacacggcgagtcttgtgtcttattcccataaccgaaccaagagactgt

SEQ ID NO: 28998 - DNA, 120 bp, Homo sapiens
cctcgcgccctaaaactagcagcgtcgttaatgaaaagcaagaaactgtgaaggccacgaggggaggcgtggtactgtcgactgcactggccaccacaacacatgggctgaagctcctga

SEQ ID NO: 28999 - DNA, 120 bp, Homo sapiens
acacgcctgcctgctccatgctgaaggagacttcggggtgcttgtagctgagcagaatgtctgtaatacacgtagatggatagcaagaggagtttaaatgctggctgccatcactcaggt

SEQ ID NO: 29000 - DNA, 120 bp, Homo sapiens
gaacgtatgaggttggcagggaactgggggactaggagagcaagggggagagagaggaggaattgaaggcaacctgtcgagcatcccacagcctgactcccagccctgaattctagctca

SEQ ID NO: 29001 - DNA, 120 bp, Homo sapiens
gcccgcccgtcctacccactctgcccaattcctctcagtgggcactgctcgcatgttggcgccagggccaaccaaaaaccactggcaggaagtggggcaacatggttgtgtgggagtgag

SEQ ID NO: 29002 - DNA, 120 bp, Homo sapiens
atgcgagcagccgcttcttactttttcaaaaacctatattgtcttctttgataactaacatcatccactcaattcctcggggtgcttttttcctttaagcctgattatatagttggatgc

SEQ ID NO: 29003 - DNA, 120 bp, Homo sapiens
ctccgcaaggacaaacatgagcgctctcctgtttaaagatttttaaaacatcattactaaccatgaggaaacagcaaagctaacaaaatgtatatagtcctggttggagccttcctgcct

SEQ ID NO: 29004 - DNA, 120 bp, Homo sapiens
ccccgccttcaggtctgatgcctgtaggcaccaagacagagcaagcaaccacctgacaaatcatgtagggggccttcctgactcccagcccagagctcatccctcagccaagctggagtt

SEQ ID NO: 29005 - DNA, 120 bp, Homo sapiens
ggccgtgaatcctggcttagctgcttcctgaggagcaggagctcgggcaagttatcttgctttgctgggtcttagttatctgtacaactggactgactccatgggtgtggagtgcttcat

SEQ ID NO: 29006 - DNA, 120 bp, Homo sapiens
ggacgtgctgagtcagctgacaaaaacaaacaaggaaattgatttaatcacagaaccctgcttgcagaattatgagggacaatatacccatatgtaaatgaacaaatgactcagggaaac

SEQ ID NO: 29007 - DNA, 120 bp, Homo sapiens
tatcgagacaatggcttaggcacaacacaaaatgactcatacctctggagctgatgggtaaggagggctggctgattttcacatgcagcctgaagaggtggagatggctgaggaggacag

SEQ ID NO: 29008 - DNA, 120 bp, Homo sapiens
ccccgtacatcttctgcagctgctcacactcctgaagggaaagtagttaatacagatgggatgcagccagacccgcctcatgcagtgatttcagcagatgcagatctgcctccaagctct

SEQ ID NO: 29009 - DNA, 120 bp, Homo sapiens
agccgcaagagaacagtgtccttgatgagcaattaactcatttacctaagtatctggtgcactaaatagattcacatcctgttctgtatgaatgaatggaaaacatcaaggatggccttt

SEQ ID NO: 29010 - DNA, 120 bp, Homo sapiens
acacgccattggaagcttggtcatcaggaaggcagaaaggaaattggctctttatagaatctttatagtacagaaacatatagaggtacatttccttcctctgagagtgccgttccatac

SEQ ID NO: 29011 - DNA, 120 bp, Homo sapiens
caccgctgctgctcttctggaggcatgaataaaagaggcactacaccttttttattacatcaaaactgatgggcattatacccttgaaatgttggtctaaagaagaaagaaggtagacct

SEQ ID NO: 29012 - DNA, 120 bp, Homo sapiens
ccccggataataagaaaatcaactcccacaagggggcatgcatggagctaaggaccagggctaacggaactgaggccaaatgaacagtacagcatgcctgatggtcactgccgttctctg

SEQ ID NO: 29013 - DNA, 120 bp, Homo sapiens
gcccgaatcccatattctctttttcaatatctctttgttggtacaagggggtggaagaagcacacagcaaacagtacaagaggtattcattctcctggaaaggaaaagtccatgccagag

SEQ ID NO: 29014 - DNA, 120 bp, Homo sapiens
gtacgagcaggctttgtgccttgtgaatactatcagagttgcaatatgaaggcaggggacaaggaagaaggagggaggaaagaaaaagttcttatggttattgctgtcacttaggggact

SEQ ID NO: 29015 - DNA, 120 bp, Homo sapiens
tttcgctggttgcaggggagcctgcccaggggcttctgcaagcactgccagatgtcacattacctctgcacagcttcctggtctggctccccgtctgagctctcctcgtccacaggggta

SEQ ID NO: 29016 - DNA, 120 bp, Homo sapiens
acccgaaaatacagtagaagattgtttacctgaaatgtctaggacttgacctgttgtttcatattaatgtgatttccggagtttaaatgtcttaactccaggaaagcatagtgaattact

SEQ ID NO: 29017 - DNA, 120 bp, Homo sapiens
actcgccaaaacatgtgagtgaaatgagaaccaccacaatgcttgtatcactgtgactttcccatctgcatccttgctagctacccatagcctgggtgcccacatcatcaccatgcccca

SEQ ID NO: 29018 - DNA, 120 bp, Homo sapiens
tgtcggaaagctcccagggttcctggatcccttcccacagttctacaagggtggagtgaacagggtgaggcaggaagtggctgtagatgaggcaggagaggaacgctgtggccagtgaca

SEQ ID NO: 29019 - DNA, 120 bp, Homo sapiens
tgccgtggtgttcatctacacaatggatgacagtgacctgagttaaggaaaggaaagtggagaggatgtttcattcacaggcactggacaactgacttgatatggcaaataagaaagaca

SEQ ID NO: 29020 - DNA, 120 bp, Homo sapiens
acccggagaatgacagtgccattcactgtcacccaagaggaggagcaggttttacagagtcatggtaagttcatttgggacatgctgaattaaagttgtgaatacttgtggaataaccaa

SEQ ID NO: 29021 - DNA, 120 bp, Homo sapiens
acacgtatgtgtagaactcagaggagcattctgggctggagaatcagagagtaactgaaattacaggagtggacaaactcatccagagagagtacatcaaaggacatgggaatagggcct

SEQ ID NO: 29022 - DNA, 120 bp, Homo sapiens
agacgccaagcggtctccgcagtgagagtcactgtgggcccaggaaacctgatctgccaacagaacgttaactagaggatgttcagcacaggccttgccctgctgcgctgccaggcattt

SEQ ID NO: 29023 - DNA, 120 bp, Homo sapiens
acacggctggcctgtttcactctgaagtagttcttaacctcttttctgacatcagctgtgatttctacattcactgacatgaaagcactacatagatttttctctctggcggtgcagtgt

SEQ ID NO: 29024 - DNA, 120 bp, Homo sapiens
tagcgactcccttacctgtggacataaaaaatgggatgcggaactttccactcagcacgcgggcccgcagattctgcagtgtgcttccatcaaatggcagggcaccgcacacaagcacgt

SEQ ID NO: 29025 - DNA, 120 bp, Homo sapiens
atacgattatggaacaaactttttcttccatcttagaacagttaacaatcttctttgcttctaggcattaatttagggtaacatcctgaatttttctcagtactcattctctggggataa

SEQ ID NO: 29026 - DNA, 120 bp, Homo sapiens
caacggcccccatccaagctggcccttgggcttcttttgcaaatgcaaaggggaaatttgaaatatgtggctcagtccacaaggtaagtattggaggaaagattttgcacgagtaggccg

SEQ ID NO: 29027 - DNA, 120 bp, Homo sapiens
gagcgcttgtggcaagaaatggtaggggagaaggttgaagaaggggagttagatgccagcccatctacagagcagattgcaaaataattcaaactgcattctgaccacaagaaatataac

SEQ ID NO: 29028 - DNA, 120 bp, Homo sapiens
gttcgccacacacaaggcttttgaagcatctccctcaaaaatacaagtcattgttatagccaagattatcgatttaatagaagaaaaaggagaaaataagaagtcttccacttagcagtt

SEQ ID NO: 29029 - DNA, 120 bp, Homo sapiens
actcgggtgtgtttaggcttccggtgaggtctgctatgaactttaaacaacacgaagtccaaactagggagagtaacttaacagaagctgtgaaagaactggccatccatcagaggtaga

SEQ ID NO: 29030 - DNA, 120 bp, Homo sapiens
atacgggccagaagctgctggaatgcagcctagttctgttttatctctacagtgacacatcagttgtccctggacaaatcatttatcctgccaatacccccacctcttgatcttctaaat

SEQ ID NO: 29031 - DNA, 120 bp, Homo sapiens
aaacgtgtactctgattaagagtatcatacgttaaaactttcactttcaaagatgttgcaaaagacatttttgaaaaggtccactgaatactatatagggaatacttaaacatctagtca

SEQ ID NO: 29032 - DNA, 120 bp, Homo sapiens
catcgattgtcactgttaatggttctggttaaaaggtagctgtaacagcgcactgggtagtacagcttaaactataatactttccccaaagttaccttcagtacccctatagttatagat

SEQ ID NO: 29033 - DNA, 120 bp, Homo sapiens
ttacggaacaaatcactttttttttttaaagtgttcacattagatatttgctcctagccattgtgtttagggttcaagttttcttctctttgggagcactgtgctcttcacatgcaagct

SEQ ID NO: 29034 - DNA, 120 bp, Homo sapiens
aatcgcattcagacctcagcctctgccctgatttttgcccatcttatccccccaacccctactcccattggtttgctttcactgtaaacctacgaggtctagtgggtgtgccaggaagcc

SEQ ID NO: 29035 - DNA, 120 bp, Homo sapiens
aatcgcctttcagctgcctgctgacaaatagctgctttatattcgtatatgctctagaggcaggcagcaaacattcttcaagttcaaatgtgatatttaactttcagtgaagaaatccag

SEQ ID NO: 29036 - DNA, 120 bp, Homo sapiens
atacgcaaagtaaaatgtacgttgaaccttgtcaggataaactccaattgcaaggaactccagagttgttctgcttcttccaggcaattcagtgaactacctctcctaaatactgagaca

SEQ ID NO: 29037 - DNA, 120 bp, Homo sapiens
ccccgatacttcacatgttttaaacactattgggagctgtgcccctgtatctactgtaaacatggtctagaactgaaccacaactgaagaaaagcaaagcaaaggaaggccgggcatgag

SEQ ID NO: 29038 - DNA, 120 bp, Homo sapiens
cagcggtttgtgggggaaaagggatctgtaaaccactgggataagaacttttaaatgttagatctccccaccacactgaaagtgatggctacaaattaccatattcccaaaaagatgaca

SEQ ID NO: 29039 - DNA, 120 bp, Homo sapiens
aaacgtcacagtggtccataaggggaaaggctacatggatgcaaattcctcaatgcaatttaccctataagcagcatgcgtttccagattcttcatcctacttcacttcgctcccctctg

SEQ ID NO: 29040 - DNA, 120 bp, Homo sapiens
atacgaaagctcagcaaagtatgcatttggtgctggcaaaaatggttgtttcgtgtactgatttggatttgctaacttagaatatctacggtttcaaaaacgtggctaagattgattgtt

SEQ ID NO: 29041 - DNA, 120 bp, Homo sapiens
ttacgcaatttgtggtttcttctcataactgaagaaattaatagcttttggatacaaaacttagatagctttaccctgagatattttcctagccttggatctctgtgtatagagtccaga

SEQ ID NO: 29042 - DNA, 120 bp, Homo sapiens
taccgcactcccaaatagggacctacaaaaggttctttcagtcactggcaaactttcttcatagcgaaacttcaaaaatgtcttttggaaaagttttctatgtgtgaaaagagtctgcag

SEQ ID NO: 29043 - DNA, 120 bp, Homo sapiens
ttgcgcttgtaaattagcactatgcttacttatccatctagacatcaaaatgctagtcagtgtagaggtacagtataattcaatctgttttggtctgctttatgtcaaactgttttggcc

SEQ ID NO: 29044 - DNA, 120 bp, Homo sapiens
acacgaatcaagagaagccattgtttagggaaaataaacactttgtaatatagtcttctagtacagattagaagtacaactaataactgttcaataaatagaataattacaaacaaaaag

SEQ ID NO: 29045 - DNA, 120 bp, Homo sapiens
ttgcgctttggtcttaagaaaccatttgcagttccctgaacttgtatgctttttcaaacctgtctttttatctcacccaaaattcctttccccacttttaaagtttgccatttgaacatt

SEQ ID NO: 29046 - DNA, 120 bp, Homo sapiens
atccgtcttagatcattttcccaaacagaagcaaaatctacttgcttatttaagttactttcactaaggtccatctgggcaatagctcctcattctacacaataagcctgcatcttagtc

SEQ ID NO: 29047 - DNA, 120 bp, Homo sapiens
gtccggatttgccagcaatgaaaagcagtcagtgttctgccttaagcatacacgccgtgtcaagtaaatgctgcctttgtagttgccagagcaatagccaccaccaataacaacaaaaat

SEQ ID NO: 29048 - DNA, 120 bp, Homo sapiens
tctcgtttcctatgatactgatttttgctacattaagtctcttgcaacgaatgataagaaattcacattgactttatcagatctacactactcagaatctgaccgggtttacatagaatt

SEQ ID NO: 29049 - DNA, 120 bp, Homo sapiens
agacgaaggctgatctactgaaactgacaccactgcagttattagtgaacagaagaatctccactgtagggctaaagtgaggtgctgggagaatgaccaagaatacaggaaggaagaatc

SEQ ID NO: 29050 - DNA, 120 bp, Homo sapiens
aagcgactcagtccaccaaaaaataattttttaaagaaaaaaatatatgtaaataacatatgtataaatgtacatatacatatactttagattgagaaatgtcagagacaaaatgtaggc

SEQ ID NO: 29051 - DNA, 120 bp, Homo sapiens
cagcgtgagaccctgtctcaaacaaaaacgaaaataatcaccctcctcctgaaaaaaggaaattataaattttaaaagaagaaaaaagagatgaaatctgcaatctccacactccttttt

SEQ ID NO: 29052 - DNA, 120 bp, Homo sapiens
caacgactgtggcactccagcctacgcaatagagagaaagagactccaactcttaaaaaataaatacataaagtttcctgcttggcggtctggctatcaatacaagcccaatctggttat

SEQ ID NO: 29053 - DNA, 120 bp, Homo sapiens
ctccgtttaaaaaaaaagaaaaaaaggaagagaaaaggaaagcaaataaaacagtttattgatactattgagccataaggagctacactatttgtacttgaaagataacagccattcaaa

SEQ ID NO: 29054 - DNA, 120 bp, Homo sapiens
acccggggtttgacgaatgagccagatgaaactacacattcatttgctcgaaaaagtaagtgtaacagccaactcagccgtttatcagaaggcacaggcccttgagaagagcatcatggg

SEQ ID NO: 29055 - DNA, 120 bp, Homo sapiens
ggtcgcggtgatatttgtatgtgtatatgtgcatatatatatacacatacatatatctccatggttcctggcttaaagctcctatataacccttgtaatttcctaagtgactttggttaa

SEQ ID NO: 29056 - DNA, 120 bp, Homo sapiens
taccgggatggaagctcctgcgttcagtactcttccaggctttgccctgggtatctcttcatctggctgttcacttgtgtcctttaaaacatcctttctaatgaactggtcagtatgttt

SEQ ID NO: 29057 - DNA, 120 bp, Homo sapiens
attcgagcagtttctacacgagagaagaaagtctactgcatcgtagtaaaaaataaacattaaaccttcagaactatttgcacaaaagaaaaatggaatcacaggtcaggtggggaagga

SEQ ID NO: 29058 - DNA, 120 bp, Homo sapiens
gtccgtagcacgctgatgaggtaaatgatgttttacagatagggaggaacaaaaaagtgagggcctggctgagccaatattctctctgccttttagttagcatacagatctctgtttatt

SEQ ID NO: 29059 - DNA, 120 bp, Homo sapiens
aaacgcaacatagaaagtcaccctgtgatatctcctctgagacgggttaagagaagaagaaatgaattgaaatctcatttataaccacacggcctaaattagtctctcatagtcatcaat

SEQ ID NO: 29060 - DNA, 120 bp, Homo sapiens
aaacgcaaagtgaatacataactggatctatttcaagggttaatataataaaaatacctttactctggaagcaaaaagagttccttcttgatagaaatgccaggtttaaccattggcaga

SEQ ID NO: 29061 - DNA, 120 bp, Homo sapiens
aggcggaaaggaaaactcccctttcactcctacacagtctttaaaaaaaaaaaaaaaaagcattaccaatattggctgcataaatatactaataataacacatgctcatttctgccattg

SEQ ID NO: 29062 - DNA, 120 bp, Homo sapiens
catcggtaataacatgcagtagtttctcaactgtcaatgagcaactactacctcactcagtgtggatactctggtgcaaagctaagcacctttccctatatttcaatcttcattccacaa

SEQ ID NO: 29063 - DNA, 120 bp, Homo sapiens
atccggtccaacccccttatttcataactgatacccataaaagtaaaatgagagacagcatggtatgactgaaaggaaagtgataaaaatcaatgctagttctagcccttaccggtatgt

SEQ ID NO: 29064 - DNA, 120 bp, Homo sapiens
tgacgtggtgagtcaagtgcacagtcagacctggaactcaaatcccctgactacctctctaaggctttttccacaactttatgtaacacttgtgttcaatactaagccattgttatcaaa

SEQ ID NO: 29065 - DNA, 120 bp, Homo sapiens
cttcgagggttacagaaggctcatgatatgctatagttcccccatttttagcctacagtagacactgcccattctgccaaagcactctttctcactaaacccacagtgctctcaacagct

SEQ ID NO: 29066 - DNA, 120 bp, Homo sapiens
atacgctagtaaacgcaattcgcaggtaagaaaggaggcacaatggttaaaggccagagtgttgtctcgctgcacatctacatgtgtctggttcttaaaagtcagtgtctgcattagaag

SEQ ID NO: 29067 - DNA, 120 bp, Homo sapiens
cctcgtatacttaacacacataaggataaataaaaacaatgaggataaacttcaaaacaaccttgagacattttattttccaggagtctttcctccacactgactacccgaatgttttca

SEQ ID NO: 29068 - DNA, 120 bp, Homo sapiens
ctccgaacgtgccatgaaacaactcaatagactaaagatggggaaagcttaatgactgaaataaaaatagataaaaaaggaaacagagtagtttctacactgcaattcacttctactttt

SEQ ID NO: 29069 - DNA, 120 bp, Homo sapiens
gttcgttttgagatggatcagaagcctcattccctgaatcgatgttcctgatgatgattttgtcaataagcaaaggaatgtaaaagactacttttaaaactattctatttcttgaatctt

SEQ ID NO: 29070 - DNA, 120 bp, Homo sapiens
cctcggctttaaatagcaccaagcctggtcactttaacagacctcttcaccccacattttgtatcaccaagaaaaaaaaaaaaagttaaaaacttgagggcccagtccaggttttctacc

SEQ ID NO: 29071 - DNA, 120 bp, Homo sapiens
ttgcggcactattcaaaagttttgctcacatacctgctaaaacaaatttaatggggggaaaaaggtgtctccttgaatattcttaggttgacatctaaaattttcattacaagttttaat

SEQ ID NO: 29072 - DNA, 120 bp, Homo sapiens
actcgactgggcaacaagagtgaaaccctgggaaaaaaaaagagaaaaaaagaaaggaaagaaatctctctctctctctctggagaatcctaatacaagtccagaatgacaagctaaaac

SEQ ID NO: 29073 - DNA, 120 bp, Homo sapiens
ttgcgaggattttttataatgcatgagaaaagtcaaagtaaggctttataaatattaatatcatagcagtaggcaggagagactgcagcgaacctaaaggtagaaagaccagttactatt

SEQ ID NO: 29074 - DNA, 120 bp, Homo sapiens
ctccggcattcattctgagctctctatcatgtttacaataaagaaatctcttctctgaatcacattttaacatttcaatcttcagcaggtttataagaagaaagtggaaaaggcagaaac

SEQ ID NO: 29075 - DNA, 120 bp, Homo sapiens
tgccgtagtttcagaaagcaatactttccagatgcatgctgctgactgctgcaatgcaggaggacctggcactttattctgggctacacaaacagcacatctgattgtttactgggtccc

SEQ ID NO: 29076 - DNA, 120 bp, Homo sapiens
gagcgtagaagatatatttgagacagaccactgaagaatcaccaggaattcaccagacagactagatgtttggggtggaaggctgagtgcttattagcagggagtgcttgaggggacaac

SEQ ID NO: 29077 - DNA, 120 bp, Homo sapiens
gcacgctccatatctcatattcagtcagaaaaaaaaaattagccttcagggacactgataactttattatatgttaatgaatacagtatcaaaaacatctggaaaaagtacccctgttaa

SEQ ID NO: 29078 - DNA, 120 bp, Homo sapiens
attcgattttgatctttaagttattacattctccgcttcccattttaggtgagttacttttaacacttcatgaactaaggcatagtgatagggcatttaagcccaaaagattacaacatg

SEQ ID NO: 29079 - DNA, 120 bp, Homo sapiens
ctgcggccagcccaataccatttcaaaaaagaaacataaaataaaacaaaatagaaaataaactaaaaagcaaggcattatctcatcactacttctaagtcccaagagctactagtaact

SEQ ID NO: 29080 - DNA, 120 bp, Homo sapiens
catcgggcaaacctggaaaatgtgctaacatttctccagaggcgaacccataccactcgctaatacatatgaaagattttgtccctaatatttttactatctgaaaatgtgaatgggtta

SEQ ID NO: 29081 - DNA, 120 bp, Homo sapiens
actcgtaaaacttaccgttgcagggttccatcacaagccttggaagagctctctaaatcagaacacttcctaccttcagggcctgttgaggatccattccaatgctaacttttctgaacc

SEQ ID NO: 29082 - DNA, 120 bp, Homo sapiens
ttccgaaacctttcagaacaactgttatttaccaatttaccaaggcaacattctcccaaaataaaattttaaatgatattgccttaaacacaattttttttttttcgagatggagtctca

SEQ ID NO: 29083 - DNA, 120 bp, Homo sapiens
gaccgaacaaagaaaatccatcttcaccaatgtgggcaggcatcatccaaccggtcgagggggcaaatagaaccaaaaaagcagaggaagggcaaatttgctctctctgcttgagcaagg

SEQ ID NO: 29084 - DNA, 120 bp, Homo sapiens
caccgcggacccagccgcctgtcttctgatttctaagccaaagacccaagctttcttgaaataagagagctggctcatttttatcggtgatctttggaggcagagatttgagacggtcaa

SEQ ID NO: 29085 - DNA, 120 bp, Homo sapiens
tcacgtggccagagggaaccagatgcagggcctgagtatatcacagatatttcccagtgtgaatggtgaaagcccagttttaggaaatggaaagtgactgacctatctctaggagaaagt

SEQ ID NO: 29086 - DNA, 120 bp, Homo sapiens
tctcgtttgtctctcttcctgttctttagacagtaggatggtgaatgcagggaagcctagctccactgtgagtacttaggacagtagagaccaagtccagacaaggctcccaaaaggctc

SEQ ID NO: 29087 - DNA, 120 bp, Homo sapiens
acacgtagcctcgcctccttatgtgccagggcaacaggcctgagccaccgcagctcccagtgactgtagaactttttgacatcaaagtccgtcctttttccgtaataccatgaagccatg

SEQ ID NO: 29088 - DNA, 120 bp, Homo sapiens
tagcgatggtgtctgcctgccttgggcagtgtggcccacggtctctgggattattaacctttccttctctctctcttccacccctccctctctttctgtcctccctcctgcgtgggacct

SEQ ID NO: 29089 - DNA, 120 bp, Homo sapiens
ccccgcccaccagactgaggctcacttcacctctgacctgagcggcccccagctcaccaagccacaggcccaagcagtgctccctgatgcggcgtttataatccgctcagcgtgcaggcc

SEQ ID NO: 29090 - DNA, 120 bp, Homo sapiens
ggccgaggcaggagggtgatgaaagctgggcaggctccaagaggagggagttttgatatgtccctgaaagattcatttagacttcagtcggctaaggaggacatgatttgggggccaagg

SEQ ID NO: 29091 - DNA, 120 bp, Homo sapiens
cctcgccagggcccactcctcttcctgcttttcctgcaggcgccactgggaggtgctatggctgtgcctcccctgggctctggagcatgtccagttgcagtgggcagaactgcggaggcg

SEQ ID NO: 29092 - DNA, 120 bp, Homo sapiens
tgccgggtgtggcagtgtgtgtgtagtggagagtgttaggtcttccctaccagatgcccttgcaggggagtgccacagcagtcagtccagggatcccactgttagtctcaccttttttaa

SEQ ID NO: 29093 - DNA, 120 bp, Homo sapiens
gtacgagcaagatgagagtgggttatctctggagtgacagaggctggtctgttttccaggctggtagggactgttcctaaagggaggaagggatgataccagcctcctgagcctccttct

SEQ ID NO: 29094 - DNA, 120 bp, Homo sapiens
ctgcgttagtgtctcaggccctgccaggccttatagaccctcttattgacactgcccactggatggggaccggagttggactcagcttctgccgaaccctcaaatcccagccccaactaa

SEQ ID NO: 29095 - DNA, 120 bp, Homo sapiens
atgcgggttggcagaggtgtgcaggatctgccacttaccattcaccatgtggccttgaggaagacgcactcggggcctcagtttcctcatctataaaatggggatgtaattacaccctca

SEQ ID NO: 29096 - DNA, 120 bp, Homo sapiens
tcccggctccccagccccttgcccctctctccagccagactctattgaactccccctcttctcaaactcggggccagagaacagtgaagtaggagcagccgtaagtccgggcagggtcct

SEQ ID NO: 29097 - DNA, 120 bp, Homo sapiens
tcccgggccggctccccgccggcagcgtgccccgccccggcccgctccatctccaaagcatgcagagaatgtctcggcagccccggtagactgctccaacttggtgtctttccccaaata

SEQ ID NO: 29098 - DNA, 120 bp, Homo sapiens
agccgggggtggggagcggagccggcttcctctagcagggagggggccgaggagcgagccagtgggggaggctgacatcaccacggcggcagccctttaaacccctcacccagccagcgc

SEQ ID NO: 29099 - DNA, 120 bp, Homo sapiens
gtccgaacccagacacaagtcttcactccttcctgcgagccctgaggaagccttgtgagtgcattggctggggcttggagggaagttgggctggagctggacaggagcagtgggtgcatt

SEQ ID NO: 29100 - DNA, 120 bp, Homo sapiens
aggcgccagctccagctccctggctagggaaacccaccctctcagtcagcatgggggcccaagctccaggcagggtgggctggatcactagcgtcctggatctctctcagactgggcagc

SEQ ID NO: 29101 - DNA, 120 bp, Homo sapiens
ccccgggctcattgaaatgccccggatgacttggctagtgcagaggaattgatggaaaccaccggggtgagagggaggctccccatctcagccagccacatccacaaggtgtgtgtaagg

SEQ ID NO: 29102 - DNA, 120 bp, Homo sapiens
aggcgccggccggttaggccaaggctctactgtctgttgcccctccaggagaacttccaaggaggtgaggagtgtgtgaacgcacctgtgttggagcacggtgtcccactctggcgggtc

SEQ ID NO: 29103 - DNA, 120 bp, Homo sapiens
cagcgatagccctgtgacaatgtgaagggccacagaactcttgtattccagtcaggggcaaagagtggagacggaaggcctgtccttctgacaagcagccccttccactgtctgacagtg

SEQ ID NO: 29104 - DNA, 120 bp, Homo sapiens
gggcgggtactgccaaggaggagctttggagtgataggcggggcaggcctgggacccttggtctttcccaaagggtggttccctttcgaagttgctattccaaaggtagcagtgaggatg

SEQ ID NO: 29105 - DNA, 120 bp, Homo sapiens
gtccgtggagtggagaggagccaccctcctgccctctcagaggtccaggtgtgctcactcctatttgggaagagagaaggggcacagcagccctgcaggggcccctggctctgctcgtgt

SEQ ID NO: 29106 - DNA, 120 bp, Homo sapiens
tcccgtttgaccctggactttctttctccactgcccactttcacccactgggcagctcaggggaggggtcctggcaggagccacagggcaggagggtccatgcctgtccatgctgtcctg

SEQ ID NO: 29107 - DNA, 120 bp, Homo sapiens
ggccgccctgtaatcatcctcctctccccctccccactggctcgaaggcaggactcgggaggcttcatcagaggactctaaaggatttctggggattctccacttttcgaccctgaccca

SEQ ID NO: 29108 - DNA, 120 bp, Homo sapiens
ctccgggcagcaaagaactgacatttcgaggagctctgctaagggccaggcagtatgtgagggagttcacagacaccgtcccattttcacagccctctgaggttggtaacataaccccca

SEQ ID NO: 29109 - DNA, 120 bp, Homo sapiens
catcgggctgggcagctggcctgggaccagtggggtgtgatagtgttggctctgcttcccgcgggtggggtgccagtggggaggggtctcaccagagagggagccgggggagtgcgctcc

SEQ ID NO: 29110 - DNA, 120 bp, Homo sapiens
ctgcgtccatcctcagaccagcgtgtccctcccaacctctgacccctctgaggccaggggatgggttcggcttcctttggtacctcttttggaagtctcttcagacaaacactggagaga

SEQ ID NO: 29111 - DNA, 120 bp, Homo sapiens
ctccgtaagggtagccttacgagagcgtaagggcatgaggggaagtcgatgggtagaccaggtgtctctgatttctctgaggaaatgcagcttctttgccaagaactcttgggctttggt

SEQ ID NO: 29112 - DNA, 120 bp, Homo sapiens
cttcgtcgcccttgcctggggtgggcgagttttagtctcttcagctgcagaccagaagctgagctgacctgaaaagagctggagttctggagttcgggcttccaggccagggcctgcttc

SEQ ID NO: 29113 - DNA, 120 bp, Homo sapiens
acccgcagctggacaaaggcaccagctggctgtattctgtgggggcaatgtggcttctggaaggtctctccagtggctctgtagctggtcttggcaaagaatgttctagaccaagggttg

SEQ ID NO: 29114 - DNA, 120 bp, Homo sapiens
ggccgggtatcctgcacagagctagaaggctgcctggcacgggtgaaagcagagctgctccctgaccctctgcccctccctcctccaccctggcctgctttagctttccccagacatggc

SEQ ID NO: 29115 - DNA, 120 bp, Homo sapiens
agccgcgaagtgcagtccaaaatcgagaagaagtatgacgaggagctggaggagcggctggtggagtggatcatagtgcagtgtggccctgatgtgggccgcccagaccgtgggcgcttg

SEQ ID NO: 29116 - DNA, 120 bp, Homo sapiens
tggcgtggtgagtggcaccctgggctagggcgctggggggctggggtgtgccaccctgtgagtcctgggccaatccctgagctgactgctaagctgcgtcctatgccctatgcctggtag

SEQ ID NO: 29117 - DNA, 120 bp, Homo sapiens
agccggtgaaggtgcccgagaacccaccctccatggtcttcaagcagatggagcaggtggctcagttcctgaaggcggctgaggactatggggtcatcaagactgacatgttccagactg

SEQ ID NO: 29118 - DNA, 120 bp, Homo sapiens
gcccgcacacagcagggatgggatatgccgagaataacacgccacgctcacagggcccactgagaggcctcccttgaattggggacaactcttggccctggtttggccatttttttgtga

SEQ ID NO: 29119 - DNA, 120 bp, Homo sapiens
agacgggggcaggccctggcttggagtcttgtttatacgttcttgatgttcatctcctctctcctgtcttctcacaggcaaagacatggcagcagtgcagaggaccctgatggctttggg

SEQ ID NO: 29120 - DNA, 120 bp, Homo sapiens
taccgtggagatcccaactggtttatgaagtatgtggcccccagggagcttgggtctccgcatggggtgggaggtggcttgttctaaggagcttgcgggaaggattaggggaagcagata

SEQ ID NO: 29121 - DNA, 120 bp, Homo sapiens
ctgcgctcagtctccctagcctatgaggcaagctagattagggaaaaaaagtgcaacaggaaggcaatgggattgggctaggacgtaacagagggatcagaaaacgggtggaaaacacac

SEQ ID NO: 29122 - DNA, 120 bp, Homo sapiens
aagcgcaggagcataagagggaattcacagagagccagctgcaggagggaaagcatgtcattggccttcagatgggcagcaacagaggggcctcccaggccggcatgacaggctacggac

SEQ ID NO: 29123 - DNA, 120 bp, Homo sapiens
ttccgtggcaacgtcccctggtcagcaggaagcagaggatgacgaagctgggaagaccatattactcttttaagtcactgccctcatttgacagatgcaacaggaaatagccctggatag

SEQ ID NO: 29124 - DNA, 120 bp, Homo sapiens
acacgcaagtgcaaagccaggggcttccaaatgaactgcattcctggaaatgtttctgaacttctctgacttggctgacgctttatgccctttccaagataacattccttttatgggaaa

SEQ ID NO: 29125 - DNA, 120 bp, Homo sapiens
aaacgctggtaaatgtgcagacagggcatcctctgcacaagcatcctgatccagctgcactctcctctagggagggcgtccgcctcttcgctcaacataaaaccaggtcgctggcttaga

SEQ ID NO: 29126 - DNA, 120 bp, Homo sapiens
aggcggaggcagaggatgggtcactaaagcctaggagacttctacaaaccctctgtccatccccagcagaccacatctgactctctctattaggtaagccagagaatcaaaggaagaaat

SEQ ID NO: 29127 - DNA, 120 bp, Homo sapiens
tgccgacctcgctttgagtatatctgcatggatgaccttgtactcgtcacttccgccctttcacttccactgtaactctatgtgggcagaaaacatgtcttcttgtctctttgtggatca

SEQ ID NO: 29128 - DNA, 120 bp, Homo sapiens
agccgcgccaggtaggaagaaagggcgtccttcttacagacagatggggagagagtccaagccaccagagagcagagactggctgatgcaggcttagttagaaatcatagtgcaagccac

SEQ ID NO: 29129 - DNA, 120 bp, Homo sapiens
gaacgaggaaggaactgacatttattgagcaattactctctgctaagtactgggctgcaggatgtatgcattatttcaggggatcagggaagtacagcaatggataccccgtttttgttt

SEQ ID NO: 29130 - DNA, 120 bp, Homo sapiens
attcgtggactgtctgacctcaaagcttgtgtgggttctgcagccccgtcctgcatcgtgccatggggtccatgcacagtgtgcacagcatgtcagtcgcagaaacaggagtaggtccca

SEQ ID NO: 29131 - DNA, 120 bp, Homo sapiens
tgacgatatcatctagcgttctgtttgctcagggcctggatttggcttctgtcctgccctcccaaattcccactggagactactgctggggaagttatggtgcacaggaaagaggatgag

SEQ ID NO: 29132 - DNA, 120 bp, Homo sapiens
tttcgactagctgagaggtagggctggggagcacgcacctaggaaggctggcttctgtaaagtaattgggaggtgggggtttgtgtttctcccagatccagctgtctgagaagttcagga

SEQ ID NO: 29133 - DNA, 120 bp, Homo sapiens
ctccgcccaccccaaacacactcccaccttcacagaccctcccaaggacagacttcccagacacagatccggaggtggctcacagatgtgcaggatcagattcaaggtgacacgcaccag

SEQ ID NO: 29134 - DNA, 120 bp, Homo sapiens
gcccgggcccggactgccccacagaggcggcagatgcacacagaggtcagccacagcaccccacatggagggctgctcacccacagaggtgcagagggtgccacctccaccagccacctt

SEQ ID NO: 29135 - DNA, 120 bp, Homo sapiens
ccccgccatggaaggagtcccactcttaaaagggagctctggctcctttcctaccatttgttctttcaccaggctcagttcagttcccctctggcctggggaggtgtggggtgggggagg

SEQ ID NO: 29136 - DNA, 120 bp, Homo sapiens
ggccggagtgtagaccgcgagagggagaaggggaggaggaggggacggcaggagcctgtccagggcttccgggcggagtgcagtcaggggggcctcgacaacctcactttgccgtaccag

SEQ ID NO: 29137 - DNA, 120 bp, Homo sapiens
atgcggacagctcaggtttgatcgttgtgcctgcagttctggaggcgacctgcagatggcgtgcgcgtccttgggaggcgttccgtcctcccagagatggaacgaagctgggctgtcacc

SEQ ID NO: 29138 - DNA, 120 bp, Homo sapiens
tgccgttagctgcttctcttggctgggtcctgggtgtgggggctgagatgagcatttcttcatgagcctaggaataccgaggcgtacggaatctctgcccctcccctctcaccgtgccga

SEQ ID NO: 29139 - DNA, 120 bp, Homo sapiens
acccgggaatctagttattcatgcgagggactcctctgcatcccacacactctaggtgctcagagagaatttgtgggatgagttgctattcggaagatgcttctatgaaaggtcatgcat

SEQ ID NO: 29140 - DNA, 120 bp, Homo sapiens
gtgcggcctcaccggggcccaggctgataggtatcagctgcctgcatgcacaaactcctccctccttctccagcccttcccagttcctcctctcagctcctagggagcggtgggtcccag

SEQ ID NO: 29141 - DNA, 120 bp, Homo sapiens
ccacggcaccttgcctgctcctccgtgtggacgccttttcttccacttggctgactccttggaagccaggtgaggtacctgatgtgctgacctggttctctttggctgagctccattccc

SEQ ID NO: 29142 - DNA, 120 bp, Homo sapiens
ctccgacgacttctcttcttctccctctggcctcatctggtcctaagagtcagcccagaactttaggccttggcctggtgccccagctatagataatctcttcttccccgctcccgatag

SEQ ID NO: 29143 - DNA, 120 bp, Homo sapiens
cagcgcttggtgagccaaggttgcctcattccatctgctacaagcttccctccgtttacaggtaaggacactgtgggtcagaggggtttaggagtttgcacgaagccaccgacctagttc

SEQ ID NO: 29144 - DNA, 120 bp, Homo sapiens
ttgcgggcccagcacagctctgagaacagaagaggaggcaccttggctaattgcaagcctttaaaagtcttagagcactgagccaaagcccaggcttctcacaaagtctctttatgagag

SEQ ID NO: 29145 - DNA, 120 bp, Homo sapiens
agacggcctggggtcgggctctctcctccctccccgctggccttcgccagatgggaaaaaagccaccacatagaaacataacctttattgcacacggcgctgggtcttttttcatagaaa

SEQ ID NO: 29146 - DNA, 120 bp, Homo sapiens
aatcgcatgcagtgtctctgagttgggattttggtctttgtcaaaaccacctagactggggggaaggtgaggaggagggaaaaaaattgctgagtctttgtgcctctgtctcaaaatagg

SEQ ID NO: 29147 - DNA, 120 bp, Homo sapiens
gctcgtggacgcgttcctgtctgtctatatatgtatatatatctccacacatattttgtggggtgggggatttgacttgtactgtcaaattctttgtgccctggcttcatggagaagaag

SEQ ID NO: 29148 - DNA, 120 bp, Homo sapiens
aggcgttcatgattgggggtttttgttttgtcgttggttggtttttgtctgtcagttgaatataaataatgcagaaaaacagccgagctggcgtgtggggctgcggcgcggcgcggtcca

SEQ ID NO: 29149 - DNA, 120 bp, Homo sapiens
acgctgtgaccccagcatctgctgatagactccccctgctgatcctagccctgccctgccagcctctaagggcatatgctccggccaggcccgtggggtcagatggttcccagccaggcc

SEQ ID NO: 29150 - DNA, 120 bp, Homo sapiens
taccgaatgaatgaggccttacaacacgctggggatgtatatcatttctaatgcccattatgacaatgcaaagtagatactatcgttggcattttacaaatgagaaacttaaggccacag

SEQ ID NO: 29151 - DNA, 120 bp, Homo sapiens
cgcaggcaccacctcctctcgtctgggctgcggtggataagagagtgggggagtgaggaggggcccagggaggcccaacggcaagtagaggacctgcggtcctgggctagttgtggccag

SEQ ID NO: 29152 - DNA, 120 bp, Homo sapiens
ctacgccccagggagaggcagacgctcagccttgcagctctacctgcgcggctgctacagcttgcccttgggatgaggccttggaagtgtcattcctctgaaaagtgggggtgcagcccc

SEQ ID NO: 29153 - DNA, 120 bp, Homo sapiens
tcccggtcagagattcagtggggcactccctaagagggtctgattctagcccagagccttccttcacagcacgcgctccgtaaaggtctgcggatcgcaggaatccgccatcgctggaat

SEQ ID NO: 29154 - DNA, 120 bp, Homo sapiens
gcccggtgtccagttcagcacgggggctctcctttgagcctcagctgctctgtggaagcagcacacccggctgtagccacctctggaggagctgagcattgggacaaaggcccggctttg

SEQ ID NO: 29155 - DNA, 120 bp, Homo sapiens
aggcgactccccctttttcaagctgggagtagggtttggactcgggaactgagtgcaccctgtccacccgccccaggcaagagccggaggcagcctgttgtgaggctttgctggagtcag

SEQ ID NO: 29156 - DNA, 120 bp, Homo sapiens
gtgcgggaggcaggcgggtggccagttcctcacagctgggtggcagataaagcggagcaggcagagaccctgtctggggagaaccaggattctgtaagggagcttttggaagtgtttgcc

SEQ ID NO: 29157 - DNA, 120 bp, Homo sapiens
gctcgatggtcaccttctcgctgctgttgccccggccggcagaggtgacggcggccacccacagcagatactgctgaccgcggtttaggtgggcgatccggtagaagagctgctctggac

SEQ ID NO: 29158 - DNA, 120 bp, Homo sapiens
actcgtctcgtactcgctgggagcctgcggggcagaggcaaagaggctctaagaagcagaactggggccctccagcgtccaaatcttcctcagtgcccggggctcagaggagaggatggc

SEQ ID NO: 29159 - DNA, 120 bp, Homo sapiens
tggcggggtcggatgcgaggcaggattctgtcctatttgccctttccaagttttagagatgcagcggacagagtgtgccctgggtttggtccctgggagctgatgggcctgcctcgcggt

SEQ ID NO: 29160 - DNA, 120 bp, Homo sapiens
ccacgctctggcagctgtggctcaggccaggggatgtgagtactttaggtgagggacggggtagccaggagaagggagaatgggggacagggggtcccaggaaagccctgaggaaagagt

SEQ ID NO: 29161 - DNA, 120 bp, Homo sapiens
tcccgtcacctcctagccctgccgtctaattaccactcctgcattttgcaggcagcacgcccgcccgtccagggaggagggggcgggagaaggaactatgaaagctttactgggtagcac

SEQ ID NO: 29162 - DNA, 120 bp, Homo sapiens
tatcggatcccagtggttttaccagttgctttgatgaaaagattatgttgccttggaaaccagaggctcagatattgaaatgaatttgagaaggagcttttgataagcgctagtttgcag

SEQ ID NO: 29163 - DNA, 120 bp, Homo sapiens
gcacgggcgggatggggctgactttcattttattttattttttggtcagccgcagggaagggagaggaggacagcaccagggcccctttgaaaacagagcggaagtccagggagggagag

SEQ ID NO: 29164 - DNA, 120 bp, Homo sapiens
gcccgaggccagagggagctaataattagttatctctgcagtcacaggatcttgcacacacacgctcacaagcacacacacatgtagacgcatgcacacatgctgaggaacagacctcca

SEQ ID NO: 29165 - DNA, 120 bp, Homo sapiens
cctcgtgggggtctggccttgaatccaggaggtccgggggggcaggtgcagagccacccttgagccctggtggttgggaagccctttcaggccacagcaccctgggactggtgtgcgtat

SEQ ID NO: 29166 - DNA, 120 bp, Homo sapiens
tgtcgttgatatgtgcttgaagtgtggggtagtgtagtggcttcaacaccctcctgcccttcctcctgggcatacagcccgtaaggttgcccatagtttctggacgctgttttctctctt

SEQ ID NO: 29167 - DNA, 120 bp, Homo sapiens
gcacgtcctttgtaaactaggacatattcttctccgggcttgtttttggtgacagtacaggaacgtatgtgtttctatgtacatgtgcatgtgtggagaacagctgagtgtatgtgcttg

SEQ ID NO: 29168 - DNA, 120 bp, Homo sapiens
caccggcccctcctctgggcctgagcacctgcggcagcagcaggaggcaaggggcaggggaaaaatggtctcagctgcagcgaaaccctgtcccctttctcctccgcccaactcaatgaa

SEQ ID NO: 29169 - DNA, 120 bp, Homo sapiens
cctcgtgccaggctggggggtacgcatgacaatgagacagggtccttgcctctggagggaggggaagacagatacctgcaccggcaacatgaactggaggaaaatctgatgagtgtttca

SEQ ID NO: 29170 - DNA, 120 bp, Homo sapiens
tcccgggttctggagctgacagtgaataggacaaacatggcgtgatctcatgtttgaaactcctatgatctcagggagtttcactctagtggtgagaacagacaagactagcaatttcag

SEQ ID NO: 29171 - DNA, 120 bp, Homo sapiens
gcacggcccctgacccagcaagacttaaatggggagagcagagggaagggcgcccaggcaggagaatctgcttgagccaaggctccaaggcagacataggcggggcaggtcccaggaagg

SEQ ID NO: 29172 - DNA, 120 bp, Homo sapiens
aatcggaaaccccccacccccattcaggggaatacctcttgtcacagcagagaccagctcaccctatcctggtcactggcctgctttgggcaatcgtgcaaaaaggggctttgtcttctc

SEQ ID NO: 29173 - DNA, 120 bp, Homo sapiens
gcccgccccccgcccctgccccccgcccctgccccggcaccgtgtctctgctccatttcaacagctggccctttctcctccttccttccgggtattctcagggtttttctctctcctagt

SEQ ID NO: 29174 - DNA, 120 bp, Homo sapiens
ggacgtctgacttttatggacaaataagcctttgaagaaatgaggggagccacagagctgccacggtgccatctgacaccagtccgtgggtgaggaggcgtctgggacaggagtagggtg

SEQ ID NO: 29175 - DNA, 120 bp, Homo sapiens
ccccgaagtcacaccacacagcaagccacctcctctgctgccttgtcatgcaggacttgatgctgacgacagccctggcctccaggcccccgcaccagcctctcagcacattccccagcc

SEQ ID NO: 29176 - DNA, 120 bp, Homo sapiens
gcacggcattacactaggatatacaataaaatgcaaaagacaaataacgaggtgcaagttataatgaagaaaaagcctgcagtcagagacatccgagtatgaattattgactaaggtttt

SEQ ID NO: 29177 - DNA, 120 bp, Homo sapiens
gtgcggaggaatatttttccatcaaagatttgcataattcactcgtataaacctgggtggaatatagagtaagattttacaccaacaagtcaggacttgcattgcagatgcctccatttt

SEQ ID NO: 29178 - DNA, 120 bp, Homo sapiens
gctcgggtgtcggggaggctcgtaagcggactggggactgggacccccatgggtcgggccctgaggcctccttcctggggaggaatcctgttcctgagaggttgctgctgaagccacaga

SEQ ID NO: 29179 - DNA, 120 bp, Homo sapiens
tgccgggagccacagcttggccaatgaagcagggaccatgtttcagaccccattcacccctgaggctatgtacttttgagcagtgcacaacctgtgtatccatacatgccattcccactt

SEQ ID NO: 29180 - DNA, 120 bp, Homo sapiens
gcccgttcatgaggaagaggagagaagcttgaggggcttggggccaggccagcctgggatctgcttctgtggctgcgagctatgtggccttccaccccttaaagctaacttctgtgagcc

SEQ ID NO: 29181 - DNA, 120 bp, Homo sapiens
ccccggttccaaagcctgtgtctcagtgtatttcttgacgaagctccatggcctcccgcatgcccaggttcccctgacaaagcaggccctgagctggatgcctctgccttttggcctgtt

SEQ ID NO: 29182 - DNA, 120 bp, Homo sapiens
ccacgaaagcaagtcttatcatctccacttttcaaatgaggaaactgaggcttccagaaagtgtttcttccacctctaagggggctggccacctctagccatctgtttgtctgccaccct

SEQ ID NO: 29183 - DNA, 120 bp, Homo sapiens
ctgcggcggggcagctgcagcaggtactcctggggcaggcagtggggactgctgctttaggggtgcaggcgggagagccggggtggggtatatgcacagggctgggtcctgcgtgacaaa

SEQ ID NO: 29184 - DNA, 120 bp, Homo sapiens
ctgcggggcatcccctgcatggcacgtgtcctccggcagcgtccttgcctccttgtgtgtgactgtgagactctccagggcagaagcatctctattccagggcttagctcgtgtttgtgg

SEQ ID NO: 29185 - DNA, 120 bp, Homo sapiens
tgccgtcctcctccagtgccccagggcagcctgccccagtccacacttaggctcactcaggggagcggggagccttgctgggccactggggctcaggaagctgccttataaccatgcgga

SEQ ID NO: 29186 - DNA, 120 bp, Homo sapiens
gctcgttgagatgggcaggcacccctcaaagaggaagcaccacggagaggagaaaggcaccagagccgtagaggaatcaccccctccccttgctccagggctctttcagggcagcaagcc

SEQ ID NO: 29187 - DNA, 120 bp, Homo sapiens
gcccgtgtgttcaaggctcggatcgccttttgtttctgaaaggattacatgcacccctgagaggtgagggggcccctccttttccccaacccaccccactccccttctcccccaaaagcc

SEQ ID NO: 29188 - DNA, 120 bp, Homo sapiens
tgtcgctgctccttgttaacaagttcccgacaagagctgcagtgctgtttggcggtgtgagataagccgccacaaaggggcattgttggcgcgccgggtggtcggcggggcgggtgggag

SEQ ID NO: 29189 - DNA, 120 bp, Homo sapiens
cagcgcttcactcagccttcgacggcagcggcatctccaggcctcccctgggaaaggctgggggcggagtggggagggggtgccttctggtgcctgttttgtttttcccttcttaaagag

SEQ ID NO: 29190 - DNA, 120 bp, Homo sapiens
tggcgttgttaatttgattgcacccacttcggcttcttgtctctcctgattagccaagctccacctgaagcatgagattaattcagattgcatggaagcaatcagcttcagcgccaagag

SEQ ID NO: 29191 - DNA, 120 bp, Homo sapiens
ggccgaacagtatgtgtgcaaggggtaggggtgagggtcacagagaatggttggggacttggactgcagagctgtttctgctgcactgggggtccagttgaggccctcaaactcgccagg

SEQ ID NO: 29192 - DNA, 120 bp, Homo sapiens
tcccgaaggttctacctacctgtgccctttaaactgaaatcagaatgggggagtgggagaattgctatcaggttgaggaaaagcaaaggagggaaagaaaagagcaggcaaggagagagg

SEQ ID NO: 29193 - DNA, 120 bp, Homo sapiens
gggcggggggttacttggaacaggcacctgcctcgaagcagcaggaggcagaacaaatattccaaagaaggccaggtgcaccagcagtccacccagtgcccacttccaccccgccccccg

SEQ ID NO: 29194 - DNA, 120 bp, Homo sapiens
tcacgcaggctgctacacaaagacagtcagctcctccaaccccagacagaggccctgcccctgccagcctccatgactgctgccctggagccttcgatgtccttggccctgcctcttccc

SEQ ID NO: 29195 - DNA, 120 bp, Homo sapiens
ggccggaatgggaggggacatttgtgacaggaggggtgtgagaaacggaggatgtgtgagagggagtgtgtgtgtggcaaggctggagagcagcccatctgagagccacgcaggagccat

SEQ ID NO: 29196 - DNA, 120 bp, Homo sapiens
gagcgggatgacgtgaccccgaggtgtggagagacagcagctgtgtaagaaaggtgtgtcgctagccctaccaggagagaactgaagtaagacaccgaggcctgcagatgaggacatggg

SEQ ID NO: 29197 - DNA, 120 bp, Homo sapiens
cagcgtgtgtgtggtgcgtgaggttttgtgcagcatgtgttcaggaggtggccctggatttaccaaatatgctccttctgaacccctcagagcactttgcagttgctgctgggttgccaa

SEQ ID NO: 29198 - DNA, 120 bp, Homo sapiens
gcccgccaggggaagtggtttgctccagggcccagggcatcagtgacagcctgaggcacgtggggtcccctcacacacagcccagctcctgaccgctgtgtcctccggcacccgcgaccc

SEQ ID NO: 29199 - DNA, 120 bp, Homo sapiens
agccggcagctcagcggaatcccccaacttaaaggaaaaggcaaagaacaacaacagcgaaaaagcatctacgagtttgggagatgaggagggttgcagaggtgcctgctcttcccccgc

SEQ ID NO: 29200 - DNA, 120 bp, Homo sapiens
cctcgcgcagccagaattagccaagctctcccaagctgagggatgtagattgattgcctggttttattaaggacaaagtgctttttgatagtgtgagggaagtggctccccagggcgggg

SEQ ID NO: 29201 - DNA, 120 bp, Homo sapiens
ttccggctcggagctccctgagcatcgatcgctggggcttccctgtcttatgctgagctgaacgcgggctttggcaagtgataaagaagctatgattcttaaaggtgggaactctgggga

SEQ ID NO: 29202 - DNA, 120 bp, Homo sapiens
acacggggctatgctatcagcaggctttcccacctgcaccctggagggactgccactacacataacaaagctggccaggtcatgaaatctttgctggccacttaccataccggttgcttc

SEQ ID NO: 29203 - DNA, 120 bp, Homo sapiens
actcgctcttgacatgaaatgtaacgggtaaggccctattacgagcccaaccccccgctcatagtgtagatcaggaaaatgaagtagcacgaggccaagtatgctcatcaaggtcccacg

SEQ ID NO: 29204 - DNA, 120 bp, Homo sapiens
ggccgggtcagacgctaacactcaggcccttatagccatgtcttgacatggggccagatggacgtggcccttctgatgtgattcccaggaatccattatacagacacctgcagcgtaaag

SEQ ID NO: 29205 - DNA, 120 bp, Homo sapiens
attcgtggtcattatcctcatcaccactaccatcgtcatgagccctgtctgtcccacgggagtttgcttcctcctttgttactggctcccttggctgaggaagtaaggttgttggcagtg

SEQ ID NO: 29206 - DNA, 120 bp, Homo sapiens
actcgttagggtgggagagggtctctggcacatgctcccaggcatacggcagaggctgggtggagcagtgctgaagctcagcattgaacagctagggaaaaattagggagggaggaggga

SEQ ID NO: 29207 - DNA, 120 bp, Homo sapiens
cctcggaagctcagatgtaggaatggagatgtttcttcacggagccaatgcaaaggggccccagttgcagccctgccttcctagttaattaaacattcagcctgcatgcccagagatgct

SEQ ID NO: 29208 - DNA, 120 bp, Homo sapiens
ctccggatgaccagagacaaataccagccatccctgcagcctggctctccactgccagccagtgtcacatatgccaaggcacacacagccttcaaagcaccctccaccctctctcctctc

SEQ ID NO: 29209 - DNA, 120 bp, Homo sapiens
ttacgggagggccctggtggacaacacacttgcgtatgtgtaactgctggcatgcatgtttacgtatgtgtgctcaagtgtgaatgggctaatgtgttaattggctgcacgtgcatgcaa

SEQ ID NO: 29210 - DNA, 120 bp, Homo sapiens
atacgtaccagggtgcacacgcacgagtgctcacacacaggtctctgcacacatgtgcaggcatgttgggcgtgtgctgctgttcgcagcttagtgttagaaaaattcgttagaagacaa

SEQ ID NO: 29211 - DNA, 120 bp, Homo sapiens
ttccggctcatggagcagcatgggtttcagccccaccctgcccactgacccttggccccacagagagctggggtgggagacttccagttttatctcacacttccggtgctctgtccccac

SEQ ID NO: 29212 - DNA, 120 bp, Homo sapiens
ccccgcaacttgcccttttctactttctagctctctgctctgaaccttgagtgggatgcacttcctagtcgggcagcagcagtggggtctggagagctgcccccaggcccacacccttct

SEQ ID NO: 29213 - DNA, 120 bp, Homo sapiens
ccccgccatgcccacgggcacctcctccacccccctccttgggtagttcttggaacagcgcatccgctaatcaagcagcgtgatcataatcagctctgatggttcttctgcaaaagcgca

SEQ ID NO: 29214 - DNA, 120 bp, Homo sapiens
gcacgtcccagagcccctcacacccatgctgcttcttggtccagagagaaaacaggtgactacacccgcctcagggctggatttctgggattttttcagaccctgagggtggggaagggg

SEQ ID NO: 29215 - DNA, 120 bp, Homo sapiens
aagcgtgtgtacacacacacacacacacacacacacacacacacacacacacatgcctgctatgcacagcttatgctgggtgctggggactcacacgtggccaaggcatgggctctgtcc

SEQ ID NO: 29216 - DNA, 120 bp, Homo sapiens
tgtcgctcagcaccatcacaacaggcccagcgagtcgccgagacggaatgcatcagattcaattcattaggactgatcactccctgaatggggctgaataattgatgagcagaagcagct

SEQ ID NO: 29217 - DNA, 120 bp, Homo sapiens
ggacgttccgagtcctctgaggcccgctgcacccgttattattttttttaagccaacaaacccgaccaaatgcttgccagtgagggctggcgcagggagtggagcaaaggttagatgttt

SEQ ID NO: 29218 - DNA, 120 bp, Homo sapiens
tctcggtccactgcttgtaagggaaatggatacaggcggcccggcccgtgatgctgcttaaaggaggcaggttgagctgtgtacacagccaccaagctgatttgtcccagatgacagggg

SEQ ID NO: 29219 - DNA, 120 bp, Homo sapiens
gggcggggatgtgggctgggggttgttaggtccctggtggtacggcaaggcccctgggctgggcagagaaagtggccaggatgcccttccacatggctccctcgcaacagcagggaaatg

SEQ ID NO: 29220 - DNA, 120 bp, Homo sapiens
gcccgactgggaaatcttccagggccctgcatctctgtcccccttccaatacagaggagagggcaggagggtggccagatgggaaacccacacttctgtcaggagtccaaggcttggcac

SEQ ID NO: 29221 - DNA, 120 bp, Homo sapiens
ccacggcaaccaggggtgcccctggatcagtgccccttcccttcctgctgtccccctgctcctctgcccttgggtcaggggtcagcagtagggtcagatgaagaccagtcagaccccatc

SEQ ID NO: 29222 - DNA, 120 bp, Homo sapiens
catcgggctacaaagagcttcagaggagactgtgttctcaccacagtgacttgaagaactgagatgtggggatgatgcccttgaggactcctttccccactcttggaggctgccttcctt

SEQ ID NO: 29223 - DNA, 120 bp, Homo sapiens
ttgcgggagaagatggtgccctggctcctggttgcttatacctcctggagcattttgggggctggctcagtgggaggacagagggagcacagcttgggtgggcaaccatgttaaagacca

SEQ ID NO: 29224 - DNA, 120 bp, Homo sapiens
ccacgtgactctccagaggcagcccccatcagcactgccccttccaagggcagtcagcacctggaagaccgagctcctcaaggcagcgttaaaccgctgctgtatctccccaggctgctg

SEQ ID NO: 29225 - DNA, 120 bp, Homo sapiens
aggcgagtagtctgatttttctggatagaaatccacattgcagaactgtatagacttgtggaattatagagctggcttagggagcttgaggcacaaagagatgaggatgctgagaccagc

SEQ ID NO: 29226 - DNA, 120 bp, Homo sapiens
cagcgacgtacagggacctgcctgggatcacaacatggagctaagatcagaagccaggtctcccccacccttgttcagtaaatggcgtctgagatggagtaatctaaaatcctaaatttt

SEQ ID NO: 29227 - DNA, 120 bp, Homo sapiens
gctcgtcaggggctgcctgtgggccacagaaggagcccgggttgggaatcaggctctccaggggcaagttctgcctgggtcactgagaagccctgtgaccttgggcaagttttgtgatct

SEQ ID NO: 29228 - DNA, 120 bp, Homo sapiens
gcccgagtttccccacctgccctggtggaggtgataacattgcctccagacttcacaaggccgttgcaggcaaccagtagtataggtgtgtggaagcgctttagacgctcaatccagctg

SEQ ID NO: 29229 - DNA, 120 bp, Homo sapiens
atgcgtgggacaattactatctagagctcatgtgccctgcctgccagattctgtggcctcttctcccacccccaacccggtgggaatggctgggataaacaaacccagtgccaaggaaga

SEQ ID NO: 29230 - DNA, 120 bp, Homo sapiens
ttccgtggcacactgcagaatttacaagcggaggggccatcagggtggtggaggaaggggcggagggagggaattaatcaccgaggctcaggcgtgaaattaaattctgagggaaagaaa

SEQ ID NO: 29231 - DNA, 120 bp, Homo sapiens
ctgcggcgtgtacatggcgacagcccggggggactgggtgctcctagcactgaagcagggctgggggagacagatggtcaggcttgagaaactgctgggggtgcactggagctaggctag

SEQ ID NO: 29232 - DNA, 120 bp, Homo sapiens
atccgattccagtccctcagcctctctgaccactagtctcctcctttataactgcaggtgacaatgcccatcccactgagttatggtggggacagagtgagttaatacacctgaaagcac

SEQ ID NO: 29233 - DNA, 120 bp, Homo sapiens
tgccgccccccgcccccccccttgggaatgtagtaggaataacaatgtagcaacagcagaacaaccaccactgacaataatagtagcagctactgtctgtccagagcttcctgtgtcagg

SEQ ID NO: 29234 - DNA, 120 bp, Homo sapiens
tctcgtagcctcattatttgaaaatgaaaacatagcaaagaggtcttccttggtggtttcagtacctgatttctttaatctctttctctgatttccctgagtacacagggggctcctcca

SEQ ID NO: 29235 - DNA, 120 bp, Homo sapiens
ctgcggtggggcgtgccaagttccagggatggcctggtgtcctcccttcccagcctgccccgttctccccaggccctctcccctacctgtcacagagaggcgtgccccattgctctgccg

SEQ ID NO: 29236 - DNA, 120 bp, Homo sapiens
ccccgctatacttgtgcttggtgatgcagcgataggtggagagggcgtcctccttctgtacgtcagagatgtacagcccgccgtggtaggtaataaaaaacctgtgttctggagacacaa

SEQ ID NO: 29237 - DNA, 120 bp, Homo sapiens
gttcgttacttcccggtttcgtacagcctcagaggcagggtagcgtctctgacagatgaggattttcacacacaaacaaaatgacaaatagaaatggtagtaattgttcctttcagtgta

SEQ ID NO: 29238 - DNA, 120 bp, Homo sapiens
tcccgatctggcttttctacttatgggctgtgtgaccttgggaaagttacttaacctctctgagccttatctgtacaataggatacaaataattgggtgggtgtacagatttaaaaaatg

SEQ ID NO: 29239 - DNA, 120 bp, Homo sapiens
gttcgagatgctaactctattttacaaagaaggaaactgaggcttgtagtaaagtaactggcccaggtcgcacagccaggaagtggactggaacttctgactcccagttgtccttctgca

SEQ ID NO: 29240 - DNA, 120 bp, Homo sapiens
acccgttgtgtgcaaggcagtgaagaggacaggcacggtgctctatgtctcctgccactgccacagccatctctgccccgactgttgggacctagcaggagagcaggaagcacaggtggc

SEQ ID NO: 29241 - DNA, 120 bp, Homo sapiens
cagcgtgcccactttgcagattgccacacaagaccccccactccatcccagaggggaagtggatttccttgtctaaggtcctaaggctcaccctgaccttgagctgataaaggctgattt

SEQ ID NO: 29242 - DNA, 120 bp, Homo sapiens
gggcggggtttgcactagactccctaagctcatggatgtgtcctcccactgaggccagactgagatggagaggagaacactggggtcctctgcctcctctttggggatttcccaggcaga

SEQ ID NO: 29243 - DNA, 120 bp, Homo sapiens
acccggagggcccaggctgccatttccatgggagggggccttggaatcaggatactgatagtgacttcaaagctgcaggggagagggtcatgctgaacccacaggaagaacccgatagca

SEQ ID NO: 29244 - DNA, 120 bp, Homo sapiens
caccgtagggcaccttctgccactggaggccgtagaactgcagggctgaaaagctgagtgcacgacgatatctttgacaaaggttcatcagccttcgtttgaatatctctggggctgggg

SEQ ID NO: 29245 - DNA, 120 bp, Homo sapiens
tggcgctccctctgtgtgtcctgctttgactcactggtgccccgctgaaccagccgaaacccgtgttcctgacatactccctcatacactggaaggcagctgtgatgccctttgaatttt

SEQ ID NO: 29246 - DNA, 120 bp, Homo sapiens
aagcggtggcacattagcatctcaccagtgagaggggagcaatgccctctcctggagatggatgcagggaagggacagtccacacaggaccaggcaggatgcacgttgggctagatcttg

SEQ ID NO: 29247 - DNA, 120 bp, Homo sapiens
gcccgtagttagtctatgagagtcaggtgtcatgagtgggaggttaagcaggtgggggacttgcaggaagaaggtgcagaggcagtgtggcaggggaggctctgacttagagaaagaagg

SEQ ID NO: 29248 - DNA, 120 bp, Homo sapiens
agacgtggggctctgaagccctaaggtgcaggaaagaaggctccaccctgctctccaccttcttctgtgcctttgaagagcatggagtttccccagcccccctcctgaccaccgtccctg

SEQ ID NO: 29249 - DNA, 120 bp, Homo sapiens
aagcgagccgcagcttcccaggagtccctgcccgcctcactcgagcccctcttcctgcctttcatctgagcagaaaacaagggagaggccccaggcgtcagcaaagcatttcactgtgtg

SEQ ID NO: 29250 - DNA, 120 bp, Homo sapiens
agccggaagaaagagcagctgttccagctgcagaaggtgcttagtccagtgtgggctataaagtgccacttggctgtggggtgatcaggagggaggcagtgagaaggaacaaagcaaggg

SEQ ID NO: 29251 - DNA, 120 bp, Homo sapiens
aagcgggctgaggctttaggggcctagatctatctagggtgtagatctagggccatggttctcaacgaggggtgattttcgccccttaggagacatatggcaatgtgtggaggcattttt

SEQ ID NO: 29252 - DNA, 120 bp, Homo sapiens
gcccgggatagcaaccacaacagagaatgatcaggtccaaaatgtcaatgatggacatttcccaccaggactgggaaccctggtggcaggatcagaggagagggacaaaaagcagaaaag

SEQ ID NO: 29253 - DNA, 120 bp, Homo sapiens
agacggggatgggcgatgaggtttagccagtgtctcccaggcacagggcagtgccgggtgccatagaggcaacaaaagaagcagtgggcatgtagctgtgggcaaactgagaagctgctg

SEQ ID NO: 29254 - DNA, 120 bp, Homo sapiens
caccgcacaagctgcttcctgtctctgagttttggcctctttgtccaaaatgagaagttgtgccagatgactcttcagacctcgctctgtgattctgccactcctgcacttaaaatcctg

SEQ ID NO: 29255 - DNA, 120 bp, Homo sapiens
gtgcggctatggggatgaaatctgcacatgctacagttctgtggggctgctccagtcatgtctccaagcatcctcctgccccttgccttgctccatccacccagaacctcttcctatagc

SEQ ID NO: 29256 - DNA, 120 bp, Homo sapiens
tagcgccccttgttctcctctcctctcctctcctctgggcctttgcatgtgcaggtccctctgcctgtgatggtctgggtctgtttcctactctacccagcccctaggttaacaacttat

SEQ ID NO: 29257 - DNA, 120 bp, Homo sapiens
tcacgttctagctcagctttacttctactgaaaagcccttggaggtcactcaggaagggcaggatgcccctcgtactagccccagaatgccctgggcttactgcatgaacggcattgcaa

SEQ ID NO: 29258 - DNA, 120 bp, Homo sapiens
cagcgtcaggtctgctttgactccagctgtttcctcagcaccttccacaatgcctggcaccaatagtcaactggtagatgtggcatgaataaatgattgcatacagcaattctatgagca

SEQ ID NO: 29259 - DNA, 120 bp, Homo sapiens
aggcgtagactcacagcctctgctgcagagacagtgttgagagggaatagggtgtcacagactcctgatgccccttggttcagaggggcaggctttctggggctctgggtctgacccagc

SEQ ID NO: 29260 - DNA, 120 bp, Homo sapiens
tgacgcactgtgggtcccaagggagccccccaagcctctcatatgcctgcctcctaggatgggctgctcccatacacacaacaacaccccctctctctagggactggactccagggctcc

SEQ ID NO: 29261 - DNA, 120 bp, Homo sapiens
cctcgccagggtgtgtgtgccagccccatgcaagtgccacgtcttctgtgtgcctttccagatccccttggaatcatttcttgcttccagctcccacagcatgtgacatgtgactcgcat

SEQ ID NO: 29262 - DNA, 120 bp, Homo sapiens
caccgaaacgacatgtgggtctccttggctgcagggcaagttttctgaggcccaaggttaaagaagcatgagtcaccagaaactggtgggatctaacagacttgggcttgaacactagtt

SEQ ID NO: 29263 - DNA, 120 bp, Homo sapiens
tgacgtgcccccgttccagcctcccatcctagccaactgcttgctgaaatgaagtgaacgccaagagcagtcactgcagcaccaaggccatttcctagtggtgtctcacccacccaatag

SEQ ID NO: 29264 - DNA, 120 bp, Homo sapiens
acacggcagcacgcatggtgctgggtcagctcagcttggccctccagttccccagctctccaggcttgcttaaatatggaacctgggcagaggctaggaagaactgggatggagaagtca

SEQ ID NO: 29265 - DNA, 120 bp, Homo sapiens
ccacgctttcatagatgtaaaggaagctccgtgccagagggaatcacacgttcacctgtcattaggccttgttccccatgtggtgtgtctatcatgtgtttgctgagtttgtgcctactt

SEQ ID NO: 29266 - DNA, 120 bp, Homo sapiens
agacgagaactattataatggacctcaaagcggaattgattgagaaaatagaccagtgttgtactgcttctctatgggacgagccgtgtgacagcgaggaccattctgagggcagatttg

SEQ ID NO: 29267 - DNA, 120 bp, Homo sapiens
atacgacatgtgaaaagggctgggctaggcctgtgcaccctggcaatggaaggaagacatgaggagaaatgatggatgaaatggatgatgcactctgtgggcttctctgcatctgtgacg

SEQ ID NO: 29268 - DNA, 120 bp, Homo sapiens
gggcgtagtggcccaggagttcccaggggcccactagtggagttcaccgaggtggagggttccctgccacatagttttccatgtcaccaagcagttctatttttgggaaaagatgtctgt

SEQ ID NO: 29269 - DNA, 120 bp, Homo sapiens
atccgcaagagggaaaagtgtaagcttggtttaaagcttcagaggactgactcacactcctgtttcatagaaatgtaccagggtatggcaacttaaacctctgctggtctctttggactg

SEQ ID NO: 29270 - DNA, 120 bp, Homo sapiens
ttccgagatggaatccatttctctaccttgtgcagagacactcttctttgaacacgttgagaagcactccctagcctttgttattgtttttattcaccagagaacacacagctctcaaga

SEQ ID NO: 29271 - DNA, 120 bp, Homo sapiens
atccgcaatcaataggccttgcaggtcccggcgattctcctgctgcagctgctctggcttctttgctgcccctgaacatgcaaagcaccctcctgcctcagacctctgctcttgctggtc

SEQ ID NO: 29272 - DNA, 120 bp, Homo sapiens
gggcgaggagcaggttccaacacccccataacccagtgggcaccctagcacccccaaagtttgccttctgcttcttggtctggccgggtttctcacttagcccctgcatcccgtcctgag

SEQ ID NO: 29273 - DNA, 120 bp, Homo sapiens
gagcgcctgcctctgtaatgaggagtgatgtataattgatgaaagcacaatgtgatatagtcacagaaacctcgtctgctaggagacatctgttcagcacatagaatccactcagctact

SEQ ID NO: 29274 - DNA, 120 bp, Homo sapiens
ctgcgagtgctatgcgagccgcgatttgtaatattctctgtctggggacgtggagaagtaggaaccagtgcttctgcctcagagatttatgcacctgggtggcattctctgcatctccct

SEQ ID NO: 29275 - DNA, 120 bp, Homo sapiens
cttcggagtcctcttcataaattatcccggcgctctgatggggttttaacgggctcaggtgccagcatctacgtccctctttcccatgcttctgtcacagatgccccagggtccccgtgc

SEQ ID NO: 29276 - DNA, 120 bp, Homo sapiens
gaacgagggaggagcacttgccagggatgcagcttcagggatcccttctttgcttgggactctctgtccccaggtgcatcccggcccctcaccaggtcagcccaggctctacaggcatgt

SEQ ID NO: 29277 - DNA, 120 bp, Homo sapiens
gcccgcagtagtcagagtctggattctccgcagctctgggctcctggttttgtcatcttacacccctctgctcatcctagcccatcatccctccactccgtaactcacagtgcacctcct

SEQ ID NO: 29278 - DNA, 120 bp, Homo sapiens
ggccggctcggcaaggactgcctaggagcttggatggagccattgcagtgtcgccagtctgcctcccattgagctcacactgtcttcactcagcgtcttaagcattctccacatctgtgt

SEQ ID NO: 29279 - DNA, 120 bp, Homo sapiens
gtccgtgtgtgtgtgtatgtgtgcatgcatgtccaggctcttccatttgcctggaagccccctgagggctggctctgtttcttttctttctttggtgtctcctgtggggtctgacacagg

SEQ ID NO: 29280 - DNA, 120 bp, Homo sapiens
cagcgctaggctcaccgatggtccatagtcattgtattgagctaatagttacacacccttcgttacatgctgggcaatgttctaagcgatttacacatattcaataacataatcccttaa

SEQ ID NO: 29281 - DNA, 120 bp, Homo sapiens
acccgggcagtctgcttccagagaccaggctccgtgctgctgcactgaacgctgccccagtggggctcaggaggaagggctttgacctcaggcagcacggggtgtgaaccccaacaccac

SEQ ID NO: 29282 - DNA, 120 bp, Homo sapiens
ttacggggcactaaacaagaggctgtccctgttcctcactactgaagaaagggggcagtgaggggcataggcccagctcctccatcccctgggcccacgtgtcctgccctcggcggtgcc

SEQ ID NO: 29283 - DNA, 120 bp, Homo sapiens
cagcgatgcttcagggtcacagactcacaggctcagtgcagaagaaaatggatgccttctgccctgcagcaaaatctctgctttctcccctgctcccgcccaccctgacctcttgcaaaa

SEQ ID NO: 29284 - DNA, 120 bp, Homo sapiens
ccccgtgcacctcgctggggcctgggggcctgggtcactcaggtggtacctcagggctgctgtgcggcctccctcattaaagcctgacaaatgaaatgtgagaaccaaagccgctcccat

SEQ ID NO: 29285 - DNA, 120 bp, Homo sapiens
ggccgggctgggaagccctccaggctcggccactggcccaggagtttctggccaactgagagaaaacccagccccgctcagtatgcatgttgtggtatttttaaaaagaggtaaataagt

SEQ ID NO: 29286 - DNA, 120 bp, Homo sapiens
tcacgctgactcggtctctcaaactgttattccatctacacacggcactgtgggatgcctgcgatattttataaagttaataactttctcttaattggatgagtttatagaatagtctgc

SEQ ID NO: 29287 - DNA, 120 bp, Homo sapiens
ctgcgcaattaacaataattacgccaaagacactttgattccaaggatgctccacaaacattggcgcattaagccatttaggaaaaaaacaacaacccacaacacactgccacaagacaa

SEQ ID NO: 29288 - DNA, 120 bp, Homo sapiens
acacgcacacacacacacacacacacacacacacacacacacacacactctcactgcagagctccctgaagcaccgtgacccagaatgagtctttgtttccaggccacaggatggtggag

SEQ ID NO: 29289 - DNA, 120 bp, Homo sapiens
cctcgtgtcacacttcactacactctgtgcctcccctcgctaccccctaccaggtaggaggaggggtcggcagggccaggtcctgccactacttgttgaaggacacactgtctgtccatg

SEQ ID NO: 29290 - DNA, 120 bp, Homo sapiens
actcgtaataaactagatctataataatgtctctctctccctctccctctctctcatctatgctacctttgatctcaacaatacctatttcaggatgacttctcattcaaaaaggacaat

SEQ ID NO: 29291 - DNA, 120 bp, Homo sapiens
gctcgctaccatctaaaggcatccattccattttaagatagctttaattataagaaaagtcttccatataatagagcttaaatttatttccctggaacttccacctgctggttctaccct

SEQ ID NO: 29292 - DNA, 120 bp, Homo sapiens
ttccgcaggctgacaatgcccacttcctataaccttttctaccattccaagccagcttcagaaacccatccatcagaatagtgctgcaaaaaaattctagccctacaataaaatatccct

SEQ ID NO: 29293 - DNA, 120 bp, Homo sapiens
ctacggaggctgtgttaagcggcccaagaccagcacttgtgggcttgtcactcaatgccccttaggacagccttaagtgccactaccgctcactgggggtgttctcaggagacagggacc

SEQ ID NO: 29294 - DNA, 120 bp, Homo sapiens
aggcgagctcctttgtctgcacaatcccaggatcaagccttccccaacgcacccagccccagcccagctcagtgagccaattcctgacctggcttctttgcctttctctctgttccctcc

SEQ ID NO: 29295 - DNA, 120 bp, Homo sapiens
gctcggggcgcctgtgcccagcccatctgttcagtcccatatgcttcccgtaagggctgccaagtcggcccagtgctcagtgactctactccagcccctggtggctggtctcaggctttc

SEQ ID NO: 29296 - DNA, 120 bp, Homo sapiens
ggtcgctaggaaacagccttgctactgcatcaaggccagacctggatgctgtcatggtacagcagaggcgtggctattggcctggggcacccgatgggcacccaagaccaaccttcctca

SEQ ID NO: 29297 - DNA, 120 bp, Homo sapiens
cttcggagcaaaatacctaagttcaaattctgactcttctatgtattagctttgagaccccagggagctttattgagcctacgtgggaataataatttcaattccataaattggtgagaa

SEQ ID NO: 29298 - DNA, 120 bp, Homo sapiens
tttcgtgaaacatctttagtacggtgcttggtacactggagacaataaacattgctgagtaaaaacagcctggtggattacagcccagtgactttgaggtcccatatgtgaacgattcct

SEQ ID NO: 29299 - DNA, 120 bp, Homo sapiens
agccggccatgatccagcttccccatacaaaagagaaccaggtctgaatttcatcagccaccgacagtggagagctaacaaattgttctctttaccctaccagtacctgtaaacactgcc

SEQ ID NO: 29300 - DNA, 120 bp, Homo sapiens
gaacgacactgtgactgaaattaactccagaggggagatttccaagccattgctcagacaggcttgtctgtttgccacccgtttggactggggccccctactttgctgcaccttctcctg

SEQ ID NO: 29301 - DNA, 120 bp, Homo sapiens
ctgcggctgtcctctcctcccgcatgtcacagagaaaatatccttgctcctataaacctgttttaggcctgaacaggcagcatgggatgccctccccatgggggcaagtggagatcaaac

SEQ ID NO: 29302 - DNA, 120 bp, Homo sapiens
gggcgaaggttggaaagtcagtgcattacaagtttaaagcatcaggtgcacttggatttggcccttttgggttttgtgttttggcctttttttatggcttgagtatgggtgagatagtcc

SEQ ID NO: 29303 - DNA, 120 bp, Homo sapiens
tcccgcaacatactgtaatttaattggtctggagtgtggccggggctttggatggtttaagagacccccaggtgattccaacgtgtggtcaggtctgggaatcactggtctgggactcct

SEQ ID NO: 29304 - DNA, 120 bp, Homo sapiens
caccgagtaaagggatttcaggcccggggaaagtaccctctggctttcaaaacacctctcccacctacttcctaacacctgcagctccttcgcagggacaaagctctttattccacaatg

SEQ ID NO: 29305 - DNA, 120 bp, Homo sapiens
tgacgcaggggagaagtgtgaacatattcaagctagaggggccccctcattttagaaaggaggaaactgggtcccagtggtgtgacccaacatggtcaaggccatctgttcagcaggtca

SEQ ID NO: 29306 - DNA, 120 bp, Homo sapiens
tagcgtccagggcagagaggatgctcttcatacttggcacagcttgaggtagggctggccttgactgtcgaaaatgaagatgcctcctgcaggcgtctccatggtagatctctgtatcag

SEQ ID NO: 29307 - DNA, 120 bp, Homo sapiens
gtacggtgcagatccaaatgccatcaatgtcccctatcagaaacactattaatcctggggctgtggcagtctatgaggcgcatcttcccctaaaacccatgacagaagcgctggtcccat

SEQ ID NO: 29308 - DNA, 120 bp, Homo sapiens
catcggtggaggaggcatttgtctccaggtaggttctatggacactttgaggctagtgcctgtgcagctgggtttcccacaggcctctgggacattgccccattatctggagctgagctc

SEQ ID NO: 29309 - DNA, 120 bp, Homo sapiens
ccccgcctcttcttctccctcctagacgttattctccttcaaaagctccttcctcaccaccatctgaggtgggttttcattcgccctgccctgtttcccatgggtcttgggcacaggggc

SEQ ID NO: 29310 - DNA, 120 bp, Homo sapiens
tgtcgtccccagcctgagtacaatgccgggagaggtgcccagtcgcactgctcgcagccccacatcaccacactcgtgccttcccctgagccgctgcacccaccattccctacggcccag

SEQ ID NO: 29311 - DNA, 120 bp, Homo sapiens
gcccgtctgctgcccgtggcttggttcagctcctccgtaactgagctcatcctcacagtgtccaggagggagcttcgggaactcctgcgccaggcactttgtatatatgatctcacagaa

SEQ ID NO: 29312 - DNA, 120 bp, Homo sapiens
aggcggttccaacaccttcattttggagttggggagactgaggctgaatgcggctgagctgggatgggcatctagctcaaagcaggacccctcaggccccgctgcccacatgcctctatt

SEQ ID NO: 29313 - DNA, 120 bp, Homo sapiens
cctcgccacaccttggccagcctgggtctggccacccttcagtgaaagagattcctcctcccaactgcaagagctggaggggtagggaggggacagacacggctaaatccagcctttgct

SEQ ID NO: 29314 - DNA, 120 bp, Homo sapiens
cagcgcgtggcaggttttcacgcagaattttccttgctaatcccctttgttagctctgatactgacattgcaataccaacctcgtctgggcgatttgaaagggattacagaccctcaatc

SEQ ID NO: 29315 - DNA, 120 bp, Homo sapiens
gttcgaaacgcagcacggcaggcagaatgtcatccttttggagggcgaggcagaggtgcaggcccacctggttgattagtggcccttcgtgtcctccagactttgatgcctgctaagtgg

SEQ ID NO: 29316 - DNA, 120 bp, Homo sapiens
ctgcgaggggagggcagggcaggcgctttggcatgtgtggtcactgaatgggaccctgttctctgaatggtaccatgtgcatgcctgaggggccagattcaagttcaatttcaacaactg

SEQ ID NO: 29317 - DNA, 120 bp, Homo sapiens
caccgtgctggagattgtggaggacacaatgatgaatccagttttacacttgccttgaggaaatcacagtctagcaggcaagcggcaagtatccagaggctcccgacccagggcagaggg

SEQ ID NO: 29318 - DNA, 120 bp, Homo sapiens
gaccggactgtcacggagcatcaaggacagggagagggatgattcagttccctcatgcagcttcctggaggtgtaggagagtgtggacgggagctgtgcttcttgtgggctggaatcttg

SEQ ID NO: 29319 - DNA, 120 bp, Homo sapiens
actcgagttctggcctggctgtcactgtcactggctgtgtgacctctagtcacaatgatataccctttccagcctccgcttcatatggtggcattaaactgtgactgtgttcccccttct

SEQ ID NO: 29320 - DNA, 120 bp, Homo sapiens
tgccgaaggcccgtccagctcctagatgaagctttagggggccaggcaaaggtaacacatgctgcaagatgtggcgggcctggggatttaattccagttgctcagggccctggagtaagc

SEQ ID NO: 29321 - DNA, 120 bp, Homo sapiens
cagcggtgccaacacaactgtccctctaggtccccagctgcaaggtggtcccctactcctcgaggctgcggtcgtggtggtgggtcgcaggttggagcttggacatcctgagcttcatct

SEQ ID NO: 29322 - DNA, 120 bp, Homo sapiens
tctcgtttcaggacttgtctttcttttcctggtcccagaaggagttgaagtctggtggctttcaagagccaaagcctctggcagtaaatgggccttgacatcagatcttgtctctggcgc

SEQ ID NO: 29323 - DNA, 120 bp, Homo sapiens
gcacgagtgtggccacgccataagtcctctcctccctcagctggcaccatcatgtctgctgcccaccaaacccatgataggtcgcacaacagtcagcaaatcgccctttcgggggctgat

SEQ ID NO: 29324 - DNA, 120 bp, Homo sapiens
atgcgcagcccctgaggtggctggaagcacaggctgctctcaaatgcataaccccaatattttcttcttaagcaattctcttgctctttgatgttctgcagcggcacacaatcaaattca

SEQ ID NO: 29325 - DNA, 120 bp, Homo sapiens
gagcggatggggagggagacagaaagccccagctctactcgcccattctttccaggcaaattcagttttaccatttcatccctggctggtcaggaatttagtgagctgtgggttgtcttt

SEQ ID NO: 29326 - DNA, 120 bp, Homo sapiens
cagcgccagagtcccggatatccaagggatgtggtgccagtggttgagttttatggctttaagtgcagaacgtcctagtgtgtgtggtgtgtgtgtgtgtgtgtgtgtgtgtgcgtgtgt

SEQ ID NO: 29327 - DNA, 120 bp, Homo sapiens
ggacgaggctcagaataatattcgttgaggaggggagagaagaaaaaggaaatgaagaaagagaaaggaaaaagggagatcagagggatcaaaacagaagagatgggaaggaaaagagaa

SEQ ID NO: 29328 - DNA, 120 bp, Homo sapiens
gatcgatcaaagttgaagagggagaaggcaaaaaaagggcagagtttatgagaaaggagaagaaatgagggaaaagaggacatcacccttgatggcatgcaaaggaggaggtggtgatgt

SEQ ID NO: 29329 - DNA, 120 bp, Homo sapiens
taacgctgggtgggaaacgctgctttagtcaaaatcaggttacaatcgtggatatctacagctggggttcagggggagtctctgaggtccaggtcatataaaggacttgtccaggggtga

SEQ ID NO: 29330 - DNA, 120 bp, Homo sapiens
tatcgagatccagctgtcctggatgccttctagtaggggaagccccaacttcaaaattgcttctcagactcccaatatcttttcttttctggagacaaggcgttggtagaattagtctcc

SEQ ID NO: 29331 - DNA, 120 bp, Homo sapiens
cagcgtgttgcctgctctagtccccagctcttagtctccatgacgagagaggtcacctgggctacgcatgtgatgctgccatgcatattatccccatgggaaagaaccaggagatggagc

SEQ ID NO: 29332 - DNA, 120 bp, Homo sapiens
gggcggcgtagcccctgtcccaccacgccatgcccttgaattggggaagtcacttaccgttcccagtcacctccccatctgggactgcagagatggatgcaagacctgctccacctccaa

SEQ ID NO: 29333 - DNA, 120 bp, Homo sapiens
ccccgaagcaactggatgagcagaaggaatgctgggactggtcataaagtgcccagtcacgatgataaccgtgcgtgcattggtaagggctgtgggaggcaaggtgtctccccattgcca

SEQ ID NO: 29334 - DNA, 120 bp, Homo sapiens
ctacgatcctggcatccaaatggtgacagaagaagctgtgaatggaattgttgctacaggcccctccccaacttaggacaagcagcacattccctggctttgccgagtagttttgagtta

SEQ ID NO: 29335 - DNA, 120 bp, Homo sapiens
tctcggggtggggtgtgtgtgtaggggaaatggccagcacacaaacaaggtttataatcctggtcgccatgagccacagtcccctttctcatgattttccccagccatgaagtggatcca

SEQ ID NO: 29336 - DNA, 120 bp, Homo sapiens
tcccgtggaggccagcactggtctttagtcaagtttggtaccaggatgagcatcctggaggggaatcctggggcatcccagaagcctggggacagtggtcccagaaggattcccccttcc

SEQ ID NO: 29337 - DNA, 120 bp, Homo sapiens
ccccgggctagcccatgagctaggtgaggatttaagagaggaccaatgtgggagaggacatcgagaatctggacccctcacaccctgctggtgggagtgtaaaacggtgcagccgctttg

SEQ ID NO: 29338 - DNA, 120 bp, Homo sapiens
cctcgaaaggttcaacgtggaatcaccatacgacccagccattctactcctaggcatatatccaagagaaatgaaaacatacatccaagaaaaagcgtgcacaagaatgtttatagcagc

SEQ ID NO: 29339 - DNA, 120 bp, Homo sapiens
agacgtggaagaccacatttctaatctattcttctatgcagatatgaaatatccaaaataggcaaatctatagagacagattggtggttgcttagggacagaggtggggtggggaaatag

SEQ ID NO: 29340 - DNA, 120 bp, Homo sapiens
caccgaactgtgccttttaaatgggtgtattgtatggtataagaattctatctcaattaaactgtcggaaaaagtgaagagagagaacatctgactattcctggaattgggagctatgca

SEQ ID NO: 29341 - DNA, 120 bp, Homo sapiens
tatcggtctgctctatgaccctggaaaagtcacttacttctctgggcccctgttggcccatccatgagatagggcacaaataattcctggctcagaggagcgctgcaagaaaccaggagc

SEQ ID NO: 29342 - DNA, 120 bp, Homo sapiens
aatcggaacagaggcattatttaaatgggcaagatttactgccgagatgtcactgctctgggaagctgcggcttacttgagttatgggctcagagtcctgcagaatgttaaattggaaga

SEQ ID NO: 29343 - DNA, 120 bp, Homo sapiens
ggacggccttgttctcacccaggcacatgcacacccacccctgtcctccccatcgagaaccatttatctgcggcgtggagggcactgagcgggtggaggaaacggcgggtaggaacggca

SEQ ID NO: 29344 - DNA, 120 bp, Homo sapiens
ttccgggtaccctggtggggccacctgcaatggcctttctcttcatctctaccccaggatgtaaaatatagaatcagacacaacagtctcccgaaacagaaaaccctctgcccacgcttg

SEQ ID NO: 29345 - DNA, 120 bp, Homo sapiens
tggcgtgagccttgcagccgcccctgggcatggggccagctcacacgcaggtctgcagccccagctgccatctccatgccctgatattgggggctttctgcagggggaaccacaccagca

SEQ ID NO: 29346 - DNA, 120 bp, Homo sapiens
aaacggtagagacaggatttaaaatgaggcctgtctggtgtaaagtcagtgcaaaagtgcaatccatatttcagccccttcaggccttccatcaggagctccccagtgccagaaatccca

SEQ ID NO: 29347 - DNA, 120 bp, Homo sapiens
gtccgtggaagttggggccagctccaagccacgtttatgtcaggtgccatgaggattttgtttaatctcaggatggagatgctggggagaaaaggcatatttgaggacttggactcgaag

SEQ ID NO: 29348 - DNA, 120 bp, Homo sapiens
caccgctagtgctgagctgggagtgtgcagcgtgagggacgaggggaggtgaaggctcatattcttcagaactggtgtttaaggcagcaagatgttgtaaagagagcactggcactttgg

SEQ ID NO: 29349 - DNA, 120 bp, Homo sapiens
cagcggggcagaggagagcaccggatctggagtcagacaagccagctccaaatcctggctccaccaggtaaccctgctgtcacgttcgactaggaactgagctcctctgagcctcagttt

SEQ ID NO: 29350 - DNA, 120 bp, Homo sapiens
ccacgggaaggttctcaggataagggtgatgatggaaagacttgtagaacatttactatgcactaaggatgactgttctaaacatttacctaaatcatctatctatctatctatctatct

SEQ ID NO: 29351 - DNA, 120 bp, Homo sapiens
catcggctctaaggtggtctatgtgggctgcagggcgctccacaggtgacagagatggcacactcccaggccaacagcagctagtcctggaaggtgacacctctgccctgtccatcaaca

SEQ ID NO: 29352 - DNA, 120 bp, Homo sapiens
attcgcaaagcccttgaaatttgcaaaagggccccatctccctaggacttgaggccaaaaccataacccaatgggctcctgagaaagaaacaaagaaaaatgagccagccagagagagcc

SEQ ID NO: 29353 - DNA, 120 bp, Homo sapiens
ctccgaggggctgtttgttggcctccttgggccccaggaagcagaatagtatggtgagaggggcatggatctcagaaggccctgaggtcacatccagcctccggtgcttcctaccagtgg

SEQ ID NO: 29354 - DNA, 120 bp, Homo sapiens
cctcgagccagcctcttcagcatcaatttccacatctgtaaattgggagtgttaatacctgctgtaagcgtgctggggatcaaacaagatcacacatgcaaagaacccacccagtagcta

SEQ ID NO: 29355 - DNA, 120 bp, Homo sapiens
tatcgagaaaggaagagacttggaatggctcttaaggaaaatgaagtggggattgaagaaaagcatttgcaaggagaactaggggtacctctcagggtagaaatcataaatgtataatgt

SEQ ID NO: 29356 - DNA, 120 bp, Homo sapiens
ggccgcacttctcttccctgcaggccccccagggtgggtgtagatcccagggacactcatcttgctgcctggcctgggagcagcagctggtcaggacccgtctccccttgtctgtgcttc

SEQ ID NO: 29357 - DNA, 120 bp, Homo sapiens
aagcgtctatttaattgctctcccttccattatctggcttcacatgggggctggaaatgctaatctcccatagttacaaccacgagcttagtgctcactattcagctcacttccaacatg

SEQ ID NO: 29358 - DNA, 120 bp, Homo sapiens
gctcgcccattaatagtacaacctcccttgtcatctgaggcagctgctggcatttaagcagcctgaaaaccccacctcctccacagactcttcagggactaatatgggagctaacattta

SEQ ID NO: 29359 - DNA, 120 bp, Homo sapiens
taacggctctggtagtgttagtattgtcatctcgttttatcaataagggaaccatggctcagaggggttagatcacctgtccaacatcacacagcattgagtcagcagcactaggatcaa

SEQ ID NO: 29360 - DNA, 120 bp, Homo sapiens
ccccgggaggaattattacacagggacggggctgtagcacacggctgggtctcgaatgtgaagaggagttaggtccaggcgagtggctcagaaatgagaatgtgaataggaactttgggc

SEQ ID NO: 29361 - DNA, 120 bp, Homo sapiens
taacgatgtcaccccagagcagaggggttggtgttgcaaggaacggagagacggcaaagtccgaagggaggtgacgcaggaaaacagacggtggcagtcacaggagagtgctgcacagac

SEQ ID NO: 29362 - DNA, 120 bp, Homo sapiens
caccgcagtttcacaccaagacccggagctctcaggttgctccccactgactagtgagtgcccagaggcacagagccgggccatccccgcccagtacccacagtggctctgaaggctccc

SEQ ID NO: 29363 - DNA, 120 bp, Homo sapiens
ggtcgagagttagtaacaaaaagcatggcacaagggtgggcagtgaccagtattcagttttgggtgggcaggaggtcacttaataaagagacctcgtgcttgtgtggcgtccttcatctt

SEQ ID NO: 29364 - DNA, 120 bp, Homo sapiens
tcacggggccttggatggtgcctggcgactgcccagtagatgtttgaagaatgaatgagtttattcatcataacagtgctctacaatgttcctaaatcttttcaagtctatctgcagccc

SEQ ID NO: 29365 - DNA, 120 bp, Homo sapiens
ctacgggagtccactgcagccccgggtctccttccagagaaggtcagaccacaccacatcacatcctatcctatcctccttcatgccaagaaagccctttcacccagagtccctgggaaa

SEQ ID NO: 29366 - DNA, 120 bp, Homo sapiens
aaacggcctttgctccccagcactcttgtgaccactagggaagcccagccagttcgaacccacatcctgagaagcaggagctcccagccagccaaaggccagtattgggccagatgtagc

SEQ ID NO: 29367 - DNA, 120 bp, Homo sapiens
acacgtgaggccagctagctagtgactgacctgctttgcactatcgataactaacaccttgatcgtgacaagctgggttcctaggatggctctaaggagcactgatcaatatggggaagc

SEQ ID NO: 29368 - DNA, 120 bp, Homo sapiens
tctcgcccccacacactggaccagtgccaggggtagaagctgtaatgtgaactgggggcttcccctccgcccagccagaagcagagcaggaccttctataatattttaacaatgctgcaa

SEQ ID NO: 29369 - DNA, 120 bp, Homo sapiens
tgccggctggggaagagccacgagggctgtgcaaagatccccttcagaaagccagcgcggggtgggggaggcctgtgtttccatcccattctcacttccatgtggttattcctgcatctt

SEQ ID NO: 29370 - DNA, 120 bp, Homo sapiens
tgccgtgtcaggacctcaatcctgctgctgggcataggcttcctagcccactccttcttgtctgtcacctacagaccctttgtggcgctgctgatggtgcctggttctaagtactcatcc

SEQ ID NO: 29371 - DNA, 120 bp, Homo sapiens
ggacgtcctggggatgtcatccccgcgctcagcctcataacccccagacctcatgcccatggcagatgtacgtggggcacacagtgccggtgccaggtgcagggtaaacagacagcgcgt

SEQ ID NO: 29372 - DNA, 120 bp, Homo sapiens
tcccgtggatccaaccccctgacctggtaccaaaactggcttctccacccctcctcccaacacctcagtcaggccctggccacttcctgtgtggctgcctcttccctgcgtggctcccca

SEQ ID NO: 29373 - DNA, 120 bp, Homo sapiens
caacggcccacattgcttttaggaaaagttcaatcgatctgatgaggcgcagaaaatcctttgttaccctggctggcctctgtcctccttcttatccttgtcactcccacacctccatcc

SEQ ID NO: 29374 - DNA, 120 bp, Homo sapiens
tggcgcatagtaggtattcagtacacgtttgttgcatgaatgaatgaaaacatatttaatacaacttttaaataatggtataacaatcaaggttttgtgaatcaaacagtatttgccact

SEQ ID NO: 29375 - DNA, 120 bp, Homo sapiens
tgccgtaaagatgcacataaaagggcttaggacctggtgcaacagccagtggtgaacgtgtgagcagtaggggagcagaagccagagcctgccgagaatttcagggctgcccagcaactc

SEQ ID NO: 29376 - DNA, 120 bp, Homo sapiens
gctcggagctccagtctccaaatctcaattaccccagggctatttcatcttgagattatctgggctgccttcaccacccgcctaacactccaacggggagctggaaagatagttcttatt

SEQ ID NO: 29377 - DNA, 120 bp, Homo sapiens
attcgtgacatccttcctcctagattctgctaaccagccccagctcctgggaaggatcatggctctacaggaaaaacttgagggtggaagccagaaggcttatgtccagggctccagctg

SEQ ID NO: 29378 - DNA, 120 bp, Homo sapiens
aaacgaaacaataaataaacagatagaagcatggagcctggagttcaggctgtggactggcccgccttgccaccctgtggattcaggctgaggtgtagacaaccaaactcctctgggtgt

SEQ ID NO: 29379 - DNA, 120 bp, Homo sapiens
ttacgagtataggttctggagccagatggcctgaggttgaatcttagttctgcaactggttatctcagtttcctcatctgtaagatgagaataacaatgtgaagtacctcattgggctgc

SEQ ID NO: 29380 - DNA, 120 bp, Homo sapiens
acacgtgatgtgtttaagaaaagtgccaagcatgtggtaagtgctgtagtatgttagctgttagctattttttaaaaagtattactactatactggtatttattaccccttgtagcttta

SEQ ID NO: 29381 - DNA, 120 bp, Homo sapiens
tctcggtccattaggcattcattcccttgacctgttccaaatactccttattggataccatccaggttacaaatatccagcttgtgtacaaggattgccatgagagattacaacaaatgc

SEQ ID NO: 29382 - DNA, 120 bp, Homo sapiens
tgccgtgctaaaatcctcctcctatatccagaacattattttaaccttccagtattttacaaaaaaagagaggtttgctcatctggcatgactagtttacagtgaacccaccctgatttc

SEQ ID NO: 29383 - DNA, 120 bp, Homo sapiens
ttccgcggctgttttagaagcctgcccggggttggcgttgagttcatctgtggattgactgcagcagtcccctgtttttcccccttgaaaagtaaaatgacatttgcctttctccccact

SEQ ID NO: 29384 - DNA, 120 bp, Homo sapiens
gatcgctggtgatttagcaacctcatctgcagcgtctcctcccaacaccctgggagggagggaatgatggggccagaagacacacctatgtggctcaaccacgtcgtctcctcccacctc

SEQ ID NO: 29385 - DNA, 120 bp, Homo sapiens
gctcgcagacagagaggaagggagcaaaagagagcttggctacggctggtcctttatctccaattaacattacactagctgcacttagaagcaaccctgcactctcttcttctggctaca

SEQ ID NO: 29386 - DNA, 120 bp, Homo sapiens
cttcgctgaggccataggagaagtcactgggtcccctggtctgattgggtcctcgtccataggcagcaccgccaggcaccacatgagacaagggatggaattatggactggagcgggaaa

SEQ ID NO: 29387 - DNA, 120 bp, Homo sapiens
acccgccaggaagagggggctgggctgtggaaggtgagggtgggaggtaggaggcaccctgcctggagctagcacaccagtctcctgtggtctgtccactgggatgtacagaagctccca

SEQ ID NO: 29388 - DNA, 120 bp, Homo sapiens
tgccggctaactttatttgctcagtatttatttcaccagccttgaagcgggaacaacaggcagcttgattgaaaggttgtctggttgcattgtggctcctgtaagtaattctacagcctc

SEQ ID NO: 29389 - DNA, 120 bp, Homo sapiens
ggccggtctccgtggacgggaggcaagttggatctgggccctccacaccactgtcttccctgtctgctgcccttagagggcagaggcttgccaggcagtacaggcctctgtgccttggga

SEQ ID NO: 29390 - DNA, 120 bp, Homo sapiens
gcacgacttatgttcacctgccgtccatcccttatccagagtgactccatccacaggaggtttcagaaggctggtgcagggcagagggagcttcaacttctgccctccgaccctcctgcc

SEQ ID NO: 29391 - DNA, 120 bp, Homo sapiens
ttccgctccctgtccgatccgcactgttgagcacaccagagtgaaaacatatcatccgttccgatcagctgctgctcagcccaaaagtacacccctcttgctgccttactggcagagagg

SEQ ID NO: 29392 - DNA, 120 bp, Homo sapiens
ggccgggcctcccagggcctagacacagggctggcccctgaaccccatcttccaggggttgggggaattgtccggaggctttgggagcccctgcagaggaaacaggccatggttatgcta

SEQ ID NO: 29393 - DNA, 120 bp, Homo sapiens
caccgcagccataggacaccacccacgagaagcaggacgaagtgggaatcaagagtactagttctgggcctgaaatgcttgggcagattgctcagcttctttgagcctcagtttcctcat

SEQ ID NO: 29394 - DNA, 120 bp, Homo sapiens
tgacgccagaacaggggagatactgctttcccacaccccaaggtcctcaacatgggtgttggaaagccatccacaaagactcctgcccacctctctggccttgtatgtcactgttccagc

SEQ ID NO: 29395 - DNA, 120 bp, Homo sapiens
cctcggggtcacatagcacatagatccttacaggtagctcttccctgtcgtttaataccacaatacatgtagctgttacatgtctctttcaccatagcttttaagttcctttagagcaga

SEQ ID NO: 29396 - DNA, 120 bp, Homo sapiens
ccacgcaagatcaggctggacagagggccggggtgatgtcatcttcctcttccttctcctccctctccatagctaccttccaggctcaagggccctactgtcctccaggagtcacatagc

SEQ ID NO: 29397 - DNA, 120 bp, Homo sapiens
caccgagtcttctttcttgttctgctactaacaagctttgtaacctgagggtaagattacttcttgggggcctggctgcctctattataaaaagacgagttccaaggccctatctggctc

SEQ ID NO: 29398 - DNA, 120 bp, Homo sapiens
gtccgaccggggaacctcttaggacttagaccacacacatgcaggccagctctgggcccacctcaaacccagcctccggacagaaggaccaggctgctgtcacttctgaaaggtctgcag

SEQ ID NO: 29399 - DNA, 120 bp, Homo sapiens
ttccggaaagagcacagtgacgactgcccagcttccttgggagccaagcatgaaatatgggaaaagccaggaattattattattatcattattattattattattgcatgtaaattatgc

SEQ ID NO: 29400 - DNA, 120 bp, Homo sapiens
actcgggaggagggccacactttctttttccagatcctacgaacgtcggtatgataataacaaaaaaaaattatatgcttgaaaacatgcacccagcactgccctatgttttcttctaat

SEQ ID NO: 29401 - DNA, 120 bp, Homo sapiens
gctcggggcagaggcagggaggagcatcaggaggacatgcgggggaaggggccagaaagggttggtggccctgcacatcccggaagaccagagcagccatccctgatctgctctgttttg

SEQ ID NO: 29402 - DNA, 120 bp, Homo sapiens
gcacgtagtagcctccctacaaatccagaatgaatgctaaggaagcatggtctggtagcgcactgcctcccgaagaatccctggtgcagagtggggctcagtgagtgggggtgaatgatg

SEQ ID NO: 29403 - DNA, 120 bp, Homo sapiens
ctacgaaaggattacagatgaaacctgcctgtggctattgcccaaagccacagtcacaccctcctgcaagagagtgcagtcaggcctgcggtccctcgacacggcaaggaaggaagcatt

SEQ ID NO: 29404 - DNA, 120 bp, Homo sapiens
taccgtctggagaattcatctccctctgggcctccaatctcagggaccaattgcatgcatgaaagcaggcatattgtcttttgggggaccatctggataagtcatcttcctctgggcctc

SEQ ID NO: 29405 - DNA, 120 bp, Homo sapiens
cctcgaatctcagggaccaattgcatgcatgtaagcatgcatcttgtcttttgggggactgtccggggaagtcacctctttggtcactcctcttttctcacctctccaagttactgccca

SEQ ID NO: 29406 - DNA, 120 bp, Homo sapiens
ttacggggtgggggaacccagtgatggaaaaggtggggagagatgggtccaatagagccatcttcagtctccggaaaaccttgctgggagactagaaaatccctgctggcccctcgggtc

SEQ ID NO: 29407 - DNA, 120 bp, Homo sapiens
cctcgggctctcccccagctctgctgggtcagtgcctgctcttattttaaaccttgaattgttacctcctctgaaaacccttctcagagccccatccctgcacccccattctctcctgat

SEQ ID NO: 29408 - DNA, 120 bp, Homo sapiens
ttccgtagcttttgtgattgcttggtgattgcttggcatctgtttcctgttctcttttgtaagctccagagggggcagggactatgcctgttttgttccccagccatatctgcagggcct

SEQ ID NO: 29409 - DNA, 120 bp, Homo sapiens
agacgagacaggtgagaaaggtggtttaggaggactgaggctggggctgggattcagaggataaggacggacatgcatcacagcaaaagagtgggcccagggaaagccaggggcggagct

SEQ ID NO: 29410 - DNA, 120 bp, Homo sapiens
gaacgcaaggtagggagttacacatgactccatgaaaatgcctcctatttacaaataaatgcaggaatgcgtaaagacagcaagtcctcctgagtgacacaaaggagagagggtctggca

SEQ ID NO: 29411 - DNA, 120 bp, Homo sapiens
gaccgcctgtgtcctctgatctccggtccctcaggtaacaggagaaggacaatacccaatctcacaatcgtgctgcatgtgggatgcagtgctgtgtggggcagagttttataaaccgca

SEQ ID NO: 29412 - DNA, 120 bp, Homo sapiens
aaacgtcacactgaccctgagccagttgtactccccgtcatttttacccactggtccttgtcttgcctcttggagtctcatacaataagcctgctccctctcccttctgatggcacttta

SEQ ID NO: 29413 - DNA, 120 bp, Homo sapiens
atgcgggggctcagtcctctttcgcctgcaatccactttggagatgaggattaaggaggggagggctgggactccaggctggtagtgttgcatgttgcccagcccagctaatgtgtgcag

SEQ ID NO: 29414 - DNA, 120 bp, Homo sapiens
ggccgagaaagacctgtgttatctacccctcctctgcccacgtccaacaggagtggctgactcccagggagggagcaggagaggcagggctgctatgagcagcaagatggagggtcccac

SEQ ID NO: 29415 - DNA, 120 bp, Homo sapiens
tggcgggtaaggctctagttggctctgcggccccatggcccacagctcacccttgacacacgtgccttgcctggctttgtgggcttccagggagaggttctgaggtcttccttgactttc

SEQ ID NO: 29416 - DNA, 120 bp, Homo sapiens
ggacgaaaggatgaggcccagaactaccagctcctcctccagccccctctgccctggttccctggtcccaaccaggccagacggggcttgagccgggacgagggtttggaaacatgctgg

SEQ ID NO: 29417 - DNA, 120 bp, Homo sapiens
tggcggagctgtgccttcccaggtaaataaattacacaccatacacaaacaatctgctgcctgcctctccccattcagagagcggcatgtacagagaacgagccttcctcccagaagcag

SEQ ID NO: 29418 - DNA, 120 bp, Homo sapiens
caacgctattgacacagaaggcagggccagggctagggtgagaggccacgaactgccctgtgcctctaacactccctgtctgttagcacagagatctcaggtaaatgattgcaaaaacag

SEQ ID NO: 29419 - DNA, 120 bp, Homo sapiens
aggcgaccagcagacctgagccttcggaaccagcccatctgctgggaaggaggcagtgggtgatctggattcttggcaagatgctgaggcccagaacacagatgaacccagcctggcagg

SEQ ID NO: 29420 - DNA, 120 bp, Homo sapiens
gcacggtcgggctgagctgaatcgcaggcagtgcaggttggcagaagctctgcctgggcatccacgcatgagatccaaagcacaggagggcagggcctccccttacagcggggagagctg

SEQ ID NO: 29421 - DNA, 120 bp, Homo sapiens
gagcgggacctgtgttagaacagacaacctccagcctgtgcagacttgagctctggttcttaataatagtggaagcccaatctgccagtggagactgtaagcagggaacatggaaacgta

SEQ ID NO: 29422 - DNA, 120 bp, Homo sapiens
gttcgagcactgttcgacatattaggatttgatctgggtgatgaaaggcactgagaagggtaccctagaaattggatgatccacgttcttgttctcgatttgtcctatagggttgtgtag

SEQ ID NO: 29423 - DNA, 120 bp, Homo sapiens
actcgggaaatgttgggtaaaggggcatctggctggaagagagagaacaagggatgtctcagcctccagcaaggagttaagggcagcactgagggccttgtgcccagggactctgtcccc

SEQ ID NO: 29424 - DNA, 120 bp, Homo sapiens
gcacgctgcacaccctggcactgcccctactcctgaccgagcggggatatgcaggtaaagatatctgtgtctttgtcggacccaggttagggagactgttgcccctttagcagaatggga

SEQ ID NO: 29425 - DNA, 120 bp, Homo sapiens
gaacgtggatgaaatgtctcccgggcgtgtctactccctgacaagcacacgggctgctgcactcatgccagccttccctgggtgcccaaggcggggacataagaaacagagtgtaggcct

SEQ ID NO: 29426 - DNA, 120 bp, Homo sapiens
cctcgtgcttttgggggtggctttctgaggtttccattggggggcagccagaggcagagggcaggggctgggactgcctatgcatgcatgtttgtgtgtgtttgtgtgtgcgcaggcgtg

SEQ ID NO: 29427 - DNA, 120 bp, Homo sapiens
gcacggacgtgactctgcattatccgggcccgtaatgagtcctcattgcaatgggtttgatggaataattatattctggaaaaactgcaggaaactgtgttccacttcttaaagggcagg

SEQ ID NO: 29428 - DNA, 120 bp, Homo sapiens
aggcgatacgctcacaccttttttctttttttttttttctctgttgccatggtgattagataaaattcacgccaagtctccagggaaggatggaattatttcagacagtttctcacccct

SEQ ID NO: 29429 - DNA, 120 bp, Homo sapiens
tctcggggcttggacaggaagacaggcaagagaagaaggcaccagctctttgggaagccttgggcgagcagaggaaagcgctcatctttcagtgatgctcttagtgccaagtatgcctga

SEQ ID NO: 29430 - DNA, 120 bp, Homo sapiens
tgccgagccagcaacacatcctgaaaacccacagcctcctcagtaacccagaaagccacctgggggaaaaaatggaggctcagggggtgaaaggcaaagtgcccttggtcaaggtcaagg

SEQ ID NO: 29431 - DNA, 120 bp, Homo sapiens
ggccgagattctcataggcgctaattaccaatggatgtaatttgttaaaaggattttcataaagggaattattgacctaattgttatttaacaccaccaattcacaaacctcagctctgt

SEQ ID NO: 29432 - DNA, 120 bp, Homo sapiens
gcacggaagcctcagggaactgaactcaatgcctgtgaaagctgaaagtggctcattattaaagccatagctgaacaaggaggggagagctttgtcagccaaagcctaggggtggaacga

SEQ ID NO: 29433 - DNA, 120 bp, Homo sapiens
gcccgagaatgtcttctttggtggttggttggaacttgggcctattcagcagggtgccccggggaaacaatgggtctggagtcaggatgctgaggtttgctaaaggatctgtgagattct

SEQ ID NO: 29434 - DNA, 120 bp, Homo sapiens
caccgttgggaaaccttgcaaattctagtgtcagggatgaggctgcagcacgagggccctgtggtgcggcgaggacacccaggaccactgagcaggctctcccagggcccagcacagagc

SEQ ID NO: 29435 - DNA, 120 bp, Homo sapiens
ctgcgcacaggggtgcccagtgagccagcaaaaacgagtctctaggtctgccctgtcactttgcccatggctgtcccaggggagctgtggccccaggatggtggcaggggtgggagcacg

SEQ ID NO: 29436 - DNA, 120 bp, Homo sapiens
gcacggacttggagggtagacagacctggctgagtcctgcctaagccgcttattagctctcaacttcagacaatgtaacctctctaagcctctgtttccttgaaagggaaatgaaaatac

SEQ ID NO: 29437 - DNA, 120 bp, Homo sapiens
tgacgaaggagaggaatatgggcggcatcattttagaaagaggtggtgtgaaaacagcagaggcctggggctgagtggtcccgcattcttctcctccctttgccctttgttgctgctatg

SEQ ID NO: 29438 - DNA, 120 bp, Homo sapiens
ctccgttgtcaacctgtgctataagtgttgttattctcaattttcaaatgagaaaaggagaagttaagcacccaaagtttcacaaggccacgtattagtgtctgagcagggatagcaacc

SEQ ID NO: 29439 - DNA, 120 bp, Homo sapiens
atgcgtggctaagttgccacgattcagtcatggtaatgagaatcaccttgaattggcagctgagacctgtgacttagaagggcttgcccccagtatccagactgcaggcccttagttaga

SEQ ID NO: 29440 - DNA, 120 bp, Homo sapiens
tcacgctgcatgttgccagaacctagaaaggaggccagagagattgttctagaggccctggttctagttctcatgctgttactctatgtgactctggactaggttgtcactaaggtcctc

SEQ ID NO: 29441 - DNA, 120 bp, Homo sapiens
tcccgacttttggatcagggttgagcaagcctggaatggggaggggggtagaaagcccccagagcctagagattcaaagacaccctgcccctgtgagatgcagaaactcttaattggagc

SEQ ID NO: 29442 - DNA, 120 bp, Homo sapiens
gtgcgtgcatccagcaccaatcactccatgatgtgcctttctgaggcagcacagaaggcagcccttcattaaatccgacaccagggaattaattcaactcactgctgtcactctgtctcc

SEQ ID NO: 29443 - DNA, 120 bp, Homo sapiens
gcccgaggaggggcacaggagtaagacaggagtgtggggtatgtgacggaggcagctctggtcccacccacctgaaggatgcccagtgataaatcctgggaaattctcaaatttagagtc

SEQ ID NO: 29444 - DNA, 120 bp, Homo sapiens
gtccgggcaagggaggctgtgtcagtgaactcctggagagctgagaacaacgggagacgtggactccaggaggctgaagccagggatgacctccacttttctggaaacatccttgattac

SEQ ID NO: 29445 - DNA, 120 bp, Homo sapiens
cttcgatacatacaactcacgcagcatcacttatatcccacctgtgatgcatcctgagcccagccaggctgcttttccccaagagcagcccattgttctcagctctccaggagttcactg

SEQ ID NO: 29446 - DNA, 120 bp, Homo sapiens
tttcgaaagctccccaggggactctaaatttgagagctggcagatctagaacactctcccctgcaggagctcagcctgccaaaacagaccccttctccaggacccagggggaggtgccat

SEQ ID NO: 29447 - DNA, 120 bp, Homo sapiens
gcacggtgcctccaaatgtttccatacctctgcccacccttcttacccctaacagggctcatgaaacagtggttcatccaaggctgtccctaaaattcaaaacaccaaggcgtctttctt

SEQ ID NO: 29448 - DNA, 120 bp, Homo sapiens
gggcgcaggccctggggtacaaccatgctccatcaggctttgcaaaatggctttcctaggcctgggcagtagcagcaggatctggaacattctcagtgcaagtcttttccctgtgtccca

SEQ ID NO: 29449 - DNA, 120 bp, Homo sapiens
acacgctcttagaagggattcctttgttacaaagtctcagagaagcccccagactctcacatagaatgaagctcactccacacctggcagagccccagactccacccacatgcacggccg

SEQ ID NO: 29450 - DNA, 120 bp, Homo sapiens
cttcgacaggcccttctcccattccgttgtctgcttctcagcggtctcttcaggattctggcagatcctgtgaccctaaaggcttgggtattcagacatactttgagccccaaactgctc

SEQ ID NO: 29451 - DNA, 120 bp, Homo sapiens
aaccggcttgctattccactgtgaaagtcgagcttggcagctacagagacccgtatttaagttccagaggcttctgcacacagcaagatgccaggaccacaaaagccaagagcgtaatgg

SEQ ID NO: 29452 - DNA, 120 bp, Homo sapiens
gggcgtccctgcctctctgtcccaccatgagggtctggatcctccccatctagccctcaggcctttagccctgaaggtcccatgagcctgtgaccctctgtgtaagagcagcagtgtctg

SEQ ID NO: 29453 - DNA, 120 bp, Homo sapiens
ctacgatcacacctatgttctcattcctcacagagacctcccaggccgcacagcaaagactactaatgctggggcagcttgtggacatgcgtctgtctagccctaggaaaaattgaaaac

SEQ ID NO: 29454 - DNA, 120 bp, Homo sapiens
ctacgcatagagaaactgcatgtagaaaacagatctatacagaaaaatacattatatacatggaaaatgtattttctctatacagaaaatgaaagtacctgattttgaatcctcacaact

SEQ ID NO: 29455 - DNA, 120 bp, Homo sapiens
ccacggaaacaggtacaaccgcacctgccccttcattctcatccatcccatttacaacttaatctaaaggatcagtcaccttcccagctaaaccttcctctaggcattcgacaaacattg

SEQ ID NO: 29456 - DNA, 120 bp, Homo sapiens
ttgcggacgcagttatgttacccagcacaggcctccgcacagaaccgcagcaccgtctccaccagctctggctctcattgatacacaacagagttcaaaatcacaggcttggcaggaagt

SEQ ID NO: 29457 - DNA, 120 bp, Homo sapiens
gcccgtctccttcagcatgccttactgtgtggccatcagcagaaagagtggtcctgcggtatcctcctctttgtgggaagacactatagtcccaagacagaagccaggaaaggaacagat

SEQ ID NO: 29458 - DNA, 120 bp, Homo sapiens
cctcggatctatcatctatttcccactagtgcagggtgacaatcccagccacttttctccagactcataagtagttaagagcttaggtccccagttctacatctgaacagcagagaatca

SEQ ID NO: 29459 - DNA, 120 bp, Homo sapiens
actcggcattatggaggtgaaggaccaccaagattagacactggtaatgccaccgatttgccacgggacattaggcaggtctcccagtgtcctccattccacaggacggttcagtagggg

SEQ ID NO: 29460 - DNA, 120 bp, Homo sapiens
gtacgattagcgtcttgagcaaggaaccgataaagtttggagggagttcagaaaaggagccccttggagtgggttaatctgggtgacttttaaatccattcttagcagaaatcgaggaaa

SEQ ID NO: 29461 - DNA, 120 bp, Homo sapiens
caccggcaccacctcccctctctgtgcccatctcccattcgagttggtgtagattcgtgggagccaaagaagtgaccttcatgtcagcctgaacgaaatgtaattaataaattgaatttg

SEQ ID NO: 29462 - DNA, 120 bp, Homo sapiens
ccccgtccatcagagccgacaacatgagctgaatcctaaattcccagtttaggacagtctttgtgtctcccatggggccaaaaacagagccagcgcccaacaaagccttcttgttaggat

SEQ ID NO: 29463 - DNA, 120 bp, Homo sapiens
tttcgttcactggtctttaagctggagatctgttgcccttcagaggagcccaagcctctggtcactgcacacacagccagaggtcagcacaagggttggtggcagatttctgttcccagg

SEQ ID NO: 29464 - DNA, 120 bp, Homo sapiens
acccgattcctaatgattcccagtctgctccagagaggcggcgggaagtagaggaaccggaagaccggctcacatccgggccacatctcttattagctgtgtggccttgggtaacgtgct

SEQ ID NO: 29465 - DNA, 120 bp, Homo sapiens
agacgtgccagaccaagaccaaagactttttttttttggccaaagcttcaccagaacaataacaagtcactccccagagccaacctcaagatcttattgagctcaacaaccagctcaggc

SEQ ID NO: 29466 - DNA, 120 bp, Homo sapiens
tgccgcagccccgggacgcttcttacctgggatgatggagactgtgtctttctcccaagatacaacgctaacatattcctgcactgaagaggggatgaggcacttgaagacggccacgtt

SEQ ID NO: 29467 - DNA, 120 bp, Homo sapiens
ccacgcattgacctttgatcctccacccggacggtgtagggttccctgaaaactgcagagagattggcagtggggaagagaagagtgtcacaaggatgtggtgagggtccccagaaagga

SEQ ID NO: 29468 - DNA, 120 bp, Homo sapiens
tttcggtattagcaagtcatattagattgtaaaagccttgagggcagcactaagccctgcaatgttatattcaccaaggggatgtgcaggtaataaggaaatatgctagaattcccctaa

SEQ ID NO: 29469 - DNA, 120 bp, Homo sapiens
aaccggatttcctgcattattgctggacccagggtggcaattattttggacacagtgaccataatgcacccaaacaaaacctgtgacacatgctctaacaattgagttttgggctccttc

SEQ ID NO: 29470 - DNA, 120 bp, Homo sapiens
ctacgattgtctctgagcacacagaatcctagagacatggacacagtctccaagattctccaaaacagagcattcttgctgctttcttcctgcttctgaccctggctgcagcctctacag

SEQ ID NO: 29471 - DNA, 120 bp, Homo sapiens
caccgtgcccacctcctgcctcagctggcttctagggcattgccaactgcagccgctgtatgtgtctggccctacaggcaggcagacccagccctaggaatgggaccaaggcttctgcct

SEQ ID NO: 29472 - DNA, 120 bp, Homo sapiens
cctcgcttgatccttccacccccttatctgccaagcaaagctggaacatccagagccctgctgcctcccgaccttgtccctcagcaggcacctgggcagcgtgccctcctcctctccctg

SEQ ID NO: 29473 - DNA, 120 bp, Homo sapiens
tcccggccctccctcggcctttattctttccccttctccaagctgtggctgtgatgaggagaagatgtggttgaggtggaagaaagagaagagaggagaggcactggtggctctgtggat

SEQ ID NO: 29474 - DNA, 120 bp, Homo sapiens
gagcgggctggggtgcacgccacctgtgatgtcccagggagtcagcagaggttaatggctaacggcatctaacaagcgggccctgcctcctccactggcccactgtgtgatcctggacaa

SEQ ID NO: 29475 - DNA, 120 bp, Homo sapiens
cagcgtataaaaggcccagcccaaggaaagcactttggcaatgtcacttttcatgatagctgcacctctgcgattaactggctatgtgcccttgggcaagtgacttaactctctttgttt

SEQ ID NO: 29476 - DNA, 120 bp, Homo sapiens
ccacgctgtggaggccagagctgggctccaaacccaggcctcagggctcccagcccagcacttggtgctgcattaggggttgagccgtgcaaagcacttgctcctaaaaagagtccatgg

SEQ ID NO: 29477 - DNA, 120 bp, Homo sapiens
tcccgttcccagctactttaaaccttgctcttatgagaggtgtacctaagggaaaaggaccccaagaagtcagagagggtctgtcaccacatgctggttgggaggcctttcccagaacca

SEQ ID NO: 29478 - DNA, 120 bp, Homo sapiens
aaacgtcagtgctttataatgatccgagacccaccttaccattgattgtgagacaccagtgtaccctggtgtcctagtgaagaatggctgatcttagctgtccccttggcctcccgacat

SEQ ID NO: 29479 - DNA, 120 bp, Homo sapiens
catcgtgaattttaccaaattgccttttctcatgagatatgtcatcctcagacatcccctcagcagtagaatggacaaagaaagtgtggtctagttgcatgatagaacactaggcagcag

SEQ ID NO: 29480 - DNA, 120 bp, Homo sapiens
gttcgcagtggcagagctgcatttcacatctttatgccaggatgtgtggctcagcaggcacatgacaggctagattcagaccatccccatggtgtgagcacactgtggggggattttctg

SEQ ID NO: 29481 - DNA, 120 bp, Homo sapiens
aaacgccagcagctccccaccctagtcattgagatgaccaaaaaacgctccccatttccaatccccatgcaaagcacagctcaagtgtcctccctgtgtccatcagaaacatgggtggtt

SEQ ID NO: 29482 - DNA, 120 bp, Homo sapiens
ctgcgaggtccagtggagacgcagctatccttcaacctccaaggccctgtgccatcagctccaggagaagttatgagcaacagctgactgtcggacagactctttaatcttccagccctt

SEQ ID NO: 29483 - DNA, 120 bp, Homo sapiens
caccgaaacgatgtcattcgagggtgtatcagagcaactagggatgctgcgtgtccagagcaggggcctcagatgggcaggacatctgcctatcacagtcgcagggctgtcaagtggaag

SEQ ID NO: 29484 - DNA, 120 bp, Homo sapiens
aagcggtgacatcaggaccagtgagtagaaggtccaagaccacaacagggtttgactcattctaaggatgagctctgtaatagtcagagctgtgtggccaggaatgggctgccttgcaag

SEQ ID NO: 29485 - DNA, 120 bp, Homo sapiens
caacgcaggggtcctatcctctctcataccccacgactgcgggagggtcaccctagtagcagggtgtccaccagtctcgactcggcagagttttcagagattccagtgaatactgtgacc

SEQ ID NO: 29486 - DNA, 120 bp, Homo sapiens
ccacggagggggagacagccacaaacagctgtgagaccttcatcgttcctgtatgatgaaatgacagtaattatgcctcacatttcagcagagcatttataaggctaaaacgggtttgct

SEQ ID NO: 29487 - DNA, 120 bp, Homo sapiens
ggacgggggtaattttgcccattttacagattacgaaataaaggcacatgaaccattaggcaacttgcccaggtaagacaggctgagctttgttttttaggtccatggataatgttcttt

SEQ ID NO: 29488 - DNA, 120 bp, Homo sapiens
gcacgtgcaaacacacatgcatctctttagaatcagtttaatggatatgcaactaactagcatttgaataattgttgttaatgaagatggtgaccttggaaactgttagtgcaagcatca

SEQ ID NO: 29489 - DNA, 120 bp, Homo sapiens
gaacgaatgaggggagtagcagctggagtggcatgggtggtccccaaggctaatgctgttcactctaaagcagcacaggacaaacatctgtttaacaaggcacacaggctgtggagccca

SEQ ID NO: 29490 - DNA, 120 bp, Homo sapiens
cctcgctttgtgaggagtgcttacgcaggctttatggcatgaactccagaatagttcttactctggccaaccgtggtagagatttaacaaccaaccccagccttcctttggcagatatga

SEQ ID NO: 29491 - DNA, 120 bp, Homo sapiens
tgacggatggaaggagttgacgtcccctgtcctggccactactctgtctttcttattgttataaagtctaagccaactggcttggccaaaaatgtggctgattaattcaactgcttaggg

SEQ ID NO: 29492 - DNA, 120 bp, Homo sapiens
tcccgaggccacactcccactgcagcatcccagctggctcgctgggaggggccactcagctctcctgaagtgctcactcctcaagcatcactccaggctcttgacacgcccttccctcag

SEQ ID NO: 29493 - DNA, 120 bp, Homo sapiens
ccccgccataaccaacccacatacctgaagctgccctaggggaggtggaatgagaagctggtgctatatctttcatctctctgaagccacgaccacctcccaggctaggtggtgacaaac

SEQ ID NO: 29494 - DNA, 120 bp, Homo sapiens
atgcgggccctggatttctatagctagtttgcccctctcttcaccctcttcttcctgcaccatgagaggagcaacccacatcccaagtttggtctaccttacggtgtcttggcccattgc

SEQ ID NO: 29495 - DNA, 120 bp, Homo sapiens
ctccgagacactaaaggacttccccagggctgcccaggtggtcagtgaccgagccaagctcacgcccacgcctgtctaccctgctctagcagctccgtcactgccccgcccctgcttcat

SEQ ID NO: 29496 - DNA, 120 bp, Homo sapiens
ctgcgaagcttgagaggaggaaaaatccatccagagagaatgaatcttccagatccgttgggaatgcctcagatttaggagaggcgacctcaggagtttgccctgagaccccaggctcag

SEQ ID NO: 29497 - DNA, 120 bp, Homo sapiens
tggcgaaggggctcagtgcagacctccagggtggggcaggtcctgggaggccagctgccgcgtctgcactcctggaaagtgcagtgtgggaagggtgggagctgtgggaagggaggggag

SEQ ID NO: 29498 - DNA, 120 bp, Homo sapiens
ccccgctgtgcctgactccttgggcgtggctctgatggctggagaggacaacccgcctccctggcccactactggatgtgtctctgcggtcctccgcggaaggaagctccaggcctccgc

SEQ ID NO: 29499 - DNA, 120 bp, Homo sapiens
tggcgccgcaggctgctgtgcagtacaacatagacggcggccactcaaattctccactacacaggtcctgcccttcaccccagtcatgtctcgcagtgaagccggaggctgggctcactc

SEQ ID NO: 29500 - DNA, 120 bp, Homo sapiens
aatcgccgcgcagcgctccagatgctaggtccacccacgcaaccctcctgggttgctctgctcctccccagttccagctcaactagcaacgcacaacacacacaaactcacacagtcaca

SEQ ID NO: 29501 - DNA, 120 bp, Homo sapiens
ggacggatggacagacaagtaaatgaggcagttggacagctgccttcccagccctcgcagctcagatatgctctgcacacacgttacagcaggccagtgactccgtatggagatgctctt

SEQ ID NO: 29502 - DNA, 120 bp, Homo sapiens
ggacggggctggcacctgtgttagagcctgagcagggaggaggaatggggctcagaggactcacccaggtaccacctgtccatggcaggagctgctggttgtgtccaggagtgcaggaga

SEQ ID NO: 29503 - DNA, 120 bp, Homo sapiens
cctcgtgcccacttgctggggcgggttggggcaagggatgcacgtgaaagccaggggagattttctgacctccacctggcacttgaggatgggcaagctgtcagatgcagcagagccaac

SEQ ID NO: 29504 - DNA, 120 bp, Homo sapiens
ccccgccctggccctctccctcgaggggctccacactgcagccagcccagggtgcccgaaaagggtacaggagccgggaggaatcaaggagcccactcttccccaggcccctgggctggt

SEQ ID NO: 29505 - DNA, 120 bp, Homo sapiens
ctccgctgcacctctgccctccagtccagctgggccgttggccggaggtatcctgcccaagaccccggtctgtagctaggcatcccctgagactgggaggcacagctgcagcctctcaga

SEQ ID NO: 29506 - DNA, 120 bp, Homo sapiens
tgtcgtggcacctgaggcaccggccccagcttcctgtgtcgttctggcagttggcagagagatggggagcagctgcggggctgggagccggagctgtgatgggggccgctcctgtggcct

SEQ ID NO: 29507 - DNA, 120 bp, Homo sapiens
gcccgcagtgactcacccagcccacagtgactcacccaggctgtgatgtcaggcctgcctgccacacctcagagggctcagctggagacaccagcagcctaatgagtcctctgggggctg

SEQ ID NO: 29508 - DNA, 120 bp, Homo sapiens
aggcggggcaggccactaggcagggtgtcctaccatgcagggcagcccactacactgcccaggcagtctctgttcctcggccaccaaggccttgcccacagcaaagccacagtgagcagt

SEQ ID NO: 29509 - DNA, 120 bp, Homo sapiens
ctccgtcaggttcctgtagccgccctggcacggccaccccaacgtggacactgagaagcagagttaggaggggctggctctggccccagcctctgacccgggctctggtcactctgactc

SEQ ID NO: 29510 - DNA, 120 bp, Homo sapiens
tcccgcctctctgtccctcctttgcaacactccctgtcctgaggggaggactcatgacgtcccagggagccctctcagggctgaaatagagaccaggaggtctaagaggtgctatttgtt

SEQ ID NO: 29511 - DNA, 120 bp, Homo sapiens
gatcggcgctggggcccctgagcacagccctgactccaggctctctgcacctttccctccagaccaccctggaggcagggccagacctgtcctggggtggataacagctcggctggcagg

SEQ ID NO: 29512 - DNA, 120 bp, Homo sapiens
agccggaagagggagtgcagtgttggcaatagggctcttcctgccccctgggaatagggaaagcacatgtcaatggctctgggccaccagggacaatgggcagcagttcaggttgctgct

SEQ ID NO: 29513 - DNA, 120 bp, Homo sapiens
tgacgagaacttcccaacaggtacagacgccatgcaacaatagtccagaaagacagagagaaggggagcagagagctcaacagggagctagggaagtttccgtggaggagctgacattcc

SEQ ID NO: 29514 - DNA, 120 bp, Homo sapiens
cagcggaaccttaagagcagggtaggattttgatagacagggggaaggaaagagcagaggaaaggcattccggtagagaagacagcatgagcaaaagcagtgagaggggaaacagagagt

SEQ ID NO: 29515 - DNA, 120 bp, Homo sapiens
taacgcatttcatgcagtagtaactgtccaaagtggcttccccaaatgaggtccaacaggagacggccttcatccaccagtaatgtctgcttagcctaggagggggctgtgacagcaacc

SEQ ID NO: 29516 - DNA, 120 bp, Homo sapiens
cctcggggtggcgggagcggggaggaggggggcctaaacccatttttaaaaatctcatcggtggtacgttggcactgcccctgagtcgagtggccaagtacatacacagaacttttgaag

SEQ ID NO: 29517 - DNA, 120 bp, Homo sapiens
ttccgggcgagagattctaaggagtagatggaagacaggaaggaggagtcactgggggaaggagatccaaggctgaagtgagcggagagggcacaggaacagggcatgcaccgccacctg

SEQ ID NO: 29518 - DNA, 120 bp, Homo sapiens
ctgcgcactgggccctggacctttgcctgggggcctgaggacctggctcgccagcacagggggcctgagaaatcatcactgctggagtgggggactccctggctgcttcactctcttgct

SEQ ID NO: 29519 - DNA, 120 bp, Homo sapiens
acacgttgctgcctcctctagggtgtattatgagaacgaattctgtttccgctcatttttcctctcctttctgtgctcttgtttatctccatattggcaagcagctgaggttctgggtgg

SEQ ID NO: 29520 - DNA, 120 bp, Homo sapiens
gtgcgggagaaagcaatcagaagagtttctccggcaattatcttcccatactgagtcacataatttcacttaattgctgggtaaaaactgctcagaaagagaagccactagttgatgata

SEQ ID NO: 29521 - DNA, 120 bp, Homo sapiens
ccacgcagcagtgaggtagatcagaatacccagttccattgtgaaaataactcagaaacaacctcccttgaaaatgcagaggctccaaattacagtgaaacttcattatctcatcctcat

SEQ ID NO: 29522 - DNA, 120 bp, Homo sapiens
tcccgaagcttcactcgcctcccctggcatcccacctgcttgccttcctgcaggctcagcccacggatgacaagctctgaggggtcaccgggcctgggtcttagcaggatgccctgctaa

SEQ ID NO: 29523 - DNA, 120 bp, Homo sapiens
gaacgtcccggaatggggccttttatgaggccgcagaatgcctgggccccacagtttagtctaaatggttaccctagactattattatatgcaaagggatatgatttagcctatgacgta

SEQ ID NO: 29524 - DNA, 120 bp, Homo sapiens
attcgactgtgtatatattgagtataaccaagatgtgaggtctaccagatggagttagcatcacagaattcatcacagttggttacagtgattgggctcctgctttttatttgtgaaaat

SEQ ID NO: 29525 - DNA, 120 bp, Homo sapiens
gggcgaggccctgcaggaatggggtggccagggacatgagagggcaggagggaagccactgccactgatagcctccttggattggagatgggaggtgacagtgctggcttcagggaaggt

SEQ ID NO: 29526 - DNA, 120 bp, Homo sapiens
atacgtgatgagaacaggtctttcccatgatccccaggtgatgtggtgagtttagtgcaggtggctattgctgcagcatggatctgtgttgtgtaaggttagactaagaatgaaaacagg

SEQ ID NO: 29527 - DNA, 120 bp, Homo sapiens
tcacggggacttcacatgtgtgtccccatgtccacccaattgcatcaggaccacagctaagtgattatggggaacaatgatccctgggaatctaaccaaagcccagaggcagctggagca

SEQ ID NO: 29528 - DNA, 120 bp, Homo sapiens
ctgcgccagtttagaatgccctatcaccccccgccatccctaattttggtagcctctatagatatcctgggccaaaggaatgtatttttcttttcccatccagatcctgctttttctcta

SEQ ID NO: 29529 - DNA, 120 bp, Homo sapiens
gatcgttcagaagaggccagtgggaccacccatccgattcccttggaaatagctgagtaagctttggggtttccttgtcaacatgtctgttgttgagccagcaaaggcagaagtagagga

SEQ ID NO: 29530 - DNA, 120 bp, Homo sapiens
gcacgagaatggctggactaaccagagagtcctccgaggcttccagaaatcccggtactcctcctccctctcccacctttacagatgcttatgccagagggctctggctccattcttcag

SEQ ID NO: 29531 - DNA, 120 bp, Homo sapiens
tttcgggacccaccttggctatccttcctctgctgagcttcccctagcctgccaggatgattagttgctcccgcctatgccaccatagctccctgctccccgaaaacatcgtataattgg

SEQ ID NO: 29532 - DNA, 120 bp, Homo sapiens
ggtcgtcttggtgtattttatttctatttgcaactgtactatagggctggccatatagtatttgataagtgaacaaatgagtgaatggatgaatgatgagtgaatgaatgaatgaatgaa

SEQ ID NO: 29533 - DNA, 120 bp, Homo sapiens
tgacgtgcatgcatttgccacaagaaacctggtggccacagagtccagaatgctcttgtcagcagagcaataaattctgtccccagagagaagctcacttcaggctacagacagactcag

SEQ ID NO: 29534 - DNA, 120 bp, Homo sapiens
gtgcgaacttcgtaggctcttcagccttccagaggaccttcctcatcccaggattgaccaggccagaccctgctagaaggattctagcaccaaatgcactctaccttcaagctctgcctc

SEQ ID NO: 29535 - DNA, 120 bp, Homo sapiens
tcacggaggctttcttcctcttgttggcacgtagaccaagttgtggttgagtctctctgcagcctaaagtcagctggtatctagatttgatctgggatgcgttgactttctagtttagct

SEQ ID NO: 29536 - DNA, 120 bp, Homo sapiens
tagcgtcacctgagcatgtatgtcaccctccccactaagtctagggttggcaagacagctcaggcaaagtcagaattgcaacccagctgtactgaacactggctgtgtaaccctgggcaa

SEQ ID NO: 29537 - DNA, 120 bp, Homo sapiens
gatcgggtcggtgtgaggatcagatcaggatagacacacgcagtgccccacaccatgcctggtgggtggtgagcactcagtgtgtgtgggctctcatcgtcgcagcggatgccctgcaca

SEQ ID NO: 29538 - DNA, 120 bp, Homo sapiens
ctgcgagtgggagctggtgcctcacagcagcaggtgccatgcatgtctgattcagggaatcggtgcaaactccttgttcatgacttgtttcaagcacatatgctcgtctgaccagtgcag

SEQ ID NO: 29539 - DNA, 120 bp, Homo sapiens
ttgcggctgtgggaccctggcaggttacttaactactcagtgtcctcaatgaaaagcggggcagagggcaacccttcccttctaggccaacactgcccattagaaatggaacacaagtca

SEQ ID NO: 29540 - DNA, 120 bp, Homo sapiens
ctgcgggttgccagcatatggcccactgcctagcacacagtgggtgcacactaaatgtctgttgactggaattagctgataaatgtttgctgactgaggcacagacaggtgaagtcactc

SEQ ID NO: 29541 - DNA, 120 bp, Homo sapiens
acacggtaggctcataagaagtttttgttgactgaagcttagcggtctgccccaacactgagcctggggagtttccttattaaaccacaagccacactgagcaggaagtggagggatggg

SEQ ID NO: 29542 - DNA, 120 bp, Homo sapiens
acccgccaccccaggccaccccaagccctgcacaacctgccagagccagccatacctccgttctgccatctgtcccctccacctggaagtctcttccttccctctttgaagggaaggtta

SEQ ID NO: 29543 - DNA, 120 bp, Homo sapiens
gtccgtctcctcctgctgcaatgaacactccatgtggcaggagttttgtttgctttgtctgcctcgaatgaagcctggtatgtggcaggaaatcaacagctattgaagaataaacactct

SEQ ID NO: 29544 - DNA, 120 bp, Homo sapiens
aggcgctggggtgagcagatgggagcgggatgataaagtctctgcttcagaagccaccagcccagccacgtcttctgcagatcctctgtgccaaatgcaaaccctgtcaaggcatttctt

SEQ ID NO: 29545 - DNA, 120 bp, Homo sapiens
gtgcgtggggctggcaggagcagtcaacaggaatagttagagtcagacctgggcttacaagccagctgtaccacttatggagttaccttgggaaaagcatataacctttctaagactcag

SEQ ID NO: 29546 - DNA, 120 bp, Homo sapiens
aaccgccataagtatctcgctttgtgggtggacaggaggcctctcctgggaccagtggatgggtgagcacccagtaatcacaaggaaacccttctgttaatgtatacgtatagacacacg

SEQ ID NO: 29547 - DNA, 120 bp, Homo sapiens
ctgcggactatcagagataccagcaggacctcccccaccaatatcacccaaatgttggcctgtttaaaagagtttggaaaaggaggtgagaagaacatcacctgtcttgttcttctgtcc

SEQ ID NO: 29548 - DNA, 120 bp, Homo sapiens
gatcgccacagaatgaatgtgggggcgaggtatgaacccgctatgctcttgagatagctcttcctctctgactttcgttttcttataaattataaaacttcacaactccttaggactgca

SEQ ID NO: 29549 - DNA, 120 bp, Homo sapiens
aggcgtgagccaccacgcccagcccaccatttcttacatttgtcattaattatgtgaaagaggaaagactgtacttccagtgtgtcctgggaagagtggtggaatggaaacatgtaggta

SEQ ID NO: 29550 - DNA, 120 bp, Homo sapiens
aagcgcatgagtctgataaggccagtgtcttactaatttttggatcctaccatgcctaggcaagtgtacttaacaaatgtttgcttgcattcatcctctcaacaaccctgacaggttgga

SEQ ID NO: 29551 - DNA, 120 bp, Homo sapiens
cctcgttttttagctaagaaatccgagacctggggaattcatgacttacccaaagtcacggatggcaactgacagacctggggcttgaacctcaggcttaggtcttcccattgagcactc

SEQ ID NO: 29552 - DNA, 120 bp, Homo sapiens
actcgggctgctgccagagacaggggagaatatagagctttaaatccttgaagcaaaggagctgtaattcaaggatttacaagacatttctgcatgacagaggagtgattaggatttgtc

SEQ ID NO: 29553 - DNA, 120 bp, Homo sapiens
gtccgagacagagtcctcagactgaagtgttactggtttcatttagcaatgtcagtggagtatctccttagcagaaccatgcccctgaggaattacagaatttgtttcccaaagtctcaa

SEQ ID NO: 29554 - DNA, 120 bp, Homo sapiens
cagcgtccctccccagagacccaagacaccatccacccgcttgatgaggaggcctttttgaaggtgtccccagagctgaagaacttggacctgcacggcagcacagacagtggctttggc

SEQ ID NO: 29555 - DNA, 120 bp, Homo sapiens
gaacgctgggaaacagggagccccctgtgctgggggacagctgcagtagtggcagcagcaatagcacagacagcgggatctgcctgcaggagcccagcctgagccccagcacagggccca

SEQ ID NO: 29556 - DNA, 120 bp, Homo sapiens
ggccgggctggggacacacagggtggctcggccttgggccaccacagtcccccggagcctgaggtgcctggggaagaagacccagctgctgtggcattccagggttacctgaggcagacc

SEQ ID NO: 29557 - DNA, 120 bp, Homo sapiens
aatcgcccttgacagatggccttggccccaaattcgggagatgcctggttgatgaggcaggcttgcatccaccagccctggccaagggctatttgaaacaggatcctctagaaatgactc

SEQ ID NO: 29558 - DNA, 120 bp, Homo sapiens
caacgggacagtggaaccagcccactgaggaatggtcactcctggccttgagcagctgcagtgacctgggaatatctgactggagctttgcccatgaccttgcccctctaggctgtgtgg

SEQ ID NO: 29559 - DNA, 120 bp, Homo sapiens
actcgggctgagaggctgcttttgattttagccatgcctgctcctctgcctggaccaggaggagggcccctggggcagaagttaggcacgaggcagtctgggcacttttctgcaagtcca

SEQ ID NO: 29560 - DNA, 120 bp, Homo sapiens
actcgagcatcagagcttccagcaggaggaagggctgtaggaatggaagcttcagggccttgctgctggggtcatttttaggggaaaaaggaggatatgatggtcacatggggaacctcc

SEQ ID NO: 29561 - DNA, 120 bp, Homo sapiens
ccccgaaattctagctctgactttgctgtttccagtggtatgaccttggagaagtcacttatcctcttggagcctcagtttcctcatctgcagaataatgactgacttgtctaattcgta

SEQ ID NO: 29562 - DNA, 120 bp, Homo sapiens
aatcgtgtgaaactagtcagattgctgatggcacattggctcatggaggactcggttgttgataatgaggagggtaataatgtgtgggatgtgtgatgtcactttaaggaaacagggctg

SEQ ID NO: 29563 - DNA, 120 bp, Homo sapiens
ccccgtaagctcaatccaaatgctccctcctcggggagggagccctccggctctgtgtgctctttcctcttagagtttgccaacaggatgacagcacgatctctgtgtcgagtctccctc

SEQ ID NO: 29564 - DNA, 120 bp, Homo sapiens
tcccggcctgtgaaagagctgcggacagcgccttattcatctttgtgtcctcagtgtccagcacactagaggcgctcgtaaacgttggatgaaggagaggcttttacagagacgggggtg

SEQ ID NO: 29565 - DNA, 120 bp, Homo sapiens
cagcgctgtttcctgctggcctttcaggctgcagatgaaatctactgggaaaagcgagaaacccggggtagcggagtgaccttccaccacctggcggcactgtgtctgcattctcggcca

SEQ ID NO: 29566 - DNA, 120 bp, Homo sapiens
cagcggcatccaggagccgtggtctctccccacgcatcactccgtggccagaagcactcagtcaagccagagccaccagcattatcaatacattatcatccgtgggatttggcaaggcct

SEQ ID NO: 29567 - DNA, 120 bp, Homo sapiens
ccacgacgatctaaaagcattctctcttccaacaggttcaacccaaagaactcatttgttaacggaccaccattgactcatcaccctaatggaaaactgaatcatccccaggtcttcccc

SEQ ID NO: 29568 - DNA, 120 bp, Homo sapiens
ccccgtcagtcctctctattctgcatcagcagcatctgtgaatgccagcaccccagcatcccacactgcacctgtgctctgggtctgcctgccaagtacaggctgtgaggtatcgggcca

SEQ ID NO: 29569 - DNA, 120 bp, Homo sapiens
tggcggggacccaccatggtgatggggtctggctggatctctgaattttacctggtacccacatctctcagacccattctctcctttccttagctcaggattgttgcttctgggctcaga

SEQ ID NO: 29570 - DNA, 120 bp, Homo sapiens
catcgacattgatggcccccagttgacactcacaggcctaaaatgcacctacctccctgcccatgagccccagtactcgtgaccttctgcagctcctcttccaaaggtgtatctgtccat

SEQ ID NO: 29571 - DNA, 120 bp, Homo sapiens
caccgcagccgcgccaatgctcctgcagctctccctctcttcctctctcttttccctgccagtccagcttctcagcccttccctcattcagactcttctcattccttctctccaagcttt

SEQ ID NO: 29572 - DNA, 120 bp, Homo sapiens
ctccgggtgtttcttaagaccagacagaggactctagccaagaattccaacagtccccgaattctggcaacacgatctaagcatctctcccagttacatccttcctggcaggctctgaaa

SEQ ID NO: 29573 - DNA, 120 bp, Homo sapiens
catcgcagtgggtctcagtccagaagggaccagagcgtaggaggcgaggcatgggtgagggaggctgggctgtactgttcttcctccaaatacttacaatcttgaatgcgtcactgctgt

SEQ ID NO: 29574 - DNA, 120 bp, Homo sapiens
caccggaagtggaggtcctcgaagccaaagcagctggagaaggtgcagggcagcaggatctccgtgccattgacagcgtagatgtcggtggcctttcccacagacacctccagcgacagg

SEQ ID NO: 29575 - DNA, 120 bp, Homo sapiens
ttacggggagcaggaagaggcctgtgtaaggagcaccgcctcccttaataaaaccccaccagcctggagctctggaaggggatgcttaggcagggcggagtagcttggccaggcaggtag

SEQ ID NO: 29576 - DNA, 120 bp, Homo sapiens
cctcgggaggatggctgtctactccaatcagcaccgcctgggccaccctccatcattctccatttctcccctggaaaggactgaattctggaccagggagtagcccttgttgcgctctgg

SEQ ID NO: 29577 - DNA, 120 bp, Homo sapiens
tgccgcgaaccgcgccccggctccgcccctcacctggggacgcagtgcctggaagcgctcctgccgcacccactccaggacgcgcagggcgggctcccttctgtttgcaggggaattccc

SEQ ID NO: 29578 - DNA, 120 bp, Homo sapiens
gtacgcgcctctcgccaggttttcaggactgacgggcggggcggtcgaggagggggaagagccgggtcccgtaaggtgaagaagagaaacgcggccgccgcagtcccgggccgccgtcca

SEQ ID NO: 29579 - DNA, 120 bp, Homo sapiens
tctcgttcccccgccctggaggctcctccctggtccccaggggcagagaggcagaaggacacgttcgggctggacctcgctgggccagccgagtccgacgccctctggccgccaaacggg

SEQ ID NO: 29580 - DNA, 120 bp, Homo sapiens
aaccgcaggaagacggcctggcaggggggaacacggcgggggtggggaccgacgcggggcttggagcttggcagccgcgggggcgcgcgggcgcagccagggtgggaaagtcagtggcag

SEQ ID NO: 29581 - DNA, 120 bp, Homo sapiens
ttccgggccagcccgagtgcacgcgcgcgggggcgggacggggagggcgctggacccgcggtcccctcctgagccctgcagcccggccttctcgccacactccgccccctcgtccccgag

SEQ ID NO: 29582 - DNA, 120 bp, Homo sapiens
gagcgcccccaggcttctttctcacgcttcgaacctccgccccagcactccgatgcggccccctccgctgggactaggcctctccactcacggcctccaaactcccgctccggagtcctt

SEQ ID NO: 29583 - DNA, 120 bp, Homo sapiens
ccccgccaccccgccccacacacacacccacccccagtcctgcagatgccccaaggaaaccccactcgcctcaaggtcggtggaggcgggggcggggagggtgtctggaagtggatgcct

SEQ ID NO: 29584 - DNA, 120 bp, Homo sapiens
caccggatgataatgcgtctgagcaatgcttttcaaatgacagaaaaggatctccaaggacagcaggcagccctgcttgctcagcttcttcctgtgcccttagcttctgatgacaaagtg

SEQ ID NO: 29585 - DNA, 120 bp, Homo sapiens
ccccgtggtccagtaaccccatcgtgattcggccattgtcgctaacaatagtactagctgatattaactgagcatctactatgtgccaggcacatttcatcctcacggcctgtcctatga

SEQ ID NO: 29586 - DNA, 120 bp, Homo sapiens
gatcgatgctactgcaacaccaccaaagttccactgtcaactcggccctcagcattggagtgccagggacatgcctcattacagcaccaatcaagttcaagttcaaggtccccattcctg

SEQ ID NO: 29587 - DNA, 120 bp, Homo sapiens
catcgcagactccctcttcctcaccctagcccagagctctgggtcctggtcactgagccccctttctatctttacttagccatggctctcaccaggcggcttctctcctgcacgaagtgc

SEQ ID NO: 29588 - DNA, 120 bp, Homo sapiens
caacgtttaagagaatgtgctgaagtcagacacagggagttcaaatttcagctcccgttaccatagtcatctgtttcctccctgtaacctgagtataatagaatctacctccgattgctg

SEQ ID NO: 29589 - DNA, 120 bp, Homo sapiens
tcacgaaaagcattcttatgttagccatcgttgagttcctgccatgcaccaaatcacaaacacgtcaggcagtaggcattctttagtttacccgggagggaactgaagctcagaggggtt

SEQ ID NO: 29590 - DNA, 120 bp, Homo sapiens
ttacgtaaatgacaaaggtggcttgaaacccaggtcctgccagagattccatagcattcctgctctgatgttaatatgccaagtaactcagcaaagcaggctggcagggcctctgcactg

SEQ ID NO: 29591 - DNA, 120 bp, Homo sapiens
cctcgctcagcctgtgggttccatttttttcctgaatctctacacctggcccttcctccattccatccggcccaagccaaaggtgccttctccatcagtgcgtgcctcagcaggtctcct

SEQ ID NO: 29592 - DNA, 120 bp, Homo sapiens
gcccgcttcccacctactcccacacacgttccaacagatcagtgagaccgagtgccaagaagccagacccagactcaactttctgccaccagctcccctgcacactctcctaatacccta

SEQ ID NO: 29593 - DNA, 120 bp, Homo sapiens
ccccgcatttgcagcaactccaaaaaataatccctgaagagactgcaggtcaatccactctctgccccaccgccacgtaggtccacttaggggaaatccagagaagattcacctcccttg

SEQ ID NO: 29594 - DNA, 120 bp, Homo sapiens
caacgtcccttccagtccccagcacctcccctcccaaggacacagagggaaagcgctagcaatgtcttctttcctatcccctgcccccatcctcttcacattgcggctacacttctgaac

SEQ ID NO: 29595 - DNA, 120 bp, Homo sapiens
cctcgggagcatgcagatgtgtctaacttacccaaagagaaaaagagactgagccccgtgaggctgaaggcagggcgaggtagccaggcatctctgtgcattttcagagactgagatgtt

SEQ ID NO: 29596 - DNA, 120 bp, Homo sapiens
agtcgggtgggctacgggagagggtgatttgagggggcgagaactacaagggaggaatggttggatgctaaaaaaaaatgcacggatgtacttcaaagacatatacaacattaaggaagc

SEQ ID NO: 29597 - DNA, 120 bp, Homo sapiens
ggccggcttgtatgttgctgctaaaaagagagagagagggagtgtgtaaaggagagagagagagatgggggggagagaaaagggggatggggtaaatattgtggttggtggatttcaaaa

SEQ ID NO: 29598 - DNA, 120 bp, Homo sapiens
tcccgcctgccccccacccaactccccccaggttgggattcattaaatctggggtgggcctggtcacattagtatccttcagtaaaccctcacatgtgcccatccctgcttgagaagctt

SEQ ID NO: 29599 - DNA, 120 bp, Homo sapiens
gcccgtgggagagacggcaagtttgaatgcttctcaggaaatctattactgtgctgaaattggcaaactgccaaggcagctttgaagggaacaagaatctgcagttttgttgaaagacaa

SEQ ID NO: 29600 - DNA, 120 bp, Homo sapiens
catcgagatgaatgaatgggggtgtgtgctcattggcgaagctcacctccatctctctctgtggtcagcccagaggctggtgccagatgttgaactagagaagcctcaagcttataagcc

SEQ ID NO: 29601 - DNA, 120 bp, Homo sapiens
ccacgggtcaaattcaaagaggttatccaagaagaggaggaactagtagatgctagacgcccagaatccagagcagttttgatacagcagtctttaaacaacaaaggtcagatagtgtca

SEQ ID NO: 29602 - DNA, 120 bp, Homo sapiens
cttcgtagctcctacacttcagctgctatccctggaattctcaagctcaccattctttcagaaccttgcagttccttcttccaagcgcattgcccccaacctcccagctcctgctcatca

SEQ ID NO: 29603 - DNA, 120 bp, Homo sapiens
taacgtcacactgaaacacgttaccctgtcttatctttgctttttcacaaaacctattcctacttgaacatctctcgtttatttactaatgtctattgtatgtctctttcattagaatgt

SEQ ID NO: 29604 - DNA, 120 bp, Homo sapiens
gatcgttttttaaccacagtgacatgacttgcagcactcacttagcatctgtggaatgtcatgttagcaacttacctagaacaatagaaagagacagataatttttaggaggagattgct

SEQ ID NO: 29605 - DNA, 120 bp, Homo sapiens
ccacgccctctgcaggtgcccctcccagggtacatcgaggcctacccccgatcacggtacccccagagctctccctccaggcttcctcgtcagtacagccagccagccaacctgcacccc

SEQ ID NO: 29606 - DNA, 120 bp, Homo sapiens
ccccggcgccctccacagcggcctcgcagcagagcctggcagaaaacgacccgtctgacgctcccctgaccaacatctccactgcggcccttgtgaaggccatccgggaggaggtggcca

SEQ ID NO: 29607 - DNA, 120 bp, Homo sapiens
taacgccttagccccgtgggactctggacttccaaactctgaggactcagcctttgggtttcccatgcctacgtgttaggacttgagacatagcaatgggtgagtctttctcaccctcca

SEQ ID NO: 29608 - DNA, 120 bp, Homo sapiens
gaacgactagattcttggctcatccaactgattgtgggtcaagtccctggcttggggccttatgtttgatactctctcatgtcaaatgtttgaactttgggcatgtgccctatggaagct

SEQ ID NO: 29609 - DNA, 120 bp, Homo sapiens
caccggaagcgggagaatgtagctcttatcttcggtgacctctgcatgttaactctgtttctgtgttaaaggcaatgcaggagtgtggattaagcaccagactgtattctcattcaacca

SEQ ID NO: 29610 - DNA, 120 bp, Homo sapiens
gaccgtgcgcattaaaatcagtttgtaagggagacactgactccagccaagaaacctgagccccttttttttaggttcatattcaaagtcaaatgaactggatgaaagtcagtaccaatg

SEQ ID NO: 29611 - DNA, 120 bp, Homo sapiens
cctcgtcaattaaacaaaggccaagaaagagagaagatgagagggaatggtggatttgcgttgacagattttttaaaaggtgttgccattttggaaataaaagtcccctacaagttagga

SEQ ID NO: 29612 - DNA, 120 bp, Homo sapiens
aatcggtgctaagagcttttaggatcctacaaaagaaacacagttatttgtgaaggtttttctttgccttgttttgaaggtggcctgagaatggagcttctctttttcttgggataatag

SEQ ID NO: 29613 - DNA, 120 bp, Homo sapiens
ggccgcagcctctgtttatagaagcttctgaatgtagaaaagctgttgaatttcatttaaatgtaaataaccttttaaaaagcgtatggagttagccagttccccctagttaatggacat

SEQ ID NO: 29614 - DNA, 120 bp, Homo sapiens
catcgcctcacggcactgaggcaccagccgctgcctacccatcaatgcaagcaaaacagctactgactttgtgtagcagggagattggggactctggttccctcgccaagtgtggcagcc

SEQ ID NO: 29615 - DNA, 120 bp, Homo sapiens
caacgagtttctttggtctttactgaaagaagatagtagaaatttaaaagttgagagaagactagaaatggaactgattagaaggggaggttcaaactgtcaatgcacagacttttcaaa

SEQ ID NO: 29616 - DNA, 120 bp, Homo sapiens
ggacggggtggtggcggatggagttccaggtgtggaggctcagagtccagatgacccaaagggtttaggacggagggaggatggagtttgggactaagaggctcatgaagttcagatctg

SEQ ID NO: 29617 - DNA, 120 bp, Homo sapiens
gttcgcaagcgtcaaagtcacaacaagtctgtacacaacaactctctatctgtagatatgaaattccatcatgatagcacagcgcctgcttgcccctaaatgttcctttcttctgctaat

SEQ ID NO: 29618 - DNA, 120 bp, Homo sapiens
agacgaagatgccatggagacggcgtcttcagtgaacacctccccaaagatgcccggggactcgggcctatatcatcccattgatcttagtccactcgtagatgtcctgttcgcacacta

SEQ ID NO: 29619 - DNA, 120 bp, Homo sapiens
aggcggcgcatttgaaacattccaggtgatacactttgtctttcacccgcattgtcatctcataggcacgaatccgcttgtcacaggatgcgcagagaccgtcttgcccaaaaagcctgg

SEQ ID NO: 29620 - DNA, 120 bp, Homo sapiens
gctcggggatgagccctagaaaggaggccgaactttcaggatgtcaggaagccagggaaggtcggctccagaaggagggccggctagtgcagtcttcaccagcaggcagagggaactcag

SEQ ID NO: 29621 - DNA, 120 bp, Homo sapiens
aaccgctcatcattcccctaggctgccccctggctcctcctctgtgggcaaggctctcagctgatgtgatctatcataaggagttaggcaagtattacctgtcccctcccaggggaaccc

SEQ ID NO: 29622 - DNA, 120 bp, Homo sapiens
aaacgggcattcttctgaggctcccaaactctatcatgtcaacagccactgattctacccatggggagagctggccttgaatacctccataagctgcaaagcacatctccccctgattat

SEQ ID NO: 29623 - DNA, 120 bp, Homo sapiens
attcgctggggccccagctgctgggagacagggagttccacagaaaacacgcggtgcagctaatcgtgcctctgagatatggaggaccaacagcatctctccaccatgaagggaggatct

SEQ ID NO: 29624 - DNA, 120 bp, Homo sapiens
cctcgctgcccactggcatgaatcaaaagggaaacttcttttctgacatttaaatcaagactctcccaagcctcagttgatcagtcacttatttcaggcagtattcagtgtcaaggtggg

SEQ ID NO: 29625 - DNA, 120 bp, Homo sapiens
gtgcgttaatgaacacttccgggggactggttgcaggctgacatttgagaatcaacagcaaaagtgcagtaacacaagtaccggaagcagagaagacccagcttcaatgtcccggaccag

SEQ ID NO: 29626 - DNA, 120 bp, Homo sapiens
aaacgaagcatgtcagggcacccatggtcaagggctaagccaacgctggttatgttttaacacatcttgggtgtattcccagctgtgccagtcttgctgcaggaagtaattttcactcgt

SEQ ID NO: 29627 - DNA, 120 bp, Homo sapiens
gggcgagattaatggaattgacaagaggtggtctgtgagtggagagctcattgttcgggccagggccagctaatttgcctctgaatcctgctttccatttgaagatctctgagtgttttc

SEQ ID NO: 29628 - DNA, 120 bp, Homo sapiens
caccgcctgggagcaaactcattactggggggagaacattttatcccaacgtagcagatggtggagctgcaggtaaccgccacattggaggtcacagagtggaaagacagttctggtttc

SEQ ID NO: 29629 - DNA, 120 bp, Homo sapiens
gaacgactgagaaaacagtgtgcatggaatgaatccaactgcctggggtgtgcgatccttaaggaaggagggagcttattaaagggaagtcagggggtaaattacaacccacatcaggca

SEQ ID NO: 29630 - DNA, 120 bp, Homo sapiens
ggacgaatatgtgggagacaagttcaggtcccagcatgacctctaacttgccaggtgacctgagcaaatggagtcccctgtacaggcttctgtgacttaagccataaagcaagggaactg

SEQ ID NO: 29631 - DNA, 120 bp, Homo sapiens
attcggagattctaatattagtaaaaaataagccgggacttgacacctaacttgagcattaacctctggcaccaagaattggtatcttaggctggatatcccagaagcagcccctgaggc

SEQ ID NO: 29632 - DNA, 120 bp, Homo sapiens
ctgcggggcttggtactcccaccatgtctgtcactggttaaggtccgttgggggtctagttggggcaggcatacttctggctctaacagattcaggtgctggctgttaaaagcaaaacca

SEQ ID NO: 29633 - DNA, 120 bp, Homo sapiens
caccgccaccccaccactcccagcacacaagaattagtgaaaagggatccaaggagatctggctcagcacagacatgaacagctgctcttgggttcccaacaatacaacacagcagcaga

SEQ ID NO: 29634 - DNA, 120 bp, Homo sapiens
tgtcggaaaagaactgtaacaggcaactcagccattggaaatcctcacggggacaagttatcctaggggtgaagaactcaaacacattagagggcccgttcagttactcctccaacttgc

SEQ ID NO: 29635 - DNA, 120 bp, Homo sapiens
tgacgcaaaagacaatttttctcctctgtcaagagatgtcccatcttaagctctctgctgcccattttaataacaataatataaatattaaagaatggctggaaatgcctgcactaatgc

SEQ ID NO: 29636 - DNA, 120 bp, Homo sapiens
aaacggtagagatagggagaagctggggctcttctgaccttactctatctgcacttcagttaataagattcaaatgatttgacagggatggagtcaagggtccgatgggaatcatttacc

SEQ ID NO: 29637 - DNA, 120 bp, Homo sapiens
acccgtctgccctctcactgacttggcaaactgggagtgagcaaaaccaggtctgtatttatccaagttctattttctgtgacttaaaaaaaagaaaactgaccaaaattataagcatga

SEQ ID NO: 29638 - DNA, 120 bp, Homo sapiens
tctcggaaccaccatatctgcaaggactgcaagaactttatctgggaattcaaggacaaaaagcttcttctaacagtctttaggtaaagcttccttcactgtgaaactgcctgcagtttt

SEQ ID NO: 29639 - DNA, 120 bp, Homo sapiens
gggcgctgaggtctcaacaagcttccatgggttggatggtcctggtgtatcagggaagcatgcttcacagaccctctgctccaggaaaacggagaaatactgacagctacacagttgagc

SEQ ID NO: 29640 - DNA, 120 bp, Homo sapiens
catcggaaactagaaacactagtacattctaggcaaaggctttcacacagtgctggaaaattcggatggccaataggatggcccagagcatgggagatgtcctcagctcctgtcttactt

SEQ ID NO: 29641 - DNA, 120 bp, Homo sapiens
tgtcgagttcctattttactcttccattcttccatccctttgctcattagattggaaaataatgattatgtaagagcagctaacatctatttgatccataccaagccaagtagtttatct

SEQ ID NO: 29642 - DNA, 120 bp, Homo sapiens
aatcgaggcttaggaaggttaaataacttgcccaaggccaccaagctgggaagcaatggtattgggactcaaacctccaactgcctacagggcctttgcctttctgctcttcgaagactg

SEQ ID NO: 29643 - DNA, 120 bp, Homo sapiens
ctccgtgtgtactcctcctcaatcccatcccctagcttctcccgctccccaagggaagcacttttctgaattttgggtatacaattctcttgcctttaaagatattagtattttaccaca

SEQ ID NO: 29644 - DNA, 120 bp, Homo sapiens
gaacgtaaccctgagaacatgcttctcaaacaggaagaaatgccctctgcttctcagcacaggagctgagactcagcctctgcagtctgacctctttctataggtggtgtccgagcctgg

SEQ ID NO: 29645 - DNA, 120 bp, Homo sapiens
caccgactgcagatgtccatggaccacccagcctcccttccgagggcccagtggagtgccggggagggtacctgagatagtctctccggcagagcttccggcccagtttgtagtagaggc

SEQ ID NO: 29646 - DNA, 120 bp, Homo sapiens
aggcgccgccccacctcacccagccggcagccacagaggtcgcagctcaggcagtcctcgtgccagtactggtcgatggccttcaggaagtagcggtccccaatgttctgctggcagccg

SEQ ID NO: 29647 - DNA, 120 bp, Homo sapiens
cgccgcatgtcagcagggatggggggatctgcagcacctcatccactggttccctggagagaaggccaagcatcagggacagcctcaccagagtgagaccagcaccgagggtccgagatc

SEQ ID NO: 29648 - DNA, 120 bp, Homo sapiens
gatcgttttgggccagacagggcatctcacctgactgcctttcagtgacctaagggagaagggacaggacaacacatcccttggccagactgcagagtcccaaccaaccttgggttaaga

SEQ ID NO: 29649 - DNA, 120 bp, Homo sapiens
agacgggaaagagccagaccttactccctagatgtctaagaagtaaacacagggcaccaagaggcatcaaaggcaattgcaggtggcactgtgcccctgcccatgcccagcactacctgg

SEQ ID NO: 29650 - DNA, 120 bp, Homo sapiens
ccccgctgactctatcttcacagatctccctcattttcctcctcccataacctggacacccaagggcactgcctaacctcaaaggacgcactctggactaaaagagtcgctcactgccag

SEQ ID NO: 29651 - DNA, 120 bp, Homo sapiens
tttcgctcctctgcttgaagctctcccaaggtttccttcttgcccagagtaaaaagccaaagtcctataaggccctgcatatctggctctagccatctctgtgtccccttctcttacact

SEQ ID NO: 29652 - DNA, 120 bp, Homo sapiens
ttccgggaacattcttccccagatgtgagttcttcttattagaaaggtcttccttcatcacctgagtaagacactaataacccgggccagcgcattccattttccctcactctgtgttat

SEQ ID NO: 29653 - DNA, 120 bp, Homo sapiens
caccgtccctacccttgaggagctcaccaactaggggtgaaatgtccaggacacactctctgagttcctagggctgcagctaaccttagccagaccagagcacagatgagctcgcagcca

SEQ ID NO: 29654 - DNA, 120 bp, Homo sapiens
atacgggccaggcagcagcatccgttcaacagaatcgctgagcagttctgttgtgccagacaaagcagtcacactagagatacagaagcaggtcagacaagggtccattctcagaagctc

SEQ ID NO: 29655 - DNA, 120 bp, Homo sapiens
tggcggggtcccaagctcaagggcttccgtccccatggagggtcagtgcaccattctcctggcacacagatgtgtttgccaacctggtagctttccaaaaccagtccttttggattttta

SEQ ID NO: 29656 - DNA, 120 bp, Homo sapiens
tttcgtaaatacgactggttaaagccttgctaatggtgatctgctcaatcttcagctcctctcctctcctctccccagagatcagggagtgggcctgaagattttagtcctctaattaca

SEQ ID NO: 29657 - DNA, 120 bp, Homo sapiens
agacgaccaaatgcatatttcacaatatcacacacgtgcacacacctttcccccagagagctggttgttaaacattcaccagcaccgttggccttacgtcatctcaatataccttcctgg

SEQ ID NO: 29658 - DNA, 120 bp, Homo sapiens
cttcgtagtctgaaactgaaagttaatggaacctgccagggtggacttgggtgacccttacaaagcacttatgataggaaagaccaaaaaaaaaaaaaaaaaaaaaaaacagaaaaactc

SEQ ID NO: 29659 - DNA, 120 bp, Homo sapiens
tgacgataggaagagcctgaagatcctgaaccagtgggttcacttctgcctcatgctaaggaaactgaaggttctgggtcgtgcctcaatgcccttgaagggaggcttcaagagttgaca

SEQ ID NO: 29660 - DNA, 120 bp, Homo sapiens
ggccgagtgccagggtgacattgttgagcagaaacttctctttacagaactcagatttcaactgagtgagctggcagcatccaagagcagatgtagcaaactccaggctcaggcacttca

SEQ ID NO: 29661 - DNA, 120 bp, Homo sapiens
ctccgtctcaaaaaagaaaaaaaaaacaaaaaacaaaaaacattcagctgggctcaaatccagcaccatgacaaagagcataacatttatcttaaagcagaaatggaaaggcagtgaggg

SEQ ID NO: 29662 - DNA, 120 bp, Homo sapiens
tctcggtaggttgccaaagggcggtgtcccagtatacaggaaagcttgccaccaaagccagaggtagggatataaaggtggaaactctttcctaaaggaagaagccactttaaaatgtag

SEQ ID NO: 29663 - DNA, 120 bp, Homo sapiens
ggacgttttatcagagtagttacctaagacttaagaataacaatccattttgacatgtaatcctacatgggtaccatcattcatcttttttatattacttaaatttcaggcatagtgtgt

SEQ ID NO: 29664 - DNA, 120 bp, Homo sapiens
gatcggctgtaccagcatcgaaacagggcttgttagaaactcaaattaccagccggccctcagagtctccattagtcattcagcgggcggggcccagccagcagcgctttagcaagccct

SEQ ID NO: 29665 - DNA, 120 bp, Homo sapiens
ggccgttctgactcttccccgagaaaaggcttcagcttttcaagtataacgtactatacaagagctgaaactacagacttgctgagtcacccttcctttctcttggtcacccgaaccttc

SEQ ID NO: 29666 - DNA, 120 bp, Homo sapiens
tctcggcatatttctctcgatattttctcttccatcttggaatctgcttcttcctgaatcagcacctcgagtttgccgtccttttccatctatcaacatgccctacttaagacactgtca

SEQ ID NO: 29667 - DNA, 120 bp, Homo sapiens
tgccgtgtaacagattaatccaaaatttaagggattaaaaccatgattttcttatgcacaaagattctgcctgtcagggattcagacagggcacacaggagttttgatgtttctgttcga

SEQ ID NO: 29668 - DNA, 120 bp, Homo sapiens
cctcgtgggaagactaagacttgttcattcatatgtttgttgcttggactaaaatgagtggaaccacagggattgctgatcagaagcaagaggcctttcttcatggcatggcttcctcat

SEQ ID NO: 29669 - DNA, 120 bp, Homo sapiens
ctgcgatagctctcggtttggatgaattctaaatttgttattgtgtagaaaattggaggttttctactctaggatagcttgtcctactataggatagtataggttcataattaaggattg

SEQ ID NO: 29670 - DNA, 120 bp, Homo sapiens
cagcggattatttgggacaaaggggcccttgtgggtttttggcatttccttgtgagtcattagtagatactcaaagttagaactttgggtcatttgcccatagaggagctagattgaggt

SEQ ID NO: 29671 - DNA, 120 bp, Homo sapiens
tcacggcactctccatgctgagggtctgggagcacaggatctcgcagtgcctctgcagggcatccagctggaacaggctggcagctgacagcagctggtagggaggcagagcaggtcttg

SEQ ID NO: 29672 - DNA, 120 bp, Homo sapiens
caccgaacagaaagctcccgagtgccgtgtgccctgctgcctccaccctcaggccccactaccttctgatactcctgggcctaaccatccccgctgggacacgcactgaggctgggctca

SEQ ID NO: 29673 - DNA, 120 bp, Homo sapiens
gaccgagccgctgggcaccctagcccaggccccctccccctctcccgagtctcacctccaggatgtcagtggtggggatctccatggattctgttcctccgtagtacagatactgcatca

SEQ ID NO: 29674 - DNA, 120 bp, Homo sapiens
ccacgtgaacctgaggcatgaaagtccttgccagccccacagggtactgctccagctgccgcctccaggggcctgtccctctgcaggtccccagctctgtctctccctccctctcctgct

SEQ ID NO: 29675 - DNA, 120 bp, Homo sapiens
tcccggggaagccaactccaagaccctctctcctgagtccctgcccggataacaggctctctccttggaatgttttccctacaatcctcatgagaacacggtgagcccaggagggaagtt

SEQ ID NO: 29676 - DNA, 120 bp, Homo sapiens
tctcgcatcatgcctggccccgtgtggctcattgctggtgtgatctaaattctacacagggagtagcagtgggagggtctctgaagggatgttggaggacgctgcctcctgccttcccct

SEQ ID NO: 29677 - DNA, 120 bp, Homo sapiens
aagcgcagagcccaggcccggaggcccggaggcccggagctcccctcgacaggctgagccctgccttgggctcccagatgaggtggtccaggaccgggaacgatttagttctgctgaggt

SEQ ID NO: 29678 - DNA, 120 bp, Homo sapiens
tcacgctggagcctagtgaggttcccagttggaaaaagaaaaacaattctttctggctggctgaagaaacggctccagcaaggagctggcaagtgtgtaagtaaacacagctccagccgg

SEQ ID NO: 29679 - DNA, 120 bp, Homo sapiens
agtcgggctctgtcaagaccggccctgaggctgcagaggcaccagagggtctaggagaaggcccaactgtggggagagaagtggggagacaggcctgccagccttgttcaggcatcagga

SEQ ID NO: 29680 - DNA, 120 bp, Homo sapiens
ccacggccttctgcagcccctgctggagcctgggtggtgagctcatgattgcacagtaagtgtccgtctgctccctccagatagtgtgtgccttgggcaggccatgcccaggtccctctg

SEQ ID NO: 29681 - DNA, 120 bp, Homo sapiens
atccgtggcacatggatctccctgaggccacttgaatgcatatgaggccacagaagtcagatcagaacggctcacctggagccttgctatgggagctgggcagccagcaggcagaggtgg

SEQ ID NO: 29682 - DNA, 120 bp, Homo sapiens
cttcgccgtccaacagacctccccgccaccgaggggcccggatggcagcctgtggcttcatgacttcgtgggacacccacctgctctgcccagaatggacggagctctttccctgctcca

SEQ ID NO: 29683 - DNA, 120 bp, Homo sapiens
gagcgggtgaggctgcccatgggcgtgggctctgcaccctgatttcagagggcatcactcagctgtgaatcatgccttagtgacaggcaaggagcctgctcagacagcgctgacactgat

SEQ ID NO: 29684 - DNA, 120 bp, Homo sapiens
aggcggggctcatctccaaagggggaccacacagagaaatacagccagaaacacagctcccgacactgtctcaggcaccagtgaaatgctagggtggctggctctgttaaagggaccctg

SEQ ID NO: 29685 - DNA, 120 bp, Homo sapiens
gaccggtgtccatgccatgcccagcaggatgtcagctatgctgggggaagccgcgcactctctgagctataagagagtacatggagggttctttactttctctcattatctgacgtgcat

SEQ ID NO: 29686 - DNA, 120 bp, Homo sapiens
gcccggatggtggttcggagttcatgctccaggggttcatgaggctgagctgaaaggaagtcacctgacacagcatgagcccccacaccagagctggccagagccccacgactccatgcc

SEQ ID NO: 29687 - DNA, 120 bp, Homo sapiens
agccgtggcaggagtgacagcgaggaggccagatgcacgagcctcttcctgaaccatcgcatctccccacttcctatcagccttttctttggactggccccatctcttccctggcttggg

SEQ ID NO: 29688 - DNA, 120 bp, Homo sapiens
aaacgctatcacacattttcctctggcttcccccacccaaggcatagccagtttcacagtttggtgaataagctgtattcttctggcttttaaaaaacatcacagtgctatctctgtacc

SEQ ID NO: 29689 - DNA, 120 bp, Homo sapiens
caccgactcacatccttgtgtggaaaaggtgggaggcaaccattcttgcaacagttctttgatagagaaataaatgatgtccagagatgcaacaggtttgatgcttgcactctcagtaaa

SEQ ID NO: 29690 - DNA, 120 bp, Homo sapiens
agacgaggaaacctaaggctcagatgtaaaggaacccgcttgaggtcatgctgctacatcagatccaggacttagacctcaatctgccttcaagggactcagatccagcggaactagaca

SEQ ID NO: 29691 - DNA, 120 bp, Homo sapiens
tatcgtccaattacacctccagcaacaatcaaatctatcgccagcccacccccacaatctttccccagtggatttttcttcctccattagccttgataaattacaaggccccacagcagg

SEQ ID NO: 29692 - DNA, 120 bp, Homo sapiens
gggcgattgtcacctgcaaaccctcaggtgcccaggaggtcagtacccagcactgcgctctactttgagctgcctaaacactgccctggaaattggacaaaggagaaggacccggcaaaa

SEQ ID NO: 29693 - DNA, 120 bp, Homo sapiens
agacgaaatcaggccagggagataatgggccccagatttgttttgaactgagctcactcacagcccagggccctgatgctaaaggactccggaggccggtttagcatcagaaatgctttg

SEQ ID NO: 29694 - DNA, 120 bp, Homo sapiens
ttacgtgtgagagtccatatgtgtgcatgcgcttgcatgagggccacactcccccttcacattccctaactttaggttctggttagaaattcattaacaaaggctctgtgggggaaataa

SEQ ID NO: 29695 - DNA, 120 bp, Homo sapiens
aatcggctttttattgcaacaaaagcaaccagcaggataaggcagggtggatggagagaggaggtgtggtttaaacataagttcttttgcaggttctcagcttttaattagcacacctga

SEQ ID NO: 29696 - DNA, 120 bp, Homo sapiens
acacgacacacatcaggcatgcgcaagacactgtcctcaggcccgaccccagtcccccactggtatctgccatggaggttgcaatttgtggcacgggagggagaacataaacccatctgc

SEQ ID NO: 29697 - DNA, 120 bp, Homo sapiens
agacggttctccttaacatgctgacgtctttatggagtctgacgtttggctggctttgctctgtgagatcagtggtcttccagggtaagtttcccaatgttttctctaagggaagtaaca

SEQ ID NO: 29698 - DNA, 120 bp, Homo sapiens
gggcgagagttttagggccatcaggagagtctccaaacacatctgatcttctagaagcagcttggagggaagccctgaatagggagtatagtgagcagtctcgaggccgagagttcaaag

SEQ ID NO: 29699 - DNA, 120 bp, Homo sapiens
tctcggcctcagtttcttcctctgtgagatgggctcttcaattcacaccatccctaggattcaatggcagcacatcaggcacatggcgatgtgtctctgtgctgtggacaggaagaacgg

SEQ ID NO: 29700 - DNA, 120 bp, Homo sapiens
actcgagggagacctttcaaacttgctcagaaaatctgattttctttgactttttgctgccagcaatttagctgagttgggtggttactttgtctacctttttctttcagttttctccca

SEQ ID NO: 29701 - DNA, 120 bp, Homo sapiens
aaacggagactcaaagccaatataatagtcaactacaatgctctccctgttctgggaccagtggtgggtggcatggactggccacacttcaatccctcctgggacattaaactgttcgaa

SEQ ID NO: 29702 - DNA, 120 bp, Homo sapiens
aagcgtgtcccacagctagtccagggtgaatgccacatttctgctggcccgagcctgtaatgcctgctggccctggccagacccctcctcatcccgaccccacttcctcatcctcggaac

SEQ ID NO: 29703 - DNA, 120 bp, Homo sapiens
cctcgtgactcagtcgcttcatttgaaaaaagcaaaggaaagggcaatctggtctatccttcctaaggaagatgcagggatacaaggaaaaatagaaccgaagcaacaagttccagaggc

SEQ ID NO: 29704 - DNA, 120 bp, Homo sapiens
caccggcctagctgggggagaggatgggtggagaaaggcccaccagcattggtgcaatgtcactgaagcagctaccctcaatggggtgagtaccttgcggacaccatggcagttctcagc

SEQ ID NO: 29705 - DNA, 120 bp, Homo sapiens
aaacgtggcctggctctcactctcaggcctcaggcacatttggttatcttcactcaccccagttcctttccactctcaattagcttttgaaggaaagcaaccccaaaagtgacaggagtc

SEQ ID NO: 29706 - DNA, 120 bp, Homo sapiens
tcccgtatttccactcttccccctctcccagatacgtttctcccaagagaaacttacagagaaaaaaactttagaaaccaaatgatcctgcctgggagaaagagttctggattatgtttt

SEQ ID NO: 29707 - DNA, 120 bp, Homo sapiens
ccccggcagctgcgtgtacatggttagaatgcactttgtctgctgtctcactcccagacccaactcctcgctggctgtttaacatttccaaccctcattctgcctgtactctgaaatgtg

SEQ ID NO: 29708 - DNA, 120 bp, Homo sapiens
tcacgtgggtcagacaggttggaaggaggcccactcagtatccccccttctggaaagacactggcttcagcattcaggcaatcttccttcttcccaggcttccagtttcaagagtgatga

SEQ ID NO: 29709 - DNA, 120 bp, Homo sapiens
catcggagtgagggacgcaggctttgcagctggagggagcctggtgtgaggctggctttgatgctcacttgcttggtgacttggggcaggctgcctaacctccccaagcctctgctgctt

SEQ ID NO: 29710 - DNA, 120 bp, Homo sapiens
caacgtatgcaaaattcttagcactgtacctgagctagtaactgctgaataaacagtttctgttattactgcaacaggatcattcattcctccagagcagaaaccacctttttgttctcc

SEQ ID NO: 29711 - DNA, 120 bp, Homo sapiens
tgacgggtagatgggccggttggggaagagaaacaggcaagccaccccatttccccagcctctcatactgacctgcccaagccctattcaagctatgtgactgtgaagtacatcagggtt

SEQ ID NO: 29712 - DNA, 120 bp, Homo sapiens
cctcggagcatggagctccatgtctcggccttcagcattcctggcagcctgtcatcctcagttactctcattttccctcctctttgaaacaccggccctgccaatggcaacaaacagcat

SEQ ID NO: 29713 - DNA, 120 bp, Homo sapiens
catcgtataaagaagggtgtagcatatttaattttttttttctagctgctcccctgctataaatatccaagtctgggtaggcgggcttcaagcacatgctatatgaagtcacctcggagc

SEQ ID NO: 29714 - DNA, 120 bp, Homo sapiens
atccggtgagttaacgtatttctactgaacctaaatggtagaaccttgaacctgttcactctcctcattttattcatgagggtccaggagttaagtcagccaaggtggacagagaaggta

SEQ ID NO: 29715 - DNA, 120 bp, Homo sapiens
ccacgttcctgtcttcctgcacactagtgtggcctcagcttgctgggtgctgtacggcccttaacctggttggtcgctgggcttggatgttaagtaaaaacctggtgaatgatctgcatt

SEQ ID NO: 29716 - DNA, 120 bp, Homo sapiens
tctcggttctgaaaatgaaccatgggcaccaacacctggagaaataaggagcccctgtttaagctgagaagggtgctggaggcacctgtgtgatgttgggtcagtggaggaacttctctg

SEQ ID NO: 29717 - DNA, 120 bp, Homo sapiens
attcgatgttatagattgttatccccagtttataaacgaggatactgaagcccagagaagccaagtaacatgttcaatgctgcacagtcattgaaggagctggtcttgggcttccccaca

SEQ ID NO: 29718 - DNA, 120 bp, Homo sapiens
attcggaagctcagagaacgtaagcaacatgcccagtgtcacggagcaaggtcaaaaccagactttggaccaagatctatctggccttggaagcatctcccctttggcctggtctttgct

SEQ ID NO: 29719 - DNA, 120 bp, Homo sapiens
gcacgagggcacatgcaggatgaaaacgatcgtggtcctgccagcctgaattattaaagcatttcagtcctaagtatgaggtgtgtatatgttggggtgtggagtgagttgtggagatga

SEQ ID NO: 29720 - DNA, 120 bp, Homo sapiens
ttccgttactcagtaaagtaaaagcattggatctaagctttaaggacccttctagttctttctgattggaattgtgtgacttcatcttttgtgggttagaaactcatcactctgtccagt

SEQ ID NO: 29721 - DNA, 120 bp, Homo sapiens
gaacgtgcaaaagaatgattttccgaagctgtggaggaaagaaagaactctccttctgaacatctcaggtggtttatgctggaaacagacaggaccctgtttagagaagatctctctttt

SEQ ID NO: 29722 - DNA, 120 bp, Homo sapiens
cttcgtggactgggaactccagttggaatgatgtctcctgtgattgcgtatggtgggaggtgggagatgttggaattggcgtgtcctcaggaggcttgggggtgggggagatgtgcccta

SEQ ID NO: 29723 - DNA, 120 bp, Homo sapiens
ctgcgacttcctacagtgtcatctcccacatccttccatccttccatccttccatccttccatccttccatccttccatccttccacttgggtctttgacttacggcaaaaaattccaac

SEQ ID NO: 29724 - DNA, 120 bp, Homo sapiens
acccgggaaacaaaaacatcatagttacagctctgctgccctgacagctgggccatcctcttttctacatcttgacttacaccttctagaatctcaaaatcaataggggccttagaggcc

SEQ ID NO: 29725 - DNA, 120 bp, Homo sapiens
actcgctctctcctgagtccaccgattgtatttttcaatagtccttcttaagatgggctcaggaatcttctctccttacccttctgatccttgtttgctgcagctccccatttctatcct

SEQ ID NO: 29726 - DNA, 120 bp, Homo sapiens
ccccggaaaaaccttggtcatttgcctgagtctttatttttcgagctcccatgtaattgaatgcagtgaaatatctttctatgttttaatgctagttaccagctgagctaaggcgaggcc

SEQ ID NO: 29727 - DNA, 120 bp, Homo sapiens
cagcgtaaactgatgccctctgtgataaacgcaggtggggaaataggctttgttttgatttctctgtcatctgcccatttcataaaatgcccgctgccggtgtcctgttctgctcgacag

SEQ ID NO: 29728 - DNA, 120 bp, Homo sapiens
gctcgggcttgatgtgtttatccactgacttgttgagcctaaagctagggtggcacggtctattagaacactgaaatttgtatatcccgtaaagaaatggctcacagctgaatcatatgc

SEQ ID NO: 29729 - DNA, 120 bp, Homo sapiens
gcccgtcttgaaccaggggctgaaacttgctcagctctgtagatgctcctgcctgtgactcttgtcctgatccctgcaataagaatacagtcatgacgtttcagtcaatgagggactgtg

SEQ ID NO: 29730 - DNA, 120 bp, Homo sapiens
cctcgttattaagtgacacttgactgtacttatctctaagtcgttcctactttgccaggattatggaggctatgattgtaggggagtcaaacccagcttcactgggactttccacgcagg

SEQ ID NO: 29731 - DNA, 120 bp, Homo sapiens
tctcgtctagcctcaccccattgtggtgcaaccctgtcctaatgggtcaccagactggtgaaacctgaacagttggaagccaaaggaagcacttgatgataagaagggggggtcggtgag

SEQ ID NO: 29732 - DNA, 120 bp, Homo sapiens
gaacgaagccctgtatgcattgttatgctatttggttttgataaaaaattgcattgtacaagatgttccctggctacataaaacctcactgcacagctaatggtggcagcgagccacacc

SEQ ID NO: 29733 - DNA, 120 bp, Homo sapiens
aagcgaactcttttctcttcatgtttccacttaatactaggagccaaagtgtctgtggtgcttttcccaactttgtaggtagccaagatagtctagctatgctcttgtattagctccaag

SEQ ID NO: 29734 - DNA, 120 bp, Homo sapiens
catcgcaggcaacagagctgtggccggccggtgtgaatagtgggcaatggagttaggacttggtgagttgttcttctgttgccaccaacaattgtgcagcatctgatgtccttttgtcct

SEQ ID NO: 29735 - DNA, 120 bp, Homo sapiens
atacgtgcctcccaggaatggtccctctctctcagagcaggacatcaagttctgataggcaacccacagggctttggctgccaggtaggcttggtaagtggcagttagatcaggaagttt

SEQ ID NO: 29736 - DNA, 120 bp, Homo sapiens
gtgcgatgccaagccccttctctggcactttggatggaagcccctaatccagaccacctgtatccctgcactcctcccacagcttcctcatcagactgttgcctggctacacggctgggc

SEQ ID NO: 29737 - DNA, 120 bp, Homo sapiens
gggcgcagcgccaacaggaagtccttaaaggcaggtattattcctaagtgtatggtcaggctcaagctgccattcagcaactcgtgggctttgggacccagcaccgaggggttatatgtg

SEQ ID NO: 29738 - DNA, 120 bp, Homo sapiens
ccccgccaggagtctgaagtgaaaatggtagcagtcacagacaatgacggtggcagcaggggtttaggcaatgacggtggccatgctgttgatgctgtcatctacactgctgatctttga

SEQ ID NO: 29739 - DNA, 120 bp, Homo sapiens
cctcgcccccgatctgcttctgcagctgctgatccagccactcaaagttgctgttgtcataactgaccaggcctactcaggtccagttaaagtaactcaagagcttggccaggactcaag

SEQ ID NO: 29740 - DNA, 120 bp, Homo sapiens
gtgcggaggaaggatgggaactggaaacagttggaaaactgggggcgctgagatccatggctgatctgggggaaaggaacagagctgtacattcctggcctgaacacacttgctcaggat

SEQ ID NO: 29741 - DNA, 120 bp, Homo sapiens
cttcgaaagcctgtgggctcaggcctaagaaaccaactgacgtttttagaaaggaatgcagcggactaaagaatgccaacatatcttccagtgggggtgggagaagcagagaggtaaaga

SEQ ID NO: 29742 - DNA, 120 bp, Homo sapiens
aggcggatttgaagtggcagagggtccacaaaaggcacaagtactaaccactgaatgggaggagatagaaaaatgtgtaagtcacaattaagtcacagaatcaccaagtctttaccaagt

SEQ ID NO: 29743 - DNA, 120 bp, Homo sapiens
aaacgctgtgtacttgtctttcaggaagcatacaatatgcacccaaaagaagtgtggggaaagctaatcttagaaaaagataaaggggaaatgagcagtagaccatgcaacaaaaatcaa

SEQ ID NO: 29744 - DNA, 120 bp, Homo sapiens
taacgatgacactatggaattacgtttttttaggaatatagaaccccaagaagattttgttcattaggttttattctgttgatctgatatggataagatctctgggaaatcatatatggt

SEQ ID NO: 29745 - DNA, 120 bp, Homo sapiens
gctcgcaaatcagcacaaacttgaaagccaagcatggaataaaattagccttaagataatcaggtttaagtgaagggagagttttaataaaaatggaaaatgtaaagtcatagctctggt

SEQ ID NO: 29746 - DNA, 120 bp, Homo sapiens
acacgggaagcagagagacctccaccaggatgtaaaggggattggtaaagaggaagggggtaggggggagtagaattttgatttcacttcagttgattctgtgtgtgtgtgtgtgtgtgt

SEQ ID NO: 29747 - DNA, 120 bp, Homo sapiens
gtgcgcgcgcgcgcgtgtgtgactaatgtactgttaatgtactgtttaggtcaggacatttcttaaaaggaatgctttggcctcctgcctcatcccacctccactgcaagcgtcagaccc

SEQ ID NO: 29748 - DNA, 120 bp, Homo sapiens
aagcgaaaaatgataaaaacttcatttcttggcttctgtagccctctgagaactacagataaagacagaataagataatttgatggtttgatgaagtgtctgggtgtgagataaaatcta

SEQ ID NO: 29749 - DNA, 120 bp, Homo sapiens
tttcgatcaatctggtttgaacacatagaaaacaaaagatgcaagaatagctaacaataaagttcttttctcagcaataccataagttacttcttttctgtatctttggatgaatgaggg

SEQ ID NO: 29750 - DNA, 120 bp, Homo sapiens
tgacgagtatttgcctccacgtgggtgaggacatgcttgccatacctgagcacaagcatctctgccaggtacttggcctcctgggtctgggtggttctccaggtggttgctgagggtccg

SEQ ID NO: 29751 - DNA, 120 bp, Homo sapiens
ctgcgagaagcagggctgaatatcaggggtttctgggaccttcagagagtagatgctgtggtggacctgcactctggctgtgacctacaacctgatggaaccccgggttgtacgccttga

SEQ ID NO: 29752 - DNA, 120 bp, Homo sapiens
tgacgttctggcacttggctgagaacttaccattaaggctggggaggaagcggagcttagcactgatggagccgcccaggctttggtgtagttgagccagtggtcaacaagctctgcctg

SEQ ID NO: 29753 - DNA, 120 bp, Homo sapiens
gcccgagctctgcattacttaggtttttctagccgctgtccagcagttccccctgcacggacatgttcagtgcctgcttgcagccttgaaaccccagcatcctcgcaggcctcatcattg

SEQ ID NO: 29754 - DNA, 120 bp, Homo sapiens
tcacggaaaggagcatgggattgctcctggttccagctggttctaacagtgtgcttggagcagaagtcttttctctccaccctgtatggggagaggcagcactggccagaggaatgggtg

SEQ ID NO: 29755 - DNA, 120 bp, Homo sapiens
tcacggctttcttccctgagtcccacttccttcatctgttacagaatgagaacaataataacctcttcaagcttgagctgttggatataaaatgcccagcagagtgcctggcacaaaata

SEQ ID NO: 29756 - DNA, 120 bp, Homo sapiens
atgcgcctcctgggaaacaggcctaaatactcttcatctgaggggtaaagttccgcacccagtaatgcgcgtcctgggaaacaggcctaagcagtgctggccccttcctcgtccagactg

SEQ ID NO: 29757 - DNA, 120 bp, Homo sapiens
actcgagaaatttgtattcagagcctattaagtaccaaacactgatgggtattgggtaatcatcacttttgtgctcaggaaaataaccaatgcacaaccatgtaaaaaaaaaacaaaaga

SEQ ID NO: 29758 - DNA, 120 bp, Homo sapiens
ctgcgttgctgaacggcgatttcacttcctccaaaaagaggcaagaaggaagtcccacatctgctttctttctctgtttgatcccgtgcaaccttctgacaccatctcattcagcgccaa

SEQ ID NO: 29759 - DNA, 120 bp, Homo sapiens
aaccgtgattcatatctgaggttcgcttctgtgtgggcttggaactaatccaggtgtttcctacttctgcatttcacctgtggtctaaaatggggaggaaagtctagttgcatttgctgg

SEQ ID NO: 29760 - DNA, 120 bp, Homo sapiens
tgacgttttaagagttgcgttgtcagcttcttcccctcagaggctcttctttccaccaggatcatttggtgatctgaccacaaaactaagaacatagtgatttcatgactccttttaatc

SEQ ID NO: 29761 - DNA, 120 bp, Homo sapiens
caacgaacatccactgatgtcctgaattcacagagtgtgctctaatccactgctagtgagaatgtattgtgtttctggagggggagtttgccagtttatatcctttgactgaggaattct

SEQ ID NO: 29762 - DNA, 120 bp, Homo sapiens
gaacgttttccccatgcacttgggtatgacttttatttcttattgtgaattacagtgcatgtttaccttctttgtctatttagcaattggtaccttgattgtttttatatatataaacaa

SEQ ID NO: 29763 - DNA, 120 bp, Homo sapiens
tttcgtcagtggggccatcctctcctcttccccaccagttcctttttgatctcaaactcactgaagaggctccttcttgttcttctctttccaaatatccctttcttatgaagatctttt

SEQ ID NO: 29764 - DNA, 120 bp, Homo sapiens
caccgtactcttttcatgtgctttactggcaaacacagggtttgcttgagaaacacagcctgctttgtagtcttcattactgcatttataaccatttgtgaatttacttccttaacttac

SEQ ID NO: 29765 - DNA, 120 bp, Homo sapiens
actcgcttaatgcaaatgaaagtatttattgagatgaatgtggctccttaaggttaaatgtttagggctgagaaaaataaggaacgtttttacctggggttcaactaggaagattctctg

SEQ ID NO: 29766 - DNA, 120 bp, Homo sapiens
tggcgactcctatttttgctatttaattttttcctgaatctaatccaggcccttgatttctttctctttttatatttatattcttttatactcatgctgaaatttagcctagtcatagaa

SEQ ID NO: 29767 - DNA, 120 bp, Homo sapiens
aaacgattttcttttcccttgcaggtcctttcccataacctgtgcacggtgctgaaggttcctcatgacccagttgcccttgaagagcacttcagggatgatgatgagggtccagtgtcc

SEQ ID NO: 29768 - DNA, 120 bp, Homo sapiens
tcacgttggccttctctctgttccccagattaccaagacccttcctgcctcagagccttcagacatgctgcttcctgtgctgtaaggccaactccgcccatcaaatgcagcgaatttttg

SEQ ID NO: 29769 - DNA, 120 bp, Homo sapiens
tcccgcagcagcctgtgcttttcctctatagcacttactagttgttgggttgttgctgtattgtttggtgtctgattccctctccagactctgagttctgtgacggcaagaactggttca

SEQ ID NO: 29770 - DNA, 120 bp, Homo sapiens
atgcgcaaattaatactgcaaaccaggcagaggggtacaaaactgaataagatatggcctttgatttcaaagaattcatgatttcatgtgagttgtaataaaatatagaactgggactca

SEQ ID NO: 29771 - DNA, 120 bp, Homo sapiens
gcgaagaccctgatttttgcagggctctctttgagtgtctttctctgatctctcatttaagctttccacctctgttggtaccacaccaacagctgttagagttcactaattttgttctgt

SEQ ID NO: 29772 - DNA, 120 bp, Homo sapiens
gtccgtgtgttagtgtgttgttctcatggagcttctggcctcctcttaattctcagccactcttgcctggaataaagtttctgcaacatgcagctggggacaaagagaaattctggcagc

SEQ ID NO: 29773 - DNA, 120 bp, Homo sapiens
aatcgagttattggaaagttcttgaggctgagccataatctgtcctgttgtaactcttacccactttggatctgtaacaccctggagtacaccttagtcgtgtctgtattcccagcaact

SEQ ID NO: 29774 - DNA, 120 bp, Homo sapiens
actcgtacctggcacacagtaagtacccagggaaatttttttgaatgaatgaatggatccaatgggaccacatggaacaacagtccctcttacatttgatataatacttttcatatattt

SEQ ID NO: 29775 - DNA, 120 bp, Homo sapiens
ccacggtttgattcctggctctggtacttttagctgtgtaacttgagagaatggccaactttatacagttgttgtgaggatgaaatgaaatgatgcatgcagagtgttttagagtaatgc

SEQ ID NO: 29776 - DNA, 120 bp, Homo sapiens
ctccgagtgtgttgctttctgttcctttatctcatttgcagacggggaagatatataatgtgtggaatgtaaaaataagcattcagaaaaaagatgttgacaggctagaatgatgatttt

SEQ ID NO: 29777 - DNA, 120 bp, Homo sapiens
tatcgcatttaatacactaataaacctttgatggtaggtgtagtttctattccttttttgataaatgaggaagccgatacacagaaaaagagtgaggcactgaagtctttagtcaggagt

SEQ ID NO: 29778 - DNA, 120 bp, Homo sapiens
ttgcgaaccacagaaaccaccttgtattagctaaagcaataaaacaatttgttgaaagtttcttaaatagtttgccagttccacagaaaggcaggtgaccaggccttgaacacaggcagg

SEQ ID NO: 29779 - DNA, 120 bp, Homo sapiens
tgccgctggcgcccatgttggtaccaggcatcagcagtgccatcgctcctgctgtcactcaacactgcatattactgccaccggcaagatgaattctctactggctctgcttctttgtgc

SEQ ID NO: 29780 - DNA, 120 bp, Homo sapiens
tagcgggaaatgagccctaccttccatcaagtcttctactatggcagttcccctagacacatgaaggagttcagaggctgggcagcctaagcacctggaaatgtccattccccctccata

SEQ ID NO: 29781 - DNA, 120 bp, Homo sapiens
gcacgtagaaggcacataaaaaatacacatcaactgagtgaataaactctgcactggtcagaccacatctgtagtgtcgtgttctgttgtgtacatcaaactccaagagacatctgagga

SEQ ID NO: 29782 - DNA, 120 bp, Homo sapiens
cgtgaaatctgtaccggacttctaggatgctgttcattacaccacccacctcctctcgggtcctgattacatttttatgtcaaacatttaatttctcagtgccccatcacccagctagtg

SEQ ID NO: 29783 - DNA, 120 bp, Homo sapiens
tgccgagtctttggccctgggtagtggatacatctgtggtggacactaaattccaagcagggctacactcagcctccttttcctgttcccaccacacacaggcagtccatggtctcttag

SEQ ID NO: 29784 - DNA, 120 bp, Homo sapiens
agacgaaagctctgtctagcaaaccccattctgttcagtccccaagacccgcagcccactgccccctcctcctcctcatcggaagtcctcgtttcctgtcccatttcaccctgcctctcc

SEQ ID NO: 29785 - DNA, 120 bp, Homo sapiens
ctccgacaacactttctgcttggaccagcagcccatgggggtttcagggagcagtctccctgccccactttctgcattttccctctgctctcaggttcccttttcttcctgatgcatggg

SEQ ID NO: 29786 - DNA, 120 bp, Homo sapiens
attcgaattatctggtaaaagccagagtcatgtaaagcactagtgttcacttgaaaggcattcaaagaaggcattttctaatgcctaaaaccagtatgtcgaagatgatgaaacactacc

SEQ ID NO: 29787 - DNA, 120 bp, Homo sapiens
taacgattttcatttactcaacaaatatttattgagtatctactatgtgccaggcatgctgtagctaatgaactcaggaatctctttatcccaggaggaaatagggatgacaaataagaa

SEQ ID NO: 29788 - DNA, 120 bp, Homo sapiens
agtcgtgtttaggtttttattttaaaatacagtcaggccatgtaggaaaacaccgcacctttttcctatgtggtatctctgcaaggtctccatcctctctatggattatatataataatc

SEQ ID NO: 29789 - DNA, 120 bp, Homo sapiens
tcacgttagagacattctaagttaattaggttgaaagagggaaaaaatttacaacaataagtctacaactattgacacagcaaccgcattccagaattgtgtggttatctgttggggaat

SEQ ID NO: 29790 - DNA, 120 bp, Homo sapiens
aaacgtcaacctccacatctttaataaagtatttttctctttggctggtcacatttctcagagaacagttttacaatctcttgcctggaaggcaggctgccagagtcctggaagctaaag

SEQ ID NO: 29791 - DNA, 120 bp, Homo sapiens
ttccgggatttgagaccagaagggaccagaaggctgggaagagagagaaagagatcaaggaagtgcctgagaacaaggcaagagagaacccagggaagctatgaaaccagccggcaaggg

SEQ ID NO: 29792 - DNA, 120 bp, Homo sapiens
agacgagagagaaggatcgaaagataaaaagaggcgggagggaggcagaagcaagggtcggctgttgctctccctcgcccgggcgcctgcagcagtctgggtgggcgggggcgccatgac

SEQ ID NO: 29793 - DNA, 120 bp, Homo sapiens
catcgtaccttataaggaaggcgccggtcctccatttcagccttttctctgccaggacgcggccgtggcatttctggtcttgtaaacatcagactctttggggccttaaaaaaataaaga

SEQ ID NO: 29794 - DNA, 120 bp, Homo sapiens
agacgcccctccttcctttaccgggggtgagccggccggggaaagcggcggacagggaaatcaactaatgaagactccgggaaacttttctctctttttctctctctggctccgctcccc

SEQ ID NO: 29795 - DNA, 120 bp, Homo sapiens
ccccgccagctggggacccttccctccctccttcctccccctcccttcccccgcctctctttttctctatctcccagtcttctgtacctctcgccgccgtctgtaactctgggctccctc

SEQ ID NO: 29796 - DNA, 120 bp, Homo sapiens
atccgttccattccactgcgaagcggagcaggacctaagaattggagagaaaattaaacgtcataaagaaaagttcatttacagcttaaatgtctgaatgttacggtttccttcagaaaa

SEQ ID NO: 29797 - DNA, 120 bp, Homo sapiens
aggcggtacactcggtaaggagaagtgaggcagcaggggtggggagggctggtgcggtaggaggcttggttttatttctttctcagatccagaggcggaaagaaagggggagaagcagga

SEQ ID NO: 29798 - DNA, 120 bp, Homo sapiens
gtgcgacagaagcgttttacccgggcagctagcaaagaaagatgctgcagtcggtggaactggaagcaaagcgcataagggcccagtgcgggggcagcgatccccgagcgctgagctggc

SEQ ID NO: 29799 - DNA, 120 bp, Homo sapiens
ctgcgctgaggcctggcgtgcggagaaacaaatatattggatatttgctggtctaggggaggggtgaggcaagaatggagggagacagggagaccgggagcgtaaggcagcgccgcagcc

SEQ ID NO: 29800 - DNA, 120 bp, Homo sapiens
agccggcccggcgagaccgaaagagccccgtatccgccgcgacagcctttggcggtgggcagtgggcaggctcagctcgaaggctcagggaggaaggatcccgaactgagatccttgatc

SEQ ID NO: 29801 - DNA, 120 bp, Homo sapiens
ctgcggaggacttacctttttcctggacctcacagctcgttttcgcctcctctgggctcatggagacattttaaggcctaatcattgctttttaaattgaaattctaatggcaagggaag

SEQ ID NO: 29802 - DNA, 120 bp, Homo sapiens
ctccgggatattagggacctgagggtctaagtcccgggtgggagccgccaggagcaggggtgttggtctgtggaactcccaggcctcagtgcctggtgctctcttaccctgtgttttcat

SEQ ID NO: 29803 - DNA, 120 bp, Homo sapiens
agacgtttaatctgggcaaagtgccacttatgttacaaaatgcctgggctcaacgggctggaggggtagccgggaagccccagggagggaacagcaggctctctttggcagtatctagag

SEQ ID NO: 29804 - DNA, 120 bp, Homo sapiens
gttcggtggatagtattttaaacagttgaaatggactggggaggccctttcttatgtcccctcagtctgggaaggggagctccagttagtgaggtggtttatgagctggacgcttccccc

SEQ ID NO: 29805 - DNA, 120 bp, Homo sapiens
agacggatctgattgcctggggtgctgggctgggcgcaccccactgctgctgggggtcaccccaagagccccccacccatccaaggaaaggaataaacttaaccgctggaggggcatgag

SEQ ID NO: 29806 - DNA, 120 bp, Homo sapiens
cctcgacagcagctaacagaaacgccaggagcagcaggaggaggaggcagcgacaaggtaagagaagcggtttcttgttcttctcttggcggcggagtggggatgagcggtgtccccagg

SEQ ID NO: 29807 - DNA, 120 bp, Homo sapiens
gtccggcgtgcagcggacagagcctggaggaaggtgtttagggcatccgtgcttgccgagaacccaggctttcctagtggccgctggcagcggagggcagcgactgggagctccctctcc

SEQ ID NO: 29808 - DNA, 120 bp, Homo sapiens
tcccgggcccattgccatgggggttccacagttaaagggataaattgatggtttttggcttctttatcttttcgggcactttgggtctcctcgaagtcgacactctggtctaggtgttgc

SEQ ID NO: 29809 - DNA, 120 bp, Homo sapiens
ggtcgtctgttggtgggggaggaggagtacagagggttgaagcttgaagcttaggttttcctgcttttcgctggtttggatgtgagcctcgtccagcctcttgttccctgtgctccctgg

SEQ ID NO: 29810 - DNA, 120 bp, Homo sapiens
taacgttttgccaggcaagtggcctgattggaagtggctccagagcacagggctatgattcagctacccacattcgctgagaagcctaaaccgagctgagagggagaggatcagagggag

SEQ ID NO: 29811 - DNA, 120 bp, Homo sapiens
ctgcggtgctgggggtggggcaggtatttggccgccagtggtcccatttcaccagatttttcctgagcaatttgcttagaccagaaactaatgaaggcagtcagaccccttacccaccca

SEQ ID NO: 29812 - DNA, 120 bp, Homo sapiens
gggcggaaagggggacggggctgaatttcttccttccccaacccccttcccttctcctccagatagatgcaaagctgaatctcccgccctgctcgctcagctgatctgtggcttaggtag

SEQ ID NO: 29813 - DNA, 120 bp, Homo sapiens
actcggcaacaagaaactgcctgagttacatcagtcggttttcgtcgagggccccaacccacctctcccactcctaccctccccagtgggactgccccactgccccctcccagatagggc

SEQ ID NO: 29814 - DNA, 120 bp, Homo sapiens
tgccgtcctctcaacctatcccaatccctgtgattaagggagaggagtctttcctgcagctattgtctcctgggcccagctgatggagacagacaaagagggtccagccaattccaagga

SEQ ID NO: 29815 - DNA, 120 bp, Homo sapiens
tggcgggccagctcagttgggcagcagggtggggcagaattattagcagaaagaggagcacagaaagagaagacggtctctggaatggttagcctctcccacctaccacctccagtcgac

SEQ ID NO: 29816 - DNA, 120 bp, Homo sapiens
ggacgtaaaaggaatgaagtattgatacatgctacaacatgtgtaaactttggaagcattatgctgtgtgaaaagccagtcacataggccacatgtagtatgattccaattacatgaaat

SEQ ID NO: 29817 - DNA, 120 bp, Homo sapiens
ctacggaaaggaaattgatggtactggggttgggatggggatgggggaaatgggagtaagtggtaaaagcacaagtttcttttggggtaacgaaaatgttctaaaattgattgtggtggc

SEQ ID NO: 29818 - DNA, 120 bp, Homo sapiens
gtccgttgctttctatctctcccaaagttttggggaccaccgaccctgctaccagatgatagggataatggaagaagaaagattagagctaggcccccactccccaagcaagtgaggaga

SEQ ID NO: 29819 - DNA, 120 bp, Homo sapiens
ccacgcccggccttgcctctcgtctttaaacaataaggttcaaagttccgtgggagcacaaaggagacatgatgaggacaacgggagtagggcctgagtttttttttgtttttttttttt

SEQ ID NO: 29820 - DNA, 120 bp, Homo sapiens
acccgctttaataagagacttgtgctctgctaatcgggggaggtgtttgtcagcagagatggcctccgttcccctccccctccctcccctcccccagccctcaaccctggaccccagccc

SEQ ID NO: 29821 - DNA, 120 bp, Homo sapiens
gcccgagtttctctctcctccccacaccaagaggcccctgccctctcagcccaacctcctgcccttaggccttccagccatggttgggagtgtgtgtgtttgggggggttagggtggggg

SEQ ID NO: 29822 - DNA, 120 bp, Homo sapiens
cagcgggagatgggcagggtagaccatggggcagagagagcaagggaaaggcaggcaggctgaaggtcaggagggaggcttcgatggggctgtggagcagtaacccctgtccctccgctg

SEQ ID NO: 29823 - DNA, 120 bp, Homo sapiens
aggcgccacctctgcaagccccaggacccggcctgagactgtcatggggagtaggaagcccagccacagctgctggcagttcatggtcccaccagacgagagctccagaggctgtccgtg

SEQ ID NO: 29824 - DNA, 120 bp, Homo sapiens
gagcggaagccaaagagagttcccaatcgcttccctcagagtcctctgctggagatggaaaaacttcatactgccctagggtgagcatccaggcaggacgagaaccagaatctctggaga

SEQ ID NO: 29825 - DNA, 120 bp, Homo sapiens
ctccgcccctacctttgagtctccctagaataagctgagaggtaggaaacagctgaggtagcttgggtttcaggtgaaggagtcaagcgtgaagtctcagtttctttgtacccaagacca

SEQ ID NO: 29826 - DNA, 120 bp, Homo sapiens
ttccgtacaccacactgacacttagagctttgttctttaagtaactaggacccctgaaggctccaccatcagttacacatcatacaacattttcatattgttcaaaagcacagtgaagta

SEQ ID NO: 29827 - DNA, 120 bp, Homo sapiens
gtccgtctggcccatccaccacccaactggtaaccattgggtgactaagtctcaagtgaccagtgacaggcaaggaaggacagaaagcctctgagcgatgagtgacagggcccatcacca

SEQ ID NO: 29828 - DNA, 120 bp, Homo sapiens
ctgcggggctcttcctcctctctttctaccccctttccagtctttctccttttgagaacagaacatgcgccaattgaaaattaattacgatttttaaaattaatgttttgtgtttttttc

SEQ ID NO: 29829 - DNA, 120 bp, Homo sapiens
ctccgcctgcctggcctcagcccctagagactgtctgggagggaggagaaagctttgggagccagagaggataatggaggagaggtgaggggaggggtggggaagagacagacaaggagg

SEQ ID NO: 29830 - DNA, 120 bp, Homo sapiens
ctccggcctcagaaggcctgggggtggaactatattctagcaacttaggagccaggagagagagaataaatcaaaagtaaaagctgccaaatagataacttcatttaaattttaacaaca

SEQ ID NO: 29831 - DNA, 120 bp, Homo sapiens
attcgacaggtggagggcatggaagaaagaaaaatcatgagcaaaggggctcaaacttgagcaaagaaaggcatggatgtgggaatgggcgtgagtagggaacagaaagttgagaggttc

SEQ ID NO: 29832 - DNA, 120 bp, Homo sapiens
aatcgcagaaagccttaaaaacaaggtcaagaactttggactttactgggtgagtaaaacataactactatggatattttttgcccagctgtgacaagaataaaaaccaaagaaaaaaaa

SEQ ID NO: 29833 - DNA, 120 bp, Homo sapiens
gttcgttctcaaacaaaaactcacgcatgggaatgtagatagcattttcaggcaacgacaaatagaccagtcaggctgagccagagacaagggctggaatgttcagaccttgaataccag

SEQ ID NO: 29834 - DNA, 120 bp, Homo sapiens
atgcgaagtattgtcttagggctttgaataaatgaatgaatcctttatacaaagcagtgtttcagagtatttaatctagcataataaaagggtgacttggaaaaaaaaaaaaaacaccag

SEQ ID NO: 29835 - DNA, 120 bp, Homo sapiens
gaacgtaagagactaagggcagatacattatcaaagaatcaacatttggtaattcactaactagggaaggagtaagaggataagaaatcaaagataattcagtacactttttattttagt

SEQ ID NO: 29836 - DNA, 120 bp, Homo sapiens
tatcggaaaaaataaaaacaaaaaagagaggaagagataatcatatgaatatgataagcattatcaataaatagcgaaaggtcaggcacagtggctcatggctgtaatcccagcactttg

SEQ ID NO: 29837 - DNA, 120 bp, Homo sapiens
actcgccgggccctattccctggagattctgagattgaccagctcttccggatctttcggactctggggaccccagatgaggtggtgtggccaggagttacttctatgcctgattacaag

SEQ ID NO: 29838 - DNA, 120 bp, Homo sapiens
gcccggcaagattttagtaaagttgtacctcccctggatgaagatggacggagcttgttatcggtgagagtgggcacctgttttccctcattcatttctcccagggaagggcttttccag

SEQ ID NO: 29839 - DNA, 120 bp, Homo sapiens
ctacgaccctaacaagcggatttcggccaaggcagccctggctcaccctttcttccaggatgtgaccaagccagtaccccatcttcgactctgatagccttcttgaagcccccagcccta

SEQ ID NO: 29840 - DNA, 120 bp, Homo sapiens
acacgttagatttgccgtaccaatctctgaatgccccataattattatttccagtgtttgggatgaccaggatcccaagcctcctgctgccacaatgtttataaaggccaaatgatagcg

SEQ ID NO: 29841 - DNA, 120 bp, Homo sapiens
attcggttgaaaaaatagatccaatcagtttataccctagttagtgttttgcctcacctaataggctgggagactgaagactcagcccgggtggggctgcagaaaaatgattggccccag

SEQ ID NO: 29842 - DNA, 120 bp, Homo sapiens
agacgaaagctggatgtctctgtcaagtctaattcctccttcatgtcaagagagcgtgagctgctggggaaggtaagagggcaggatggcagggcagaggtgagggctggaagctgctgg

SEQ ID NO: 29843 - DNA, 120 bp, Homo sapiens
ccacgtgatcctttagaggtgactcacctctgcaatggtttgggacgagtatgtgatgaaggaacatggtctttggagatttcaaaacagcatcatcagaatgagatcctgtctcaaaaa

SEQ ID NO: 29844 - DNA, 120 bp, Homo sapiens
gcccggtggtgagtgtctgcgtgggtgggggatggtctggatatttcagtgggagaaattccaatcacaggaaaggaaaaaaagatacaatctgagcagagaaccattgattctatcaag

SEQ ID NO: 29845 - DNA, 120 bp, Homo sapiens
gatcgtgtctcatttataaatatgatgacacaagagtcatctttctacatgagccctcttttcacaggtatgacctgatggacaacaaggacaagggcagctcctaggagctggcgagtc

SEQ ID NO: 29846 - DNA, 120 bp, Homo sapiens
cttcgtctcgctccatcaccgcctcaatgtgatgagcctaaagctagggtccaagggcagagcctgtgcccttcagccctttcacctaacaggcccatattcgggcctttgcctgaccaa

SEQ ID NO: 29847 - DNA, 120 bp, Homo sapiens
ctgcgggtggcccagcagcccctgttggggggataggctgggagcctgggggcagggctggtggtggctgctgctgctgttggtgcatctgttggaagtgctgctgccgagccctcatct

SEQ ID NO: 29848 - DNA, 120 bp, Homo sapiens
ctccgcatacttcagctgctccatgtggaaggcttgtctgtcggccaggagctgctgcctctgatactccagctgccagtgccaattgagtattgttatccaattttcagcagatcccaa

SEQ ID NO: 29849 - DNA, 120 bp, Homo sapiens
acccgacttcgtgcaaattcccatgacctttatgtctcctgagtgcccacatggtttcttattgcaatgactttaacctggcccaagctcacttcagctacaaagctttgaacttgccat

SEQ ID NO: 29850 - DNA, 120 bp, Homo sapiens
gggcgccgcagccacccaccgtcttggcggctgcaatgctgcagttcttgagcaggctgaagctgaaaggactgacggcgtccttgggtgggaaaggcttcatggtggaaaggatcaagg

SEQ ID NO: 29851 - DNA, 120 bp, Homo sapiens
cagcggcagaatccaagggtgacgagggcccaggaaggctgacaggcagattctctaagtacgggttaaagggcgggcatgggagtcaaagcctagggtgtggagtcctcctgaccctgc

SEQ ID NO: 29852 - DNA, 120 bp, Homo sapiens
ttccgggcagcaatgtggagtggccttggaaaaaaggaaaaagaaggagcttgatgctaagctgcccttccacctccagacagggtggcaagggtgctgaacaaatacaatgggctccag

SEQ ID NO: 29853 - DNA, 120 bp, Homo sapiens
cagcggccactctttcatcacccactggcctcccccagccaggagcccccttccccaggcactcacatctgcagcgcactgttggtagcattgataaggccaaggtcttgggtttctgcc

SEQ ID NO: 29854 - DNA, 120 bp, Homo sapiens
agtcggataggctggacaatcctcacttctgccccagtcccctctgcaaccgagacttacctctcttcatcaagctctgccccttatgcagtcccccaatcacttcaggtaagtaccttg

SEQ ID NO: 29855 - DNA, 120 bp, Homo sapiens
ggccgtgttcttgttctcatccaacacagtaaggtctgccttccctcgatacagcagaaattctacgagagaaatgtgatagagggactgacccctccctccagagcagtagccatcctg

SEQ ID NO: 29856 - DNA, 120 bp, Homo sapiens
tcccgtctgcagatggcgagacatccaaagacaaccctcttgctttctgaaccccagccccagccagcctccacaggcagggctgacccatcctgcaaatgccccaggggagctcctccc

SEQ ID NO: 29857 - DNA, 120 bp, Homo sapiens
cagcggtctgcccgttctcagccgccgtcatgagcgcagtgcggccagtgtggtcagtggcgttcacctcagcttgatgctgcagcagcatccggagcccagagacattgtccgcgaagg

SEQ ID NO: 29858 - DNA, 120 bp, Homo sapiens
cagcggcgtgaaggggggtcctgtaaggcagggatcagggtagattaaaatagggaagagtatactgcccaagcagaaaggggaagccagaggcaactgggattcttcccaagtcttcca

SEQ ID NO: 29859 - DNA, 120 bp, Homo sapiens
aagcgagagttggatatattagccatcattattaaccacctgggggaacttcaactgatttggagtctaggcatacaactggaaagacctgcctaggagtgtcttgtgaatgcgatttgc

SEQ ID NO: 29860 - DNA, 120 bp, Homo sapiens
taacggtttaggcccagctgacgtcaagggctccttatagctccaggtcagttgtagccctggatgtagttcctgccacgcaacagtcccacaatctccccaccaacccttcttcctacc

SEQ ID NO: 29861 - DNA, 120 bp, Homo sapiens
agacgttgtacacaagtaaggtgaactccctatcctgccccctcccctttccttattccattggtgtccaccttattagggagagaggcaaaacagttctcacccaaactcagataattc

SEQ ID NO: 29862 - DNA, 120 bp, Homo sapiens
cacgcccaacctcacactcttagctgtttcactcgatgttgcatcatggagggtgatgaaatcggtgtcagtggattttacccatggatgcaacaagctgaaggaccagccagagtcatt

SEQ ID NO: 29863 - DNA, 120 bp, Homo sapiens
gggcgggccttacaatgcagggaccttaaaagactcagagacaaagggagaaaaacaacaggaagcagcttacaaactcggtgaacaactgagggaaccaaaccagagacgcgctgaaca

SEQ ID NO: 29864 - DNA, 120 bp, Homo sapiens
aggcgcagagccagccagatttgagaagaaggcaaaaagatgctggggagcagagctgtaatgctgctgttgctgctgccctggacagctcagggcagagctgtgcctgggggcagcagc

SEQ ID NO: 29865 - DNA, 120 bp, Homo sapiens
gaccgtgaccttgagtggaagctggagggttgaaggccattagggagtaagagaggacaagagagtagggttcctgggagagtcatgggcctgagggtccaggttggcttcagaagtact

SEQ ID NO: 29866 - DNA, 120 bp, Homo sapiens
gaacgttttagattctggagcctgggcagcacaaataaaggctctgactggctctggtttgggaaatctgcgtcttaaagacctttcctccattacaaatattctccccattcaacaacc

SEQ ID NO: 29867 - DNA, 120 bp, Homo sapiens
ctacgcacacacccaacacttatggacgtacctgcgcaccaataatacacgcgcatcacacattacctgccgagaacacgcagaaacacaacacacagaccccagtacacctggaccgga

SEQ ID NO: 29868 - DNA, 120 bp, Homo sapiens
ccacgcatctcctaaaatacacacgaggactagggaaggtgaggactggcggcgtgagcccggccctgcactcagacacgtgagccaagcaacactcggcgcgcatctgtgatccgggtt

SEQ ID NO: 29869 - DNA, 120 bp, Homo sapiens
gtgcgcaccttggacaggcgccatccccaggacccgcttgcccgaacgcactcctaggcagacggcagattaccgcccgagcgcggcgcacccaaagccccacatccaaaggaaaaggca

SEQ ID NO: 29870 - DNA, 120 bp, Homo sapiens
caccgagggctagtgagcgaggagaggggagatgagcggcgctgccttggaagggcactcgggaactagcgagaaccacagtgggagtgggggcaagcccgtcccctgccctgtcccagg

SEQ ID NO: 29871 - DNA, 120 bp, Homo sapiens
ctgcggctggtggctgtgtggcgtctctctgccctgcgccgcggcctcactgaggtggtgccggacgcccccgccaaggagggggctccggctcgggtgaccccagcctcctcgcccgca

SEQ ID NO: 29872 - DNA, 120 bp, Homo sapiens
gcccggctcagggccttctgcagagccttcatggagcgcatgccccagcaagcctccggctctgcaggtgcgcccgggacctctagctgtggctgggaaggaggggcggagcgagcgaga

SEQ ID NO: 29873 - DNA, 120 bp, Homo sapiens
gtgcgggggagttctgtgagggagcgctggacctggaagacggagaatgtgggcccggtgggtggggctggggctggggcaggagaaggggcctgcccctttaaagctggctccagggtt

SEQ ID NO: 29874 - DNA, 120 bp, Homo sapiens
acacggaaactagaatagagaccagaacttcatttgagggagggtttgggcttaatatttgttgtcacaaaacagacagggttaatttatatctcaagaaactacttaggatggcagcaa

SEQ ID NO: 29875 - DNA, 120 bp, Homo sapiens
ttacgcctacaaagacattctttggaaactagtagaggtaagtgttgcaactctattaggttcttgactctgaaatttgtattccttcctaagaattttgtgtttttattctgttgaagc

SEQ ID NO: 29876 - DNA, 120 bp, Homo sapiens
gatcgaagtaaggagcccaaaaggggactgtggagaggcaggagtgaggcaggaatgaaagaggtgccagaggagtcctgactaggaggctgagcagagcaggtgggtggagccctctgt

SEQ ID NO: 29877 - DNA, 120 bp, Homo sapiens
gtccgctgtgagcagggagttaagcctttctaggaaggatgtttctcatgcgtagacggacttcctgcctttgtcccagttgtctctccctgggttgtagaggaagtaaatattgctgga

SEQ ID NO: 29878 - DNA, 120 bp, Homo sapiens
aggcgtggagtctaggactggaactcctgtttctcggaggggctccttcaaggaagcagcagcagtgacccagctgttgccagctgcagtggaaattctgagctcaaagtctcagctgct

SEQ ID NO: 29879 - DNA, 120 bp, Homo sapiens
ctgcgtggctggaagagaagtggggaggggctgctcaaaacaagccagccaaggagcaaggcagtctgagggaatccagcctctgggaccggctgctgggggagagcgggaatgctgctc

SEQ ID NO: 29880 - DNA, 120 bp, Homo sapiens
ccccggtgtgcttggaccctttgcccagggaaccaggacatcagaaataatgttccttctgtggaaggacaacggggagctagggtagcaaagagcaataaattccaactctttatgagg

SEQ ID NO: 29881 - DNA, 120 bp, Homo sapiens
gctcggcccagctttccctcccttcccagccaccctagaattgagagtcccagtgcccctagtgtcgactttctatgtacatcctaggggtgagggagtgcggggcaatgggtaggatat

SEQ ID NO: 29882 - DNA, 120 bp, Homo sapiens
aagcgtaaaggacaaattgccgcagtcttctaattgatgcttccaaactcaggaagggcttatccagtgtaaaatagccccaagcccagcaaccttctagagggctctggctgggcagat

SEQ ID NO: 29883 - DNA, 120 bp, Homo sapiens
gaccgggggagctttgctatggtaggaggtttaggaagggcctttcacgcatagaaaccattgttgatattgccactcccctctcctctgcctcacagaactcctgattctgtcttcttt

SEQ ID NO: 29884 - DNA, 120 bp, Homo sapiens
tatcggtgttattactcctcatctcaggctctgagatgatactcagaccctaaactgattggactttttggaggagggtgccagtagagaggtcaggaagatgtggagatgatgatggag

SEQ ID NO: 29885 - DNA, 120 bp, Homo sapiens
aggcgtgagccactgcacccggccctttgtagtgtttttaactaaagaatttgtagagttgcccaggccaggaagcctggtggctctaaagggtaatagaccttgtcagtaacagataag

SEQ ID NO: 29886 - DNA, 120 bp, Homo sapiens
atgcgctgggttgggccacttcagctccactccattcgttttcctttcctaacttgacaatcagctcactcaccctcccttagtgcctccagtgcctactcctgtcactccaatgtcaac

SEQ ID NO: 29887 - DNA, 120 bp, Homo sapiens
acccgtgggctgttactttgcgtcatatgatgctgtgagaggccttgctggaatgtcctaggaatccctagtagcagtggctattagtcttctagaaaagaactattgctgctgccttgt

SEQ ID NO: 29888 - DNA, 120 bp, Homo sapiens
ttgcgctcatgaggggctttgcattcttagccaagggcaataaactgggtgggtgatctggcccaaacttgcccctaggctctgctagccctgaatcagcaggcttcagagacgagggtg

SEQ ID NO: 29889 - DNA, 120 bp, Homo sapiens
tcgtatattcctttttcttttctttttcaaattggcatccatttaacacaactgagctcccatgagccaggcactgggaccgctgaggtcaggaggcaagcatccctgtcttgggagggc

SEQ ID NO: 29890 - DNA, 120 bp, Homo sapiens
gcacggaagagaagtatctcctttggaagaacagaaaatggtgaataacaggtgattgcgtctgttacaggtgacatcactggcctctgaacgggcctttcacctttagcttctgcccat

SEQ ID NO: 29891 - DNA, 120 bp, Homo sapiens
ccccggggacgggaggactccagggtcagggagagaatattaattccctatttcctttcaaaatttggagcagaagggatatgtgcaggagggaaatgcaagataactacagattgaatt

SEQ ID NO: 29892 - DNA, 120 bp, Homo sapiens
taacgacctctttctttgagtgactatagactttttactcactgagaaatcttgttctgtaaaagcaaagactatcaaacacttcagtgtttaaaattctattgtaagaggccaggtatg

SEQ ID NO: 29893 - DNA, 120 bp, Homo sapiens
gctcggtgtaccccccagccaccagagggccccaaatggcctgctttggagtttctccagcaatcattgaaatttggctcttgtcttacagtctttggttaggctcacaaagtttctgcc

SEQ ID NO: 29894 - DNA, 120 bp, Homo sapiens
cctcgattaatcaggtctttctcatcttatgattaagtaagcttggaaaacactgatttacacaagtgatccaccctcagtaaggcaaaataaaatgtagacagtgtaattacctcctgc

SEQ ID NO: 29895 - DNA, 120 bp, Homo sapiens
acacgtaccacacaacctgaatatttcagagcaatcttgattccaagcattcattcactgttctcataaaaatgcttgtatttgtcagtcctaagaacagtcatcattcataatgtatct

SEQ ID NO: 29896 - DNA, 120 bp, Homo sapiens
ctgcgcatgggctccagactagttcctttaggagggaggacttcctctagtctgctgcttctgcaactcagccatcctgttcctcctgttcctgggcccacaccctgtgtgctggaagtg

SEQ ID NO: 29897 - DNA, 120 bp, Homo sapiens
tctcgtgaagggccggtgaagagggaagaactgagcagagagagccaaggacagggtagtggggcacaggctttgaggagcctggaaagctcctaatctggtacttctgggcaaaccaga

SEQ ID NO: 29898 - DNA, 120 bp, Homo sapiens
ccacgactagacttggcttcctgactcagtggccttctggaagttcacactgtggacgcgagtgcaattactgccaaatccctcagccttaacctgtccacaaagcacctgcctccaccc

SEQ ID NO: 29899 - DNA, 120 bp, Homo sapiens
gcacgtgggttgatccctgggacagcctgcctcaccccttctgccagggtccaagcacagccctttgcctaacctgaccctggaaagtcgtctgcctttatctctgcctcccaatacctc

SEQ ID NO: 29900 - DNA, 120 bp, Homo sapiens
gatcgcaaaatcttgtctacacttttttggggaaaaaaagtggggcggggaggaaaaagagtaaatttccaggaattgtttcactgctgctgtttctgctgcatagggcaaagctgctgg

SEQ ID NO: 29901 - DNA, 120 bp, Homo sapiens
tggcgaggagcctggcctcctgctcctccctctttctcttcctcccagtctctctctttccagctgcaccccaccccctaaaaagccccacatgaaaactgcagagctatcacttatttc

SEQ ID NO: 29902 - DNA, 120 bp, Homo sapiens
tgtcggccccaccgatggggttcctactgagtcttctggtccctgatcccgtctgtggtcattttcctgccaggtagcttggccaggcctcccctggtgcagatttcatccttggtttct

SEQ ID NO: 29903 - DNA, 120 bp, Homo sapiens
tcacggccaggcactgcccatgtggactctgtgcgtgccacctctttgccctgacccatgttgcctctgggggagcacttcttcctccaccttccatcatgggctgtggcagtgcccatc

SEQ ID NO: 29904 - DNA, 120 bp, Homo sapiens
ccccgacgctgtctgctgcagtatggttgttgggggaaagggcaccaggctccggcgtctgacagccgtgttttacccaccttcctactcactagcttgtgaccttgggcaattacttaa

SEQ ID NO: 29905 - DNA, 120 bp, Homo sapiens
aggcggggattctgaggctcagagcagttccagaactttctacagattattttgccttgtttgcgcttccagactgcctatcttcttgtatcaccattgatcttgatctgtatggttttt

SEQ ID NO: 29906 - DNA, 120 bp, Homo sapiens
caccgcaaggcatttggaagacacctggcagcccttcttggcttcctagccagggctgtgcgtcagtccccgtgctaagggttgaaagcaacgttccggggaggagcacgctcactgcgt

SEQ ID NO: 29907 - DNA, 120 bp, Homo sapiens
gggcggcaccccccgtttggaaaagccctggctggactccagcttctgagcagtgtccactgcgtgtccctgttggccctcaactcttccctaaggcttttgggggaggagggtctgggt

SEQ ID NO: 29908 - DNA, 120 bp, Homo sapiens
ctgcgggtgaagtgggatagagaggaagaacagcaggctttctggagccacatgcccaggcccatgcccggcccctcctccagccaccccatgccatagtccccattcacacccactgag

SEQ ID NO: 29909 - DNA, 120 bp, Homo sapiens
gctcgctctctttcggaaagaaaaattggaaactctgactaagtcctcaggtgaacccacaaaagcctctttaatgcgcaagtggctaaaaaactcaacatgtacaagactgttgacttt

SEQ ID NO: 29910 - DNA, 120 bp, Homo sapiens
ctccgtattcacagaatcaggatttgtggtcaaaaacaatgcatgcttgttcctccctgcttctggtggctttcactgcctccttcctcagttgctgccccaggctcagccccactttgc

SEQ ID NO: 29911 - DNA, 120 bp, Homo sapiens
ctgcgtaagccccaggctgcaagtggcacagctgtcaaagtagtctgagcacccaaaggcaggcagttctgtggcagtgacgccaggagtgcgatgccagggccgagcatggcagtgacg

SEQ ID NO: 29912 - DNA, 120 bp, Homo sapiens
gagcgtggcagtgacgccaggagtgtgatgccagggctgagcgtggcagtgacgccaggagtgtgatgccagggccgagcgtggcagtgatgccaggagtgcgatgccagggctgagcat

SEQ ID NO: 29913 - DNA, 120 bp, Homo sapiens
aaacgacgctgagtcgtgtgtcctcgcagtgagcctgggcagctcatgccgacctgcttccaaggcctggtcccagtaggccactttaccctcagaagccctgtgtccttgtctgtagaa

SEQ ID NO: 29914 - DNA, 120 bp, Homo sapiens
gaacgccactgtgataacccaaggatgccccatttgaccttgtctactctggggtcaaccaggaatagtacaaacctagatcttaacggaagagaggggaaaggacctgtggtttgacat

SEQ ID NO: 29915 - DNA, 120 bp, Homo sapiens
tctcgcggagctcaagagaggaagcgctataaatagagggcctggaggaggggcggccgcgggaggaagaagttctcagaacacctgcttgtctcaaaatcaaggcccagtggggttttt

SEQ ID NO: 29916 - DNA, 120 bp, Homo sapiens
ccccggccagaaacttttccaggctcttctccagctcatcgaaaccagggcttagccctctggcctggatccctacaccccaaatgcagccacaaccccaagtccaccccagagccctgg

SEQ ID NO: 29917 - DNA, 120 bp, Homo sapiens
tcacgagctgctcccagcccatagttgacctaaatgaggtcagggcagaccccagtccacacctcagcaacgccttcccgtgtctgaggacaagacccaccaacggcagattggtcatct

SEQ ID NO: 29918 - DNA, 120 bp, Homo sapiens
acccgcaggcgggatggggaacgggctctcttgaggctgtccctgcagcagctactgtttttacttggagtgtgtttctctgggggctgcctttggtgggagaggaaaaggccatgcaga

SEQ ID NO: 29919 - DNA, 120 bp, Homo sapiens
aaacgctaacgtatcaagttgaggaaggaacttgttctcttctgtttttacgaagtgagaaggttagaaggtcagccatagccttgtgtctggttttctggggtgcccctggcactcttg

SEQ ID NO: 29920 - DNA, 120 bp, Homo sapiens
cctcgaaaaatctctagggtgtgtgctttttgcctattgataataataaaagtgtaagcaggactgtgatcctattacaacagccagcgtgtatggagtctttcccatgtgctgggatta

SEQ ID NO: 29921 - DNA, 120 bp, Homo sapiens
aaacgtgctggcagacagtgacgacttgatgcagcaatgcgtgtctgggttagctttcgtcatcccagagccatccacccccttcgtcaacctcctgcccaatatatctgtggtgcgtgt

SEQ ID NO: 29922 - DNA, 120 bp, Homo sapiens
gtacgtgaatgggcactcgtgtgtgtgtgagagagggagtatgtgtgtgtaaagtgcaagaggaggtggcatgaagggacacaggctgtagtgtcagctgagggtgtgtttcactccagc

SEQ ID NO: 29923 - DNA, 120 bp, Homo sapiens
ccccgggccagagtaatgtgtccccatcctctgcactctgcactcctaatacttcagaacactgacgtttgccagctctcctatctcaaatatcattcatattattgtctacctctgctg

SEQ ID NO: 29924 - DNA, 120 bp, Homo sapiens
aggcgcgtatttacacataggaggcgcgtatttattgactgaaactaggaatttagatgagaagtgatactgattttaaatctctcaatcatcgtttaataggatgatttaaagacacca

SEQ ID NO: 29925 - DNA, 120 bp, Homo sapiens
ggacgtgccatcttgattccgtaaaattatgtttttcactgtgcgtccacaacatcgcctcgtacgcttgttctacgttcattgacagttgttaaaacaaatcagcaccggcagaacttg

SEQ ID NO: 29926 - DNA, 120 bp, Homo sapiens
ggacgagccattaccacattggcagggtcgtcccggtctctgcttgggtatttttatctgtaggcctatcagttagtatgcttttggaaaaatctgggatttactagagaaaaaggtaaa

SEQ ID NO: 29927 - DNA, 120 bp, Homo sapiens
ggtcgatgttaattgtgtcccctccaaaaaaagatatgttgaagtcctaacctcccagtacctctgaacatgacatcatttggaaatagggtctttgtagctgtaattagctaagatgag

SEQ ID NO: 29928 - DNA, 120 bp, Homo sapiens
agccgaagcaggccaaggattgccagcaaaccaagagaggctggaagaagagagaaggatctttccctgctgatttcacagggagcatggcccttgatctcaggaccttgaccccagaac

SEQ ID NO: 29929 - DNA, 120 bp, Homo sapiens
atacggtgccagtattttgtacagcagccctcggaaactcatacagcaggcaaccaataatgtcccaagtctagtaagtaatgaaatacactctgacatggggatggaattgaaataaaa

SEQ ID NO: 29930 - DNA, 120 bp, Homo sapiens
cttcgcttcctgagtcctaatttgaccgtaacctagaggatgggcaaataatagctgttttcaggacaggactcttaacctcctttcagtggttttgattatttttagtttctgttctat

SEQ ID NO: 29931 - DNA, 120 bp, Homo sapiens
ggccgttctcctagtcggggccaggttctggggacagtgtgacaagagcttgaatgaagacaactcgccctccctgcctgcaaaatttaacaatgagacaggaatccttattttgtattt

SEQ ID NO: 29932 - DNA, 120 bp, Homo sapiens
tgccgcacctctgagctctttggcttttgtagacgttcacttctcggaattctgctgactctgtgggtccccaggcatcacctgagaactggttagaaactcaaagtctcaggccctccc

SEQ ID NO: 29933 - DNA, 120 bp, Homo sapiens
attcgctctgtaggtggggacaacaatctgggttttgagaagccatggggtgattctgatgcccactcacaccctgttttacttctgtgtttactctgcactacagaaacgaggagccca

SEQ ID NO: 29934 - DNA, 120 bp, Homo sapiens
ccacggatgcttgagcatcaaagcttcaatcactgctgcccgcggctctgcactgtcttaattcttccctgctttttcattatgtcccgtctggctcattcctcctttatccccctgttt

SEQ ID NO: 29935 - DNA, 120 bp, Homo sapiens
aaacggccactttttgcatccaagagcacaagtcagcttccactggaaggttctgagaaacggtttcaggtttaagtctagagcatgaatggaacggagtcacagctgaaaaagaaacat

SEQ ID NO: 29936 - DNA, 120 bp, Homo sapiens
tctcggccttcctgaagcaggctgcacgcttatttatattggcaccacatgctaatctcacgaatggccctgttccgccagtgggaggacaaatagctgttcttttgctcccgtgtccat

SEQ ID NO: 29937 - DNA, 120 bp, Homo sapiens
ctacgcccttttggattatttcctctgcggcccctagcatgagccccaaccaggcctccccttttccccacttctctcaattcccacaggaagcccgagaggtgaggagctgaggttaga

SEQ ID NO: 29938 - DNA, 120 bp, Homo sapiens
aagcgcggccgcagagtcccaccgccaccaggcgacccccacccagagagggacagacatgcggggagccagcaccgggcaagatggctctggggatcctcattctgtgaagacaccaac

SEQ ID NO: 29939 - DNA, 120 bp, Homo sapiens
ctccgtggggtccctcatagaggagtgccaccctccacactggccacgctgggctgccccagagcggccagaaaggaaggtgggagctagccccatcctcactcagaggccggaaggagg

SEQ ID NO: 29940 - DNA, 120 bp, Homo sapiens
tctcgccaacttcagagccgaatggcctctagccacactgcttccagaccccagacggggcagcagcagcagttcccagaggagcacccattgttgcagctaggacccaccaaggatggg

SEQ ID NO: 29941 - DNA, 120 bp, Homo sapiens
ccacgctgtgcacccccagtctgcccctctgctcagaacacagagggatgggaggatggcttggcagtgggaaggcaaaagaaggcctctctcactctgcccctgccatacgcacccgct

SEQ ID NO: 29942 - DNA, 120 bp, Homo sapiens
aggcgtaattacatgggtttactcatccaccctacgcgaaggtgcaatgctgtttttgagcatggtcgtttctgttcaacctacatatcccgggttgtgaagaaacgctttgaacactgc

SEQ ID NO: 29943 - DNA, 120 bp, Homo sapiens
tgtcgtggaaggaaaggtagaacattagagttaaataaaggaagaggtgcacggagaaaacagaagaaaacaaggcaagggcgatggaaaggcctgtgttgttcagggggcctaagggga

SEQ ID NO: 29944 - DNA, 120 bp, Homo sapiens
agacgagtcacgtcagaatttaactatttacagagtttgagagcctggagcctgtgggaaagtaaggaactacttgcggaccccgccagctcctagcagctccctctcccgagagagcgc

SEQ ID NO: 29945 - DNA, 120 bp, Homo sapiens
gggcgagtgtgatactgcgtgtgagagggcgcgtggggcgtgtaaatgatgtgagtgtgaggacacacaggtgtcgcgggaatggggtgcacgcgcaggaggatatgagtgtgtaaagtt

SEQ ID NO: 29946 - DNA, 120 bp, Homo sapiens
agacgcacgcagaagaaggtgtgcgtgaagagtgtgtcacggtgggcgagtgcgagtggtctccggggttccgaaagcgcattcctgtcttcccggaggggtcccttcccctcccggaag

SEQ ID NO: 29947 - DNA, 120 bp, Homo sapiens
cctcgggcggcccaaatccggcagcaaatcccacgcccggtcctcggagcgcggagactgcgcggggcctacgacccggtgggaagagaggcgcttgccggggcggcccggcctctcttt

SEQ ID NO: 29948 - DNA, 120 bp, Homo sapiens
catcgccctcccagacttcccagggccgggcgggtggggactgccgaccgtcctgggcgccttcctgctccagctgctgctgcgtctgctccgaggtggcggcggcggcggctggcgcgc

SEQ ID NO: 29949 - DNA, 120 bp, Homo sapiens
gcgcgttgcgggtcccggccgaggggctgcgggcgcgctggagactccgccgtgtgggaacccaacgcggggcctgtgtgtgctatcgaattacttattcatagaaaaaaaaaagggggg

SEQ ID NO: 29950 - DNA, 120 bp, Homo sapiens
gtccgggttatacgtatgcgaagagaagcagcagaaggagaaaaaaattaaggcgagcaggaggaggaggagaagcagcggcggaagcggcggcggcgcaggagctggtggcggcggcgg

SEQ ID NO: 29951 - DNA, 120 bp, Homo sapiens
caccgtgacgtgattcaccagctcgtgcatggtgccgaaagttttggagcagggcttggcgccgccggccgggggcggtggcggcggcggcggcggcggcggcggcggcggcggcagccc

SEQ ID NO: 29952 - DNA, 120 bp, Homo sapiens
tgccggccgagtggggaggcggggccgggtgctggggggagccggtgccggaccgctgctcccctccgagcggggccccgtgcatggccgccgcgggggccgtggcggaaaggtccctcc

SEQ ID NO: 29953 - DNA, 120 bp, Homo sapiens
ctccggaggacgaagtccctgctgtggcctttgccgctgctgccgccgccgccactgttggtggtggtgtagcccgagagggcaggaggaggaggaggcgggggagggggagggggtgaa

SEQ ID NO: 29954 - DNA, 120 bp, Homo sapiens
gggcgggggcgcggagggctgcgcgccactgctgcccccgccgcaggggtagctgcccgcgccggggtgcgcgaccaaggctgcagcacgggcggcggctgccggagcctccgggtgtgc

SEQ ID NO: 29955 - DNA, 120 bp, Homo sapiens
tgccgggaacgcctgggagggagggctgaggcccagcgtgctcgcctgggccatgtgctcgggtccgagcggagtggtggccacgccggggtcagcgcccaggtcccgcaggcggaggtg

SEQ ID NO: 29956 - DNA, 120 bp, Homo sapiens
gtgcgcgacggcggcccggagttgggagtgggcgggcgggccggccagcgccgggaagcctgtcatattctgaagcggctggacctgagccgttgccaaatccgctaatctcagcgctgg

SEQ ID NO: 29957 - DNA, 120 bp, Homo sapiens
tggcgggttcctcttgctcaaagggggctccatcagaactacacaatcaggcccatagaccctcactggggggactttattccctctgcccgccttcaaaaacatgtatgtattgggcgc

SEQ ID NO: 29958 - DNA, 120 bp, Homo sapiens
cagcgattggcagagtgaacaccacatttgagctgcacagtgggaccgagattttggaaatggcacgggtgggattggagggagccgcgtgattggcagtagcctcggctgctcgattgg

SEQ ID NO: 29959 - DNA, 120 bp, Homo sapiens
tcccgttcaggccctcgacccagcggggattcgcccccgtgcttgcggccgcctgcgctttcgcttcgcgccccctcctccgctggagccacacgtccccgcctccccggggatgcccaa

SEQ ID NO: 29960 - DNA, 120 bp, Homo sapiens
ctgcgcgcgcagcgccccgctcttccttgacgcacctcgcggagcgcgcgccggcacgcgggcagagggcgcggggtggtgaggggctgaggacccccgaggggcagtcccagtttcaaa

SEQ ID NO: 29961 - DNA, 120 bp, Homo sapiens
gcccgtcctacctgtagtggtgatgctagaaacttcttgtttggacacccaacctgcctagcgctcacctagggcgcatagacagtagacggagtgaagaagataaagtctattggttgc

SEQ ID NO: 29962 - DNA, 120 bp, Homo sapiens
cgtttacagccttcctaccttccccgcaggagctgatcggagttttcaaacaagatactctaaggaagaaggcaaaaataattgtaataacgaaagggtagggatggggaagattatttt

SEQ ID NO: 29963 - DNA, 120 bp, Homo sapiens
cagcgacacctccagaggatcgcgcagcaccgccgtggagacgcagagcgcgggtggcgcgatggctgcggcttccctgctctcctttccctccagccctggaatgagcctctggaccag

SEQ ID NO: 29964 - DNA, 120 bp, Homo sapiens
tcccggaggtcacaatacctgttcagtggggaggaaaggcgtccagccttgggtgggggagtgaccagagggtgacagaggccaggctcgccttccccagcggctctgcgaactgcccaa

SEQ ID NO: 29965 - DNA, 120 bp, Homo sapiens
aagcgccaactcctgaagcaatcagagccccattaaaatcaaatttataacccctaataatattaggcgaaattattaaaataattggcatatgttactgatccttgggagagttcattg

SEQ ID NO: 29966 - DNA, 120 bp, Homo sapiens
aaccggcatcggtatcagctttccctggttcagtgatatcccacgaagttcggggcggggaggaagtcactccaggatcagaggccgcgtcggttctgcttggggcatgggcagagggag

SEQ ID NO: 29967 - DNA, 120 bp, Homo sapiens
ccccggctggacgcgagggaagaaactcgtcccaggacccgcacgcccatacctggctgtcccagagctcttccctaggccggcaccttcgctcttcctcttccccaccccctagccctt

SEQ ID NO: 29968 - DNA, 120 bp, Homo sapiens
agacggatgttttcagtctcaagtggttttattttccgcacaaaaccctgagatcaagggcagatcacagactgtaccggaggctcgggtttccctggactctgtgctgttctgcgtccc

SEQ ID NO: 29969 - DNA, 120 bp, Homo sapiens
ggccggcgaggtgacgggtctcccgcccaggtcggcaggacggggggaggtgtgtcccggtaggtccctggtgagctcacccgtggcatcggggacccgcgggaacccaccgggcgccca

SEQ ID NO: 29970 - DNA, 120 bp, Homo sapiens
actcgggtcctaccctcccccacactactccaccgaaatgatcggaagggcgcgctaggcctgcttccaagggctcagtgataaaggcctcaaaatcacactccatcaagacttggttga

SEQ ID NO: 29971 - DNA, 120 bp, Homo sapiens
acacgtcctggaaagaggtcctcagaacccaaaggttcaataatgatttgtggatggattgattatagtctgatatcgctctggttccacagaaacccggagctccttggcccactgtta

SEQ ID NO: 29972 - DNA, 120 bp, Homo sapiens
ggacggtttctgtttttcactggcagctcagaactggaccggaagaagttcccctccacttcccccctcccgacaccagatcattgctgggtttttattttcgggggaaaaacaacaaca

SEQ ID NO: 29973 - DNA, 120 bp, Homo sapiens
gatcgggcaaaaaccctcaggctagtccggctgggtgcccgagcatgaaaaggcctccgtggccgtttgaacagggtgttgcaaatgagaacttttgtaagccataaccagggcatcctg

SEQ ID NO: 29974 - DNA, 120 bp, Homo sapiens
tcacggtcaaggctgtgggctactaggtccagcgagtccaggcctcgccccgcccccgagctgccacagccaagatcttcggcagggaattcgagaccagggtcctcccactcctgcccc

SEQ ID NO: 29975 - DNA, 120 bp, Homo sapiens
ccccgccccgacagtccgagaactctcggtgctggggccacctcgtcgccctcccacgtttctcttttgttcccaggagccgacgagcttttgaagaggtgacacctcgcttcgccttct

SEQ ID NO: 29976 - DNA, 120 bp, Homo sapiens
cctcgtccagcatccctcctgccccacgaagcgagaggatgctcagcgcagctgccaggcagagagtgtgtggggaggtcccttgcctttgcgcgcgcgcacacacacagacacgcacac

SEQ ID NO: 29977 - DNA, 120 bp, Homo sapiens
ttccgcacctcccagccacaggctcgcgtgagtgggaaggacctgaggccgcagaaatgtgggttagcgtgggcagcaggagatgctccccgcacccctcctcccattcctacctccccc

SEQ ID NO: 29978 - DNA, 120 bp, Homo sapiens
tagcgcctcttggaggggaccgggcctgccctgcgctctcaacctaattcggcctcggagggtcctcccccacccagggcggcactccccaggccggcactcgcgccactggcgtgggac

SEQ ID NO: 29979 - DNA, 120 bp, Homo sapiens
gcccgcgcgccctccagccctcgggtgtagggaggggagcgccccctcacctccaaggaaatctggagtaagggaagagctgcctggcccccgcgtcccctgaacctggcctcaacctct

SEQ ID NO: 29980 - DNA, 120 bp, Homo sapiens
tcccgggctaggtttatctctgtcctaaaggccaagccggtggccctggggagcagaagggagctcagagctgctggagaaggtggggggtagaaataataataatgtcagagataatca

SEQ ID NO: 29981 - DNA, 120 bp, Homo sapiens
catcgcagttaacgctcagcgactgggctgctccgcggaggccggcggaggcctacagaggctcctgactggcagaactggaggtgtgggtgtggttcccttttcaccccggctcttatg

SEQ ID NO: 29982 - DNA, 120 bp, Homo sapiens
ggccgagccagcgagggcctgccaggagctgcgctggagcctctcgctgcatccagagctggttcttgttcttttctctctcttggcccactgggcccacagtggttaggtggccgagtg

SEQ ID NO: 29983 - DNA, 120 bp, Homo sapiens
tcccgaaactctttggagtcgcctgggtctgcgtgcccctggccccgtcctcacccccgggctcgtcccccagcctccgccggcccgcctgtgaatggtggatttaatgagcgtttgtgt

SEQ ID NO: 29984 - DNA, 120 bp, Homo sapiens
tggcgttggccggcggttctgaagatgcgctgacctggagggagggcgcgaaaggtcaggcgcatgccgggcccaacttgggctcctcccaggcccacgctgctccgatattgatcctgg

SEQ ID NO: 29985 - DNA, 120 bp, Homo sapiens
tgacgtctctagttgaatgttttaccactacctcaaacccagcattacccaaactgaactttgatccttcgggcttcttgtatctgaatcctcctgcagaagcacaagatgtaggaattt

SEQ ID NO: 29986 - DNA, 120 bp, Homo sapiens
cttcgttattgcttctttagcaaggtcttttaaaatcttctagtgaatcttttaatcttttagactgataaaattaatttcatctggggcagtttatctaatgtgaactgtttcagtttc

SEQ ID NO: 29987 - DNA, 120 bp, Homo sapiens
tagcgaatgctttcttactctgttttggaattttagttcataggctcttttttctggtgaaagttaaaaatgtttattgctcttcatgcttcatcttctcccttccctttgcttccttga

SEQ ID NO: 29988 - DNA, 120 bp, Homo sapiens
ccccggccattgctgcctcccaccttctccctgaccagtagttttgtgggtgcccccccgccggcattttggattcctaatctacatccaggtcttatggtgatagtttggacacatggc

SEQ ID NO: 29989 - DNA, 120 bp, Homo sapiens
aagcgctgtcaatgtttggacagtgttggattacctaatggactcttcaagacagtcctttggggtgttactgtcattctctgttttacacggtgaagaagtgaggcactgagggcactc

SEQ ID NO: 29990 - DNA, 120 bp, Homo sapiens
gaccgaggccaggtgctcagggcccagaaccctcttaccccctccaacttcagtgagcttcaaaatcacctgctgagcttgtttgaccacagacttgtgggctccacccttgaattcctg

SEQ ID NO: 29991 - DNA, 120 bp, Homo sapiens
tgacgccctaggtctgggatggggcttgacaatttgcatttgtaaaaagttcctgaatgctgctgctgctgctggtcagggaaccctgctttaagacctcctggtttatgcaatttcaaa

SEQ ID NO: 29992 - DNA, 120 bp, Homo sapiens
gtacgaggatttttcaaaagtaagtattgttcattctaaaggaaggaaatgtatgttatgagatagaattatataataaacagaaccattaaatgccatctgaaaagtggtgttttcaat

SEQ ID NO: 29993 - DNA, 120 bp, Homo sapiens
ctgcgtattttgtgtgtgtgcgcaactcagctttgtgtcattgtgtaactttaatttgaaagaacatcacgtgactgctgttttcatttctgccttttaaaaagcagacagctattcaga

SEQ ID NO: 29994 - DNA, 120 bp, Homo sapiens
gccgaattgtaatccataaagcacctgggcagagttcaatcagaggtcccatttcagaagttttttggaatgtagggaaagaattacttagaaaaggttcatctacttggagaggagatg

SEQ ID NO: 29995 - DNA, 120 bp, Homo sapiens
tatcggccacaagtctgtactcttacccttagccccttgggtgctgcccagttctggggagccccacttgagagacaaggggagcaccaggcagacggcacgtgtgcctgaagtcccgag

SEQ ID NO: 29996 - DNA, 120 bp, Homo sapiens
agccggcagcggggctggacgggtggcccctgggttcccgcgccctccagagtgaggccgctcgtgcatgggccattaaaggagtcttcagccggagaaagggctgggcggcgtctcctg

SEQ ID NO: 29997 - DNA, 120 bp, Homo sapiens
gcccgcctggtctgtctttgtaatttgatgatggttccatccttgctcaaatactgcagtctcccgtggcctcctccccgtctcgctttacatgaagatgttgggatgtgaatacacgtt

SEQ ID NO: 29998 - DNA, 120 bp, Homo sapiens
taccggctcagaggaagttgctattaatataatcagatgcgagcaggcagtgccttttcactcaatctgagatgcctttttttgtgactgttaactgaacctttcttcagatctaagggc

SEQ ID NO: 29999 - DNA, 120 bp, Homo sapiens
tggcgtagacaccagggctgatattgatccgtgtttttccggtggtccggcgttgcagaagtggaaactgcagcgggctggtaagccctccgagccttctgtctaatttggcagaaaaac

SEQ ID NO: 30000 - DNA, 120 bp, Homo sapiens
gcacgcagtgatttggtgctcactcttgcatcgaaacagttgcggtctgaacaggcaggaaacagttttcttttaattgccgaaatcattcggaagtgcttcatgccctgcttctgtaca

SEQ ID NO: 30001 - DNA, 120 bp, Homo sapiens
ctgcgtagaagtgacccagggttccttgcagcgggcccaattttaggcagagggtttaaatagcttatttattattttgtataatctggcgtacattgtgtgctcctgcacgtgtcgtat

SEQ ID NO: 30002 - DNA, 120 bp, Homo sapiens
caccgtttcctctgcattccttacagttgctagagagtgggcttcctggggggcggggcggctcgatgctgtgaacgtcccctggcctctatttcaacgataacacctttaaaacagccc

SEQ ID NO: 30003 - DNA, 120 bp, Homo sapiens
cctcgtcattttctttatcagaaatacgactgcacactcttaatagggaaccttgttttgttactccccgtctgttccaaacagacctcagcccattagaagggcctcccttgtgtggga

SEQ ID NO: 30004 - DNA, 120 bp, Homo sapiens
ggccgggggtgctgtctccactgtttttgtttgttttgaggatgagcgcgctgcctggtcccttccccattgcacaagccagggcagtcacaaggagcttgggctgcctcaccgccctca

SEQ ID NO: 30005 - DNA, 120 bp, Homo sapiens
ggccgccacgagctcatcagctgagacccagcgtagcctttttgtgttttttgtgaagcaagtttccaattaagcaaaagaagctaaaaataatgatcatgtttttgtgccagatgcagt

SEQ ID NO: 30006 - DNA, 120 bp, Homo sapiens
tagcgatcacagtctgccattaagttgaagagtaagtgagctctcccaacagagaatgaggttactaaagatcacagcagctgcattttcatttggttctgaaatccttggaatacattt

SEQ ID NO: 30007 - DNA, 120 bp, Homo sapiens
agccgtgcaccgagttgaatcgatgctgacaattatcagatggaggtgggtagtaattggtacttcgtgccttgctaaaattattttaagtgctgtttgtatttggaagctaagcttctg

SEQ ID NO: 30008 - DNA, 120 bp, Homo sapiens
ggacggggtctggctactgagatctgggctcagataaacttccacttgaagtccgggcgctcagctgtgtctaccagcaagtgggtgttcattattttgctagatcagaatgtaaagaac

SEQ ID NO: 30009 - DNA, 120 bp, Homo sapiens
aaacgtgggggtcaaacacagtaccaacacttttatatctgatttcccaaaacatcgacttcaaatttaaataatctttaatatttgctgtgaagcttgatctgaaaattaggaagaatg

SEQ ID NO: 30010 - DNA, 120 bp, Homo sapiens
aaacgctggcgcctttgaaatcagaggccagggtctcctcttcacagttcgctcaagacactgaacacttacgggtctgtgaaatcaaacggacacttggtccctgatgccaccccaggc

SEQ ID NO: 30011 - DNA, 120 bp, Homo sapiens
taacgatttttttcatgccatatcactttaaaggcaattgtgttgccacctttaaaatgttcagtgaccaacaacgcagacatgaccatcccctgcatccccatgtctgcttcaagtatg

SEQ ID NO: 30012 - DNA, 120 bp, Homo sapiens
gaacgagctctatgcaaacaggcaggatggagaaccggccagggccatggccccaaattccaggcacggcagcaggagcggaggtgctgccagcccctgctgcctcctggtgtgacactc

SEQ ID NO: 30013 - DNA, 120 bp, Homo sapiens
aggcgcagcggaggcggcagcaggaggcagagccaggaacacatgctgggcaggcggccagcggcccaacactggagatgccgtcaacctcgtcacacagggccaacctgcaggcacggc

SEQ ID NO: 30014 - DNA, 120 bp, Homo sapiens
tgccggacctacctgtggctcacgggggatcaacgccacccccaagggagagccctgactccatgcccaccccatgccaagtgctttacttacattcttcacctggtgctccaaaccaca

SEQ ID NO: 30015 - DNA, 120 bp, Homo sapiens
ggccgcttcactcccagcttctccccccttttgcagatggggaagctggggcagaggtgaagtgactcacacacaaggcgacccaggcaagggcagcagagccttcacgtcccttcctga

SEQ ID NO: 30016 - DNA, 120 bp, Homo sapiens
ccacgtcccagggcccctggaggagggcaccccctcactgcccccaagcactccagggccccaggcagccagtggcctgggctgccctcataccaggctccagtcacatctgccgtggcc

SEQ ID NO: 30017 - DNA, 120 bp, Homo sapiens
tcccgattttgtctttgtattttgtaagcaaagcgaagcctgctggaataacacagcactcctgtgagtggagagcccaggagtgtgggatcgtggtagacccagggtgtggggctttct

SEQ ID NO: 30018 - DNA, 120 bp, Homo sapiens
cagcgccattctaatccagggctcgctgctggttggcactgccaggcagggccctatatcccactgcccagaaacatgaaatcaggagctaaaaggaacccaactggccattgaaaactg

SEQ ID NO: 30019 - DNA, 120 bp, Homo sapiens
cagcggcagggagctgggtcagggcccagccagactccgcctccagtgggctctgtaaggcaggactcgttttggtagtaataacaggtttgccttcagcatcacctttcgctaagaata

SEQ ID NO: 30020 - DNA, 120 bp, Homo sapiens
ttacgtcagtgcacccaaggagatgagacctcatccccaacacacatgagcacatacacacaatgccattttcacacatttgaaaaaaataaacatttttaaagataaaagcatagaatt

SEQ ID NO: 30021 - DNA, 120 bp, Homo sapiens
gagcgaagttaagactcaactacaaggaagaagggagcggggaaggcaattcggcatgtgtccctgagcgagcttctacagcccctgcacagagtgggtccatctgccacattcctgtga

SEQ ID NO: 30022 - DNA, 120 bp, Homo sapiens
gaacgtgaacgcacggccggccactgtgtgctggccggacagcctgaattctgaggccaaaacttccagaaaaaggcattgagctggagggactggcccttctaaggaaactggatgcgc

SEQ ID NO: 30023 - DNA, 120 bp, Homo sapiens
atccgagccgattatactctacacacacacacacacacacacacacacacacacacacacaccacttttaaaagcaccattatagccagaaaccgccgacaaaagccaggccaggctgca

SEQ ID NO: 30024 - DNA, 120 bp, Homo sapiens
acacgccagtgtttgggtttacaactccttggcctccccagtgttgggggtggaacccaggaccctagacattatttaaaagcacatttgggtatatacttggcttttgaaaaagcactt

SEQ ID NO: 30025 - DNA, 120 bp, Homo sapiens
ccacgcacaggccactcccgagacagtggaatgccccgagagaacgtgcaaagccccagctgttgctgtgtggttattagggagagaggcggctcctcccactgaggcgctttctccaat

SEQ ID NO: 30026 - DNA, 120 bp, Homo sapiens
agacgccaaagactacatcccgtatgattccattagatccgggtagatccaggaaaagccaagccatgggggcagagcagaggctgcaaagggctgttactggggagggagactgactgc

SEQ ID NO: 30027 - DNA, 120 bp, Homo sapiens
ggccgcaggaagcttttggggagatggacaggcctgtatcttgaatgcggtcgtgattacatgagtatatatatttatcaagattcgttgaccctttaaaaaaacgcactgaactttaaa

SEQ ID NO: 30028 - DNA, 120 bp, Homo sapiens
actcgcttttctgcagcgtgttgctgctccataaacattaagccttttcttctttgccacacaggcccgtctgttcctctctcctatttgagtgaatatggctagaagtctcttcatatt

SEQ ID NO: 30029 - DNA, 120 bp, Homo sapiens
atccgtgggagctgtgtggccctcccaggccctgagggctgcgctgggaacgtgccctgtgggcttgtatccattgctttcactggggccactcctggctgaggagggttgcagctttgc

SEQ ID NO: 30030 - DNA, 120 bp, Homo sapiens
ccacgcgatccctttagcctccccaggttttattctggacatttccattccctcacataatctagctttgtttttctgactcttggccaaggtttttggtgtcagtgtgttcctaggaca

SEQ ID NO: 30031 - DNA, 120 bp, Homo sapiens
caacggagtgattttctaaagaaccaggacacatgctctagcaagacggatgtgtggggcaaaatatgggtcagaatctttgcaattgtgaacatctctgacagcccaggctgcgcaccc

SEQ ID NO: 30032 - DNA, 120 bp, Homo sapiens
ccccgcatctcctccagggcctgggatagtgggctggtgggctgtcatttcatcacaagcacgcctcctagaccactcatccacacagcccaggaacacgtgcctcttcccccggctcct

SEQ ID NO: 30033 - DNA, 120 bp, Homo sapiens
ctacgccctcctaagtctcatcaagcagcaatacccccgccccgggcattttaacctctccatttcagtatttccagctccattgctattattttaccaatgattatctacaagctttcc

SEQ ID NO: 30034 - DNA, 120 bp, Homo sapiens
tgccggcagccggggctgtcggggagggcagggccagggcggaaatgcagggccgggcccgcgcctctgctcccaggccgcccccggcggcgccccctgcaggcggaacgcgaggcccgc

SEQ ID NO: 30035 - DNA, 120 bp, Homo sapiens
ctgcggcgccctcgcacacacgtggccgctcgcacaactggccgcctaacagccagacccacccacgccgatgcccgccggagacgccccgccgcagacacagcgcaaccagcttcacac

SEQ ID NO: 30036 - DNA, 120 bp, Homo sapiens
ggacgccccacagaagtcacatccaccctaacacacctgggcactcaggctcaagccccgactgcatggtggaccctgacacacctgggccacaccccacaaaacagactcacagacgac

SEQ ID NO: 30037 - DNA, 120 bp, Homo sapiens
acacgccacatcaaatggacacacatgcacacacaaatgaacccaagcgcagacacacttggggatgccaaccatgtgtgtatctatcacatcacacaccaccaaggccccccagctggg

SEQ ID NO: 30038 - DNA, 120 bp, Homo sapiens
taccgagtccagaccgccatctagtcacactgcccacttacttaccaatactcttaaaatgaaactgtggccgaaggagacaatggaaggatgacatcacctcttccctagctccaggac

SEQ ID NO: 30039 - DNA, 120 bp, Homo sapiens
ggacgaacatcattcaggacattgaggagtcagcaatttgggggacacagtggtgctgaagacagggaagggctcagatctgacaccttgttagagggccactgctgtcagcaagggctg

SEQ ID NO: 30040 - DNA, 120 bp, Homo sapiens
acacgacagcatgtggacaaaagaaggggtgtcaggaggaagagatggtttgagaggaggtgtgggtgggtcggcctggctctatccaagtcacgggggcagcccctgggcctgtacctg

SEQ ID NO: 30041 - DNA, 120 bp, Homo sapiens
gaacgcagcatctgtgagtattcaaagcccatgaaatgttcatctattaaatcagccttctaatggcctcattcaggaaagcagtgaactgtttataaattgatcttctgtggaggtctc

SEQ ID NO: 30042 - DNA, 120 bp, Homo sapiens
aagcgctagtctgtatgtctaggcgaggaagcctgggtgggcggaggtcatttcagccacagcagccacccaagagtgctctggggcacaggggccactgtgcctccgctagaataggaa

SEQ ID NO: 30043 - DNA, 120 bp, Homo sapiens
aaccgtgactcacacaggaagagagttattctctattctccctccttccttctgattgcattggggctgaagtctgcacttggtggtggtgtgtgggccccaccctctaacataccggcc

SEQ ID NO: 30044 - DNA, 120 bp, Homo sapiens
cttcgtcaaacatacttagatttctggaagaatatgcagcagtgcatattaacaggttttcttaactgccaatttaaaagcatatagatttatgtttacccactctgatgaaaggactca

SEQ ID NO: 30045 - DNA, 120 bp, Homo sapiens
tatcgctgaagtgtgtgttgagaaaagtgctctaaatgattagaatttgagcttcccccaacccagcttggacatgtgacttcacctcctctcgtatgcacaaaacaacctagggccgga

SEQ ID NO: 30046 - DNA, 120 bp, Homo sapiens
acacgacgcccgcctcttccgccccaagctcctgctgttttcctttgttccaggcaaattctgttttctcaataaaaagcccagacaaagagttcaaccgccctctgcagtatagacagt

SEQ ID NO: 30047 - DNA, 120 bp, Homo sapiens
ggacgtgggactctggaacaggaactagttaaaaatctgatacagccttagaaggcaggccatcattaagaattggtaaacaggtttccctagaggccagctttatcctatgggttaggt

SEQ ID NO: 30048 - DNA, 120 bp, Homo sapiens
tcccgagtcgagggtctgtccacctcggcactcatcacatgtgggctacttactttttttggaggggggttgccctgtgaatcacagaatgtttagcagtaccctcagcttctactcatc

SEQ ID NO: 30049 - DNA, 120 bp, Homo sapiens
taccgctcccctcagtggtgacaatcaaaaatgtcacagatattgccggatgtcagtaggggcgtggggagggtaggaaatcactcccacttgagaaccattgccctaaaccagtgccac

SEQ ID NO: 30050 - DNA, 120 bp, Homo sapiens
tcacgggtgtgtggtccatgaacctgcacctggatcttattagactcaggccccactgagatctgatgaatcagaaattgaggatgggaaccagtaatcggcctttaacaagctttccag

SEQ ID NO: 30051 - DNA, 120 bp, Homo sapiens
tcacggctggacggctggcaccatgcctggctcataggagcaactaaaaattgttctgactaaatcagcaggcccgactgacgctggaagggcagtatatgttcagtgagtgaagtgact

SEQ ID NO: 30052 - DNA, 120 bp, Homo sapiens
tcccgacaaatcatggaaccgcaggtgtcaacactgcttcttagaggctgtgcatcatctctcctgcaaggatggaaatgctggaatcccttccaagatgcttccagcagggggccacct

SEQ ID NO: 30053 - DNA, 120 bp, Homo sapiens
cctcgacttgagtaacttcactggtggggattaattttcaaaccacagcccgtttcattaaactctgggttgttagattattctaaatgctgagcccaagcctgtctccctaaacttcag

SEQ ID NO: 30054 - DNA, 120 bp, Homo sapiens
gccgctgcttcccagtccctgactgcctgtctcgggcgcacccatgttgccagtgtttattcctgcagatgggctgagcactagggccagcagtagcccatcgggtgacctggtgcgact

SEQ ID NO: 30055 - DNA, 120 bp, Homo sapiens
aggcgggcccttcttttgggcagacccggggcacatggcttccttggtcaggtgtctggcacaaactgtacaaccatgcacagtgaccttgttcccaactctccttcctccaacactaaa

SEQ ID NO: 30056 - DNA, 120 bp, Homo sapiens
aaacgacttctgttcctcaatgacctgagccaggcctggcactcagttaaaagaagccctgtctgagcaaggtggcagagacgggggaccaccctctctacatcccttcccccctttttt

SEQ ID NO: 30057 - DNA, 120 bp, Homo sapiens
gatcgttagttcaccttatgaagcaacaaaaagagagacccactgtggcctctgctacaggccaagcagagggcacaacccaggaggaatgaagtcagtgttctgctcgctacctgactc

SEQ ID NO: 30058 - DNA, 120 bp, Homo sapiens
ctgcgacagaatcaactggcccctcaacaggggctgaatctggaacaaagcagacgtccctttatcctacaatttctcaaacttctcatatcgagcctctgttttcaggaggttaaaaca

SEQ ID NO: 30059 - DNA, 120 bp, Homo sapiens
tgccggtggctaaggtcatggaggaagaggactcagaaattaggatcaatcccataggtcagttaaccctctctattgtgagttttaatttttttcctaaatgctaactttgaaggtttg

SEQ ID NO: 30060 - DNA, 120 bp, Homo sapiens
gttcgggattgcctacaacttgaaaatgcctactgctgtggtttaaagaatatatgccagaaattagaaattgttgtaattaaaggaaaatgcgtcttaaataattgtctagcagagaga

SEQ ID NO: 30061 - DNA, 120 bp, Homo sapiens
ttccggaaagtaaaggaaagaggcatgaattgctcttgagtgtctggctgtatgtcaacaagtggcctctctgttccttggtttccaggcgctggccatgtggtctgtccaggaaggaga

SEQ ID NO: 30062 - DNA, 120 bp, Homo sapiens
agccgcaactctcctttttgtgatatcatttcttacaacttagagaaacctgcggtttcagggtcctttacttcctatgtgtcatagttatgatgacagctaaatttactttagttacat

SEQ ID NO: 30063 - DNA, 120 bp, Homo sapiens
gttcgtggacatggctaattcccctccttttttttttttttttcccaaaaacccgtttgcactcctaaaagatggctaattgtagccattatttgctgcttctagtaatctctctctcca

SEQ ID NO: 30064 - DNA, 120 bp, Homo sapiens
gctcgtagcatataacaatggcttgcagaatttcttattttgactggtgtgtggggtgtgtttatgtatgtgtttgtttaggagagaagaattatggccagttttttattcatgacattt

SEQ ID NO: 30065 - DNA, 120 bp, Homo sapiens
gaccgttcaaggttcattgttaccctgacaggagctgtggaggggatggggcgcattcattcctttctttgtttggaccagactctgtccaattgtgagtggagactgaatggcttaggt

SEQ ID NO: 30066 - DNA, 120 bp, Homo sapiens
aaacgctaagcttttagctctgatggtacccaaagaaaatcctgttgttggtaccagtttctagtagcctcacttccttctggggttgagttatcttaattcatgtgggatataataaga

SEQ ID NO: 30067 - DNA, 120 bp, Homo sapiens
caccggctgtcgatggtgtcaaataaaaaaacaaatccatatttcaaaaggattactgcaaagtgggaagaagaaaggataattgcaatcgggagaaagctatgaccataaggttggcag

SEQ ID NO: 30068 - DNA, 120 bp, Homo sapiens
gaacgtcctactctgaggtcagcctgttcttaggggtggctctgtgctgctcaggctgagggtgggtcaaagttcctgtggaaggcgagcagcttgacccaagcttggttaaaaagcatt

SEQ ID NO: 30069 - DNA, 120 bp, Homo sapiens
ttccgcttgattcatgaggacaagcagttcagctgatcttttgtgaggccaagaatgggacctggtgtgtctgtgtcatctcatcctaggtaaaacaaagggaacactcatgagtcttct

SEQ ID NO: 30070 - DNA, 120 bp, Homo sapiens
aaccgtccctgttttgcaggatcagtgggctcaggtaaaattcaacgttgtcaatggttatgcttagaagttgtcaaactaaataacagagcgtgattctccaaaagaaaagatgtttat

SEQ ID NO: 30071 - DNA, 120 bp, Homo sapiens
gaacgggtgtctttatacatggcagggtgccaagtcatgctccagcttccctgggagaaggtgggttcccatcagcagtggcagactgatgacacatagcacagagacaccgagagagaa

SEQ ID NO: 30072 - DNA, 120 bp, Homo sapiens
tctcgcctgaaacccaagaaaggaacataccaaaaccttctgttgtttgctaaataagagcaaagttgtgtataataaggcaattttaacagggaattatcagcaggacataaatggacg

SEQ ID NO: 30073 - DNA, 120 bp, Homo sapiens
gttcgttgctctatcctgccctgccgtggctttgttatatcacaaaatccagcaagaatttatcttgctgctaataaaatcagaagatggcccagaagaagaagacaaggattttgtctt

SEQ ID NO: 30074 - DNA, 120 bp, Homo sapiens
atacgtgtattgtttgtgctctatgttcatgcaattacgtaagatatttatttcataaggaggacttttgagactctagtgtagatgttgattactaagccttgactatctgtacttgaa

SEQ ID NO: 30075 - DNA, 120 bp, Homo sapiens
actcgttttttgaattaaaatgcatcattgatgctaattttaaggaagtctgtatattgtactcctatttaaccaaacatcacatttcctcattaaaatatcagcatccataatgaagca

SEQ ID NO: 30076 - DNA, 120 bp, Homo sapiens
tcacgtggcagattttaattgcaattagttagctgctgtcgggtctcggcatgctgaaggctgggggaagtcctgatcggggtagaacaattaccaggacttttgagcagggctggtatt

SEQ ID NO: 30077 - DNA, 120 bp, Homo sapiens
gagcgagcgagagcacccatcaaagttgtgaatcttaattctcctggtaatagctatgcttggggggccagcatttgctctgaggaaaaagccaaataaatgggaattatccgagcacta

SEQ ID NO: 30078 - DNA, 120 bp, Homo sapiens
ccacgttcatcccggcggcttgggggctgatgtagccgggaacgtgctctctccggcatcctgggcttttgatgtgtgtgatgtacagctgtaacaaggcatggggtacaacacccgcct

SEQ ID NO: 30079 - DNA, 120 bp, Homo sapiens
caccggccccagcttttatttcagtggctgctattaccagctgcactgctatattatgcagaaaatctgcttgcttactctgcaaacaaactgccttggttcaatgagctattcgtaatg

SEQ ID NO: 30080 - DNA, 120 bp, Homo sapiens
aaccgctgtgctcttagctctcagatgaggatagaatgaacaattcctagctcaggtttattttgtgggtcacattacaaacatggggaaaagaggtctgtaaaattagagcagaatgtg

SEQ ID NO: 30081 - DNA, 120 bp, Homo sapiens
tcccggaatggtcacagcactggctgtgtttaatatattaatatatttagcatattaatgagtgtatcacaaactcctaggagaaacctaggtcaaatccagtgccatgttgggtctagt

SEQ ID NO: 30082 - DNA, 120 bp, Homo sapiens
ggccgaatttcctaggaagtcccacagacagaatcaagtgatgctcctagagctttgcagatatcatccatagtccctgccctgagatggcttatagtgtatcctagtagacttctgaag

SEQ ID NO: 30083 - DNA, 120 bp, Homo sapiens
ggtcggcagtcagacatggcttagaattagtgatggcagcctccttgctgtggaggctctagggaatctgctgtctttccttttccagagtccagagactccctgccttcctttgctcgt

SEQ ID NO: 30084 - DNA, 120 bp, Homo sapiens
cagcgtggtctccatcatctctcacttacatttttttttcttttttcattttttatatctttctctctaattctcttctttttcctccttctacttttttgtttgttttgttttgagaca

SEQ ID NO: 30085 - DNA, 120 bp, Homo sapiens
aaccgaacatatccgcaggttctggggattaggatgtggggtccttggaggccatcactctgcccaccatgcagacagacagtagtgaggacacctgctctgtgccagaggctgcacccc

SEQ ID NO: 30086 - DNA, 120 bp, Homo sapiens
aatcgaggctgagaaaatgaccactaagaagctaaggcaggctttgaatccgcctttcatggtggaaagaacacagttttggagcaggacaggcggtgtggtgaattcagctccacatcc

SEQ ID NO: 30087 - DNA, 120 bp, Homo sapiens
ccacgtccgtcatatggcatggggcatgtggccctcatgaagagagctgtgctgttggaacaaaggtgagacacattctcagtgaaaaaaaccaaatggaaaaaaaaaaaaacatcccaa

SEQ ID NO: 30088 - DNA, 120 bp, Homo sapiens
atacgttttcatttgctaatatatgtgtatatgtttaaaggtttcatttcttctgttcattcattaaacacgtattcagctgcaagctgggacctgtcagatgagaagacagggcatggt

SEQ ID NO: 30089 - DNA, 120 bp, Homo sapiens
tcacgcatactccctttattctcatttgcaagatcattactctccccctgctcctggcatctggcctattttactataccctggccagtctacctcctaaatgtctctcctcccctcctt

SEQ ID NO: 30090 - DNA, 120 bp, Homo sapiens
tcccgtccttgagatcgaacctgtctttggggatgccattactcatggctgctacctctgccgacgtttatagctctattttcctatggcacttcaggacatagacccttttctttaatt

SEQ ID NO: 30091 - DNA, 120 bp, Homo sapiens
gcacgtaagcacttaaaaaagcctctttctctccgtggaaaaacagcgaatgacaatacaaggagctgttttgtacttgttaccagagatgctcagagatgctgggggaagtggggggtc

SEQ ID NO: 30092 - DNA, 120 bp, Homo sapiens
agtcgtactctattttcttcaggggcatccacactccttacctagaagggtgtggcctagccctgtggtctccatgcacatccaaaagccacacttgaaaatgatagtccagcctcttta

SEQ ID NO: 30093 - DNA, 120 bp, Homo sapiens
caacgtgaacagtagttggggtgtagtttcctcacctgtcactaaaatgcaaatctaaccaagtaattagtgtttatgatccatcaatacctctccattgccttctgaaaaaagtctgag

SEQ ID NO: 30094 - DNA, 120 bp, Homo sapiens
tcccggccaatactataattaaaagacctccctccaaggatttcaaagtactttagagacatggtctaattaatcctcagtacatcctggtaatgtccgcaagctccaggccctgcctct

SEQ ID NO: 30095 - DNA, 120 bp, Homo sapiens
atgcggccacacttcttgagtggcttatgggaagtgacagcagctgtcttacccagcctctctttccagaagccgtgaaaatagcctctctttccagaagctgtgaaaatggcctctctt

SEQ ID NO: 30096 - DNA, 120 bp, Homo sapiens
ttccgcataatgctctgttgccttaattagggctgcagcctgcggataggtagaggcatgttttggagtctttcagccaatttatctttttaaatgaatcttttttggccttagatgttg

SEQ ID NO: 30097 - DNA, 120 bp, Homo sapiens
gtacgttatcaattttcttttcactcttttttgtcaatatccattctctttccatcaccacttgtgattcatttgacgattatttactgtatgtctttttttttggtgtcagacactgtg

SEQ ID NO: 30098 - DNA, 120 bp, Homo sapiens
tagcgagaccaaaagacggaaaatttgagagcatttatagggcttgggacagagtaagccagttccaagatatgcctaatagacattcctggatgacagaacagagaggatggaggagag

SEQ ID NO: 30099 - DNA, 120 bp, Homo sapiens
ttccgtatcaaggaaagatgcaaattctcagattgaaggaacacactgtcctgaaagatcccagatgaattaaagttaaactgtaaaaaatcaaaaacaaagagaagatcctccactctg

SEQ ID NO: 30100 - DNA, 120 bp, Homo sapiens
gcccgtggggacagctgctgtccccagcagcaagagggggtaaaagtggtctttaagaggtcggggaaaaacacacattgttcttgtaattcaagagttaaggcaaaattagacactttc

SEQ ID NO: 30101 - DNA, 120 bp, Homo sapiens
gcccgagggtagacgtgaggctgctgatacaataatagcaggagagatctctgattccaccctttgggaggctctggcatgttggctttcagccggttcctaaatctttcagcctgtctt

SEQ ID NO: 30102 - DNA, 120 bp, Homo sapiens
atccgagggcctctgtcctttccttgtatttctggtcctcttgaatcatcctcttcctcacatttgtttcctctcaggttcctcatctctttagccgatgtggctgaatgccaggtggta

SEQ ID NO: 30103 - DNA, 120 bp, Homo sapiens
cctcgggattctacacttcatcctaattccttggatttttaagctgtgtttgtgctgagctgggtgcatgctgtgtttctgtagtcgatttttcctcatcagggagtctctcttgcatac

SEQ ID NO: 30104 - DNA, 120 bp, Homo sapiens
agccgcttggtatttttcctagaatgctagaaggaagcagacattcatttgcttttcgccagtctctctttgtctaaattgtcccatttggctcagcccgttggctttagtcattagaag

SEQ ID NO: 30105 - DNA, 120 bp, Homo sapiens
gcacgcatgtccaaatcccatgtggaggtcacagttcactaactctggagggccacctagagaaaagaagtgtttcaggataatcactctgcaaactgtagacaagagacccagaaacca

SEQ ID NO: 30106 - DNA, 120 bp, Homo sapiens
ctgcgttttccttttcataatgtaaaaaaacccatctttagcatttttggaataagcaatattcatctctcaattagtgttaacagctaatcagggtgcagcaggatagtagagctttcc

SEQ ID NO: 30107 - DNA, 120 bp, Homo sapiens
cctcgaacagcaggcagcttgttttattttttcaatgcagcttaaagattatttgaaaaatctccttcagagaccagtgtgcggggagccacctaccccagtcagaatttaaaatgatcc

SEQ ID NO: 30108 - DNA, 120 bp, Homo sapiens
atgcggaagctcacagtttggggctggggtttaattagataagcattgcagctgttttcgggtggaagcaacttgataggacgtggagctgttatgtgacttcccatctacagggtatct

SEQ ID NO: 30109 - DNA, 120 bp, Homo sapiens
ttccggtactgtttggttgtctgtaaatgttttctaattttcctataataaacatgtattgctcatgtaataagagaggaaaaagctttttgttttttgtttttggttttgttttttttt

SEQ ID NO: 30110 - DNA, 120 bp, Homo sapiens
cttcgaatgacctcatgggaaaccaaccaaccaaaaaacccaccaatctatttcgtttttctaatttgtcatgtgttatagatctctggtctgacaagtttttaaatcacaaaacataca

SEQ ID NO: 30111 - DNA, 120 bp, Homo sapiens
acacggaaagaatgaggggcacttgtctgcattcgctcccgcaagccttctacaacaggatatcgccatccgctgcctgcttttctgctttttgttcactgctcgtaacaggaaaacttg

SEQ ID NO: 30112 - DNA, 120 bp, Homo sapiens
ctgcgagggaaaacatcccttcagaatccaccccagggctccacagaaggcaagagaaacaaaagctgcaccattctctccccaaatattccattggcaggcagcccaggaccgcgccag

SEQ ID NO: 30113 - DNA, 120 bp, Homo sapiens
ccccgaatctactctctactactctgcgggtgttaccatttgctgggcatccatcatgacaccatcttttgaagaaagacaaaccagccactgtcagataagggaccgaattaggaaaag

SEQ ID NO: 30114 - DNA, 120 bp, Homo sapiens
tcacgactcagaatacaagaggtccaggaaagccagcaacagaaagaatcactctctatgtcagaatattagagaaggatttaagaaacaaaagaaaagaaccaacaggaaggcttgtgc

SEQ ID NO: 30115 - DNA, 120 bp, Homo sapiens
aaacgaacgatgaaaagcaagcctgggtcatactgaaagatgtcgtgctctattcatggctagtgagccaaaatgacactgctggtgacagccctacggccctacccagactgtggggaa

SEQ ID NO: 30116 - DNA, 120 bp, Homo sapiens
caccgagcagagaatacacacattcctaccaaatgctggggctaggcctcacctgggtgtgggtacccaggtgtccaaacaccttcctccaccctgcgactcccacaagtcaccggacac

SEQ ID NO: 30117 - DNA, 120 bp, Homo sapiens
cctcgggtgagcatccatatgcctcccaacctgacaccccttggtttctggggcccaaaccaaccacttcaactggaacatcctccaactaccatcttcacatacctacaacaggacctc

SEQ ID NO: 30118 - DNA, 120 bp, Homo sapiens
gatcggatcaaagagaaaatcttgatgtggtgctagtctgaaagacctctctaataaaggctattttcctattgtaacaaaaagagcaggaagtaatattagtctttaataactttgttt

SEQ ID NO: 30119 - DNA, 120 bp, Homo sapiens
acccgtttatgcattcatctgccagtggacacttgggttcctcccgccagtatgtgagcacctccttcacatcactccccttttgtttaacaaacactcttgactgcctttatgtgtcag

SEQ ID NO: 30120 - DNA, 120 bp, Homo sapiens
gggcggatggacaatagaccaataaacatatttccttgattctaaaatgcattaggtcccacgttttaatgattctaaaattggaacgtgccttgtaattgatgacgtcttagaattata

SEQ ID NO: 30121 - DNA, 120 bp, Homo sapiens
cagcgtttattttttagtggcactaaaaataatggtgtatcagtttgaatcatagagttgatggatcactattaaatccactgttaagtgctatgaaaaaagcaggacaaaggataaggt

SEQ ID NO: 30122 - DNA, 120 bp, Homo sapiens
acccggttagtcagcatatcctgcctgcagtaccttcacaacatatcccagtttcaacctccctcttcatctacacctccaccctgctggtttgaacatcctcctttcttccctggattc

SEQ ID NO: 30123 - DNA, 120 bp, Homo sapiens
tgacgttagctccctccctgtctgccttgtgctcattctgcttttgccagttggcagccttatcatctcttaatcatgttgagcatgttttcatctcaaagcatgtgtacttgctttttt

SEQ ID NO: 30124 - DNA, 120 bp, Homo sapiens
agacgggaaatatgtggtgaataacaaagccacaggttttattttccctagttcatttctcataggatttatttccatctgacataatgtatatctaccttgttttgtttgttgttgttt

SEQ ID NO: 30125 - DNA, 120 bp, Homo sapiens
cagcgtggatgcctactcatatttagagaatgattgagaataccaaagcaaaccgttcatttattcatttggtgcatgtgttgggagtttggtattcaagttgggagtgtgaattaggga

SEQ ID NO: 30126 - DNA, 120 bp, Homo sapiens
tgacggggcccattgcacaaggacaggtggaaacccaagttgaaggaaacatggatcaagctgcccgttgcacttacatcacccctgctccatctgcagtcctgtcagagtcacaaagga

SEQ ID NO: 30127 - DNA, 120 bp, Homo sapiens
tctcgtaacacttttgaggtaggttctcatctccattttacaggtgaggaaaattgaggctgaaatggctcgagaaaggatttaggttggttaggcttatagtcatggtgctctcctcta

SEQ ID NO: 30128 - DNA, 120 bp, Homo sapiens
ttacgaggcaatgaggaactcggttagattttagattccgtggagccttgtttgcattttggtcatgaagaaagtatgcaaccactttactaatggttctagtttagatgctcacaagac

SEQ ID NO: 30129 - DNA, 120 bp, Homo sapiens
attcgcccccagggaatttcttatgaataagatgaaggtgcatctcacagaatctgagaatgtccccatcagtgaggcttttctgtgatcttggctgttaatgatctggacgtttcatct

SEQ ID NO: 30130 - DNA, 120 bp, Homo sapiens
ggacggtgctaggctttatggtggatgtagcgaagggtaaggcatgtggcctcccttcaggaatctttattgtggttgggatagcaaaactgtacaaaccctggctgctcatagtagtgt

SEQ ID NO: 30131 - DNA, 120 bp, Homo sapiens
gaacgagggtgcagagtgggggaaaagcccttcaggctaaaatggttcactcaggctgatggaggaaagtagaaacaactgtaatttgaaggctgcataagatttagataagggagtatc

SEQ ID NO: 30132 - DNA, 120 bp, Homo sapiens
gtgcggtttgattgcagcaaaggctcctgagaacaaagcaatggatgttgtgctggagaggcaggaggcccagaatgtagggaggtctggacaaccagggacagtgacttgtcatttgag

SEQ ID NO: 30133 - DNA, 120 bp, Homo sapiens
gaccgtacgatggctggcaaagagcttgcctattatctaacacttacttcactgacaagacaattgaagtctagaaaggctcaaagactggacaaagtgggatggagctgggttggagtc

SEQ ID NO: 30134 - DNA, 120 bp, Homo sapiens
aggcggtgtgatttggatgtaagtgtaaacaagaaggggaggaagcaggagaatcccactagagagaaccaaacattttatccacaggacagacaaaaccaactagacaaacttgaaagg

SEQ ID NO: 30135 - DNA, 120 bp, Homo sapiens
agtcgaaagtgtgggagaggaacttggacttgatgtggtagatcatggggaactattctcaatccctgagcatgaaatgacacaatgaaagtgggattaaggaagattgtttgccaagag

SEQ ID NO: 30136 - DNA, 120 bp, Homo sapiens
ccacgaaataaccctgaaatcacagtggcttaatccacagtgtgtttcttgtttgcacacttgtctaatgcagttgggtggggcatggggtgggagttctcacttactcattcagggacc

SEQ ID NO: 30137 - DNA, 120 bp, Homo sapiens
cctcgggctggaagtgacacacgcgtcttttgcccccaacccattggtcagaggtagtcacctgctcttcctccccacccccaaggaacttgaggatatttggtgagcagtgtgtgtctc

SEQ ID NO: 30138 - DNA, 120 bp, Homo sapiens
atacgatgatgaagagtgcagaccatggagccagaccccagagtgtagagcctggctccccacttgctgactgtgtgaccgtgggcaagttactcaacctctctggagcatagtttcatc

SEQ ID NO: 30139 - DNA, 120 bp, Homo sapiens
gtgcgactgataaatagaacaagcctcacagcattcttgtgagatttgaatgagcactttatatgtaaagtgcttaaagcactatgctatataattgttagcaagtatttattattgtta

SEQ ID NO: 30140 - DNA, 120 bp, Homo sapiens
gtacgcctgcttacccctcttcttcctttaagctctctgtattattccttttctgtgttcattctttgcttaaaattcacgcctttgttccccacagctgatatgcttgcagccaatatt

SEQ ID NO: 30141 - DNA, 120 bp, Homo sapiens
atccgtctggtattcttgagacttgtggtggcttagggccatcctggggttagactgattctctgggacacaggtgccagactcccccaagtctaggctcacccagttagaactgttgcg

SEQ ID NO: 30142 - DNA, 120 bp, Homo sapiens
atacgatttcattgtgttagttactattaattcttttactctccatatttgtccccttccttagtaactcttatgtgactcagttttttaaaacacattccattttctttctttattctt

SEQ ID NO: 30143 - DNA, 120 bp, Homo sapiens
gaacgtgtgagtctcagggaacgtgccttgaagaccaagcacctactttggggaaaggcagccgtacaggatgcagtgagccaaggagggctgcgtgagtacgcgcaaccgtggggtaag

SEQ ID NO: 30144 - DNA, 120 bp, Homo sapiens
aagcgtgcgtgcattttccaccctcactgaacacttactggtttagagaaagccatgtggggactgtgtgtgtgcacatacatgcacacagatatgtgtgtgtgcacacaagggtgtcgg

SEQ ID NO: 30145 - DNA, 120 bp, Homo sapiens
tgccggttcacaagagacagaatcaggaggctctgagtgtggacacacataagcgtgtaaattgaacggtgtgcaaggctggcagatgtctatgtgcacacatggcaagtgctctgtgag

SEQ ID NO: 30146 - DNA, 120 bp, Homo sapiens
agacgactggagatgactcagtgagttgtttgaaaatgaatgaaccatgaggcgtgggagagagaggaagccaggaggaaaagaagatgggccgccctggcacactccagcccaaataat

SEQ ID NO: 30147 - DNA, 120 bp, Homo sapiens
tgccggcctctgccctgcagcccagggcgggcctgtgggtgtcggggcctccgcagtctcccctcagagccctcctcccgctcaggcctttgggtggggggggtctcctcaccgcgctgg

SEQ ID NO: 30148 - DNA, 120 bp, Homo sapiens
cagcggccgctgcaggtggcagttgaagatctcctctgcccgccgcaggtatttggtaattttcagcttcacagcctcacgtcgctccttgttggggtcaactgtgggagacaagagtca

SEQ ID NO: 30149 - DNA, 120 bp, Homo sapiens
cctcggagggctggagttccagctcccattgcctgccctctaccctcccaaggagtgagctcctgtttctaaggctggttcggcagattctgcccccagattgcttcatgagcccctcct

SEQ ID NO: 30150 - DNA, 120 bp, Homo sapiens
caccgccttgctggcggctgtcacaccctgggaagggacagggtggggatttccccatccattttttcagaggaggggatagaagattccagagagcattgcttcttccatctctgatgc

SEQ ID NO: 30151 - DNA, 120 bp, Homo sapiens
gatcgggggataaaggaatttgctggacagactggaagcccaggcttgaagggtctcttcagccagagggcaggaagggcccagtgcccacctcaaggcctggccaccagggcccacagg

SEQ ID NO: 30152 - DNA, 120 bp, Homo sapiens
agccggagttggggtggaacagcactcactcaagcttggtgtatagatggaatgaacagagtccagctgccccagaggaggagggcatacagtgtagcaccagctgggaggatttcttta

SEQ ID NO: 30153 - DNA, 120 bp, Homo sapiens
aatcgcagacctggcaccttggacagtgatttgatggttagttgaggtgagttttcagctgtcagaatgtggagggaaaaggggctttgcttctgtttcagtcccgagagtgagcctgaa

SEQ ID NO: 30154 - DNA, 120 bp, Homo sapiens
actcggagctggatcatttgtggtggccttggcatcatagaaagcttgcccctttttccctctgatgacctcatgatgttgggtggtgtgtgtttgtgggtgcatttatggcaggggctg

SEQ ID NO: 30155 - DNA, 120 bp, Homo sapiens
ccccggctcttgtattccccactgattagtcatggccaggcagctgctccagccagggtggagtgctgtgcctttacccacagcactgcctgtttgttttgctttatagaaactccaaga

SEQ ID NO: 30156 - DNA, 120 bp, Homo sapiens
acacgaacaccccaccttttccttcagcacagctctcaccgccagcacaaagggcttcgctagagatgtttttggagggaatcagtgggactatttgtggcatggatggcctattcctcc

SEQ ID NO: 30157 - DNA, 120 bp, Homo sapiens
ccacgtaagagcttggatgatttagttggagaaaattgcacctatcaccaaatgcaaatttgattcccacctccacccccttttaggttatgggagttggtgttgggacagggtggcaga

SEQ ID NO: 30158 - DNA, 120 bp, Homo sapiens
catcgtggacaatgcctgcaaaattttcacaggaagaaagcctattcaggatattaacttgaaatttccagtgtcctaagagcctctcatgaagcccagttctaataagtggcaagctgc

SEQ ID NO: 30159 - DNA, 120 bp, Homo sapiens
tgccggggtcatctcctgggtcatcggactgattgctcaagttctgcaggagaggaagcaccattagaacaactccatcagaacagctccaccgggacttgtgggcctaaattttcctgg

SEQ ID NO: 30160 - DNA, 120 bp, Homo sapiens
taacgggtctgtctccaaaccctctttcctaagagctgagcaaaccaaccataataaacttgacaaaagactttgttgtggccatgacagagataccgactcaggagggctacctaccta

SEQ ID NO: 30161 - DNA, 120 bp, Homo sapiens
ccccgtcaacttactctaacctttgctgaaaactaatcttgattcattctactctgaaaatccaaaggtgcttctgagagataagagggaaggggtagaaggaaaggtgccccttgaaat

SEQ ID NO: 30162 - DNA, 120 bp, Homo sapiens
gagcgataatctttatcagatattctaaacttaaagggattccctttaaaccaactcaagctgatctttcctatctagcctgctgtttggctgtactcatgggctttggtaatatctcct

SEQ ID NO: 30163 - DNA, 120 bp, Homo sapiens
gatcgtgaccactgtgctgtcttgctccagccactgccctggcctcagcatatcagggcagcctgtgctggctgcaatactgtggtgcttgggccactgcctgagaggagccaggtttgt

SEQ ID NO: 30164 - DNA, 120 bp, Homo sapiens
ccacgttttcggcagaagtagtgagtcagtgtggaagagaggtgagggtgtgctttactttttgataaagagaaagatgtttactcataaacccttcaaaaggtattaacaaaatgttta

SEQ ID NO: 30165 - DNA, 120 bp, Homo sapiens
tttcgaggcaataaaaacttctcagaaagtggtctgccttatcattcagtggggcagagatggctcttagaagtccctgcaagactgtcacacattcctgaggctcctgtcttaggtgtg

SEQ ID NO: 30166 - DNA, 120 bp, Homo sapiens
gggcgggggagtgtgaggctagagaagcagcaactgtggtcttccacaggagcatctcactgttgccagaccttaccatctgggagggatattttttaaagacaaggctgtaaaggttac

SEQ ID NO: 30167 - DNA, 120 bp, Homo sapiens
gcacgaccctgacctctttccatgctgtgtacgcgctggaatgtgagtgactgctgatgagagagtccactgttgtttctggctctgcctcaaagggtggttgaaatgtttgttctctga

SEQ ID NO: 30168 - DNA, 120 bp, Homo sapiens
ttgcgttaccatttttcttcctaactggccaacgtcctgttactcatccctccccagttgtgatcaccttgtgcgtgttacttgaatatgctgctactatcatctgtgttctgtacattc

SEQ ID NO: 30169 - DNA, 120 bp, Homo sapiens
actcgtagctggggaggaacaatattatgattctattttaaatgatctaggaagggacccaagcctgggctgttaagaaatctaatatccatagtgtctgctaaatactctaactgtaca

SEQ ID NO: 30170 - DNA, 120 bp, Homo sapiens
tgccgacccttcatacagatgcattgtagtgtatttaattaatattttgctgttataacacagcattgaaaatcttatatatgcaatattttacacatgtgtgagtagaactagaggata

SEQ ID NO: 30171 - DNA, 120 bp, Homo sapiens
gtgcggcacattaaattttttctaattctgttaattctgcatcaagggaaaaggcagaggaagatgggggagagtggacaaaagatctctttctttcctcctgctgaaatggtttgtggc

SEQ ID NO: 30172 - DNA, 120 bp, Homo sapiens
tggcgcacagcaacctaggcaatttggaaaaaggaagtctttgtgagatctgctcagaaacatttgcatttgcttgatttatttccccacactattccttccctttctctcttccttcat

SEQ ID NO: 30173 - DNA, 120 bp, Homo sapiens
tgacgtatttcatcaaaagtggaagaggcacagctgggaccagtgctctctctccagtctgggatgtgagaatcagcagcactgagagctctagcctgcttctctcccctgacttctgac

SEQ ID NO: 30174 - DNA, 120 bp, Homo sapiens
tcacgatccaaagggatataaagtgtaaagctgaacctgggaaaggaacaggacaaatggcaccttttaatcacttgtaaatgattgtccttcctctccactggcacattgcttgattta

SEQ ID NO: 30175 - DNA, 120 bp, Homo sapiens
gctcgaaatatttaaggaaagtagctgtattataagaactagattttggcttacattgacactgtttgcctaaggtcctttagttaacagatgtaagcatttcaaagattcatgatgatt

SEQ ID NO: 30176 - DNA, 120 bp, Homo sapiens
ttgcggggctcttccaacattcgtgggaggctgtgccattggccactccgctgccatagcaatagtatacctcctcactcttactgtcactccagtgcactctcccttcagtgttacctc

SEQ ID NO: 30177 - DNA, 120 bp, Homo sapiens
tgccgccttcttccccaccctcttgaaaaaggcaaactgtatgcattttcatttccattgaagaaattggtatgaaaggatatatgacaaaaaggaccaagaaaaaatgagtaactggaa

SEQ ID NO: 30178 - DNA, 120 bp, Homo sapiens
tgacgatccagaagtggaggattatggaaacaaatggagcatgagtgctatgcttaggtacctgaaacaagaaggcagagatacaaccggtgagtactgggcctttttccttcttgactt

SEQ ID NO: 30179 - DNA, 120 bp, Homo sapiens
tgacgtgtttgctccgcaccagccatgcccagtacacctctgtgttgacgatacctggtttggttttctgttgctgccattcttgaccatttcacagggtaacctgaggttcttataggg

SEQ ID NO: 30180 - DNA, 120 bp, Homo sapiens
cttcgacaattttggttggtattatctgtgttttatagacatggaaaaaagattcagaaaggttaaataagttgtcctaggtcatgcagctaataaatggcaaagccaaatttgggagcc

SEQ ID NO: 30181 - DNA, 120 bp, Homo sapiens
gtccggccacttttggcatgccccatatcctggattctccctctgctctcccgtaactagatactcaggaaaaatgatatcatcctttctagcagatcaggcctgaaaaggacactcctt

SEQ ID NO: 30182 - DNA, 120 bp, Homo sapiens
aaacgaccttgttctcccgctgttttgacatcaccccaaatgtagcctcagggttgtcgtctcccattgggtcagtgtaagctcagcccagcgcctcaaatcccttggttcctttggtct

SEQ ID NO: 30183 - DNA, 120 bp, Homo sapiens
ccacgacttgcccagacagtctgaggcctggccatgtagcttgcagttccctagacactctggagttggacttggccagccatccctctgttgttacttttcagaggtaataagtgagat

SEQ ID NO: 30184 - DNA, 120 bp, Homo sapiens
ctccggaagagaaagtagttagagccaaatacagtcacatgtttagaagcctgaggtgtgcctccaagcaaggccgacttagaattatacagtagggactccaggatgcaggtaccaagt

SEQ ID NO: 30185 - DNA, 120 bp, Homo sapiens
atacgtgggtgtgttaacttttctttagccaatgagaaagattagatttttcaagctgccttttaattatccatttttggggtacatgggaagtcattaggagctgaaagttgatgtgca

SEQ ID NO: 30186 - DNA, 120 bp, Homo sapiens
gtgcgtttttctttgtgagacatggaagggttactgtaaagtcttggctgctgcttggaatgatttgggaagaacagggcctcagacagcttggcaggaacctgaggccctgtttttttc

SEQ ID NO: 30187 - DNA, 120 bp, Homo sapiens
gatcgagctgtcagggaatcccacgaatgtctggctcctgcccctttgtatgtttttccagcatttgtcattgaattatttttatccacctctggctttttcacacatgcatcctgggca

SEQ ID NO: 30188 - DNA, 120 bp, Homo sapiens
cctcgatatgaaagatgggagaatttgcagaaagagcacagctgtgagtttgttcctacttttttgtgataggacaagacattgtgggcatgggctgctccacctggccagctcccattg

SEQ ID NO: 30189 - DNA, 120 bp, Homo sapiens
caccgaggagtgggaaatcttgagaagttggaaccattttcgatgtcaccctgtccttctgccctcttattcaacaatagattataaatagcttggtattctgctttgcgtaattttaag

SEQ ID NO: 30190 - DNA, 120 bp, Homo sapiens
caccgccacccccacctgcctggctggaggttctgacatggcttctagagctgctgtaactctggggaacagagccaaacatgcggaagtggttacgtgtactagctcccagggaagccg

SEQ ID NO: 30191 - DNA, 120 bp, Homo sapiens
agacgccaaatctttgaagttttgttttagcagctgccaggtatgctgtttcagcactttgcagactctccctgtgttcccatatcacattttttctttactgtgtgtgcatagtataca

SEQ ID NO: 30192 - DNA, 120 bp, Homo sapiens
aggcgtgagccaccacgcccggcctatgcttgctttttcaatatcatataagtctgatcttagtgtattattacaatacagactttctttcattgtgttaacttattactgatagtagca

SEQ ID NO: 30193 - DNA, 120 bp, Homo sapiens
acacgcagtaaatgcttcctgtgcaccagatgtagtcttatctccattccactgatgaggaaatcaatgttcaaagagtttgggtaacttagccaagatcacacagctgcctgattgtgg

SEQ ID NO: 30194 - DNA, 120 bp, Homo sapiens
taccgtcctcccccacgacagaattgactcttcgttttctttttagtttacatacttatcagtcagataaggcattccagcattattgctgctgcactgctatatactctcgtatacaca

SEQ ID NO: 30195 - DNA, 120 bp, Homo sapiens
ctccgtggcctgtggtttgtttgtttgtctgtaggtatatgagggactcccagcagtaactttgtgtgagatgatgaaagacttcaatccatccatctgagatggtggcagccaggggaa

SEQ ID NO: 30196 - DNA, 120 bp, Homo sapiens
acacgttaggagaacggggccctgatatacaaataatttcttataagtactaacaaataaaagttaaaacacacaattgaaaatgaagcagacctatctttatttagccagttgagcttt

SEQ ID NO: 30197 - DNA, 120 bp, Homo sapiens
gaacgtcaaccagtgtctgattggttttgtggctagatgaaggtgtggctgctaataagggaaggtcacccatgtgatgtcttagggcaaggtggtttcactggcttttgtggtcatgaa

SEQ ID NO: 30198 - DNA, 120 bp, Homo sapiens
tttcgaaatttttctgtccaggtaagcatctgtctttgtatcctttagagtaggtcatttgaggtagtaagaacctcctttcctactcactgaaggagggggagcttcgtaattggtttt

SEQ ID NO: 30199 - DNA, 120 bp, Homo sapiens
ttccgacacctttgacagctccatatcctgtctcaggtatttgtgtgcttggtctctctatatgaagaggagcaacttctggattgctgtcccattcctattggagtcgtagtactgccc

SEQ ID NO: 30200 - DNA, 120 bp, Homo sapiens
agccgacaaacactgtgaatggaagacagccaagaactccatacagtgtgagacaaaggccttttggaagcttacttttgccaaaatagaaacagttactctcactctcaccttggctgc

SEQ ID NO: 30201 - DNA, 120 bp, Homo sapiens
aaacggacaagaaatgtctttgcatatgtcatgggaattttatccaaattgggacacaatctaatgtggggagaatactgcatagaaatgtttgcttgtcttaaattagagtacaagggt

SEQ ID NO: 30202 - DNA, 120 bp, Homo sapiens
tagcgtttgcctactttatcccccttcattctcaaaaaatgaatttacagaattatttcactacaaagaggcatccagctctgctccatcaccaggaagcctgagtgaaggctaaaagga

SEQ ID NO: 30203 - DNA, 120 bp, Homo sapiens
gcccggcccaggtaagagctcagtaagccttggtcaccatcatatgcattctaaaaccacactctccttcacagatttggaaagcccgtagttaactaggaaaatttttgagccaaatgc

SEQ ID NO: 30204 - DNA, 120 bp, Homo sapiens
atgcgaatgttgaatttgccagtgtgccccttgtggattctctgattattgccagtaccctcagaaggcccttggtggcctgtgtggctagctggtggagaggtgggcccaggcggcagg

SEQ ID NO: 30205 - DNA, 120 bp, Homo sapiens
agacgctgcttgctactgccctgaactcactgctggcaggagaactctgcagcctcctgagatggaattgcagctctttggacagactttgctttgcagcatttttgtggtttcttcttt

SEQ ID NO: 30206 - DNA, 120 bp, Homo sapiens
aaccggaaacagctcagcatcaaaaatgcacagaaggggggaaaaagcggagatttcttcagaatttaagtaatataatccaggtatcaaaaggcatgctgtgaggcgttgttccaggaa

SEQ ID NO: 30207 - DNA, 120 bp, Homo sapiens
cagcgttttggggaccccagtgttttcagatattctcctgacttttaggaaaaagaatagcatggcttttcatctgaacagtgaaaagttccccctatgaagtatcctgataaagttaaa

SEQ ID NO: 30208 - DNA, 120 bp, Homo sapiens
tctcgaaatcaggatcctgagtatcagttgatatattctcactgttctgtagtaattcttgttcctagccagcatagcaagttactcaacatctctgtgactcagtttcctattttaaaa

SEQ ID NO: 30209 - DNA, 120 bp, Homo sapiens
ctccggctcagttcagattaatcaggaaccctcagttatgactggtgatactgagtcacactcaggaatgccatagtcgcctcaagagacacaactaatgagaagttgtaatgagctttt

SEQ ID NO: 30210 - DNA, 120 bp, Homo sapiens
gaacgttaaagatggaatgtcacttggattttggtgcaaagggagttgagaatcagaacagtggggtcctgtttctttatgataatactcaagttgctttccctctaaaggtttcatttt

SEQ ID NO: 30211 - DNA, 120 bp, Homo sapiens
aaacgaaacccactgtccctactgaataattaaccaaaatgacttgttttctgtctattccattgaaagcttttttatgagcacatttgctctttaatcctgatgctttcaagccatttt

SEQ ID NO: 30212 - DNA, 120 bp, Homo sapiens
taacgactgttctgtgtcagcacccaggacagtggtgtctgttaaggctgccagggattagcagggaggaaagccatcaggactgggtagcctggtagcaccaaatcccaattaatgtta

SEQ ID NO: 30213 - DNA, 120 bp, Homo sapiens
agccgtatgatgaaagatgtttaagagattaatgtcagaagaatatgaaaataaacaccggcttaaaaaatgttatatctttttaacatatgagtcattaaagtgagaagatttaagggc

SEQ ID NO: 30214 - DNA, 120 bp, Homo sapiens
aagcgtgtgcctatgtaggaatccctaaaccatctttgaaaggtatttagcccatctggtccagttaattcaatccgttaaacatgatattgagtccaagactatagcagaagtctgttt

SEQ ID NO: 30215 - DNA, 120 bp, Homo sapiens
tttcggctgtgtgactgttctctcgcagtctgaatgagatagtgattcgtcccagggcactgttgaaaaacaactcagagtcctttcctatagatggtggcttaatggcattcttggtat

SEQ ID NO: 30216 - DNA, 120 bp, Homo sapiens
agtcgttggccttccttctttataactgtggtgttcttcttgagttctgaggtggtgatggtaaactaaaatagcagagagcaacagattagataactgacatttctctcatgctgattt

SEQ ID NO: 30217 - DNA, 120 bp, Homo sapiens
agccgcagcagctgccctcatccctgccccttagcttctgcctaagcctttcctgttctggagcccaacctctccctccttttatttttaagctcttagtagtctgcaattggtggaagg

SEQ ID NO: 30218 - DNA, 120 bp, Homo sapiens
gttcgttgtttctggccctagtaaaatgtactatagctttgtgctttttggatggggatggggcaacagcacatcagtgtgactctgactgcccacttcgttgggtccctgagacaacaa

SEQ ID NO: 30219 - DNA, 120 bp, Homo sapiens
gcccgaaacagcaggtgggagccaggtgagaaagggcaagatgatagattggggtccacctgtcagactaaaaggttaaattttaacccattaacagtagggagtcactgaaagtgtttg

SEQ ID NO: 30220 - DNA, 120 bp, Homo sapiens
gcacgtgctatgccagacgctgtcacctgctggcctcttcatccctgtccacaagatgtgggcagcgaatgctctttcccacccctctgagccagagaaagagaaagagcctgtcttttc

SEQ ID NO: 30221 - DNA, 120 bp, Homo sapiens
gcccgaagttgaaattcaagctcatagacccagattccacacataatggacatggctggaatgagcttataatcaccccgaggggttgttgaggaagtcacagacaaggcaggaaggatc

SEQ ID NO: 30222 - DNA, 120 bp, Homo sapiens
atgcgctactgatcttcaggaaaggatgagtgagtgtttctggaaattgccatctggtgggcctgacgctggttcttagaaaattaatggaacagatgttaggaaaacaaatgtgtgaat

SEQ ID NO: 30223 - DNA, 120 bp, Homo sapiens
caacgattccctaaaccatttcagatagaaccaaggagagaaatcagtgatagttaagtaatgtgtaagtttacaagtttgtaatactctgaatgtggataagctacttgcattggcaac

SEQ ID NO: 30224 - DNA, 120 bp, Homo sapiens
ccccgccccgccgccttgcaagcccctgatgatggctctctgctcctgctcagcacctgcccactgccttctttatagttagtgtgccttgtgtgtctgcctctctggggtgggctcagc

SEQ ID NO: 30225 - DNA, 120 bp, Homo sapiens
acccgaccagctgcagggcgggcccaggtccgtctgctcagcctccaagtcacctccaacagctgcagagtctgcctgcttccggtttgtacctgtgagcctcatagcatcgcacgttgg

SEQ ID NO: 30226 - DNA, 120 bp, Homo sapiens
gcccgggcttttcccaaggacatctgctatttgtgctttgagtctgcacaaaatcagtgtccacttgcacctgcatggccttgcctccacgtggctcattcattctcagctcaggattcc

SEQ ID NO: 30227 - DNA, 120 bp, Homo sapiens
ttccgggatgggggggtcctggtgactcagaatgcttcctcccttggactcctcctgctgacccagaccatgaaggtctgagtcctgccctcttgccctggactctcctcacacctctcc

SEQ ID NO: 30228 - DNA, 120 bp, Homo sapiens
tgccggcctcagatttcgaccttcctctgatgcttgtggtcactatctcccgcgttggtgggttcccagggagttggagccttggccatcgagctgctaggtgcctctgggaactgtggg

SEQ ID NO: 30229 - DNA, 120 bp, Homo sapiens
catcggcctccagcctccgccccacatggcagccacatcctgaagaaaggcgctccaggcagccacaggaagctggagcgggaacccctcgccagtaaccacaggctcctctgcctggcg

SEQ ID NO: 30230 - DNA, 120 bp, Homo sapiens
agccgtgaacggggcctttgcacctccagccagagctggtccacccatcggtacccactcctgttccttctctccagccaggttcctttcaccccttgctgtgtgctctgctgaccaccc

SEQ ID NO: 30231 - DNA, 120 bp, Homo sapiens
gggcggcgaggacacctgctggtaggaaaagcaaacagagctgctcccggagtctacggcccacgagtggctcacattcctctttcctgggctgtcagtttctcaacatctgccaaattt

SEQ ID NO: 30232 - DNA, 120 bp, Homo sapiens
acacgtgtaccaacacacacagacatctcgcccagaagccgcccggctcctccatgcagacagagcctcctgggacggcaggctcccagacatatcccccccccccaccatgcacccact

SEQ ID NO: 30233 - DNA, 120 bp, Homo sapiens
acccgctctcccgtgacacgcagacacaaagggcgccagcctcctctacgcatccacagccaaaacccgctctccccgtgcccaccggcctggagggcgcccattttgagcacatgaatc

SEQ ID NO: 30234 - DNA, 120 bp, Homo sapiens
acacggccctgggaacattcgtgcataccctcttccttccacacacacagctcacgtgggtctcgtgggtcacgtgggtggggtagaccaaagggcccaggcagcaagaagctgtctcct

SEQ ID NO: 30235 - DNA, 120 bp, Homo sapiens
aaacggagacgtgtcacaatgagttgtgaaaagcagggagaagatgaggtctccacactgagaaccgtaagggctcctgacagagccggccttcccctttatggcacccagatgcttaca

SEQ ID NO: 30236 - DNA, 120 bp, Homo sapiens
atacgatcgcatgtgcaagaatacatatgtttccctggacagcacaatgtaattccaaattaaaatcagtcaaggatgtgatgtgaattcagcaagccactcagctccagggctcctggc

SEQ ID NO: 30237 - DNA, 120 bp, Homo sapiens
aagcgccggctcttaacagaatggctctatctccttccccacccacctccccagccccaacggaggagcatcgcacatcctgagccttggtgctggtgaatcctggggcaccctgctgtg

SEQ ID NO: 30238 - DNA, 120 bp, Homo sapiens
ctgcgcccggctggattgtcatctcagtagtggcccaaatgacatttgggtcagcagtgccttctgtttctccttacagagggccaagatgggtcgccgagctcaacaggagtcagcgca

SEQ ID NO: 30239 - DNA, 120 bp, Homo sapiens
ggccgagaatcacctcaatggcaagaattcctctttgactctgactggagaggtgggtgctaaaaaaaaagaaaatctgaagaaatactgtttaagagttagtgattccttaatgaccaa

SEQ ID NO: 30240 - DNA, 120 bp, Homo sapiens
ttccgctgaataaatgccagtgaggcagactggtgacgtaaggttggattacacaattggacattgctctcggtggtgacctgcgctttctacagtcttccggcaggaagcagatcattt

SEQ ID NO: 30241 - DNA, 120 bp, Homo sapiens
ttccgagtagcctggaattatgggaaatgatccagcttctttgtggagggtgggtaattctgatgagcaatactttttactgccagggcactacttttggcagcttactcagagcccctt

SEQ ID NO: 30242 - DNA, 120 bp, Homo sapiens
caccggacagtgagttcccagacagcaggaaacctggcttctagcttgctggcccatagtaggtttgcaacagatgaagagacccatgctgagaagcctaatgggtcaggcaggtgcatg

SEQ ID NO: 30243 - DNA, 120 bp, Homo sapiens
aaccgggtacctgacatggacacacttcacttacatatcacataggtaggaatattcttcattttcgtaggaaatgcattctccaccactttcttaagctctccacatggccttgtccat

SEQ ID NO: 30244 - DNA, 120 bp, Homo sapiens
tgtcgagaatacaggcccagtattgccagatatgattcttcaagagatgctggcagtctaaaattttatgtgaaagcaacacatttttagaggttagcacctgattaagaaaacctaatc

SEQ ID NO: 30245 - DNA, 120 bp, Homo sapiens
catcgaccttgggaatgagctaggttgatagggaaagaagtgacaccaagaaggaagttgttagatgaggagggaaggaggggactggatatttcagagatggagcagttccagttatga

SEQ ID NO: 30246 - DNA, 120 bp, Homo sapiens
actcggtcctcctggtatggtcctttgccccaaagcacgcccagcatgtgggaagcatagccttccctcatttctcagtgggcatgtggttcattcatgattttactctcttgtgaaggc

SEQ ID NO: 30247 - DNA, 120 bp, Homo sapiens
tcccggttttgtgagaaagagttgcctgaaagccctcaaggtgctcagcctgacctttttttgtttgcattcacaggatggggagatcgacctgaaactcctcaccaaagtgctcgcgcc

SEQ ID NO: 30248 - DNA, 120 bp, Homo sapiens
cgccggagcacgaagtccgggaggtacagtggtggcagcaattccccggtctctcagctctggcattcccataaccagccgactcccgggctggcctgtgcctccctgaggcctggatgg

SEQ ID NO: 30249 - DNA, 120 bp, Homo sapiens
cagcgaaacccttcttggcaggatgatgtcggctgggactgggaccatctgttcactgaggtgtcctcagaggtcctcactgagtgggacccactgcagacggagaaggaggaccctgcg

SEQ ID NO: 30250 - DNA, 120 bp, Homo sapiens
gcccgtcacccatgctctagacatgaagaaatgcaatgagcttaaagctaaagaagcttgtaagcagctccgaatttttacctggaatattttgtaataaaaatatttatattcagtcaa

SEQ ID NO: 30251 - DNA, 120 bp, Homo sapiens
actcgcggccttgttgcggagcatgtgggagagttcgattcaggcggagaaggagtgggcactcctactgaaagctgttcacttctcgggaggtttcaaacagttgcctgctggggttct

SEQ ID NO: 30252 - DNA, 120 bp, Homo sapiens
gggcggggcctcccttcccgtgggtgctctgggccctttgtgaccttagtgacgcagcactgccacctgcatcataggcttccaggcagctgcagcggagggaggaggcggcgggaggga

SEQ ID NO: 30253 - DNA, 120 bp, Homo sapiens
actcgcatcagggtttggtggctgttgtgacaatattctcctttctcccctcttcctgcagtccatgccttgagctccaaaagcttctacaggttcccagagcctcatttctgattctca

SEQ ID NO: 30254 - DNA, 120 bp, Homo sapiens
atacgttgcagccatctccaccgctgcaagtattataaccgcctggttccaagatgtgctgagatcaggagcagagtcccacccttctcctaaacagagctgtcttttgtttttgttttt

SEQ ID NO: 30255 - DNA, 120 bp, Homo sapiens
cttcgctgcctgcttctcttggatgcggctttgggttaggctggcagcagctaactaaggcccactccccggccatagggagcgctgagtgcttctgttatcctgcctggaaagcccttc

SEQ ID NO: 30256 - DNA, 120 bp, Homo sapiens
ctacggtgcccttccccggcgagccacatggctccagaacaggcagagcgaatgcttgtctgttaattataaactcggggatttagtggctttagggttccatttcctccttttccagag

SEQ ID NO: 30257 - DNA, 120 bp, Homo sapiens
gatcgcccaagattatccagctgagtggcagagctggaattccaagttctgatgccacagcgctttaccacctgtgtttctgttacccactgctgccttcatcttgggaaagtaatctag

SEQ ID NO: 30258 - DNA, 120 bp, Homo sapiens
gatcgtctggcctacaacgcctaaaatattagctatctgccgctttgcagaaaaatgttgccaacccctccttagaggagagaatgaagatgagaaataacaaacctgcgtgctctcaaa

SEQ ID NO: 30259 - DNA, 120 bp, Homo sapiens
aaacgagcactcatcagttccaggaacagggacatgatctatctggagacaaaaaagctggaaagggggacatctggctccttcttggccctttgatcctacttgggatgtgggggtgag

SEQ ID NO: 30260 - DNA, 120 bp, Homo sapiens
cagcgggctcaggatattgaagagaaggcccagtggagtgggtgttagaagcaagggaaggggaaaatgttgatttttcttttggcaaggcagaaatcagaaagcaagggtggtgggagc

SEQ ID NO: 30261 - DNA, 120 bp, Homo sapiens
gaacgaggaagaagccgttcttctgtggctgtgccggagtgaattaattcacggcatatgttcctagcatctgtcgtggtgacctggactggaggggtcagtgagagaggagaccatgcc

SEQ ID NO: 30262 - DNA, 120 bp, Homo sapiens
caccgaacgctggctggccagcccacccaggaacagctgctgcagctgcagccaccagcgctgcctcggggaggagggagagcatccccttcctgtgctccccacaagaaaacacctggc

SEQ ID NO: 30263 - DNA, 120 bp, Homo sapiens
gaacgctatctcttccagacctttagcggcggtagattccacccagcagccacacgtccgccagcagactgcaggtgtgtccccaaaggacagcacaggaggggtgagagagccacagcc

SEQ ID NO: 30264 - DNA, 120 bp, Homo sapiens
ctgcgtggtgctgaagtgtcccttgtgagttgatggtcagcccagaggaagcaaggcaggcaggcgtggtggctgagaatgggatgatgccaggttcacatctgtgctcttccacgtcgc

SEQ ID NO: 30265 - DNA, 120 bp, Homo sapiens
gtacgaccttgggtatgttctcataactccttgagcctcagttttctcatctgtggagtgacgctgaaaatcattcctgaatcacagggctattgtgatgattaaatgagctgatgcttg

SEQ ID NO: 30266 - DNA, 120 bp, Homo sapiens
tcccggactctaaaatctgggctttgcatcccataccctgtgtgggtggcaccagcctgggcacaatgggaagcaagatgtcagctccatgctccagatgggcatgatgttgatttcctt

SEQ ID NO: 30267 - DNA, 120 bp, Homo sapiens
ggacggagagcccagggcttgcgagtctgtaacctggtccccaggggcatctggtaacatggtaatgggcacgttcgagcatctcatcttttgctccgggtgcctttaatcgctgccaat

SEQ ID NO: 30268 - DNA, 120 bp, Homo sapiens
agccgctttgtgtctaaaatggccaggataattgaaacggaatttggaatcagggccctgcaggcaacacttgttgaaagaagaaataaagatcggttgggtcacgtcttttgtaatttg

SEQ ID NO: 30269 - DNA, 120 bp, Homo sapiens
ttgcgtttaataatcataccaggaggtacgcacaaagggagaggcggcgtgtgagccagctcccagcctgcccgcaccctccctgggtctgccagggagggaagaaggaacatgcgaggg

SEQ ID NO: 30270 - DNA, 120 bp, Homo sapiens
ccacgtggcaggggcaggagagggggtgcgggttggggtgggccgagttgctagctgagatgaaggtggtgtgagaaaccttcgtgctgggcgccctcacccactgtgctctgcacacct

SEQ ID NO: 30271 - DNA, 120 bp, Homo sapiens
acccgtctgtggtgctttgttagggcagccctagcaaactagtacagagaatgaggtgcagggagacactgggctgggatgcctcttgccctgcaggcccttccctctcttgtctggaca

SEQ ID NO: 30272 - DNA, 120 bp, Homo sapiens
acccgtggctctttctccaaggcccagggctgcccaccaccaggccctggtcatggggtgctaacagccctgtgatgcccaacttccgtctcttccttccattcttaagcctcttcccct

SEQ ID NO: 30273 - DNA, 120 bp, Homo sapiens
tttcgccattgatgagaaaaagtgtcctgccttggtgacacaagggggctctcagtccttgcataagccagaatcctgacaaccagtgacctggaatctgggaaccatccagtcagtaat

SEQ ID NO: 30274 - DNA, 120 bp, Homo sapiens
ccccgggctggggacagaggaggagcacagcagcaaagggtggaaaggggataaacagagtcctggacttttaagcttgcaagggctttgtggtgttggggggcgggcggggaaatcacg

SEQ ID NO: 30275 - DNA, 120 bp, Homo sapiens
ttccggagaacagcctctgctgccaagagctgatggatacactctcgaatcttttcattttagttcctccatgctggggcaggaggaaggggaagtagatggtgatatctccactgtaca

SEQ ID NO: 30276 - DNA, 120 bp, Homo sapiens
gaccggtttccttgtgactctagagctgtcctgcagatgttcttctttttatataaaacaagatcaagtctagactatgactgtgcatcaaaactcagatcctcattcagtctatggtat

SEQ ID NO: 30277 - DNA, 120 bp, Homo sapiens
gtacgtgtgtgggggtgggtattaaacaagacttgagcattaagcatttcccctcctgagcccagctcctttcctcacttgttgactaagccctgcttcactgagcattttctttttttc

SEQ ID NO: 30278 - DNA, 120 bp, Homo sapiens
catcgggccatctcggattccacctcttttataggaatgagtgatgaagagaggtgggttccgctttgccgctgtattaatacacatcaggggccagctcctagcactaaatcacgctac

SEQ ID NO: 30279 - DNA, 120 bp, Homo sapiens
ctacggcatacatctgttatcggactcttcaccagtgtgatgaacaagactgcagatagaggcttccttgtgtcattctttataggattttcctaaaagaataaatagctcagatctctg

SEQ ID NO: 30280 - DNA, 120 bp, Homo sapiens
ttacggctttctagcatgcaggtgtctagtgcacagaaccacaccctggatcttagtgagcaagcatgctaacctgcttctcagacttgatacaccagaacagggatttccctgcaagtg

SEQ ID NO: 30281 - DNA, 120 bp, Homo sapiens
agacgttggggctgcacgactccctcctcctctcccaatttcaggacccagttgcacctttgaaggccacttggctttcttctctggctgtgccctgcacagagaaggggaaaaaagcac

SEQ ID NO: 30282 - DNA, 120 bp, Homo sapiens
ccacgcctgggcccagcaccagcacagcctcgggaccccatgcccagtttttggcagcttccagggctgggagagcctaggcctgggccgggtgacctcgcagctgtgccttccacccct

SEQ ID NO: 30283 - DNA, 120 bp, Homo sapiens
ctgcgtgtcacccagggctggggacccacgtgggggtgggctgagccactggtctctacctcctggggcttggccagcttccccatttctctctgacacgcctggaaactcctgaaaagt

SEQ ID NO: 30284 - DNA, 120 bp, Homo sapiens
tcccggaaaggtattcagcttgtgatgatgataatgatgatgatgatgatgatgatgatgatgagccaggcactgcgctctctcctgtcttcccttctcaggctcagcaacccaaggaag

SEQ ID NO: 30285 - DNA, 120 bp, Homo sapiens
ttgcggggttttggggtgccacccggggctttggggacactgcgcatagttactgatataccccgtgttgatgcaggtgttaagtccccttttgcctaggaaggtgggtgcatcctcttt

SEQ ID NO: 30286 - DNA, 120 bp, Homo sapiens
ccacggagtaataaggcctgtagggcatatagcatttgaatgagacacacctaccctgtgggatgccactaacttcaaggcctgctcgtgagtcatctccaagcaggccccccttcccac

SEQ ID NO: 30287 - DNA, 120 bp, Homo sapiens
cagcgcatccggacagagttaattaaagcagcgagggctggcggggcagctggagtccggagtggctgagctgctatggcgggagacagctcccatcaggaatggggcccagtgcatgcc

SEQ ID NO: 30288 - DNA, 120 bp, Homo sapiens
aagcggggatcacgaaaggaggcaacaaagggaaaggcaagatctcagtggctcacacctaactcaatctacattctgtacgcaatatccacaaataatcaagagtttcctgcaacatct

SEQ ID NO: 30289 - DNA, 120 bp, Homo sapiens
ctgcgagatgctcaagatctccagggtctagaatggtgcctggcacatcctaggcacttaatggacagctctagaatgaatgaatgaatgagatttggactctctagttggggtttatct

SEQ ID NO: 30290 - DNA, 120 bp, Homo sapiens
cctcgtccactagaacgtaaattccgtagaggcaggtcattttgtctggtttttccctgctgggtccccagcacctggaacagtgcctgactctgagtgcgtgctcattaaagatttgtt

SEQ ID NO: 30291 - DNA, 120 bp, Homo sapiens
gagcgttcttttcttcctctactcccttgctgccacccaccaacctgccccaacttctgaaattcccatcctgggggaggttcccatgaagggctcctctacacctacatggagcaactg

SEQ ID NO: 30292 - DNA, 120 bp, Homo sapiens
gtccgccctcaagccagccaggggtgtgggtagggcggaccatgtgcctagcttcctttgatcatagaaaacactgtgctggacacagaacaattcaaaacagcccttgccctcgagaag

SEQ ID NO: 30293 - DNA, 120 bp, Homo sapiens
ctgcgaatgtttgtacatccagaaaaatgtcagcaagctgaaggggtttgagaaacacttgcatggctgcccaggagactcaaagtgactgttgccagggccccaacctaccaggacggc

SEQ ID NO: 30294 - DNA, 120 bp, Homo sapiens
cgtcgtaggcaaagttcgttctcggctttgggggaggctgtgaccagcggaacagaagggcaccatttccctgctccgaggcggctttgcgctcgcggtgccagaacctggggttatccg

SEQ ID NO: 30295 - DNA, 120 bp, Homo sapiens
gagcggcgtgggcgcgggcggcagccggcgccgcgagaagcgactctcagaaaccgcgggtctccagccccggggcagcgcgccaagagcgcagagtgggaaagtgaactgatcgcctaa

SEQ ID NO: 30296 - DNA, 120 bp, Homo sapiens
cagcgggtggtcaacccgcgtgtcatgtccgggctctcggggatcccactctatccacctacggtttccctcccgacaccctccacggtcgccgctccacctgctcgggtacctgcccgg

SEQ ID NO: 30297 - DNA, 120 bp, Homo sapiens
gggcgctgcgcaccccacggcgcccccggcgggtgtcccggaggcaggttgtgtgcgcgtgcaaagtggtccctcggaaggcttaataataataatacataaaactctaggttcttacgg

SEQ ID NO: 30298 - DNA, 120 bp, Homo sapiens
gctcgtcttcctcttttttttctgacgcaaactaaattctccaagtcagcgtttctccagttccaccgtgctttcatttgtgtaccactcgctctccccctccccccaagaaccacgact

SEQ ID NO: 30299 - DNA, 120 bp, Homo sapiens
aatcgttttttaagaatgagataaacattaagacaccaaggtgacttgattatttttaaagagtacacattcatgatgggtttttttttttcctgaaaaacagctcccctagttctgtaa

SEQ ID NO: 30300 - DNA, 120 bp, Homo sapiens
ttgcgcttcctaaaatttcactttagatgattttttttcttcttgttttctgagtagtatgcctcttagaattcccacagaattgtcttttattttctatgaagtgcaattaactgtcag

SEQ ID NO: 30301 - DNA, 120 bp, Homo sapiens
gcacgttaatacctgagtggtaggaagcaactgttgagcatttaaggagataaacctctttgtatattgttggtgtaaataaatttttctctacagctgaataccagcttcttggaaaat

SEQ ID NO: 30302 - DNA, 120 bp, Homo sapiens
atgcgcacctatactgagcatttacatgccctgtttcatttaatcctcaagaaagccctgtaaggttggcattgttatccccacattacagatgaggaactaaggtttaaaaggtgaagt

SEQ ID NO: 30303 - DNA, 120 bp, Homo sapiens
gctcgccctaggggaatcataagctagcatggataaagcccatatatattagaaccctgatcagaccagcttcagactctgctcctaaccactgctgcatacatccagaaagtgcggtgc

SEQ ID NO: 30304 - DNA, 120 bp, Homo sapiens
tttcgacttactgtcacctgatgaaaatgacctatttaggaagacagttttattctatactaaacctgtaaggtctccaggtatttgattggcttgccatattccttctcctgattctgg

SEQ ID NO: 30305 - DNA, 120 bp, Homo sapiens
aaacgggattttttttatttcttaggaataaatataagtatataaaaatgtttaatatcttttaagctataattttaaaactcgaactatatttttctgagcagtgtttggagaaaagcc

SEQ ID NO: 30306 - DNA, 120 bp, Homo sapiens
ttccggtttggggatgatgaactgctggcagctgctttcagctattagcaggttctgccactctctcagacaccagggcttcagctgtctagtaaaagttaaacagctgttccccacata

SEQ ID NO: 30307 - DNA, 120 bp, Homo sapiens
atccgaggtttccatatcagcattcccactacctcgccttgtctgtgtagtaagatagctgccaaagtatcctttggttttaatgaacactgagtaggaaggcaggccatggcagagctc

SEQ ID NO: 30308 - DNA, 120 bp, Homo sapiens
gggcgatgctgtctttttctctttaattcaggttgttaatgaaaatctgggctgttgaattatgtaatgaagccttctttttaattcagcagtcataatcaaagaaaaatactttcacat

SEQ ID NO: 30309 - DNA, 120 bp, Homo sapiens
cgattcaaaatcaagaggaattcatgctgttttccagtttgtccctcaattcacaagacctctcttattcatcaactaattagatttaacatttttccattgtgaatgctaaagccatcg

SEQ ID NO: 30310 - DNA, 120 bp, Homo sapiens
aaacgtggagggtagcaggccttggggtttgccttgccctgctactcccctaacagcggcagcctgtcagctgtatgctaacgaggtgaacaattaaaccgagtcctatctggctggccc

SEQ ID NO: 30311 - DNA, 120 bp, Homo sapiens
ctgcggattaaagggaagacatgggagcccaggagagcaagggttaaagagaactataagaactgtgaaagtcaaattctccagaaaatatatgagggccatttgcaaggagaatcaagt

SEQ ID NO: 30312 - DNA, 120 bp, Homo sapiens
ttacgctttataattgtgcacaatcagcatatcttactttataggaaacctaatagaccttgttgttactttattttctagcagtactaatgaagatgaggatttgaaccctgaacagaa

SEQ ID NO: 30313 - DNA, 120 bp, Homo sapiens
aggcggatggctaacaatgccagagaacgcttacgcgtgcgggatattaatgaagcattcaaagagcttggccgaatgtgtcagcttcacttgaagagtgaaaaaccccaaacaaaactc

SEQ ID NO: 30314 - DNA, 120 bp, Homo sapiens
agccgtggcagtcatccttagtctagaacagcaagtcagaggtaagtaggttcagccgagatgtataactgttctgcttcagatgggcagacatttctgtttacagttgctcttctgctt

SEQ ID NO: 30315 - DNA, 120 bp, Homo sapiens
ggtcgtttttcctgtaattctcacttctgtctcactgtatcacccaatatctgtgggctgagtgttctccaccaatagagagtaattctgtgaagcaaagcagataacaaacagcctctg

SEQ ID NO: 30316 - DNA, 120 bp, Homo sapiens
taccgtgccctgctggttaataggatgccttgttatcatcccttctgcctttgccagatacctttacacccatgtcaataaggtctcagggcttctttgttgaccccagaccaggaacac

SEQ ID NO: 30317 - DNA, 120 bp, Homo sapiens
caacggtcgctgtcctctgcactccacagtcctaggggtactcttgctggggtggaagtcgcgacctcctctgagggtgaatgggcagggcccacgtctgcacctctcttaacagccctt

SEQ ID NO: 30318 - DNA, 120 bp, Homo sapiens
gggcggccccagccctccgggctcagctctggaggggctgaaagatgggagccctgagctggcaggacctggaagatggtgtcctctccataaaacaattcccaaagcctttctttgtct

SEQ ID NO: 30319 - DNA, 120 bp, Homo sapiens
atacgttacagaacaaatagaactatgtttatacttcccaaattatgaaggtgatttcacgttttttggtgggtttttggtgtgcgatggagtttgtttttcttctgggacattttgggc

SEQ ID NO: 30320 - DNA, 120 bp, Homo sapiens
cctcgctgcaacatgaaggtgggatgttgggggcaccggaggatttaccctctctaggctgtgctggttactatagtggagggtctcagagagctccaggctggggcaggaggagggtga

SEQ ID NO: 30321 - DNA, 120 bp, Homo sapiens
ggccgccctccacagttcccgtgagccttgtgtggtcaggcgtcccctgacctttctaactgaaaccaggggaaagctgttccccggcggagcagcaggcgtccctgtcagagccaccgg

SEQ ID NO: 30322 - DNA, 120 bp, Homo sapiens
tcacggctgcttcctcctggtcatctggtccagggcaggcctagaggatgtgtgttgactgaccatgttcctgctaaaaatatgggtcctggagtcagaatttcttgctgtgaaaagcac

SEQ ID NO: 30323 - DNA, 120 bp, Homo sapiens
gtacggtggccaggaaagcgggaaacaggtggcggtgctcacggggcagcactggactggggaatgctttcagcagctccccccgtgggcgtgtcagtgtggactccctccaagacactc

SEQ ID NO: 30324 - DNA, 120 bp, Homo sapiens
ctccgggcctcaggacgccctgagcactgctcagaggttcactcttcagtcactgtggtccccgggagcagtgctgatgagttgaagctcagcctctgggtattcatgctccaccccctg

SEQ ID NO: 30325 - DNA, 120 bp, Homo sapiens
tcacgccctgctcctctgggaccacctctccccacaccccatgggcctgaaacataagagttctttacttggggggttgggggtgggtgagaacactcagcccttcagaaacacacagca

SEQ ID NO: 30326 - DNA, 120 bp, Homo sapiens
aaacgcccctctttggggcccaggacaacatgctggtttcccggaagcatctgggccaagactctgctgctaagaaaatgatattgtttttgcaagcatgggagtgtgtttaaaatgctt

SEQ ID NO: 30327 - DNA, 120 bp, Homo sapiens
acacgaggttaaaaaccatctcccaaacccagaaaacagaatgcaaaacctgggaggtgaattaactctttactgatgccaaggagtttatttcaaaacaggattcatcgactacaggga

SEQ ID NO: 30328 - DNA, 120 bp, Homo sapiens
acccgcagccctttgtggggaaaagtaaattccatggcagacctcagtggctgaagattatttgcttctcctggaaataattagaaaaatacttactctttgaaaggcaacatctggctg

SEQ ID NO: 30329 - DNA, 120 bp, Homo sapiens
tgacgttgtgcagaaggaaagaaacatcccgagggagtgtccagtgggttttaatggccgtgtctagagaggcactcctgctctgtacaagggctggcttcttccctggatctaggggtt

SEQ ID NO: 30330 - DNA, 120 bp, Homo sapiens
tgacgtcagtggccctggatctgggtcccgtccctgctcttcagtatgcagagctgtcaggcgtcgtgtgctcctgtgtagagtgtcaggggtcgtgtgctcctgtgtggacagggacag

SEQ ID NO: 30331 - DNA, 120 bp, Homo sapiens
tttcgttattcagtgttcttggcttctttagattgatcatcatgtcttctgcctacaaatatctgctcatattttacaagcagagaagtgactggagctgtaaccagcctagctgaccaa

SEQ ID NO: 30332 - DNA, 120 bp, Homo sapiens
gttcggagcaggttaatgtttaatgtaaaagtacttagatgagtacttggtacatagtaagagtgtttaagagttaattacattattattattattgcaaactaaaaattgctcccaggt

SEQ ID NO: 30333 - DNA, 120 bp, Homo sapiens
gaccgagaagaaagagatactttgctgaaagcacaacatattccgagggagaatactgagctttggaattcactttgcagacatctgcgaggatgttccgggagccaggcttgttatagc

SEQ ID NO: 30334 - DNA, 120 bp, Homo sapiens
ggccgaggagtgacacttccactgagctctgacagatgagagcttgtcttggtggcacaccagtgccgcgggacatggtgacatgctgtggtccacagccctccagtgaccatgtgagca

SEQ ID NO: 30335 - DNA, 120 bp, Homo sapiens
ccccggatttagaggttttagctcatgtttatcatcagcctggtagtatcttctctttaaatgaggcagtcacaggatcccactcaggggaaattactttttggttggtgggtcaattct

SEQ ID NO: 30336 - DNA, 120 bp, Homo sapiens
tgccgattgcttgggccagcctggcttgactgatggggactcttgtccttggaggcaagggccagccacagcataaaggtgaaggtttcagattgcctggttgcatttcctccgtagcca

SEQ ID NO: 30337 - DNA, 120 bp, Homo sapiens
gggcggggatgtgtggaccagcattacgtgactaatctccatgctcagctgataacatgtgatggcccagagagaggaaatgtttctatctggcatatgttcatagttcttccaagagct

SEQ ID NO: 30338 - DNA, 120 bp, Homo sapiens
actcgctgatctcgctaactaaagcaattatcatcatttagcagtcttttcataaagtattatttccactccaaaacaccacttttatttgccaagtgccacaatgttgcatcctggcga

SEQ ID NO: 30339 - DNA, 120 bp, Homo sapiens
cagcgtttactgccaaattatgtaagcctttggttaggcttagtccccgacggcgcaagcgtgtctgtggtgtgcattaggattgtaaacgtggcccagtgcctggaagtggagaacagc

SEQ ID NO: 30340 - DNA, 120 bp, Homo sapiens
gaccgtttttaaaagcctcttgttgatttccctgtcttatttttttttagatttgactgaatttgagggagaaaagcgaaaccgatttaatttttattgctttgaggggacatgcctgtt

SEQ ID NO: 30341 - DNA, 120 bp, Homo sapiens
gagcgacaactacattgacccatatcagtctgtaaaaacgaaacaggcgaagtagtcaagacgtgtatcactggcagagaatggacagtttccaggcaccgggaagctaacacaaagggg

SEQ ID NO: 30342 - DNA, 120 bp, Homo sapiens
gttcgccttagtacccactggggtgtgggccagcaagggctgtttgttccaggttgttttctatactgctgccagcaactttccttacaaaaccaaatctgatcgtgtcagcctttgctt

SEQ ID NO: 30343 - DNA, 120 bp, Homo sapiens
atacgtgtagagtgacttgctcctgctttgccatctgaacaggctgttgtcctcctgcaagaattcccccaaatgtcctctcttttatgaacatgccctagatacctatactccctttgg

SEQ ID NO: 30344 - DNA, 120 bp, Homo sapiens
ctgcggaaccctggccattcttctactgtagtttgtatcataccctattataatttctcatcttgtctgcttcctccattagactctgcacttcttaggcatagggggcacttttgtcct

SEQ ID NO: 30345 - DNA, 120 bp, Homo sapiens
gagcggtcagtggcttctctgctccagcttagagttgccagtgagagaatgctgggcccatgttgctagatctttcatttttttcaagaagccagatatctggatgtttctgtgagatct

SEQ ID NO: 30346 - DNA, 120 bp, Homo sapiens
ggacgtttctattctggccccattccccttgccagtcagttagagctggctattgacccaggtagcctggccttgcaaggaggaaccagggcactctgggctttgtaggagcctggtctg

SEQ ID NO: 30347 - DNA, 120 bp, Homo sapiens
ctgcgtgttcccaggctatgatttatctggagctgcaacagcttatcaggccagagctgcacaggtttagagagggaccttcctgaaaatcagaggcccagatagagagctcaaccttga

SEQ ID NO: 30348 - DNA, 120 bp, Homo sapiens
gcccgccagggttgttactgaagactttgttttctaagttctctcactggaataaaagctgttttgtgatgagcccctgccagcctggctaagtagcgacgttccccccagacatgtcag

SEQ ID NO: 30349 - DNA, 120 bp, Homo sapiens
atccgctaaacattcacaatgacaaaggatgtgaccatggatttgttttgccagcgcttcttgtggcttatgctaagaggaatagtgggaaagcctgtcatcctatcagtaatgaggccg

SEQ ID NO: 30350 - DNA, 120 bp, Homo sapiens
gaacgtgtctgcttcccttagctcagctgacagcccaacactgacagaactgatcatgcagagatctggtcccagaattgctctggacacttctttttcctttcaactgagcacttggat

SEQ ID NO: 30351 - DNA, 120 bp, Homo sapiens
aagcgtctgactcaccctttactttcccccaattctctccctgtatctgagttacatgcctaaaaagatgagttccaccaatgtctataacctctttccctaccagctctctttccctct

SEQ ID NO: 30352 - DNA, 120 bp, Homo sapiens
ggacgtaggaattggtaagccaatgaaacagaaacgctgatgtctcctgattgtgttctgagagcttctcttctggcctttgctgcctcctgacttgtgagggagggcagagaaatgggt

SEQ ID NO: 30353 - DNA, 120 bp, Homo sapiens
tggcgtttggtctgtttaaatccagagtaatcctttttcctttccgtcctccaaaaaccatgtttccatttatgacaattgccatccttaccaatgattccctaagtgctaggcactgtg

SEQ ID NO: 30354 - DNA, 120 bp, Homo sapiens
catcgtccctgaatgagactatgtcatggtcttaaagaccactccttcaaatgcatttgggtctccattcccaagttaaaagtggtgtttcttaaaatgggtgaggagttaagttcagct

SEQ ID NO: 30355 - DNA, 120 bp, Homo sapiens
ccccgatcaagagtattttctttagctagcttaaaaagaaaacatatattttatgtaaaaacacatacatggccaaatgcaatactgaagagacaatcatcctgtatcttttatggtttt

SEQ ID NO: 30356 - DNA, 120 bp, Homo sapiens
tgtcgttctacaatgcccgttgacttattccattgcgtctctgctttagggtatggtttggtcgctttggttgtcatgagaaagagacattctccttgcagctacctccatgtgagtgaa

SEQ ID NO: 30357 - DNA, 120 bp, Homo sapiens
aaacgctgtcacccaatgggaattttgactctcctgtgattgtgacttctttgttttctccagagcttggctctgtgtcctttaagaaactgccaaggtgagtggctgggagctactgag

SEQ ID NO: 30358 - DNA, 120 bp, Homo sapiens
gaccggtttctgaaacagaagggtggggactggtcagtggtgaatgctgagggaattaatggctctggattcttgtgatgttctgagaaatccaaactgcccgttccagaacatggcaaa

SEQ ID NO: 30359 - DNA, 120 bp, Homo sapiens
attcgaggtcttctgcaatcctagttggcccataatctctcttgatctcacaccaggcccatagcaggcaccacagtctctattttacagaaaccaaagcagcttcctcatggaagggga

SEQ ID NO: 30360 - DNA, 120 bp, Homo sapiens
gggcgggtcatggctttctcttgctgttcctctctgggtccctaccttggtgggttcctgccacactgcccacccaccagagcagcccttcattgagctgccgcagttcactgctgtgtc

SEQ ID NO: 30361 - DNA, 120 bp, Homo sapiens
aaccgcctctgcctccaggtcaatgtggatgacctgtccctccagctctctagcagcactgattctcctggttctaattggaaggggtaacctaatgtaaatgagattttttaattttag

SEQ ID NO: 30362 - DNA, 120 bp, Homo sapiens
gagcggatacctttccctcacgccctcaggaagaatgtgactcaggaggcccagagccaaaggaaaaacgtcccccaggccggcagttcatttccttcacattctcagcattcctcctct

SEQ ID NO: 30363 - DNA, 120 bp, Homo sapiens
ttacggggagcctgtctttgttggaagactgtcattagccggaaatgtttctgttctaaatcttcaaatgattggggagaaatgacttgacaggttcctctcaggggtgtaacagcccca

SEQ ID NO: 30364 - DNA, 120 bp, Homo sapiens
agacgttctaggctttgcagagggatccacatgccttggtcctgccctcagacctgccgaatacacagggctaaagattgtcactgactttcacaggcatgaccaaggcccagcccatct

SEQ ID NO: 30365 - DNA, 120 bp, Homo sapiens
ctccgtcaataaagaaaggctggagtgtgtgcccctcactggttatgaaagctaagagaagtgcaagtcggagagacattcaacagtaagttgaaggtagtgtggggggaaggttgcaag

SEQ ID NO: 30366 - DNA, 120 bp, Homo sapiens
ctgcgcaggatcttacttggtctcacaacagttgtcaacaactcccaggggatgggaaatgtgattccagaggtttgcagggtaaatgcaattaaacaatttttgaagaaaggtggaaac

SEQ ID NO: 30367 - DNA, 120 bp, Homo sapiens
agccgcacatagagtaagtagccagcccacaattagcacctgccagtgtgggacaggaaccgccggtgaacaaggtttaggccacggtctaggacctttaggtgcttacagtagggctac

SEQ ID NO: 30368 - DNA, 120 bp, Homo sapiens
aatcgttatgaaactaagtggaaatgacctgtcaatattaagtccttcatatatttatgtgatgccaaacgtgtctgtttttccttgtgctttgctagctctctatctgcagtccatacc

SEQ ID NO: 30369 - DNA, 120 bp, Homo sapiens
tcacgatcatcccctgagtaggtcctgttgtgacaagtgaggcaacccaggcagaggttactaacctaaccaagggcatgtggtaggatgtgggggaactggaattggattctgggtctg

SEQ ID NO: 30370 - DNA, 120 bp, Homo sapiens
acacgtcctagaggacataggtctttaatttggtccctgtattaggggctcctacggactcccagtcatccagatctccccttcaatggccggtttccatgcaactcgacagcctgctgc

SEQ ID NO: 30371 - DNA, 120 bp, Homo sapiens
ccacgggtctcatggacgtggctggccaggaaatcttagctgttcctctagcctggctgctttggtgccacttactgctgtgatctttggatctctcattttatcctgagtgctcccttg

SEQ ID NO: 30372 - DNA, 120 bp, Homo sapiens
tctcggacaacctgtgaatatggggtgtttcttgttctactttatccaaaggggctttgtaatgtattacccttgtccttggttggaaatgtgtcctttttctattgtgaaagtttggtc

SEQ ID NO: 30373 - DNA, 120 bp, Homo sapiens
ctacggctgaccgtacctcctgagagtccagttcctgagcaatgtgaaaagaagattgagagaaaagagcaggtaaggtatctccgaggcaaagccccaacaagttccagcctctatacc

SEQ ID NO: 30374 - DNA, 120 bp, Homo sapiens
tcccgtcttcccagaagacagagagctctccctagccggctctgccaccgacgtgccctgctcttgtttcttggtgaacactatggctttgtgttaccttgaagctgcagggacactggt

SEQ ID NO: 30375 - DNA, 120 bp, Homo sapiens
tggcggggaacgtgggttttcctgaaacagcccaatccagttgcttcaaagggcctattgtgagcagctggcggggctggaacctttctcagcagcttggagcagcagccgggggctctg

SEQ ID NO: 30376 - DNA, 120 bp, Homo sapiens
tcccgcagaagagaggaaaggctggcaggcaggctggtgcagggaaagggcactttcttggctgggggtaggaggcattcggcaaacatttttgtgacagctcctgtgctaagtgctgag

SEQ ID NO: 30377 - DNA, 120 bp, Homo sapiens
ggccgtgaagataagtatgtccttgccttgggggaatttgcagttttctgggtgagacgatgatgtgatatttcaggtgttaagatccagccctatatgacggaatctgggaacacagag

SEQ ID NO: 30378 - DNA, 120 bp, Homo sapiens
cagcgtaaagaagcaaggtgagccggcagcatagcagggtggtctgggggagatgccgtcatacagagaaaccacaggtagtggtcatgaacataggctttagaatcagacagtctgggg

SEQ ID NO: 30379 - DNA, 120 bp, Homo sapiens
ccacgccaagtgctaagcatggttcctcgtatatagtaagggttcgatcatttgtggctatgatttttactctgttacgaggttgcctaaatgtctaccctcagagtcaggttgtcttta

SEQ ID NO: 30380 - DNA, 120 bp, Homo sapiens
gcacgacccattttatgcttatcttcattgctgtcttgaggttctgaaagtttcttgtctttccccactgattttcacatggagccctcatgtgggatgaatgggtagagccaggaagct

SEQ ID NO: 30381 - DNA, 120 bp, Homo sapiens
aatcgctgtctcacactacgtgaacggcatgtcctaggcagggctgtggcagtgtacgtatcctgctctcagttttggattttgctcaaggacaaaccatgtgcttttgaatggcttctc

SEQ ID NO: 30382 - DNA, 120 bp, Homo sapiens
attcgtctgattaaagacccactcaaatgaagtcaaagtgggctggctggtgggctgggagagggtagagaggtggagttataaatccagaaggatgaagagaacaggaggggatgtaga

SEQ ID NO: 30383 - DNA, 120 bp, Homo sapiens
taccgagctggcagggacttgagctcagaggggccaggcacccagatgaaaggagagtggcatttatcttgaggtccttgtgctaaagagtagaaaccagcagcccccactcccttcacc

SEQ ID NO: 30384 - DNA, 120 bp, Homo sapiens
ggccgactgtgagtcccttggtgaggagactagagagttgttctctgcagaaactggaaggtagagaggcttcagtcttgggaactccaggtatagcagagcacagaagcaagtcaggtg

SEQ ID NO: 30385 - DNA, 120 bp, Homo sapiens
gagcgatgggattgaacacgggcaacttcctctgccctgaacacacactgaaggctccagcccagccccaggcaggggagaggaaggttcctccccagagaaagggaatggctgcagaga

SEQ ID NO: 30386 - DNA, 120 bp, Homo sapiens
aatcggatgagctgaaagagtaggagcgatgggatggaacacaggcaacttcctctgccctgaatacacactgagggctccagctccgccccaggcaggggagaggaaggttcctcccca

SEQ ID NO: 30387 - DNA, 120 bp, Homo sapiens
aagcggctttgtttctcttctgctctctttcctctcctccaggttagcacttctggccaccagtcaggtgttttcaccctttctgtgcccactgtcctcaagtgggtaagagttagacac

SEQ ID NO: 30388 - DNA, 120 bp, Homo sapiens
cttcgtctctttcagaagtgtctctgtttgaaatgaatgaggcagacaagagtgtggcttcaaaagcaactctccccctctgggctttgcttattgaaagtcctgtgagcactgttacta

SEQ ID NO: 30389 - DNA, 120 bp, Homo sapiens
taccgccagtcattggccttcactttgtctatttgagtttgcaaggttaacatgaaagaggctgtttattttctcccaacgattatgcttaaaaattacatgaacttccctcaccgagac

SEQ ID NO: 30390 - DNA, 120 bp, Homo sapiens
tgccggtacctcttaagggtgtcattgctgatggaactagagctaccttcactactgttgccatggttacactttctgtaccagaaaattggctgatccttggcccagctctcccacctg

SEQ ID NO: 30391 - DNA, 120 bp, Homo sapiens
ccccggggcctagtttgtgcaaatgctgagagaagtggccactattagcaagagggttcctcagaaaagaggatccaagtcaggaggcctcttgttctcttggaagcagaatctcttggc

SEQ ID NO: 30392 - DNA, 120 bp, Homo sapiens
catcgagcaccaggaagtactccctcaaggacccttcctctttagcccctcctcccagcctacttcttttgagtatttattattaatgacatcttactaatggagtcactaatgtgctgc

SEQ ID NO: 30393 - DNA, 120 bp, Homo sapiens
ccacggacattttatctcatcctcaccatatggttgagtaagctggcagttaagtgccttgccggcggtcgcatagctggtcagggcagagcagggagaggtacctgcagcctcaatctg

SEQ ID NO: 30394 - DNA, 120 bp, Homo sapiens
ggccgcagtgctctgtgtcgagcccacacccagtgatttgacagccagaggtttctagaaaaacattctgctcagttcctctcacagagagggagatttagacagttgttcctgcccttc

SEQ ID NO: 30395 - DNA, 120 bp, Homo sapiens
tgccggagctcatggaaagcatcccagagacccaggtgacctagctcaggccctgccctacttccccatctacaagtggccactggggctctgaaatcgcttggactctcgactagtctg

SEQ ID NO: 30396 - DNA, 120 bp, Homo sapiens
gctcgacatctgtgacaggaccatcgactgagagggagagctgccctccagaccacaagtcttctctggaaaacacacacgtatatgagaagttggctgtgttcccattataggtcttac

SEQ ID NO: 30397 - DNA, 120 bp, Homo sapiens
ttccggaccagcaggagtgagaagaggcgcatgcatatcatgtttgcattgttttcttgcatgtgtcacttcaccacaatgctcaggacctcaatgagagttttaagttctcccagcttc

SEQ ID NO: 30398 - DNA, 120 bp, Homo sapiens
tgacgccagtgccactggtccctgaactacactttgagaagcgaagttctaaaggtcacaaaacaacttctcatttcttcagtgaactggtaattagcacctacagctaaatataaggca

SEQ ID NO: 30399 - DNA, 120 bp, Homo sapiens
ctacgtctagcattttgcttaagtgggacctaaaaagttactccaagctgcctcccctagggtcttctggctgtttctggtaatgtgtattcctgctgatgctcaagccctttgcaacaa

SEQ ID NO: 30400 - DNA, 120 bp, Homo sapiens
tcacgtggactagggttgggagctcttcaagtcccttcctgtctgccaaaaggtttctaagcagtttccaagccgtttcttgcagttttcccatcaagccaggtgaaggcaagtgttatg

SEQ ID NO: 30401 - DNA, 120 bp, Homo sapiens
ccccgttatcttgggtgctttcagttttcagagaccagctttccaacagggctaaataacactctatggtttctttccccatcagaaaccaaagaactccctgtttctcagcccttgcca

SEQ ID NO: 30402 - DNA, 120 bp, Homo sapiens
gtgcgttaagtggggaaaaagtacattaggtcaaccccaaaatctgccatcgataacatcagagtatgtccatggctttattagttttctagtgaatatttaagagaaaaaggtgctagg

SEQ ID NO: 30403 - DNA, 120 bp, Homo sapiens
cctcgtgctctgcaccgtgttctggtggcttctgcagctgtcacaggaaggaatccacacccgtccccaaggacgcctgcacgggaacagatgcccgctcccttaccccttgggggaagg

SEQ ID NO: 30404 - DNA, 120 bp, Homo sapiens
aggcggggccctgggaggccctgagtggggccactgcgttgctatgagatcagaacggtagccagttggtgggtgcagcaggctcacacctagcaagaacctacctctccctttttccta

SEQ ID NO: 30405 - DNA, 120 bp, Homo sapiens
tcccgtactgcagcttccaagcccacggtggttacgtctgagcaccctgtagggctctgctctgaaagtcttttcagctcccaatgagcattgttcaagccgatgaacatccccaaaacc

SEQ ID NO: 30406 - DNA, 120 bp, Homo sapiens
cctcggccccacccaccacctggcatctgtctttaaggatgtttataacagagttctgaaataaagttttggctttttcctggagttctaactctgcaggagaagcagtgaggtaggact

SEQ ID NO: 30407 - DNA, 120 bp, Homo sapiens
ggccgacttgggatgtggatgtgcaaaaggaaaggtgaaggctggatgggaggcagggtgggcacagttaaggtgggccctgggccaggatggcctcccaaccagagagtagccttcaac

SEQ ID NO: 30408 - DNA, 120 bp, Homo sapiens
cctcgtactgcgtgccagacactctaccaagccctccacttaggtaataatcacgtcttccaccctcactctcaccctgtaagggagctcttagaataacgctgctctccacggctggga

SEQ ID NO: 30409 - DNA, 120 bp, Homo sapiens
attcgtccctgccctcaaaagggccttgggatcaagaagaagtggacacgagcacatctgactaaacacaacatcatggagggtgtatccaggatatgagcaaaatgctcagagacaact

SEQ ID NO: 30410 - DNA, 120 bp, Homo sapiens
ttacgtcacaaatgcttctacagcacctactatgggccaggcatcatgctaataagggctttaccaatattaattcatttaatcctcacagcaacccactgagatgaatactattcttat

SEQ ID NO: 30411 - DNA, 120 bp, Homo sapiens
taccgtcgggccacactgcctcacaacacactttctcgccaaattcagagacacataactaaaaccacttacaaatggagtatgccaactgagaatgctacagaacacattgaggaagtg

SEQ ID NO: 30412 - DNA, 120 bp, Homo sapiens
agccgtggttctgggtggggaaggagtgcaatgtgttccaggaactcaccaaggccaccagaaaaggagggtggaaaagaaggaagaaaacagctcaagaagaggctaaaacatgagcag

SEQ ID NO: 30413 - DNA, 120 bp, Homo sapiens
ttccgtagttgggttccgcaagaatgataggaacctaacagctttggcaggggtaatagcatcagttatgcatcatccactgatcacttgggctgacatgtagaatgcattggaagagga

SEQ ID NO: 30414 - DNA, 120 bp, Homo sapiens
ggacggcggggttaagcagggagaccccgggggaggcagcagcaaggagagagttgatactcccttggatgggctggaggtggataaaaatggattcaagtgagttttaggagacagtat

SEQ ID NO: 30415 - DNA, 120 bp, Homo sapiens
ggtcgggaagcacttgtttgtcacaggtttgttgggtgccggaggggaagaaagtcccgtgcaacagccacatgcaatgttcatcactcccctggctctcaggctgcttcagggctccag

SEQ ID NO: 30416 - DNA, 120 bp, Homo sapiens
cctcgcacgtgctgatctcgggctaagggctgtttccttccttcgactgaagacctttcatactgtaagattcagcttgaaagtctctccctccatacacatcacacgctgacactggac

SEQ ID NO: 30417 - DNA, 120 bp, Homo sapiens
aagcgagagagcccactgacatcccagcgctgccttcccagccacactgagggagaggtgggcttggcccttgaggccccttcttctcaaaggcattgaggttactttccatgtagatta

SEQ ID NO: 30418 - DNA, 120 bp, Homo sapiens
ttacggttgagaacaatgagaacttctggagcacattctgtgggctgtgtgaggacgtcggcaagggaacagactaagatggctagaaaatgcccctctttcatctctagaattcatcta

SEQ ID NO: 30419 - DNA, 120 bp, Homo sapiens
acccgctcaacccagtttcacttgctagtggaaagtaacgtctctgtggtcacatcaagccaccctgggcatggctggaaagtgcactcatgcgagactcgcctgtttgaagcagctgct

SEQ ID NO: 30420 - DNA, 120 bp, Homo sapiens
atacgtggctgctgcatcagagaacacagaaataaaacatttccatcgccgcggagagttctactggtgatgctgggatgaagattttaatctaggccaccacagctacaccactccctg

SEQ ID NO: 30421 - DNA, 120 bp, Homo sapiens
aaccgtgatcataactgacttgggcccccaaagcctattccaccagccacctccagcattttgatgaatacatattacactcttaaaagagcagacttgcccaaccccggcctacagaga

SEQ ID NO: 30422 - DNA, 120 bp, Homo sapiens
catcgcctcctgattgtagtttcacaaaggatgactaacttggcctgaattcctctggctcccaagatatttcgacaaaaccatcaaaggatctattttctacaactgtacaccagaact

SEQ ID NO: 30423 - DNA, 120 bp, Homo sapiens
actcgggtaaacactgcgagagtacagcagtagcaagagagaattgggaaacagtcgccgagtgaaacgaggcaatttatcgcccacttccattctcactctctcacaaggaacctttac

SEQ ID NO: 30424 - DNA, 120 bp, Homo sapiens
aaacggatctgtacggagtaaatcctgtttcgccagtgcctcctctcatttcatcctcagagcagtcagatgaggtaaccgggtggagaggagggaaggggccctcggggggcactctgc

SEQ ID NO: 30425 - DNA, 120 bp, Homo sapiens
gcccgggcactgggctggatgtgttgtacacgttagctcatttcccatttgatcctcacagcaacccccagacagggagagacacacgcacacacagagacacggtcagggcaaagtcac

SEQ ID NO: 30426 - DNA, 120 bp, Homo sapiens
catcgcattgaatcccagcctttgctccttttactgcacttggcctcggcgtaggaccaaggccctcgactgagtgcctctccctcctgcggcattccagctgcatgtcccgcctcctcc

SEQ ID NO: 30427 - DNA, 120 bp, Homo sapiens
ccccgtgctgcccttccccctcccccgccccctcacccacggccctgcactccaggctccctgggtcgggggtgaggggcacttgcttctgctgctcgccgcagccatgagagcaccctt

SEQ ID NO: 30428 - DNA, 120 bp, Homo sapiens
ggtcggcgagatgacgagccaagctgtgactcgggcagtcggtctgtttttggcttctctcagctacttctttggaaggtttccactgacttcagggagagttccagaagaagcaggggg

SEQ ID NO: 30429 - DNA, 120 bp, Homo sapiens
tgtcgtagacagcacaggcttggggttgggataaggagtgtcaagaatcttggccttgctgccaaccacttatgtgaccttgacctaatgacaaaacctatgtgggcaccaaggaagagg

SEQ ID NO: 30430 - DNA, 120 bp, Homo sapiens
ccacgcccagctcctagaactctgagaggccagtctctctcttcatctcagaaaccttttaaatattttcgctcacatctctcttctgttacatccttcacctccgttctggatttttac

SEQ ID NO: 30431 - DNA, 120 bp, Homo sapiens
cttcgatttatctcttgaaagctctggttcaaaatcatccttttttggttccagagaatcagttttattgtgctgcacttatgtctccttttcttattctttggttcaagttatctatgt

SEQ ID NO: 30432 - DNA, 120 bp, Homo sapiens
attcgcagcctgatagaaggaacagcagtatcagcctcccaggctcaagcttagcagcatgtgggttgccagtcctctggcaagggacttgaaggaagcctctctgccccctttctagtc

SEQ ID NO: 30433 - DNA, 120 bp, Homo sapiens
tcacgaggaccttgccccggatcccctccttaggcttatgatatggttcccaggcaggaagacaatcttgccccagctctctgacaggattctgctgtggcccgaagcctcattcacatc

SEQ ID NO: 30434 - DNA, 120 bp, Homo sapiens
ccccggcaagccccagcagctgcttttctcaggagaggcaaatgggttaaactgcaagtagaaaaaagttcaagctgctatcattccagaacccccagttcctcatgtctcggaacttct

SEQ ID NO: 30435 - DNA, 120 bp, Homo sapiens
atgcgggagacagccctcttatctcactggccaaaattaggtgacatgaccattcctaaacttggcaagggtaatgagattaaccacagaccaaggaccctaaccacatgtctgttagag

SEQ ID NO: 30436 - DNA, 120 bp, Homo sapiens
gctcgcaagctaaatgttccagttcagtaagcagtttttcacatgaaaaccagaacagttgacattcgagtgttcaccatatgcaaggtgccttacatacattctcctttaatccacatc

SEQ ID NO: 30437 - DNA, 120 bp, Homo sapiens
acacggctaatggaccatcatttccctctttatagattctgtgtccatgaatgcagcctaccattgcagtcagcaacagaaaatgtcctttacatattaactcccttggaccccatgtga

SEQ ID NO: 30438 - DNA, 120 bp, Homo sapiens
acacgtaacatataaatgcacataagtggtgttcggttttgataaattttattgaagagtcagatacatacagcatagctccctgaattttctcaaagtaatgcttatgagaccaagcaa

SEQ ID NO: 30439 - DNA, 120 bp, Homo sapiens
ggacgttctgttttttcctagagcccaactaagttactttcattttctattccctcttctgaggcaactgttaaattaaaaaatgtgtcctctactatcacctttattcttcctgatacc

SEQ ID NO: 30440 - DNA, 120 bp, Homo sapiens
gtgcggcctggtcttgaaagacgtttttccatctagctggacaaggggaacattctctgaatagcaaccacacacatgtgagtcatggggtggagacttctggttcactgtaacctagac

SEQ ID NO: 30441 - DNA, 120 bp, Homo sapiens
tgacggagtaaagccttaggagtgtggtgaatgtggagaaaacctttagtcacaactcctactttacagtacaaagaagaattcacagcaaagaaataccttataaatgcagtgattgcg

SEQ ID NO: 30442 - DNA, 120 bp, Homo sapiens
ccgagtgctcttcattgctagagagttatctacttccacgttcctgggatttccctccccctttcttacaactccttgccaactaagggacctgtgatggcggctgggaggaggactgga

SEQ ID NO: 30443 - DNA, 120 bp, Homo sapiens
gtacggcgtgtttcatcaggcaactgccaggctgtttttcagattgttcacatttctttttgtatgagtttcccatttatttcggcacgctaagtcttccatgctacgttcactaataaa

SEQ ID NO: 30444 - DNA, 120 bp, Homo sapiens
ccacgagcacagaggagcccaatgtgaccaggcaaaggctgtgattttaggggaacccttgctgtattccctgggaaccaggacttcagttcagcagagcctaaagtagcaaggatagga

SEQ ID NO: 30445 - DNA, 120 bp, Homo sapiens
atccggttcttgttctcactccaggtgccatatcaccccatagttggatccaaccaccttctactaagtgggtctcacaggttttgcgccagtgactgagggcagtcctaagctccatca

SEQ ID NO: 30446 - DNA, 120 bp, Homo sapiens
gagcgagtcaacagcctgagctgtcatctgaaccagaacagtgtttggcacacaaagtatgtgctaaaaacataaatgtgggggtggtaggtgcctgatgacgggctaatatgctttaca

SEQ ID NO: 30447 - DNA, 120 bp, Homo sapiens
acacggagaacagcccccaccctccatcccctgggaagctctgactcatccatcaagacctgcccctgccatccagctcccccctgcagcctcccctgacatgaaacactggagagggac

SEQ ID NO: 30448 - DNA, 120 bp, Homo sapiens
gcacgtgatctccttcagtctgtgcgagcccacctgaggtgaggaaactgactcgggaggttagggaacttgcccaagataacttagccaagggtgaaagccctgaggtgggaacaaaca

SEQ ID NO: 30449 - DNA, 120 bp, Homo sapiens
ctccgcacttgagaagagaagtgaccaagaggtgagcctcagacagagggttgagggaaaggggaaccaagccacacttttgtttgtttttaagagacagggtcttgctctgtcgcccag

SEQ ID NO: 30450 - DNA, 120 bp, Homo sapiens
tgccgcagcctcccaaaatgttaggattacaagtgcgaactaccatgcccagtccagtgtggttctttatacaaagagaggtgaggcacccaggctggagtgcacagtcatgtgccttct

SEQ ID NO: 30451 - DNA, 120 bp, Homo sapiens
atccggctctgaagtttggctgaaaagtgtagccaaaatatcccacaaatgtcctacttttcagtgtgtaaagttaaaaaaagtttttaggaaacaggtgtgtttactctgaacgcaaaa

SEQ ID NO: 30452 - DNA, 120 bp, Homo sapiens
agccgggaaggctactgggtggcatttacaattatgagcaggttgatgcagcatcgcctgccaaggtgccgcactgaggaacaaaaaggagctgtttggaggtgacaggatgtcacgggc

SEQ ID NO: 30453 - DNA, 120 bp, Homo sapiens
agccgttgtggggcagggttgcaggagccctttgagaacacagaacgttctttctgcacagcatgtggcctctgctctgtatcgcttggataaaaggatggaaatgctttccattgatgc

SEQ ID NO: 30454 - DNA, 120 bp, Homo sapiens
ttacgtgcagccaaagttgagcggcactgatccaggtgctgtgttggaggcagaatgagcatcctggtgccctgctctccaccagcacaactggacccacttagccacacagtgagacca

SEQ ID NO: 30455 - DNA, 120 bp, Homo sapiens
ccccgcccaccctgcagtagaggtgaagcccacctgaccccaaggtcagcagcccagggcacagccagggccctagatgttctccagccagctcctctgttcttctctctggctcttttg

SEQ ID NO: 30456 - DNA, 120 bp, Homo sapiens
tctcgtataaaaatcaactcaaacaggaatgcacaaaggcctgatcccaccaccccaacctcatcccaactgttatctccacctggaagttagttcactaggtctttgaggatttcagat

SEQ ID NO: 30457 - DNA, 120 bp, Homo sapiens
ggacggaagaccctagagggtggagcagaagctctgaattcaagtcctggctctgtcacttcccagctggcttttgtcagtcacttcccagccatgcatgtagacaccgatgatgggtaa

SEQ ID NO: 30458 - DNA, 120 bp, Homo sapiens
cctcgccccccgcatgtggctttcacggggctacaggtcaaggactcccctctcccgggtaggaggtggacacctggcccaaatgaggctgatcagaccatcccaggaatttctatcttg

SEQ ID NO: 30459 - DNA, 120 bp, Homo sapiens
gaacggtgcaacccaataatttaaaacaaacaaaccatttagccccttcatcccaacagggacagcctgagttctgctggctaagttcccagaggggctgtggttttgccctttccggga

SEQ ID NO: 30460 - DNA, 120 bp, Homo sapiens
aatcgaggcccaaaagaggccaggatagatgcaaggctctatatccacttagtgagagagtcagagctttaatgagatctcctaacccacacctgtgcatcagacttgtctcaacaacag

SEQ ID NO: 30461 - DNA, 120 bp, Homo sapiens
tggcgacatcaccctcggccacagccgctgcaggaagcaccagcccacaggtcagtacctgcagctcccaccacagctgagggcttctgtactgctctcccaaagacatgtgaaaggtaa

SEQ ID NO: 30462 - DNA, 120 bp, Homo sapiens
caccggcaatatcttcagagccagcttcattcataccatctctgggctccgtggaagcgcgacacgtttcttgctaatcaaaactctgtctgatgcccacgttctgcacaatggaggtca

SEQ ID NO: 30463 - DNA, 120 bp, Homo sapiens
agccgggagcagacagaggctgcactacatagaaaatgggcagattgggttgttaggtgcaaggaatgaatgaatgttctcagctgttcccagcatttgttcacagagtgtagagcagtg

SEQ ID NO: 30464 - DNA, 120 bp, Homo sapiens
cagcggagagcaggccagggtgggaagaggtgatgcatttatttccagtgactcctggcagggagttaagccctttagaagatgattctcagacagtacagttctctgtaagcgagagaa

SEQ ID NO: 30465 - DNA, 120 bp, Homo sapiens
cagcggatgcaacacaaccaatttacaggatggagtgatcccacaatggcccgcacagctccccggttcctccacacacgtgtcacatgggtgcaattcttttcatctttcacagtgctt

SEQ ID NO: 30466 - DNA, 120 bp, Homo sapiens
aaacgtgccttgttaagacagtgctctgaaaggcagcctttgtcaaacctggatctcccggggaacctgttaaaactgcagaggccaaactcacccaacccccctgaatctccacttggt

SEQ ID NO: 30467 - DNA, 120 bp, Homo sapiens
tcccgactttaagataacagcaaaaacatttgaccgaggccacattctatgagaacactttgctataatttactctctagaacttataggcaaatatttgttgaaggagtgatccaggga

SEQ ID NO: 30468 - DNA, 120 bp, Homo sapiens
agacgccctccaagataccctgtctgcacatccctgcgtgcactgcatatttcttgggacaaaccccgcactgggatgtctgtgtcttgttcctggacccctggatcctgagcatttgca

SEQ ID NO: 30469 - DNA, 120 bp, Homo sapiens
acacgtgtgggatcagagcatggggctgtatggtcttatcgcacacccctgtgtgggcacatgtgcagatgctgcagaagcagaagaaacaggacaggcatgagtctggcggtgacaatt

SEQ ID NO: 30470 - DNA, 120 bp, Homo sapiens
agacgacttttcccacatcaccagcacctgtcttccccctctaggtccccaaagccttgggctccaccctggaaccatggcacagtggctgggcctcccgaacctttcgtacatcctgca

SEQ ID NO: 30471 - DNA, 120 bp, Homo sapiens
agtcgatcttgtgtttaagaccacatcattcctaaatcagggtacttacggtctgagagatcgtttatttgtgcaggaggaagtcaaagctcagagagagaatcactcgccgaaggtcaa

SEQ ID NO: 30472 - DNA, 120 bp, Homo sapiens
gaccgcctgcccagtactccccgccaacctgctgtggctcccagaccaactgcctcccacttttttgggagagtctcctgatgagaacactgctttttcactctatctgggatgaaaata

SEQ ID NO: 30473 - DNA, 120 bp, Homo sapiens
tgccgcttgggaaagagaacagcccctctcaatggcaggaggagacgggctgggggaaggggggcccgcagagctcagtgaccaccaggaagccagggacagggcaacagcgaatcaaga

SEQ ID NO: 30474 - DNA, 120 bp, Homo sapiens
ccccgctcactcagtcagtgacatttatgaagtgctcactctgagccagcctggaggacagcatggtgcctgccagcctccagctactcccagtatgggggagcaagcagccagcccaga

SEQ ID NO: 30475 - DNA, 120 bp, Homo sapiens
agacgatgtccttgttgtccggaatgtcgtggacaccggccatgggttccctctcctcgacctcctgtcagccacttggaagggcccgggcaggacagccagcgggagccttggttaaat

SEQ ID NO: 30476 - DNA, 120 bp, Homo sapiens
atccgccctctctgcaggagctacgcatcctaattctgccttggcagagacatgagcggttggcggtccaggccatggtaggggatggcagaacacgggataagactgcccgtgggcctc

SEQ ID NO: 30477 - DNA, 120 bp, Homo sapiens
gggcgctaaagtatccacactgcaaggctctggaatgctgatgggctccggaaagcacgaggggccaggccagctgcagaggccatgggactccaggggagaagggagggcttatggagg

SEQ ID NO: 30478 - DNA, 120 bp, Homo sapiens
ctgcgccccaatcactaccaggccccactgttcgaacggggagcacaggccttttcatcttgtccatcaaaggtctccatgagccttcacctcaagcctgtggggcagggggcatagcac

SEQ ID NO: 30479 - DNA, 120 bp, Homo sapiens
cttcgtctgcagagtcaagctaatatagctgtacccacctgaaagggttgtgaggtcagctgggatgaaatgggagaagtgcacatagtaagtgctcattcaatgacaaatgttaatatc

SEQ ID NO: 30480 - DNA, 120 bp, Homo sapiens
ttgcgaggccctgtcctggagtgctgagccaggcctgctctctgccagccgcacagggtacgtcccactgtaatgcctccgagttcctccatcacaaatcagacatgtttctgatgtgga

SEQ ID NO: 30481 - DNA, 120 bp, Homo sapiens
cttcggggtgaatcttggctgagtatcttgaggcaggtcaccagtcctatctgggctaattttctccagctataagatgaggtggggccgggtgcagtgtctcacacctataatcccagc

SEQ ID NO: 30482 - DNA, 120 bp, Homo sapiens
tgccggaaatttttcagtcgtgaaaaaaaaaaaaagcacaggagaggctggaatacgagcagttttcagtatgtatttttaggaccctgtacaggcctgaagttcctttgatgagtttag

SEQ ID NO: 30483 - DNA, 120 bp, Homo sapiens
ccccgtttggattttgtgatttgttgggaaaagccagaatgttcttcagaacaaaaagacattcctggcccccatcaccaccgccccatccatcttcctttcttttgtttctccttggtc

SEQ ID NO: 30484 - DNA, 120 bp, Homo sapiens
aggcggctcagtctctgagcaatcagaccccacccccaccccgtgaggtccctccaagtgtagcatccagccccgaccgcagcctacgcctcgccccagcagctgcagacaattgcatcc

SEQ ID NO: 30485 - DNA, 120 bp, Homo sapiens
ggccggccaggaactgccctggcggccaccactggagagcccagcagtgacagctcagcctcggggccagcaggctcccaggacccccactcacctcccagcagacgttcctcgcaaacc

SEQ ID NO: 30486 - DNA, 120 bp, Homo sapiens
aaacgctccagaaagatcgggctattcgttcggggctctgcggggctgaccctgagcactcacaccccatcccacatgctgtccaggcatgctcactggctctgatccccacaggaagaa

SEQ ID NO: 30487 - DNA, 120 bp, Homo sapiens
actcgcccagcttagggaccgggttttcctggactgtgggggagcgtatgtgtccacgttgcagccaggcatggaccgtgggtctgaacaggcagagacctctgagaccacagggctgtg

SEQ ID NO: 30488 - DNA, 120 bp, Homo sapiens
cctcgtaaggtggccaggcagaaaccacaagccacataccttcctacacaccttctctcctaggacccctgcaagggtcctgttgagcagatgttaccagcccacttctggataagccca

SEQ ID NO: 30489 - DNA, 120 bp, Homo sapiens
caacgagctcagaaatcttcaagaagcaactggaccagtgggaaatgcaggtctgggtgattccagcctgaggcctgagactgagcccagtttcctcaggctccagacaactgggtggcc

SEQ ID NO: 30490 - DNA, 120 bp, Homo sapiens
acccggccggtcagccccatctggggtggtcagggtggggcacagatgctgaaagtcgctcccactgtgcacaggtggggccctggctgaggcaggtcaggacctcgtgacctgttaccc

SEQ ID NO: 30491 - DNA, 120 bp, Homo sapiens
aatcgtagacacacaagtctcacacaagctgacatatatgcgggttgacccacaaacacacacacacacacacacactgcctgctgggctggtctggcagggcctggggtaggtcagtcc

SEQ ID NO: 30492 - DNA, 120 bp, Homo sapiens
ccccgaaggcaacaagatatcagcccttgagtctggactctggccaaggggagaggggacagaaggaatgagagttagaagagagcaacgcagcagaagaggagagggagaagagaacaa

SEQ ID NO: 30493 - DNA, 120 bp, Homo sapiens
gcacgccctttaatctcccagaacctatgcacctgcaaaatggagctaagagaggtagctacctcctaaggtaatgctggaagacctgggagcatattaacctcctggggagctttacaa

SEQ ID NO: 30494 - DNA, 120 bp, Homo sapiens
attcggcaggtctggggtggtaccccaggatttgctgatgctgctggttgaggccacactttgagaaccactgtcttgcaaagaaagagagacagtgggtaagctgatgcatatagaaca

SEQ ID NO: 30495 - DNA, 120 bp, Homo sapiens
tgacgcaaaggaagctgtgtgggtttttcctaacaacaaccaattgtccagttctccaacaccacttgggtttccaacaattcaagccatttctgagcctaactacccagagttagtgca

SEQ ID NO: 30496 - DNA, 120 bp, Homo sapiens
ccacgcttctgcctgcccaactacaacttcgggggttgcccgcagccctccttcggattcgataatttgttagaatgactcatagaacccagagaagggctttacttttgattactcatg

SEQ ID NO: 30497 - DNA, 120 bp, Homo sapiens
agccgaatggaagcgctgcatggggcaagacgcaggggtggagcccagagcttctgtgccctctctcagaatggaagaggcatccaagtttacaaagcacttggagaaatgttactcatg

SEQ ID NO: 30498 - DNA, 120 bp, Homo sapiens
agccgtgtctgcttgccccatcaagaggtgggagggattgatccaccttcctgccccacagatggtgcagcctccaacctattgttttccaggacgcttcggtggagagcacaaggaatg

SEQ ID NO: 30499 - DNA, 120 bp, Homo sapiens
ttccgctggacaaggtttcctccagactcaggcctgccctccagacaacaaggcagggcccttggtcccaccctgccctgcctggctcactgggccaccccaaggaaggccttgccctct

SEQ ID NO: 30500 - DNA, 120 bp, Homo sapiens
tgacggatacacagaaggcttgggcagtggggtgaccaatggctccagacaacggaggaggaggatgctgcccaaggcctcaacctgactgcacctctcagcccactcatgcaccacgaa

SEQ ID NO: 30501 - DNA, 120 bp, Homo sapiens
acacgtttcctggggagctacaaacacataagtcctgggattctatcaccagccattctgaccccatcagcctggagtggggcccaagaaatctgcatattcactccccctctcccagga

SEQ ID NO: 30502 - DNA, 120 bp, Homo sapiens
actcgataaggcttgctggtcctgtcatttattttcattgtctcatttcatcttccaaacggcctgcaaagtctgaacagataactcatttcacaggtgaggaaagaagctcagagaggc

SEQ ID NO: 30503 - DNA, 120 bp, Homo sapiens
agtcggctgcccaggtcatgcaggcagcaacgggtcatgctaggatccaaacctgggtctgcaacccccacacctgtacctccccaagcagcgctccctgtcgggtcaggcttcctcctg

SEQ ID NO: 30504 - DNA, 120 bp, Homo sapiens
gggcgtccccaggccttgtcgtcccacccgccatcccacccccactgcctccactgttgcttcctcctctgctactaatctggtctcacagaccatcccatttcctgctagcccaccagc

SEQ ID NO: 30505 - DNA, 120 bp, Homo sapiens
agccgccttccttgctcccaatgacacttcctggccttgtgccctcctgttacctcctttgcctccagagaggttggagcagaggctgggcagtgccagaaatcaggcatgaaatcctca

SEQ ID NO: 30506 - DNA, 120 bp, Homo sapiens
ctacggtgacccccagccccacccctggggcccacagctcatgcctggctcaccattcctttgtttatggaccacaggaacagtcgttttcagggcagagtcaacttcctcatggactgg

SEQ ID NO: 30507 - DNA, 120 bp, Homo sapiens
ccccgagtctgagacccagcaggaagcaatgcacaggccagtgtatccccatgggcacgtagaccatgaggacaggcgggggtgagggggatgtggactggaacacaggggacagagcac

SEQ ID NO: 30508 - DNA, 120 bp, Homo sapiens
ctgcggccaaccccccctctgggcaggagaaagcagagttaatcccattggagaaggaagcgctgagctgttgtttgttcattccacaatcggctgttgaatgtgttggatcccactcag

SEQ ID NO: 30509 - DNA, 120 bp, Homo sapiens
ttccgccccaaggactgttctccttccagcaggtcgctcctcagtctccagcatcatctgtcttcccgtctgctggatgctccctggggacatgagcgtgctgccatagttaaaaaaaaa

SEQ ID NO: 30510 - DNA, 120 bp, Homo sapiens
acacgtgactccacatccccgtccccctttctcccctttctctagcccctccaatctgtcttgtctaccttttcctgtttaacctgttctggtcacagtcattgatgacctcatcttcca

SEQ ID NO: 30511 - DNA, 120 bp, Homo sapiens
cctcgactccaggctggactcacccctgtctcccccaccagcctgacacctccacctgggtatctaacgagcatctcaaactcaacctgcctgagacagaggaatcactatcccctcctc

SEQ ID NO: 30512 - DNA, 120 bp, Homo sapiens
aaacggccctgggccctctctttctcagggtctctgcttgcccagctatataataaaacaagtttgggacttcccaaccattcacccatggaaaaacagaagcaactcttcaaaggacag

SEQ ID NO: 30513 - DNA, 120 bp, Homo sapiens
cagcgtcactgtcttccacgcccctctttgattctcgtttatgtcaaaagccttgtgaggatgaggctgtgattatccccattttacagatgaggaaactgtggctccaggatgacacaa

SEQ ID NO: 30514 - DNA, 120 bp, Homo sapiens
gaccgaggctggcaccttagagctggagtccatgcccgctctgaccaggagaagccaacctggtcctccagagccaagagcttctgtccctttcccatctcctgaagcctccctgtcacc

SEQ ID NO: 30515 - DNA, 120 bp, Homo sapiens
acccgctgagcctcagcttcccgggctataaaatgggggtgatgacacctgcctgtagcattccaaggagggttaaatgtgatgctgcagccaagggtccccacagccaggctctttgca

SEQ ID NO: 30516 - DNA, 120 bp, Homo sapiens
ggccgggagtaggggttcaagtggggtgccccaggcagggtccagtgccagccctctgtggagacagccatccggggccgaggcagccgcccaccgcagggcctgcctatctgcagccag

SEQ ID NO: 30517 - DNA, 120 bp, Homo sapiens
cctcgccagcggggtgtggctcccctccaaagacggtcggctgacaggctccacagagctccactcacgctcagccctggacggacaggcagtccaacggaacagaaacatccctcagcc

SEQ ID NO: 30518 - DNA, 120 bp, Homo sapiens
gcacggtgagtgggggctcccacactcccctccaccccaaacccgccaccctgcgcccaagatgggagggtcctcagcttccccatctgtagaatgggcatcgtcccactcccatgacag

SEQ ID NO: 30519 - DNA, 120 bp, Homo sapiens
cctcgagggcacgctgggcctcctcgtggctcagagcagggtcggggaaggtgcacccagaggtagtgccaagggcacaaatgggcatctcggggctgaggggggcagggcaagggcttg

SEQ ID NO: 30520 - DNA, 120 bp, Homo sapiens
tgccggggcagaggactggcacccaggccttggcctcccctcggtgccttacccttactggagaggatttaccaaggcctgacaccagcctcctcagccccctacccatacgccactaaa

SEQ ID NO: 30521 - DNA, 120 bp, Homo sapiens
ctccgagccttggcccctctcggtcagccagtgcccccatttcaggataggcaagctgaggcttggctctgggcacttgaggtcttgcctttccctctgggcctttccctgcccaaacac

SEQ ID NO: 30522 - DNA, 120 bp, Homo sapiens
catcggggcccactatgtgtcaagggagctgtagtctggacagcggtccaccattcctcccaccagcaccctttcaaaggctagagcataagagccccaaggcccccacagcccaggaag

SEQ ID NO: 30523 - DNA, 120 bp, Homo sapiens
tctcgtactccaaagccccagctctccccaggtctcaagtgtctcatctgtgaaatggggaaacagtgtttcctcagtcaattgagtgaagtgagctacatccctggtgctgggaatggc

SEQ ID NO: 30524 - DNA, 120 bp, Homo sapiens
agccgatcctggttgtgaatgtgataaagattttggcccttgaggtatggtcaaaccccatcacggaggggtcctcaggtgcccagcaggtacgaggaagggggtgcaagtgagaggaca

SEQ ID NO: 30525 - DNA, 120 bp, Homo sapiens
catcgcgagcacctctgggcctctgctccatgtcaggctccctccccagcgtggacgtttctcatgtgtgatgggcagataggattctgacaagagaggaagggcattcccagggaggca

SEQ ID NO: 30526 - DNA, 120 bp, Homo sapiens
agtcgagggtgtacctggaaggctcttttgccacaggccactggagccagggccagaagccctggtccatcctcaggtggtgggaagcctgggactctcctctgcctgccctagagagca

SEQ ID NO: 30527 - DNA, 120 bp, Homo sapiens
gcccgcctgcagcctcagcctgagctattgtgttgccaaacaagggccggacatgagggcaggaagccagcaggggccacacattttctgcaaagttggatgattcactgctgacttggg

SEQ ID NO: 30528 - DNA, 120 bp, Homo sapiens
catcgaggctgagggaagctgtgcagccagtccaaggtcacacaaccaacacaaggtagaagcagggtgagtgcggttccttctgacccacagtccatgccacactccacagtgaagctc

SEQ ID NO: 30529 - DNA, 120 bp, Homo sapiens
gagcgccctggtttcaaggcgcctcccaggtcaagaatccttcgaataaatcctactgtcttcaaggtgactggtagagtctctgatgttcacaatcaaaacctcagaccacccagcaat

SEQ ID NO: 30530 - DNA, 120 bp, Homo sapiens
ccacggcctcccaagctccctgcctcctgtttccctcacctggcgccccctccaccttcctaaagagagaatagctgagcaatcctgcttcaaatcctcctaggaaccctcttggggcag

SEQ ID NO: 30531 - DNA, 120 bp, Homo sapiens
catcgggccccttattcttctgagtcacagtgttgtcatctgtgaattggggatttgttttgaggatccagtaagctgacagcatgtggcagcaactgagcagaggctgtgtaaacaggt

SEQ ID NO: 30532 - DNA, 120 bp, Homo sapiens
tgccgcccatggtgtgaggctggccgctcctggggccttccagctctgtaagcctctgccatgaggatccccagacactggcgcgtcagcagacccaggctctctccccttagccacatg

SEQ ID NO: 30533 - DNA, 120 bp, Homo sapiens
tcccggagcggggacatgaaggggagtgggaatgacgtggacttgccacacaccattcagccacttcaaagcctggagtgccaccagcccgccctcgagttcccagccagacaatccagt

SEQ ID NO: 30534 - DNA, 120 bp, Homo sapiens
aggcgtgagctaccacgcctggcctctcttctttctaatataaagggtagcatactatagacactcgtttgggcattgcatttttcacataactttatgtcctagacattacttcataac

SEQ ID NO: 30535 - DNA, 120 bp, Homo sapiens
ccacgacataggctttctcttagcttctgtttaatgatagcttttgccaagttcaccatcttatgtaaactaaaggaacacgaaattcactctagccttaggaaagctgaggggatggga

SEQ ID NO: 30536 - DNA, 120 bp, Homo sapiens
caccgtcactcgggtctaatggtgcatgtctgcaggaagattgttctgactgatatattccccaggcggggggacacttctcatctaggtaaagggctcctacggaaatgaaaggggcag

SEQ ID NO: 30537 - DNA, 120 bp, Homo sapiens
actcgtttgtaaattcggtcactcatgttattggaacaaggatgaggtggtttcattcctcacagagttaggccttgcaagggacattacggtacgggatgggaatggtgagggtgagga

SEQ ID NO: 30538 - DNA, 120 bp, Homo sapiens
tgacgtgggggcagaggggagagggaggtgaagcccaaaggaccccacggcgctgatgccaggtcatgtgacccggtctatgggtgggcactgccctcttgcctttccccccacctccca

SEQ ID NO: 30539 - DNA, 120 bp, Homo sapiens
cctcgtaagaaccttccagcttatcttagttatgccttggaaagggacattaccagcatctggattaaagagtggatggggagcagtgggctctgatgccaaccgtgcccagagcaggag

SEQ ID NO: 30540 - DNA, 120 bp, Homo sapiens
ccccgatggccactaagccaccacaaagccctggaccaccccactacacacttcttttatgtaaaagataaatatatttctatctagtttccaaaaaaaaccaggtacataaggtatttt

SEQ ID NO: 30541 - DNA, 120 bp, Homo sapiens
ttgcgacctgccctggccactgctgatgcgtccagcctcctctccaaggtggaaggcagggaggacagcaggctctcttagacccatacactccacgttaggaaacacggagtttgaaaa

SEQ ID NO: 30542 - DNA, 120 bp, Homo sapiens
acacgttaatctactggcaaaagcagctggcagaagctaaaatcactggcctaggaagcacttcaaaatcaacaacagggcttaggtgaaggagttattgggtatcacagagcaagaaaa

SEQ ID NO: 30543 - DNA, 120 bp, Homo sapiens
gtacgtggtctcaggacctcttgagattgtgccttaggcaaaaaaaaaaaaaaaaaaagagagagaaatcacatttccccaaaaatggatgtgcaaaatgagccgagaggaaatattgga

SEQ ID NO: 30544 - DNA, 120 bp, Homo sapiens
gagcggccaggggatcctctgtcaggaagcataacctcgctgggaaggtcaggggacacggagctcagatctgaagggagagtggtcttcctaaagccaacaaagctcttcgtaccacag

SEQ ID NO: 30545 - DNA, 120 bp, Homo sapiens
atccgggctgggatctggctgtatcatacactggcctagcgaccctggacaagccacttaacctcattaggccatggtttcctcatctaaaactgtggtaaaaatggtacctacttcaga

SEQ ID NO: 30546 - DNA, 120 bp, Homo sapiens
tatcgttgttaatcgggtccaaggtcttcagtgagactataagcacttctaaagtgccattaagagtcatatcactcaggacaggggtcaagagtccccaagccccccctcctccccagg

SEQ ID NO: 30547 - DNA, 120 bp, Homo sapiens
cagcgctcagccatgcagacaaccacttcctgacatgtaccaaaattccggactcccaggaagaaagcaggtgtcagcataaaccatactgtttgcagaaacaatttaagcagagagcca

SEQ ID NO: 30548 - DNA, 120 bp, Homo sapiens
aatcggagtaagaccctgtctcaaaaagtagaaaataaaaataataaatgagtattagtgggaggagacataggcagaaaccaaatgtgtgatttcacagagagatggtagaagaggggg

SEQ ID NO: 30549 - DNA, 120 bp, Homo sapiens
gcacgagggcattttagcatcctggactttttaggtttcaatttaaaaagcccagctggagggccacagatatgtccacctagcccggtgtgtgtttatctttatgcatacattttaaaa

SEQ ID NO: 30550 - DNA, 120 bp, Homo sapiens
caacgacctgattgcttgtgcgttccttgtgggagccgtggtctttgctgtgagaagtcggcgatccatgaatctccactacttacttgctgtggtgagtctttccatgctgggccttgc

SEQ ID NO: 30551 - DNA, 120 bp, Homo sapiens
gagcgggaagggagcaggtgggggtgtttccaacttctgcttccaccgcatcgcagggcaggctgcaccctgatccacacagttttttgcccagagcttaggacagcagccccgctggac

SEQ ID NO: 30552 - DNA, 120 bp, Homo sapiens
acccgggatagggcagtgtcagctgctggcaaggcagcagaggcacctcgggggtgggacaagggcctaggcatgtgggtggggccaggatgggataggagccctcaggtgctaggcctg

SEQ ID NO: 30553 - DNA, 120 bp, Homo sapiens
agcgccagggaagtttacaaagctaaaagctgagggtgtcaggcctgcgtcctgtctgagatggcagccaagccagcttcagagtcacctgctggacccacatgttcctgagccagatgc

SEQ ID NO: 30554 - DNA, 120 bp, Homo sapiens
ggacgggaaagacctgtccccagcatcccactcttgccctcaagctgactgtggaacgcgagacagctttcaaagacaagaggacaggaaggcagttaacaaagtacacgtttccaagac

SEQ ID NO: 30555 - DNA, 120 bp, Homo sapiens
ggccgtgtgtggacctcaccagcctaccaagctgttgggcctggacgtgggtgctgataaaataagacaaacctggaaaaaaccctggattctgcaacttcactaggaaataacaaggca

SEQ ID NO: 30556 - DNA, 120 bp, Homo sapiens
taacgtcattattactctgtaaacaagatctggagaagatgacagtcaggcagtggcacaaagacttcatgactgttttgttttgaacacagatgagacaataggaacccttaaatcatc

SEQ ID NO: 30557 - DNA, 120 bp, Homo sapiens
tgacgggtttctcatgtgaatctacaagaaaaggtacgcctgggccacacgcaggacatggcacccactagggttgttcaggtctcattcactgcaagcaagaattcacgtacatgagtg

SEQ ID NO: 30558 - DNA, 120 bp, Homo sapiens
tcacgaagctgtcccagaagcacccgacatagggtggaggtcagacacattccctggctgcccacaggcgtgagccttcctgccaggggacagtaacagggcccgaagggctgggggtgc

SEQ ID NO: 30559 - DNA, 120 bp, Homo sapiens
tgccgctggcttcccagggccaagcgctcagagctgggccggacttgcccatgctggcttcagctcacattgccaaggaagatgtgtattggggctgtgcaggctgccacattcttgctt

SEQ ID NO: 30560 - DNA, 120 bp, Homo sapiens
cctcggatggctgtttacttcaaatcaaacttctctgacgagattttaatctgaaactgcatctgttcttcccagctttatgtggggccaacaagtatctccagcctttcatgactgtaa

SEQ ID NO: 30561 - DNA, 120 bp, Homo sapiens
tatcgtcccaccagaacactgagaaaaactaaggtcgctcagccttcaaatgccccaaaccaaactgatattggtccctattgaaactattaaacgcaaaaacgcttccttcaatttgcc

SEQ ID NO: 30562 - DNA, 120 bp, Homo sapiens
ccccgcagacatacagctttgggtcttctcatactaagccccatgctgttcccaccttaactatatccctggtcttagggtatcaggcacaccagcatcttaacagtcctgaaaagcctc

SEQ ID NO: 30563 - DNA, 120 bp, Homo sapiens
ccccgcacacctcttaacactttgcacagccatgtctggaggtaaactagtttgggaaacacaaaaggcatgtgctggtcaatactcagctttgtcacgtcatgcacaatttacagagta

SEQ ID NO: 30564 - DNA, 120 bp, Homo sapiens
ctacgaagctgagtggtgaccacacgcgcacacacagcagggttcaaagtgtcttcagaatcagacgaagctctaatcaactccagcacattcgaaattcaaatgtctctattcctgcca

SEQ ID NO: 30565 - DNA, 120 bp, Homo sapiens
agacgagacagggcttgtatttaaccacagacgaaaaaggctagttgttaacggctgctggaagacctcagaatgtgcagaacagagaatccagagggggcagcagagagcaaagcaggg

SEQ ID NO: 30566 - DNA, 120 bp, Homo sapiens
ttccgaagccagctcctctcttagcaaccaacaggggatgttaagatgggctcctggagccggaactacagaagaggcacgaagcctctccgcaccatctttcacggtgttgagatgggg

SEQ ID NO: 30567 - DNA, 120 bp, Homo sapiens
acacgctaaacaacagatcaccttaaaacataagttcccaggccagaagccatttatatggtctgcaaacgggggcaaatagttctgcaatgccaggcacctccgaataacaacggcttc

SEQ ID NO: 30568 - DNA, 120 bp, Homo sapiens
ccccgactcaggaagcaggcagcacctccatcgtgtggccaggtcccaaagctagttcctcccctacctcattctcctagataagatgcctaacatatgacttatccagagtcttcccac

SEQ ID NO: 30569 - DNA, 120 bp, Homo sapiens
gttcgctaatatgaaaagatagtaacattaagtccaaattttattaaaatggatccttttatatgattccttgcacatgccaggaatatcccagagtaatacttaaaacatttccttact

SEQ ID NO: 30570 - DNA, 120 bp, Homo sapiens
ggccgccctcgggcacctggggccccgcccggcacctaccacttgggcgaccttgaggcggccgagcgcgccgcgcaggtagtcggggtcgcagcgcaggccggccagcccgcggcgctg

SEQ ID NO: 30571 - DNA, 120 bp, Homo sapiens
caccggctcggtggtgggctggtacgggctgctggcgcccgagatcatggaggtgctcgaggcctcgccctcgaagccgtccagctcctcgccgctccgcatgctgccgcccggcccggg

SEQ ID NO: 30572 - DNA, 120 bp, Homo sapiens
tttcgtgtttgaaagaagcggatgtccctgtccctctccttggtggcagggccctgaccagactcctccagcaatgttcccacatgcctggagggagggaccagagcctgggccagttcc

SEQ ID NO: 30573 - DNA, 120 bp, Homo sapiens
agccggaaaaatgctctccgagtctctaaaaatagtgctcgctgggattttccagtttgacattccttttattacaatgaccaaagacaatccaagccagtccaccctgggcctctaacc

SEQ ID NO: 30574 - DNA, 120 bp, Homo sapiens
ctgcgggaccccagtttgtggttcctgctgcttccaaaacataatgatttggggagaattcacctgctcagcagccgcctcgcttctccctggctgccctccaccttctctctccatggc

SEQ ID NO: 30575 - DNA, 120 bp, Homo sapiens
ggccgagagtgtggccataaggaaatgtgggacctgccttcaccctccaggactggtgtccatgctgggcctggctaaactagccatgtgaaccctagggagctgctgaggtaaccagga

SEQ ID NO: 30576 - DNA, 120 bp, Homo sapiens
cctcgccaggcatttgcggctgccccaccccccggggccaggcactgggccatatcctggggcttcacggctctcacagaagaactgcggtgggagggagttataaaccaaaagtatctg

SEQ ID NO: 30577 - DNA, 120 bp, Homo sapiens
gaccgtaaagtccgtgcctttttctgaagatgattttgaggacttcattatttaataattttttgagatggactctcactgtcgccgaggctggagggcaatggcacgacctcggctcac

SEQ ID NO: 30578 - DNA, 120 bp, Homo sapiens
tttcgcagatatgggcagggtcgagaaggtatgtgaagggcaggggcagggacagagggacaggaaggttgggaactgattctgaagacgcctgcagtccgtggagccatgagagctgca

SEQ ID NO: 30579 - DNA, 120 bp, Homo sapiens
tgacgtgatcagatttggacaaaaacaaaaagtactaatgaataattcaaagtcttatctcccggtgtcaaatgggtagtagaaacactgttgccgtgaataatgtatagagccctttta

SEQ ID NO: 30580 - DNA, 120 bp, Homo sapiens
cctcgaaggtcagactggcctcaggtgagctatcagagtgggcaggaaagcataatgggaggacacagcaagggcagaggccaggaggctgggaggctgggggaggaggagtgaaagggt

SEQ ID NO: 30581 - DNA, 120 bp, Homo sapiens
actcgagcagctctgaaagatggcaactgactgattgttctcacaggcctctcattctccatctgtcttctactccatagctctataatcaagagggtgcttagccagggtgctccaccc

SEQ ID NO: 30582 - DNA, 120 bp, Homo sapiens
aaacgggcagggcatgattgagatactgccgtgagccatgcagccttcggaagctgagagatgcttcttcattccagaccagccccaaatccaaccggtctccttgctcctagggatgac

SEQ ID NO: 30583 - DNA, 120 bp, Homo sapiens
tggcgcctgcctgactgctctgaacaactatctaaaatcagcccaagcctgtaggtatgccatctatgactagcctgagtgacactctccttgactgtgcaggaggcaacccaaatccct

SEQ ID NO: 30584 - DNA, 120 bp, Homo sapiens
ccccggctccccctattgcaattctttccagtccgcctgggatctaccatttgtcttccagcatcaccctcctgctttccctgccatacttcctccataaccccatcactgcccttccct

SEQ ID NO: 30585 - DNA, 120 bp, Homo sapiens
acacgtatcattcatttctgtgtcctttgcagagaacctgagcacctagtgggtgctgaataaggtttcctgaatgaataatgtaattgtttgttaagtcaggaggatactgaagcctga

SEQ ID NO: 30586 - DNA, 120 bp, Homo sapiens
tatcgaggacaatcaatcccggtggctcccaaaatgtgaaatgccagaagcacagtaagcacttaatatagcgaaagcccatgctgacagagatgccgagaggatgtttgcagtcatccc

SEQ ID NO: 30587 - DNA, 120 bp, Homo sapiens
aggcgctttaatagaagacattcaggatcccccaagcacaattccctatattccctccccagccagtattttaccagagttgacagtgagtgccaaaaatggctggcttaggttttggca

SEQ ID NO: 30588 - DNA, 120 bp, Homo sapiens
tctcgaggaagaaaggcagcacccctgaccacaccacccacttccctcaggcagatgcctcataatccggaaaggaacagagagaaggtgcagtgagagagctggctgtagaagacacag

SEQ ID NO: 30589 - DNA, 120 bp, Homo sapiens
aagcgggtggcctaaaaaaatccaataaatgcagagaccaagaagtttttaaggtaactttaaaaaaatctgtatataagttaaaatatacttaaaggcaaataaatgtggtcaacacga

SEQ ID NO: 30590 - DNA, 120 bp, Homo sapiens
gaacgagttctgcctggctccaaagccacagctctttccacagtaaccacactgtccaaaaaaggaagcaaaagactcaatacatgtgagatcctctggccaggctcagcagccctgtat

SEQ ID NO: 30591 - DNA, 120 bp, Homo sapiens
aggcgtgagccaccgcgcccagccacccatgccctctactaaacagctcttggagatggtagaattacggtgctggaaaggaccttggttcaactttgtcattttagcaataaggaaatg

SEQ ID NO: 30592 - DNA, 120 bp, Homo sapiens
gggcgtgcagccaggcaaagtggcaggaatgagtcagatctgctcccggcctctgtcctccacgagagcagcctcagaacatttgatgccaaattggctccctctgctagggccttcctc

SEQ ID NO: 30593 - DNA, 120 bp, Homo sapiens
cctcggccctgcaggatggaatcatgcctggaccctggcagtttccagtttggcagtctatgagtgtaacctacattcctccagctgcaactcaagtgcttttgtcttctgggacatagg

SEQ ID NO: 30594 - DNA, 120 bp, Homo sapiens
ttgcgagaaaggcataggggcacgtgagccctgggggtccctcaggtttttgggaagaacttgaatctctttctcctcctcctttctcagctcctgctctcagcatgaatgtccagacac

SEQ ID NO: 30595 - DNA, 120 bp, Homo sapiens
aatcgttgttgttatcaaaacgccttctctttgtcgtaaacgtgtttttccacttggtgttctgtcctggccaattccaaccgcgcgcctgctcaggccgaggtgagatccctgcagccc

SEQ ID NO: 30596 - DNA, 120 bp, Homo sapiens
gtgcgcagcccccagtgctcgcatgctttttgcatagagttgctcaccggctcgctccgaccagggcttccccggaaaaggtggggaggggctcctaggcactcgcggtttcctggagat

SEQ ID NO: 30597 - DNA, 120 bp, Homo sapiens
caccgtctccctgggtagctcaggccggtgctccaaggccattgcctgctgacgcagccgactctgcggtctcctacagcatgcgcctcctgggagcgagctcgccgggccgcgccccct

SEQ ID NO: 30598 - DNA, 120 bp, Homo sapiens
ggccgtgtcccctgaagcctcggccgcaaatgcgcgccgcttgagcctcggaggttcggagtctcctctcccagcttcctcttctccgtccacgcccaccagacttttaggccgttctac

SEQ ID NO: 30599 - DNA, 120 bp, Homo sapiens
aaacgacaaccacaaagcccacacaaatgcccttccatgtagttttactgaggctcagaggaagtgactggcccgcagggtcacacagcaagtaggtggcagagccgggcctcagtcctg

SEQ ID NO: 30600 - DNA, 120 bp, Homo sapiens
ccacggttcacttggggtcccagggaccttgccagccctgtactgggctttggcatgaaggggtggagaagctcttccaagctctgactggtgtcttggttactaaatcctgagggtggc

SEQ ID NO: 30601 - DNA, 120 bp, Homo sapiens
tgtcgccatctgaccacactggcatcagctgagtgccgttggaggaaaatgttcatgagatgcggcctgaggcctgtccccagcccaagctgggtctcctggcgactgcagcttggagca

SEQ ID NO: 30602 - DNA, 120 bp, Homo sapiens
ggccggtcctgtggtcacccagccctgtcttgtagggaaggaactgctggggtcccaggagaagccagagccaggcagtgagctccagatggtgggggagtggctgccaccttgaccatc

SEQ ID NO: 30603 - DNA, 120 bp, Homo sapiens
ccccgcatggctgttctcctctgtggaccaccccatgcctctgacccccatcctccctaccccattccctacagccagtccccacaaccactcttccagcagcccggggggccattccca

SEQ ID NO: 30604 - DNA, 120 bp, Homo sapiens
tgacggctgtccgtctagtcagttccacccactacaccacagtcatcgtgaccatgtcactcctttgctccgaaccatggctccccctcaccctaaggaggaaagctcagactccctctc

SEQ ID NO: 30605 - DNA, 120 bp, Homo sapiens
ctccgctggaacacctaccactgcaccatccacctccacctgtcttgttcctgcgactcagcatgactctgctgaagcatcccctgccctgggaagacttcctggctttccaggcagtac

SEQ ID NO: 30606 - DNA, 120 bp, Homo sapiens
tggcggcaccagggacctcctctgactctcctctgagtccccagggatcagcccagtgcctggtatgaagtaggcacttgcacatgcatttaaaatgttagggaggaaagagtgggaaaa

SEQ ID NO: 30607 - DNA, 120 bp, Homo sapiens
ctccgggcttcagacactgtaaggcccatagttacaggaccatagtacactcccgttcccagaccagttggtcgcctctggcctggcagggctcccagtgtctcgggacctccaggtgac

SEQ ID NO: 30608 - DNA, 120 bp, Homo sapiens
tgacgcgcctgcctcccctgctgcaacagaggcctgggagtgccgggtccccatcgctcggagcggcaggcgctcgtgaaatgttcgtcaagaggataaatgaccatggccctggtctcc

SEQ ID NO: 30609 - DNA, 120 bp, Homo sapiens
aagcgatcttcctgccccatcctcctaaagcactgggattacaggtatgagccaccacacccagtcccaagcctcatgttttcacacacacactcacacacacatgcaaacatgtaccct

SEQ ID NO: 30610 - DNA, 120 bp, Homo sapiens
actcggagtggcaccccagggtcactggccaccacttcctagggtcagtgatgtggtcaccttgggatgaacgcacaggatttcatggagatcaccaagtcaggagagctggaatttgaa

SEQ ID NO: 30611 - DNA, 120 bp, Homo sapiens
ggacggggagggctgtcatatcaaccaggcctctgcagggcactcatctagccctgcctctggctcagcctgagcatggggctggccaccagctaggtggcgctgtccttggaggttcta

SEQ ID NO: 30612 - DNA, 120 bp, Homo sapiens
gatcggtggtgctgaagggcagggatcttattccaccttctgaagcttctgtcgaaccagttgtaaggagaatggagagagcagtgagagtggagtccggggtcctggtcggggtggtct

SEQ ID NO: 30613 - DNA, 120 bp, Homo sapiens
ggccgaccgctcaggaaacagtcctgtttggaggcagaccaggggttgtgcattctctctgggcaggcgctctgctcttgctgtatttgtttcgttgtttttgttgttgttgtttgagac

SEQ ID NO: 30614 - DNA, 120 bp, Homo sapiens
gctcgcaatgtccaaaaaaatcatatggctcctcgactacaactcaaacatggaagaattggggtatgtcagggagcatcataatattggcatgagtctcttccaccttaaaataacttc

SEQ ID NO: 30615 - DNA, 120 bp, Homo sapiens
gcacgcccccgcagcctccaccccagttcccagtccagcctgcccaggctccgggaaggctattccaagaacaggaaggaacttggcaggggaacgccagctctggttcttgcagtggca

SEQ ID NO: 30616 - DNA, 120 bp, Homo sapiens
catcgttgccactggagcctctcttcgggtgacgttgcccctccctgctgcccccaagctggccccttcccactcttcagaccttgaccaggaccccaggaaacaaggcaatcgctggcg

SEQ ID NO: 30617 - DNA, 120 bp, Homo sapiens
gtgcgggtaggggtgaggtccaggcttctcccggccacccactgagctctcctctgagctcaagcttactcacacccggcctctcccgcaggcctctgggccgtcctctggggttccgag

SEQ ID NO: 30618 - DNA, 120 bp, Homo sapiens
gcgcaggggtgacccttttcccctctctttccaggtgccttggtcccatttgtggctgagtggctgagccagggtcccatttgtggctgggtgactgagcagaggtgacccttttccctt

SEQ ID NO: 30619 - DNA, 120 bp, Homo sapiens
actcgtactgtactgttccgtgccactgtaataaagttctccagtgaatttagagaaaaggcattgccctgtgttttctcatccgtggagctcagactgtggggtctcgaatttcttttc

SEQ ID NO: 30620 - DNA, 120 bp, Homo sapiens
tctcgtcctgttcatacgcagttttgaggaactatagttgtaaaggctttagagttaggcaaaattgagttaagttctggcttctgcatttactacagtgtaactttgggcatgttgttt

SEQ ID NO: 30621 - DNA, 120 bp, Homo sapiens
ttacgtgtactgagcattgtcctaggtatttgagatacatcagtgaacagagatccttaacagacaatatacataataagttatgtaatagcttacaaagtgacagtacctttgggaaaa

SEQ ID NO: 30622 - DNA, 120 bp, Homo sapiens
ttccggacaaaggaaacagccattataaagggccccagagtggcaccctgtttttgatcaacagcaagcaggccattgtggctggagtagactgtgaaagaagttgtagtagatgaaatc

SEQ ID NO: 30623 - DNA, 120 bp, Homo sapiens
ttccgaagtagctgggagtaaaggcatgctcctgcacctagctcaggcttttgagcagatgaatgatattatctacgttaggttttgacagactcatgctagctgctaggttaataatag

SEQ ID NO: 30624 - DNA, 120 bp, Homo sapiens
catcgggatgggaaaactggctggaacaattttgaacagcaggttaggttggtttagcgcatgtgaggttgtggtgggagcttgttattgcagcttgtttctttactttttttttttttt

SEQ ID NO: 30625 - DNA, 120 bp, Homo sapiens
tcccgttgttactgtacttgaagatagggcatttatggaggtaattaaggttagataaaggcgtaagagtggggctctgatccagtagggttagtgtccttaagagacaggagagagctc

SEQ ID NO: 30626 - DNA, 120 bp, Homo sapiens
tgccgtatgaggacacagtgagaagatggatgtctgcatgccagaaagaggttcctcacggggaaccaaattggctggcacattgatctgggattgctagtctccagaaatgtgagaaaa

SEQ ID NO: 30627 - DNA, 120 bp, Homo sapiens
tagcgtgcagtacagttcctaaacaaagactcttgtttgttactgcttgtactttagcattttatacttagggtttccactcttctccagatgtctgtcttgtgaagtagtgtgtaaaat

SEQ ID NO: 30628 - DNA, 120 bp, Homo sapiens
aaacgccaatgtcagttcctccaatcaccgtccttccagctacccaagctgggaaaactatgtcgttattcttgactcccagtctctctcatctcccacatgcaatctgtaaatcctgcc

SEQ ID NO: 30629 - DNA, 120 bp, Homo sapiens
cttcgtgccctgtgattagctctggtccactgttttcccattgatcaggcagggtcgaagcacctatatgtgttggacccgtatagctgttggcaggtggggtgccagtgatacaggagg

SEQ ID NO: 30630 - DNA, 120 bp, Homo sapiens
catcgtgcaggctcacttccacagggcgggtggtgggaagctttgggggatgactggccagctgtagggatagaagtgagggaggtgagtgcctgtgcctgctatgaacaggagggcttc

SEQ ID NO: 30631 - DNA, 120 bp, Homo sapiens
tgacggcctagcagagggagcagttctttctagcagataggatcaaaagagctacattatagtcaagaggtatccaatttggttcagtgttgtggtctctaaataaagttagggataggg

SEQ ID NO: 30632 - DNA, 120 bp, Homo sapiens
aagcgaacctactatctattatgtctcagtttctttggcagtgccagatgttcctgcatacaatgccccacagcctcttccacaatcaggctcagattggcaggacaaacagatattgag

SEQ ID NO: 30633 - DNA, 120 bp, Homo sapiens
ctccgagcccctacctgtgctgctggctgccaagcccttgacaccattgcatggaggacttcatagtgcttattacttggcaccactgatggcggagtgttaggtgatgcctattccttt

SEQ ID NO: 30634 - DNA, 120 bp, Homo sapiens
tggcggcggcggcggcggcttcacctccgacagagagggcaccgggggctgcaagggggccgaagcgacctccccgtcgccaccccgggcccccgagccgcacttcagatttcgcagcgc

SEQ ID NO: 30635 - DNA, 120 bp, Homo sapiens
tcccggagccggtcgggctaggggaatggaacgtgccgtcacgggggacttaaccgcggatccccgccctaccccatcctgaccctagcccggccgcacctgctgggctaggatgcaact

SEQ ID NO: 30636 - DNA, 120 bp, Homo sapiens
cagcgctcctcgtccgccagcaaagcgtccagccgctcggcgccggcgcgcagctccagttgcagcggcaccgagtgctgggcgagcgcggccgccaggctcctctgcagcgcggcgcgc

SEQ ID NO: 30637 - DNA, 120 bp, Homo sapiens
cagcgccccctcgcggtaggcgcggaggaagcggccacagggctgccgcccgcagaatcgcagctgcacgatcagctgcgggtcgctgcggtggatcttcagcatctgcagcacgtccgg

SEQ ID NO: 30638 - DNA, 120 bp, Homo sapiens
tcccgccgctctctgcggaggcgggcggtcaggcgccgggcggtccccaagctcggccgttctccaaacggccggaggaggggcgaagcccgtggtgaagccccgcgtcccatcccctga

SEQ ID NO: 30639 - DNA, 120 bp, Homo sapiens
ccccgctctcacgccccaaatgagggttggcaaaagagagggacttcgaagcacagaaaagggggcgtgtgccctgggcaaacaagccgtctgggtaggcggccagcagggcagaggagg

SEQ ID NO: 30640 - DNA, 120 bp, Homo sapiens
gggcgagaggtctcaggtcttcggcctccaccaagcgcgactcccactgctcgggaagaagaggggctctcgccgctctgaggccacgaacagatcccccaacccgcttcagcctcctgt

SEQ ID NO: 30641 - DNA, 120 bp, Homo sapiens
tcccgcaccccttcctcttgcctctcttctctccccttcctctacagccacgcttcttggaagcacacaggcacaggcatgcctgctgtcccgccactcgttgcccctcgcctcacctgc

SEQ ID NO: 30642 - DNA, 120 bp, Homo sapiens
tcacgcattcctggcaacaactcccctccagcaaggtcaccaacatgtgggggcttcacctcagacctcccacaagggttctctctgccatgtcacctgctctgcatggccagcagccac

SEQ ID NO: 30643 - DNA, 120 bp, Homo sapiens
acacgtgtgcacgtgcacatatgcacacgatctttgtgcccctccgagtgtaccctggccaactgcattttgccccatggggccatcattccaaccactgtctttccgatccacatgatg

SEQ ID NO: 30644 - DNA, 120 bp, Homo sapiens
gaacgccagaccccgggagccaagtgcctgactggcctctctccagagggcacgatgcagcatacccaaatctgaactcatcatctcatcctccaactctgctccttctaaactctcccc

SEQ ID NO: 30645 - DNA, 120 bp, Homo sapiens
ggccgctgaggaaggagatgcctctgaggaacttctctgcaaatagctccatgtttccacccccacctctctgcttcctcaggaagaggtgacatcctttttttcaccaaactgatgctg

SEQ ID NO: 30646 - DNA, 120 bp, Homo sapiens
tcccgctgctcttccagggacagctcggtgtccaggtagtatccggagggagacacttgcagagcacaatcctccaactgggggcaaagggaacagctgtgagactgaggaagaggtggc

SEQ ID NO: 30647 - DNA, 120 bp, Homo sapiens
aggcgaatgtatgaagacccctgacctcttacctaccacttgaagggtggcagagagacacagggtctgcactacagctgtgcattccttcagcagttgcttctcaagcacctactatgt

SEQ ID NO: 30648 - DNA, 120 bp, Homo sapiens
tttcgagaccttccacacagcattctaatatccgagccactggtctcctctagctgcgttctctgcgttcaggcactccgtctgtcttgctccctgctgtatctatagagcctggcatag

SEQ ID NO: 30649 - DNA, 120 bp, Homo sapiens
cttcgaggaagctcacagccctgtggggtgataagctatagtcacaaagcattaagccccagaaagaaagtgttaagatggctgggaggtgcaaacccacccgggagagtgtgtctgtgt

SEQ ID NO: 30650 - DNA, 120 bp, Homo sapiens
ccacgtgtccatgtttccctccccgggctctcctcccccgccacaaggcatggcacttagccccttgagaagtgcctgtagagaagcctgagggaggtgactcctgtgagtcggagggtg

SEQ ID NO: 30651 - DNA, 120 bp, Homo sapiens
cttcgcctggcacgagctgggccagtctgggccttagggtttctgggacgttgggggcagcgttgtccgtcactgctttggggagcgtccagtgcgcgtgcgcagctcaggtccgggtgg

SEQ ID NO: 30652 - DNA, 120 bp, Homo sapiens
ggccggcagggggtcctgggcttggcaacgtgggcggagggcggccaagcacggtcccctgcgttttgcacccggccgcgccttggtcccaggggggtgctgctcgccgcacagcagcgc

SEQ ID NO: 30653 - DNA, 120 bp, Homo sapiens
aggcgcgagccaccgtccccagccaaggccaaatcttaaaaggggagaaatccaagaagaggaaacggcaagtgaaaaagtgtagagagaaagcatgtggggtgcttggggcaaggctga

SEQ ID NO: 30654 - DNA, 120 bp, Homo sapiens
ccacgtcaaggggtttgcatttgagtcatccacttacccacaccacagacaagctacacagttgggatgaatatctgctgtttatgtcatcctcttcctttccaagatcacagtcataat

SEQ ID NO: 30655 - DNA, 120 bp, Homo sapiens
aaacgtcatttgtgtgatcaacataaaaactccctggctcccttgagcacaaggaatgaaggcgtgtttgggttgcttgctggtagcagaatgctcacaagtggaacaatttaaagttcc

SEQ ID NO: 30656 - DNA, 120 bp, Homo sapiens
aatcgataatttgccatgaaacttaaaccctggtgaatgaccctaaagggaaattccacactctgcagctgtgactcccacccaggctgatggatgtgaagggctcagatcagtttacat

SEQ ID NO: 30657 - DNA, 120 bp, Homo sapiens
tcccgcgcctcctgtttaccttcacttggatggttttattgccctttcattgtctctcaaactcaacatgttcagatcctaactcctgattttcctccctaaacctgtgtacacatccct

SEQ ID NO: 30658 - DNA, 120 bp, Homo sapiens
acgtggggttttggggctcagccattctctctgtgttcttccaagccatactgccagtcacaggaatggagaagccgctgggccctctaccattggatggtactgtcacctgcagtggaa

SEQ ID NO: 30659 - DNA, 120 bp, Homo sapiens
aaacgaattttccagggctagaggaattgttcctctgcattttttttttttcattaaacgccttgcattctacctcttaacatttgctggtgggaggatctgcctgaaggtccctgaagc

SEQ ID NO: 30660 - DNA, 120 bp, Homo sapiens
agacgcggtcagctgggtcaggaggagccgcgctgtgaggcaaggctctgctgtggccaggtgcccacctgctgcctgccgattcccgcctgacatccctgtctcaagccatactattcc

SEQ ID NO: 30661 - DNA, 120 bp, Homo sapiens
ggccggccagagcgtagagaccttaactcttcccagacccagcttgtggttaaccttctaggcctcagtaggcacatctgcagaagaggctgttctaagcataaattagggtaatgggta

SEQ ID NO: 30662 - DNA, 120 bp, Homo sapiens
aagcgctcaaggtcatggatgaggagaagtgatggctccatcctggccacccatcactgaccccgtcgctggtccatccctctctctcctgctgcagccccaacctgcttgcttccaggc

SEQ ID NO: 30663 - DNA, 120 bp, Homo sapiens
caacgttgtgacagaacaaagaaagaaaaacaaaaacaaaacaaaacaatctggctaattaagcaccactgttgcttttactgcatctcatggtgattatctgtttacaaacccgtctcc

SEQ ID NO: 30664 - DNA, 120 bp, Homo sapiens
acccgtgtctgaacccagctctctttcagtaaaggaagtcaagccacttttttaccatctctgctgtcattaccccaatccaaacctccagcatcgctctcctacagtgtttgcatgata

SEQ ID NO: 30665 - DNA, 120 bp, Homo sapiens
tcccggtatgtctgtcacaaccatgctgctcagcagccagagtgaagtgagcttttcaaacgtgaaactcatccaaactcttctttgggaggccaaggtggctggatcacctgaggtcag

SEQ ID NO: 30666 - DNA, 120 bp, Homo sapiens
aagcgcccccttccagtttctatcctgagaccaccgctctcaagaagagacctcccccaaccccagtcaacctgcacacttcaatgagcgtatgtgctggaacatccatgatatcccgac

SEQ ID NO: 30667 - DNA, 120 bp, Homo sapiens
ttccgggagcttacaggttaagaggcaaacagatctagacaaataaattacaccactaaaaatgcaggtaccccagaatataaagcgagaagcgtaagagcttaaaataagcagcacaaa

SEQ ID NO: 30668 - DNA, 120 bp, Homo sapiens
gcggtgctcatcaccggtgagtgcgcgggtcgcggagcgcggggactccaggctcgagggcgggactggacactcaacaggactgactccccatgggcacagccaaggcgggctcctcag

SEQ ID NO: 30669 - DNA, 120 bp, Homo sapiens
cagcgcaagagtgggagagttctccacccctgggtgcagggagcgagccaaatagggagcgccgggcacctccccaagcccgggttcactacctgccgctgcggggagtgttggagggaa

SEQ ID NO: 30670 - DNA, 120 bp, Homo sapiens
ggccggttcgagaaggaaactgactggtggctgagaagagggaacctcctggagtttgagagtttatgccattcccttccccaagagagcagtctcaggggacttcggaggccttgagaa

SEQ ID NO: 30671 - DNA, 120 bp, Homo sapiens
gatcgttaccccttgaactctgcctgacatccccacctaagatacccatctcccattcctcgggccagagggaagagcttagatggggaacttccccaccccacccatcccccactggct

SEQ ID NO: 30672 - DNA, 120 bp, Homo sapiens
caccgtgaggggcagctggacattcagctgtctttctgtctagccacccactgccaaactgctgaggcagtagtttggagcctacacccagcaccccacccccaagccctcctggtcctc

SEQ ID NO: 30673 - DNA, 120 bp, Homo sapiens
ttccggaggaggaaatccttgagtggggccttggagcatgagtggagataagtggagtatgaaagggatctcggatcagagaaaggatgtgggacaaaggcttaaggcaggagtacacac

SEQ ID NO: 30674 - DNA, 120 bp, Homo sapiens
acacggtctctgtaggggacagccagtctgggtgtgggggtggggagaaggggatatgaggtggtttccttgggaggggccatgaatcaggtaagaagccagactgctgaggcagagtag

SEQ ID NO: 30675 - DNA, 120 bp, Homo sapiens
attcgggctggacaggagagacccaggttccaggcgcagtgtgaagcctcagcagaccccagtttcagaggtttgaggaaggaaaatcaacagacaccccgggtatgaagtaggggccag

SEQ ID NO: 30676 - DNA, 120 bp, Homo sapiens
gcccgaacacttgggggttgtctctcaacacccggctggaagacaagtaggtaaccaggttcagccccacctgccaagaacactgtgttttgggcctggcagagctgctactccccctct

SEQ ID NO: 30677 - DNA, 120 bp, Homo sapiens
gcacgaaagcctctgttgaggtcaaggcctgaaaaccattgcctgagcatccaaagtggggcaaggtctgggcaagtgcccagggccaggcaagagctggccaggaaagcagtgtccagc

SEQ ID NO: 30678 - DNA, 120 bp, Homo sapiens
ccccgttgcctgaggaccctggggatggaggaagagcatcagaccaggggcagggtctattctgggccagcacgtggagcggaggcagagctggcctcaggcccttgcctgatcctccct

SEQ ID NO: 30679 - DNA, 120 bp, Homo sapiens
atacgattcttgctttttggactatgaatgcaccctcatcaccccatgctcaacccccaactgaagactgaggttacagcagatccgtggatatcacagggtgatgaggcactaggccac

SEQ ID NO: 30680 - DNA, 120 bp, Homo sapiens
ccccgatcaggcatgtcatagacaggagggacacatactaccactgggcatggtgccctagataatgacccagagggaggttgtaggtctcgaccctggggtccaagctgatgaggaaag

SEQ ID NO: 30681 - DNA, 120 bp, Homo sapiens
gggcggcagccgctctgatgcccttcacaacctcagcagagacaaggtctgactcgcagccgggcctccagtctcagcatcactgtggagcatgccttggagagcttcagcttcctcaat

SEQ ID NO: 30682 - DNA, 120 bp, Homo sapiens
agacgaagatgaagacaatgatgttcctggggacaggtgagggggctaggcaagatgggtgtgaggctaggtgagagggaaaaggtgaggcaggaccaggggaaggtggaacaggtgaat

SEQ ID NO: 30683 - DNA, 120 bp, Homo sapiens
ctacgtgtgtccccagtgcttctgaccgccctcttcatctctgcaatgtctgcctcccctgccggtccccatcagcttgggtgcctccagcccctcctcttccccttggcctcaccttgg

SEQ ID NO: 30684 - DNA, 120 bp, Homo sapiens
tctcgccgtgcaccctgggaccccagcactgccccactccttctcaaccccgactctcccagaggccctggcccctcaactgtcagtcctggagtggcctttgctggttcccagttgaga

SEQ ID NO: 30685 - DNA, 120 bp, Homo sapiens
tcccgcctgcagcctactcctacccatgccatccccagtggtcccagctggaggtagcatggcgcagactgactccagagatccctactaccacctgctggtcccagccccttcctcctt

SEQ ID NO: 30686 - DNA, 120 bp, Homo sapiens
tgtcggtgcatcatcttcttcctttctggcatgggggaagcttaataaaaataaacgctggtgaccaggtggtgatgtgtgcctgtggggtggtggaccccatttttccctcaggcctcc

SEQ ID NO: 30687 - DNA, 120 bp, Homo sapiens
gcccggaggctggggctgaggacagcatagactcacccagtgcccgccccctcagcacggggtgtccagctctggatgctgccttggtccggcacctgtaccactgcagtcgcctcctgc

SEQ ID NO: 30688 - DNA, 120 bp, Homo sapiens
gcacgatcctcccgagccctaccctgaggcctgagctacttggccacccatgttctccagaaactgggcacatttgggcccctgcgctgccaggaggcatgggccctggagcggctgctg

SEQ ID NO: 30689 - DNA, 120 bp, Homo sapiens
ctgcgggaagcccgagtactggaggcagtatgcgagttcagcaggcggtgggagatcccggccagctctgcccaggaaggtaaaggccctgggggttcgggctctgccatctgccttgaa

SEQ ID NO: 30690 - DNA, 120 bp, Homo sapiens
tgacggtttccctcaccccctcacagtggtgcagttctcggcctctcggcctggcttcctgaccttctgggaccagtgcacagagagactcagctgcttcctctgcccggtggagcgggt

SEQ ID NO: 30691 - DNA, 120 bp, Homo sapiens
gcccgcctctccctgcgccagccaggcttggctgaggctggtgagtgggctgcttcctccttccacccttgctcagattcccagtgacaggaagctcggggaagccaggtcagcccacac

SEQ ID NO: 30692 - DNA, 120 bp, Homo sapiens
aaacgaactgggcaccgaggagaccagcaaagacttgggccttagagcagaaggacccagatgggtggggtttgaacagggggcccctggacctgagcctgggataggagcatctctccc

SEQ ID NO: 30693 - DNA, 120 bp, Homo sapiens
ctacgtgactgagaccgctgaggagggtgaggcggtggccctgatcacatagtggcctcttggggtctgaggacatgaggacaagccctccccaacctcgggggctcctcaccctgccac

SEQ ID NO: 30694 - DNA, 120 bp, Homo sapiens
gtgcggaatctgaactcggatgatcaggctgttgtgctgaaggccctgagattggcgcccgaggggcgtctgcgaagggacgggctgcgggccctcagctccctgctcgtccatggcaac

SEQ ID NO: 30695 - DNA, 120 bp, Homo sapiens
ctccggagcctgtcactgggccctaccttccgggagagggtgagttggacagggctcccttgagggcgagggctggggtcctggactcccactgtctggctaagtctgtcctcccaccct

SEQ ID NO: 30696 - DNA, 120 bp, Homo sapiens
ggacgtgcagactcgagtggctggctgcctggccctaggctgcatcaaggtgacccctgccaaccctcccacccctctgtccgcttccggcacccccacccctgaaaccctcccatctgc

SEQ ID NO: 30697 - DNA, 120 bp, Homo sapiens
tcccgagggcattgagcccctggtgtacctctgccaaactgacacagaagctgtgagggaagctgcccggcaaagcctacagcagtgtggtgaggctgggggatggaagagatgggtgga

SEQ ID NO: 30698 - DNA, 120 bp, Homo sapiens
actcgctgtcccccaaatactcttgtagacttttatgcctttgatcatggctcttcaccttacatgtcttcgtgtcacttgttaatgctttgctaatcctttagacccagctgaaatgag

SEQ ID NO: 30699 - DNA, 120 bp, Homo sapiens
catcgtgagtcatctttgaatctccagtgcctagaacaggaagctacacacaccaagtattcaataattacttgatgagctgcatcatgtctcacacatgttctcaacaggtatagagaa

SEQ ID NO: 30700 - DNA, 120 bp, Homo sapiens
cttcgtttgttgattatcttgattaaagagtttttaaaaaacatgtaaatgatcataattattgcaagctttacaggggtaacaataggagccaaggaagatcttggaaatacaactgtt

SEQ ID NO: 30701 - DNA, 120 bp, Homo sapiens
ggacgtcagcctgggctccatgccactgttggccatgcagtcttacttgtcctgacccagaagttctgcctgtcggctgtctacagagattgaccagcagatggtctactgctgttttca

SEQ ID NO: 30702 - DNA, 120 bp, Homo sapiens
tctcgttcttgacacactgccacctatctatatattccccacgttttcacttaggatttcagtcacttgagaaataaggcattttatctggaagatcaggagtttacccacagatctcta

SEQ ID NO: 30703 - DNA, 120 bp, Homo sapiens
acccgtgctttctagaggaaggcaggcagtgtacattttgtgccgcagccatgggggagggataacaaaagctctttggctgcctgcagatgtgggcgccagaacagccccagactgagg

SEQ ID NO: 30704 - DNA, 120 bp, Homo sapiens
cacgggtggcccggccgctcctcatgggtggtagcggtcaaggagagggggtggtgggggcccaaggccacctggtcgtgcggccgcggtcacatcctggcttcttcctgaccacccccc

SEQ ID NO: 30705 - DNA, 120 bp, Homo sapiens
gtgcgggaccatgggtgtgcgggttccgttcggggtgtgcctgggtgtgggactccgtctcggggcggcccgcggcctccgtggctgcgcgagagagggtgtccgtcctccctccctccc

SEQ ID NO: 30706 - DNA, 120 bp, Homo sapiens
ccccggggctgctgagagatgccgggcagccgggtagccgagccgcggggccaagcctgcgtctgctgcgcgtccggcggcggcgcgtgtggggagatgcgtgtgtgggctgcaagcccg

SEQ ID NO: 30707 - DNA, 120 bp, Homo sapiens
ccgcgggggcagcgggcactggcggagggcggggaggagccggcttgaggccccccagagggtctgacgcagcagccggcgccactgagccggcagcaggccgggtggagtgggggtggg

SEQ ID NO: 30708 - DNA, 120 bp, Homo sapiens
gttcggagcagagctggtggcaagtgggaacgggtgaccccgggggcacgtgagggctaggtttgctggtgaccgggtggctcgggcgtgtaggatactctgtgggacaaggacgggtgt

SEQ ID NO: 30709 - DNA, 120 bp, Homo sapiens
gtgcgggagccagcagcgagtgaggagtgcgtgaaatctggagtctctgtccagcagcaggacagtaggaggctggtatcagcagcccctagggtcaccccagtctggaatcctggagtt

SEQ ID NO: 30710 - DNA, 120 bp, Homo sapiens
tgccggccgggggggggggggggtagaagccagagttgcactcaaccctgacccctgaccccatgatgccccccaggtacccccagccttgccgcaggaagggaatgggctcagtgcccg

SEQ ID NO: 30711 - DNA, 120 bp, Homo sapiens
tgccgcaggccaccaacattcagggccacacagggcacccacactctgttatccagaggaaggatagagccactaacaaaaacctgtggctgtaagatttttgtgctctgtttgcagggc

SEQ ID NO: 30712 - DNA, 120 bp, Homo sapiens
caacgcatacctcctgtgcaggctgggctttcgctgtgtttactgacgagccatctttcaaatgaatatttgcttctgtagtagaattgactctctattaaaacagacaaatacattcat

SEQ ID NO: 30713 - DNA, 120 bp, Homo sapiens
ccccgaatgtcattcattccatttaaatttataatattcttctgtggcctcatctagtcatacacacaagattgcttctatttacagggtggagctacagggtctggctatagaattgag

SEQ ID NO: 30714 - DNA, 120 bp, Homo sapiens
attcgagtgaaagctgctaatggaacactaacttcaccaacagatctatttcactcggaacagggattacaatcccaacttgtttcccaaactaaaatctcaactttctcaaaaggagga

SEQ ID NO: 30715 - DNA, 120 bp, Homo sapiens
gagcgctattgctttcacaccactgtaaagctgaaaaatctttcgtctgagtctacagactcagaagaattctctggtaggcaaattaatgaccctattaagtataaatttcaagttaaa

SEQ ID NO: 30716 - DNA, 120 bp, Homo sapiens
atgcgactgtgacctcttggctggaaagcacagactcacagagctatgaataaaggatgaaggtggacctattaacacaaccgcatgggagcagggtttctgatttaggctggctccaag

SEQ ID NO: 30717 - DNA, 120 bp, Homo sapiens
gggcgatgtcctaacctgctgagccatgctgagggctattgggcacctccctgtggttagagaagagcgccccaatcagacttcaaacacagctgcctaatcagccggtggtgagcagcc

SEQ ID NO: 30718 - DNA, 120 bp, Homo sapiens
tttcgaccccctgctggagagggaagaggtgaatgcctgggcagttggataagctcagctgaaggctgcaaagagcagactggcccagaacgctgggtcctcactgcagggctggcctgt

SEQ ID NO: 30719 - DNA, 120 bp, Homo sapiens
gtgcgggcaagagcttcctttgggcagcacgtaattacagaatggcttatttttcctctactgtgctgtctttaatcaccagtctggagctggtgtccctgaccagacataacaagcggg

SEQ ID NO: 30720 - DNA, 120 bp, Homo sapiens
aggcgccctgcctgggagtatctgccaccctctggcccatacctcccacacctggaggggagcagagcgcagcttcaaggttcctggggtagagacagcaagagagcagatgatggccag

SEQ ID NO: 30721 - DNA, 120 bp, Homo sapiens
aggcggggtgaggaggtcttggctgcttggaatgaggcagcaggtgtcaggacagctgccatgtggcccacgagaatcaatgaatgtccaagatcttcaggcctgaccaaaggagggaca

SEQ ID NO: 30722 - DNA, 120 bp, Homo sapiens
ggccgagcatcttcccagctgtgtacagttgcctggtccttcctctctttctccctcccagtctccatctcttgggtggacagccttccccctatgcaggccagcttttcctgccttcag

SEQ ID NO: 30723 - DNA, 120 bp, Homo sapiens
tggcgaggaagctcagaaggctgagcctgaggggaagacactggaggcctggggtctctgtgtgcagccgcctgtctcctagatcctcttcttccctggggtgggaggaacagacgtcca

SEQ ID NO: 30724 - DNA, 120 bp, Homo sapiens
ctccgggaggcagtaggacaggtacaggcattcatttgccctggaccatggcctctttgggaggcctcaggatccttgccaaagggaggtgggtgcgttggagcacagtatttacccatg

SEQ ID NO: 30725 - DNA, 120 bp, Homo sapiens
ccccgccgggagggccatttctttctgagctgaaataaccagtttatcccctctgggaagaggcggctcttatctttataatcccccaaagccactgtggagagcgggattaggtgagat

SEQ ID NO: 30726 - DNA, 120 bp, Homo sapiens
ccccgtccctcaggccagcactgggggctccacttgagtgcctcctgtgatgccaggctgtggcagggggcagcatccctgggcccaggagccactcttacttatgggatgtgtgccctg

SEQ ID NO: 30727 - DNA, 120 bp, Homo sapiens
tgccgaggagggggtatgtgtggagacaggcaggaaggagtaagcccagaaggccagagggcacagccagggcaggactctgggagacagaactgtgggccgcatagagggtggggagag

SEQ ID NO: 30728 - DNA, 120 bp, Homo sapiens
agacgaggcagccaggggtcaccagccccacagcctgtggctgagcctcctccatggctgccccaaatccctttcctggtgcctgaggtctagggattcactcctcttgctcaggaggtt

SEQ ID NO: 30729 - DNA, 120 bp, Homo sapiens
cttcgcaggtggtcctggaaagactcacttctccttcaggcgctgcctttcatggggctcttctttgtcccagggcctcagagctggggtgtggtggctcacgcctataatcacagcact

SEQ ID NO: 30730 - DNA, 120 bp, Homo sapiens
gtccggagtggagcctagacatccaccacatttttaaaagctgtggtgtctaagattttgggctgacagtcccgattaaggtgaagccttgactaagctgcggaatgcctcgggttgttc

SEQ ID NO: 30731 - DNA, 120 bp, Homo sapiens
tggcgggagagccagctgtgtcaatctgtgattacagttctgtaaggtgcaggctgcaggccaggttgcccaggacaccattgacatgtaaacctcccctgaagtgcagccctgggtttt

SEQ ID NO: 30732 - DNA, 120 bp, Homo sapiens
gcacgtgattctcgctgggaaacacatcaagtatgtgaacatgagctgaaggggctcggctcgtgtcaggaggagcaggaaaggaggccagggaggctggcacatctgaagggtctccag

SEQ ID NO: 30733 - DNA, 120 bp, Homo sapiens
aatcggacttgattttaagggtaaataggtcatttgaccaaccaggcaggccctgctctggccaaggtgttccagtgggtttggaaaagttagagacagtgtggggtggagtttgggcaa

SEQ ID NO: 30734 - DNA, 120 bp, Homo sapiens
gcccgcgtgccttgcatagccttggcctggcagtgacgcccagcgcctcctgcttgcctgcagggcgagcctccctcagccctgggcctgtccacgcggaaggccctcagcgtcctgaag

SEQ ID NO: 30735 - DNA, 120 bp, Homo sapiens
gagcggaagaagtgtctgacgtggaaggtgaagcttcttctcggggctaccagggcctggctgggatggcagggaagtgtgggaggccccttctcaggactctgatgtaccctgtcaccc

SEQ ID NO: 30736 - DNA, 120 bp, Homo sapiens
agccgaggtcaaagagaggggaccaaggcggccatgggggctgggaagggtgccgggggaggcagccagattggagtgggacaggcctctcattgtcccctccctgtccgaacttcccag

SEQ ID NO: 30737 - DNA, 120 bp, Homo sapiens
aaccgctgctcctgcttccactggccgggggcctcactcatgctactggccgtgctgctgctgctgggctgctgcgggggacagccagccgggaggtgtgcgcccaggggctgctcccca

SEQ ID NO: 30738 - DNA, 120 bp, Homo sapiens
tgccgcggcacctgggacagaccagggctcttgggggctgtcacccccaagctgctcctgggatgtaagggaacctcctcagtcccttgaatggggtcagaggcctagctggtgtcaggg

SEQ ID NO: 30739 - DNA, 120 bp, Homo sapiens
gaacgggacagtctttccacaagggactggggtgggaaggggagctgtggcctgggggctgctgggtgggcgagccctcactccctgtgggtgcggcctctctttcctcccaccagccgt

SEQ ID NO: 30740 - DNA, 120 bp, Homo sapiens
caacggggaaaaacctccagtccattcccaagaaggtaagcaaaacagaccctgtgagccttgcaagtgagcatggaagggactgaggattgggggaggagagaggggctaatctggaag

SEQ ID NO: 30741 - DNA, 120 bp, Homo sapiens
ctccggcacttggttcctagtcttcccccagatcaaagaggaggtagtggcacagagctgggaaagacccttgctggggcttgagctccctatccccccaggcctgaccatttactaaga

SEQ ID NO: 30742 - DNA, 120 bp, Homo sapiens
gcccgttgaatacgtggaagagctaggagcagccggcagaggggctgtgcgccccaggagtgactggccttgttcccgcagacccagcactacttcctgctctgcttcctgctcaagttc

SEQ ID NO: 30743 - DNA, 120 bp, Homo sapiens
tcccgggaccgcaacctcaccaactgctcctccgtcatgctgcccaggtgggtcccagccccagagatccacccatcgcctgcctcgcctcgaggcttcctccctccccaccccagccta

SEQ ID NO: 30744 - DNA, 120 bp, Homo sapiens
cctcggcctccttacttgcacctctcctagccaacccaggtcccctgacccttcctacctgccagggacggcgggtggagtcctggcagcacctggtcctctccagcagagggcagtggc

SEQ ID NO: 30745 - DNA, 120 bp, Homo sapiens
gtccgtgaccccatcatcctacctgggcgttctcaatcaggaggccagggccatggccattagtgccctcagagctctgcccgctgccggcactgcggatgctgcccacgctgccctcac

SEQ ID NO: 30746 - DNA, 120 bp, Homo sapiens
ctccgtctcaaaaaaaaaaaacagctatcttatagatatcctcttaagacacgaacatagaggtgctctggttgaaatgtgtgcgtttgaggttgggggtagggatgaagttctatctat

SEQ ID NO: 30747 - DNA, 120 bp, Homo sapiens
ccacgaagacaggaatttgggtctgttttgttcactactatgatccagtgcttagaacagagcctgagccaggcacagtgactcacgcctgtaatcctagtactaggaggcctacctagg

SEQ ID NO: 30748 - DNA, 120 bp, Homo sapiens
actcgattttaaggacccaggaggtggggcagaagagaggactgtgtgcctttaacgagagggtgcctgcttcgtgctataaagccaaagccattaaaaatagatttcttttctgctgtt

SEQ ID NO: 30749 - DNA, 120 bp, Homo sapiens
tctcgcccccgtcccgttgtcagtggaactgcccccagcccctcacccctgctttgcccactcaaggagatccgcttcctctggtgcgggatctaagagtgagagaagcccgcgggatag

SEQ ID NO: 30750 - DNA, 120 bp, Homo sapiens
gaacgcgacctcgaaccttttgagcctttcccgggcctgcgtcggaggggatgggacgtcgcaggcttcccgaagggaggagggaggacggcgcgccatcggcccttccctgggcgcagc

SEQ ID NO: 30751 - DNA, 120 bp, Homo sapiens
cagcggggtgcgggtggcgagaggcgccacctgcagctgggcggtggagcgcgctgcagccccggcctccgcgccctttccgctcccgcctctcgtcgctccaacctcctccctcgcttg

SEQ ID NO: 30752 - DNA, 120 bp, Homo sapiens
acccgctgttgcagaccctccggccgacacggaggaggtgggcgcccccccgcacccccccccgaggaaaggcgtctcgccgcgacgccccggtccctacaccatccctctcgtggggct

SEQ ID NO: 30753 - DNA, 120 bp, Homo sapiens
acccggccctgcgtcccccggtcaccctctctgggctgggctctggcagaggagctggcccggatccgcccctccctcggcagctcccgggagttggagggacggctcccctggagtctg

SEQ ID NO: 30754 - DNA, 120 bp, Homo sapiens
aggcggcccgggaccgcaggcgttccgggaactatttccgcttgcgggaggcggcgggacactgggcgcggcgcgccgttctgcgtccaggtgcgcgcaggtgaggccggggcgggcctg

SEQ ID NO: 30755 - DNA, 120 bp, Homo sapiens
ctgcggaaccccgaggccgttcgcgaggccccgccccgcgcttcccggggccgcggattggcaggagcgcagcccccacccccgagggtgcccccgcccctgcggcgccgagctgggggg

SEQ ID NO: 30756 - DNA, 120 bp, Homo sapiens
ctgcgcaggtgctggtactggaactgaatgacgaggcagcggagcaggctgtggagcaggtggaggccgacctgctgcaggaccaagagggctaccgctggaaggggcacgagcgcctgg

SEQ ID NO: 30757 - DNA, 120 bp, Homo sapiens
gcccgctcagggcccgtgcgctttgagcctggctttcagcccttcgtgttggtgcagtgtcagcccccggctgtggtcacctccttggccctgcactctgagtggcggctcgtggccttc

SEQ ID NO: 30758 - DNA, 120 bp, Homo sapiens
cttcggcaccagccatggctttggcctctttgaccaccagcagcggcggcaggtctttgttaagtgagcaggggcggctgggtcccggggctgggagtggggcccgcgaggactcccagg

SEQ ID NO: 30759 - DNA, 120 bp, Homo sapiens
tcccgcgtcaagtccctcaagaagtccttgcgtcagtcattccgccggatgcgtcggagccgggtgtccagccggaagcggcacccggctggccccccaggagaggtgaggcctgaggtg

SEQ ID NO: 30760 - DNA, 120 bp, Homo sapiens
tgccgtgcagtcacctgggagcaggccgcacaggagctgtcagcattcaggctgtattctaaggactctctcctggagcttccttcccctctagccctcgaaggagcacatgcacctggt

SEQ ID NO: 30761 - DNA, 120 bp, Homo sapiens
agtcgttctgcaccagcgttctttcagaggccttcagccctgtaaaggaggggaagatggagaagggaactcacatttcccttgggtttaccgggggcctattttgggtttgacactgtg

SEQ ID NO: 30762 - DNA, 120 bp, Homo sapiens
aggcgcttaactttactgagcctcagctgacaggcacaaagaccctagcccatgtgtggcacagagcatttggcaaaggttagggccatgattcaagcccaagtccgttggcctccaaag

SEQ ID NO: 30763 - DNA, 120 bp, Homo sapiens
aaacgtatcacctgctgctgggtaggcatacagtgggaagaactcaggagtcacaattctcattttagacctcattcatgtctagactccttttaggggatttaagtgtatcactttagc

SEQ ID NO: 30764 - DNA, 120 bp, Homo sapiens
tggcgttcacacccctgcagctgagctctatggccagctgttcacaagcctctctagtcctgcagtacacaatgccgcagccagataactgaatggggagatgcaggaagaaaataagca

SEQ ID NO: 30765 - DNA, 120 bp, Homo sapiens
catcgcaccccactgctctaacagctgcttggcctccacctcaatgcctcacccctttatcagcctcctgtccaagagccttaaggcagaagtccttcaggttcccatagggatcagaaa

SEQ ID NO: 30766 - DNA, 120 bp, Homo sapiens
gcccggaagcagggagtcttgaagatggcaactggtttcttcaggtgcagggcagcaaacacgtcctcttggacctgtggggtggctgtggcggtcagagccacacaaggggcatgtccc

SEQ ID NO: 30767 - DNA, 120 bp, Homo sapiens
aggcgggagcgcagggcacccagacgcaagtagtcaggacgaaagtcatgcccccattgggaaacacaatgagcttcatccaccaccaagtaagacagcaggtggcgggacaccagggag

SEQ ID NO: 30768 - DNA, 120 bp, Homo sapiens
tctcgctccaggtcagcaagcagctccttcctttcctgtgcagagagcttcgagttcagggaacttactcgtacctttagggttagcaagtggtccacttggtcctaagagaagagaaag

SEQ ID NO: 30769 - DNA, 120 bp, Homo sapiens
caccggctctctgagtgacattcagccctgcctgcgggagggcgaggacaagccgtgctccggccgtggggagtgccagtgcgggcactgtgtgtgctacggcgaaggccgctacgaggg

SEQ ID NO: 30770 - DNA, 120 bp, Homo sapiens
ctgcgagtatgacaacttccagtgtccccgcacttccgggttcctctgcaatggtgagcacaacaactgcggccaatgctgatggcggggtagggagtggacagcaagcatgactttccc

SEQ ID NO: 30771 - DNA, 120 bp, Homo sapiens
tcccgtcaggacccaggttgggagagccagacttggaatcagaatccccaagttcaggcccagcccactctggatgccctgagggccgcccctgagtcctgccccaacctgggcctgact

SEQ ID NO: 30772 - DNA, 120 bp, Homo sapiens
taacgtccatgcccaaggtcactgttggcaggactttcccctggttttaagattccaactcccctgaggttctctctggaagttcagttctatgcccaccccacttctccacacccctat

SEQ ID NO: 30773 - DNA, 120 bp, Homo sapiens
cttcgactgtctgtccctgagtgtgctcagagaaacagaagagagaactgggcaccactggagaaaggcagacaagtggcacagagggaggtatgagagaggaagggaggaaggtgcctc

SEQ ID NO: 30774 - DNA, 120 bp, Homo sapiens
cttcggttctagtccagagcaggacttcatcctttggacaaaagggggtcactggaggttttactttcattttctaactatttgcatattaaccttgtatctagtcaccttgctaaacgc

SEQ ID NO: 30775 - DNA, 120 bp, Homo sapiens
ctacgtccagggctccaggaaggcgacgtccagggcttgctgagggtggcagaattgatgagcttctcattggcttttctccagtttcaacagtgtgctcatgtctaagcacagctccag

SEQ ID NO: 30776 - DNA, 120 bp, Homo sapiens
tgacggcctctctgtgacccctctccatacctgagcacaggttagagcttccagccacaggcgccctcccgtgcacacatctggacctgacagcaggctggccctctgttagtggtttcc

SEQ ID NO: 30777 - DNA, 120 bp, Homo sapiens
taacgacttcaaaaaagtcatgactcattagaatgcggtggtttcattaaaagaagcattgctatattttcaatgtgcatttacaccaactgatctaaatggagtttagtgttagatgaa

SEQ ID NO: 30778 - DNA, 120 bp, Homo sapiens
tagcgagggaggagagttgcacatgactggagttgccttttacatttcttttcttagatttatatggtgcttctacttcaaagagctccattcaagtgcccacgtcctaaacatctttta

SEQ ID NO: 30779 - DNA, 120 bp, Homo sapiens
ctgcggaaaggaaagaaaatggtctaaattggctgtgcaagttggcctgggtctgtgtgcctgcttctaagggaagccatcagcagatgcaggagacgaaccttccagagtatttgttta

SEQ ID NO: 30780 - DNA, 120 bp, Homo sapiens
ggccggggagaacggcagtttgaccaacgagctgataaacagctgagagctgtttaaagatggccgactgccccaaagtgctgtggagcccgggaccgtggcaaggactgcctgctcttc

SEQ ID NO: 30781 - DNA, 120 bp, Homo sapiens
ctgcgaaagaaacacccgtctattgcctgtcaaacaatgcctggctgggaaagctattgggtttatagaagagacaaacatttcaggcatgccattctggggtaatgaagcatggcaaca

SEQ ID NO: 30782 - DNA, 120 bp, Homo sapiens
acacgccagtccaaataggctcttttgtgtgtctgcacgtgtctaccatcattgctttcatcttaaaacaggaaggtagcaataaccgcagcagctggcagggaccataagggggagagc

SEQ ID NO: 30783 - DNA, 120 bp, Homo sapiens
aaacgtcgtttacctctggcctttatttcactcccactacctttaatttattatatgttttctccctttctatgcacaaaaaaaaaaaaagtggctcaatttttctttctttctcttgct

SEQ ID NO: 30784 - DNA, 120 bp, Homo sapiens
ggacggagaaacagagatggaaagattggaggttgatctgcagaccagccagaaagtgagacaggaagatgcagaaaattcagtggcccacatatgagctggagaatcatttctggtcac

SEQ ID NO: 30785 - DNA, 120 bp, Homo sapiens
ctccgctcctccttggggactgtcatggacaccacccgtggtatcccacacacaggtgcctagcattgagtgaccaccggccttggcaggcaggactgagagaccacagaaggggtcttt

SEQ ID NO: 30786 - DNA, 120 bp, Homo sapiens
gaacgctttgtggcacgatgacctctatgaaaaagagagatatacaggttttgcttttgttcactcaactaattaccaacctttcattatacctctactcggacatctaaacttcagtta

SEQ ID NO: 30787 - DNA, 120 bp, Homo sapiens
aaacggcatgcaaaataatttggggtaaggaacattttttattcccctcagaccttgtacaatgatagtctgtactcaagacaaaaccttggctagagaaattaaagagcaggtgcttgg

SEQ ID NO: 30788 - DNA, 120 bp, Homo sapiens
gcacgttcagagctgcctatttctgtgtaactgaagaaaacagaaattataaatctatagaagagatgtttacttataaatgtttacttataaatatcacatgtaaattaaatgctatgc

SEQ ID NO: 30789 - DNA, 120 bp, Homo sapiens
taccgcaaagttgtatagtcaatgtatttttaatatagtttgaaatgaaaataacttcattttaagggaaacagaatttatgatgatgcaagtaatccaggatgtcgatcaaaatatacc

SEQ ID NO: 30790 - DNA, 120 bp, Homo sapiens
ttccgatggtgtgcatgtgccatagtacgtatagaaattctaagaattcatataatttacctgctaaatcagggactattacagtctgctgtgtaaattcacattttggcactctttaaa

SEQ ID NO: 30791 - DNA, 120 bp, Homo sapiens
agccgttactgtacatcgtgtaaagccttcgtggtgtgtgttttattgaagctctgtagctgtcgggatctgcttgtcaatctagctgccatgcgcgtgcaccaaatgcattgctaaaga

SEQ ID NO: 30792 - DNA, 120 bp, Homo sapiens
caacggtcacagtgagatttctctactttaggcttttgggaatccaaataagatttttatttaattttctatgtgctaattttgtgtttttccacctgtctgtcctcttctttcatttaa

SEQ ID NO: 30793 - DNA, 120 bp, Homo sapiens
agccgtcctgacacccacacagcatacacagcgtgtttgtgatgatgattaagccatttgttagtctcttcctgatatggctgaagccatgcaaatcagcatggattcccaatcctcaga

SEQ ID NO: 30794 - DNA, 120 bp, Homo sapiens
ggccgagagcaaacatttggtaagtttctgagctaggaagaaaatgcttatggaaccgtggttttaaaaacatacagtcagcagaacatatccgcttagagaccaatatttcttcaagtt

SEQ ID NO: 30795 - DNA, 120 bp, Homo sapiens
tcccgtaagaaatagtaaaagctcatatttttatactatgttatttcaatctataattgttataattgatagcttaaaatcctaaagttcaatggtaatgtgacaaatgggagatagagc

SEQ ID NO: 30796 - DNA, 120 bp, Homo sapiens
tcacgtcagataaatggatagagagttaagaaccgcaaatttctaagaaatcaccagcgtaattatcttaggaaaatatagtttattttcattttgcaaatatctgctaaccactgcatc

SEQ ID NO: 30797 - DNA, 120 bp, Homo sapiens
ttacgcagccctgccgtaacaaatctcagctggtcctctgctgtcctctggggagaatgcatttgaactcatctcaaaaagctggttttctaccctggaggtctccgatggctactgcga

SEQ ID NO: 30798 - DNA, 120 bp, Homo sapiens
tcccgaaagcagtgatacagattggcagccactgcagagatgcagaatgtcgaagagtgtgtgtgttgtaagagattcttaacccctccctagcacccataggggcagtccacagcctgc

SEQ ID NO: 30799 - DNA, 120 bp, Homo sapiens
gggcgggagggggttaatgcggggcagctgcctggcggggaccagctgaaatggatcagctaggaaccagcctcccctctgcattaaccctcgaagggatgcagaggcccaggacagagg

SEQ ID NO: 30800 - DNA, 120 bp, Homo sapiens
cctcggcctcatttattcatgggagacacacgcgcgtgtgtgcatacacacacacacacacagagagagagagagttcattttacctcctgaccccttctgcctcttgtcctgatttgaa

SEQ ID NO: 30801 - DNA, 120 bp, Homo sapiens
aggcgtgcagaccttacaggctgatgattctgcctcttgccaagggaattcctggacagacactgctctgaaagaaaaaccctctggttttggaagtctggctgggcaaggcaggcggag

SEQ ID NO: 30802 - DNA, 120 bp, Homo sapiens
ggccggcgtgatggaatcctcggtgcagctgactgcgcagcccgacactggcgtggacactgggacgcgtcatgcaacatccaaccagagcacactcacgaggacaaacatgggcccacc

SEQ ID NO: 30803 - DNA, 120 bp, Homo sapiens
tcccgcatacaaagaaattggcattctctgccaccaatcaacatttgagtatttggcaaagttatgatttcagttccatacacgacagctgaataaaagagttgcaaatccagaagaaaa

SEQ ID NO: 30804 - DNA, 120 bp, Homo sapiens
gtccggagtgctccatgtagcacacacccaccctcagcacattacaaatgtgtttgcactatcaataaatcatatttctagcactgtactaattacaggggcagcaatgtatataataaa

SEQ ID NO: 30805 - DNA, 120 bp, Homo sapiens
catcgtgctcagcacacaccccctctgggatactgtttagctcattcatgatttctgcttgtgaagacattcatccaaaacatgcctttaattgtaatgtcaaacacaagagcaaatctt

SEQ ID NO: 30806 - DNA, 120 bp, Homo sapiens
cttcgtttcggatgcacgcccgtctcagaagaaccagccatccaagaggagggaggttctaaacagcgaggcataaacctcagcagagttagacaaggtctgcacttcatctaagggcct

SEQ ID NO: 30807 - DNA, 120 bp, Homo sapiens
cttcgggcttccacaacagcattttcaccgcagagtggcgcacccagcgcagagtggcgtccccagcgcagagtggcgtccccagcgcagagtggcgcacccagcgcagagtggcgtacc

SEQ ID NO: 30808 - DNA, 120 bp, Homo sapiens
cagcggagagtggcgtacccagcggagagtggcgtacccagcggagagtggcgtacccagcggagagtggtgtacccagcggagagtggcgtacccagcgcagagtggcgtacccaaggc

SEQ ID NO: 30809 - DNA, 120 bp, Homo sapiens
agacgctccggttgggggaaggacgcccagtgctgttcagagttccatttcctgcccagcacatctggaaagccacattcgggaacttatctagtctgttctttcctcagccagtagaga

SEQ ID NO: 30810 - DNA, 120 bp, Homo sapiens
ttccgtccgcgtccatccctgtgcgtcctgtatgggtgacagtgcaagggtaagaacagtgggtgtattcagtggggaaataacatgtgtgctgtgaaagaaaatgagaaaaacacagcg

SEQ ID NO: 30811 - DNA, 120 bp, Homo sapiens
cctcgagtccacaaaagagttggaaaaaaaccactcgggccatctgggcatctgttcagatgaacgatcttgtgaattaccctaaaactcttccataaataaagagcattaacactttgg

SEQ ID NO: 30812 - DNA, 120 bp, Homo sapiens
gggcgggtggcccttggtcactcccacaggcacgttaccgggctccggcgtgtgctcccaccaaccacggcaaacaaaggcgtcctcctcacttgaagtcctggcctgtggttgtttcat

SEQ ID NO: 30813 - DNA, 120 bp, Homo sapiens
aaacgttctgaaattagaactcaccaaagttaaaagcagtaaaacaacatatgctacttaagacattttgaagcagaaagtaaagctatgtgaatgccgtccttccttccttcctttttc

SEQ ID NO: 30814 - DNA, 120 bp, Homo sapiens
tttcggaagatttcgcttttcttttctgcagctgtgaactgtgggcttttcagtaatgctgaaagacatactatctttcttgaaggtatttcagtgttctagggatggatattgactact

SEQ ID NO: 30815 - DNA, 120 bp, Homo sapiens
tcacgaggtccactttctctctttcttttagtaaggcaagggaaatgtgtatgtagtggtgggtgtggatcgatgccccgcacacaaaaaacctgccatgccccaggacacacggggcac

SEQ ID NO: 30816 - DNA, 120 bp, Homo sapiens
tctcggccttcagagggaggtcagcctgtaaacagggcttgtggtcagccacgcaggcaatgctaagtgcctgaggaccaattatgcacaatgctttactgactaaaacctttacccaac

SEQ ID NO: 30817 - DNA, 120 bp, Homo sapiens
ctgcgcccccagccttggaagctgtattttgatgtccgaacaaaaacagtcccaaattaaatatagaatttctgactagacaaattattcgtgttactttttaaatcagtgagtacagaa

SEQ ID NO: 30818 - DNA, 120 bp, Homo sapiens
tttcggttaaacagcagtttatccggcataaaacataatcaggttccagaaacctggaatttactaactgcttcctattgactcaaccataaagaagcgtcgctcaggtttggtttttct

SEQ ID NO: 30819 - DNA, 120 bp, Homo sapiens
aatcgaattcaagttggctttcacggctactctacaccttacacaccttccttcgtccccagatcctaacagccaaccaaaacacatccactggagaaaatacaatcaatatattctttt

SEQ ID NO: 30820 - DNA, 120 bp, Homo sapiens
acacgaatctttccttgtatgacgcagctgtctgaagcagatgccagctagcacaaaggccgtacatgaagtcttatcaagaatggtggcggggactgtcgggaagaaggtgctgacgcc

SEQ ID NO: 30821 - DNA, 120 bp, Homo sapiens
cgccgctggtagatgttagaatgaaaataaggaagcttagagtaaggaggagagcaggaaagccaggcccataacactagttatgaaggaatgggggcctttctgaaggaatgggggcct

SEQ ID NO: 30822 - DNA, 120 bp, Homo sapiens
ctccgacttaaagccaactaatatacacacaaactagctagcacctgcatggctttctacaactttttctattgcgatgcataaatgtccaaaaacacagaatccaaattccgtgtcttt

SEQ ID NO: 30823 - DNA, 120 bp, Homo sapiens
ttacggaacaaaggccatttcataacacaagcggtctctgtcctccgtgacagaggaaggcggatttccccgaggcatcctggcagcccgcgcaatgcatggaagctaccactagatggc

SEQ ID NO: 30824 - DNA, 120 bp, Homo sapiens
ctgcgcccaagctatagcccgactccctcctggtgctggtgctacgcgtgtggtccccgtacatggaagagccatccacttttcaacaacaggcatttatctgcaaaagacttacaccaa

SEQ ID NO: 30825 - DNA, 120 bp, Homo sapiens
agacggaattaagcaaactatgtccatgaacattacatgtgggggattatatatatagtcagcatatccaacttcaaaaatgtccaaccttgcaaaaacttactcaaatgtaatgagtta

SEQ ID NO: 30826 - DNA, 120 bp, Homo sapiens
cagcgaaagcctgggtgcgttctaagcgctagagaggaggttcaggaaaacagcacctaagttgtcttctgtcacctctagactcgaggtccacaggtctgacttctagccccagggccc

SEQ ID NO: 30827 - DNA, 120 bp, Homo sapiens
agtcgggaaacactctcatcccttgaacatagctctgggtgacatcgtccattcaataccggtcccaggtggtcaccacctgcaggaggagacccagccaccagccctcaccatgtttct

SEQ ID NO: 30828 - DNA, 120 bp, Homo sapiens
caccgtgggatgagcagaccatcaccgcagagcaatcagccctgcccaagggcagcagcccttctgaaagtggcccttcctgcacacgcccccactttagcaaactcaggcaggagggtg

SEQ ID NO: 30829 - DNA, 120 bp, Homo sapiens
taccgctgttgttaataagcaaacaaaaaagaaaaaaaaacgaatgcagaaatatttagctgttctcatgcctgggaaacataacccaaagacctccataaataacttggagaatacagg

SEQ ID NO: 30830 - DNA, 120 bp, Homo sapiens
gggcgatctgggatattgagaaataaacagattttcacaatgcttctcagcttgcaaccatttgatggttgctgtgaagttctgaaatgaaacttggcaaatggtctcagtgagatgcct

SEQ ID NO: 30831 - DNA, 120 bp, Homo sapiens
ctccgaatgcctcgatgccgcagcggctactgaacggctcatctggtcccttattctcaacttcaaagaacaggctctccctgtcccaggcaagggcagaaagctgggtgcacgatttta

SEQ ID NO: 30832 - DNA, 120 bp, Homo sapiens
tcccggctctttcaacattttattaacccatgaaagcgtggaaaccaaagctgtaagaacaccgccaggaatcttgagaaacttttaaaatctcaaaagtcttctgccttcaataacggg

SEQ ID NO: 30833 - DNA, 120 bp, Homo sapiens
tgacggcacttcacacacacagtcacgtgccacttagccaatgggatacgagctgagaaatgcattgttaggcgatttcgtccctgtgcagacatcctacagtggacacacacacccgca

SEQ ID NO: 30834 - DNA, 120 bp, Homo sapiens
gcccgcaacacacctaggctgtatggtgaagccacagcatcctcctagtgaggctgggtctgctcctagagattgtgcccaagcctgaaaacagtgagcatcaaccaccctgcatggccg

SEQ ID NO: 30835 - DNA, 120 bp, Homo sapiens
gcacggaacaggcccccaccaaggacgagggacgcatgaatcaaaatgcttgtatccaaccaaagaggcctacatggtgcaaggagaaaagcaactcttcagtaaaaacaggaatcccac

SEQ ID NO: 30836 - DNA, 120 bp, Homo sapiens
gaacgatgagccagttagaaaggatgtgagagatgtcgagtctctcaggtcagcgtctgagtgttcaagagggaggggctgcacagacaactccccggggacaggctctgctcatctgct

SEQ ID NO: 30837 - DNA, 120 bp, Homo sapiens
ggccggctccagacctgcacagagaggcacccagatgggccatgttctgaaaacccaagtgatttcgcatagaaaggaagcgtgtttgtataagcctacaatctcacacacactaagaac

SEQ ID NO: 30838 - DNA, 120 bp, Homo sapiens
ttccggctgggaagcacacaacacattaacacacagcttccatgaaagatgacagggccacccacgaaaagacctggggtggcagctccctgtttgctccgagttttgcagcctcccagg

SEQ ID NO: 30839 - DNA, 120 bp, Homo sapiens
tgtcggtgtcaagagtgtccccatacctcccccacgggggtcggggattctgagcattttgtattaatacttcaactcccgagggcccagataacagcaagacaggagccttctgaaaag

SEQ ID NO: 30840 - DNA, 120 bp, Homo sapiens
cagcgccaggtagaaaccttatcaagaattataggcttcacaatgtctttccagaaagccccgctttggaggcgcctaaggaaacacgagcagcctcagcagcaaatgaaaagcagcaac

SEQ ID NO: 30841 - DNA, 120 bp, Homo sapiens
gaacgcacccagcagagccatgcaacagagcgggcatgagagagatgcccacccagaggagccaaaacccacttgctccaataaaaaacaacaattagccaggcatgatggtgtgcacct

SEQ ID NO: 30842 - DNA, 120 bp, Homo sapiens
cgcaccatggttttaaatacgcagagggccatttttctcctgacacttcaatgccatcatttacttagctaataagtgccacggtaggtcctcagttaacatcatctatagcttcttgga

SEQ ID NO: 30843 - DNA, 120 bp, Homo sapiens
atgcgaaatgacaaacagaaatccttgataaagtctttttgttttaaagctgatgtggaaaggaaacatgagtttcattttacgtcctttcacttaaagttgcagtttccaaaaccctac

SEQ ID NO: 30844 - DNA, 120 bp, Homo sapiens
acccgcagtgcatggagctccaattcctgacgggcccaagtcctcacaaaaaggtgctttgcaaggaaaattatgaaaaagaaaacgtcagtggggtggagttaaaaggttcctattttc

SEQ ID NO: 30845 - DNA, 120 bp, Homo sapiens
ttgcgcttctctcccaagcaagcatcctgcacaaggctcgctctccctcccaacacagatgtttcggggggcattttctagacaggtacgaagggaatcccgtccctgagaggaccaagg

SEQ ID NO: 30846 - DNA, 120 bp, Homo sapiens
gctcgggaccctcaggacggggcatgcactgtgggcaacgccaggcctcaccgtcgtgcgtgtgcatgcctcaccgtcgtgcgtgtgcgtgcctcaccgtcgtgtgtgcgtgcctcaccg

SEQ ID NO: 30847 - DNA, 120 bp, Homo sapiens
cgtcgtgtgtgcgtgcctcaccgtcgtgcgtgtgcatgcctgtaggcaatgccaggcctcaccgtcgtgcgtgtgtgtgcctcgtgtgcgtgcctcaccgtcgtgcgtgtgcgtgcctca

SEQ ID NO: 30848 - DNA, 120 bp, Homo sapiens
caccgtcgtgcgtgtgcgtgcctcaccgttgtgtgtgtgcatgcctgtaggcaatgccaggcctcaccgtcgtgtgtgtgcgtgcctgtgtgtaaaggttagagtgtgtgacagtgagtg

SEQ ID NO: 30849 - DNA, 120 bp, Homo sapiens
gcccgagggtgtgtgtgtgtgtctgagagagcacatgtgtgtgatctcttaacctacataaaagcactcattcaaataccctacctggaggcaaacacgcatgtccacttccaacaatct

SEQ ID NO: 30850 - DNA, 120 bp, Homo sapiens
actcgtgcccatgtgcctggattaccagcttcgcacagagccagacgctgcagcagtaacggggcgccgggcccacctgctgcccctctcctgtgcatagggcgctctctccctgccccg

SEQ ID NO: 30851 - DNA, 120 bp, Homo sapiens
catcgcctcaagattggacgcaaaatgcacccgtgtgtgtgggacagagaacgccttactcattttcccagtagcagaaatcttaagaactttcccacggaaccagcattgttaacaatc

SEQ ID NO: 30852 - DNA, 120 bp, Homo sapiens
gcccgtgttaaggaagaaagggacttgtttttcttattaccttttcttataatcctacagtatgttaattacttaacagataggttgtgacctattaacaccacactttcttacaacagc

SEQ ID NO: 30853 - DNA, 120 bp, Homo sapiens
ctgcgactggcttttactctgggagacaaactgccccttgcagtgtgaagggacccacgataaacactcgtccctttgcctgttaccctgcacaattagaggcaagcaacaggactctaa

SEQ ID NO: 30854 - DNA, 120 bp, Homo sapiens
gctcgaacacatacagatggaattggagatgcatatgttgtgttaggagcacccccccctttttttttttttttttttttttgcctggcgtctttattgtatttgttatttaaatatcct

SEQ ID NO: 30855 - DNA, 120 bp, Homo sapiens
gtacgtataaagacaggaagtgagttatacaaaaccttacaacaacaacagtattgagtgtcagacaagcagatgtgcctggtgtttggggagatgatatatatttagtttttgaaaatg

SEQ ID NO: 30856 - DNA, 120 bp, Homo sapiens
cagcgccgcataaatattctccggttaatcacgggcgcttgggcctggagcagcagactttcattattgagctttttgctttgctttatttgtgtttctttcagaaaactaaaatcttgt

SEQ ID NO: 30857 - DNA, 120 bp, Homo sapiens
gcacggtcagagaaagagaggtgggatcgatgtcctctgtctattccctggtgcattgttcctgcctgggctccgcggggcttgatgcggatcagaatctctgtgcacacaggagaggga

SEQ ID NO: 30858 - DNA, 120 bp, Homo sapiens
caccgccgccggttgtgcggccgaaactgcagcccggggtggtgtgggagaacgtccgccagggctcacgcccccgactcgacagagaactgtggggagcagctccttcctctctcggga

SEQ ID NO: 30859 - DNA, 120 bp, Homo sapiens
atgcgggatgagtcagtgacgcaggagctaaaaacagtgtccctttaaaaatgtgcatgcctttgaaatggaataagtaaagtacttgcagatgcaaatggtttcaagtttcactggaga

SEQ ID NO: 30860 - DNA, 120 bp, Homo sapiens
cagcgaaagcggctgttctcaaagttgccaggcagtgtggaaacgcccactgaggggcacacagtgaggcggccactggctctgtgtccttggggaagccccttctgcggtcccctccat

SEQ ID NO: 30861 - DNA, 120 bp, Homo sapiens
ctgcgtgacaaagtggacgtagaactcccccatttcctgcccagggcgggtgaggaccctgcacacacacggtgtgtttgtgagctgtgcagagtggggtctccctggcaatggccacag

SEQ ID NO: 30862 - DNA, 120 bp, Homo sapiens
gggcgctgacacctcccgtctaactggtagacagtttctgcctcttcttgtttggggattggagagggaagtgcgtctggatgactactaaggtaaatatggaatgggcaccgcgtcttc

SEQ ID NO: 30863 - DNA, 120 bp, Homo sapiens
ccacgcacctgcctggctccccggctctcccgccctggccagagtcaatgtgagctgcaaagtccatatgtgaacagctgtgggcaagtcgtgcaacagtgctcatgggacttactacgc

SEQ ID NO: 30864 - DNA, 120 bp, Homo sapiens
agccgctgaacttcagctggaccccaaatggccttggtcacgttttgtttctgttttgtcatttccggctgcatctcccacagtctcagccctgcgctccttgctctgccttctcctccc

SEQ ID NO: 30865 - DNA, 120 bp, Homo sapiens
ggccgatttctagggcatgaggtccctcaacttctctcatttacgtattgggtccctcatccttcgatatatgtagtcagaattcgtggctgttgtccttaattctttcttaaaggcaga

SEQ ID NO: 30866 - DNA, 120 bp, Homo sapiens
tggcgttacttaatggttcacagactatagtggtggatgcagttgatgttaaagagacttgggtcagaattccatctcagctgcttcctagctctgttaccttgggcatatcccttggcc

SEQ ID NO: 30867 - DNA, 120 bp, Homo sapiens
atccgtaaaatggacatattcataccgatttggcaagattcctgctgggggttggtgatcgagatcatctgtgtgcaacctcctaacaggatctccagggcgtctggtcctgtgcagagc

SEQ ID NO: 30868 - DNA, 120 bp, Homo sapiens
tctcggagcaaaaatgcttttgtgcaggcaacatttcttagatgtttttgtacttagagtttgacttgaggatatttgtggatgggactcagatttcagagtgtgggaggagaagaggtc

SEQ ID NO: 30869 - DNA, 120 bp, Homo sapiens
aggcggctttgctcgggtcatttgcatctggccgcccaggttccagcagctccatcgcgttggtgaaatatatcctttaggggatgtcacggctttggttaagttttcctttttactcct

SEQ ID NO: 30870 - DNA, 120 bp, Homo sapiens
tagcgcagttttaatgatagctgtttcacatgtgcatgcggcactcatgtgggcagagctgtcagaagactgtaaagtctcaaccatcctgcgattgcttgcacctgaggaagacggaat

SEQ ID NO: 30871 - DNA, 120 bp, Homo sapiens
tgacgatgttctgcgccatggtattcctttgctcattcatacactgatttatggctcgttgttttcctttggctcaaggtgacatcagtacctacaaaaaggcaaatatacgtgagaatg

SEQ ID NO: 30872 - DNA, 120 bp, Homo sapiens
tagcgtgactttttcttcctagcttttgtgggtagtgaagtttttctcaacatgctatcagattggttccattatttaaaagtatttttaacacaggaaaaagtttcgtgttttgtattt

SEQ ID NO: 30873 - DNA, 120 bp, Homo sapiens
tttcgcaatgcgattcgatcatcttccgctgttccagatggtggcttgcaccgtgcaatcaggctggatcttacacaagaatccattccaaaccctgaataagggcccaagcccagagag

SEQ ID NO: 30874 - DNA, 120 bp, Homo sapiens
tgacgtggcgctgtgtctgggctcgccctttcctcggatcccacctctccggaggacggggagagtgctgggtaatcctgggagttcctaaaagccagcacagaaggcaggggtttcttt

SEQ ID NO: 30875 - DNA, 120 bp, Homo sapiens
cttcggaggaggtggccactggtctgagaaagtctaagtgtaggttgggacttcggtcaactgggacttaactatgccactcaaactggtgtgcatgcaatgccacttctgctgggtctg

SEQ ID NO: 30876 - DNA, 120 bp, Homo sapiens
tgccgggattataggcgtgaggcaccgtgcccagcaagtattgaataaagatctcagttcatgtgttttcctttattataaacagcacaaatgggtccttcctcgctctgagcaaatgta

SEQ ID NO: 30877 - DNA, 120 bp, Homo sapiens
atacgtttatcaggtagttgaagtcttcatcttttaaaatatttaccattttttcattaaaataacaaatagacatttgtcttcgagaggcacattacctctagtgatttctaacgattt

SEQ ID NO: 30878 - DNA, 120 bp, Homo sapiens
acacgatcacaggaactactgaagacttgctttaggatctgcccaaattagcaatgtctcctctgtctacatcagaccttatttggattcttctcattttggtgtctattccaagactcc

SEQ ID NO: 30879 - DNA, 120 bp, Homo sapiens
tcccgtccccgccagaactggtttatgaccaatactgctttcagttcactgcgtggggctacagctcctcaattgtccaaaaggtcctcggttccagagttggccctgtgccatggagcg

SEQ ID NO: 30880 - DNA, 120 bp, Homo sapiens
ttccggaggagcacaatggtttgatcggaaaggttcccgaatcaggatttaatgtcatcttgactaattttgtacagttaaaatgccatgggactctttcagaattaaataattgatttt

SEQ ID NO: 30881 - DNA, 120 bp, Homo sapiens
tctcgctgtctctctctctcacacagacacacagacacacacacacacacacacatgcctccaaactggctgtctttccattgcacaaaattgtattgctcgatttacagttgagctaac

SEQ ID NO: 30882 - DNA, 120 bp, Homo sapiens
ggtcggaaacaggactcccccagtgcccatggtggcctgagcgagcctggagatacttcacagtggcaggggctgaaggagagaagggagagctgcgtgaagctggggaaggcctgcccg

SEQ ID NO: 30883 - DNA, 120 bp, Homo sapiens
tggcgttcaggagtccttggttgtgggtgaaaaagtgaaggacttcagcttgaccttggggtcgaccagctgtggtcagacaaggtgagagtgggagcgaactcattaaactcttggccc

SEQ ID NO: 30884 - DNA, 120 bp, Homo sapiens
ccacgggaaaagcaatgtcccagtccctgctaagtaggtaagacctgagaagcagagagactaagtgacttgcttgcagtcaccctacacggtgatagagtttgcgcccagacagtgtgg

SEQ ID NO: 30885 - DNA, 120 bp, Homo sapiens
gggcgaaagggaaaaggggagagtgtgttttgacacagggcagcataaagagccactcccagagaactagtctcttcacttgcagcccggccacgggttatgatggagaacacactggaa

SEQ ID NO: 30886 - DNA, 120 bp, Homo sapiens
ttgcgtcagtcacttaaatgtcttctctgtgaatgaacataccttagttctactggaaaaataacacatttttaaaatgcatatcctttttgtagatgttataaaataatttgagtggga

SEQ ID NO: 30887 - DNA, 120 bp, Homo sapiens
tgtcgacctccaaggagggtaagatactttccttcgtgcttgtaaacttcccttttcttcctgttctctgttgcgctcaatctgcccatccattctctctgcattcagcctccatttaat

SEQ ID NO: 30888 - DNA, 120 bp, Homo sapiens
gtccggtttaaggaggattagtgattcactgatttaattaccacgcacaaattgttcttttctggatgcataactgaaacattgtcttcgaactccaagaggaaattgcctgtgatatgt

SEQ ID NO: 30889 - DNA, 120 bp, Homo sapiens
ggacgttatgagagctcatgatgaatttgaatctgtgcacaatagaaccctttcacacttcagggcgattgaaatgtcaaataattcttaaagtataatgtgtggcttgttaatccctgc

SEQ ID NO: 30890 - DNA, 120 bp, Homo sapiens
agacggaattggagcagggtgacagtgagaggggacatttgttcagtagagtcctttgctgttggctcctcctgcctccacgttcgcccttgtgccccgggaggattctgggagacacgc

SEQ ID NO: 30891 - DNA, 120 bp, Homo sapiens
gcccgccccaagcgtatttcaagggcagtggtgaaaaaaggaagagagttcagggccttcaagggtcggacattttccatcaagtttatcatcagagatgataaagtagtttgaaagagt

SEQ ID NO: 30892 - DNA, 120 bp, Homo sapiens
aatcgctttagcaatgttcctaatgactgatatataaaatgctctcacagatcaataagaaaaaggcaaacccatcaccccacttccagagaaaagtgttaaggatccaaacaagtgttc

SEQ ID NO: 30893 - DNA, 120 bp, Homo sapiens
tcccgagtggtaatgcttagtgttagtaaaaatttgggaaactgacaaccttctgtactgttcgcggggtagaattgggggtgtcactttctgcagtgtgagtctcactcatcttggtag

SEQ ID NO: 30894 - DNA, 120 bp, Homo sapiens
cctcggcagcatctgcctttctcagcagcagactggttgttttcttctgctggtcagagcaattcttcaacaactgcatgagcagaggcatgaacatctgtcgtaaaatggggatacctg

SEQ ID NO: 30895 - DNA, 120 bp, Homo sapiens
ccacgccattccccagtctgctcgctgctctggcaagtccagcaccatggttgaagcagtctgttatagatgcctgcctttcttcccctgcggtcagcatcagtgttcctaacagaagtt

SEQ ID NO: 30896 - DNA, 120 bp, Homo sapiens
ttccggctgtcttgtaaacaaatagttgattattgttcttcagtaaggactgctaaccattctcagtggagaaagccctgataagtcttctattctattgagaatatcctcagtgaaagg

SEQ ID NO: 30897 - DNA, 120 bp, Homo sapiens
ttccgctgcacgcttttgcgctacagtgttgcagaccccctgtgatctaagaaagccattaatacccacggaatgtgttgagattcagcagtaaagaactttcctgtctgacaagttccg

SEQ ID NO: 30898 - DNA, 120 bp, Homo sapiens
caacggctgtgtcatatttgcagagcactagccattgaaccagcacctgagaagggggcaccatgagatcctggaagagcttctgtcaatttctatagcaagcctgctgctcctgcagct

SEQ ID NO: 30899 - DNA, 120 bp, Homo sapiens
aaccgtgtagcctaccagtgctgtggtgtcgaaatataaactgcgcaggagtcagcagtaccttggtgaagcttgagctagccggtccaacagtaacttctgttgttttttatagttgac

SEQ ID NO: 30900 - DNA, 120 bp, Homo sapiens
agccgctgcagcaaactgcctttcttccttcactcactgcttaaggggccatggccttcttttgaaactggttttgcaggagaaaagagccgacacttgctggccaggtgcctaaggcca

SEQ ID NO: 30901 - DNA, 120 bp, Homo sapiens
agccgagcccttcccacagcctgtgaggtgtctaagtgtcacggccccgttttactcacaaggattctatcatttaagggtagctttgaataacttaaagtcaccctgccaatagagaca

SEQ ID NO: 30902 - DNA, 120 bp, Homo sapiens
tatcgttctgagcatttacacctggatttcctgttacttgagatcagctggtctcagctgggaactttttagtaaggggcaggtttttagagggaggtttggggtcagaagggtgatcat

SEQ ID NO: 30903 - DNA, 120 bp, Homo sapiens
tgccggccgctggacgcagaggatgttggatccgcgcccgttctttccgggctcattaggaggtggatggagaggccgctttcctccttctgctttccaacagccacactcctcatgctt

SEQ ID NO: 30904 - DNA, 120 bp, Homo sapiens
tctcgtttgaaaggtattaaagtgacttgaaatgccgtgcgcatccatcataatatcagtgtgtctgtttatgagagatgccagatcctggacttcccagaagcatccatggagttattt

SEQ ID NO: 30905 - DNA, 120 bp, Homo sapiens
tgtcgtcgggctctttgtaaagatatattcatctattttactatgccttacatttccaaactgttagagaagttggtaattgagagagtcatcatcctgttgaaacaagagatttcaata

SEQ ID NO: 30906 - DNA, 120 bp, Homo sapiens
atacgttttcttggcactgagtagggactccacgtagttttggactgaaaaaattaaagtgatgttgacttcctgaatttggctaagagggaatggttaagaaattgctttactgttctt

SEQ ID NO: 30907 - DNA, 120 bp, Homo sapiens
tttcgcttctttctttcgttgtaggaggcatattgctctgatagattttgaaatagagtgggtgagggaagcgctttggatcccactacgatggatcatctcaactattggcagtgcttt

SEQ ID NO: 30908 - DNA, 120 bp, Homo sapiens
tagcgaatagagtgctgtcccttaagcacaagcaaaggcttgtacctgcaagtgtgctgtgcgctctcaatgctgcgagggaggtggcgtgggccccactcagacgaactctgcctctga

SEQ ID NO: 30909 - DNA, 120 bp, Homo sapiens
tgacggctgcctgtccctgggccagccagtcacattctctagacctggctcctcgtccctggggttagttgattgaatttctttctttccagctctgccttctacttctattctcagtta

SEQ ID NO: 30910 - DNA, 120 bp, Homo sapiens
aaccgaccacatggtattgggaatcactctccatgggccccttgcatttctttgtgttatatccacatgctcttgttgggctgtttgtacagagcgcagcctggggagatggcgatggcc

SEQ ID NO: 30911 - DNA, 120 bp, Homo sapiens
gcacgaagggacgtttgcttactgatcagtgtaatcaagacactgttgccctccgtaccaaaggccaggcaggtgcacttcaagtgacccccctgtcttggcctcctgagcagctgaaag

SEQ ID NO: 30912 - DNA, 120 bp, Homo sapiens
gtccgctcctcaagctcaggcccctccgccaccacaccacccactgtgtgtgcaggcatctcctggcccactttgcgtcccacttcggggctgggggctcagatgttcaaacaaatgctg

SEQ ID NO: 30913 - DNA, 120 bp, Homo sapiens
ccccggagcccacgtcctctgccagcagccaggaggctggcaggctgtcctgaaaggaaagtggggagaacctgcgatgcttcatggctgctgacaccgtggtcagccctggctcagcct

SEQ ID NO: 30914 - DNA, 120 bp, Homo sapiens
acacgaaacattcagaattagaattggattaagaagacgcgttttggcatcacgctgactactcctcatctccgtcctcggggagggtgatgccagcgtgggactctttggaaggcctat

SEQ ID NO: 30915 - DNA, 120 bp, Homo sapiens
gtgcgctaaaatcaaaaggtgggtcagtaggttagggagggaggcgcgaaaggagatgccagcgggtgttaagaaggatatggtcagaagagctctttgtctccatccacggggccgtct

SEQ ID NO: 30916 - DNA, 120 bp, Homo sapiens
gcccgtgtgtctcggtgagtaattcgggagcaggtgcacgcctgtgcctactcgctaccacgcgtcttctgggaggaagtgaatgagccggttatcttctcagggagggttagtgctggc

SEQ ID NO: 30917 - DNA, 120 bp, Homo sapiens
tgccgctgccagcacgcccggtcacagccagtgtctatgggcgactggcgcggctgcgaggctgtctagaggactcctacccttctgctctgagtgcgcaagtcttcctggactctccgg

SEQ ID NO: 30918 - DNA, 120 bp, Homo sapiens
aaacgaggttgttcatagaggctgctctggggccaccatgcagggcaacggtgacgtccagaggccacctgcttgacatctccatcaccaaatctccaggaagaccctgtttcctatgtg

SEQ ID NO: 30919 - DNA, 120 bp, Homo sapiens
ccacgtttgcctccttttcctccctctgccacacgcgaattcagctaattggggtgtgtgggcagccacggcctggggaggtggccccctctctgtgctgccccacgttggactctaaca

SEQ ID NO: 30920 - DNA, 120 bp, Homo sapiens
gcccgcatgtcacataccaaaagctcccacatgtagtaagccactccttgactgtctaatcctgttaggaaaaatgaagtctactttaggaggtgagagaaggacaggaaaaaaaaacaa

SEQ ID NO: 30921 - DNA, 120 bp, Homo sapiens
tgccgcccacgtcctctctgtctctgcagctgtgtgcctccatggcagtgaccagcaaaagcgcaagggtgccgcagccacggcgaaaagaaagtccaagggtggaggggtgaacgtgga

SEQ ID NO: 30922 - DNA, 120 bp, Homo sapiens
ggacgtctgtgcacctggccccctgaagacccacgtgcgtctgggggcacattgcgggggaaggaacgtgatcttcacacagaaagggacagttttaaccgttttctgttttcatgttct

SEQ ID NO: 30923 - DNA, 120 bp, Homo sapiens
ggccggaaattgccggtaggctgccgtggcctgaccctactacgtgcacaactccgcaggcattaggggaggggtcatctgctctaattaggtaacaggggcaagtgggattaaagtttt

SEQ ID NO: 30924 - DNA, 120 bp, Homo sapiens
ttccggaaccaggtgggttttcagcgtctagccatgggtgatccagagcgactatctcttcctccctgaaaaggaagagagaggagttaggacgagagtgccgcagggtcctcccacacc

SEQ ID NO: 30925 - DNA, 120 bp, Homo sapiens
tcccgggtggatgctgagccattgggtgtctctctcatctgctaatagaaatggcaccccggagagctggtcttttcattccatttctcccgacctccctcagcaaatgctaattgaatt

SEQ ID NO: 30926 - DNA, 120 bp, Homo sapiens
aatcggattcccaggccccagggagtggtgcctggcataaccactgctctgcaaaacaacgctgcacttctgtgggtgaaagtgcagccgctccattgctttgctttgaatgagcacttt

SEQ ID NO: 30927 - DNA, 120 bp, Homo sapiens
tctcgtcagctagaggtgccagggcagccgaggggaactgccagcgacaacaggagcaacttctttttcggcgggaccctagcacaccccttgctacacgcgccagcaaagagcaaagcc

SEQ ID NO: 30928 - DNA, 120 bp, Homo sapiens
ccacgtgtccatccctggggacgtccctcctatgtgccatctcatctgccacaccagacaaatcaaatgcacagagagctttgtctgcaaactttgacttgaaggggtcttaaaaccatg

SEQ ID NO: 30929 - DNA, 120 bp, Homo sapiens
aaacgtttgcttggtaaataaaaataacttgctgaaaagtttttaaaatcacgggaggaagaccacgggtggccatttatttgtaaaagaaattcctttttccattaggctgtttgattg

SEQ ID NO: 30930 - DNA, 120 bp, Homo sapiens
ctgcgatgatacccatcaccagcaggcggagctcctgcgcacagcacccaggctgctgcccgccgcctgtttctctccagaaatcaggaagagggttgttgttgttttttttgtttttgt

SEQ ID NO: 30931 - DNA, 120 bp, Homo sapiens
gggcgttctgaaactgggaagcagtaacagatgagttgccgcccgatgcatctgaagatcagcggctgcagggccaaggcatttcttggcagcatcatttccactcggattttattaaag

SEQ ID NO: 30932 - DNA, 120 bp, Homo sapiens
atacgttgatggagtcactccctctcagaagaaatgtttacaattaatttgaaaaaagattaatattcacgggtgcctggagttggtaaaaaaagagttcaagctcttagttctttgtct

SEQ ID NO: 30933 - DNA, 120 bp, Homo sapiens
caacgatcataaggtcaatacgtgaagacctagtgagtttatggttctgagcctgtccgggtccctgcccacccggtccccactcacctggtccccgcccaccgggtccccgcccacccg

SEQ ID NO: 30934 - DNA, 120 bp, Homo sapiens
ccccgctcactgtcccggaccctgaagctcatctcagcctccaggtgggaccatgcagggctggggcttgggggttcctcgcctgccatcccaggctggggtgtgcccgcgtttctcttc

SEQ ID NO: 30935 - DNA, 120 bp, Homo sapiens
acacgggtgtagatacacctacccagaagatcggcccagcgtagcctgacagtctccagccactccgcagcagtccacggcagctaatgagcctgccagggtacccacgctgcagtttta

SEQ ID NO: 30936 - DNA, 120 bp, Homo sapiens
gggcgaggtattggaggtctctactcctatttcacatggaatccttttggagacacaaggagaagtgtgcattcctagaacttggatgacttacttaagaaaatgcccgtaagaggccag

SEQ ID NO: 30937 - DNA, 120 bp, Homo sapiens
ccacgtgttggaacatcttctaactatcattagagatgatctgcctcctttcagatcacacatattaacacagtacattttgtttccccatttgtattgattatgtgccagttttgggga

SEQ ID NO: 30938 - DNA, 120 bp, Homo sapiens
tgccgcctggagacctctggcctctcgtaaacctggaatggtgcgttctcatggaggcaaccacggcagggtcccatgcacctggctctctccacctgggcctcccattagggcctttgc

SEQ ID NO: 30939 - DNA, 120 bp, Homo sapiens
actcggctgtggagccttagcaagcacctgttcttccctttgtcgtgtggtccatgatgtcattgcagaatgacacgttagaaaaatgtctctttgttaatgtatctcaatatgcccaga

SEQ ID NO: 30940 - DNA, 120 bp, Homo sapiens
aggcgtcttggttttaaaacacgaggtgtgatcgtaaaccaaaaatatcattcagcactgctcccacgtcaccactcattttacagatttgaatattgagatgcacagaggttcagggag

SEQ ID NO: 30941 - DNA, 120 bp, Homo sapiens
gctcgcagaggctgctagctgtctagggcttgaactttagactgcatgccaagcgagactcttgtggagtgaacgtaggatgagaggctcacgttacccacctgaaagtcagcggcctat

SEQ ID NO: 30942 - DNA, 120 bp, Homo sapiens
gaacggatttttaaattgtattttattacaagaatttgtagacttaccttgtagtaagttatgaagctattggctagaactaacagtgtgctcacagacgagaaaaataaactagtatct

SEQ ID NO: 30943 - DNA, 120 bp, Homo sapiens
agacgcatttctatgtaattaaaacaaagggcccatcagttcctcctttcagtggagagtgatgcctcaggactgacagatggcatcgtctggactgtcctattttgtctatgtgactga

SEQ ID NO: 30944 - DNA, 120 bp, Homo sapiens
acacgattgcctaaggaaattttgggatctatcacattaaaatacaagcaactggaaaggagagtccccagaggctcaggcaatggttaggaggctgggaatcaggcaatggttaggagg

SEQ ID NO: 30945 - DNA, 120 bp, Homo sapiens
atccgaggcagaaagtactggaaggagacccaagagcccatggtactattcacgtagggactctgtgtggaaagagctctgaacagggcagccacttctgagggctgacgaggcctccac

SEQ ID NO: 30946 - DNA, 120 bp, Homo sapiens
ggacgggaagggacaggaagggacgggaagctttggttacttttgtcttaaatgcacaatggcagaattcattggagcaggacggccctgtggtaccggtacatggaacaattttctctg

SEQ ID NO: 30947 - DNA, 120 bp, Homo sapiens
agacggtatcttcaaggtgactgaggctaccggggccactgtgtgatctagattcctgtaactgaccctgtttcagaccttctcttatggggaccagttgtcactgcaaaataagagtct

SEQ ID NO: 30948 - DNA, 120 bp, Homo sapiens
cttcgggggcaacctggtatctgtggaagagggaattctgaagtcacaaaaccattctttatggtcaagaaactctaaagccatacagacactgttttagagaaataaagaaaagttatc

SEQ ID NO: 30949 - DNA, 120 bp, Homo sapiens
agacgttttggagttgttacaattggctttttacctaaagcagtttggcagatgccagacagacccccgaggctgtgagcatgcccgccctgctgcccaccctctcacaccccgtgtggg

SEQ ID NO: 30950 - DNA, 120 bp, Homo sapiens
aagcgcagatttcaggaacacgtgaagaaagctaagaaaaaggaggcagggagtattccatttgtttagacctgaagccggtcaggttctcatttttgtggatgttttgacgcaagtaat

SEQ ID NO: 30951 - DNA, 120 bp, Homo sapiens
agacgaacatcttgttgcattttacatgctaagctgcagaagaaacaatgcaccagggcctatttgcagaccatcagcctcttggcacgaggagggcattgcccgtgcagctctgctggc

SEQ ID NO: 30952 - DNA, 120 bp, Homo sapiens
gtccgtgcctctccatttggccaccttggacaggctgtacactggctgcagagtgggccgcaggtgacctctctcatggatggggagaggcttgcaggctgtgcccagtgggagccaggg

SEQ ID NO: 30953 - DNA, 120 bp, Homo sapiens
tgtcgagcactcagctccagctcctgtccagcagatagatagtctgctccctgcctgtgaagagtcggacagaaactttgagcgatggcaacgacaacaagtgtgttttctgggggtgga

SEQ ID NO: 30954 - DNA, 120 bp, Homo sapiens
aaccgagctttaagctgtggccccttgtcccactggagaaggcgccgggggcacgcagggcctccactctcctggcccctctcaaggaggccgagccctgcagagaccatggaatttgga

SEQ ID NO: 30955 - DNA, 120 bp, Homo sapiens
ggacgctccttgtttgtggaatacttgtgtcacggcgcgctgtgcttggggtcaccagggagggcaaaggaaacaaaaagggccatggtgtggcctgtggatttgcgatggcagaaattc

SEQ ID NO: 30956 - DNA, 120 bp, Homo sapiens
tcccgcagagatttcttgaaaactttcccacaaacgaggctcatcaacccacccatctcacaccaatgcctcctttgtgtgcccagaacatatagtttttatttgctccacatagctcac

SEQ ID NO: 30957 - DNA, 120 bp, Homo sapiens
ccacggcagggaagaggccacaggagaggcagccgtgtgctaggggagcctcaggagggtggggacggggtcggcgaggcgcggccatgcgctggccagtcacccctgtgaggctgcaca

SEQ ID NO: 30958 - DNA, 120 bp, Homo sapiens
cagcgcggtgacagtccacatgcccagcttccctaacacggttggcgtagagataagagattcttaaagagcccaatattcatgtagattcggttaggttgtgcagcctttggtgaattt

SEQ ID NO: 30959 - DNA, 120 bp, Homo sapiens
ggccgctgactccttaatgctaggcctggagaccgggagtgcagactccagttgagcctgacccagagacccagagtacagaccccagttgagcctgccctgacttttgacctacaaaac

SEQ ID NO: 30960 - DNA, 120 bp, Homo sapiens
acacggcaatagaaaaacagatgcctgcctcccacagtggagcctcccgctgcctctgggagccagggctgcaggtacacaggtggacagaacagtccctgccctcattttgcttgtgga

SEQ ID NO: 30961 - DNA, 120 bp, Homo sapiens
agacggaaattaataaaatccagtggtgcgttttatgccctccctgatcgctccttcggagattctcttgctttgcgaccattggctcacccacctggtgcagcccctgcctctccttgg

SEQ ID NO: 30962 - DNA, 120 bp, Homo sapiens
cttcggtgggcgacgtcctctttgtaccatttgctccagggcccccgtgcaccattatctcagccctctttattagcttttctccaactgtgtttcctgaagcccgggtgtgctgcatga

SEQ ID NO: 30963 - DNA, 120 bp, Homo sapiens
ctccgtggctaaactgctaggaaagcacttctgtatttcaagactcctcaggggcttcaatgtgcggagccggaggatgcagcatgccccaagtttaccttccatggaagcacagctccc

SEQ ID NO: 30964 - DNA, 120 bp, Homo sapiens
ccccgggcacccagcagccctctgagaacaggctccggggcacaggctgtgtgatgctgctgaaactttgcccaggtttcctctgcttctccaggtggctgcttcttacgcattccgtac

SEQ ID NO: 30965 - DNA, 120 bp, Homo sapiens
tcccgggacgtacacactgcattctaagtgtctctttgcccacatatcaccactgtacgccctttggaatagtttttctctatgattggaatgttgtgtgcccagtagatgtccactaaa

SEQ ID NO: 30966 - DNA, 120 bp, Homo sapiens
atgcgaaccatctgtccacgtctccattaggaatcagcctttggctgaggaaggccagtgctctccctgtgctaggatgagaaacgtgcatcactcatgcagagctgtctgtgaactgtc

SEQ ID NO: 30967 - DNA, 120 bp, Homo sapiens
agacgacgctaatgcaatgccgtgacaccacacgtcacgctgcaggtgaagggggggggaccatgaggctgacttattttcatacaaattaaatacactgctggagctaagtctataatc

SEQ ID NO: 30968 - DNA, 120 bp, Homo sapiens
acacgttgccaggaaagactctcctgcaaacattactgcttaagaattctttcaaactcaagggactttaaagcttttttgggtaagaaaacactccttaaaatcattctgctgactgag

SEQ ID NO: 30969 - DNA, 120 bp, Homo sapiens
aggcgtttttctcatagagtaaatagaaccgtcagttcttgggtcaaattggaggaaaagtgaaaggaagagaagatgtgactcatgtcatggtcacattttggagacagagctgagcaa

SEQ ID NO: 30970 - DNA, 120 bp, Homo sapiens
aagcggccagactttatcctccagtgaggtcgggagtatgtccaggtttggggacagagactggccagagccacagagaggtggctggaggggctgtttttagggcattctcagcattgc

SEQ ID NO: 30971 - DNA, 120 bp, Homo sapiens
ttccggagggctgtccagggaaggtggcagaaatgaatccagagtggagagttccaacttccaagctgaccagttttgtgactgagcaggtaattaaaacttagtatttaccagccttcg

SEQ ID NO: 30972 - DNA, 120 bp, Homo sapiens
aagcgtgctcagcctctctgatgaagctgctctgtgcagccgaggcgcctggagtacatcgctgctgggtgacagcaggacggtaccaagtgctggtgacagagacgtggccacatgcag

SEQ ID NO: 30973 - DNA, 120 bp, Homo sapiens
aggcgacgggcctccgaacaggcctcccgaggtctgcagcgtgttcaccaattatacagaaataatcattttgaaataaatcacactgctgcctttgcaggttatttccatgcaaatgca

SEQ ID NO: 30974 - DNA, 120 bp, Homo sapiens
agtcgcagtagggaatgataaggcaatcgatattaaaaatccaaccaagacagcaaatcagatgctcaaaagggttcctgtcaataatgacttcagtcagttccagggcccaagatttaa

SEQ ID NO: 30975 - DNA, 120 bp, Homo sapiens
cagcgactactaagatagaagacttctcaatgaatctgcaaagggatcaatacactgaaagacgaatcacatccacatgcgagccgcatagaaattaagaatttgtgccagaaaccttag

SEQ ID NO: 30976 - DNA, 120 bp, Homo sapiens
gcacgctggcagtagaaaggcaaaccctttgtttgacatcatatttggtgtttctttgctatcatgccgtaactgggtcctgggaatgacaggagcccaagcttgcagacctgtgactat

SEQ ID NO: 30977 - DNA, 120 bp, Homo sapiens
tatcgtggcatctgaaaatgtaaataagtgatgtaccctgtggggtagctctgctgcaggcaccccggggacctgctggtgaccctgcccttctcctgctgcgatcatcccaggccagcg

SEQ ID NO: 30978 - DNA, 120 bp, Homo sapiens
cagcgtggacgtctctctgcaaacgcccaaatgcagtgtatgaaatgtcatccctagaaatggcttcatttgggataaagctttgaacttgcgtgcgtgccccgcaccccgtggcggact

SEQ ID NO: 30979 - DNA, 120 bp, Homo sapiens
ttgcggcgtggtgagtaaaactttcccaggggagccggagttgagtgagaaagggatgcaggacacgcaggagctgacacatctctatggatttaagtcgctgtttccacaaatgctact

SEQ ID NO: 30980 - DNA, 120 bp, Homo sapiens
acacgtgtagggcaggactgtcacgcgtccactctgctcagctttccaggccggatctggtcccagccattctacctgacccagactccccgcacccctgccattcccccagctgccgtc

SEQ ID NO: 30981 - DNA, 120 bp, Homo sapiens
ctgcgtttttgatcctgaggctctctgcctctctgcctcctccctggaggccgtgcaaatcctgttctccttccagcggtgagttcctcctgctgaccacctcccccgatgccctccacg

SEQ ID NO: 30982 - DNA, 120 bp, Homo sapiens
ggtcgaatgcactccctggtgacttacacatctcacaagtgccctccatcacctgcttgtgaactcctgaccacagcagcctactccatgtccccctgtggatgctgcaatgcccagcac

SEQ ID NO: 30983 - DNA, 120 bp, Homo sapiens
agacggggtccaaacccctcttcaactgtcctccaagcttcaggtccaccgtgacctcccccaactctgctgcagctgccgtggtgccagccccctgcccctctcctccacctccataga

SEQ ID NO: 30984 - DNA, 120 bp, Homo sapiens
cctcgtccctggaaagccctctccagggccctcggcctcgctgtctcacatcactcgcctccctaccccacctccctcctcgcacctgggacgcaggtgccctccggtcacacccttcca

SEQ ID NO: 30985 - DNA, 120 bp, Homo sapiens
tcccgtgtggtgctgagcccctcacacacacgaggggccccggaatcacctgccacgtgaataaacaaagtcagatctgaaatgcttaaaagcaaattaaacttaactcataaaaggaga

SEQ ID NO: 30986 - DNA, 120 bp, Homo sapiens
taacgggatacacacagatgtactgataagcggatagatacgatcttgatgtatgatgatggaggctggtttctctaagtaatcagcctacatgtctgggtttaatctgcttattctttg

SEQ ID NO: 30987 - DNA, 120 bp, Homo sapiens
acccgttaatgcacaactgggtgttaaaccaactgacctgctgccggcagcacctgccggcatcaggtcagggtctctggagcccggctgccagtaaagacacttgcatgcatctccgaa

SEQ ID NO: 30988 - DNA, 120 bp, Homo sapiens
acccgctgcagcagcacctgcctgcaccaggtcagggcctctggagcctggctgccagcagagacatttgcatgcatctctgaactgacccgctgcagcggcacctgcctgcaccaggtc

SEQ ID NO: 30989 - DNA, 120 bp, Homo sapiens
cgcacccccagttgcattgagagttgatggcagagccaatggtcacacctgcctgtttcccaggtggagtctgtcttctcttgaggctgccgctgaccctcaatggaacacaggcacgca

SEQ ID NO: 30990 - DNA, 120 bp, Homo sapiens
agccgctcagaactcctcctgggcctttctcagagcctgggacctggaactttgtgctatgaaatgcctatcaaagtcctggctctgggaagggaccccaagttcttgtaattctgtctg

SEQ ID NO: 30991 - DNA, 120 bp, Homo sapiens
atgcggaagattcatgttgcaccactggcccttactgaattctattacaataaataactatacaaaactaatctccacatgtgctataaaaataccttgaggtcgttgactaccatgtga

SEQ ID NO: 30992 - DNA, 120 bp, Homo sapiens
actcggagtcatggtccaccacaggctgctgtattcaacacatgtaagagttgattttgagaatttttcaatcccttaaaaaatgctgcatttcccttaaaaaatgctgcattaggagat

SEQ ID NO: 30993 - DNA, 120 bp, Homo sapiens
tggcgactgtccaattaaactcggtgagccaagccctgtccatcacactggagagtgtcaatggcgtaggaagtgcaccgtgtttattttttctgagatttcccagaagaaaaattacag

SEQ ID NO: 30994 - DNA, 120 bp, Homo sapiens
actcgactgaccttatttaaaaaacaaaacaaacaaaaaagcccagctgaagcttcctatgacgtcacaggcgacacagtcatatgtggcacctacatgccagctgcttggcctttgaag

SEQ ID NO: 30995 - DNA, 120 bp, Homo sapiens
tgccggcgtacacacccctccgcctcccctcccctcctgcctcataattcttatctcatttctatgcacaaatctgaatatggcctggtgtttctcacagcaccacacatattttgagcc

SEQ ID NO: 30996 - DNA, 120 bp, Homo sapiens
tgccgtagacagatctaattcacccagatatttgcagaaaatagtttgggggcatcaggatctgcaacacatgtacgtcgtatcaaaatcattattcgcatgacagccaagacctcgggc

SEQ ID NO: 30997 - DNA, 120 bp, Homo sapiens
catcgtgaagagcattcaataagtggaaactgctctttgcagaagcacacaaaactattgaaaatgcagatcagtagcatcttagcttcacactgttatcagaataagcccttatttttt

SEQ ID NO: 30998 - DNA, 120 bp, Homo sapiens
tgccgcccgcagcgcagttactcaaagtgagatcttaagcgagtcaagctccctccacctcagtatccccaggaggacagtggtccccatcttgcggcatcattatgaggactgcaaatg

SEQ ID NO: 30999 - DNA, 120 bp, Homo sapiens
atgcggacggtaaggcttgagggcagcccggaggctgtcccagccacactgggctcctcacctggggccctgctggcatctggggtggatgattgtttgttgtgaggcagaggctgccct

SEQ ID NO: 31000 - DNA, 120 bp, Homo sapiens
ctgcgtggcggggtgtttggcctccacccactagatgctggtagcataccctgcgttgacaaccagaccgtctgcaggcattggcagatgtcccgtaggggcaaatcacacctcattaac

SEQ ID NO: 31001 - DNA, 120 bp, Homo sapiens
taacggcccttggtctagacacaggagtactagagaggaagtgaaagctgccaatccatttcctagtatacttggtggcatcacagttttcataaacacactttttatattttatttatt

SEQ ID NO: 31002 - DNA, 120 bp, Homo sapiens
gggcggcagctcttagagatgacacggaagcatgaacaatggaagaaaccacagatcagtgagactattaacatggagaacctttgacactgtcgagaaagggacagacaacccggagaa

SEQ ID NO: 31003 - DNA, 120 bp, Homo sapiens
tgacgaccagggaaagcccagtgtctagcttttctcagcccacccacagctgaaaagcaggtttccagacttattgcttgttaggttttggaatgttttggagctcaccacttgatttca

SEQ ID NO: 31004 - DNA, 120 bp, Homo sapiens
gaacggaagaattgagccacacccattccaagcaaattgctccttccagccttcctgcggaacctgccctggccttggggctcttcagctgagggccactggaaccatcagcccagacca

SEQ ID NO: 31005 - DNA, 120 bp, Homo sapiens
ccacgctgcaggtgaccagagtctttaaggacaatgacaacatgttttccatgatggatgtattcttttgcaaaaaggtgtgagtacccattctcctgtagaacccaggaacagctttcc

SEQ ID NO: 31006 - DNA, 120 bp, Homo sapiens
acacggggagagaggactctccaaaatagtagatacacccgaacacaatgcaaattgtgttcctcaaaagtctctctttagaaaagagaattgcctgacagctgagcttttccatctccc

SEQ ID NO: 31007 - DNA, 120 bp, Homo sapiens
taccggggtccctttttggtggctcaggaagactggctgaggacacttttctgcaggcgggcacccccatcaccccacagccactggaaggattgctgagaagagaagcaaacgcctaca

SEQ ID NO: 31008 - DNA, 120 bp, Homo sapiens
agtcgccactcccggagtccacctccctcacgtgtgtgggagacgactagcagccgaccacagactggaaaccccacccaccttcagggtgtgtgatgaaactggggcccacgataagac

SEQ ID NO: 31009 - DNA, 120 bp, Homo sapiens
ttccggtgaggggctcgtgcagggagatttaaaacacgtgtacttcaagcaacttaggtcaaagtgcccacagatgaggctctgcgaaatcaaagacgcggttctagtgatgatataaac

SEQ ID NO: 31010 - DNA, 120 bp, Homo sapiens
aaacgcaaggctacctttgcggatgatttcggtgtccagtgtgattctaccttcccaatttatttaaattggacaaccaaaaaaaccttgaaggggcattcttctcattgggaaatgagg

SEQ ID NO: 31011 - DNA, 120 bp, Homo sapiens
tcccgtgtcaccagatgccccaaaagacgggccgcaacaccagcagtcccctgaactgctgagaaacctccctttctccagcctcctgcctccccctcatctctgcctctgggtcctttg

SEQ ID NO: 31012 - DNA, 120 bp, Homo sapiens
aatcgctagaataactcttctggccaccacgcctcccaccccccaccccgtgctggcctcctttcttggggctcagtagctgctgtggtcgctgcctgcacctccttccccagctgcacc

SEQ ID NO: 31013 - DNA, 120 bp, Homo sapiens
ccccggaagtgggggttggacgcggggcagctggggccgcactggcctgggtgcctgtctcaggtgagttcggaggggatgggagaggaaaggagcaaagtctccctcggggccagtggg

SEQ ID NO: 31014 - DNA, 120 bp, Homo sapiens
gagcgggcagccacactttacctccagagtttctgagccaggtcgcctgcagagtgacaggaagtggggccctggtttgctggcctctgtctgaatcatgctagactgctcttagaggcc

SEQ ID NO: 31015 - DNA, 120 bp, Homo sapiens
tcccggctcctgcccgtttctgcacgcttctctttttagatcaatttctttatccttcctttctgcacttatattacttgaacaaatgacaacgaagaggagggagactgtctctcctgc

SEQ ID NO: 31016 - DNA, 120 bp, Homo sapiens
tagcgccctccaggttcacaaaccccgggggacagtgtcaggccaccccacaggagagacccaccccctgctgcctgtgcctggttcttcctcccacagttaagaccccaaaaccaccct

SEQ ID NO: 31017 - DNA, 120 bp, Homo sapiens
ttgcgaacgtgtgctacactcctgacatatgcctagcactgggccttgggggcccaggagctggtcacagagatatttgggccagtggtcgtgttaaggccagttgcaagggctggcaac

SEQ ID NO: 31018 - DNA, 120 bp, Homo sapiens
gcccggaagtcaggaagaccctgagggtgtctttcgaggtgtcctgggggaaatgccaggtggagaggggcagaaggggcattgaaggtgtgccaggtggaagcaccagccagcaaagtc

SEQ ID NO: 31019 - DNA, 120 bp, Homo sapiens
gaacgtccgagaacatcagagaccgaacagcagcttggagacatcagctggggccaggccgttttggagcgggctcctgccaaggagcttcagggctgcccttgaggaaggagaggtttg

SEQ ID NO: 31020 - DNA, 120 bp, Homo sapiens
ggacgtgggccggtgagcatgtggatggctctggggagagcagagaagtggggcgggggagattccagcagagaaagcactagggaaacccatagtcattagtgagacccaggggcgctt

SEQ ID NO: 31021 - DNA, 120 bp, Homo sapiens
agccgtgaagtcctcacggtgagcggccttcagaggagctcacggattctccatgctgcacagggtagtgaccccctgagggtatcagcgacactgtgagctcctcaaggacaggcatgg

SEQ ID NO: 31022 - DNA, 120 bp, Homo sapiens
caccgcttagctacttcaagcactcagaagagtgcctggcacacaggaggccctggataaatatttgctggatttgttgcaagaaagggctagagtctggcgtgggcagcaggcattctg

SEQ ID NO: 31023 - DNA, 120 bp, Homo sapiens
tatcgtaagcatcctcccaagtcaacgaatgggtatcgatgtccttgataaaagtaaccatattctctttttggactggctggttggtttccattcattttgctgtggagcccacttcta

SEQ ID NO: 31024 - DNA, 120 bp, Homo sapiens
gaacgtatgctagacggcgctggtttgcagagccacacctggaaaaccagacagaaaacagacctctgtgtgcagccccagtctccactgtcccctgggagaaagagttctcagaacagg

SEQ ID NO: 31025 - DNA, 120 bp, Homo sapiens
tgtcgtgtatgctattacgtggataaaccctagcgtctgtcttcctctgctatggacagtcagggtttttccacttttgaatgctaaagagtctgctgcagtgaacactgtagcttctgt

SEQ ID NO: 31026 - DNA, 120 bp, Homo sapiens
ctacgagtctctttccatccttgcattatcccacatggatttcatttctgctcacttaaaataatcattttctttttggctttttctttggccctgattttgtgtgtgtgtaaaagtatg

SEQ ID NO: 31027 - DNA, 120 bp, Homo sapiens
aaacgtgacggcgaatctggatgagaactaattagtgcaactcagcattgcagtggaggtcagtcacagcattaggaaagaggcaggaattccaagctctgattttgctgctatgtaact

SEQ ID NO: 31028 - DNA, 120 bp, Homo sapiens
agtcggttaatttccttgtgtgtgtgcatcaagttcccatcgtttaaacgacaggcttgaacttgattttctatctgcagggtctctttcggctctggattcttaggaatttacgatcct

SEQ ID NO: 31029 - DNA, 120 bp, Homo sapiens
aggcggtgtttaggcgcaggccactgcgatcaccactttcttattctgttgtgtaattatggtttcctgagaaaagcgcttcctcctttcaggcagtcccctttaacatgcaaatttcga

SEQ ID NO: 31030 - DNA, 120 bp, Homo sapiens
tgccgggaatcaaatgaaatcattctgggtgtggccagagtgtgcagatgtcccaggcccccgagggatgcatgagttcatcgggagtcaaagcaaagcctgcgctggacggagttaagc

SEQ ID NO: 31031 - DNA, 120 bp, Homo sapiens
cagcggggagactttattcttgaaggcgattgcagtaggcgagagaggcagaggctgtctgagctcagttctgtggaccgagggtgagagggtggagtttgtaagagctggggtctgggt

SEQ ID NO: 31032 - DNA, 120 bp, Homo sapiens
gagcgaactttctcctgcattcatcacaggagggatggagggaatcgcatggcttgaagagaaatgagacttggagagaagtgcgccttgaggttagggtctgcctcccaccttcctccc

SEQ ID NO: 31033 - DNA, 120 bp, Homo sapiens
gaccggacgtggccactgtcttcctccgtgattatgtttcaaaggaatgaccggcctccagatcactgagaaagacactccctgggccttacaactggcaagatatgtcacaaaaggctt

SEQ ID NO: 31034 - DNA, 120 bp, Homo sapiens
taacgcaaatgctccaagaaaaggcaggtggaggtgagagtcaggaagaagcttggctgaagtttagtcaaggttaggggcagggtggggcgtctctgtcacaggattgagaaccgagtg

SEQ ID NO: 31035 - DNA, 120 bp, Homo sapiens
tagcgggcatctgggaggagaccaccaggttctaagctacagggcagccttgggtagtaggatccagagcttggaggggggcgcgtgtgggggcagcccgggaaggtgcaggtcccaggc

SEQ ID NO: 31036 - DNA, 120 bp, Homo sapiens
ccccgcatggtgcccctgagtggacaggtgttagaggtgctgattgagaggcgctggtgctgtgaggggcttggcggtcgtggctgagtcagtgatgtggacgtcacttccagacctttg

SEQ ID NO: 31037 - DNA, 120 bp, Homo sapiens
ggacggggagtgcagctttgaaaatcaactcccattcccatcactggcaccaggcactagatgagatgccaggtggtgtgtttgtagaaggttggcaaagcatgtttcgtatttatctgc

SEQ ID NO: 31038 - DNA, 120 bp, Homo sapiens
agccgtagttccagaatccgtctgttgctgaccttgtttttaattgctgttttatgtgtctccttaaaggctgtgtttacccttctcatttactgatttataccagcaccacctgccccc

SEQ ID NO: 31039 - DNA, 120 bp, Homo sapiens
ccccgactcccccaatcccaccatcgcccagaaggtgataaataagtgctgattgaatggctgtatttgaacctgctggtgacagggttggtagatgtttcctgcccataagatattaat

SEQ ID NO: 31040 - DNA, 120 bp, Homo sapiens
cagcgctaggaatcctttcctttgtgtcgggggctgtacttacacctcatttcgtgctcctggaaggagacagcactgcctccatttggggtggtcacagacagctgggccctggaggtc

SEQ ID NO: 31041 - DNA, 120 bp, Homo sapiens
ctgcgctgccaaagcgggtggttttcttgtcacagcattggaggagagaagagacgtgagtaggattctgagcgctctgcacacaccgagtactttacgtgctgtctgtttgtcagaatg

SEQ ID NO: 31042 - DNA, 120 bp, Homo sapiens
tcccgagagtgagttttctgctaccaactttatagatgaggactcggaggctgagagaggctgggcaccgggcccatgtcccgcactagtggcaggggagctgggatttgcagccagggg

SEQ ID NO: 31043 - DNA, 120 bp, Homo sapiens
aggcggtgggaaggccgttgtgggggtggttgactgtcatcctgctgcccttgggaacatgaatgttgagaagctgctaactgtgctccagccgtgcgtgaggagagaggctgctggctg

SEQ ID NO: 31044 - DNA, 120 bp, Homo sapiens
tcacggcccagggggttttgccaaggcctggggtttggcctcacgctgcagggggagcccggtttcagcgagagccaagcccctctcaagggttctgcagtggaggagccgtaccgatga

SEQ ID NO: 31045 - DNA, 120 bp, Homo sapiens
gagcgtttctcatcatcctggcttctgccaccatctaatctaagcaccatggtttcccgcctggatgacagccctcccgggccttctgcctcactgcccctgccttgaaaggaaatgaga

SEQ ID NO: 31046 - DNA, 120 bp, Homo sapiens
tcacgtgagctcacacagtggtgggacgcatattctctggggtctacagcaccttaacccactgggaacaattgtcttcacattgccaatctgaccgtgagctctcggagggccgcgctg

SEQ ID NO: 31047 - DNA, 120 bp, Homo sapiens
tctcggatgtctgtagcccacactttgagaactgatggattagggtaacaaagaaggaggcaaagaaatgattctgggtgtgtttgggagcccataggacttgctgatgaacgtgaacgt

SEQ ID NO: 31048 - DNA, 120 bp, Homo sapiens
ttccgggtctgtacatcttcagagtagaaacctctgagatgtgagctttcagtagagccctccagacgccaagtgcgtggatgctaacttcaaactctctgtgaagaaaccctttggtaa

SEQ ID NO: 31049 - DNA, 120 bp, Homo sapiens
cctcgtctctgggcaacacactggattcttgcaccaccaccacctgttctcataatagccgattgctataaaaccgtgacagctgcgtaggcccggggccctttcacggtgctgtagccg

SEQ ID NO: 31050 - DNA, 120 bp, Homo sapiens
tcccggccttggctcagcattacagaggagggccctgtcaaatgaaactcaaactgtgcaaaagtcatccacagagggctacgtgtggaggccaatgaaccacctgggaagtttttccag

SEQ ID NO: 31051 - DNA, 120 bp, Homo sapiens
ggacgttggtagcttggcccagggtaggccacagtgaaatctggtccatgagggacctagagacattgaaattaccccaaggtgagttgctaagattgtaaatccaagctaaatgcactt

SEQ ID NO: 31052 - DNA, 120 bp, Homo sapiens
ctacgaatgacttggacagtccttaaagtgactcctacaggatgcggcagtaaaatctcataaactgtgttttacggcctaatttgacctaatgagattctgcaagccgcatgcaattgg

SEQ ID NO: 31053 - DNA, 120 bp, Homo sapiens
gttcgtaggtataaatcagggcatctcagcagcaacactgttggtattttggctcgatcgttccttgctgggcagcttgatcgtcctcgtgtctgtgcactgtgggatgctgggaggcat

SEQ ID NO: 31054 - DNA, 120 bp, Homo sapiens
aaccgttggaacagaaaaaaatcagcaactcttcccaattaggcatgtcttaagatcctgaaacatggcaaatggcatctctgtactgtgaacctgtcctatctgttaccccattgctgg

SEQ ID NO: 31055 - DNA, 120 bp, Homo sapiens
ggccgctcttgctaaatcttttctgtgcatataattcccatgtttgggcgagtgggagggggttagtcacctgagcatgttgggagtggatgaggacctgccccaactctactgcctacc

SEQ ID NO: 31056 - DNA, 120 bp, Homo sapiens
tcccgggccctttacgtctgccctttctctatcatctaagtaatttaccatttttgcacccatttttttgtcttcatattttgtgatttgtaagaacagatgtctcctagctttgtgaaa

SEQ ID NO: 31057 - DNA, 120 bp, Homo sapiens
gaacgactgaaagttgaaaggggttcagttaactccaagtccacgcattcagcagattatgtcccacgagaaacacaccagagagatgccgaccaaagacagcccttgcttctgcagtca

SEQ ID NO: 31058 - DNA, 120 bp, Homo sapiens
tctcgtttcatactttccctcccccatattatattatagtttacaatattatgttatagtttataatatgactatcatctttaatactttctttacatacattgagaacatcagacagca

SEQ ID NO: 31059 - DNA, 120 bp, Homo sapiens
ggtcggagagcgtctcagggaagaaaagcaatacggattggcaagatcacctgaggaagtttcaaggcattctctcaggtcggggcaggtaagagcattcttggctttagcaggataccc

SEQ ID NO: 31060 - DNA, 120 bp, Homo sapiens
ctgcgtccgcgcataatggacagtcaccagatggtgaatgctggaaacgcatcggtgtttttgaaagtgaaaacagacaaatcaccgcaaataaaggaatcagtgtcagctctctagctg

SEQ ID NO: 31061 - DNA, 120 bp, Homo sapiens
taacgtgactggccctgctataccgaaacggcttaatttctttctggcaaatccacatttacggcagtaagatactaaacactttctttcactttaaaaatatttcgtttgtcactgctg

SEQ ID NO: 31062 - DNA, 120 bp, Homo sapiens
gagcgcgcccggcttccctcgcccgcctggcccgcggcatccggcagccccgccttcagcccgccgggcaggtccgcactccgcagaggcgagcgcgctccggttccagccgggaggtgg

SEQ ID NO: 31063 - DNA, 120 bp, Homo sapiens
gggcggcgacccatcccgctagaatccgtccagtctctgctcgcgcaccgtgacttctaaggggcgcggatttcagccgagctgttttcgcctctcagttgcagcagagaagcccctggc

SEQ ID NO: 31064 - DNA, 120 bp, Homo sapiens
acccgactctatccaccaccaggaagcctcccaaaagagctctcgccctgtggacgactcggaatccctggaaaagccgggagggagtcggaggcgccagcccactggggaggtggcgct

SEQ ID NO: 31065 - DNA, 120 bp, Homo sapiens
gggcgcgcgggatgcgcggggagccttctctgcaggagccgcacagtgcactgctgcgcgctgggcagtgcggggaagcgccgcgggaaggagcggctccgagcaacaggtgcagcacgc

SEQ ID NO: 31066 - DNA, 120 bp, Homo sapiens
ctccgtgctttgcgccgggacccctggccacccccggcgcctactatcccgccctccctccccgcgcgccccgccgctcgccgggacagccccgcgggccatggagctggcggtcgggaa

SEQ ID NO: 31067 - DNA, 120 bp, Homo sapiens
cagcgagggcaacgcgagctggccggagccccccgccccggagcccgggccgctgttcggcatcggcgtggagaacttcgtcacgctggtggtgttcggcctgatcttcgcgctgggtgt

SEQ ID NO: 31068 - DNA, 120 bp, Homo sapiens
caccgtgctggcgcgcagcaagccgggcaagccgcggagcaccaccaacctgttcatcctcaacctgagcatcgccgacctggcctacctgctcttctgcatccccttccaggccaccgt

SEQ ID NO: 31069 - DNA, 120 bp, Homo sapiens
actcgtaaacagaatgaaattaaccagagaagtataggagtgtgttgcgtttgccaagcatctgcttcccagctagatttccccctaatatacaatgaccaattctgaagcaccttcttt

SEQ ID NO: 31070 - DNA, 120 bp, Homo sapiens
ttccgtcactaaataaagacagcttcccaaggacacactttttctcccagcatcaggttgagggagaaatattgcttatacctttgaagtcaggctgcttgaaactcacattttcagttt

SEQ ID NO: 31071 - DNA, 120 bp, Homo sapiens
tcacgtaaggagacaggctttgggatatttagtagctgaaatgcttgctgtttcacatgcataagcaaccatttcagtgtcctgctgatgaatacagtgatgtggatggaaacgttttct

SEQ ID NO: 31072 - DNA, 120 bp, Homo sapiens
gaccgggtatgtactcagcaacatgggggactgaggccattttctgaatactttaggtaaattacttttgcttttaactaaattgttttattttacacattgggagtaaaaccatttccg

SEQ ID NO: 31073 - DNA, 120 bp, Homo sapiens
tctcgataatatttaccacagataaattcatctttcagcgcagatataacaaatcagagtggggaggagagatgcttaaggaactgcatgagtcatgcaaggctcagaacttcttgtggc

SEQ ID NO: 31074 - DNA, 120 bp, Homo sapiens
actcgaaatcatattgcattcctgcattctcccagatgctttgaggcagtgcagcgatcattctaatatgttaactgagacccaagatctcagcaggagaggacagcttatccaagcatc

SEQ ID NO: 31075 - DNA, 120 bp, Homo sapiens
ggacgaatgtccatttcctgagccatttctcctgggagatgttcagactgactagattggaggtctttcaagtcctctggtttgactgtgagtggaagtcctaccacagtggctctctgg

SEQ ID NO: 31076 - DNA, 120 bp, Homo sapiens
tgtcgcacttgccataaagtagtttttaggactggagactctctggaaaaccgtggcttcttgtgatgtcttctccacagcaacagccctgcctgcactgcattcttctgcttgtcccgt

SEQ ID NO: 31077 - DNA, 120 bp, Homo sapiens
acacgctcccctctcagttgtgggtgctgtattcattactgcactttggtttcctgtgtcttacgtgtttgtggatgggctttaacaaagagccatgtctatgacaaaccaagtgtgttt

SEQ ID NO: 31078 - DNA, 120 bp, Homo sapiens
ttgcgaatcagtttgaatgaactattgcttgggaagctgggcagaagccctcgggttgtgtcacggatgcgggtggagatggtgctgttccgaggcctcagcaccctgatgtgaccctcc

SEQ ID NO: 31079 - DNA, 120 bp, Homo sapiens
ccacggttaggtaccactctcctggggtgaggagcctttgctgcaccagtgattcagaaagccacctcatcccggctgataagcctctgtttgcttaatctggctagaatggttcttact

SEQ ID NO: 31080 - DNA, 120 bp, Homo sapiens
tctcggagaagcccttacccattttgtaaatgaaatttttatttccccaaacatgtctgtttcacagaacctccattgcacgctggaagcaggaatgggctctgaggttaatgtgtaaga

SEQ ID NO: 31081 - DNA, 120 bp, Homo sapiens
ctacggtaaacatttgcctgcaggtcgttttattttttatttttttcacagatctttttatttctattggaagaatgcctatggtagattgccaagtgaacacggtgggtgtctgttgaa

SEQ ID NO: 31082 - DNA, 120 bp, Homo sapiens
ctgcgtattgattttcattttcctaacagccggtgatgaagagccgctttctctgcatgctcatttgctgcctgtgtctcctcgttggtgaaatgtctactgaaatatgtggcctccccc

SEQ ID NO: 31083 - DNA, 120 bp, Homo sapiens
ccacgttcagatgctctcacatcaacactgcaatgtcccctgtgaggaggcctggagccaagctcactccttccgggcttctttgtctgctaatgtggaaatgggcctaatgattcaaga

SEQ ID NO: 31084 - DNA, 120 bp, Homo sapiens
gcacggctgaattttcagaatattattacttttacatgtaagttctgctatggttacagcagaaatttgatgtttcctttctatattttattacttttcacacgtatacgttttttttag

SEQ ID NO: 31085 - DNA, 120 bp, Homo sapiens
acacggcccggaaaagattcctgctctgaagaatgttgctttcccttcagattgctagcaccccaggaaaccacttgtcttgatgtatattcaaaataattgcaaatgtgtaaacccttt

SEQ ID NO: 31086 - DNA, 120 bp, Homo sapiens
ctccgtttttgttttgttttgttttgttttttaaaaaaagaagaagaatgcttgggctgtctgagcaatttaggaagactggtgtagctggaaaagacagtgttacagagaacggcaggc

SEQ ID NO: 31087 - DNA, 120 bp, Homo sapiens
cagcgcattcacttctgctgggggccagaccctcacggctttgaggaaaccatgcccctctgttttatcttcaatgttgccctccctcagatccttttcctattagcatcttgaaactta

SEQ ID NO: 31088 - DNA, 120 bp, Homo sapiens
atccgcatacctctccagggcctgtcctgtttggctcctcccctttgcagcagtccatttcctcactgcttaacaagtttgaatgctgctaattccccactgagcctgagcaagccaaga

SEQ ID NO: 31089 - DNA, 120 bp, Homo sapiens
tcacggatgtggacacaccctaaggtgtctcctggtcatcctacctactaccatctacacctctgtcctactccctgccctggagtgtgagccaggttggtgacttgctacttacaaatc

SEQ ID NO: 31090 - DNA, 120 bp, Homo sapiens
aatcgatgacaacaaaggtgatggtttgcccacatgcttaggttctgtaacctgacaggggtgataggctgtccctcctgtgcgtatatcacattaaataagactctgtgagggcagatg

SEQ ID NO: 31091 - DNA, 120 bp, Homo sapiens
gcacgtggctggtggctgtgagctctggggagtctctagggcccaagggtggcaccctcctaatagcccttggttgtacaaccataaggaaaggtattctgccagcaacctaaatgagct

SEQ ID NO: 31092 - DNA, 120 bp, Homo sapiens
aaacggtggcttagttcagagtactgagttcagagtaatttatttagcagctctacatccttaaattccaggtgcgatttttcatgtgcattccatcattcactcatttgtacattcaca

SEQ ID NO: 31093 - DNA, 120 bp, Homo sapiens
ccacgcttcttttaaagtgtgatttaactaagacctgcataaggaagataagaatttctggtgatgaataccagctgtagagtattccgcacatgaagatgggacagttccatgtcatca

SEQ ID NO: 31094 - DNA, 120 bp, Homo sapiens
caccggccttcaatcactgcagtgagagatatgtaagtcaaggaggagctatgcaaaatactgagtttgtgtaacgcaaagttatgaattttagaaacctgcatccttcaatttatccta

SEQ ID NO: 31095 - DNA, 120 bp, Homo sapiens
aaacgttgccaatgactatgagcctgagtcattcattctaataagtgttcttgatagaaaacgcagccaagtaggcagcaattttagagaattttcaatctctaaattttgaattgtgaa

SEQ ID NO: 31096 - DNA, 120 bp, Homo sapiens
gggcgatgctcctctccaaaggttctgagaaagaatccactcaggatgctggcagaattcagttccacgcggttgtagaactgaagcccttgttttgttgatggctgttgtcttcacaat

SEQ ID NO: 31097 - DNA, 120 bp, Homo sapiens
ctccgtgtggaagacagtttactggacacacaaaaataaatgagacctactcccggaaagttacagtttaatagggagggggcagtgtacaggcaaataaatcatcaagatttcagtaaa

SEQ ID NO: 31098 - DNA, 120 bp, Homo sapiens
tagcgacagatgctgtacaggtggtagcacaagcgtgggagcagagggcagagtgtctgcttaaatccaatggaatatcgggcaaaaagtccaggttcctgctgaggctgaattcaggga

SEQ ID NO: 31099 - DNA, 120 bp, Homo sapiens
gcacgaggcgtttattggcgtgactgtgtccctcgcacatggctgaagaatgaaactcgtgggaaacgggagcaggagatggattgtaagcacgttcctcagaggctcctcgcactctgg

SEQ ID NO: 31100 - DNA, 120 bp, Homo sapiens
atccgttgtgcctgggacctcagctgggaaacttacagtctgggcttgactgcacccaggcgccttgcatgacctgaagagtggttcactcgcactgtggctgctgatggtgcctattcc

SEQ ID NO: 31101 - DNA, 120 bp, Homo sapiens
tggcgaacgttgcacaggcttatgtaatagacatttcaagggtaggattaactttgaaagattaagcacgagttctaaagccaaaggaaagtcccagcccaggcaatcgagcacaatgcg

SEQ ID NO: 31102 - DNA, 120 bp, Homo sapiens
acacgactggggctttgtgtggagaagcacccgcaccctttggtctggttgagctaatcaggtgcggagggtgatatggtttggctctgtgtctgcactcaaatctcatcttgtattata

SEQ ID NO: 31103 - DNA, 120 bp, Homo sapiens
ggacggactaatccagagggggttttgcctgaaaagattttcaaggtaatgaaactgggaacagtcacctgagagagtatgtgtccgcaagaaagatttcaaaggacaagctaagacttc

SEQ ID NO: 31104 - DNA, 120 bp, Homo sapiens
cttcgtgacactttgtgacaattaatccaaggactgtgcatcaacgctgcctactcacattgaagtcgtataccagtggccttctaaatgtccttctgggagctatgtatgggtagaggg

SEQ ID NO: 31105 - DNA, 120 bp, Homo sapiens
caccgaactgtcttttctgaagtctgtgtatctgtatacaacaccattacctcacacaaattttgcacccaaaatatttgcaagcaatttccctctccttgtcatttaaaaacctttctg

SEQ ID NO: 31106 - DNA, 120 bp, Homo sapiens
gaacgaggtatataccggtatttttttcttctttaaaggccacatctgtgctagggatttgacatgcatctttgcattttatccccaaaacaccctataaagtaaatatggttgtcatcc

SEQ ID NO: 31107 - DNA, 120 bp, Homo sapiens
agccggagagttgcctgttttcagctcttagttgctttttgatccatattggatggttactaataaaagatcaccctttatgcaataaatgttaattggacacctattatatgaaatgca

SEQ ID NO: 31108 - DNA, 120 bp, Homo sapiens
acacggccatgtgctcacacatgcacaaacgactacacagtcacacacacaaccctatactcacacaactacacactcacatatgcacagccacaggctcacacatacacacatgactac

SEQ ID NO: 31109 - DNA, 120 bp, Homo sapiens
gaacgtacgactacacagtcacacacataaccctgtactcatgcacacaactacacacacacacacacaaccacatgctcacacatgcacgcataactgcacaatcacacacacaaccat

SEQ ID NO: 31110 - DNA, 120 bp, Homo sapiens
gcacgcataactacacacacaaccatatactcaaactcacaactgcaatcacacactttcctacacggtcacatgctctcacatgcacatatgactgcataattacacacagccatatac

SEQ ID NO: 31111 - DNA, 120 bp, Homo sapiens
ctacgcaattacacaaccgtatactcacacaactacacaatcacaaccatatacttacacacaaccacactgtcacacccactcacacacataagggatttaaacctagactgcattcat

SEQ ID NO: 31112 - DNA, 120 bp, Homo sapiens
tggcgtttctaagcaattgcatcactcctctatatcacatgatttgagttataacacagtcataactaaatcatatattgggaaatctctcatagcttaaaagccaggcagcctgcagtg

SEQ ID NO: 31113 - DNA, 120 bp, Homo sapiens
aagcgactcaatgataaactgaattgcccactgttaaagtaaagagctgaaatttgtcatagcatagatgaatgccaatggtgtgatcataagtttctaaaaatgataagatggtaaatt

SEQ ID NO: 31114 - DNA, 120 bp, Homo sapiens
gttcgtcccaccaactatggttctattcatctcaaaggggttatgtgggttaaaagaggaatcatctgtcccacgagttaccattttgattatgacctcctccgattgttctggaatgat

SEQ ID NO: 31115 - DNA, 120 bp, Homo sapiens
gctcgccatgtctctgtctctaaagaagcattctctacaactcgctgtagccaaaaaacacccacacttcagagggaggttgtgttgtttgttacagttttcctaaccccctccaattaa

SEQ ID NO: 31116 - DNA, 120 bp, Homo sapiens
ccccgcttctcccatcctccccaaggctccctgccctctctgctttctcctcctgccactggctcattgtcaggttagttttttcctgaggaacaacctcccagtctcccactcacagcc

SEQ ID NO: 31117 - DNA, 120 bp, Homo sapiens
caacgcggtgatgacatcatctgccactgtgtgttgtcttctgtctctccagatgacatgagggacctagtctttcttgtatcctggagtctagaatatttcctgacacagtcgattgtc

SEQ ID NO: 31118 - DNA, 120 bp, Homo sapiens
tgtcggtaattattcaatggattaattaattagttctgtaaccttcccattgtctcaatcctccttcaaggtgaagcccttgttctgtgtctctgcatcctccatggcaccagcgcatcc

SEQ ID NO: 31119 - DNA, 120 bp, Homo sapiens
gctcgtgtgtgagttgatggggtgctagcgttgacacagggctctgagggcagtggtgcagcaggactaccaccgccccaatccagaagcccagtgtccaagtctgagttttgcccctta

SEQ ID NO: 31120 - DNA, 120 bp, Homo sapiens
cttcgttcttgaacttcataacaatcaggtgagagagaaagcaacttgttcactctactcaatatacaaatttaaagtgctgttatcagaagtgaaaatacagaagcaaatttaaaaata

SEQ ID NO: 31121 - DNA, 120 bp, Homo sapiens
tcccgctcctgagttctgctgtgcccatgttcccagacctagcggttttgaaatgttgaaataattgttcatgtgttctttcttcatatacagccaaggttgctgaacaactgtttttta

SEQ ID NO: 31122 - DNA, 120 bp, Homo sapiens
atgcggccttctctcttgaatgctgctctatggccaactccaagcttcataataacccaccagtaccccagacccagccgtagcaaacatttcttggtacataagatccagcatttcaat

SEQ ID NO: 31123 - DNA, 120 bp, Homo sapiens
actcggtggccagaccttaaataattctgaaagcaatacctctcagagataaacaggagttgtggttttcaagcgttgtttatttctttagaagatttgcattgaaagcaggatagaaaa

SEQ ID NO: 31124 - DNA, 120 bp, Homo sapiens
acacggagatggtctttgataatctgctgttccttattacatttcaagcttgctgtttaagcgagtgcactccgtcgacataatattgtgccctccgtgacagcctgacttccctccact

SEQ ID NO: 31125 - DNA, 120 bp, Homo sapiens
aaccgagagtcaccagaatatcattctgtaaacaaaaacaaaagcccagcaacaacttctccaccccatcgtaagaagatcaaaaagaaaatgcaaacagcagcttcccaatgcttgtgt

SEQ ID NO: 31126 - DNA, 120 bp, Homo sapiens
gcacggtgggtggaacaaaagcccctttttggcatttgcagcaccagcagctgcaggctgatgcactaggctttccgttaaataggggctggggcataaaaatagacactggcatttatt

SEQ ID NO: 31127 - DNA, 120 bp, Homo sapiens
aatcgctatcaattaaaatccctgcctccttgttgcataaattattcacaatgcagcacacaatagtagggcttttggaaatatttattgtggccaaatgttggaaacagtgaagtgcaa

SEQ ID NO: 31128 - DNA, 120 bp, Homo sapiens
tatcgttaccttattaatagagtttagtggctaagactgggtaactggtttgaagtcattaataaacattatgagataaaataagtagatttctgccatgtgagttgaataggtcgccaa

SEQ ID NO: 31129 - DNA, 120 bp, Homo sapiens
gaacgctgcttctcaccctggctccattactggactcagtgccactgaattatgaattttgtcaccaccagcttcttctaccatgttctccgaagggcagatgacccaaatgaatgcaaa

SEQ ID NO: 31130 - DNA, 120 bp, Homo sapiens
aatcgaattaggtttcctctcagagactttaataccataaatgagaaagagcattcatcacaaataactagggattgtataccaaagtgcttgaagaaaatcaatatactttcagctgct

SEQ ID NO: 31131 - DNA, 120 bp, Homo sapiens
tctcggcctataaatgtaaatgagaacagatataaagctgatatgcactagagaaaggttattgagagagcaacacataacactaagaaatcaattgaataaacttgaaaaatgattcag

SEQ ID NO: 31132 - DNA, 120 bp, Homo sapiens
tcccgtatggttttagagtgtaggatttttaatttagcattgatataatgccaagctatgagaatctgcagatggcggaggctagcaggaaaatcaattcattcttgttctatggtctaa

SEQ ID NO: 31133 - DNA, 120 bp, Homo sapiens
aagcgtagctgtctttgtgttgctgtgtgtcacaggcaattttctaggctttattttcttgatatacaaagttttgctttgtgctttttttttcccactgcaaggcaattgaggtggcat

SEQ ID NO: 31134 - DNA, 120 bp, Homo sapiens
agacgccaagttggaaacatgctcccaaaactttagatggtcagaactctgatatatagaacacaaatatcatcgagcatttgcatcatctgagtgatttgtggcttttatttgcctaat

SEQ ID NO: 31135 - DNA, 120 bp, Homo sapiens
ccccgccttcccaggcaagagaaagtcgcctcttctttgctccgaaggcaccgtggaaaccacaaagggggctgaatccacttctttaatttccagtgaattccacatagtgaaaatgct

SEQ ID NO: 31136 - DNA, 120 bp, Homo sapiens
atacgagtgcaggttttattttcatgacaatatgagcctaaatgctgttactatgtgaggtctattacatccaatgggggctgtaaggctgaagcttcacttgtaacccagagatttttt

SEQ ID NO: 31137 - DNA, 120 bp, Homo sapiens
tatcgaggtaatatatgtaatccacattaatgagaagacagtgaacatttcaaatgcttgttatatatacatatacacaatcatgtgctggaagacaacatttgttcaacggcagactgc

SEQ ID NO: 31138 - DNA, 120 bp, Homo sapiens
acccgactgtgttatattgtctacagtattcactacttgctgtgaaggtgcatgggggcaacgggccacactgcacagcctgggtgtgtagaaggctctcccgtctaggttggtgtgagt

SEQ ID NO: 31139 - DNA, 120 bp, Homo sapiens
atgcggtggaattgcctagggatgcattcgaggaatggatccctgatgtgtgactgtacgtctgcactccagtttacccctctccaccatgaatgtggccatgccaagttcttcagaaga

SEQ ID NO: 31140 - DNA, 120 bp, Homo sapiens
ggtcgtgcgcctctgcgccaagagccgtgaggccatcgactccccggtgtcttttctggccctgcacaaccagatcaggaacatggacaggtgtgtgtcgagtccatccctcccagttgg

SEQ ID NO: 31141 - DNA, 120 bp, Homo sapiens
ctgcgggtgacatgtacagaactcaggcaccctgctgacctgcatgtgcttccagcatgcctgagctgcagaagctgcagcagctgaaagacgagactggggagctgtcgtctgccgacg

SEQ ID NO: 31142 - DNA, 120 bp, Homo sapiens
aagcggtaccgggccttgaagcgcaccgcagagagagagctgctgatggtgagtgcccctcctgcctgcaaaagggcctgtgggctggcggcctgatggtttttgtttgggccaaagcac

SEQ ID NO: 31143 - DNA, 120 bp, Homo sapiens
ctgcgctcagttgtacagtaaattagggacatctcgctgcctggaacacggtcttctagggagtctccactccctgccagcctccactgggatccggcagtggatctagaacactcctgc

SEQ ID NO: 31144 - DNA, 120 bp, Homo sapiens
tgtcgtgaggcgcagagctcttggtgtggagaggttgccttctgtgaaacatgaccgtttaaggatcttaaaagtttgtaatcaccacagcctggaccatgtatcttgtctgggagggac

SEQ ID NO: 31145 - DNA, 120 bp, Homo sapiens
caccgcctggctattttggacaagccaacgggcctgctgcaggtgagcatctgtggctgcggctgggtgtggccctcctgagagctcttgagggtgtgcttgtctgcgaggccctggcct

SEQ ID NO: 31146 - DNA, 120 bp, Homo sapiens
cttcggatcaccctggactgctgtctttcagggcgaggcaccccgaaaggcaagactggtcgtgggggacgccagaagaaccgctttgggcttcctggacccagccagactaacctcccc

SEQ ID NO: 31147 - DNA, 120 bp, Homo sapiens
tggcgtcacagcccttctctcagggcgccctgacgcagggctacatctccatgagccagccttcccagatgagccagcccggcctctcccagccggagctgtcccaggtgagcccgcccc

SEQ ID NO: 31148 - DNA, 120 bp, Homo sapiens
ggacgggacttacctgagtgagggtggggctatgcacctgaaacattccctctgaagagccccagagagctggcctggcccatgtccactgtctgaattacctgtccctgggctggggtc

SEQ ID NO: 31149 - DNA, 120 bp, Homo sapiens
ggacgggttttccattcttttctctggggctgctgagggctgggtggatgtgagcacccttggcctgtggcttgcttacctcctgaccttgtctttcaggacagttaccttggtgacgag

SEQ ID NO: 31150 - DNA, 120 bp, Homo sapiens
aatcgacgtggcgctctcacaggactccacgtaccagggagagcgggcttaccagcatggcggggtgacggggctgtcccagtattaaaaggcaagcccccctggagcaggcctggcccc

SEQ ID NO: 31151 - DNA, 120 bp, Homo sapiens
ctccggggaccaccgcgggacctcagtttcctcatcagagtcggggagggcagctcgggctctccctcactgtcctgtgtgctgggtacctgtggggctcaggtcgcagcctctcaccgc

SEQ ID NO: 31152 - DNA, 120 bp, Homo sapiens
tggcggcggaagagctaagcaacgtggcttagtccatcagcatcttattctgggtaataaaaaataaaaataaacggatacctgttttccactgctaaaactgaagcaccactgtgtgag

SEQ ID NO: 31153 - DNA, 120 bp, Homo sapiens
gagcgcacgagggagaggagccgaggccgagcgccccctgctggcccgcggcggcgaggagcagagggagcggaggaggggccggcccgcgggagccgcggccaccaggaggccccgctc

SEQ ID NO: 31154 - DNA, 120 bp, Homo sapiens
ctccgtcccatcggggctgcggccagggcggagggaggaagaccctcatctcagagtagccctttcctctgttcttttatttctttttctctttgattgaaaggggactacgtcttagca

SEQ ID NO: 31155 - DNA, 120 bp, Homo sapiens
cttcgcatttctgtgcccgagcaggctccttgcaaagacagcagcgtgcggggcagagccccgggagggcgcgtctgtccacgcctaccggacgcgccgaggtcgcgctgcctgtgttct

SEQ ID NO: 31156 - DNA, 120 bp, Homo sapiens
ctccgagggccttcatttaaagaaaataagggtgttttgggtttttctctttgtttttttcaagattcttttaaaggagtactgaagaatactttcctaagtttgtctgtaaaatcttag

SEQ ID NO: 31157 - DNA, 120 bp, Homo sapiens
tagcggtggacctgggagatttgagaagcttccagaaacagtttaaacaagccagcgctactggagaagaggagcaacacctgtgccgcggccggaggagttttgttgttggttttagct

SEQ ID NO: 31158 - DNA, 120 bp, Homo sapiens
ctgcggggcatcaggctgctggggtagccgcccgccgagcctggaagctgctcgttctccgctggactcagaagccaagctgcttcccgcctagactcggcgcagggccccgcaccggtg

SEQ ID NO: 31159 - DNA, 120 bp, Homo sapiens
ttgcgaggggccttggccaggactggccctgtggccaggaggcgagaaggtggctgttcccggattgacggctttttcccgggggcctttggaagatttggtggaaggacaagagggcct

SEQ ID NO: 31160 - DNA, 120 bp, Homo sapiens
ccccgtccccaggaggtaccgacagtccctgtgctggttagacacggagcgctgcacaccgaaagcccaaattgggagctctgcctgccggcaactttgctgatggggtgattgctgctt

SEQ ID NO: 31161 - DNA, 120 bp, Homo sapiens
taccgcgttctgtgtgaagggactgagggtgtggtgtcattggcagagggtcattttaggagagctgccccagcccctcgaacgcctggcttggggtgtcattctgcctggcggccaggc

SEQ ID NO: 31162 - DNA, 120 bp, Homo sapiens
ccccgggcctggggctgtcactggccctgatccgaacacctccagattccggcttctacatgggacagacggggacgcacaggccaccttccttctggcagggactcttatttattccca

SEQ ID NO: 31163 - DNA, 120 bp, Homo sapiens
tttcggtttccccttcttccggtaggccgcgtagaggcatgcaccgggtaggtttccgcggtgaccccgcggcggcctgagggacgctccctgccccatcccggctgttgggctgggccg

SEQ ID NO: 31164 - DNA, 120 bp, Homo sapiens
cttcgccctgtgctgtgttctccagctttgtagcagcagccttgacaaacccaggcgcactgtaccaaggcaatgtaacttttgattttcggtcaatttaagttcttttgtcaccaaata

SEQ ID NO: 31165 - DNA, 120 bp, Homo sapiens
tgacgggttggggtgtgaaggaggccagagggagacaggcaaagcccagaagggacaggtctgccttgcaggactgaagggcgacccctgcccctgggcccttcccgtaggcagcacctg

SEQ ID NO: 31166 - DNA, 120 bp, Homo sapiens
gtccgggcggctccccggagtggcgcgttaggcctctggcaggtggcctggaggtggaaaggcctatccgatcaccaagactgaggggcgccctccccaccacccaggcaaggagtccaa

SEQ ID NO: 31167 - DNA, 120 bp, Homo sapiens
cagcggagcagaccacgcggcatttattgttgggcccgcgtccctgcccgccccgggttagcggcagccgcactcgtccaccaccatgtcctcatactgccgcagcaccacgttgtcgct

SEQ ID NO: 31168 - DNA, 120 bp, Homo sapiens
gctcgtcacagaccctggtctccaggaacagccctggatgccagtgccccaggactctccctgagcgtcagctcccacacgcccccagcaaagtgaccagagcacatcatcaggtggaac

SEQ ID NO: 31169 - DNA, 120 bp, Homo sapiens
tcccgggctgacatgggtggcccagtgaggttggggagggggcagtgggtctcagggtctgcatacagtaagtgctcaatgggtgttgccaggaaacggaagagatcaacttcgggaggg

SEQ ID NO: 31170 - DNA, 120 bp, Homo sapiens
gaacgggaagcaagacaaagagagagaagcctctgttcccctgcccgtcccatccctaagcagggacgtctgtccacctctgtccctcccaagacgatggtaaaaatgcccacaatggtt

SEQ ID NO: 31171 - DNA, 120 bp, Homo sapiens
caacgcatggttgcatcccctcagcctccactggcctgcgtttgtcacctctggtcacagggagcacccccttcccacacttgccaggagagcatccttccggagttgaactaggatcca

SEQ ID NO: 31172 - DNA, 120 bp, Homo sapiens
tgccgccccctctctggcaccgtctccaaaatcacacggtgcggcgccgttggttcgtttgtggacagaggtcctgcagctccctggaaccaaggcctgtggcgccctaaagctctgatc

SEQ ID NO: 31173 - DNA, 120 bp, Homo sapiens
tcccgctcagttctgtggctgatgccctagccactgctgtgtcccctaatcctggggtgtcagagggatcctaagttttccagatttttgcccatacttaaaacttcaacgatcctgctt

SEQ ID NO: 31174 - DNA, 120 bp, Homo sapiens
acacgcagcagagtgctggggaatctggagagcgggggcgatcacatgcctggaaatagagcagctgcagagcccaccccaggaggagcctgcctctccttacaaaggctgtaataagac

SEQ ID NO: 31175 - DNA, 120 bp, Homo sapiens
tgacgatgccatacgtgcgaaaagtgcagagtctcagagggtttacaacccccatccctttgtaactgtagtttgcttacactgtggattctaaagagacatgtaaatctggggccgatt

SEQ ID NO: 31176 - DNA, 120 bp, Homo sapiens
acccgatagagctattctatactgttgctaaaatttcattaagtctctcaagatgcattgatgagatgagacaccatgaataacacattcatcaactcaagtatggcaactgttcagaga

SEQ ID NO: 31177 - DNA, 120 bp, Homo sapiens
acccgagtgcagacttggtaattaccgggaatttgtctcccccgtataaattctggcgaacaacgagaaaacaccatctgtgatcgtttccacatcacgtttgctaacagagcacttctg

SEQ ID NO: 31178 - DNA, 120 bp, Homo sapiens
tttcgggggcagcgccaccttctgaaggggaaccaagacagatttggaggggacttgctgctaaaagcatgtgaacagagaggagaggcaaaagcacattgaaaatggtgcatgtttttt

SEQ ID NO: 31179 - DNA, 120 bp, Homo sapiens
cagcgaaacctccgccccagagactgcagagacgtttgttttcatgtacacaccaaaccgtacttgggcactggctccaggccgatccagggcagggatgatgttttaagggcaattgct

SEQ ID NO: 31180 - DNA, 120 bp, Homo sapiens
gaacgattttgttcaaaactgaggtggaaattaggtgagggggcaactaaaaaaaaaaaagaatagaaagatgaggatatttacaggcccaaggccctgcagaaggaaaaggatttgaag

SEQ ID NO: 31181 - DNA, 120 bp, Homo sapiens
agtcgcccttccacttgcatgatggcaaggccctctggactaggaacagtccgtttgctggtcatgttatgtggtaggtggctgtcatctgtgagagaaaacttgagcaagagaagagac

SEQ ID NO: 31182 - DNA, 120 bp, Homo sapiens
aggcgtggcctatttccacacgcacatccacggaggctggcctggaggccttgaggggctcacagccggggcaccaggcaggccatgcgcatctgcccttggccagtgtgaggtttgctc

SEQ ID NO: 31183 - DNA, 120 bp, Homo sapiens
gcacgccagcgagggcagacggccttacacactggcctgtgaacatacctatttgttggcccgcttgtgtctgtacatctgcatcatcctctgtcggaacacatcgaatgtgtcttcttt

SEQ ID NO: 31184 - DNA, 120 bp, Homo sapiens
gcccgtcagcacccaacccttccccttccgagggggttcccctagggagtgaaaaagagagtcagttgtgcacctgagcccagggcctggcatgccaggaactgggcatgggcacaaaca

SEQ ID NO: 31185 - DNA, 120 bp, Homo sapiens
agacgcgactcacagtagaaacaaggagtactcaccctcgaagagctggcttttgagggggtgcccagagggccctggttacctcggaatgccttacccagcaggaactaagctcagtat

SEQ ID NO: 31186 - DNA, 120 bp, Homo sapiens
gatcggggtttaataaactttgggcctgtgttcgggaccctggctggcccggctatgggttcccgggaatgggaaagcagttccagacggaaactacacagaaataccacttagctttta

SEQ ID NO: 31187 - DNA, 120 bp, Homo sapiens
agtcgtgcctctcagctaccactataaccctggtgccaagactgtgaggaaaactgggtaagggaatggccagtcccggggtcaaggagtcagtaggaaggccctcagcggaaccctgga

SEQ ID NO: 31188 - DNA, 120 bp, Homo sapiens
gggcgcagcccagggaagagtggggggcaccagggcacaggcctgcaggcaggatgggggccagacagtgggtgagaactggctggcagcaccctccctgaaccaccccaacatacccct

SEQ ID NO: 31189 - DNA, 120 bp, Homo sapiens
ccccgagtgcttcattcactccctggctgcattgtctgtctgtcctcaggactgagttctacttggacattggggtctgtgtctagcacagagcagacctcactgagagctagtacagct

SEQ ID NO: 31190 - DNA, 120 bp, Homo sapiens
tcacgggggctggtgctgggggtctgagcaggggacaggtgggagtggctgggagagggttagatgaccctgggcatgggaagcagggtgagaagggcatgctgagtgctgtgagctcag

SEQ ID NO: 31191 - DNA, 120 bp, Homo sapiens
tcacgaggtataattcaaccaaaagacaaatcccccccttgccatctgcattgaggtgcccaggaatcagcttccctaacgttaggggtgcatgtgggaggcactccagagacaaaggag

SEQ ID NO: 31192 - DNA, 120 bp, Homo sapiens
tagcgaggttttccagtttgttctgtaaatgattgcatagtcctgtgcccgtctgtgtccatgttgcagctttcagcttattttaaacactagtgtgagctcctcacacatgatgagtca

SEQ ID NO: 31193 - DNA, 120 bp, Homo sapiens
ccacgttattccaagtatgtcccctatgaaactgctttttttttcatggctctctttttacagagctactagttttacatgattttacaaaagatgttgaggtttacagtcagcaatgaa

SEQ ID NO: 31194 - DNA, 120 bp, Homo sapiens
ccacgaacaagggtcagaaagtgggtcacagctttggcccagcaatcctactcctgagaatgtaccctttcaaggagaattaaaaacaataaaactaacagtaataaccaaagcattcaa

SEQ ID NO: 31195 - DNA, 120 bp, Homo sapiens
ctgcgcctggcccattatagcatttctaacaggaacataagcagcggtggggcagcctcatgagatgtgggccctgctgccacctatcccgctatccagacagggaactgaggcttgcag

SEQ ID NO: 31196 - DNA, 120 bp, Homo sapiens
aggcggtagcattttcagtccagcatgcctgcagctgcaggaaaacagggggaacatcaaagactgtgggagggtaagtgggtgggttataaccactttaggttatcggtgacttttctt

SEQ ID NO: 31197 - DNA, 120 bp, Homo sapiens
cttcgccactggactgggggcaatggaaggtgaaaaccacatcgtgggaaaagtgctttctccctatcacaagagttaagacagcatgattaccatgtgtgctcgtgacctctgggatgt

SEQ ID NO: 31198 - DNA, 120 bp, Homo sapiens
gggcgaaaaggtgtatccactatgtggaatgacctggctgttccctacacatccctcaatacagctcaagcacgacctctccaactttccaggctagactggagcctctcctgtgtcgct

SEQ ID NO: 31199 - DNA, 120 bp, Homo sapiens
cgagtcagatgttaaatctgtctgggaagctgtttcgagactctctccaattgtccaatttctcaccactggtgccagatggagggtgtcgtcatactgaagtcaggcctctgcccacgt

SEQ ID NO: 31200 - DNA, 120 bp, Homo sapiens
attcgctcgtttgggttttgcaagacagagcttttaaaagtgcatttgcattttttattttaaacatgaaatacttcttcataaaaagtatattggccgggcacagtggctcacacctgt

SEQ ID NO: 31201 - DNA, 120 bp, Homo sapiens
ccggaggtgaggcagtggggcgtgtgggtgcgcatgagtgcgaacacacgtgggggtgcaagtgcatgtgtgtatgtgcacgcaggttgctcctaggggtgcaaaggcgcgcgcacgggt

SEQ ID NO: 31202 - DNA, 120 bp, Homo sapiens
gtgcggggtgcgcgccccctcgcggcgccttcacggccctcccgcccctcgccctgcagagtacagcggccgccggcagccctaccccttcgagcgcatgatcttcggcgcctgcgctgg

SEQ ID NO: 31203 - DNA, 120 bp, Homo sapiens
catcgggcagtcggcctcgtacccgctggatgtggtgcggcggcgcatgcagacggccggcgtcacgggctacccgcgcgcctccatcgcccgcacgctgcgcaccatcgtgcgggagga

SEQ ID NO: 31204 - DNA, 120 bp, Homo sapiens
gggcgccgtgcgcggcctctacaaaggcttgagcatgaactgggtcaagggtcccatcgccgtgggcatcagcttcaccaccttcgacctcatgcagatcctgctgcggcacctgcagag

SEQ ID NO: 31205 - DNA, 120 bp, Homo sapiens
ggacggtggaccggtgacccctttgtattctgggcccatggaacggtgggggggtgcgcttgattctacttcaggaggcacatggggcgctttatggaacgagcaggtgggcctgagggg

SEQ ID NO: 31206 - DNA, 120 bp, Homo sapiens
ccacgtccaaacgcaaagctggcagccctggaagtgcagtgttggggcgatggtgtggggggtcccgcagctcccctcttccttcctctgcagacgctggcgctgtctgccggaggtgtt

SEQ ID NO: 31207 - DNA, 120 bp, Homo sapiens
gggcgtggtcagctccacctcctgatcctgtgtgtcctccgacatgctgctgattctagtgacccctgtccccaccaggctcagagccagaccgcgcctggaccttcttgttctgactcc

SEQ ID NO: 31208 - DNA, 120 bp, Homo sapiens
ccacgtgcctgcccggcctccagggtgcgggggcgcctttcttgcaggcggaccctgcccaggatggggccagcctcgtgctcagctttggccacaaatgcagcccctggcccaccccac

SEQ ID NO: 31209 - DNA, 120 bp, Homo sapiens
tgccggccctgccttctccagtatttcccacatggccacgactcctcagtcactagagcctcctgctgggaacagtgtcccccagagcctcatgtctatcctagaccctgcaagcagctg

SEQ ID NO: 31210 - DNA, 120 bp, Homo sapiens
gctcgaggcccaggccatgacacggaactgcctcaggtttgggtcagacctgcatcctggggcatctgctgaaatgtgagcacacaaaccacctcctttggcccagaagccccccaggcc

SEQ ID NO: 31211 - DNA, 120 bp, Homo sapiens
ccccgaagtgggagcctcatgatagagtatagcttgggggtgggaggtgaggaaaatctgaggtacccaggggaacccccagctaactggtctctcagaggagtcccccagggcccgcca

SEQ ID NO: 31212 - DNA, 120 bp, Homo sapiens
ccccgggtctatgatctattcacatcgaacccctgactggtctgcctggtgccagggtgagcgtgaccgtgagtgttgctttcgacagctggctcagcacacgctgtgtgaagggatctg

SEQ ID NO: 31213 - DNA, 120 bp, Homo sapiens
agtcgtgacttcatttcccttccttctgtcctcctcctgttcttgccttggacctgcaggtgtgcagaccgctctctctgccttccttgcatgtggccaccagccatccctgatcttgtc

SEQ ID NO: 31214 - DNA, 120 bp, Homo sapiens
ctacggcgtcctgcacctccgcctgggacgacgccccactttcaataattccggccatcagtgcccttccttcagggccatctccagcgcccctcctcggggatggtcccaggcagagac

SEQ ID NO: 31215 - DNA, 120 bp, Homo sapiens
ccacgtccctctctctgcccaggccggtcccgtcagggttgtgggagtcccccatctccctgcaccagcctgacccccaggggctgggctaagttttaagaacacactcaataggttgga

SEQ ID NO: 31216 - DNA, 120 bp, Homo sapiens
agccgcgtgagacctgaaggttccaactttcctgtctcccactctgagaaccttgcccgccctgaggccaaccagacctcctgagtccacctcccacggcctcccctgcccgttccacac

SEQ ID NO: 31217 - DNA, 120 bp, Homo sapiens
ccccgatatagcagggacccccgatggatcctgtcggcgcggcccccacgctcctgcaggacccccgtccccagagtggacccccaacaggaccccacaccgccttaaccaggttccaaa

SEQ ID NO: 31218 - DNA, 120 bp, Homo sapiens
ccacgacccctcaaaaggatcccagacccctaaaaggtctcgagggcagaatccccagaacgcttaggggcttctagtccccctgggtacaactcccgccgactccctcggaggtcctgt

SEQ ID NO: 31219 - DNA, 120 bp, Homo sapiens
tagcgagagcagggctcccagagagggacacacggccttcagcgtgcccccgaatccctcagagcctccaatccccaagaagaaaccccaatccattccctcagtgtctccctggacccc

SEQ ID NO: 31220 - DNA, 120 bp, Homo sapiens
cttcggctggacctcggccctgcagaaccccccacttcgcgggacgctcgctcaccatgacgcgtgcgagaacgcggtgcactcacccaccggcctagggctccgggcactctgcggaaa

SEQ ID NO: 31221 - DNA, 120 bp, Homo sapiens
actcgaccaattagagcccgactctggtctgacgagcatcccgtccgaccaatcagtgtgtcttgagccggcaaatcaccagggacgaggaggccgctcgcgttgcatgccggaaattgt

SEQ ID NO: 31222 - DNA, 120 bp, Homo sapiens
atacgctggttcggatcgatcaaagtgaagattgtgtctgggaggcctgcgtggccgacctctcttaaggcttagttttctctttcctacacttatctcaaaggtttgcagcgaaagcat

SEQ ID NO: 31223 - DNA, 120 bp, Homo sapiens
ccccgccgcccgggacgcccggtccccgccagggccctctcactgtagctttaaggagggctggggccgggtgcagcggcacctggagtctcggtggaacccggcagcggtgggcgcgga

SEQ ID NO: 31224 - DNA, 120 bp, Homo sapiens
ccccggagaggctgccccgagcccgagcaccccctgaccgggcgctcaccacgggtgttgggacaagcagcggagcctgcgggctggagccaggctcggaccctccgcgccggggcgggc

SEQ ID NO: 31225 - DNA, 120 bp, Homo sapiens
gggcggccgagcggacgcagctggcagtggcggcgggagagcgccccggatccgcccggagcccaaccccgtggcacttcggctggctgggcagcggcgctggggacaacgcggggcctt

SEQ ID NO: 31226 - DNA, 120 bp, Homo sapiens
caacgagcgcctgcgtgggactccaggggccggcgccccgctccgctccccccaggcctcaaccccgctggctacccgcgctgaaacctcacctgccgccggctgcaaacggactgcgct

SEQ ID NO: 31227 - DNA, 120 bp, Homo sapiens
aaacgtccttctcctactttctgggctcactcggctccctgtgacgcgatcccgcttgcacccttgcccttcacgttgaccgcagtggctggtgggcagtgggggacaccctgggctccg

SEQ ID NO: 31228 - DNA, 120 bp, Homo sapiens
tggcgctcagtgtccctggtcgttagacaagggtgccttgagccacttgttgttcaggcggtttcttctttacagaaagtggccccccacacgcccttcctggtggcaggagcagggcag

SEQ ID NO: 31229 - DNA, 120 bp, Homo sapiens
cagcgtttctgccctgctccatggggctggggttggaggcggctctcccattcctgctgtccggacaggagcggggcctttctatccgcagacttttgctgaagacactgtcccccgccc

SEQ ID NO: 31230 - DNA, 120 bp, Homo sapiens
taacgactccatcctcagaaagagcttcccaaccccactttcatgccaatcccaactgtgtctgcctaaggatttccagcttttcagggttttgtcatttctctaagtataaaaggctct

SEQ ID NO: 31231 - DNA, 120 bp, Homo sapiens
aaacgtacaggccggccccccactgtggcggacaccatgggttcccgggggccaagggagagggagacccagccccatcaatcagcatattcctccacagcagggaggatgaggaccttt

SEQ ID NO: 31232 - DNA, 120 bp, Homo sapiens
gggcgttccttcttccagtgtcaaatctgcttgcaataagcacattggttttttagtacaggagcctgctcacctttttggcctttttggcagggacccgagatctcctggccagcgctc

SEQ ID NO: 31233 - DNA, 120 bp, Homo sapiens
gcacggctattcttaggagccgctggctcaaaaggggtgtaagtccaataggcctcctggaggtgttccaaaaatgctcccagtgactcatcaggcccctagaaaacttcagttgtctta

SEQ ID NO: 31234 - DNA, 120 bp, Homo sapiens
gagcgctcactgcctggagggatttgggcctctctcagcaggaggagaggggccacctcctctggctgaggccgtaattgggtggctataggtggagaagccacagagcatgtagtcaag

SEQ ID NO: 31235 - DNA, 120 bp, Homo sapiens
aggcgccagccccggcccagaggagcagagacgccccatggggaacacgctgacctattgcgtgtccccccagtaccagcctcaagctgggccggtgcgtggtgccagagctgtactgcg

SEQ ID NO: 31236 - DNA, 120 bp, Homo sapiens
gagcgcatgccgcagcctcgccccctgtctccctcagtggacgacgtccaggtctcttgctaccgaacgctgtgcagtatctactccctgggaaccaccaagaacacttatgtggaaaag

SEQ ID NO: 31237 - DNA, 120 bp, Homo sapiens
catcgtttggggctgggtggggctggaggggaagggagggagcaggggaagaagatggggtgggtgaaaagcagggtagatgttaagaattttcccgcacacggcggcagccgcggttcc

SEQ ID NO: 31238 - DNA, 120 bp, Homo sapiens
ccacggcggccgcgtgagggcgctcagggacaggtcagccacggaggtagagccgccaggtctggggctgtgaagcaggcaggcctcgctggggaagaaagggaggcgcagaccacgggg

SEQ ID NO: 31239 - DNA, 120 bp, Homo sapiens
ccacgcaacactggggtcactggggagggcccctggcagtggccatgtgaccgcttctgagctgagattactgatacagcaagagcgaggctgcggctgtttccaccagctctgaagtta

SEQ ID NO: 31240 - DNA, 120 bp, Homo sapiens
tggcgctggtgcctgtaaatccacctactcctaaggctgagatggggggatcgcttgagctccagcctgagcagcatagggagactgcatctctacaaaaacgactttttttaaaactag

SEQ ID NO: 31241 - DNA, 120 bp, Homo sapiens
agccgtttctatggagatggggctgggacccaggaccccaaagagggggacacgtggcagctaaacacagccccgtcttccaggcttcggccagccctcggggagtgcctggcccgtctg

SEQ ID NO: 31242 - DNA, 120 bp, Homo sapiens
tgccggtggcgttcctggagccgcagctgaacgagtacaacgcctgctccgtgtacaccaccaagtctccgcgggagcgggccagtaagctgtgtggggcgggagcagtgctgggagtcc

SEQ ID NO: 31243 - DNA, 120 bp, Homo sapiens
gagcggctgaggattccccaggttgggagtgccacacattcaggaaccccagagtttatggttcgggggcatttcaaggccgttacatggggagaatttagagattaatttgatttttga

SEQ ID NO: 31244 - DNA, 120 bp, Homo sapiens
tcccgaacgtaacacaagtggtgacatcagagggcactgatgtagaaagacacttgaggccccagcttcatgactcagggccccttgggtctccgtctgctgatgtcatgggctctgagg

SEQ ID NO: 31245 - DNA, 120 bp, Homo sapiens
gaccgcctggcgtcatggatgcccatggccctcacagtgtctttggagtggcagctgctcctcccagcacccccatgctttgtgcatgcgtgtgcagtgtgcatgggccttgtgcatgtg

SEQ ID NO: 31246 - DNA, 120 bp, Homo sapiens
gtgcgctgtgtcttggcgcatctgacccctcctgggccctgtcccctcccttccacctaggagagaaggtcatggcggatgatgaattcacacaagacctgttccgattcctacaattgc

SEQ ID NO: 31247 - DNA, 120 bp, Homo sapiens
agccgaggtttggggctggtacggaagggttgactgaattagtttccgcccctcctcctcccccggtcaatgatggccactctccagccagtgtcaatccacctagctttcaaaatctct

SEQ ID NO: 31248 - DNA, 120 bp, Homo sapiens
cctcgctggaatttctggaatctagccactttgtttccccctcatctcctctggccagtccaattccccaaaagcaacctgccaaaaaccaatttggccaaaaatcaatttgcccaaatg

SEQ ID NO: 31249 - DNA, 120 bp, Homo sapiens
aggcgctctgcagtggctgccaaagttctatacacgtggtggatttctgtactttaggtccagaaaagacctaagggaaaaaactgcctggcatttaaaaataaatctattagaatcact

SEQ ID NO: 31250 - DNA, 120 bp, Homo sapiens
acccggaaatcaactttcgtgacaagaattggagtaattagtaatcttacttccatagaaccttcacccacttggttagtgctctttaaggtaactgatttgtaaatatctttaatcttc

SEQ ID NO: 31251 - DNA, 120 bp, Homo sapiens
agccgggactaagattttcattctttaattttaactaagatggaatcagtctttgggtttaaaataaattttattcctcaggaatatgaagttttgaaaatgagaatgttgttatgaaag

SEQ ID NO: 31252 - DNA, 120 bp, Homo sapiens
caccgggaaccagcagagcctggcgcacagtcgcctatgggacgcagtggtgggattcctgcacgtgttcgcccacatgatgatgaagctcgctcaggttcgagcccctctggtctccat

SEQ ID NO: 31253 - DNA, 120 bp, Homo sapiens
ttccgggcgtcccccaagtggtccatttccaagtcttgcccctttggtcagtttgtcacccgagtgctcccggcatgttccagactggttccctctcagtggccaaatccatcctctttc

SEQ ID NO: 31254 - DNA, 120 bp, Homo sapiens
ccccgcctcctcctctgcccctccctccccaccaatcagctggttttccatccacgcttccattggtctgacgtgttggccccgtcccaatggccggagctcctctatgattgattgctg

SEQ ID NO: 31255 - DNA, 120 bp, Homo sapiens
catcgcagatgtggacagtccttgggctaggatggggctggtttctagattagagcctggggctgaggaaatgttttgcttctttatcttacttgcggcagatgacacccatatcaggca

SEQ ID NO: 31256 - DNA, 120 bp, Homo sapiens
tcacgaacacttaatccatttgctctgcttctgtctggtaactatattcaaggctgccatatactgttccgcaggtcgtgcactgcacaaaggcacgatctctgagagcattcacatcct

SEQ ID NO: 31257 - DNA, 120 bp, Homo sapiens
ggacgcctttttttctaatttgctcaaaggtgccccaggggctggcagaaaccctaattcgttgtcatctgactttttaaaaggagttaaacttagaatgcaattcctccgtgtcacagc

SEQ ID NO: 31258 - DNA, 120 bp, Homo sapiens
atccgccaccatctagtctaggttgcaaaagctagaaatccagtgcaaagtggtggcttaagaaaaataaagaatttatcagttcatattacagatccagggcttagagtgatgtcagca

SEQ ID NO: 31259 - DNA, 120 bp, Homo sapiens
ccacgatgaggctgaaagagctcacaggctccctctggcggccattcagagaatgacccgtggaagggcaggggcggaagcaaggagaccaggccagctgctgctgtccaggagatgtca

SEQ ID NO: 31260 - DNA, 120 bp, Homo sapiens
cctcgggctttggggctaagggggtgcccctcaagggaggccgaggcaggggcccagaggacctgggtagatctgctcgtgttctgggctgggaagtctgcacctgccagattccattca

SEQ ID NO: 31261 - DNA, 120 bp, Homo sapiens
tcccgcccaggaggaatagcggggagctgggtgatcttccctggaacttctaggccctgtgtcctgccccatagcactcagcaagacttcctggggcccagcggggcctcacagggggtc

SEQ ID NO: 31262 - DNA, 120 bp, Homo sapiens
gcacgcacaataacctggtgaacaatgccagctttctattaataaatgaactgccagttcagaatttgtacccatgtggcagatggacagaaatagtttctttaggattgatctcttaaa

SEQ ID NO: 31263 - DNA, 120 bp, Homo sapiens
cagcgtttcttattgataggagagttgatggatttcaggaaaatgggatatagtagatgtgcaatgaatttgttgacttggaaacaaatttggacacttatccctgaaaacttcaggcca

SEQ ID NO: 31264 - DNA, 120 bp, Homo sapiens
aggcgtgagccgctgcccctggtgactttgttgctttttaataagcccagaaatttctttcaagagggaggatctttgtgaacatcttgagccgcgttcttgatcgctggctgtggaagc

SEQ ID NO: 31265 - DNA, 120 bp, Homo sapiens
tcacggtggtgctaatatccaaaagatagaagcaacacaaataatgcccatcagccaatgaattgataaataaaatgtggtatatccatacaatggaatgttattcagacaggaacgaag

SEQ ID NO: 31266 - DNA, 120 bp, Homo sapiens
agacgaaagaaaggtaggttagtggttgccaggggctgggggctgggtaggagggaagtggggttggagagtaactgtaccagttttgcggtggtagacatgttccttgtatttttggtt

SEQ ID NO: 31267 - DNA, 120 bp, Homo sapiens
atgcgagatgccgcaacctgattccactcactcctagatttgttgagtacctgctatgtgaaaggtaccagtccaggcagtgggttcccacagcaaacagaaccctcctctggggagctt

SEQ ID NO: 31268 - DNA, 120 bp, Homo sapiens
caacgcagagtggagtgatagcctaggggagatgacagagtccaggaaggcctcctgggttgctgacatttgaggcaagtcctgagtgatgagacaaaaccagctctataaagagctaga

SEQ ID NO: 31269 - DNA, 120 bp, Homo sapiens
ctccgcatggagaagtggccgtcatggtcgacctgttcccaagggtggccttgtgagtgcaggctctcctcaccagagctgagggctttgtgaacctctgatgtcaatagatgcccctca

SEQ ID NO: 31270 - DNA, 120 bp, Homo sapiens
gtccggatctgggtgggagttcccttctgcgtcatccaggccaggcgagtgggcatcctccctgagcacctgtgcttggggctttgcctgtgtcagtcaggaagacagagtacacggaag

SEQ ID NO: 31271 - DNA, 120 bp, Homo sapiens
gcacggagtgattgacatgtgtccttgtgtttaatccctatcttaacctctcggttactgtcctgtttatcagtgaggaaactgaggcttattgcttgcctgaggcctcagtggcagaag

SEQ ID NO: 31272 - DNA, 120 bp, Homo sapiens
atccgcacctgtgtgatgcccaagccagagctcttgtttactacccagagaagatgagcacaggtgggatgtacgtatggagggcgggtagggcagcagcccctctgaggacaggtggcc

SEQ ID NO: 31273 - DNA, 120 bp, Homo sapiens
cgccggcctaatagaacgttcttcgtccccaggcaaggtgactctcagaagcaacaataaagcttttcatttttgagacagggtcttgtgctgtcacccagactggagggcagtggtgtg

SEQ ID NO: 31274 - DNA, 120 bp, Homo sapiens
ccccggcctcccaaagtgctgggactacagatgtgagccactgcctgcctctggcctcttcctttattttgacagctcaggagtgaattgtttttagaattgctagtaaatttagtgttg

SEQ ID NO: 31275 - DNA, 120 bp, Homo sapiens
cctcgtgggggaaggcaggacaaaaattgtgtccaaagcaaagcaccacaccaggccgtgtacatgtgctcaggctgaatggggtggcagggcatggggtcagatcagtgctgcggagga

SEQ ID NO: 31276 - DNA, 120 bp, Homo sapiens
ccccgagcgagcaggagccaggaaaggtcccggaagaagaggcagcttagagccagaggagggcttcctgggggaggcaccagatggcacccagcccgttccagccacagtgagcaagag

SEQ ID NO: 31277 - DNA, 120 bp, Homo sapiens
ccccggccagggagagttggagtgcagtgggctttagtcctgtaagcagtggggagcctgtgagggggctgggggacactttagggtggttgggacctgggacctctcggtttgctcccc

SEQ ID NO: 31278 - DNA, 120 bp, Homo sapiens
tcacgaggcactcctgtgagtgggaattgaatttatccaggcggtgccctcccgctcacacatcacacgtggctgagaactgcctgaagaaacccccaaccctcgccctcccgggtctct

SEQ ID NO: 31279 - DNA, 120 bp, Homo sapiens
tgacggagttcttgttgtccccacttgcctccttctaggacgaccctgtcaccaacctgaacaatgccttcgaagtggctgagaaatacctcgacatccccaagatgctggatgcagagg

SEQ ID NO: 31280 - DNA, 120 bp, Homo sapiens
cctcgggcaaggggctgtgggcacatcagagctttgggtcaccttggggagctggcagagccagcaagaagggctgaatgattctgggtgaactggggacagccatgtcgccctgggaga

SEQ ID NO: 31281 - DNA, 120 bp, Homo sapiens
ctgcgagcaaccctggcctctccctccctacctgcagcaggcatggagtatggagcccgacaaagtggagtgttttgttttttccttttccggctttgctccatttcccagccatgcact

SEQ ID NO: 31282 - DNA, 120 bp, Homo sapiens
atccgcttcccacagccttgtcctttccagacccatgggagagggaggggctgagggtgtggctgagcccacccaagtcacgcgtcactctgcaggtccctctcccccaaggccgtggcc

SEQ ID NO: 31283 - DNA, 120 bp, Homo sapiens
atgcgattggagcttgtgtttggagtgttctgctagagggcacgggccaggagggtggagggaggacccctgacccacactcccgcgggagggtgggcagggaccagcagcaatggacga

SEQ ID NO: 31284 - DNA, 120 bp, Homo sapiens
attcgtcaccacagaccccaactaacagcatgtttgccattggactcacccctacgggccccgaaccagccccctgcccaccacatggcctcaccagattgcttttctttctacccacac

SEQ ID NO: 31285 - DNA, 120 bp, Homo sapiens
ccccgtgtgcaccccctgcctcctctacactgttcactgccccctagcaggacagggcaggacgctctcctgtagttcaggcccagggactatgtccaccactctcaccctccaaagccc

SEQ ID NO: 31286 - DNA, 120 bp, Homo sapiens
ccacggatggtgacttctgtcctctggagctcctattaacattgcctccaaggcaggagagtggacaggcctgagtgtgctcctgtgcacggaccactaggctcctccgggacccgggcg

SEQ ID NO: 31287 - DNA, 120 bp, Homo sapiens
acacgcagacggctatcccggtagcggctggtgagggtctgggtcagctggttgttcaggtggaagcctagggggaggctgcttctgagcccagtggcccacagggaacccaccttggca

SEQ ID NO: 31288 - DNA, 120 bp, Homo sapiens
tcccggcagggtgagtacaggctgatcccttcaatcctctgggcctgtttcctcatccatcaaacggactaagacagccccgaccccatagggtgtgtgaagacagaacgctcaggacag

SEQ ID NO: 31289 - DNA, 120 bp, Homo sapiens
cagcgtctgacacgtgactcgatgtgtgggtactgttactccttaaatcctgtggggctttctccttgccagtgggcactggaggatatttctgtgcagcaaaaaatatagtcaatccca

SEQ ID NO: 31290 - DNA, 120 bp, Homo sapiens
aggcgatttctaaagctgagaaaccatgtctgctgtggagtctcattggaggcttttaaaaacccaaaacaatgggttcttgaccccttctgagatgcaaggttgtgcctgatgaccttt

SEQ ID NO: 31291 - DNA, 120 bp, Homo sapiens
acacggccagacaaacccagttccaagtaccgtttcatgggcttctgctgcttccaaagcccatcttcacccccattctgtgtgttcattctcttcacaaatatctaccaagtaagtgcc

SEQ ID NO: 31292 - DNA, 120 bp, Homo sapiens
gcccgtgtgacctgccccaggtcactccctctggcattcatctgccctcgggcataggggtggaggctgccatgcccagggctatggggaaacccagccagatggggtggaaggacccga

SEQ ID NO: 31293 - DNA, 120 bp, Homo sapiens
aggcgctggagcccctcagctgccactgcaggagttcccgtttgagaaattctcaagggcactttatcagtttccttcttcctggaataactcctggcatgtaacaggcactcactggtg

SEQ ID NO: 31294 - DNA, 120 bp, Homo sapiens
atgcgtgaacacaagcctgccacctgccacctgctgtgagtccttgctccctcacctccactcctgtctatctccggcccagcctctccctctctgccccacgtctcccaatccttggct

SEQ ID NO: 31295 - DNA, 120 bp, Homo sapiens
acacgccccttgcccttctccttccttatttggcctctttcagggtcacccaacccctgccagggactggcaacaagctaaggtgtgggcctgtggatggccacagtgcagacggccaca

SEQ ID NO: 31296 - DNA, 120 bp, Homo sapiens
ccacgaccaccccaggaccctgtccacacctgctgcattcagtgccagcctcagctcgtaggagttcatggttccagaggtgtcctcatcgaacttgttaaatatggcctgggcaggaag

SEQ ID NO: 31297 - DNA, 120 bp, Homo sapiens
ctgcggctgtttctggggacgtggtggaggctgcatgttctgttctctccaggaagagctagtggttttctaccctgtgtgttggtgagcaatgtgcagaggcagagccgctgaagtatg

SEQ ID NO: 31298 - DNA, 120 bp, Homo sapiens
tggcgaagcaccgccctcactccaggtcacctcatcagccctcgtttttttttgggccccagccttggggctgccaaagctgagaggcatcaaaaccaatgcacagccagccccctgcca

SEQ ID NO: 31299 - DNA, 120 bp, Homo sapiens
tgccggtctgcacatcttctatttatgttccttggagaagaaatggttgttgccatgtttctgttagcagtcatgtaatgccattgcccgctctggtacattcacttggtcaccaatttg

SEQ ID NO: 31300 - DNA, 120 bp, Homo sapiens
gggcgagcaagacaggcctgcctaggaatggggggctctggcctctcagggcctgtgcgatgtcagcatcgagcctcctccctcagcccatggcctggtccgacgtatcagaccaagaca

SEQ ID NO: 31301 - DNA, 120 bp, Homo sapiens
caccgagatggatggtcttgttggggggctgccgctgtttctcataggcaatcctccacctctccctgctaccaaaggcaaaccattcttgacagacactaggaagggagttgtccattt

SEQ ID NO: 31302 - DNA, 120 bp, Homo sapiens
ttgcgtcccctctacaaatgatgtgaggcatgtccgccctggtccaatccagagtgtctcacctccacagggtcagcttgctcacaaggctcactgcaagagcccaggagacctcatcgc

SEQ ID NO: 31303 - DNA, 120 bp, Homo sapiens
cagcgcagaacaagaggacaattcctggtccagcaagaatggagtgagtgaccctcaccagactctcaaaggagccactgctggtttctaaggccgcccccacgcctcatcctcagtgag

SEQ ID NO: 31304 - DNA, 120 bp, Homo sapiens
ccccgcccatccaggcttctgccttgcctctgtatcctgagcagcatcggagggccccaagcagcagtgaagacccatggaggcctctcactcccccatcccactagggtgtccaagtgc

SEQ ID NO: 31305 - DNA, 120 bp, Homo sapiens
aagcgtgtaggctgcaaggacaggacaagacaagacttgaggtcagccatgccccagctcacctggaagctgacaaggggcagtcagtcacctcccagatgtacctttgcgtattcgatc

SEQ ID NO: 31306 - DNA, 120 bp, Homo sapiens
gcccgctgggcactttgaactgagtcaaatgtgagtcaagttaaggaaagtcccatcacaggagatctttgagaagggcttcaagttaccccagagtgtgataaggacaaggtagcaccc

SEQ ID NO: 31307 - DNA, 120 bp, Homo sapiens
agacggaagctttgggattagctcactgcccagccactagcctcaggttaagagaccaaaacggtgttgatggactcaacgctgccccgggtgagcagtcactggccagagttctctcat

SEQ ID NO: 31308 - DNA, 120 bp, Homo sapiens
ccccgacccatggccaccagcaacctcttctgccacaccactttctccgtctcagccctctcacacccttcgactaaatctgaaacatcaactcgattacagctctgccctgaaagtcca

SEQ ID NO: 31309 - DNA, 120 bp, Homo sapiens
aaacgaaggaaggaaaaagggtcatggaacttgctgtaatctgacacaaagtacaatggccaacccaaaagcagagcggccacagaatctagaccaggatggcaacaaaatcactatttc

SEQ ID NO: 31310 - DNA, 120 bp, Homo sapiens
aatcgtggacacacaaggacacccaggagtcaactttggaagcccaacacctggcctctgagcccagtacctgatgggtccaaactcctgcaaggcctccacaaggtctgcttccaccac

SEQ ID NO: 31311 - DNA, 120 bp, Homo sapiens
tgacgccccactggcctctgtactgttgtagacccagtcagataaaacagttggaggtcatccgtgaaggatgcacaggaaagactaggggcagcaattgaagccaatcagcccagaagg

SEQ ID NO: 31312 - DNA, 120 bp, Homo sapiens
taacggagggagggccacacaagtcccaaatcttacgttcttccagggacccccctctcttcccactggtccactcgaccaaggaaacatgggaaaagagtagctggaaaaggagataca

SEQ ID NO: 31313 - DNA, 120 bp, Homo sapiens
ccacgcctgcagaagttttcttgagcctccttgtaaaccctctgtttttcactgtcccccgcccagtgttacagaccacaagttcttgggatctgaatgcaactgaaattgacttgaggc

SEQ ID NO: 31314 - DNA, 120 bp, Homo sapiens
tagcgggaggatatacaggctgagctgggcaaaacatgtgaggagtagagcactcatgaggacacttgtctggctgcgatggttatcttgagtaatgggccacatggtgttctggcaggt

SEQ ID NO: 31315 - DNA, 120 bp, Homo sapiens
gggcgttcaggacttttgggcctttgtgagtaaacagtcaactctgtggagcggagaccctagagaatatggccagagagaaatgtgagctgtactccattggcagctagcaaaactttc

SEQ ID NO: 31316 - DNA, 120 bp, Homo sapiens
cagcgtccgcctgcggtgccactggtgcagggaggcgcgggcctcggagctgagcccccggggagcgcggtctgtttcgggctggtagtgggcaatgtggtgcagcgccccaaaccacgt

SEQ ID NO: 31317 - DNA, 120 bp, Homo sapiens
ctccgccctctcggcttccctggtcgccccaaatccccctgcagtttgcctgccgtccctcctgctgcggggggaggctgtttgggatcccggaggtactggatcgctgggctccagcat

SEQ ID NO: 31318 - DNA, 120 bp, Homo sapiens
ccccgcagctcatctggatctaagagctccataagaaactctacgtccagctgcgtgtccccaatgtccgggctccagatgagttcctcggtcagcgccggcaggaaggcgtcggccccc

SEQ ID NO: 31319 - DNA, 120 bp, Homo sapiens
aggcgcgtagacaccttccatccgatccccaggaccacgagggctggctgcccctccaccttgtcgggcatgacagcgcctcctaccagaatcttcaggaccgcatagattcctcccacc

SEQ ID NO: 31320 - DNA, 120 bp, Homo sapiens
tcccgcctggctccaactctcaaggctctccccaccacgctagacgttgacccctcccttaccttggttctcgcctcgagccaggcccgcatagacatctctgcacacctccaagaggag

SEQ ID NO: 31321 - DNA, 120 bp, Homo sapiens
gagcgccaccttgcggcgcggggcgcaggcagcgtggaggtgcgcaaggcgctcgtggatgcggctccgcaaggcgggggcggggctctgcccttccggtcccggcccctgtgcccccgg

SEQ ID NO: 31322 - DNA, 120 bp, Homo sapiens
ccccgcccccgcccgcagggctgtctgtcgccgccgcagccgccgcagctccggtgctcggagtgtgcggagtcgtgtccacagggccggcttcaggggcgccagcaccgcctggcacac

SEQ ID NO: 31323 - DNA, 120 bp, Homo sapiens
caccgccgtctccagcgcggggcctgcggggtgtgggggacgggtgagcacaggaccgccaagttgtcccacgcccacccacgcgctccaacaacccaccctggcccacagccacccctg

SEQ ID NO: 31324 - DNA, 120 bp, Homo sapiens
ccccgtgagtgtagacatggttgtgaacatgtgtggaagagttagcctgggtgtgaacttgcgcgcatacgtgggcgatagaacgcgtgggatgtgtaggaagggcgtgtgggtgcagaa

SEQ ID NO: 31325 - DNA, 120 bp, Homo sapiens
aaacgtgtgcgcaccgatggagaggacgaagttgcacacttgaacccgtgggggctcccttccagtcctcccattacctggatcctcgtccttcttggggagcccaggacccctgcttcc

SEQ ID NO: 31326 - DNA, 120 bp, Homo sapiens
tgccgcacatcctgaagcagctccgtggccgggtccccagacccgtggggacccccagaatctgaggcgatgcgcacccgaaggcttcggtactgcctggccacgtagctgctccgggcc

SEQ ID NO: 31327 - DNA, 120 bp, Homo sapiens
gatcgggggaggatccatcctccctccctccctccctcccttccttccttccttccatccatccagtatttactgaatacaggctggaattaggtgcctctgccctggagagagggtgat

SEQ ID NO: 31328 - DNA, 120 bp, Homo sapiens
agtcggtaattttctttaaaatatttctgcatggacagcatgacaccgtgggtgctgcctgtgacgctgctgtcaatgacacataatgggggtaatgtgaattgtacactgcccccagct

SEQ ID NO: 31329 - DNA, 120 bp, Homo sapiens
tagcgggtattcgtgccggcagctggcgctgacgcagtgtgatgtgtagaaggtgccgtgcgcctccaccaagtcctcctgttccagcccggctattcgctccagggtatctatgttcta

SEQ ID NO: 31330 - DNA, 120 bp, Homo sapiens
ccacgaggagcagtgaggtggtggggacaggtggagaagggagggaggagaagcaagtggcagggtttatctgaagactcttctgttcatcccaatggtgccacttaaagggtgacagtc

SEQ ID NO: 31331 - DNA, 120 bp, Homo sapiens
agtcgtgacctttttgtgcctccttttcctcctctgttcagatcacttccataatgatcttacaggtataatgtgaatatcaaataatagggcacttgtaaagtgctgagcccagtgcct

SEQ ID NO: 31332 - DNA, 120 bp, Homo sapiens
gctcgcctgccgcaggagagggaggctcagggcagcaggcctggctgcctgaggagggagacagtggcagctggaggacagggacacaggagaagatgtcctcaacaaaaggctgctcag

SEQ ID NO: 31333 - DNA, 120 bp, Homo sapiens
ggtcgattgttctagttgaggactgccaagggcctggtttctcagactttggtgacctcaacttgtggcaagaaatataaatttcaggccgggacgggtggttcatgcctctaatcctag

SEQ ID NO: 31334 - DNA, 120 bp, Homo sapiens
ccacggcacaccctgccacagctctcgctatgttccaggccctgctctaagcatttgcatttttatttatcttttaaattttattactttatttttttttagagtcagagtctcactgtg

SEQ ID NO: 31335 - DNA, 120 bp, Homo sapiens
agccgtgcttcaagctggattagagccaacacactcctttttggcttaagccagttccagctgggtttcttgctacttataaagaaaaggtttcaataaatggttcaagtggctggggat

SEQ ID NO: 31336 - DNA, 120 bp, Homo sapiens
cagcgttcgctctgcatgtaccgggccaccccttccaaggtcagctcgtccagcagacgctccttctggctgcccaggctgagcgtctgggagaataagttccgcaggaagtccactgac

SEQ ID NO: 31337 - DNA, 120 bp, Homo sapiens
gaccggaaagaagagagacagcggcaggacgggcattcagccaggggcatggatgtctccggcaccctggccccagccctggggttcccggcctccccacatctaaaggcacaaggcccg

SEQ ID NO: 31338 - DNA, 120 bp, Homo sapiens
cagcggcctccaggagcctgctctggcactggtacccaacccactgctacatactttggatgtcactcctgatggagttgaggaggtatcacccacacccctgccctgaaatccccccgc

SEQ ID NO: 31339 - DNA, 120 bp, Homo sapiens
cagcggctcctccctcagagtctgaatctgagtcctggaaggggtggggtggagtggccaggcccgagaggtgggattagggagggaggagagggggtgataccaggtttggggaaaagg

SEQ ID NO: 31340 - DNA, 120 bp, Homo sapiens
gtgcggggtggtggagagactgcactggggctagctccagggctctgggacaggctgccggggttggagtcctggccatgcccgtccccaggagcaagacctcatgtgagtggctttgct

SEQ ID NO: 31341 - DNA, 120 bp, Homo sapiens
gggcgggggaagtgcttggtaagcgctggctgttgctgttattatcacagcctggggtcttcccttcgttcccgggtcccctggagcgtgggcctgctgtcccttcccagcagccctggg

SEQ ID NO: 31342 - DNA, 120 bp, Homo sapiens
gctcgaggcctcagacactctgcccacctctccagcaacctctgtctccttcctcgaagcctcccctcagcccagctccagactggcaggtctctgggactctgtccagggcctctctgc

SEQ ID NO: 31343 - DNA, 120 bp, Homo sapiens
cctcgtcactcatgataccatctctctgccctcagatccggggttccctggcttcctggacaccttgccctaggtgccccccagcctctcactcctactatgtcccaaatggaccctggc

SEQ ID NO: 31344 - DNA, 120 bp, Homo sapiens
atgcgatcgtactgtcccccccatcagccagatgtttcctgcccccgcctccctcctcgccctcctgccacagcccttcagctccagagcatgtacgctgagcctcctaagggtctgtcc

SEQ ID NO: 31345 - DNA, 120 bp, Homo sapiens
ccccggcgctccacctggtccagcctgtcctctcctccgggggtcctgccccagcctcctcccccagcctcccagcctcagtctccacctcccatccaccctgctgccctgcatgtgagg

SEQ ID NO: 31346 - DNA, 120 bp, Homo sapiens
gctcgcccctctccacttcaaaggcccttctctctggcttctgcagtcttcccagacatctatggaattgccaggatgtccacaagggcagggactttgtctgggtgcccagcactgaga

SEQ ID NO: 31347 - DNA, 120 bp, Homo sapiens
ccacggctgggccctgcaatggatttcaccaaaatgcagttctgaccaagccaccacctcagacaactcccttccccggatactcactgctctgcgtccaagtctttttgaataagaccc

SEQ ID NO: 31348 - DNA, 120 bp, Homo sapiens
ttgcggcactcaccttgtaattgcccaagcccacccttataaagataaccactgttagctaagcttaatggaaattactccagttttctctgcataaaactaatattttttacagaaata

SEQ ID NO: 31349 - DNA, 120 bp, Homo sapiens
caccgtgcccggcctcacctcgtttttcagagcagctacatagtattggattgtatggatgaaccatagttcatttaacccatccactgacagccatttggactgtttccagttttgccc

SEQ ID NO: 31350 - DNA, 120 bp, Homo sapiens
ccacggtcagcacctctgtgaccacctctgccagacagcgggtcagctggggggcaggggtgccgggtcagaggggaggttgagggcaggggagatggggaggagagcagctggtttgag

SEQ ID NO: 31351 - DNA, 120 bp, Homo sapiens
tctcggtgccaagggagcagcggtggctgtggagaaaggagatggcactgggctttgccgccctggctgctgtccccggtaccgaccccagctccatgggcgtcccggtccccacacatc

SEQ ID NO: 31352 - DNA, 120 bp, Homo sapiens
acccggcgggtgtactgtcccccgctggaggctcggcccctgaagcctctccactgggtgcactgcctgccccctcccactggagtccccgctccccggcccctggcaggtcccgcactc

SEQ ID NO: 31353 - DNA, 120 bp, Homo sapiens
actcggcaggtcccgcactcacccgcccccagcaggagcagccgcagcagcagcagctcagaggctggccctcggggcggcatggtgggcgtccaacgggtccaaggcgctgtgcgggcc

SEQ ID NO: 31354 - DNA, 120 bp, Homo sapiens
cagcgccttataacccacgcggggaccctgcaggggaggaaatgatgtcacccccgccccctccccgcccgcggcggggcgacatctgcggggcggctgcctgcctgagaccctcaatta

SEQ ID NO: 31355 - DNA, 120 bp, Homo sapiens
tctcgtctgggcctcccaaagtgctgggattacaggcctgaggtgccacacctggcctggggggatctcttcccagagcagcagggtctggtacactcgccctccacgctggcaggtgga

SEQ ID NO: 31356 - DNA, 120 bp, Homo sapiens
gaccggggtgggaacccagaagcagccactcacagatggtccccaggcaactccttcccttcctgggcctgttttctcacagggtcttgttacaggctggagtgcagtgcctcaaactct

SEQ ID NO: 31357 - DNA, 120 bp, Homo sapiens
atccgcccacttgggcctcctgaagtgctgggactacaggcgtgggtgagccactatgcttggctgagagtgggtctcataaacccgcttcctcagaggctgcagttggcttctggccta

SEQ ID NO: 31358 - DNA, 120 bp, Homo sapiens
ccacgtgccagctgtgcagcccaggataaccgcttaacttctctaagacctgtttcctcactgtaaatagggttggtgacaacctactctacagttggacagtgaggattaaatagttgt

SEQ ID NO: 31359 - DNA, 120 bp, Homo sapiens
gaacggcacacgtccaagcatcttcagtgcagtaatttttgttgagcatctactacatgccaggtcctcttttagacctgaggctacagccctgagccaatgggtggatacctctgccct

SEQ ID NO: 31360 - DNA, 120 bp, Homo sapiens
ccacggagatgatcaaagttgtctcctatttttagcaagggatccatggacgcgttgtctaaaagttgatgaaataagaaataacaatccaaaaatatgctgtaaagatttggaaataga

SEQ ID NO: 31361 - DNA, 120 bp, Homo sapiens
aaacgaggcaccagcgatcacgagttacttcttgccatttttgaaaagtaatgtagttaacaaaaaaatgtatttggccgacaggggttgggggcggtggtgagggagaggttgttgttt

SEQ ID NO: 31362 - DNA, 120 bp, Homo sapiens
aggcgtgttgttttccatgcaaagctctgtcctgtcctacgtgtctgagtgtcgtgtattactggaacatttttaaagaagtattatttattttacaactagactcccataatatttgtc

SEQ ID NO: 31363 - DNA, 120 bp, Homo sapiens
agacgctgtctaaagttgaagaggcagtatacagagctttcgaacatatcactgaacattgcaaaagtaacttggcagaacaaaatttaaattgagggttggggccgcagcgaaacacat

SEQ ID NO: 31364 - DNA, 120 bp, Homo sapiens
aatcgagaaaccgccctccaaggcttctgattcacagattctgcgaagggactgacggccagaagacagaaaatccagcaacggtaaaaagcggcctggccttccccgggctgttgcgcc

SEQ ID NO: 31365 - DNA, 120 bp, Homo sapiens
ccacgtgttggtttgcagcgtttggcaggggttttggatggtggcctccgcggacgagcgcagggatggagaggcctgggcgttcgaacacccacgttcaaagcaaagcccttccagatt

SEQ ID NO: 31366 - DNA, 120 bp, Homo sapiens
taacgtgcatttgtataactttgggtttaaaggagcctcaggccgagggagggcccgggaaagcgacgctgcgggttatgggactcccagggacccgcccctccgggcagggcctggcgc

SEQ ID NO: 31367 - DNA, 120 bp, Homo sapiens
gcgcgggaatccttcccggggcgccccagctgtgggcgagaacgggactgacgcttgggtcccgacctgggtcccctacctgtcccggcgctcacctggcgggctgctcggaggcggcag

SEQ ID NO: 31368 - DNA, 120 bp, Homo sapiens
cagcggcgggctaagcttccctttcccactttgttctgggaggcagtcgaggggctccccgtgatcggcgtggcccagggggccccgggaccggcggtctgggcggtcggtcctctcccg

SEQ ID NO: 31369 - DNA, 120 bp, Homo sapiens
gggcgtggcggctgcagcccggcgccgggggcggcgactctgagatccagcgggcgggggcgggaggccgcccctcctccggctgcggggcccagcgggagcgagggcgggcgggcgggg

SEQ ID NO: 31370 - DNA, 120 bp, Homo sapiens
ctgcgtgcagcgagggggaggcccagttgccgcgaggccagcggggagcggggccagccccgcgcccctaggatccggggcccacccctgggagagccacctcctctgggtgtgcgagtt

SEQ ID NO: 31371 - DNA, 120 bp, Homo sapiens
agacgcccccgcggggggactggtcctagctccccacccccacccaaattccgtttccttctggtcctggcctcctgcttgcggccgtctccacccctcacatccatgggatcctgcaca

SEQ ID NO: 31372 - DNA, 120 bp, Homo sapiens
ccacggttggtaaaccgcttagctgtgagcccgacccagggcctgattcgaaacacttggatcaaagtccctggccacagggattttcttgtatttacgttgcttcccagggccagattc

SEQ ID NO: 31373 - DNA, 120 bp, Homo sapiens
gcccggggctgatcttaaattaaatcccttcaccacacgcactctctgtggcaatgacaaacctgtacccttccaccttaggactcccctgtcctccccatccccccagctatagacaac

SEQ ID NO: 31374 - DNA, 120 bp, Homo sapiens
atccggaggttcagtttcggtcaggctggggccgcgacccattttctccctttacctctgcccttgggtctttgcagtcccttctgatggccctagattgcaccagggacctcaaggtga

SEQ ID NO: 31375 - DNA, 120 bp, Homo sapiens
ccacgctggtaaatcattctccaggcccactggctcatatctgccactgtgctaaatgctttgtatgcatgacctcctcatggacgcctctcccgagaaactgaagtccagagatacctg

SEQ ID NO: 31376 - DNA, 120 bp, Homo sapiens
gcacgtagtccaagtcgctagcttggaggggtcacacagccagagagcctggattccctaaagccccttcccctagaaacctcagccaggccccacagcgccatcgtgaggacggcgtga

SEQ ID NO: 31377 - DNA, 120 bp, Homo sapiens
ctgcgtgtgcagcgcggagcacagtgctggactcagagccaacgctaatttgactactattacattatttgtaacaaccgcctttgaaagcattttctgctgtgggttgtaaaattactg

SEQ ID NO: 31378 - DNA, 120 bp, Homo sapiens
cgcctgttggttcctagtgagaccccgcccctagcccctcccacgtgctcacagtgcagctcactcacctgacccttcccaccgaggccccgcccccttcccctcccaccagctcagggc

SEQ ID NO: 31379 - DNA, 120 bp, Homo sapiens
ccccgctcctctggcccttctcactgatttgcagcaaagccctgcccctccaacccctctctcgggctcccagaactgccccactcccacccctcccacaggcaaacggtgaagccctgc

SEQ ID NO: 31380 - DNA, 120 bp, Homo sapiens
ctgcgtgccaatgctgcctcgtccctccgacacctcccaccggctcccaatgctgccccgcccctccggcacctcacaccggctcccaatgctgccccgcctctccgactcctcccaccg

SEQ ID NO: 31381 - DNA, 120 bp, Homo sapiens
ctgcggccctgcccctgcggcccctagtaccggtcccagtgcggccccgcccctccggccccgctaccgctcccactgtggcccagcatcctggacttcctcttccgagatcccaccttg

SEQ ID NO: 31382 - DNA, 120 bp, Homo sapiens
ggccgcaggggttgcgaataaggttgcgtccgatgggtctgcgcgcgcagaagcggcccagggggcaaggcctggcgttacgggcgggagactggcagctgcgggcgaggtgcagcagcg

SEQ ID NO: 31383 - DNA, 120 bp, Homo sapiens
gcgcgcggccggtggcgccgtggtcgcgggccaggatcagcagccacagggcctggccgtccaccagggctcgccagccccggcacacttggcggcagcgcccgagcagcgtgcgcgggg

SEQ ID NO: 31384 - DNA, 120 bp, Homo sapiens
ggacgtggctcagcaccaccagaagcagctctgggggtagttggctcaggtccagcgcctcttcgggttccggctccggcgcggggacccgggcggcccggcccctggagaccgaggcgc

SEQ ID NO: 31385 - DNA, 120 bp, Homo sapiens
ccccgccaggcccggctgtggctgcgggagaggaagggtcaaggcgtcagggaccagcagcctccgcggcgcgcagcctctgcctgccctgattctgccagccgcacccccgtcttcacc

SEQ ID NO: 31386 - DNA, 120 bp, Homo sapiens
ccccgtccccaagtccccatcccccagcccgtccttgatagccccgatatcccggagaccccgcggtctgtgtgtatgccccgaattgcatgcaatcagcccccctcggcggccgcaccg

SEQ ID NO: 31387 - DNA, 120 bp, Homo sapiens
caccgcaccccaagtcctaccccggggcctggcggcgctcctcgccgggatgccctagctgtgccgcaagctccccacgcccctctgcgtcctttttactcgccggcccctcccctctta

SEQ ID NO: 31388 - DNA, 120 bp, Homo sapiens
actcgccagcccctcccgcctgctccctcccgctctccaaacccaacctgcttcccgcgacggggccaggtgcagccaggagccaaggcctgctgctcacagccgtcccctccagccggc

SEQ ID NO: 31389 - DNA, 120 bp, Homo sapiens
attcgttagtagcaatgagacgtctggctctgagcaaccattgttattttggtcaggcttctgagtgggaggcctcgtatccgttaacgtgttaaaaaatttccatcacctttaaggtcg

SEQ ID NO: 31390 - DNA, 120 bp, Homo sapiens
gggcgtggttatcttcatttcacaggagaaaacaggctccggctgctaaaaattaatgcaaccaatagtaacaccagccaacttttatggacggttttactgccagccagggtggcaacc

SEQ ID NO: 31391 - DNA, 120 bp, Homo sapiens
agtcgtggcagccctgctggggtttggagccctaggcagcctgactgccaagcttggagctggcctgggagcccagcccccacccttccctccctgcacctgggcaagcccagcctttct

SEQ ID NO: 31392 - DNA, 120 bp, Homo sapiens
gcacggcctctgtggcccccatgaggtcaggagcatctgttgggaagggagcgcctgctggggaagccggcagggcttggagctgcacaggacggcccagggtggggtccctgcctggtc

SEQ ID NO: 31393 - DNA, 120 bp, Homo sapiens
atccggaggcgtgccccttgcccccttcccttgggggtttatgggtgggagggcaggaggccaggcgtcggaggacatcccccagaccccatgctgccagctgggccagccgcccgccct

SEQ ID NO: 31394 - DNA, 120 bp, Homo sapiens
ccccgtccccaggtgtcccccacctcagggtctgccccgctgtccgccctccgggcttagtgaggggtcacatggctgatcctcttcccgtggctctgggaactgcctagtgccccgcag

SEQ ID NO: 31395 - DNA, 120 bp, Homo sapiens
gagcgggatggggcggggcgacaggttcacgatgaagaggcctgggctgggcatggggccaaagggggtggagggacatctgggaggacggagaggccggaggacatgggacgcagatct

SEQ ID NO: 31396 - DNA, 120 bp, Homo sapiens
ccacgagggaggggtgggcagcactcagggcgccagcattgggctcagagaaggggctgggcagagacaaaggaggccccccgtccgccctccatcctgggccccagggcaagcagggaa

SEQ ID NO: 31397 - DNA, 120 bp, Homo sapiens
gcccggctctgaccacccgctggcctcttgggaccagctgagacaggttggctgccgggcccccacccccctcccacggggctcccgctgccaaaccggttcccctggctggctcccatg

SEQ ID NO: 31398 - DNA, 120 bp, Homo sapiens
agccgggaggagaagtaggtgtggaggggctacgtgcatctgcgcgtcctctgtcctctcactagggctacaggacttgctgtgccacgcgctgtgccaggcgcgggggagccagctggg

SEQ ID NO: 31399 - DNA, 120 bp, Homo sapiens
cctcgtcccctggtctcaactcttcccctcttcctggaagccttcctgctgcccaccccgcgtccctccagactgggtcccgtgctcccgtcccccagccctgaccaccctgggcagctg

SEQ ID NO: 31400 - DNA, 120 bp, Homo sapiens
ccacgctaacagatacatacctcacacacacacacacacacacaaaaccacaagcatacagatacgaggctgatccacactggaacacgcacacaggcacaaaaagatccacctttgcag

SEQ ID NO: 31401 - DNA, 120 bp, Homo sapiens
acacgccaagatgttcactcataacagacacatgctcacacaacagtcctgtgatttacacacttccaaatgcatagaaaatactgaaccacagtagcacagtcagtagacaggcccaga

SEQ ID NO: 31402 - DNA, 120 bp, Homo sapiens
caccgtttcaaggagatcctcccaccagcagccccaaaggttccccagcctggccatcaggatggaggtaactctggctccgtctgcagatgtctggccggtgggggaattagggtggag

SEQ ID NO: 31403 - DNA, 120 bp, Homo sapiens
ggccgggtcttcgccccccaacccccacctcagggcccatctgtccatttctcggcctctcatcccccctccatctgtccacctcctggccgcccatcccccccccgcaaccaccgggaa

SEQ ID NO: 31404 - DNA, 120 bp, Homo sapiens
ggccgcttcccccaggaccgctaaggaccccccagttgacatggaccgagggagcggcgaactcccctcccccaaatccacaccgaggcctgggcgccgagcctcagcccccaagccagc

SEQ ID NO: 31405 - DNA, 120 bp, Homo sapiens
acccggggatggacatccaacccggacacaaacacccagagcagctagtcgcgcacgcacatgggcttgggggggacccacacctgggcacacaacccacgcacacacacacctgcacac

SEQ ID NO: 31406 - DNA, 120 bp, Homo sapiens
ctccgatgggcgcgcgacagcgcccagacacacagccggaggggcggccgctcggggggacacgcgtgcacagccggacacgccggccgggctcgacaccccgcgcacacccgatggcca

SEQ ID NO: 31407 - DNA, 120 bp, Homo sapiens
tttcggggggaaggggtgtcaagacatttaggagtgggaggaagaatgctagcttcctctctattccagagtttaccggagctccccatactgtacttatcttccaggaggccctgcctg

SEQ ID NO: 31408 - DNA, 120 bp, Homo sapiens
gtacgtatttcaggagtttctggaaataatggttgattcttataagagaagttgtgctcccttggcttctgacagtctcttctcaggttatgaaagtgagttaaccctaggtaactagcc

SEQ ID NO: 31409 - DNA, 120 bp, Homo sapiens
ggtcgtgctgtaaaaagaactaggaatgggtaagaaggcagataggatccccttattcatccagagatgttggtattaaagggcccttaggcccaactttcaccttgttgcccaggctgg

SEQ ID NO: 31410 - DNA, 120 bp, Homo sapiens
atgcgcggtatttttaaatacattgtttcatttaattcttctaacaagcttcattgaggaagaaacagagttacttgtcatagtcaatacagcaagtaagtataacaggagagccaggat

SEQ ID NO: 31411 - DNA, 120 bp, Homo sapiens
aaacgaatttattcatctatgtaactgaaaagagtgggccacaagggggaggcttcaggctagctgcatctaggttttaaatcatgtgaacagatctccctttccccctcccccatctct

SEQ ID NO: 31412 - DNA, 120 bp, Homo sapiens
caccgtgaaatagaagaggtggcaactggtgacatcatgagacgatgtgtaatctgagcaaccctaaccaagaacttattttccttagtagttccagcaaaaatccagagaggactatcc

SEQ ID NO: 31413 - DNA, 120 bp, Homo sapiens
ggacgcttgtttaacttggagcaaggtttcattttccctcatacctttcctgcttcttacatccaaagggattggcaaccaggccagttcagtctgtttaggggtcccacaggggatctg

SEQ ID NO: 31414 - DNA, 120 bp, Homo sapiens
aagcgcacggaagttcagagagatgtgagtagctcccttagacctgagcccagtaggttcaatgggtctttgtatgaagttctcagtccggggaaccttagtcctttggcagccagaggg

SEQ ID NO: 31415 - DNA, 120 bp, Homo sapiens
gctcgagacacttagaaaaagccttcggagtggtgtccagaaaccaaccacctgaaaaataggtctgttgtttgcccagttgaaataacttttctttagttcctgcctaagaggggaatt

SEQ ID NO: 31416 - DNA, 120 bp, Homo sapiens
agtcggggacttcccaaccagagagtttaggtttggagtcttcaggggaattaagagggcagggagcgattcacctcagaatagagatgggtaaaatctgataaatcagagttgtgcctt

SEQ ID NO: 31417 - DNA, 120 bp, Homo sapiens
acccgaccatccatcctctacccagcattgtgggtctagcttgaagtaatttaaagagcccttggagtcctatcagtaggttaggagtcacactgcccagctctcagagaaggtggccag

SEQ ID NO: 31418 - DNA, 120 bp, Homo sapiens
gatcgccatcaattcatatcttttctcataatttgcagcctactatttcccacttctgaaaaatttttccaatatattttctgtgttaaatccgcttcctttgacactatgacagccagg

SEQ ID NO: 31419 - DNA, 120 bp, Homo sapiens
gaacgagtacccaggttcttctgctcaccaggcagtgtgagaggtgatgccctgctggatgattcatttgttgtgagacatgagacacccaagagttgtagatccagctctccactaaca

SEQ ID NO: 31420 - DNA, 120 bp, Homo sapiens
tctcgggcctcaggatccccatttggacagtgagggggttgttctggtactttccaggtacttcttgggctctgaaataatgtgccaaagaagacagagccacagccaagcatactactt

SEQ ID NO: 31421 - DNA, 120 bp, Homo sapiens
tagcgggatggaccagttagaaaatcttcccctcctccccaccctccccaaaaagatgcacacctactccacaaaccaactcttgagttcagttggttcactagtccccagttaagagtt

SEQ ID NO: 31422 - DNA, 120 bp, Homo sapiens
gggcgacagagccagactccgtctcaaagaaaaaaaaaagttgcctgtctccaagcccttctttagcttggtcccttcaaacctggagagctgaacagtgaggtagatcccctgcttttt

SEQ ID NO: 31423 - DNA, 120 bp, Homo sapiens
caccgaaccaaccttagtacttcctccagttctccagggagaccttgggtgtgggtcagagctgcccagttgtctgcttcctgctcagatagatcaggtagcacagagctgacctaggtg

SEQ ID NO: 31424 - DNA, 120 bp, Homo sapiens
catcgtcagccagtggcagcaggagtccaaagagaaggtggtgtccctcctgctgtcccaccttcccctgcttcagccaggcaacacagaggccaagtcggagtacatgaggctactgca

SEQ ID NO: 31425 - DNA, 120 bp, Homo sapiens
aatcgagagcaatgctttcatcgaggagagtcgccagctgctttcctatgccctcatccacccagccaccacactggaggaccgcaacgcactggccctctggctgagccacctggaaga

SEQ ID NO: 31426 - DNA, 120 bp, Homo sapiens
gagcggttggctagtggcttccgctcccggccagagccctcctaccattcacgtcaaggctcagatgagtgggggggccctgcagagctaggccctggggaggcagggccaggctggcag

SEQ ID NO: 31427 - DNA, 120 bp, Homo sapiens
ccccgggaaaatggacacgtgcccttccacccatccagctcagtgccgccagccatcaacagtattgggagcaatgcaaacacaggtaagtggcgggggtgtcccagaaggccatgccta

SEQ ID NO: 31428 - DNA, 120 bp, Homo sapiens
tctcgctctgtggcattagacaagtcacataagctgtaggcctcaactttatgaggcaatgcagaggctgtgaactggctttcccagagctgaatctgacctacagacatgtcttattga

SEQ ID NO: 31429 - DNA, 120 bp, Homo sapiens
tgacgcttgatggaggtgtgcataccatcatctgagatcccttccagttcagacaacattatggattttatgtatctggcctcactttacagctttgtttctgagaacactgtctgtata

SEQ ID NO: 31430 - DNA, 120 bp, Homo sapiens
gtccgcatcacaaccgtatcattagccctattcaacagatgaggacatcgggactcagaggtgaagtgatgtgttcaaagtcacacgtagaacaagtggtggaacagacccaaccagtct

SEQ ID NO: 31431 - DNA, 120 bp, Homo sapiens
aggcgggagtgagcagaagttgttggtatcccagtgactttttgaaatgcacaggataagggagggtggattttccaagccatggtaaggcagcatgacctgacccagggtgagggagag

SEQ ID NO: 31432 - DNA, 120 bp, Homo sapiens
cctcgggtccctaatgccccgctgtctggtacctggtgctcatcagttattccttgagcctgtttttcccccagttagtgtggctattctggtccatctgcctccctcccagttgctggt

SEQ ID NO: 31433 - DNA, 120 bp, Homo sapiens
aggcgggaacctacgaaacgctctgcaggagctgcagcagatcatcatcactcccatcaaggcctacagtgtcctccaggccaccgtggctgccgccaccaccacccctactgccaagga

SEQ ID NO: 31434 - DNA, 120 bp, Homo sapiens
ccccgggggaaccaccgctgccaggtgctgagcctcccctagcccaccccggcacagacaaaggcaccgaggccaaggaccctccagctgtggagaactacccacctccaccagctccag

SEQ ID NO: 31435 - DNA, 120 bp, Homo sapiens
ccccggctcccgtcgccgacggagacatccccagccagtttacacgggtgatgggcaaaggtgagaccagccacagcctagcaggaaatcctgaggcagaaagccaagtgaacccaagca

SEQ ID NO: 31436 - DNA, 120 bp, Homo sapiens
gttcgatggtgggagcagggctttgtaaagcctactggagactggaacactacagagagtagccaagacagggtgacaaggccccttgcccttgggcacgtctgggctgatggtggataa

SEQ ID NO: 31437 - DNA, 120 bp, Homo sapiens
aagcgtctccaggctgagcagaaatggggcagtgggtcagaagaaattccatgtagtaaagggtgagcagttgaggggagtccattgatttctctcagaggggaccaaagtccaggggat

SEQ ID NO: 31438 - DNA, 120 bp, Homo sapiens
gcacgagccagctggaggctggaacatggcagagggcatactaggggttaacctcctgccctttctcatgtccccccagtgtgcacccaactgctggtgtcccgaccagacgaggagaac

SEQ ID NO: 31439 - DNA, 120 bp, Homo sapiens
tgacgtggcacatgccagcccttccagtcttgtatcttaccagtgttggctttagaggcttcttctcagaacccttgtacacactcttcctctctctctctcttttttttttttttaata

SEQ ID NO: 31440 - DNA, 120 bp, Homo sapiens
ggccgagtgctcgctgccactggggaagggactggcgctgcggctgtggctccggctccgctggccacccccattgctgccgctgtctgaatcattgtcactgccaccttgggcctgtcc

SEQ ID NO: 31441 - DNA, 120 bp, Homo sapiens
agtcggcatcgtcctcagaatcagcatcactgccaaagatctcctctttgtcacgggcagcccgggcctcatcctcgctgctctcgtcctcaccactgccactcttgtcactggcctcgt

SEQ ID NO: 31442 - DNA, 120 bp, Homo sapiens
tcccgttcactctcgctgcccgagtgctcatcttcactgccctccttctcactgctgctgcccttctcctgctcctcatctggaagggagtggagagagatgaaacccacttttccaccc

SEQ ID NO: 31443 - DNA, 120 bp, Homo sapiens
ctccgttcatcagtccgtctctccctccatatttccatctgtccattcatccactcattttgccatccatacatattcacccagccatctcccaatccatcgacataccccatccctccc

SEQ ID NO: 31444 - DNA, 120 bp, Homo sapiens
ctccggggtcttagtactatgatacttcagagacaattccatgctgatacgggggagatcaattttggggctctgggataagtctgtcccacatctgtctgatttcccttggcatccttc

SEQ ID NO: 31445 - DNA, 120 bp, Homo sapiens
tcccgtcagttcctcttgaatatcccagttcttgtacccactcacatacctcagatcccttcactcctccccgcagtttgcagcctctacaattcatccacatgctccctcccccagcaa

SEQ ID NO: 31446 - DNA, 120 bp, Homo sapiens
ggtcgtggagacaaaaggcttttatgttaggttctgtctgcccccttgttccagcagtggtatgcccagtgagaggcacaatttaaacggtttctttggtgatgatattagctactttca

SEQ ID NO: 31447 - DNA, 120 bp, Homo sapiens
agccggttttctcatctacaaaatgaagacaacagtacttccctcctgggatcattgaaagatttagggagcatatccttccacttcccaaacatatttgaacctctgacttgcttagga

SEQ ID NO: 31448 - DNA, 120 bp, Homo sapiens
aaacgtttggtagatggagagtgctgtgtgtttcgggtgacttgtcccagtcacttatgttgcctgcttatcctctgtggacatttgattgccaatctttattgtgacctttggagagtg

SEQ ID NO: 31449 - DNA, 120 bp, Homo sapiens
tctcgtttgcactgttactagtctcacttccccaacactacaccatacttgaccccccacccccgccgctggctcctcttcagttaccaggtgaggcaagagggcactgtgaggcctgtc

SEQ ID NO: 31450 - DNA, 120 bp, Homo sapiens
tggcgctgccttgctcaaacgccactgttgtcagaattaagagaagaatctttaggctgtttttttctcctcctcctcctccttttctttttttttgtagaaaagtgtgtcttgctgtgt

SEQ ID NO: 31451 - DNA, 120 bp, Homo sapiens
gagcgcctactgtatgcctggctctgctgggctaggcttcgttggttactatatcttacttctctggaaaaagacatataaattgaacctgtattttcccctataattattagcctctaa

SEQ ID NO: 31452 - DNA, 120 bp, Homo sapiens
gcccgggatgtccccccccccagttcttctggggtgggggagcgggtccctgtatgtgaagacggaatttcctgcccatttgctcctcacaccttccggaggccaaacgggcagcccagc

SEQ ID NO: 31453 - DNA, 120 bp, Homo sapiens
ccacgacattgcaggtcccagggtgcattggggagttcgcagccttgctaaagtagagggtgactgccattctactcgcgaggtccaaggaccccagggctccatgagggtgttttggcc

SEQ ID NO: 31454 - DNA, 120 bp, Homo sapiens
cctcgctgggaggggcggggagaatgcggccggggcgctccgtatgcatccatgttcggccgggcccaccccagcacccctcctttgcctgtcctcgcagggcccgcctggagcctgctg

SEQ ID NO: 31455 - DNA, 120 bp, Homo sapiens
tggcgcgcgtggctggcaggcggcgcttggcagccggaggcccgtgggcccgggacattcagcgcgcaggcgcctgggagctgcgcttctcgtaccgcgcgcgctgcgagccgcctgccg

SEQ ID NO: 31456 - DNA, 120 bp, Homo sapiens
cgtcgggaccgcgtgcacgcgcctctgccgtccgcgcagcgccccctcgcggtgcggtccgggactgcgcccctgcgcaccgctcgaggacgaatgtgaggcgccgcgtgagtcctgcgt

SEQ ID NO: 31457 - DNA, 120 bp, Homo sapiens
gttcgaccccaccccgtcccagccggggaccccggcccctcctgagcgtcactcgcggcccccagtcccctctcacaacccactcaccctcttcagggtactctagagtcccccaccatg

SEQ ID NO: 31458 - DNA, 120 bp, Homo sapiens
gaacgcgctgactgctgcggatgtatcccaaaccccgcccaccatccagctgccaccttcggagaaactgaggaccctggacctctctccagccctgccttgctactcgagcccccttcc

SEQ ID NO: 31459 - DNA, 120 bp, Homo sapiens
aatcggaagcccacgtccattttctatgctggcaccctccagttccttccctaacccacattcacaccctgtcctgatgctaggactccaaagctcttctaattctgcggccctcccgac

SEQ ID NO: 31460 - DNA, 120 bp, Homo sapiens
actcggaagctttggaatctcctcccagtccactctggccaaggggccctccatcctccctccctagggttgcaggccagaacccatggcttcttaaagcttggaattcttcagacttct

SEQ ID NO: 31461 - DNA, 120 bp, Homo sapiens
tcacgatctcacctgggtgcccctgtcccatcctctttccaagagcacagactccagcccgatggcctgggttcacatcatcactcctccacttcctaggtgggctggtcacctcgtctc

SEQ ID NO: 31462 - DNA, 120 bp, Homo sapiens
gggcggtcacagtaccatctagtcccgatgattatctgtcacaaagatgaagcaaggtggctcagggaacgtgctcagaaacctccctgctttccatcttgtccctggccctccccgacg

SEQ ID NO: 31463 - DNA, 120 bp, Homo sapiens
tgccgagcaggctgcagccctgagcatggcttctgtgaacagcccggtgaatgccgatgcctagagggctggactggacccctctgcacggtccctgtctccaccagcagctgcctcagc

SEQ ID NO: 31464 - DNA, 120 bp, Homo sapiens
gcccgtcctctgctaccaccggatgccttgtccctgggcctgggccctgtgacgggaacccgtgtgccaatggaggcagctgtagtgtcagtgtcacccttcccaccttgtcctgcttag

SEQ ID NO: 31465 - DNA, 120 bp, Homo sapiens
agccggcatctggggccttgaagtaggattaggtgatggggatgggactggggagagcaggctcagtgggtggccccgaaagatgcaggagtggaaatgatgaggagccgtgtggggcca

SEQ ID NO: 31466 - DNA, 120 bp, Homo sapiens
cctcgtggcaggccctgtgcaagatgcaggaattcaaggtcaagagacacaatccctggccatggggatcttccaggctagaggggagatccagcaaacagggaccacgtgacatagagg

SEQ ID NO: 31467 - DNA, 120 bp, Homo sapiens
tgccgggttttgatgtataattaggagttttctgggtgggtgttgtaggtactagggcagagtagagaggaggctgaaagcttgtttggtgaaatactgtctttctgatgcacttttcct

SEQ ID NO: 31468 - DNA, 120 bp, Homo sapiens
catcgactcctgccagggtctgtgaagatggtgcaagtgtggagaggtatccccctgacctcaatgtgtgtctgagattgaggtgatgaccacactccccactgtcgaggaatctctctt

SEQ ID NO: 31469 - DNA, 120 bp, Homo sapiens
ctacgtgaccatgcggttcccagagcctgctgacagcatgatccctccttactccttcccctacacttgctcattaaaacttcaccaaacttcacaggattttggcttttgcttgaaggg

SEQ ID NO: 31470 - DNA, 120 bp, Homo sapiens
caacgtccatctatagcatgtagttgacttcagagactctgacccaaaatcctctgatttgggtcaaacccaaatcagagatttatctgacccattaatcctccttccttcttgcccttt

SEQ ID NO: 31471 - DNA, 120 bp, Homo sapiens
agacgagtatagggtggtggctgtgagatggcattgtgccatgggaagaagtagaccaagaagtgtttcctgggcactgaggagtgtcttctatctcatggtggcctctttaccagcaca

SEQ ID NO: 31472 - DNA, 120 bp, Homo sapiens
caacgataaaattctttgaaaaaaacatagacgcatatcttcatgacatgaaatttggcaatgatttcttggggatgactccaaaagcacaagtaacaaaggaaaaaacagataaactgg

SEQ ID NO: 31473 - DNA, 120 bp, Homo sapiens
tcccgatttaacagtgaccaaataacttcaacagacatgtctccagaacagatataaaagtggccaataagcacatgaaaatatactcaacttcagagtcattagggaaatgcagaatca

SEQ ID NO: 31474 - DNA, 120 bp, Homo sapiens
cctcggcacccagcccaggatcccccagcccctgcccacctcattgatgtgcttgtaggtcttgatgaggtccacagagagcttacgcagcggggctgaggttgcatcccggaaggccag

SEQ ID NO: 31475 - DNA, 120 bp, Homo sapiens
ctccgaggcagtagccgcacatcaggcaatacctgcagggcagggtgaggggtgggcactgaggacgtgccttcacctccgacctcaagaggaagaactgtaagggctgctggcacatca

SEQ ID NO: 31476 - DNA, 120 bp, Homo sapiens
ccacgcaggtgaggagccagctgaacgcgtacctgcgtgtgctcctggggccctgggaagccagagaagggaccatggcccggtgggacggccatggtgggctcagagggccgcagggga

SEQ ID NO: 31477 - DNA, 120 bp, Homo sapiens
gagcgaggcctggagcgggagcccggccggggggcgccttcttgcatcctgcacctcggctgccaccgccgctgagacctgagagcagacaggaagtgggaaaacaacatggaacaaggg

SEQ ID NO: 31478 - DNA, 120 bp, Homo sapiens
aggcggggaagagtggacatgagaaagacagggcacagagagaagaggaaaagggcacaacggagcagcagatagcaatgaagagaaggggcagagaagtggtagccaggtgggggggga

SEQ ID NO: 31479 - DNA, 120 bp, Homo sapiens
gggcggatgggaggggctgagaagacttgaggaaggatgtcgcggagaagagaagtgaggggaggacaatcaggatcccgaaagccacagaggagtaggtgggtggaaaagcggtcacca

SEQ ID NO: 31480 - DNA, 120 bp, Homo sapiens
ctccggccgcaatcagcagctgttgcgtagcctatagccttggccagcccgaaggtgagcagtcccaagttggtggtggcctcggccgtgtggatcatgtcagctgtgccgagctccact

SEQ ID NO: 31481 - DNA, 120 bp, Homo sapiens
atacgagaactcactgcctggcacagcctcccaggtgagcttggcccccactgcatgcccatctatggtcagcccgctgatagccttcgtctgtgccactaccagggccacgccctcaca

SEQ ID NO: 31482 - DNA, 120 bp, Homo sapiens
ggccgccacatctgggatcaggaccaggtaggggtcataagtcacttcattccttatggcacctgtgccaaacaacaggacctggatgcccacatttgcagacaggtagagtggccagga

SEQ ID NO: 31483 - DNA, 120 bp, Homo sapiens
ggccggacctcaaactctaccacatcacctgcctggagcccacgggagccagtgatacccccatggttgtaggtcagctttgtggcctggctggccacaacgaaggccaaatcatagcga

SEQ ID NO: 31484 - DNA, 120 bp, Homo sapiens
cagcgtgggtactacatagtgggtgccccaggcagacgtgggtagcagctgctcaaccacatggttgcaggtcgtatgtttctgcgcacagctgtggccagagaggacagccacggggct

SEQ ID NO: 31485 - DNA, 120 bp, Homo sapiens
ccccgagagatccactgagctctgtagctgggccacattgtagggctgtagagtcactcttaggacatcgcctgctggatagaacttgccattgaatgtcactgaccccttcagcgtgac

SEQ ID NO: 31486 - DNA, 120 bp, Homo sapiens
gaccgaggcacctgcggcaccggccaccacggcaaactccttgacattcctggctgaggtgccggggggtgtgagcacaaaatactcggtgcctagggcctggatgggccgcagcagtgt

SEQ ID NO: 31487 - DNA, 120 bp, Homo sapiens
ctccgctgtgtcaggcttggcatttagtgcctgcacagagatggcatagtcagaatggatcaccaccgcatgctggaagatcttgctgcctatcatctcagccttggcactgatgttgac

SEQ ID NO: 31488 - DNA, 120 bp, Homo sapiens
gaccgactccccgggcctcactgtgaccttctttgaggtgttgtctgcctggctgaggatggagactgaagcggggctctctgacagactggagataaggaggcgggggtaggccttgct

SEQ ID NO: 31489 - DNA, 120 bp, Homo sapiens
actcgcccagtagtatttatccaagtgcagcaggaggtatggtgactgtacaaacatcttcctgttcagctaataagtaacctagaagtcttgcacaatgattaacttgacatgaaacta

SEQ ID NO: 31490 - DNA, 120 bp, Homo sapiens
acacgagcttctttttctttgtaatatctcatttaaactgatcccaattacagaggatgcatccaagggggggaatcttttgggacgtctgtagtgtttcccatggtagagctggtgtcc

SEQ ID NO: 31491 - DNA, 120 bp, Homo sapiens
cctcgtctctgttcctttaatcttgtgttttcaagaatgtcatacaaatggaatcagaaagtacgtcacctccagtcctatgtacccatttgactatggaaaatttccactcgaatgtcc

SEQ ID NO: 31492 - DNA, 120 bp, Homo sapiens
ttacgtggacctatgggtgctacttaggacgtaggtccagccagaagtcagagaaggctactggaactgccagttcaggacccttgagctcccctgttacatgcctttgtgcaaattagg

SEQ ID NO: 31493 - DNA, 120 bp, Homo sapiens
tctcggtataatttagatctgcacaaactttctatcatgactcacacttcctgaaaccctggagcctcccagatgtgaaatcactgagagctggctcttcagaaacagtgactcctttaa

SEQ ID NO: 31494 - DNA, 120 bp, Homo sapiens
aggcgggcttggaggacgtctcttgtgggtctaggtcttataaaactgactcctgcagggctgcctgggactggtgggaaacccttggtgactagggtcagggcttcgcagagccccagc

SEQ ID NO: 31495 - DNA, 120 bp, Homo sapiens
cagcgcagggtgagattggaagaattacacttccgcccaggcgcagagccctggcacagggtaggattggaagaattacacctccgcccttcggccaacgaccaacaccttcggagtctg

SEQ ID NO: 31496 - DNA, 120 bp, Homo sapiens
gtccgaggagacttcaaggcagagctggcaaggtctgggagggagcgtgggcttgctgcgttctccccgcgccccgattcctaccctcccgaaggagtagctgctctcttgtgggaaacc

SEQ ID NO: 31497 - DNA, 120 bp, Homo sapiens
ccacgcatagggagtggggtgggagggagagcacagcgccctgctctttgtgaaggctgcccccacagggacgctggcaggatccaccccataaacagtacagtctgggatcaacgacac

SEQ ID NO: 31498 - DNA, 120 bp, Homo sapiens
ccccgagcctgctcacccccaccacatgtcttggttcggatgacttggcagggcgcagcaacaccttgccctgcccgcctggcctaccccaagactgtgctttgtaccagaagattaggg

SEQ ID NO: 31499 - DNA, 120 bp, Homo sapiens
gaacgggtgcctggtgttctggaggacccggctctcggtgactgtgtgagcgacttcatcctgcagacagactgcgggtgaggggctggtgggcaacaccacacctgcccactccgcccc

SEQ ID NO: 31500 - DNA, 120 bp, Homo sapiens
ccccgacgaaggggagcaaggccttgtgaaatgcaattccattcccagccataaatgcagaaaatcacaggagtgaaaagtgaaagcctgcaaaccctcagcaaatagcagacccagacg

SEQ ID NO: 31501 - DNA, 120 bp, Homo sapiens
tgacgtccctgcaagggagacaaacagacatcacgagagccccgaggtgccaccacaggctgtgggaagtcccacctagaaagcattcttgcccaaagaaggaaaaacagtgcttcttgg

SEQ ID NO: 31502 - DNA, 120 bp, Homo sapiens
caccgcctgggaactggcagcaatgcaaattcctgggacctacccccaggcccactgagtcagaaactcggggtgggcccagcactgtctcacaagccctttgggtgactctaattcagg

SEQ ID NO: 31503 - DNA, 120 bp, Homo sapiens
caacgtgaacacaggctctctctggggcaagtttatccccaggggacacctgagaatgtctgaagtcttttttttttttttccctttttttttttagctgggggtctggctctgtcgccc

SEQ ID NO: 31504 - DNA, 120 bp, Homo sapiens
aggcgtgagctgtggcgcccaacccaaaagtcatttttgattgtcacaacttggggagctagtattggcttcagtgggtagaagccaggggtgctgctgaaaccctagaatgcacagggc

SEQ ID NO: 31505 - DNA, 120 bp, Homo sapiens
ccccgacagcgcagaatcatctgtcccaaaacgttaacagtgctgaggctgaggaaggctgccttaggcccaatcgtcacatcaggaatgaacagctaatttggttggctctgatggcag

SEQ ID NO: 31506 - DNA, 120 bp, Homo sapiens
ccccgcctgctctccagcctcactggtctgctcgctccaacacacaatctccccttctcctggccccatgaagactccctgctctcacaccccaagacctttgcacatgctgtacccctt

SEQ ID NO: 31507 - DNA, 120 bp, Homo sapiens
tcacggaggccttccctgaccacccctctcccacgagcagcggactctcagagctcagccttcccttcccctcacagcacttgcctctgtcacctgcatgactatgtgggtaatgtcgcc

SEQ ID NO: 31508 - DNA, 120 bp, Homo sapiens
gctcgggtcaccagggattcagcagtgaccaaaacagaactccctgccattggggagttgggggaatgagggaacaggcagcaaaataaaaaataaatacatacgcaaattagacaggat

SEQ ID NO: 31509 - DNA, 120 bp, Homo sapiens
acacggaagattcagtgcagggaaagggagcaggggtttccgactatacacaggatggtgacagaagggcgcactgaggcagcgcagtctgagcaaaaccggaagcaggtgagagagccg

SEQ ID NO: 31510 - DNA, 120 bp, Homo sapiens
gaacgctgcaggcaggggaggagcagggctgaggcgcgttcgaggcgcctacaggagtgggtgaaggggagggccgggagatgtagctagaggaagctggggaccgctgggcagggcctt

SEQ ID NO: 31511 - DNA, 120 bp, Homo sapiens
atccgcctgaggcgagctggggagtgggggaggggcagcaggtggaaccccttgcacccagggcagggcaggagtccttagggaggcagcccttcctctccaggagctgtccccagaata

SEQ ID NO: 31512 - DNA, 120 bp, Homo sapiens
aaccgaggatgggagagattcggtgaatacccacagcgagagacagcagggacacagccaaggagcccggacccctctcctccgagccctgagctgcctccacctccttctgcctttgct

SEQ ID NO: 31513 - DNA, 120 bp, Homo sapiens
tgtcgcctcctcccacaccccggccagcccttccttaccgcccctgatgtgcacgcatgcacgggagccctccagttggactgcatggggaatccctgacccacgtcgctctgcatcgcc

SEQ ID NO: 31514 - DNA, 120 bp, Homo sapiens
ccccgttcctcacatgggaaaactgaggcccagggagagagccacatgcacacagtcacagcgagtaggtgcaggagagggaccgcaaccagagcagaactagcccacagacctttccat

SEQ ID NO: 31515 - DNA, 120 bp, Homo sapiens
acccgccaaggccttcggacaccagtttgagaagctgggctctagggcgccctgtctccaaagcagaatatggtctgctttctccatccctggctgccacctgaatccagccagctctct

SEQ ID NO: 31516 - DNA, 120 bp, Homo sapiens
ccccggctccagctacatgggcctgctgttccaccagcacatccagatatcgccttccttgcggcctttacctggctgcaccccgtccagcccacttcctcgggctctcacatcacaggg

SEQ ID NO: 31517 - DNA, 120 bp, Homo sapiens
ctccgatcgcatccagaactacacgtggcacatagaagtgattcaatcaatatttggagacagatggaacacacaaatgaccaagaacagccaaaggctggctcctgaggctgttcagca

SEQ ID NO: 31518 - DNA, 120 bp, Homo sapiens
cttcgccgacagagcagggttcaaccatcatgcctattactgacttccagcaaatccaataacctctctatgcccgtttcctcccctgtacaacggggacgatcgggacagcgagctgcc

SEQ ID NO: 31519 - DNA, 120 bp, Homo sapiens
aggcgaactactcacgagaatgaccccaatattctatgtggcttcctgggcctcagtttcctatctacgagatgggagtgctaacactgcccacctcccaggctgctgtgcaggtttgta

SEQ ID NO: 31520 - DNA, 120 bp, Homo sapiens
cagcgtctggttgggcaggagtacagtggtgggagtgattcacattcctgtctggagccctcccatcagctaacaggccctaccactctctcccaaggaccaacaacgagcctgtgccca

SEQ ID NO: 31521 - DNA, 120 bp, Homo sapiens
tcccgccgcctcctcaggaggcctgtgctttccaacgcagcagctccgtgcatcctccccaccgccccactcagcaggaaggttcccgtttacagctgagcaaaatgcaccttagggaga

SEQ ID NO: 31522 - DNA, 120 bp, Homo sapiens
caccgagaggggtgccaagagcagggttctcacccacgtcagctacccccgggaccaggtcactcagcagccccagctgggtaagtgtacaccaaaaacccaccagaccatgaagaactt

SEQ ID NO: 31523 - DNA, 120 bp, Homo sapiens
aaccggggagcggcaactgccccagcccattcggaaagggcccacaaagtggcaaaccgaggaagacttgggtttctggcctcacccttagaaacaacatctgcgaacgagcttctccag

SEQ ID NO: 31524 - DNA, 120 bp, Homo sapiens
ggacggctgggctgaagaaactcctgctgggacctctgacatgcagtctcctcttggccgacccggcttgctgtccctcgctcggcacagtcagagcacctgggccctgctgtgggtgcc

SEQ ID NO: 31525 - DNA, 120 bp, Homo sapiens
tgccgagttggcagtgggtcctgccccaagggggccaggctgagctcccacccagcgcccctcccacactcactccctccctcctggtcctgctcccaggctgtctcccccagctgggcc

SEQ ID NO: 31526 - DNA, 120 bp, Homo sapiens
tctcgctgcttggctggctgtccagaagagcctgccatggaaccaccccaccgtgcggcccggaggcctgtggttgagggccttccgctgagagctctgggaagctgaagagaggcccgg

SEQ ID NO: 31527 - DNA, 120 bp, Homo sapiens
tcccgggggccttctggagaccctagtggtttgttctgaggggttctgctccttctaggaagataccctggaacacacctcaaaaaaaaaaaaaaaagccagagcgcctgctcccgcacc

SEQ ID NO: 31528 - DNA, 120 bp, Homo sapiens
aagcgggaatcagagaagattcctcctgggtctaatgggtcttcacccagatcctcccatggctccctcacagcactccagtccctacccacacgtcacctcctcagggaggtcctccct

SEQ ID NO: 31529 - DNA, 120 bp, Homo sapiens
cttcgtaatatcaaccacacctgagcccaaccagagacctgggtgctgggcgccagtcacaagccctggtctttccaattccagaggagcactgggaatggcgcaggcctacaggcccac

SEQ ID NO: 31530 - DNA, 120 bp, Homo sapiens
ccacggcagcgtggacgcagggtcagcgggtgctgtctgtatcaggtgtgactgctgccctgcgttgctattcagtattagtccggctggttgggttggggaggaatgggcagagaaatc

SEQ ID NO: 31531 - DNA, 120 bp, Homo sapiens
ccacgggctctggagaacacggtgtgaaaaccacaggagggaggcaaccctcaggcctttgctggctgtaaggcagtgatgctactggaggggaagtgggaggcctgtgaaacgccctgc

SEQ ID NO: 31532 - DNA, 120 bp, Homo sapiens
ctccgctcagtcaaatctacccacgcccccaggcaggagcctgtgaccggctcctgggtcacctgctaacaccctgaatctgaccaggctgttcctgctgaaattccaaactccttcaca

SEQ ID NO: 31533 - DNA, 120 bp, Homo sapiens
ccccgcagccccaggactcatctcctccctgctccctcgctctgccaagccacacaggcctccgtgaggcttgtccctgcacctcaccaagctctgtcctcccttcagacctttgcactg

SEQ ID NO: 31534 - DNA, 120 bp, Homo sapiens
agccgcatgcatctaaagaagtgcccagtctgtcacctgatttgaattcgctgcctagctcctccccctctaaccggctccttgcttattaacctgtttcgggttggtcttgcttagccc

SEQ ID NO: 31535 - DNA, 120 bp, Homo sapiens
caacgctggcacatacgaggtgttcagtaaatggtggcggatgagtgaaaccttttcctcggctccacaatacccttaggatccatcctcacctctcacccaggcccacaggccagtgca

SEQ ID NO: 31536 - DNA, 120 bp, Homo sapiens
aggcgctcagggctgcaaagccactgcgtggaagaggagtgggcccgggagctgcccttgtcagttctgacttgattgcatgtctcccccgacctctgtttctgcatctgtaaaactgag

SEQ ID NO: 31537 - DNA, 120 bp, Homo sapiens
acacggttctgtgaactggcaaaggccttcaaagtcccggcagaaatactaagaattacaattgctaagacagaccaacagctcaccatgtgtcgggcactgttcttagtgaggagacat

SEQ ID NO: 31538 - DNA, 120 bp, Homo sapiens
ttccggtaggcttattgtatgccagaacagttatgaatgcttcccacaaattaatccactcagccttcacaataatcctatcaggtgggaattatcatcatccccatggcaccgatgatg

SEQ ID NO: 31539 - DNA, 120 bp, Homo sapiens
gcacggctggatttgaaccctgtgctctcactcgcttccatacacctctttacagaggctggaaaccagaacattgaagttctggatcctagctgggccaggctggggagctggatcccg

SEQ ID NO: 31540 - DNA, 120 bp, Homo sapiens
gctcgaggggaccaaaagtagggggtgggggaggctggatgcctccgttccataacataatcatgactgccaaccaagacttacacagtaccaggcaccattctaggagcttctcgtgga

SEQ ID NO: 31541 - DNA, 120 bp, Homo sapiens
ggacgtccttctgagaccactgtatgggagtgaacagtgtggtccaaggtcgcagagctagaaccgacttcaccgtcctgctgctagctaacgcaggtccctggtagctgtgtcaccccc

SEQ ID NO: 31542 - DNA, 120 bp, Homo sapiens
atgcggtggaaggcaattcttcctctgaacttcaatttcggactctgcaaaaaaggacacaaataccatataaagcccaaagcacagggctgggcagagtatatgctcacagacaaaagc

SEQ ID NO: 31543 - DNA, 120 bp, Homo sapiens
agacgatctgaggccaaggttggccaagggctcacatcacacctctcccacttcagctatgagacctctgggaaatctttgcacttcacagtgagtgaaatgattcctcatctgtaaaat

SEQ ID NO: 31544 - DNA, 120 bp, Homo sapiens
gctcgtagctctccataaaataggcctaaccacaggtatgttttgagacttaagtgagatcacatgtacaaaagccctgtcacacgcctggcatggggtgaatgctataaacactgggca

SEQ ID NO: 31545 - DNA, 120 bp, Homo sapiens
acacggacatagcaagggacacatatgttgattatgtgtgattaaaatgtatacaagatacgagggcgtacacagatctcaccaactagcatgtttcaagggcttactgtgcttcctgcc

SEQ ID NO: 31546 - DNA, 120 bp, Homo sapiens
ctgcgccctgccaatatggctaatactggtttatagatgaggccagcagggctcagaagtaaagccccatgctcagcatcactcagcaagaaagtggcagaggtgtgatctgaaccatga

SEQ ID NO: 31547 - DNA, 120 bp, Homo sapiens
agccgaagtccaaactcaaggtgtagcagggccatgcgcctccagaagctggaggggagattccattcctcacctctcccagcttctagtggctccaggcattgctgggtttatggccac

SEQ ID NO: 31548 - DNA, 120 bp, Homo sapiens
gcacgtaagttccggggattatgcttgcgtgggacacatcttttttgaggccaccattcaacccactacaaaatccaactgaagcccagcgaagtggctcatgcctgaaatccccgcact

SEQ ID NO: 31549 - DNA, 120 bp, Homo sapiens
acacgtgaccctgttctactcatcacagtccaggcagccctgcaggatctggccctatcacctctgtgacatctcctctcccactccccccagcccacttcactgcagacacactggcat

SEQ ID NO: 31550 - DNA, 120 bp, Homo sapiens
gcccgcccaccttcctgcaggctgaggctcctggcggcgggtgagtcctcgcgcagctcccgaacgaagattccctctttgccgccgcccgctacgttgatgccgctgaccccggtctgc

SEQ ID NO: 31551 - DNA, 120 bp, Homo sapiens
ctgcgcctccgtctccacgataatttccaccaactccgcccgcctcagctcctgcagagggcggcgaggtgtcgcgttggggctctagggccggacctcgcccagagcccgccattgcgc

SEQ ID NO: 31552 - DNA, 120 bp, Homo sapiens
ccgcgcccggccaaaagcggctgttcagcgggccttcagggcacacgcccctcggcgctgccctcgcaggacgtcggggcacacccactccggcgtctcccctttaagcaagcctgaggg

SEQ ID NO: 31553 - DNA, 120 bp, Homo sapiens
acccgcggaacggttaaacagctccgcgggccggctggcctctccgaggccctggagcggcagccgaaaggggttaggggaggagacggggttgtaaggggagggactgcgtcggagtgg

SEQ ID NO: 31554 - DNA, 120 bp, Homo sapiens
tcacgaatggtgtgtctctctgtgtgtctctatctttgtgtctctctgttcttctgtttctctctgtccttattctttgtctctctttcctagtttctttctgtctcattctgtctgtgc

SEQ ID NO: 31555 - DNA, 120 bp, Homo sapiens
gtgcgtttctctctccctctctctctgtcatgctttccctcacccaagggggtgtggccacgggaagctaagttgggggtggccccagtgtcctggttccggctgtggccaccgcagtaa

SEQ ID NO: 31556 - DNA, 120 bp, Homo sapiens
ggacgcttcttctcagggaccaccctctccagactcagtctgagccaagcaggagccttggcctgccctgcgtggcctagccactccgccccacccagtccagccaagggacactggtgt

SEQ ID NO: 31557 - DNA, 120 bp, Homo sapiens
cctcgatcccaccgttcacgcccacccccacaccccagtcctctctcctgagctcccggcccagggcccgggcagctccatgccttcccctgggtgtctccccagcctcttgcaccccct

SEQ ID NO: 31558 - DNA, 120 bp, Homo sapiens
ctccgtccctccccagattctccacccctgggatcctgggctcctggcctccagtgtcacctccccgacgatgccacccacctagtgaagggatccttttacttcatgactccccagcat

SEQ ID NO: 31559 - DNA, 120 bp, Homo sapiens
ctgcggacccttccagtcttgtcatttaccttactgctttcctcctccttccagccaaacccagcagcttagagatccctgaaaatgttgtagggtctctctctcagtgacccttgctgt

SEQ ID NO: 31560 - DNA, 120 bp, Homo sapiens
acacggatttgagatttcccaggactggctttaatttgaaaaatctgattggggtctcttcccgtatcagagaaggaacagcccaagctatgaccccagggccagggaattcagtcccca

SEQ ID NO: 31561 - DNA, 120 bp, Homo sapiens
ggacggatgtgaagttgcccaggactagattctgtctctccaaagtggcccaagccctgttctctgtactagggaagccagctgtgtcttttcgaggacagttggtccagccagcaggct

SEQ ID NO: 31562 - DNA, 120 bp, Homo sapiens
gcacgagggctcagcgccctggccccggcggtcgctccagtgcctgtgtgcccaccagcacatccatgaggtagtccaattcggcctcgtccagctccggagcttcctccttgcccggcc

SEQ ID NO: 31563 - DNA, 120 bp, Homo sapiens
ggtcggggtaaccagacacacacacacatgcaagacagtttgtggaaccctgaaatgggaacaaaggaggccatagtcactgcttcgagcccccacaaaaacacacacccagagttgcat

SEQ ID NO: 31564 - DNA, 120 bp, Homo sapiens
caccgaagatgacatgaggaaggatcgatcccctctatcacagttttaggaccccagaatgatttccatgatgtgatccagttcattccactcccaagaacctggggcacagaagaggtt

SEQ ID NO: 31565 - DNA, 120 bp, Homo sapiens
gcccgtgcaggctccttttctaccgcagatgtgtcaatgtccagaaagaagtcatccaggccagagtcccccaagtaccgggagctcagagcttctaagaagactggatcaggctggggt

SEQ ID NO: 31566 - DNA, 120 bp, Homo sapiens
cctcgcccaggaagaggggctcggggggcagggcaggggcgggagccaggcgaagtgcagcctgcagctgttggagggtgttatggatgaggacatgcctgcggaggctgggtgctcggg

SEQ ID NO: 31567 - DNA, 120 bp, Homo sapiens
ctgcgctggactttgtctagggagatgcggagcagggcttgctggtagctctgaaggcctgctggactccactcccacctctcctcctcctcttccaaatcagagtgtttcctcttcaag

SEQ ID NO: 31568 - DNA, 120 bp, Homo sapiens
aggcgcataggggaaggtcagacaccagacaccgtagtgctggctcatatcccactttctcaggcctattgagttgttagtgatttttaatcatcggaatctcagtttactgatgtataa

SEQ ID NO: 31569 - DNA, 120 bp, Homo sapiens
atacgattaagaaaataagatctggcgttacgtacagctagatttaaatctcacttacttgcctgttgtggcctcaaacagtgaatttacatccatgagaatcaatttcctcatctgcca

SEQ ID NO: 31570 - DNA, 120 bp, Homo sapiens
gcacgtgctgtgccctctgcctggaacaccctttaccctctttacccggtccccccagtaacttgtacttcctctgtcacagccctctttatgctgacctgcagcaaaccaagcaccctg

SEQ ID NO: 31571 - DNA, 120 bp, Homo sapiens
ttccgtgattggacctcagcttcctcatctctgaagtgaggatcacagcaccagcctccccgtgctatgtgaccacctttcataggggaatgacacaagatctgtgctgccctcacacat

SEQ ID NO: 31572 - DNA, 120 bp, Homo sapiens
ctccgagactgccacgaggtaggaactccaggtgtgctggggacggagacatcccctttagtcgggagggaagtgcttctcggccgaggtgggggtggggacgccccgtctaagtgggtc

SEQ ID NO: 31573 - DNA, 120 bp, Homo sapiens
ggtcgcggagcgatgctcgctctaagccgccagggggcgcgcggagccgggtctcagtgcgcatgctccgcaagtccctgcccgcccacgccgactccgggaaacgaaggaggggccccg

SEQ ID NO: 31574 - DNA, 120 bp, Homo sapiens
gggcgcccctggcaaccgcgcgtgtccgcgcctacgggtcccgcggggacgcgcgctgatctcacctttctctcctgagatttgtgagaatcgctctaccccaggagaggggcggggcgg

SEQ ID NO: 31575 - DNA, 120 bp, Homo sapiens
gggcggtggggataagggccgagggccgtgggggggccagcggccctgcgccctcctgcagccagcgatggctctgaaccaagccctcgcccctttaaaggtgttcagtaatcaagcccc

SEQ ID NO: 31576 - DNA, 120 bp, Homo sapiens
ggacgatctcccctaatccgagatggtccaggcccccttccttattagtgacggttcaggagacctgctgtcttcccctccttcccttgcattccatagaaacgattctagactttggcc

SEQ ID NO: 31577 - DNA, 120 bp, Homo sapiens
ccccgtacctaagtttcttccaaccaaagctggttcaggaaccaggtctaacccctaaacccctcagcctcaattaaagacgattcgaccctcccccctatgttgaacacccatgggaga

SEQ ID NO: 31578 - DNA, 120 bp, Homo sapiens
ctccgcacacggaataaacaagggcctccataccgtgcccccctcccccataactggggtaggccgggacttgagccactggaggaaccccctgttccccctcgcccccactggagattg

SEQ ID NO: 31579 - DNA, 120 bp, Homo sapiens
ggtcgccctcccatatcccctgtccacatgtggtggccaggagcccgagcttcttcccattagagatggttcaggaggcccccacccagcccctcaccataatccccactcccttagtga

SEQ ID NO: 31580 - DNA, 120 bp, Homo sapiens
aggcgctccctcccggcattagatttggtccaggagcaccccccatccctcatgagattgttctggatcaggcagcaatcatctgagatggcgcagaagccccccacccgaagccttggg

SEQ ID NO: 31581 - DNA, 120 bp, Homo sapiens
gcacgagactcctgggcccttttcccagcagagggagcccgaggcaggaagtgactgtgtgggccagggcacccagacggagcccagctgcccctcaggagctgctactggggaagggac

SEQ ID NO: 31582 - DNA, 120 bp, Homo sapiens
gcacgtttcctggctgtcccatccacccttagggcactggggccaggctgggctgagggaggtactggctcggggtctgaggggtgtagtggtgtgcagtgtgtgagcgatctgtccccc

SEQ ID NO: 31583 - DNA, 120 bp, Homo sapiens
tcccgtcgccatctctgtgtctctctcttccctttgtgtccctctctgtcctactctctcactcccttctctctgtctctttatttattttgagacagaatcttactctgtcacccaggc

SEQ ID NO: 31584 - DNA, 120 bp, Homo sapiens
tcccgtgttcctcatgtcctccttgtgtcctctccctcatcccgtaccacacccgctgctgcagcaggctctctgggaccccacctcccaggtcctggccacgtgacccagaatcctctc

SEQ ID NO: 31585 - DNA, 120 bp, Homo sapiens
tctcggggcctgttgccaagctgtgcttcctggccaagaagccagatggtggagtctcaagtcctggctccccagccctcagggacctggccagctggtcggcctcagccacaggctcct

SEQ ID NO: 31586 - DNA, 120 bp, Homo sapiens
tggcgcgatctcagctaattatgtcttcataattcacaaattatgtcttcaatttatgaaggtgctggctcggggtctgaggggtggagtgatcagtaactcaaattacgtcttcacaaa

SEQ ID NO: 31587 - DNA, 120 bp, Homo sapiens
caccgctttcttctgtgttggcctcatggtcagggagtccctgatgttggcaggatgaccccaggatgcccggcctacctcctcccaacttaggaagcccatgggaaagagagcatctct

SEQ ID NO: 31588 - DNA, 120 bp, Homo sapiens
cagcgagaccccacctctaccaaaaaagaaaaagtgggaagagttttcattggcccatctaaggttacgtgctcatatctgacccaatctttatgaccagggtgttttcagtgttctgct

SEQ ID NO: 31589 - DNA, 120 bp, Homo sapiens
tgacgccagcctgggaaacataataagactctgtctctacaaaaaatttaaaaaattaaaactttaaaaagtacagagtccaggagaggccaagagtcagacagacagatgcatcaaagg

SEQ ID NO: 31590 - DNA, 120 bp, Homo sapiens
ggacggggctggggagcagtgggtgggttctggaggtggaggagagggcccatcctctgtgaggggtcaccacggaaggaaaggaatggaagggctcccggctgcagcctgtcctgcccc

SEQ ID NO: 31591 - DNA, 120 bp, Homo sapiens
tgacgcggcaggctccttcctcctcctgggctgcaacaacggctccatttactacgtgggtgagcagcagcctgtgtcccgggtgcccgagaccctcccctgggagaggggaagggaggg

SEQ ID NO: 31592 - DNA, 120 bp, Homo sapiens
acccgctccaccctccctgcccaccccagatgtgcagaagttccccttgcgcatgaaagacaacgacctccttgtcagcgagctctatcgggacccagcggaggatggggtcaccgccct

SEQ ID NO: 31593 - DNA, 120 bp, Homo sapiens
actcggccccacccacctgagaggggcccacgcgctggacacccccctctctgcacccccccactgctctcctctcggggtctgggcgcgcgccctcgtctctagacccccttagcctgg

SEQ ID NO: 31594 - DNA, 120 bp, Homo sapiens
ttgcgacgcacttgaaccggagctggaagctccgccactgagaccctctgggctgggagatgtctgcaagaacggcacctttctcctggtcaggcgggaaactgaggcccaaagaccaag

SEQ ID NO: 31595 - DNA, 120 bp, Homo sapiens
aaacgctggcttctggacacacatcgtggaagggcaagaacgggctagaactcaggctctgggattctcagtcctggactgtgactcccgttatccccctccacctcagcaccctgctgg

SEQ ID NO: 31596 - DNA, 120 bp, Homo sapiens
tgccgaggcctgtgaaaatggcgccacctgtcggccaggctcaggatggcgtctgagtcccggaccgggatgtgcgggagggcggggttctagattcccagacagtgcgggcttagaaat

SEQ ID NO: 31597 - DNA, 120 bp, Homo sapiens
aatcgagtcttttgtttttgtttttgttttttaatcacttttaaaaggctttaaaataacgtattttttcaataaaatcgtacgccaaaatctcttcataagacaaaagtacggtttctg

SEQ ID NO: 31598 - DNA, 120 bp, Homo sapiens
gcccgaagtctaagccaatttgcctcccattgtacagatggagaaactgaggcgtggggagaagaacctcgttagtcatatacctgtttcaagccccctcaggatgcgtcttggtttccc

SEQ ID NO: 31599 - DNA, 120 bp, Homo sapiens
ccccgattgccctcctttgcagagttctggggtgctaggggcctgagtgacttccactccactatttatagcgttgctgtttgtcgctgctgcccgggccagacgtctaggaggagccgc

SEQ ID NO: 31600 - DNA, 120 bp, Homo sapiens
atccgaggtgggttctggaagatggagtatgagtagggggcaaaagggaataggaggagaggggcagggagctccccatccctcccctcatcccagtgggagagctggatgcatttggta

SEQ ID NO: 31601 - DNA, 120 bp, Homo sapiens
gtccgtttctatttcatcccttgcctgcctatctcaggctcttcccatctctgcattatttctgtctctttctgtttctttctagttacctgtctcttttcctctctctctttctccctg

SEQ ID NO: 31602 - DNA, 120 bp, Homo sapiens
gggcggggttactgcgatgtgggcggagcttgtctgggaggccgggtcccgtgactccgcccaatctcccgcgtaccctagacgtgaacgagtgcctggagggcgatttctgcttccctc

SEQ ID NO: 31603 - DNA, 120 bp, Homo sapiens
tcacggcgagtgcctcaacactgacggctcctttgcctgtacttgtgcccctggctaccgacccggaccccgcggagcctcttgcctcggttcgtacccgggctgatcctggccccggaa

SEQ ID NO: 31604 - DNA, 120 bp, Homo sapiens
aggcgggacggggagaagagggcgaaaaggggaaaacgagtttttagccggggtattccagcaggatcagggggcagctggtgggagtctcgaggcagtgagggggggcggggcgtggag

SEQ ID NO: 31605 - DNA, 120 bp, Homo sapiens
ggccgagtctgggtatttggaccgtgattgtaaagaagctgttctaaacccgtcggggggcggtgtttgcagggagggaagtagcgtgaggcaggttggggaaggcgtgagaggcctagg

SEQ ID NO: 31606 - DNA, 120 bp, Homo sapiens
agccgaggggcggtggaggggtgtggcctagaatgttaggcggagcgggaggtgggccgggccttcggacgccctgtcccgcagacgttgacgagtgcagcgaggaggacctttgccaga

SEQ ID NO: 31607 - DNA, 120 bp, Homo sapiens
gagcggcatctgtaccaacaccgacggctccttcgagtgcatctgtcctccgggacaccgcgctggcccggacctcgcctcctgcctcggtgagaggccccgccccggcctgatccctcc

SEQ ID NO: 31608 - DNA, 120 bp, Homo sapiens
cttcgactccccgactcgccgattggcctcccacctctgtctttcctcctccgcttctcccctccccttacctctttcccccgcctcctctcctagcctccccaactctcctctacccca

SEQ ID NO: 31609 - DNA, 120 bp, Homo sapiens
aggcgtgagccactgtgcccagccagcagttcataatatttgttttttattccttgattctaactctgtaaggaatagaaatggggtgattaattttggctcctttaatacccgcctggc

SEQ ID NO: 31610 - DNA, 120 bp, Homo sapiens
ccacgctatgactcagaggttatcactcagggacatccttctgactctgtttcagtccatgactcaggaggaaaggttctagggcctcaccagcgccctacacacaccctcgtttcccga

SEQ ID NO: 31611 - DNA, 120 bp, Homo sapiens
acccgccaggcaccccttccccttcttcccggacccctccccagcgggcaccgacatgaggtaactgcgcatcttctcctcctcctccctccccgcctcctgggcccccaacttggccct

SEQ ID NO: 31612 - DNA, 120 bp, Homo sapiens
gaacgcagcgtgtgggcagagggcagcccttagcttgtgctgtgcatggggggaggagacgaccagatttggggtgggcactggtgtggggcccaggagagcccctaagcaagtgtcccc

SEQ ID NO: 31613 - DNA, 120 bp, Homo sapiens
gtccggcagtgaaatggttcccttagccaggctgggtccgtccctgaattccatcctgttgcaacctgggcgtcacaatgttggttctgtagtggttgtcggggtggttgagggaggggg

SEQ ID NO: 31614 - DNA, 120 bp, Homo sapiens
gaacgctgtctatgaggggctctatatctgagcaggcaagtaatgtctgtgagtgtgtttctgaaggctgtctggaagaacgcatgtctgagaatggtgtaggatagtgtgcatctgtga

SEQ ID NO: 31615 - DNA, 120 bp, Homo sapiens
gtccgtgagggatgcatccaaaagtgtggttgttgtctgtgagtctgaggccctgaaggttgttgctgaagggcatcgatgtctgagagtggttgtgagtgtgtgtctgctgtctatatc

SEQ ID NO: 31616 - DNA, 120 bp, Homo sapiens
atccgagagtgccgttgttgtctatgagaacttgtggctcagtgcctgttgcctgtgagggtgtgtctgtgtttgagatgaggctgtcgtctttcaaagggtgtgtccatggctgttatc

SEQ ID NO: 31617 - DNA, 120 bp, Homo sapiens
cctcggagagtgcatctgagggatctacaagactgtctgtgtccaagagtgcagctgttggcggtgagcctgtgtgactgtggctgttgccttagagtgtgggtgtgtgggtattgcaca

SEQ ID NO: 31618 - DNA, 120 bp, Homo sapiens
atccgttagggtgtgtgggaacatgaggttgtctttgagagtgttttcatgagggttatttgtaagggtgtgactgttgcctgagagagtgctgggtgttctttgtgagactgtgtgcat

SEQ ID NO: 31619 - DNA, 120 bp, Homo sapiens
aaccgtagctccctgtgagagcctgggcccgcgggtgctgtctgtgaaagtgtggctgtcgtctgtagaaatgtgggtctgtgtgtgttgtcagactgtgcaagagtgtgtctctttttt

SEQ ID NO: 31620 - DNA, 120 bp, Homo sapiens
agtcgctgaggaagatgcctgagggtgtccactcatgagtgtgattaagcctgtgtgaccgcagggacagctcctctggtcgtgttaggcaagaccacatacccattcagccctgccctg

SEQ ID NO: 31621 - DNA, 120 bp, Homo sapiens
ggtcgctcacctggctccgtcctgcaggtttctgggggccccggggccccacagggggctgggggcaggtgccgctcaggcctccggggtccgccctgcccgagtaggggaggagaaggt

SEQ ID NO: 31622 - DNA, 120 bp, Homo sapiens
ccccgactttggacttcggccagccccctccatcttgggctccctgatgagagtcctagttgtcctagcaactgttaccagggagatcagccacctggttccaagggcccaggaaggagt

SEQ ID NO: 31623 - DNA, 120 bp, Homo sapiens
atacgcagccaactcatatctacaggtgtccctagcatctggccacagctttacacacttggttacacatagacgcaatcacagctacacacctcagatcgcagatacacagaaacagtc

SEQ ID NO: 31624 - DNA, 120 bp, Homo sapiens
ggccgcatattcatgttcggacacacacagtctctactacagacatttgtccacatacatgcagcatgtcctggcccactcagttcccaccgcagacacctggtcacaccacccactgaa

SEQ ID NO: 31625 - DNA, 120 bp, Homo sapiens
gaacggggcccagacaacccactagagccgcacatgcgtggccacacccagtgacagctatgtttcctcaggcacccgcccaagatactgacgtcacaggcccacccagatagaatcaca

SEQ ID NO: 31626 - DNA, 120 bp, Homo sapiens
acacgacacaatcgcagctatatacacttgttacacgtatctccactgctgcacactgacatctggtcacagatgcacacggacagacacacatttggtcccacggagaccacatgcagc

SEQ ID NO: 31627 - DNA, 120 bp, Homo sapiens
tcacgtggtcacacatactcagtcataggtgctcaaatctggtcacagcatcagtcacacagtctattgtgacagccacactcatagggacagtcctctatacacaaccacatacagagg

SEQ ID NO: 31628 - DNA, 120 bp, Homo sapiens
ttacgttataaccagtgcagaccaaggtatatgtttcacgaaacaagactttcccttgctctacaggtgcatgcatattttctgtcctattcttctttttaaatgctggttgcaacccac

SEQ ID NO: 31629 - DNA, 120 bp, Homo sapiens
gcacgacatccggctgtgtaacccaaagtcaagtgacctcccctttgttagcctcaatgtcctcatgtacggaatagaacactcattgattcagtgcagcatgtgtgtatatgggacact

SEQ ID NO: 31630 - DNA, 120 bp, Homo sapiens
aaacgtggcgagtcataaactggctcttaaggctcctacccgaaagtgacacttctgctcccagttaattggccaaagcaaggccaggtgtggtggctcacacctataatcccagcactt

SEQ ID NO: 31631 - DNA, 120 bp, Homo sapiens
acccggtctctaaaacaaaacaaaacaaacaaaaaacaacaatccccagttcaggagggcagggacatccctgaactaatagctggagctatgtggtgaacagctgtcatgactgccacg

SEQ ID NO: 31632 - DNA, 120 bp, Homo sapiens
tgtcgctgtctctgtctctctgtcatcactatgtcatctgcctctctgtttctgtctctctctgtggtccatctccatccatcaactcctgcctctataattttccccaaaaggtctgac

SEQ ID NO: 31633 - DNA, 120 bp, Homo sapiens
gggcgatcatgtgattgccgaactaagtggggctcactcaccccaacaagcctgggaacagtgatcccaggaagcccctggccctggaaagactgcaggtcccctttcgttccctctcat

SEQ ID NO: 31634 - DNA, 120 bp, Homo sapiens
ttccgaaaacactacccttgggtccagctttctggacatgctggtaagtggggtggtggtggacagagctgggcagagtctcctgggccagggaaagggatgttctctgtagtttagttc

SEQ ID NO: 31635 - DNA, 120 bp, Homo sapiens
cttcgtatgtcagggcagagggctattccttgttattctggtggagagagggagcttcagacggacctgagctcaaaccctagttctgctctgtattcatgggtgaccttgggcaagtta

SEQ ID NO: 31636 - DNA, 120 bp, Homo sapiens
caccgagtacaaaagaaaagatggatgaaccaggcccactccttaggtctctgagcctccgtgtctctctggctttcatgagtctcatggctctgactgggtcatgctctattcggtgcc

SEQ ID NO: 31637 - DNA, 120 bp, Homo sapiens
aagcgtctggtgcagaggaatagtgatcatggtgggactttgcctagcctaaggttcagcatacaatattcagtcagtactcaagggctgggctgtttctggtaatcaaagggctgcctt

SEQ ID NO: 31638 - DNA, 120 bp, Homo sapiens
ctccgcttctgtggccagaggggacagcggaggagcccaggtacctaagccaactcaagagaagatggaattgaatatttcaaccaccttatctaggcctctgtgattgttgaggagggg

SEQ ID NO: 31639 - DNA, 120 bp, Homo sapiens
gggcgaagtttgggactggtttagggcggggacaagaccaagaacacaagtttccttgtactacgggagagagggaggggaggaaattggagaccccagcacccccttgctcactctctt

SEQ ID NO: 31640 - DNA, 120 bp, Homo sapiens
ccacgatggcccggtccctggtgtgccttggtgtcatcatcttgctgtctgccttctccggacctggtgtcaggggtggtcctatgcccaagctggctgaccggaagctgtgtgcggacc

SEQ ID NO: 31641 - DNA, 120 bp, Homo sapiens
agccgtaagaatggggaggggagaattgggggcttgggcgttagcctgtgtggagggtgctgcattcccttctattccttccctagaccctatctccatggctgtggcccttcaggacta

SEQ ID NO: 31642 - DNA, 120 bp, Homo sapiens
ccccgactgccgattcctgaccattcaccggggccaagtggtgtatgtcttctccaagctgaagggccgtgggcggctcttctggggaggcagcgtgagtcttgggagagtgaaagaggg

SEQ ID NO: 31643 - DNA, 120 bp, Homo sapiens
tgtcgctccctttttcaaaaccatccatgcatctcagggccccaggacacaaatgaactcctcagcctggtgtttgaccctctgcagggactggcccctgccagcccagccttaccggcc

SEQ ID NO: 31644 - DNA, 120 bp, Homo sapiens
tgtcggtctccctacctctcaggccactccagccacactgaagttcttcccattcctctgggcccttgctcatgctgggcctctgcttggaacattcctaccctcttttccctggcaacc

SEQ ID NO: 31645 - DNA, 120 bp, Homo sapiens
caacgtgatttcctgatggaatggatgtgtaatctgaaagagagagaggaatcaaggatgatgtcttcagacagtgctctcttgtctttccaggactttgcacctgctgtgcctgagcct

SEQ ID NO: 31646 - DNA, 120 bp, Homo sapiens
tcacgaaagtgctcagaatggggcctgatggtcaagacttgatcgatgagggctgtttttaaagttttcttcttatccatctttgggctgagctcaaatgaatgggtgtgtcttcttcac

SEQ ID NO: 31647 - DNA, 120 bp, Homo sapiens
tttcgtttcttggcactaaaatgaaagtcacataacatacatttacgtgacttttcaaagtgtacaattcagtggcattcagtacattcacagggttgtgcaatcaccacttctgtgttg

SEQ ID NO: 31648 - DNA, 120 bp, Homo sapiens
ccacgggggaagggggaatcccgtacctgctgctgcttcctctgtcttggctaacgtctgtccccctgaacccctaaccataccccaagagctcccaaagcctgagaccagggtcatttg

SEQ ID NO: 31649 - DNA, 120 bp, Homo sapiens
cggcagccccaggggcaccacgctgatgaagcactggatctcgagcagcactgcgttggcgtagggcaggcacacgcgatagtccaggcttggggcgggcctccaccctaccacagggtc

SEQ ID NO: 31650 - DNA, 120 bp, Homo sapiens
gctcgtggtttcggtgacgccaaaaaaaaaatgcgtcgtcattaccgacgtctactcctggaaatggctctccgggtcctgctgttactgtgggcagaggagatgtgctgccgcgtgcca

SEQ ID NO: 31651 - DNA, 120 bp, Homo sapiens
tggcgctggcgctgctcctgctgctgacgctggcgctgtccgggaccagggcccgaggccacctgccccccgggcccacgccgctaccactgctgggaaacctcctgcagctacggcccg

SEQ ID NO: 31652 - DNA, 120 bp, Homo sapiens
gggcgctgtattcagggctcatgcgggtaaggggctctggggacgtcctggctaggggtgggaggattcctgggagagaaacccgagtgccagggtgaggggcttttcgggtatcctagg

SEQ ID NO: 31653 - DNA, 120 bp, Homo sapiens
gcccgggagagaggatcgtggggtgggggaccagggctaggaggggcagagacctctgcctacagaatcctgggaaggtgatgggcagggaccgaggctgaaagagacaggagtcctcca

SEQ ID NO: 31654 - DNA, 120 bp, Homo sapiens
gaacgacaggaagttgggggatgccactgaaggatgtactgggggaggaggcccgggagcctagtgcaaaaagagaactgagcctcagctatttctgctgggatgggggcaggttcctgg

SEQ ID NO: 31655 - DNA, 120 bp, Homo sapiens
gggcgtagaagctagacccggtggctcctcaagtgacaggggccatgatggagacaccttggatcgaagaggtcacagcaccctcctctttcttcctccctacccccagctgagtaagaa

SEQ ID NO: 31656 - DNA, 120 bp, Homo sapiens
gtacggaccggtgttcaccatctacctgggaccgtggcggcctgtggtggtcctggttgggcaggaggctgtgcgggaggccctgggaggtcaggctgaggagttcagcggccggggaac

SEQ ID NO: 31657 - DNA, 120 bp, Homo sapiens
aaccgtagcgatgctggaagggacttttgatggccatggtaagtcaagggctgctaggccctccgctcacagcctgccaccacttactggtgtgtgacctttgcacatggcttagtccct

SEQ ID NO: 31658 - DNA, 120 bp, Homo sapiens
agccgtcccagggaaaagagaagtgggagcaggcatggggagaccaactgtctgtacccatctcctctctgtcctggtagaggttcctcttcctgtctgtcactgcaggtcagagagcag

SEQ ID NO: 31659 - DNA, 120 bp, Homo sapiens
aggcgggagccaccgtgcccagtctatttgcgttattattgtcatcacactattattatcggtgctgaccacccgccatgcactgtggcatcctttgggcataactacacttaatcttta

SEQ ID NO: 31660 - DNA, 120 bp, Homo sapiens
ccccgtgtgcccaaggaaaaaactgaggctcagagagggaagagtcttgccagaggtggcttttggaagtggtgacagaaccacattgtatacagccaaatgatctccttgctttgcaaa

SEQ ID NO: 31661 - DNA, 120 bp, Homo sapiens
gcccgtgttatcctagcatggcactgcaacacacacgcacccttgaaaagttgtgtagtcacaccagaccaccaccactgggagctgtgtgaccatctcgtgtgattgcttggctgtccc

SEQ ID NO: 31662 - DNA, 120 bp, Homo sapiens
tcccgtcctcacacccttgcctctcctcaggctgtgctgtcaaacgatgggatgggcatccaggcgggagaaccagaccccccagaggagcccctcacctcgcaagcatccgtgcccccc

SEQ ID NO: 31663 - DNA, 120 bp, Homo sapiens
cttcggctaggcagcctccatcctcacaccccttatcacatccgcgtggcatgcaccagcagccagggcccctcatcctggacccactggcttcctgtggagacgccggagggaggtaag

SEQ ID NO: 31664 - DNA, 120 bp, Homo sapiens
acacgtcaccactgccccaccggaccttgcttatatcagtgccacccccattgtcccctttcactcctttacccctcatggcctcaatctccttcccatccaatctctgacccctcagca

SEQ ID NO: 31665 - DNA, 120 bp, Homo sapiens
gcccgctggcctctctcccagcccttctctcccctgtgcttcctctcatgggaggcctgcacgagttgcccacgtgtgtgcccttggcaccctgcacccacttcctgggaacaggggagg

SEQ ID NO: 31666 - DNA, 120 bp, Homo sapiens
ctacgcggaatgggagccaggccttcgtgcattggcaagagccccgggcgcccctgcagggtaccctgttagggtaccggctggcgtatcaaggccaggacaccccagaggtgggtgctg

SEQ ID NO: 31667 - DNA, 120 bp, Homo sapiens
taacgattttacagcagatagttatatagcaccttggggaaggggtaccttttcctgattttcacaaaggcactcctatcagggctagcaataccctgacatagggagggaggatggaaa

SEQ ID NO: 31668 - DNA, 120 bp, Homo sapiens
tatcgagtcttctcagagcctgccttgaggccgcaaccaatttcaaaaatctcgtctcaagatcaagtctgtgttttcttgctgggatccttcacgcctccatgaatctggcttctctct

SEQ ID NO: 31669 - DNA, 120 bp, Homo sapiens
aggcgatagggctgaggaatctgcagagcctagagcctggagtcacagtgacaattcacacaggtacacaacactgttcatttgtctaacgcacacacacgtacacaaccctgttcattc

SEQ ID NO: 31670 - DNA, 120 bp, Homo sapiens
acacgccccgttcacgccctgggtcttctggtcttcagcgcctctcatcctcaccgccggttccattccaaccagggactgtggaagcctccgctgatttctgtggagacgatctactca

SEQ ID NO: 31671 - DNA, 120 bp, Homo sapiens
ccacgtaggggctacagcagctcggacaccggaaaaagatctagagctcgagggtgaccctagcgcggtgacttctgggaaatgtagtccacccggaataaccatgtccacggcgcccgc

SEQ ID NO: 31672 - DNA, 120 bp, Homo sapiens
gctcggagggcacatgagcaagagcttgaccatctgtaccgttggttgacttgctctattaagggctatgatttcaggtcgtcctgcgtgtttagaggaggcgagtggaatcttgagtct

SEQ ID NO: 31673 - DNA, 120 bp, Homo sapiens
tctcggctggagaaggcagagcacgggcatgcagacctcaaagcctcaaacctgcgtgtgagaggagaagttggcgagctccagcgtatggtccacggttggtattctaggtgcgagctg

SEQ ID NO: 31674 - DNA, 120 bp, Homo sapiens
tttcgcgctcccaggtagcgccagcacctatagtagctccaggagcacagaaggcgttaagtgtgcattggttttagagaaagaatgcctgtgcgttttgtgttttcactctgtgacatt

SEQ ID NO: 31675 - DNA, 120 bp, Homo sapiens
acacggcttagtgaggagaacgggagctagctcccagctacccctcggccccctcaaccagctgcttttgttcatgaacatttcatattaacagacctaaatcaaatacagctctctgtg

SEQ ID NO: 31676 - DNA, 120 bp, Homo sapiens
aagcgaattattaatctctctgtgccttaattcagttacctgtgaatggggacaataataatgcctgtattctctatttcctgcagcttctgacaagcaagtgctattatgcttcataaa

SEQ ID NO: 31677 - DNA, 120 bp, Homo sapiens
ttccgttggtaatgatagttaaactgccacaggtttttttttcctccaacagatgtaattacttgcaaatgttactaagctggaggagcctcaagaaagtctctttttccacatgcatga

SEQ ID NO: 31678 - DNA, 120 bp, Homo sapiens
cttcgcagaaaactctgaaattactccacaagtgggtgggcggctaccctgagaaaattcatgtcatcgatccgcaactgacacagtggagtctcccgcactgcagatctcatctcaaag

SEQ ID NO: 31679 - DNA, 120 bp, Homo sapiens
ctgcgagggctgccgacccgggcccaccccgcacaggcgctcagaatgttcgatacgtgcgcctccttacacccctgcctcaccaggccgagctcatggaaatccgtgggcttcgaccct

SEQ ID NO: 31680 - DNA, 120 bp, Homo sapiens
ctccgccgcacgttgtcccttcacactggtcctatagagccgatcctaattcccatggcctgacagtacaaccgcatggagatgcacgtctctaagacgcctcaccactgcctaagaagc

SEQ ID NO: 31681 - DNA, 120 bp, Homo sapiens
cttcggtaaataatataggtaatgatggggaaggaagttccaggtttgggaatcaccaggatgatgattaagagatggtcaaggtggttttggagtcagacagactttatgtgaaagccc

SEQ ID NO: 31682 - DNA, 120 bp, Homo sapiens
atccgtttcatgatggggaagactggttttcccctaacccaacagacacctcttccctcagcctgtccctgaccctcccacctcgggaagccccgagcgggcctcccagaatgtcccggc

SEQ ID NO: 31683 - DNA, 120 bp, Homo sapiens
taccgttcatccagccagatgaaccccaaaaggggaagtgggtcacccgtagtcacccggctcatggtcagctcgggacttcaggatctcgtctcttcactgcacccaccacagccctgg

SEQ ID NO: 31684 - DNA, 120 bp, Homo sapiens
gcacgcttctcattctccccacatttcacacgagaaaacaggggctccaagagaggcccacactcacctaaggagctcgaaagataggggcatctggatttgaacccaggtcctagcaga

SEQ ID NO: 31685 - DNA, 120 bp, Homo sapiens
ctgcgcaagagtttattgtgagagtacaccacaatttatgtcaggctgctggtggtgaacacccaccttgttgccaatttcctccacttccaacaagaatgcaattaacatccctgaaca

SEQ ID NO: 31686 - DNA, 120 bp, Homo sapiens
aaacggccaaacaagatccattagtgggttgtgaaatcaatttagtgggttataaacaatttttcctttaatgaaatggaattaaatagaagctattagagtgcatgctcatagtcggag

SEQ ID NO: 31687 - DNA, 120 bp, Homo sapiens
tctcgtggatgctgccaaattgctctgcaatgtagtttgtccatttgcactcagagcagctccttgccaatacttgccagtcaacactttgaactttttcaggctaatgggttttcatcc

SEQ ID NO: 31688 - DNA, 120 bp, Homo sapiens
ctacgctgccaccccaggatttttgggaccctggattgctggggagaagcagatctcttagtatctccggctgagtacacacaggcttcgatcaatactgagctgtcttcaaacaaacag

SEQ ID NO: 31689 - DNA, 120 bp, Homo sapiens
gtccgggaacattattcgaccacagcaaacaagagagccagcaggaagcggggcggtgggggggagggtggcggtgaaaccagccagggaagctaaaaacagatccaacctgccgccaaa

SEQ ID NO: 31690 - DNA, 120 bp, Homo sapiens
agccggctcccagaggacagtgatgggggacacagccaggacagcaggctgacagggacctcgggcctgatggtgacacctttgcctaggccataccctccgcctcccccaccctttcct

SEQ ID NO: 31691 - DNA, 120 bp, Homo sapiens
cagcgaccccccaccctcccacgttctgaccactgtcctgggcaactagtgacatctagtgggggattttgtcccagtctgacctggcctgtaggggccttgggcagtcggacctgtgac

SEQ ID NO: 31692 - DNA, 120 bp, Homo sapiens
ccacgcttcctagcagtggctggactcctcccccttcccgcaggtgccctggcctcttcccctgccctcctcacctgctctggccagtctgactcctcccttccccacaaggttgggagg

SEQ ID NO: 31693 - DNA, 120 bp, Homo sapiens
gagcgggaaggaggaagggagggtggcattcctgggattccctggatagggggaagagtgggagggccttccatgggtgagcaagcagagagggcaccccgtaccccacccccagcccca

SEQ ID NO: 31694 - DNA, 120 bp, Homo sapiens
catcgaagcggcctaggaggacctggatttgaagaccattgaaaataagagattaaaccggttgattccaggctactggtcagacgaggaaagcagcccagagcactgaccacaggggaa

SEQ ID NO: 31695 - DNA, 120 bp, Homo sapiens
ctccgggcatactgggagcagctgctgggggccactggtcaggctgcgggggtcactggttggactgggagaggccagtgcaggccactcggacggcacgcttggggccattagttacac

SEQ ID NO: 31696 - DNA, 120 bp, Homo sapiens
catcgcaggccacaggttgcagtggggtcctctggttaaaatcgacgatgccagcccaggctgctggtcacagtggggacgagtccccaaggcccctggtcagaataacgaggagaaggt

SEQ ID NO: 31697 - DNA, 120 bp, Homo sapiens
gtccgcgattgcctggtgagatcccagctcgggtcactggctacgctggtcgatcaggccccccgctgcaggcgctggtcagtaagcccggacagctctaggcttgggggcggacgagcc

SEQ ID NO: 31698 - DNA, 120 bp, Homo sapiens
ccccgagcctggccccgtgcactgggaggtccgctccgggcagtgggaggtcctggccccgcgcccgggcatcgggggacgaggggggcctggagggcggggcggggcggggctgccggg

SEQ ID NO: 31699 - DNA, 120 bp, Homo sapiens
gggcggggcctctggctcccagccccgcagcggccgagctgcagcccgggctcagtctccgccgccgccgtgaacatggagcccccggacgcaccggcccaggcgcgcggggccccgcgg

SEQ ID NO: 31700 - DNA, 120 bp, Homo sapiens
gctcgcagtcctgctggcggcgcacccaggtatggctcgggctgagggcaaggtgggactggggagaggcccctggggaccccgggaaagcgaggagaaagggctttaccctgaccccag

SEQ ID NO: 31701 - DNA, 120 bp, Homo sapiens
gcgggtggctgcggtgagaaggcggcgcggagcaggtgttgggaggggaggaccagggcgcgcagggaggtagggagggaaggaagcagagaacagagcagggacagagagacagcgaga

SEQ ID NO: 31702 - DNA, 120 bp, Homo sapiens
tttcgttcatcgtccctccctccttcagacaggtcaagcctcttcaggttcctcccataccacccctactccgtcttccaggcattcttggtgataattatttgtgcaatatttgtaccc

SEQ ID NO: 31703 - DNA, 120 bp, Homo sapiens
tgcgaagctgcctacgttgcatgcggagcctgcatttcccgtggggcccccttcgtggtggccctgcctggaggtgtctgggtccctcccccacccgactacttcactctctgtcctctc

SEQ ID NO: 31704 - DNA, 120 bp, Homo sapiens
gtgcgagttcaagtgctacccgaggtgcgaggccagctcgggggcaccgtggagctgccgtgccacctgctgccacctgttcctggactgtacatctccctggtgacctggcagcgccca

SEQ ID NO: 31705 - DNA, 120 bp, Homo sapiens
ctgcgaaccaccagaatgtggccgccttccaccctaagatgggtcccagcttccccagcccgaagcctggcagcgagcggctgtccttcgtctctgccaagcagagcactgggcaagaca

SEQ ID NO: 31706 - DNA, 120 bp, Homo sapiens
ggacgccacgctggccctccacgggctcacggtggaggacgagggcaactacacttgcgagtttgccaccttccccaaggggtccgtccgagggatgacctggctcagagtcataggtga

SEQ ID NO: 31707 - DNA, 120 bp, Homo sapiens
gggcgggaggcaaggaggtgggagggccgcggtgtgggagcatccccttgcgggtcagtttctctcttggcttcagctgtgaggttcacattctctgtgggtttccatccatcagcaaat

SEQ ID NO: 31708 - DNA, 120 bp, Homo sapiens
taccgcgtgccagatgcttttctgtgtgctgaggatgtggcaggcaaccaggcattcttgggaaaaacaaaaaaataagtattggctgggcgcagtggcccacccctgtaatcctagcac

SEQ ID NO: 31709 - DNA, 120 bp, Homo sapiens
gagcgagagctactgttacagggctgagacctagaggaaagtggaggaaaccgataataaaatgataattatatattcagaatatcccaatgcaaagcttactctttttccaggtaatat

SEQ ID NO: 31710 - DNA, 120 bp, Homo sapiens
cagcgctccaaatattgaccacttaagcatgaggcccagggcctgatgttttccattcgccatctaactacgtcttcccaataacacagcggggcaaaacgggaagacgaagaacgagta

SEQ ID NO: 31711 - DNA, 120 bp, Homo sapiens
ggacgatggcacagattttaggagggtggatcagtctggggcaggtgcagtggagctgcctggtagaccagcctctgcttccactcctccctcctccattagccccatgcttaccatgta

SEQ ID NO: 31712 - DNA, 120 bp, Homo sapiens
actcgggtgcttagcacactgcttgactggggacccagggattaaggccttgacttccgctttcatccaagcctgccattgaccttacatgcagctgctgtgtgtgaggcgctgtggcat

SEQ ID NO: 31713 - DNA, 120 bp, Homo sapiens
gtgcgcccaatctgccttgttccttccgtcccaagagacttggaaagccatgagtgtgttctgaccgcatctgtttctgtaacaggatcttcagctgcggcaggcagttgggaaggtcag

SEQ ID NO: 31714 - DNA, 120 bp, Homo sapiens
ggacgaggggaagggaaggcaggcctgtggcacctgccatctgcgcccttcactggagtgggcaggccttgcccacatccctgcctgaggcctggggtctggaggcctggctccttgttg

SEQ ID NO: 31715 - DNA, 120 bp, Homo sapiens
gcccgccccctggagctggccatcctgcagcatgtggccacggtacccactggctgaatggtggtgcctccctgccgggaagggcagagaagagcccctctcacccaggaaactgcagga

SEQ ID NO: 31716 - DNA, 120 bp, Homo sapiens
tcacggcctctcagcaggcctgaggagggcacgggggtctgagagggaaggaccggccatcccagcctcccctgagcaggctaactttccaggacgcattgcgggctcccttccctccag

SEQ ID NO: 31717 - DNA, 120 bp, Homo sapiens
gcccgtggttctctggggagaagggaagggtggacgttgtcttcatttcccagagtgagtcggtgcattcgttcattcatagactcacagcgacagacaccacagtgacgtccctagact

SEQ ID NO: 31718 - DNA, 120 bp, Homo sapiens
aaacgagcaagtagatccttagagattgggacgtgtccagtgaggaggcagagtgttgtctgggtgtggtgtgggggatggggatgggggtgctgctacagaaaggggtcaggagaggct

SEQ ID NO: 31719 - DNA, 120 bp, Homo sapiens
acccggaggcgggaacaaaccacaaagcctgtagagtggctgaggaggcgtgggcgagccgagggtgagccccggtggagtgctggcatcagggggccttgtcctgggctgaggagttga

SEQ ID NO: 31720 - DNA, 120 bp, Homo sapiens
tgccgagtgaaagcctgtggcagcaaccagcccgctcctgcacggtctcctaagctaattgtgcgcctgctttgggtctgaatggcggggactgcacaggacgtgggttttccttctacg

SEQ ID NO: 31721 - DNA, 120 bp, Homo sapiens
aagcgctgactggtggtgggaaacctagcctggagattgtcccagccatcccacccaaggcagggacaggccagtggggctacccgagcaaaggcttagggcagctggtagaccgggctg

SEQ ID NO: 31722 - DNA, 120 bp, Homo sapiens
ggccgcagagttagtcttagagtagcacctggcaggaggctggctccgtaagccagtgctcgtccttggcattgttgactcagtggctcagctgatgagcccgaggctgctggggaaggt

SEQ ID NO: 31723 - DNA, 120 bp, Homo sapiens
ccccgcgtgatccgcgtttctcaggcctctgggttactgagaggctgttgggggtggaggtgcccagcggttgttcactgggaagaagaactcaccaccagcgtcccttcatttttccca

SEQ ID NO: 31724 - DNA, 120 bp, Homo sapiens
ttccgaacaggctcagcagccagaagtccccgcctgggcttccaactgcctacagaggtagctgcagccctcccctcaggctggcctgtgtcactgccctattctatgtccaggcctccc

SEQ ID NO: 31725 - DNA, 120 bp, Homo sapiens
tcccggcacccagccgctgtccccatgagtgcccaggggagctcccagtttagcagggggagagggttccccagtgcagagtgggtgggaagcccggggcctgtgacctgtgtcacaggg

SEQ ID NO: 31726 - DNA, 120 bp, Homo sapiens
ccacggagctgactttgggctctcatttaggaggctgactctgaaggtcatagtggctcagcagtgaaagaggaggatccccacagtgtgtggtctgtgtggtcactcagggatgtgacc

SEQ ID NO: 31727 - DNA, 120 bp, Homo sapiens
tcccggccatatccccttcccagggatgtgctaaggtttcagggagctcgggtacataaagggcttgcctgagataactgcgtagtaaatgacagctgtcagtggactccctgccgaacg

SEQ ID NO: 31728 - DNA, 120 bp, Homo sapiens
ttacggacttgtgccaggagccccagcttcctgccacccctcaccgtgtacctcagagttctcctttgacaaccctccatctggctgtcctgtccctcaggggtgggcatgaggcccaag

SEQ ID NO: 31729 - DNA, 120 bp, Homo sapiens
ccacgttcactgagcacctgctggccgggccccagggagccacccaggtggctgcctccacagccgggctgggctttataactaattctgtcgtgagagactggccttggtgccagacct

SEQ ID NO: 31730 - DNA, 120 bp, Homo sapiens
tcccggcccacctgccgcctctgggttccttgtgggccaccgcctctgagcagctgctgcttttttttttttctcatttaactttttgttttgttttttggtttttgagacggagtctca

SEQ ID NO: 31731 - DNA, 120 bp, Homo sapiens
actcgcctgtgtcccacaacccctcttggagctggagcactagcgggggctcagctgccaaaacccagggacaggtgaggctgtcaccatccaagatggcaatctggtgtgccattcctg

SEQ ID NO: 31732 - DNA, 120 bp, Homo sapiens
gcacgatcaggtcccctccccgtgagtactacaggggaccccactcctgcagaatacaatcctcccatgagcctgaatccatcctgttgctgctctgcccctcgcccccagtggctccgg

SEQ ID NO: 31733 - DNA, 120 bp, Homo sapiens
gagcgaagtcctcaccagggtccacggggtcaccgtcccacatcatccccagtgctcccctcccggtgtgctttggcgccgagcctgctcccaccgtcacacttaagcctgccccagtgg

SEQ ID NO: 31734 - DNA, 120 bp, Homo sapiens
ccacggggtttgcacagggactgcgcagtgggcctcctgaatgaagacccagacctgagcccggtggggcctctgggaacactcctttcaaggccagctcaccctggctcctttctgttc

SEQ ID NO: 31735 - DNA, 120 bp, Homo sapiens
aagcgtggttattctgagcctggttgccatcacagtcatatggggacctgttaaaatctgggcccctgggccctagctaggacctcctgactctggtgctctgtgaacctggctcgcaga

SEQ ID NO: 31736 - DNA, 120 bp, Homo sapiens
agacgtcccgatttcatgtggtggacactggggcatgggaaggtcatttccagccagaggtagcatggttgttacggagcagccctaaatattcctgctccaggcttgtctggacttcct

SEQ ID NO: 31737 - DNA, 120 bp, Homo sapiens
gcccgcacagtgttgcttcctggtgttttgactcccacttggatgactgtgtctgtttcccccgccctgctccaggctggcacggatggtgtgagtcatcaccgccccctgatgcccaac

SEQ ID NO: 31738 - DNA, 120 bp, Homo sapiens
gcccggcgtcaggtttctctctgtccctttgtgagggccacagccggcgggagtgggaggcaagctctgtttgcccttcatcctctccctggggagctggctgccacctgctgggcgagc

SEQ ID NO: 31739 - DNA, 120 bp, Homo sapiens
gagcggcagagccccatccctgcagcagcaaggccctgcccgccagctgctgcacagcagcatctctccctggagctcatgcctttcaccatcccacccagggctccccacaccctgcct

SEQ ID NO: 31740 - DNA, 120 bp, Homo sapiens
ctccgccccagcccttcccctcctcaggccagacaagggagccgagagttgagctgtgctgtggtttcaggtcaagacagtcctggggtgtgttccagtcctgccacttccaggctccat

SEQ ID NO: 31741 - DNA, 120 bp, Homo sapiens
ctacggcgcttctgtaagcacttgggcggatgtgacctcctcggtctctgactctggtggtgactcctgcaaggccggacctggttccagaccctgtaggtgcccagctgaaggtgtggt

SEQ ID NO: 31742 - DNA, 120 bp, Homo sapiens
gaccggctgccattgtgtcaggggttatggtggtatccaccctgatgccacagccagctctgggccagcctcctcgccccagcggtgcccacccccagcttgatcctggaccctggcaat

SEQ ID NO: 31743 - DNA, 120 bp, Homo sapiens
aagcgtttgcagtgctaggcccgggccggactttctccacaaacgatttagttccgttagttcacccaccctgtaaaacagctacgcttctcttccccgtttaaagcttgaggaagctga

SEQ ID NO: 31744 - DNA, 120 bp, Homo sapiens
agccgccacagaggacagcttagggtgggcctggcctggctccctgcttcacagagtcgatgcgttcgctcctggatgaagcgcctggcacgaagtccgtgggcagcgctgctctgtgtg

SEQ ID NO: 31745 - DNA, 120 bp, Homo sapiens
aggcgaaacattaaataggattgcaaaggatgccagttggaatatcattagctaaatgctcttcctcactgaattgacatgtgaagcgataggatgtagcagcagctgtaataaggcctt

SEQ ID NO: 31746 - DNA, 120 bp, Homo sapiens
tgtcgtttcttttcatgtcagtctcaaggtctgctaaacactgtttcttttctctctctcttttggcctctgttaataagaaggaaatgctaaatttcagttccattcatgaaaataaag

SEQ ID NO: 31747 - DNA, 120 bp, Homo sapiens
gagcgcgctgacggctcggatgagacccatgcgccggcggatggagtggtccaggttgaccgtgcagcgcagcaggctctgcgcctcggccacggtgaaggggaagtcggcgcccaggaa

SEQ ID NO: 31748 - DNA, 120 bp, Homo sapiens
aagcgctcgaagagctcggggtcgccgtccaggtcgagcacgttctgcaacgccttggtcatggtgtgcagctcgcggctgttgtcgcggaaaacgtcccagaggcgcgcgcggccctcg

SEQ ID NO: 31749 - DNA, 120 bp, Homo sapiens
gggcgcgcccccggtctgctgccggtcctccaggcactgcagcgcccagctcaggcggcacggccactggttggcgagcaccacccacgccaccgcctggcgcggcgtggggcccccaaa

SEQ ID NO: 31750 - DNA, 120 bp, Homo sapiens
aggcgcacggtgatgggcacggtgttgacgatgcgccgcatggacaccacgttgtcgggcacgtactcgtagaggcagtcgcgctcgtcgtgaaggcagaagagcgcctcctggattcgc

SEQ ID NO: 31751 - DNA, 120 bp, Homo sapiens
cgccgcgccgcctcgtcgtcgatgcggccctgcccgcgctccgtccccgcctgcgcctgcaccgccagcagctgcgcgctctcgcccccggcgtcccccggcagccacggcttgcgcgtc

SEQ ID NO: 31752 - DNA, 120 bp, Homo sapiens
tctcgcggtacaacaggtcgtcgcggctctgcaccgcatcgtgcaggaactgcagcttggtgcggcggcccataatgggcacagagaagggcagcgtgacagtgcggttgaggaagaggt

SEQ ID NO: 31753 - DNA, 120 bp, Homo sapiens
agccgttatcggccgtgcccttcatgttgcccgcgctctctaggcacgcggccaggatgctggggtccacgaccaggatgaagatgaagggcgcgtggctgtcggacagcagcgtgttga

SEQ ID NO: 31754 - DNA, 120 bp, Homo sapiens
tggcgttgagcacgcccaccacgcgctccgggtagcacgtgtccagcccggtgacctccagcaccacgcgcagcctgcgccgctggtagatctccaggaagcacaggaagtcggtgagca

SEQ ID NO: 31755 - DNA, 120 bp, Homo sapiens
cctcgcacatgaaacccagctggctgccgaacttttcacgcgacaccagccgctcgatcttcttgcgctggcttacgaacaggtgcttgcccaccgagtacacggccatgagcagccccg

SEQ ID NO: 31756 - DNA, 120 bp, Homo sapiens
gcccgacagtgtggtggccgcgccgccaaacaccttgagcaggctgccgctcgggctgccgtggcccagcgcgtggccgcccagtgacaagtagagcagccccacacccaggcccagcgc

SEQ ID NO: 31757 - DNA, 120 bp, Homo sapiens
cgccgccagcagcgccagcagccccaggcacacgcggcgccgacaatgccactcgctctggcagcagtcctgcctggtggccggcttgttgcccagcaccgagtacacgctgaagggcag

SEQ ID NO: 31758 - DNA, 120 bp, Homo sapiens
gtgcgccatagtggcggcggatgccctcgcacaacgtggtcaccaggccggcccacagcttgtcggtgcccgcgtactgccaggcgctaaagcggatgaaaaggaactgcacgttcctgc

SEQ ID NO: 31759 - DNA, 120 bp, Homo sapiens
ctgcgccgcaggtgcacctcggtgatgatgggctgcaggaacaccaggtaccacagtagctgcgggacgccccagccgctcacggcacgcggccgccactgcacgtgctgcagctcctcg

SEQ ID NO: 31760 - DNA, 120 bp, Homo sapiens
tctcgcgctgcgcggcctcctgctgcatcagcgctgcgggaagggagcccgggagccgcgtgagccgcagacccgccggggtgggcggggcctagtacgggcagggcggagcgctcctgg

SEQ ID NO: 31761 - DNA, 120 bp, Homo sapiens
aggcgaggggcgcccagcagaggcgaggggctggaagcgagccgcggccgctccttaaagagctggaagccggtgcagaagcgggggcgtggagaggcctggagccgggcttggaccgga

SEQ ID NO: 31762 - DNA, 120 bp, Homo sapiens
aagcggtctgaaggccaggctgtggggtcgggatgggcagaggtagagccggcagaggagagatgggaggaggcaaaaagagatacgaggaagagccagggatgggcaagaggctggagg

SEQ ID NO: 31763 - DNA, 120 bp, Homo sapiens
aggcggagcgagggtgtggagggcaccgggaaggttctgagagtggggcaggggacaagtggtcggtgtaagggatgaatgaatgagatgctgaggaggagctatgctaggcagcaggat

SEQ ID NO: 31764 - DNA, 120 bp, Homo sapiens
cctcggtcttatcttgttgacttaactgctcctcctgcaggaagccctccctgatccccaggctgggtcgggggccctcagccattcctactctgggtcatcactgtctgaggacaagtc

SEQ ID NO: 31765 - DNA, 120 bp, Homo sapiens
agccggaagggcagggtcctgcttgtcttggtcaccgtgtcccctgggcaccagaaggtgcttagggaatgcctgaacaatagatcatgagaaatctgaggtcacagagtgaatgagcgg

SEQ ID NO: 31766 - DNA, 120 bp, Homo sapiens
aggcggcctgtgctacccagaagccctggggccagaagcctgagttctaattttgcctttaagagaacattctgccctgaactgggagggaggcgggtgggggccatgtgctccacccct

SEQ ID NO: 31767 - DNA, 120 bp, Homo sapiens
cctcgattgttctctaggcacctgctagctcctgggcagaggctgaccctgttcaacgcccacctgctgagccactctgtgccaggcccaggggtgtggtggggaacccagggaaggagc

SEQ ID NO: 31768 - DNA, 120 bp, Homo sapiens
gtgcgagaagcctgcaggacttccctgctgttgccctcaactctcctccctggtccagcaaggcatcctgagcaagtccagatcctgcctctgcccactcagaactccccatcctgtccc

SEQ ID NO: 31769 - DNA, 120 bp, Homo sapiens
gcccggaaggttgagcccaccacagcctctgccttaagctcctgcaacagcggggcccttcccaggccaatctccatccagtccattcctgtggccagggagacatttctagaatgtaaa

SEQ ID NO: 31770 - DNA, 120 bp, Homo sapiens
ggacggtgttccgggcagggacctatctgacagccgctccgcccgccccacaccctcctcagataaggggctgcccaagtgcactctcggggtgtggtggatggaggcctggcgcagcag

SEQ ID NO: 31771 - DNA, 120 bp, Homo sapiens
aggcggcctgcgctacccagaagccctggggccagaagcctgagttctaattttgcctttgagtcttgctgaaccacctcgaaatcccttcctctaccaagcacagggtccctcctctgt

SEQ ID NO: 31772 - DNA, 120 bp, Homo sapiens
gcccgcatggggagtggctgtgccctgcaggcgaatacctgcacagggttccttcgcacctgccagtgagcaacacacggattcttcctttcactttacaaactgggaaagtgaagccca

SEQ ID NO: 31773 - DNA, 120 bp, Homo sapiens
ccccgggtcatacaggtggacagagagggtccccacaccccagctggggtgcaaaggagtggatgctgcagccccaacctgcgggtctggatctatgtggctgagtggaggcagcctgac

SEQ ID NO: 31774 - DNA, 120 bp, Homo sapiens
ccccgcacaccatccccttcacccaccccacccttaggcctccgaggggagagcttcccccgctcccccccgccaactggggagagaatgggccagggggagggacaatgtgggcagcgc

SEQ ID NO: 31775 - DNA, 120 bp, Homo sapiens
ttgcgcctctccacccttttgtaactcgtctctctctcttcgtgtctctctatctctacgtctctcgatctctctctctgcgtctctggcgctctgccccggcctctctctccccttctc

SEQ ID NO: 31776 - DNA, 120 bp, Homo sapiens
gtgcgcctctcgtctcgggcgagaacacgctccccgccggcgtgcccagacccgcctccgcccccggagcccccggagcccccggcgccccgaccagcccgggcctgcgcctttaagggc

SEQ ID NO: 31777 - DNA, 120 bp, Homo sapiens
agccgcaactccagtttgggccactccccagctacggcccctgctcccatcccaaaccttcccctcctctcaacttcgagccctttgttcgccccggaacgggtggggtggggacggaga

SEQ ID NO: 31778 - DNA, 120 bp, Homo sapiens
ggacgggaccctcaccgacaattccgccaaaggggacctgaacggggggcggagagcagcccggccgaaggctctggaagcgggcaccgccggggggcgcagtgaccaggctggcgtccc

SEQ ID NO: 31779 - DNA, 120 bp, Homo sapiens
ccccgcccgcctctaaacttagccgcggtgacgcgcggcccggcgatcgcggcggggccggggacgcaggggggcccgagtggaggggggcggctcggctcggcgagcctctatttatag

SEQ ID NO: 31780 - DNA, 120 bp, Homo sapiens
tagcgcccggagcccgaaatagcgcggagcggagcggccgggatgacgcgggagccgccgggggctgactcacccggccccaagcggaggcccccggatggggggcagtggaggcgccta

SEQ ID NO: 31781 - DNA, 120 bp, Homo sapiens
ctccgcgtcctcccgggcaccttttttggtgggacatcccaagtctccgctggagaggctgtggatggatgtacagcaaaggaaagatctgcagcatgagagactgaggttggatcagaa

SEQ ID NO: 31782 - DNA, 120 bp, Homo sapiens
tcacgtgatcctttacagagtggaggaaacaataataaaaacacctctagtaatacaacgactgctgtgtattgagtgcaccgggctgcagtaagtactttacaaacaccgtcttatgta

SEQ ID NO: 31783 - DNA, 120 bp, Homo sapiens
cctcgggttttccacaggagtctttattacagtgtaaatccaagctcaggcctcccctgggccccatgcaaagccccggcgttggggctagtagcatccaggagacaccaacgcctcacg

SEQ ID NO: 31784 - DNA, 120 bp, Homo sapiens
cggcgcctccagcggcgggtccggaagtgcagggtggtgccctgtctaggcaactacaagtcccagcaggccccgcggccaaggtgcctcgtctttcctggactcctggagcagagcctc

SEQ ID NO: 31785 - DNA, 120 bp, Homo sapiens
ttgcggacagcgagagtagaaaggaaaggttcccaagctcccccacttccccctcccatcgacctccgccccatgctcttacttagctttgatgtggctcaactgattggtcaccaaccc

SEQ ID NO: 31786 - DNA, 120 bp, Homo sapiens
ggtcgatctgagcctggggagaccaaagaaaggtgaaagaagggattggaggggtttcttctctttagtcacataggaggctgcttcctccccaacctccaaattaggagttgtgaagag

SEQ ID NO: 31787 - DNA, 120 bp, Homo sapiens
acacgcgagacatggaaatggctagatctaagggtgttgaaatccccagctgtcagaacccccatgtgtgggacagagaacggtagacatggactgttatagctgtgagctcagagattg

SEQ ID NO: 31788 - DNA, 120 bp, Homo sapiens
aggcgttttcagctgggaatccagccccttagagctagttcagagctttgcacatagatgatgctcaatgcggtttggaaattgaaatctgacgccctgtgccctcacctcgtttcctca

SEQ ID NO: 31789 - DNA, 120 bp, Homo sapiens
gaccgctaagaacccatgagtccttgcccccaaaccacggatggctgttttcccgggacagggttggacagtttgggcgaggtcggggctgcctcttggacagaaaacggggatgggatg

SEQ ID NO: 31790 - DNA, 120 bp, Homo sapiens
atgcgaaggcaagtgattgggagccagacccctgttttccatcctggctctaccctccgttcaaccccctccccgccagctgcggccagcaccagagccaggggacagctccccgcgcgc

SEQ ID NO: 31791 - DNA, 120 bp, Homo sapiens
gcgcgtcctcgctcccgggcggggccgggcggtacgtcccagagcgcagcgcgccccccgcctgctgtctcagtgccccctcacctccgccctgtttcgtccaggtcctccgggtcaggc

SEQ ID NO: 31792 - DNA, 120 bp, Homo sapiens
aggcggggcgcagggcccccgaagggcctcggtctctgttgacagcgccgcgccgcgcccagcggccgcacgggggtgccgaggcgtctgggggcctgcgcttcggggcgagcgcagcgc

SEQ ID NO: 31793 - DNA, 120 bp, Homo sapiens
tggcgcgcgcgcatggaggatgctcactgcacttggctttcgttacctggtctgcccccgggctgggccttgtttgccgtcctcgacggccacggtggggctcgagctgcccgcttcggt

SEQ ID NO: 31794 - DNA, 120 bp, Homo sapiens
gcacgccatttgccaggccatgtgctccaggagctgggcccggagcctagcgagcccgagggcgtgcgcgaggcgctgcgccgagccttcttgagcgccgacgagcgcctgcgctccctc

SEQ ID NO: 31795 - DNA, 120 bp, Homo sapiens
ccccgcgtggaaacgggcggctgcacggccgtggtgttgctggtctccccgcggtttctgtacctggcgcactgcggtgactcccgcgcggtgctgagccgcgctggcgccgtggccttc

SEQ ID NO: 31796 - DNA, 120 bp, Homo sapiens
caccggccccttcgaccccgggaacgcgagcgcatccacgccgctggcggcaccatccgccgccgccgcgtcgagggctctctggccgtgtcgcgagcgttgggcgactttacctacaag

SEQ ID NO: 31797 - DNA, 120 bp, Homo sapiens
ctccggggaggccccccgagctacagctcgtttctgcggagccagaggtggccgcactggcacgccaggctgaggacgagttcatgctcctggcctctgatggcgtctgggacactgtgt

SEQ ID NO: 31798 - DNA, 120 bp, Homo sapiens
tggcgggactggtggcttcacgcctccgcttgggcctggccccagagcttctctgcgcgcagctgttggacacgtgtctgtgcaaggtcctgggggcgtggcgtggtacctttggggctt

SEQ ID NO: 31799 - DNA, 120 bp, Homo sapiens
agacgcacagcagataccatcaggacatacatgagtatgatccaggtcttagacaagagaagctgtaatggggcccagatagctaaggagaatttggagatatccaaagatgtatagtgg

SEQ ID NO: 31800 - DNA, 120 bp, Homo sapiens
agtcgtgagagatggaagcccaattcaagctgggaaaacaaaacagggaatttactgggccatgtaattgaagagtttagagtcttaaggcatggctgcatctagttgtcagatgatgtc

SEQ ID NO: 31801 - DNA, 120 bp, Homo sapiens
aaccgaccctttccccaactacatgtaccagcggaaggaaggaaggccaatgtaggaacccaaaatgcttatttcttcttctcttacttccctctcacagaaaagtcttacgaatgggga

SEQ ID NO: 31802 - DNA, 120 bp, Homo sapiens
aatcgaaaaaaaaaaaaaaaaaaaaaaaaaacaaaaaaacccaaccaaatgtttttgaaatattcagagccgaacagattctgagagataacccagtccaataacctctttccttcttat

SEQ ID NO: 31803 - DNA, 120 bp, Homo sapiens
catcggcatctctaactgtaaacctctcaaggttcctgctggttttcttagcctccagtgagctacctgatatccttccagtaagttctttttctgcttcagttagcccaggaaggttcc

SEQ ID NO: 31804 - DNA, 120 bp, Homo sapiens
aaccgttcactctgtgctaagcaacttcctaagtgttttgcatgtattaattgattcactttcataataaacttacaaaggaagttctgttatcaggcacaagatacccagtgacttgcc

SEQ ID NO: 31805 - DNA, 120 bp, Homo sapiens
tctcgagacaaatgatctaagcctaaaaagactgcaagctacatgcacgttcatagcagccctattcatagccaccacgcggaggaaacaaccccaacgttcaacagatgtatgaataaa

SEQ ID NO: 31806 - DNA, 120 bp, Homo sapiens
tgccggtctctggcactagaatgtcagctccagtgagggcctctgcttgctcccaactggctcccagctactagaatggagcctggtgcagttgatcctcagtacactcagagttgccat

SEQ ID NO: 31807 - DNA, 120 bp, Homo sapiens
caccgactccagctacaagccattgccactgggggacccaagcctgccactcagcaacacagcgaccagcccaggagtagctccgtgagccaatagatcaggttggggcttatgtaaagc

SEQ ID NO: 31808 - DNA, 120 bp, Homo sapiens
taacggctgctcttatcagcaggggtaaccaaatgccaagttgcatcaagatcctggtggtttccactgggccagcgcaggcaagggtggtgcgggaagaaggccacgttaggtacatag

SEQ ID NO: 31809 - DNA, 120 bp, Homo sapiens
ggacgcaggcactgcgtgggaagcggaccggccgggattgcagagctgggcgcgcacctcttgcagctctgtgcgcagttcctccagggcgccctgtggcggcgccgcctgcacctgcgc

SEQ ID NO: 31810 - DNA, 120 bp, Homo sapiens
cagcgcttccagcgccagcgccaggtggcccacctcgtcccgcagcgcgttccaggcagcacgctgctcctcctccttgtggcgctgctgcgcctggtggcgccagtactccagcactag

SEQ ID NO: 31811 - DNA, 120 bp, Homo sapiens
agccgccgcccacgatgaagatggtggcttcgcccagcagctctgcgcccagctcagctgccgcctcctcgttcagcggcttgatgaccgtgccccggaagcccatgatgcgcatcttgg

SEQ ID NO: 31812 - DNA, 120 bp, Homo sapiens
gtccgcatctccacccagtgatacactgcgggggaagagaggggtcaggctgcgctctgggagccccctgcaagccccacccctctcacccagggaatgcagtcacctagcctgggtaac

SEQ ID NO: 31813 - DNA, 120 bp, Homo sapiens
tagcgagcagccaggaataagaaacactgccccagaagggaggtcctcggacttgaggggccgcgccccaagagggacaccaggagcttccacagcgccaagttcatggacggtgtaaag

SEQ ID NO: 31814 - DNA, 120 bp, Homo sapiens
tgtcgccccacccacttcccaggagaaagaccaacctcctttcttgccttattttcccaaaatgcaaagttggggctacagatgggggagaggggggctcctggctccaaagggcagctt

SEQ ID NO: 31815 - DNA, 120 bp, Homo sapiens
agtcgatgctaagtgcctctgaacacttagatacacttgtaataatcaatcatttttgcaagtctgatggctccaatcctagaatttcatcagccctgaaggtgcagctaagagctgcga

SEQ ID NO: 31816 - DNA, 120 bp, Homo sapiens
ctgcgcactaataatttcaaaattaactcaatccagaagaaaataacttagcatttagaaccttatggtcacaggaaattaacatgtaaatttctgtatgtattttggttgccgacatat

SEQ ID NO: 31817 - DNA, 120 bp, Homo sapiens
ggccgcaataggcagtgcttcctcccacagacctggcttgatctttccattacagcaacccgagactgcagtaacacacaatgctccagttaccagaggggcatgactggttccatctgc

SEQ ID NO: 31818 - DNA, 120 bp, Homo sapiens
agacggtgctgggatggggatgtgacgcagggtggaccactggattcagcctgggaatttggcaggaaatccgggatgaggcacccctctgtgccctggggtcactaggcaggtaactaa

SEQ ID NO: 31819 - DNA, 120 bp, Homo sapiens
agccgatactcaccactgcaacctcccatacaccaaggggtgggaggtgacccggttgtggtaagctggcagtgaggggagtttcctgggggcttctggaaaaggattttcctccttgaa

SEQ ID NO: 31820 - DNA, 120 bp, Homo sapiens
aagcgttaccctcacttacctgaccacccgcccctccatacacacacgcatagacttcctcccttatgaaacataaaggcacaatgcctggagccgcagcagccctactgaggccatgag

SEQ ID NO: 31821 - DNA, 120 bp, Homo sapiens
gtccgcagggctgtgttcctttctgaagtctccagtggagaatccatctcctcggcttttccagcttccagaggctgcccgcattccttggctcatgcctcccttcctccatcttcaagg

SEQ ID NO: 31822 - DNA, 120 bp, Homo sapiens
cagcggggcagcatccctcaaatcattccctctcttgcctccctctttcccttataaggacccctgtgatcacactgacctgacctgcataattcaggatcatctccccatccccaaatc

SEQ ID NO: 31823 - DNA, 120 bp, Homo sapiens
gtgcgcgccaaaggaataaacacagatgagctggaattttcctactgcccagagatatctcacagcctccctgggagcaccaaaagtgcactttgcaggcatggcctcaacctgcctaac

SEQ ID NO: 31824 - DNA, 120 bp, Homo sapiens
catcgatgatttatgcttctagcatgtactgttctttcctcaggcagccacagctactgctccagcctctcctgtgagacagctgggcgcagcctgctgagtcaaaagtatctcagccaa

SEQ ID NO: 31825 - DNA, 120 bp, Homo sapiens
ggacgcctgacctgagagaaagcagggccgccagtgcaccctgggaaattccaatcaccatggctgggggccacagcaaagggcaatcagcagtgtgaagacactaatgatgtaattaaa

SEQ ID NO: 31826 - DNA, 120 bp, Homo sapiens
actcgacctgtccctaactgagctccaggtctttctgtccaacctgcccctcctccagtcggctgtctcacacccaatccatgggaaatcctgctggctctaccttgtaaacaaatctac

SEQ ID NO: 31827 - DNA, 120 bp, Homo sapiens
aagcgatccaaatcaccatcacaaatgacagaacaaatagacctcaggagtcccctgaagggatgtccttaggaggcacctcgagtctgtggtgttcccgccaaacatgttcaacatgaa

SEQ ID NO: 31828 - DNA, 120 bp, Homo sapiens
aatcggggaagcaatcaggagactccagacatcgggacacactatcaatcagaggactggctccaatgtcaatgtcaaaaaacaagggcagggatactattctagagcagggtcagaaaa

SEQ ID NO: 31829 - DNA, 120 bp, Homo sapiens
caccgaacaaccaagaattccgggccctggaaagcaaactttaagcatccaaacttacagagggggaaaaaaagtgcactcccttaatcatgtgggctttgtgtgtgctcctccctctgc

SEQ ID NO: 31830 - DNA, 120 bp, Homo sapiens
ttacgccttgtcctggtgttgtcctcacccttcaggtcccaattcagatgtctcctctgccaggaagccctccctgaaccccatgccatgtcaggtgcccagtgggctcccccatctcag

SEQ ID NO: 31831 - DNA, 120 bp, Homo sapiens
atacgtctgtcccccgcaggactaggaattccttgagggcacagattggtgctggtttggtccctgctgtttcgccagcattgccagcacaaggcctggcacagggcagaggctcacaaa

SEQ ID NO: 31832 - DNA, 120 bp, Homo sapiens
tttcgctgtgtcagtcataattttgcaaaggcggtttcagtggttctctgacccagccaatgatgctaaattcccttattttatgtcccacgtagcacaacacagatcaccttttttttt

SEQ ID NO: 31833 - DNA, 120 bp, Homo sapiens
ttccgccatctctgtgctccctccaccccagaaaaatcattgagtgcatttttccccctattcctctcctccttcttcctttctctgagaagggttcccgggaaagtcttctgggaacct

SEQ ID NO: 31834 - DNA, 120 bp, Homo sapiens
gcccgggggagcggggtggtaggagggttgtgagtgaatcttcacacctcaggagtctgtttacacacccgtaaggaggaagaggagaggagaccttctctgaagggtgaggccttttca

SEQ ID NO: 31835 - DNA, 120 bp, Homo sapiens
cagcgctgactcaccagccatgggaccttggactggttgcctggcctctctggtgaccgccctagactagggcctgggatccttcctggaagttttttctgctcacagcccctagtcacc

SEQ ID NO: 31836 - DNA, 120 bp, Homo sapiens
ccgtctccagggacagctcgagttcccagaggaactgcggctcagaggaggggaaccacagccactgtgagtgcgggatgcagggaggggcccaggaagcaaataccctgacctctctcc

SEQ ID NO: 31837 - DNA, 120 bp, Homo sapiens
caccgaccctgccgatagaatttgcacacggcggtctcccagggccccgagctggggaaggaaggctgagagtgaccctgggggcgcggaggagggtcacgtggagaatcaccagcactt

SEQ ID NO: 31838 - DNA, 120 bp, Homo sapiens
ccacgaggggtcgaaagagcacccggatgcccgatgaaagggccgcttccgcagcgctgggccactttcccagaacctgggcaatggggaagggacaaaaggtggggagtgaggggagga

SEQ ID NO: 31839 - DNA, 120 bp, Homo sapiens
gagcggcagaaaactgtcttctagacctaagggtgataggataggcctagtgcaaactccatccacagggtcggtggagagagtcagggtacactcacttcctgggcccctttctgcttc

SEQ ID NO: 31840 - DNA, 120 bp, Homo sapiens
agacgggtaacaaattccctccctgtcccttctgccctaagggtggtgatggcttgggtctcactggtctcctatctccagcataggtctggtcactgctggctgatgaggagttcgccc

SEQ ID NO: 31841 - DNA, 120 bp, Homo sapiens
gcccgtggacaagttcagaaagggagggttcaaatggctggcacctaagacaatgtgactgtagagggtgctggcttttaaaaaagtgaaggatcagccccggtgtggtggctcatgcct

SEQ ID NO: 31842 - DNA, 120 bp, Homo sapiens
gagcgggccacagcgttgatatcagtgccgtccgccccctcagaccagatccctgtgggcaagatgaagggaagtggtaagatgtcagctggagccagggaccgccaagaggagcagatt

SEQ ID NO: 31843 - DNA, 120 bp, Homo sapiens
ttccgacctagcctgtatctatccgaggatatgagtcagaattaccttaaaatgtgaatccgagcctgcccctgctctgcttaaaacccttccatggctccctggtgatcttagaagaaa

SEQ ID NO: 31844 - DNA, 120 bp, Homo sapiens
tcacgcgtgggcttttgtatgtactattccctttgccaagagactgctttccttcttcactgccctggaaagtaactcctcatcctccaggtcctagctcagatgtctcttcctccagga

SEQ ID NO: 31845 - DNA, 120 bp, Homo sapiens
ggccgtcagtcatggtcactgccaagcccacggcaggcacagaactgctcagggaatatgtgtttgcttcattcgtgcctgaatgaatgggtggctagggcaccggcagtgtggatctct

SEQ ID NO: 31846 - DNA, 120 bp, Homo sapiens
ccacgcccatttggtttcattttattacagctctaatgagtcatctcaccctaccctttcctcttacacaaatacagcccacatgcagtaaagcagtgagcttcccacactggaggtaag

SEQ ID NO: 31847 - DNA, 120 bp, Homo sapiens
cagcggggatgtctctcagaactactgtcctcagtgagacctctctcattccagaactcaccaaacaccccaaaccctaggacacaagtagctgtggcccattccatgttcctcacagca

SEQ ID NO: 31848 - DNA, 120 bp, Homo sapiens
atccgcactggtgatctgcttacaggtagccgggtcccctggggcagaaaatgggaggagacattcagagttggaagaactacccagtaaacccatccctttcttagacaatcggagctg

SEQ ID NO: 31849 - DNA, 120 bp, Homo sapiens
caccgctccccggaggtctccgatgaaaacggggccgagtaaggggcagagcgctgcctctctgcaggccgtgtgctttgctcggttgatcttgcagagcctaagacacaggcccagaga

SEQ ID NO: 31850 - DNA, 120 bp, Homo sapiens
gatcgccaaagatcacacagcacgaagtggcagggacgcgatcctggaagaagggagtcaccaaggacccttccctcctaatcagcaaggtgctccccagcgccccccacccgcagttcc

SEQ ID NO: 31851 - DNA, 120 bp, Homo sapiens
tggcggtgggggcgggtacctgtgggtgggacagcatgagagattgtacacacttggtgcaggggtcctcaggacgataaggacaattcagtaactgccctccctcatgaccttgatgac

SEQ ID NO: 31852 - DNA, 120 bp, Homo sapiens
gctcggctctctgccccagagctccccgcttccgttccctgtcccgccttggccccgccccctcccatcaccccgggctgccagcgcctgtcacctctcccagagccgagacaaggcagt

SEQ ID NO: 31853 - DNA, 120 bp, Homo sapiens
cagcggtggcaggggctgcaggagcaagtgaccaggagcaggactggggacaggtgagggctccccaatcccagcccattctccctgcccccccttgacctctcaagtctctggcactct

SEQ ID NO: 31854 - DNA, 120 bp, Homo sapiens
ctgcgtgtttccatctctggttagctgctagataacttctctttcccctgctctgtctccctccacgtctctgcctcttctttgtctcctagcccacatctgcgtctctttctctgtttg

SEQ ID NO: 31855 - DNA, 120 bp, Homo sapiens
ctccgtctctgcgcctctcagtctttacatttctgtctcttgtgtctgtgacgccgttgtctgtccttctgaggctcgacctgagatcctctctgcttccgtctttctctacgtggagcc

SEQ ID NO: 31856 - DNA, 120 bp, Homo sapiens
agccgcgggggcgcgggtgagtgggtgtcgggcgttagaccgatttccaggcatctgcacatctaaccccggatctgtcgcttctctagtccctaagtatttggatgctgggaaagggtt

SEQ ID NO: 31857 - DNA, 120 bp, Homo sapiens
cagcggggaaagttttgtaaggtcaggttcctatgtgtgctagaaaaccctttgggcttggagagtgggagctcggatgggcgtttcaagttctccaccaggctgtgggaactcagatgg

SEQ ID NO: 31858 - DNA, 120 bp, Homo sapiens
atccgaagaaatccaaaatccgaaacactttttagtcccaagattttcgggtaagggatacttgacctgtataaccaactgcccagggaggcaggctaacacagcaaaagccagtctcta

SEQ ID NO: 31859 - DNA, 120 bp, Homo sapiens
tatcgaaaagctttcaaatactactttaaaccaccgaacctaaaaatatcctctccagcactgaagggccgaatctcagtcaatctctcacagatcccaacacagcaattccccaaacta

SEQ ID NO: 31860 - DNA, 120 bp, Homo sapiens
tcccggaatcctatactccccccaaccctcctccattatctcccaattccactagaagcctccaacagcagacgaactctttgaaaacacaaaagctccctaacactttaagatgaatct

SEQ ID NO: 31861 - DNA, 120 bp, Homo sapiens
caccgcgcccggtccctgttccttctatgccctaccctgctgctcctttgtccagaatcctgactcatccatacctcacccatggcttgttggccttagagtccactgggtcccctccct

SEQ ID NO: 31862 - DNA, 120 bp, Homo sapiens
ctgcgcctctctgaagccagtgttttcaaccataagcttactatcacagccaatgaattaagcccagaaagctcacaataaaccaaactgtttcaaggtgaatttacaaagttgtcaaac

SEQ ID NO: 31863 - DNA, 120 bp, Homo sapiens
aaacgaacaaaagcaaactaacaacaacaacaacaagaaaaacctagttagaaatattttctcttcactgaaacacctggagtaaggccagactgggtatttggcggggacaggaatggg

SEQ ID NO: 31864 - DNA, 120 bp, Homo sapiens
agtcgtaattggatttaggagcccagaggtggagggcagggacatggtgacaacatgagagagaaaggagacagcctgacatcttccctcttggttcctctctactgccttctctttccc

SEQ ID NO: 31865 - DNA, 120 bp, Homo sapiens
acacgtactgagcccttccataagtattggagtaagggctcataaagtaagttccactatactgcattatcttcccgaaacttctcaccttcctagggttactgatcccattttataggt

SEQ ID NO: 31866 - DNA, 120 bp, Homo sapiens
atccgatccagaggccccaacccattgcgtccaccgttcgcctgtcccttggagcttccagaccccctcactcatcctaaccctgatcctcataccctcgccgcaggttaagcccccatc

SEQ ID NO: 31867 - DNA, 120 bp, Homo sapiens
gtccggccctggggcagggtgttccgcttacagctagtaccaagtggagggggcagggcccctgagtcaggaccctgagtcccccacgtatatggcagggcacagcatggggagggctgt

SEQ ID NO: 31868 - DNA, 120 bp, Homo sapiens
ggccggggatacaacccccagcaccaccagggcttggagaggccacccaggcagaaggatgtggtgactggggtcttcagcaaccgcatttctggggctcccccctcccattcctgtccc

SEQ ID NO: 31869 - DNA, 120 bp, Homo sapiens
ctgcgtcttcagcaccaatgtcgggagaggccacggggccacactgggtcacagttccaagggctcctccacaggcaccgactggagctgggtcagaaccttggcctcagcttccaaccc

SEQ ID NO: 31870 - DNA, 120 bp, Homo sapiens
cctcgtcaacctcaccccctgcggtggcccccaggagcagcccctcagggtcggggtctggcagcctcagcacggtgtggggggcctgtgtccccagccccttttccgcttccagcagcc

SEQ ID NO: 31871 - DNA, 120 bp, Homo sapiens
ctgcgcttagttccagccctgctgaccagacaggcacggccgcgggtgacaacatcagcccctctggtgggggcgccgggaagttgggcaggaggccaggggagtcaggggagaagggca

SEQ ID NO: 31872 - DNA, 120 bp, Homo sapiens
cagcggcggggggtggctgctgtgcagaaagggtgcctagggcgtgagcctctgggagagcagggctgggggccaccgggaggcctccctcaggcacggagatggccgtctctggcttca

SEQ ID NO: 31873 - DNA, 120 bp, Homo sapiens
ggccgggggctggcggcaggacctgggagacgagcatgctggtggggaaggtggcggtgaggatgatcttgccctgctgcagggccacacccgtcacgatggggctgccagacacagggt

SEQ ID NO: 31874 - DNA, 120 bp, Homo sapiens
gaccgagcgcaggtgagagccaggagagcaggccaagccagagagaagtggagactgtgcagctggagggcgggcggagggagccttgtggtgggccttggggcactgggacttgccagg

SEQ ID NO: 31875 - DNA, 120 bp, Homo sapiens
ctccgagatgactgcacccctccccggctctcacctaggcctgagggagggagatgggggtacctggggcagtggccgaaggcagctgcagggcagtcacgcccaccccggagttgatga

SEQ ID NO: 31876 - DNA, 120 bp, Homo sapiens
gcccggctgccaacagctgcaggggccccacagcctggggcagggtcaccacctgtgaggtgggtactacctggggcaggttcaatagtggggaggtggggctcaggcccgtgggatacc

SEQ ID NO: 31877 - DNA, 120 bp, Homo sapiens
ccccgggggtggggagagcggtaccacttgtggggcagccacagcaggcactggccccgggggcagaggaaaggtggcagccgtcggggggccaggcaccacttgggccaggggccccag

SEQ ID NO: 31878 - DNA, 120 bp, Homo sapiens
tcccggagcagccacctgggcccctttggtctcaggggcctccgactgagcctcctccagccgcacctcccctgtctgagggtccaggaccagagaggtcttggtctcgctggccccctg

SEQ ID NO: 31879 - DNA, 120 bp, Homo sapiens
ctgcggtggaggggcacccccgcccccagtgagcagcagcgggcccaggctggaggcctcgcccagggccaggccgttgatgatgacggggcccccgttgaggagcactgctggggagcc

SEQ ID NO: 31880 - DNA, 120 bp, Homo sapiens
agccgctggctgccaggaagctcccgttcaccaggatggaggaggaagccgggcaaggcgcgggagggccggtccctgccaggaatatggagccctgggcagcggcctcggcggacactg

SEQ ID NO: 31881 - DNA, 120 bp, Homo sapiens
ggccgcccctctctccaggtcctcaggacttcggctggactcgtcctcagtcgtgggattcccatcagactcgctggccggagaaatggctgtcagctggggtcccttagcctgtggggc

SEQ ID NO: 31882 - DNA, 120 bp, Homo sapiens
tcccgcatagccagccagctgctcccccacctttccctggcccaagtttcggtggatcattccaggggttatgacgcctctctgagaccactccaaactccagggccttttgcaagccct

SEQ ID NO: 31883 - DNA, 120 bp, Homo sapiens
ctgcgtggacaccactgcagagaagcgctggggagggaagaggcccttgctctcccccacctcggcctcgggtccccagaggctgagctcccaggttgccctaaaagttccttggttggg

SEQ ID NO: 31884 - DNA, 120 bp, Homo sapiens
tcccgcctcccagccttaacccctcacaagccagccccccaagctccctccttccagggcccttcagaacccttcagtgctagagtagggggaatgcatggagaatctcagctgtcacac

SEQ ID NO: 31885 - DNA, 120 bp, Homo sapiens
tcccgacaagctccagaactgggggctagggggtgagggctgggggttggggctgggtgggagaaaggggttgaggcctgggaaggggacgggaggccagggcagcttcttgggtgactc

SEQ ID NO: 31886 - DNA, 120 bp, Homo sapiens
gggcggggcgagaaggtgggcgcggcctttgagcctgtgaccgacttgtggttggctgcgggggcggagcccgcaatggaaagaggcgtggccagttagaaagctcaagtccttagcaac

SEQ ID NO: 31887 - DNA, 120 bp, Homo sapiens
aaccgcgccctgggaacgtttgcctagcaacggagggatttttttttttttttcccccacgacaaagaagccctcatccatagtccagccttcccatgaagtcacagccaaccccaagtg

SEQ ID NO: 31888 - DNA, 120 bp, Homo sapiens
tggcgttctgcacggccagctccagaggctcgggctcaggcacctgggcactgtagtgtgggaagcccagctcagagggcaagaactgaagggcagggtcatcccttatgtaaggcccgt

SEQ ID NO: 31889 - DNA, 120 bp, Homo sapiens
agccgctgcagcattaggctggtggtgagctcggcgacctgcatcctgctttcatcagagtaaggctgaggctggaactctgagggaaagcccgtgttcacagatgggtactccatgcca

SEQ ID NO: 31890 - DNA, 120 bp, Homo sapiens
agccgggcttcctcagcctggaagacctggggcatcagcaagttctcctgttgggacaggctgcccctctgtgaccaaccaggggcgtttcgctgggcgtctggaggtatctgctgcctc

SEQ ID NO: 31891 - DNA, 120 bp, Homo sapiens
cctcggggtccgctgccagggcctgagcttggtcccgactgtgccgcctctgggaggcctgagaagtcctccggcccggaggctgctgggcagggcgctcagggtagggcggcaggtctc

SEQ ID NO: 31892 - DNA, 120 bp, Homo sapiens
gttcgccaggaggcacagatctctaggagaaaggcttgcagacaaggaggccaagcgagagccacctgtcgacaccgccggtttctgagcaccgagagagggggccgttacccgtggagg

SEQ ID NO: 31893 - DNA, 120 bp, Homo sapiens
gggcgcggggagcgggccagggtgggttccgcgcaggctctgggcgcgcactcccgatcccgcgcagccccacggtggacgtcgcgccagactcgagacggcacccgcgccccaggcccg

SEQ ID NO: 31894 - DNA, 120 bp, Homo sapiens
acccgcaggtcaagccccgccccgtcccccagccccgagtccctgtcccaccccctttccccctcgagccccgtcagctgttccccttggcctcgggttccctggcgtcctcggcagccg

SEQ ID NO: 31895 - DNA, 120 bp, Homo sapiens
gtgcgagggtctgggggctccgctcctccttcaaggtcagcccgcccgctgccgtctcctggtgaccggggaaggaaagggcagccgggtggagggcgcggtcacctccacgctcccctt

SEQ ID NO: 31896 - DNA, 120 bp, Homo sapiens
ccccggcccagatccggcttcttccttcgcagcggaggctgctctccctaccttgggtagggggccctcgagactagagtccaacagcgcggcctcggtcagccccgagtcgtcatccat

SEQ ID NO: 31897 - DNA, 120 bp, Homo sapiens
gcccggggtctcgcactcaggcccctcctcccggaaatccatggcttcctcagacgggggcgggcctggccgggccgacggagagggagagggggaggaagaggagggggctcccactcc

SEQ ID NO: 31898 - DNA, 120 bp, Homo sapiens
tcccggcttcagcttctgttcctcctccagctgccgctttaaggccttctcctgggccagtcgcaggccgatgaggtcctgagggggccggggtgctggggccggggccaaggtcagggg

SEQ ID NO: 31899 - DNA, 120 bp, Homo sapiens
ggacggccggaaagagaaggaaccaccctgaggtggtctttgagttcttcaccaagagcatggggaggaaggggcagttgtcccccagacccccaactcccagcaggagcatcccctggg

SEQ ID NO: 31900 - DNA, 120 bp, Homo sapiens
agacgggtggcccagaggcaggggtggcctgagtctctcggggtcaggaggaggccatggtgagccttgctggcttggggtagggggtgggagtctggggatccagatgggtgggctgca

SEQ ID NO: 31901 - DNA, 120 bp, Homo sapiens
ccccgcaggcgcctccttggcctctggctcctgcttgccgctggcctccaagatggtcatgatggagttagggatgtgagcttgctgggtggagagcaggaagggggcgctgggggcagc

SEQ ID NO: 31902 - DNA, 120 bp, Homo sapiens
gtccgggggccctaaccctccagaactcccagcagtgcagggccttcttgtgtccgcctccatccagtccccaccaaccagagggacccagggggccgcccaccgcacaccctgggtggg

SEQ ID NO: 31903 - DNA, 120 bp, Homo sapiens
gagcggacatgggccagcaggggctcccggagctctgggcacttgtcaaagacggctcccagctgctggggcggcagctgcaggatgacctggaagctctggggctttgtgcgctggcag

SEQ ID NO: 31904 - DNA, 120 bp, Homo sapiens
agccgtcgggagaggcacacaggcatccccccgagccttgacactgggagaaagaccttgccaagaccatgcccaaatcccaccatccaagattcctctggatgggcaacaagcagcccc

SEQ ID NO: 31905 - DNA, 120 bp, Homo sapiens
ccccgacctccctccagaggcctttgtcttcccgatccaggcggctggaccacgagggcaacttgggaagggggtggaagaaaactcagccgccttttaccagagctccccctgggccag

SEQ ID NO: 31906 - DNA, 120 bp, Homo sapiens
ctgcgggagcacctctcatgacattctcacggcagcctccagggggcgaaattacccctgctaaacagcggaggtccgtgccggtgccgggacctgtcctgggtcacatgtacattctca

SEQ ID NO: 31907 - DNA, 120 bp, Homo sapiens
tcacgtgcaattagcaccacactgttccaaatggagaaactgaggccctaggacaggcacagacccgcaagaggtacgaccatctggggacccagcagctcagatccccagggcccgggg

SEQ ID NO: 31908 - DNA, 120 bp, Homo sapiens
tctcgtgaccagtgtctctgctcccttgggacaattttccaccagcaggagcagctccggggagttcatgcccattcctcggatctagaggcagagacagggatgaccagacccagggtg

SEQ ID NO: 31909 - DNA, 120 bp, Homo sapiens
gcccggcagggtggcttgcggggcatgctggcgcccagggtgagactgaggtgacagggtttggagggcgggggaaaggtggggaagggcaggagagtcagaagaaccttggcatctccc

SEQ ID NO: 31910 - DNA, 120 bp, Homo sapiens
ctgcgggccactcctctgtggctcagacttgacctgacctcgaatgcccaccctgtgcttcgttcactggtgaagatgtttctggctccacccacctgcttcgtgactcggtttctcagg

SEQ ID NO: 31911 - DNA, 120 bp, Homo sapiens
aggcgcagctggcttggctgcgagcccagaccaggctccacctgctgctgcttcctgagcctgctctgcggtgaatgccaaacaggagccagggccaggctccacctctgcccagtaacg

SEQ ID NO: 31912 - DNA, 120 bp, Homo sapiens
ttacgctcctgactaaaaccgactgtctctgccctcgagaagctcacagccctgccagataacttttctgcaaagtgagatcacttttccacagctggaccaccttgagaatggggctaa

SEQ ID NO: 31913 - DNA, 120 bp, Homo sapiens
tcccgtttatcacgaaaatgttctgtaatccaaaaatgtcaggggcagaaagaaaaaaagtggtttcaaatcctgctgcaaactggaagagcagaccttctaatctcaggtgctagtctg

SEQ ID NO: 31914 - DNA, 120 bp, Homo sapiens
tcccgttagcaacactgggaaggccagctcataaagtgacagtaacacagaggtttatgtgcctgagttcatggactccttgcatcagcgtggagggactggaacgtcttccccattttt

SEQ ID NO: 31915 - DNA, 120 bp, Homo sapiens
tgacgggcccaaggtcgcagtgagaaagcgagaagtgaacgcgaacccaggtctatcagctccaggctcctaactgccgggccacttgacgtttcctcaggagtgacatgcggaccgcct

SEQ ID NO: 31916 - DNA, 120 bp, Homo sapiens
ggtcggcccggggtgaccacccttcgggcttggcacactctgaggtggagcaggttggggaagagctggagctggggacacagccttgcccgtgggtgggcagggcctggtgggctcagg

SEQ ID NO: 31917 - DNA, 120 bp, Homo sapiens
caccggctgctcaatgaccctcagcaccgtccgcttgatgtcggcgatggcttcagtgtacacggccgccagttcgtggatcagcttgtggttctgaggcaggagggccaggtagaggta

SEQ ID NO: 31918 - DNA, 120 bp, Homo sapiens
ctccgtccagggtgctgccacctctgacagggcaggagcgggcatcagattggcccacactcttctccaaccccctcggaccctcaggaatgtcccttcttgggcagtggagccggggag

SEQ ID NO: 31919 - DNA, 120 bp, Homo sapiens
tatcgtctccaatttacaaaaaagaaaatgaagtacagagacaggtaacttgcccaagttcatgatgagtaagcagtgcagctgggatctgaacctagcaccagggatcttaactactgc

SEQ ID NO: 31920 - DNA, 120 bp, Homo sapiens
gggcgtgaaggagaggaaactggtgcagggctgtcaggggtggcagctgaaggcagtactcactgtactggatgtaggggtggtcacgagggatgcggtccaggctgatatcatgctcct

SEQ ID NO: 31921 - DNA, 120 bp, Homo sapiens
tggcgtcggggtatctctgagtcagccatgcggggtgacagggtgacaatgaggccctccacaaacttgatggcgtgggtgcggatgccgtcattgtcagagtccaatagcaggatgatg

SEQ ID NO: 31922 - DNA, 120 bp, Homo sapiens
ccccgccatggcagataccatgtcccagcaggcctcctgtagctcgctaatgacccgtgactttaccatccactgccagcaggccaggaaggaatggaagagacacacaaagaggtgaag

SEQ ID NO: 31923 - DNA, 120 bp, Homo sapiens
caacgcatcaatcaccaacaccctctgccaatacccagagaaccatgaatgatgaatacattcatttggttaacagttactgagttccaactctgccccagcccagtgctcggtgatgct

SEQ ID NO: 31924 - DNA, 120 bp, Homo sapiens
cctcgccctgccctcatggggatgcagagagtgaccactcagtgtgatgaaggcacacatcttcagggtaaaggactaacagtgctgacttcacaaggtggtggtgattaaatggattca

SEQ ID NO: 31925 - DNA, 120 bp, Homo sapiens
attcgttttattaatgctaatgtacatcacaccatagagtgttcttttcctatcacactccataatcaatatttatgtgattcattaattaaggtctacctccctccttgggttatgagc

SEQ ID NO: 31926 - DNA, 120 bp, Homo sapiens
aaacggatggtcaatggaaggaatgaaggttaagtgcaacttcctgacctaggagacaacgttagctctccatgttatctgttcccacagaccagtggcacatcttgcccataaagagta

SEQ ID NO: 31927 - DNA, 120 bp, Homo sapiens
gctcggatgctggttttgaaccccaacatattagtttgtcaacgagacatatcaggcaggatggccctgggtggggagggcgctctcacctgcagggccaccttgtagagctgggtcatg

SEQ ID NO: 31928 - DNA, 120 bp, Homo sapiens
ccacgttcacattctcgtccctcaagagcatgttgaggtttgcaatgagtttcagcagcaactcaatgtctcgcttgctgagggatggagaaaaaaggggcgaggtcaaggtgtggtctt

SEQ ID NO: 31929 - DNA, 120 bp, Homo sapiens
ccacgtgtgtgtgtgtgtgtgtgtgtgtgtgtgtgtgtgtatgagcgcacacgtgcatgcatgcacaccagtgtgacgtgtctttcagtttctgtgggtccatctttttccttgtctctt

SEQ ID NO: 31930 - DNA, 120 bp, Homo sapiens
cctcgctcacccggcccccgccttttctctctactgctctgacttccctcctccctccacctgggtctctgggtttctccctccttctctcagagtgactctttcctggggtccgtctcc

SEQ ID NO: 31931 - DNA, 120 bp, Homo sapiens
ttccgcctctacctgccacctcgcaggccaggccctctattcctgtcgctgcgccccgccttgccggctgcgtgtcacccccgccccctgccgcgctggctccccgtccgtcccaccagc

SEQ ID NO: 31932 - DNA, 120 bp, Homo sapiens
ggccggggaattcctcccggttcctggaaaaaacaactggggccgagagaaaggccctcagtctccccaggcacccgcccccctccctcgggcctgggggtctctcccggagtcggccag

SEQ ID NO: 31933 - DNA, 120 bp, Homo sapiens
gcccgaggcaggaagccctgcggtttctggcttctcccaggcggcctccggatctggcccccgccccccggccaacagcccaaatattattccgcgggaggagtcggtggtggcgggagg

SEQ ID NO: 31934 - DNA, 120 bp, Homo sapiens
gggcggccaggcctggggcttcctgtccccaggctcgggcctcaggccgccccagtggggacctcaggtggccggaggggcggggtgttgttgtagggtcctcgggggagggtggggcca

SEQ ID NO: 31935 - DNA, 120 bp, Homo sapiens
atccgtcggggtgtctggtggccaccagctctgctggcgtgggcaggtgtgacccccaccccagggacagccggctgatgtccagcgtggaaaagtaccacggtcagacatgggacgcat

SEQ ID NO: 31936 - DNA, 120 bp, Homo sapiens
acacgggacgccacgaatcagggatgtggggtggccatggggacacaggcggccctgggctgtgggcctaaggtgacatggtccaggggaggggcctgtgggttggagcagaggccgggg

SEQ ID NO: 31937 - DNA, 120 bp, Homo sapiens
ggtcgcagctgtgggcagagggctgtcagcattaggaggtaccagatgatgatgatgatgatggtgatgatggtgatgatgataattaaaagatcctagggcttcccatgagtcagggat

SEQ ID NO: 31938 - DNA, 120 bp, Homo sapiens
tcccgctccccccaactttactgttgaatgaaactgaggcacagagaggtgaagtaacttgcacagataatgagtggggtgctagggcatgaacccaggcagtctgggcccagagtcagt

SEQ ID NO: 31939 - DNA, 120 bp, Homo sapiens
ccccgctgttctgcaggatgggagggatagcggcagtgcagcacagtcctggggtcccaagccctccctggcaggcaccccccctctctgccacagcctgccatatggcaggaggtgggt

SEQ ID NO: 31940 - DNA, 120 bp, Homo sapiens
aggcggttcacagctaggtaggacatgtgtgtctaagcggtttgtcattgggctttattcgcgtgtcttgctgtcagcgtctcaatgtcactgtgtctgtgggctcgtgtgttactccat

SEQ ID NO: 31941 - DNA, 120 bp, Homo sapiens
gagcgcatgagtgtgtgtgcctggacacctctatgttggtgtccattgctgggtttgtgttggtgtcactgactgtctcaccgtgtacacgtgtaggtgactgttctgtcattgtcttct

SEQ ID NO: 31942 - DNA, 120 bp, Homo sapiens
catcgctgtgtgctttgtcactatgcctctgtgcctgacaacacatttgcctgtcattgtgttttctgtgagcatgcatcagtgtgtctgtcaccgtgtctgtgacagtgtgtctctgtg

SEQ ID NO: 31943 - DNA, 120 bp, Homo sapiens
aaccgagctgatgggtcaggactttaggggcctccagattcaggtgatgggaaccctgggttcccgaggacatctgggggcaaacttggatcccagagctgtctgacagtgctgggtggt

SEQ ID NO: 31944 - DNA, 120 bp, Homo sapiens
atccgcgggcctctgagccccgcattcccccttcccggaatctccaccttagcttggccggggaggccgcaggggtgggggctgggctcttggggccgccccctccccttaacccctgct

SEQ ID NO: 31945 - DNA, 120 bp, Homo sapiens
tgccgcagcccgctcaggccccgccccgtgacgccagcgagcaggaagtcctggttaatgatcagccacccggacaggtgcgggacaaggccgcgcacatcagaagcagccgcggagcga

SEQ ID NO: 31946 - DNA, 120 bp, Homo sapiens
ggccgccaaaggggcttgtctcccaagacgagggtgaggaatccagctggggcttcccaaacgtccgcctctggggcaccgccagaggcaagaagtagccaagttgtttctaggcatcct

SEQ ID NO: 31947 - DNA, 120 bp, Homo sapiens
ccccgtggaggtaaatttcctctttcctcgggcagtccctctagcagtctaccctaaattctcccttctacccggcaagaacccactgcccatgtcttctaggaagcctcccgctgcctc

SEQ ID NO: 31948 - DNA, 120 bp, Homo sapiens
ccacgtaggcgctgagtcctccaccttccaggtagagataggggatgggtcagctacagaagggtaatctactcccaagcctgtctgtggctcccctgcaggagccatcccctctctgag

SEQ ID NO: 31949 - DNA, 120 bp, Homo sapiens
cctcggacaggagccacaagctttctccccccacccacaatgcatctaccccaggggacccatctgggtggaagaagggagtatgtacacagatagaggtggcactgggctgggtcgggg

SEQ ID NO: 31950 - DNA, 120 bp, Homo sapiens
atccgcggcagcggtgggtggcaaaggggcagagggcagtagcctggaggcagtggtagcctaggggtcccgttctttcttaactttgatgtctccagcaaggatggtggcgatctcgcc

SEQ ID NO: 31951 - DNA, 120 bp, Homo sapiens
gcacggaggagccgaccagcgggcacttgtctccgctcgggcagtacacctccccggccgggccctgcgccttgatgaactcccgggagcagggaaagcagaacttgtgtccgggcaccg

SEQ ID NO: 31952 - DNA, 120 bp, Homo sapiens
ggacgaagtgggtgtcttctagccgctccctgcacagggtacagcacaggggggccccaggggtcgccccagtgccgctgccacccccgctgacagcttcggcccccgctgtgggactga

SEQ ID NO: 31953 - DNA, 120 bp, Homo sapiens
cttcgccgttgcgggccacaaggcgatgctgggttggcggctgggccgtggaggaggctgcagggctggcgccccctgcacgcacaggccccccgcctccgccagggtccttgggtgagt

SEQ ID NO: 31954 - DNA, 120 bp, Homo sapiens
cttcggccacattcttcagggcggcaatgggcgagggcacaccaggggtctcagcggagtacgggccgccgggtgccacccagtgccgttgctgctgctcctcggtggtcatcttcccag

SEQ ID NO: 31955 - DNA, 120 bp, Homo sapiens
agccgcctcgccctccggctcgggggatgccttgcgacggcgcggcgtgggcgccaggttccgggatggggctcgcgggggtgggccacagagagccgcaggggccggctctgggtactg

SEQ ID NO: 31956 - DNA, 120 bp, Homo sapiens
ctccgcgggagctggctcgcggaagctgcggacgccgtcggtaagcagctcgcccagctgccgccattctcctgatccatgccggcgttcatattcgaggtacttgaagcccgaagaagc

SEQ ID NO: 31957 - DNA, 120 bp, Homo sapiens
gcccggctcccgcagagcatcgtggaacatctggcgagccactgccaggacgccggcgtacacattgccggaaccacaggggtattcggtgaagagcttcagctcgaactcgtatcctgg

SEQ ID NO: 31958 - DNA, 120 bp, Homo sapiens
tagcgacagattgaggtgggaagccaggaaggatgggggtatttgagccaggtagcttttcagatacagagcagatgagacctgtcagccaccgatggacatactcaagagcagaagaga

SEQ ID NO: 31959 - DNA, 120 bp, Homo sapiens
ggtcggcagaatggaagaacagtactcctggggaggcaccacgacgggcatgggggtccctgtgctgagtgctttctgcaaagtcacagccttgactttcctcgtgggaggtgtgagttc

SEQ ID NO: 31960 - DNA, 120 bp, Homo sapiens
ctgcgggatgtctgagaatgatgtaaggagaggccgttcccaggctccatggctccccttaacaattgcacctattgttcggagaaccccagatactgctggcttgggagtttttttttt

SEQ ID NO: 31961 - DNA, 120 bp, Homo sapiens
gaacgggagatgatactgactagaaattcatcagccccggtgtttactacgtcctaacctccgcccccaccccaaggccacgaccgctgtctgctaacctgacgccaaggtgccctgttt

SEQ ID NO: 31962 - DNA, 120 bp, Homo sapiens
ttccgtctccgcctgatgcctggcagaaaatagctcttgctgggggtccagagacgagtggggaggggaaagagttagaaaccccgagaaagtgtggggagaaacacgtaaatgggcagc

SEQ ID NO: 31963 - DNA, 120 bp, Homo sapiens
gaccgagggacccgctgcgagaccgagagacctgctcatgcggggaccaagacaggggagatgaagaccagggggagagagaccccgagggccagcgaggtcaccatcatcatcattgtc

SEQ ID NO: 31964 - DNA, 120 bp, Homo sapiens
ctgcgtgcttgcctgtgccatgtcattaaatccccagacagccttgtcaagtatcttgtaatatcctcatttcacagaacaggaaacaggcttggaggtgacatctgtcatggagtgatt

SEQ ID NO: 31965 - DNA, 120 bp, Homo sapiens
ccacgtggaggaggtgtggcgcctctcaacatctattccactctcctagcgcaccttcctgcgactgcagcggctggagggctcaaaactacgtttcccagaatgccttgtggctgcgca

SEQ ID NO: 31966 - DNA, 120 bp, Homo sapiens
ggccggaggttaggttccaccaatcaggtgcctccgcgggaagcttgaatttcttaccgaagtaagctgggcgagaggcagcccgaaggccagtgcagatcccggcgagaggctgcggcg

SEQ ID NO: 31967 - DNA, 120 bp, Homo sapiens
agccggctggcggcttcctgatcgcgcaggaggagcagcggttcctggacggccctttctgagcgctggatttgagaatgccctggaggctcagcctagattctgtttcttctgagaggc

SEQ ID NO: 31968 - DNA, 120 bp, Homo sapiens
gttcgcgcctctgagcaacgatgggtacacagacagggagaaatagatgcagacacggacagagacagggaaagtgattcagggagacacacagagaccccatccctgcgaagagacaag

SEQ ID NO: 31969 - DNA, 120 bp, Homo sapiens
atacggaagataacaggcagagaggagtgagaggcaagggcaggtgggccagaaacagggacacggagacctcaccagaatgctggcgtgaaggtgttggttgagaggcctcattttaaa

SEQ ID NO: 31970 - DNA, 120 bp, Homo sapiens
ctgcgatacaatagagaacaaaacagccttggcccttgtacagtattactactcatgtcattaagaaaaatttgttttcagatgacaaagtggaggcctgggaacattgagggtggcttc

SEQ ID NO: 31971 - DNA, 120 bp, Homo sapiens
gaacgcaggacaagtccaatttcagagcccaaagtcattggaactagggtgcctttctttggaatggatcattgctattattctgtgttccttgatgcaagaatttccttctccctgggt

SEQ ID NO: 31972 - DNA, 120 bp, Homo sapiens
ctgcgtgatctgcggcagggggatcggctccaacccccccctgctcctcccttgccatgctctcaggtccccaggatgggggagggtagcagatggcctggggtggatggggtggctacc

SEQ ID NO: 31973 - DNA, 120 bp, Homo sapiens
agacggatatagggagatacgggggtcaggctgagtaccacaccttagaccctttgagtcaaatagcctcacaccacacaggtacatatcccaacatccatgaaattagctgtgaagttt

SEQ ID NO: 31974 - DNA, 120 bp, Homo sapiens
gcacggtctcaacacagtcacacagacacacttataggggataggcacacgtacacacacatacacactcatctgtaatgcacattcagtcatgcagacgcaaggccacaacacaggctc

SEQ ID NO: 31975 - DNA, 120 bp, Homo sapiens
ccacgacagctccacacttggccccacacactcggaaaagttacaaatccatgatcaaagccacaggacatccatggcctatgttacataagacatatcagcgacatgtgatgtatagac

SEQ ID NO: 31976 - DNA, 120 bp, Homo sapiens
tgacgaacagactaagtctttccttgcacacaaattgggtaaacacacacaacacacacatttagatacacggcccacataggctaacgcacacaataactggacttcacgggccactca

SEQ ID NO: 31977 - DNA, 120 bp, Homo sapiens
acacgcacaacacacatggaaagctgtgtgccgctcagcccccacccccgaggcatgcctgcagccccaaccctgcgctccccccatcgagccctcccgtttggacacacacaacagcac

SEQ ID NO: 31978 - DNA, 120 bp, Homo sapiens
gcacggtcggtcacgcactcacactcacacacaaacacaaacctcctgctagatatttttaaacccgggctagttctgctgccatggcaaccgccccaaacccatcaccatagcaaccca

SEQ ID NO: 31979 - DNA, 120 bp, Homo sapiens
caacgtcagctttccaagcaccaaatcctgggggactgcagggccccaatcagaggctggcggagggggctgctgcaccctttgccatcatccatgccacccttgtgcccccaccccaga

SEQ ID NO: 31980 - DNA, 120 bp, Homo sapiens
ccccgaacctgccttttccttccaacctggcagagctatatggaggggctcgttggagtgaaggtcagcttacagaagcctgggtttgagttctggccctgccatttacatgctgtgtga

SEQ ID NO: 31981 - DNA, 120 bp, Homo sapiens
tcccgatttacagatgaggatgataataaagctcccacctcagagggctcctgcgtagtcttcatttcactgagcgtgaatagcccctggcacaagtgccgcctgccattgtcactaatt

SEQ ID NO: 31982 - DNA, 120 bp, Homo sapiens
ccccgctccagcctcaacatcttcctatgagtccctgctgcctctgggagaaattccaaactctcccggttgctcaggccaaaaccttgcagttgcccttgacatccctttcttcctcac

SEQ ID NO: 31983 - DNA, 120 bp, Homo sapiens
cagcggcaccaccgaatgggggtccattagctcccacctggactctcccaggagcctcctccctcagaccccacttccacactggcccaccctttcccaccagcaaccagagtcatcctt

SEQ ID NO: 31984 - DNA, 120 bp, Homo sapiens
aagcgatgacaaatctcaacctgtctttatgctgagaccactccccagtttccggagccgcggccactatctccccatgcgcatgcacacccggctctcccttccaggccctccccacca

SEQ ID NO: 31985 - DNA, 120 bp, Homo sapiens
ccacgtgggcgcggcctaccctcccgcagggggtaataggtggagtcaaggggctacttccgggattctttcccttccactctggggaacaacctttttgtatgactggcagcattatta

SEQ ID NO: 31986 - DNA, 120 bp, Homo sapiens
agacgaatgtttctgtctttcatggtgggatcctagacaagcctcagtttcatcctctgtataatggggatggttataatacccaccagagagcagaatttagggtgagtcattcattgg

SEQ ID NO: 31987 - DNA, 120 bp, Homo sapiens
tgccgcagtgtgcaccgtagagatttcattgcttggttccccagagggcttctctgtctctacagtctatggggacaatgtggaaggctttggtctgtattctggggcagtgaagggggg

SEQ ID NO: 31988 - DNA, 120 bp, Homo sapiens
ccacgtggtggggaggtgaggtcagaatggggtcgggaagggggtcatccaggccaggccacgcgtgtgaatgtggggcggagggctgctgcaggagagagcccatctagggtatggctg

SEQ ID NO: 31989 - DNA, 120 bp, Homo sapiens
tggcggtggtggggagctgcagagtgtggggaaacagccatcaggtgtgggctgccaagggcagtgatttgcccgtgtctggtatgggaggtagtgatgtagatttgtctttggtgagcc

SEQ ID NO: 31990 - DNA, 120 bp, Homo sapiens
cagcgtggagagttttcagctccggccccggggtaagagctgtgaaatctgtgagctatctggggagagccatttggaaggtggagccaggggtggtgatgtaacgctggaaaggaaagg

SEQ ID NO: 31991 - DNA, 120 bp, Homo sapiens
cagcgccatgatgtcatgaggcccgagaagtgggtcaggtgtgtgggccaggatggggcctggagggcagccgcacagtgctcgcagggatggggtggtgacgtcatgggttggtgaggg

SEQ ID NO: 31992 - DNA, 120 bp, Homo sapiens
gggcggggcctcgaaggcaccgctgggatgcgtgaggtcaggaaggaggcagaggctgagaagaggaactgggagaggctcaggactggaatgaaatcagccaccaggatgagccactgg

SEQ ID NO: 31993 - DNA, 120 bp, Homo sapiens
ttccgaagcaaggatggaggatgcaggtagagggacagggtcagcggcgggaggggagagggggctcagggtccggggaatcctagaagtggcggtggtggtggggtcagtggagaggag

SEQ ID NO: 31994 - DNA, 120 bp, Homo sapiens
gtgcgggtggagtgggggttgggggtggggttacaagcaatttgggagggaacagaatccaggtgaaatatgggagtgatggaatacaggctgaaagtgggatgtgtggagcagaacctt

SEQ ID NO: 31995 - DNA, 120 bp, Homo sapiens
atgcgggaagaatgcagttggaataacggggtgcattgaagttgaatatgcgggagccctaggagaccgtgggtggctggtgtagggaggagagtgcggctgcctccctgcccccaaatc

SEQ ID NO: 31996 - DNA, 120 bp, Homo sapiens
ggacgggagagagggggctggtttccggggaatgtagcatgagggttgggctggaatatgtggagtgggaggttctgcagagaggaggggaaggggagtccagaattccgtggccatctg

SEQ ID NO: 31997 - DNA, 120 bp, Homo sapiens
tgacgggcagctggggtcagggaggccgtgtggagctggcacgggtgtgggatttattccatcagcagttactgagcacttaggacatgcctagaggaggggaaggggccgggcagcggg

SEQ ID NO: 31998 - DNA, 120 bp, Homo sapiens
attcggtggctcagtgtctgggatcagggcggggtgggggctaaggacaaggcaatgggatgccgaaaggggctgctcttcgcggggtgggtatggggggtttctgccgagcagtgggga

SEQ ID NO: 31999 - DNA, 120 bp, Homo sapiens
tggcggcggggatgcggtgtggcgggcccccttcctctgtgcggtctcctcccgggagttggggaccacgagtgggggcggtgatgctgtgcggctcctcaggtgttcagttccgtgggt

SEQ ID NO: 32000 - DNA, 120 bp, Homo sapiens
ccccgccccacctgtggtctcctagtgcccaagctgtctgccctcacccccaagatggtgcgatcatgccaactcgtgtgtgatctttttctctctctctgggtgcttctcttcttgact

SEQ ID NO: 32001 - DNA, 120 bp, Homo sapiens
ttccggccctcgattggcctcattccccatctgtctgtttctctgaggacgtagccggctcctccacctatcaccagggcatctcttctttcctccgccacctcagcctccctccacttc

SEQ ID NO: 32002 - DNA, 120 bp, Homo sapiens
ccccggaaaccggtaagaccctctctgtacaccttcctgccagggcggggcctcctctgcccagggctggttcttacctgcgcccttcctctctcgtccccagaactgctttgaacttta

SEQ ID NO: 32003 - DNA, 120 bp, Homo sapiens
ggccgggggtctgagactcctcctgggtatgagggaggaggggctggaggcctggactccttggccctcatcctgggacccctccccttctgcagggcggctgtgagtgtggaccccttc

SEQ ID NO: 32004 - DNA, 120 bp, Homo sapiens
cagcgagaaagaagcggatttcagtcaagaagaagcaggagcagccctgaccccctgcccccaactccattatttattacggagctgccccgcctgggtggccggacccctgggccttgg

SEQ ID NO: 32005 - DNA, 120 bp, Homo sapiens
acacgctgttggtaatcttattaattatttaaccacttggcctgctgaccccctcatttcttggggttgacagagtcgaggtgctccgtggagccagcctgtttccctggacaggggcct

SEQ ID NO: 32006 - DNA, 120 bp, Homo sapiens
acccgcctgtctctgggtgctgcctgggctgtcccggtgggtctgttctggtttcaccccgagcccagcaggagtggagtaaagggagaaggttaatatggtgggagtctggagttggaa

SEQ ID NO: 32007 - DNA, 120 bp, Homo sapiens
ggccggggacagagtttagaatgcagggattcagggtcaaggtctagcattcattctagaagttacttgacagccatcagccagttacgctacagccatcagctagttcccatcgttgct

SEQ ID NO: 32008 - DNA, 120 bp, Homo sapiens
ccggatccagactctgtcccgatcctaggcgcggtctccttccaggccccgcccccgctctaggctcagcctgccttcaaaccctgctgtagaccccgccccaccctaagctcagccttc

SEQ ID NO: 32009 - DNA, 120 bp, Homo sapiens
cttcgtctaggccccgccccaggccctgcacctctaggctcgacctccctccaggccccgccctgggctccgccccccagcccgccctctccctgggccccgccccactctagctcggcc

SEQ ID NO: 32010 - DNA, 120 bp, Homo sapiens
ccccgccccaggccccgccccactctagattggggctccccttaggtcccaccccaattcagcttgccctccctccaggccccgcatcactccagctcggcctcccttcaggccacgccc

SEQ ID NO: 32011 - DNA, 120 bp, Homo sapiens
actcggcctccctccaggccccgccccaccctagctcggcctcccttcaggccccgccccactccagctccgcctccctccaggccccgcccaactctaagctcggcctcccgccaggcc

SEQ ID NO: 32012 - DNA, 120 bp, Homo sapiens
tcccggctctaggctcctgctccctccaggccgcgaccccgaaaccgcgccctctcgggttccgcacctggtcgaagaggtagacggtcacgtccccgtggaaggagaccatcttgcgct

SEQ ID NO: 32013 - DNA, 120 bp, Homo sapiens
ccccgcacaatctgggcctcagcacccactttgtgaacggaagggctgcaccagggcttctccaggcagggtgggaaaggtcctctccagtgctcaacctccccagagctccccagtgcc

SEQ ID NO: 32014 - DNA, 120 bp, Homo sapiens
caacggctttaagccgcaacttcccacagcccaccaggccctcatgccctggcctacctgatttctctggcctctgtccccacctcctctggcctgacctccatctagccacatgggcca

SEQ ID NO: 32015 - DNA, 120 bp, Homo sapiens
acccggccagatccacctctctgagcctctgtttcctcactggcaaatgaacaagggtcacttagccctccattactgcataagtgaactgccctttctgagctgatggcaggggcaaga

SEQ ID NO: 32016 - DNA, 120 bp, Homo sapiens
agacggtccctctcaggtcctcgttctctctactcaagttttactaccttttgctattctctaaacatggtgagccagtgcacatctcagtgccctctctagaacactctcccaccgatg

SEQ ID NO: 32017 - DNA, 120 bp, Homo sapiens
aagcgggccattctctgcctcttttcaccccccaatcctaatccaacccagatcctctgacgcatcttagctgctcatctcccaacattttcatgcagcctgggctgtttcctgatacag

SEQ ID NO: 32018 - DNA, 120 bp, Homo sapiens
gttcgaacaccacaggctatgaggaagaaacgtcctctgtccagcccacttcctgacccttgcccactgagccacaggctcctctatggagatgataactgtttcctcaagtgtggctgt

SEQ ID NO: 32019 - DNA, 120 bp, Homo sapiens
acccgtatttaaagaagttgcgcctcccagagattctgctggaactgtatttcctatgtccacatctaaacaagggctatttatttttacccttcatttatcttaaagagttttctctgt

SEQ ID NO: 32020 - DNA, 120 bp, Homo sapiens
gtacgagggataggagaagcagcccaagtgtggccaggcctggccctgcaggctgagtctggggagagggcagggctgggggcctgatactcacttggtgtggctgtgcggggttcctgg

SEQ ID NO: 32021 - DNA, 120 bp, Homo sapiens
tgccgaaatgccggtacacctctcggcccttgcgaggacctagggaaggggaaggagaaccgggtgagacagggatctggcgcccagcttctggcctcccagatccaggagggtgaaggc

SEQ ID NO: 32022 - DNA, 120 bp, Homo sapiens
ctccgtgacgctggcctcgggctcccgctgtttctccttcctgtctgtggcctggggcttcgtgtcagatgtggatatccagagcgagcgcttcagggccttgggcagtgcccgcttcac

SEQ ID NO: 32023 - DNA, 120 bp, Homo sapiens
gcacggtgctgggcctcgccacactgcacacctaccgcggacgcctctcctacctccccgccactgtggaacctgcctcgcccacccctgcccatagcctgcctcgtgccaagtcggagc

SEQ ID NO: 32024 - DNA, 120 bp, Homo sapiens
ccccgcccatggcccactcacccctgcatcgttctgtgtctgacctgcctcttcccctgccccagcctgccctggcctctcctggctcgccagaacccctgcccatcctgtccctcaacg

SEQ ID NO: 32025 - DNA, 120 bp, Homo sapiens
ctccgctgtccccggacccactgctgtcttcacctcctggctctcccaaggcagctctacactcacccgtctccgaaggggcccccgtaattcccccatcctctgggctcccacttccca

SEQ ID NO: 32026 - DNA, 120 bp, Homo sapiens
gcccgggtaggggcctccacctgcggcccgcccgaccacctgctgcctccgctgggcaccccgctgcccccagactgggtgacgctggagggggactttgtgctcatgttggccatctcg

SEQ ID NO: 32027 - DNA, 120 bp, Homo sapiens
aggcgctgacctggtggcagctccgcatgcgcgcttcgacgacggcctggtgcacctgtgctgggtgcgtagcggcatctcgcgggctgcgctgctgcgccttttcttggccatggagcg

SEQ ID NO: 32028 - DNA, 120 bp, Homo sapiens
gtccgcagctgggctacgccgcggcccgtgccttccgcctagagccgctcacaccacgcggcgtgctcacagtggacggggagcaggtggagtatgggccgctacaggcacagatgcacc

SEQ ID NO: 32029 - DNA, 120 bp, Homo sapiens
catcggtacactgctcactgggcctcctggctgcccggggcgggagccctgaaactaaacaagcttggtacccgccgggggcggggcctacattccaatggggcggagcctgagctaggg

SEQ ID NO: 32030 - DNA, 120 bp, Homo sapiens
ggcgcaagcatagtgtcgtcggggctctgcgacgtctgattggctctctgcagtgcaccgtcgaggtagaaggctcagctcctagtcgctcccaaattactttgttggtgctcgaggcag

SEQ ID NO: 32031 - DNA, 120 bp, Homo sapiens
tcacgtctagtgctccggcctgggactgggtgtgggtgcccgcacgccgcggcagcctccggcgcgctcctcctgctgcagccgcttcaggggccgggcccagcgcggcctccatggcag

SEQ ID NO: 32032 - DNA, 120 bp, Homo sapiens
aggcgtgagccactgtgcccagccaacagctttcacattacaaaagcccaagcagaagctggcaagctgccaacaagctgcactaattcatcaataaatatttactgagtttcttactgc

SEQ ID NO: 32033 - DNA, 120 bp, Homo sapiens
gcccgccctgtccctcaccagaaggggacaaaaggaagctgagcaggacaggggccacttaagtcccctaaagaaggggattgcataccccagcacctcagacagtatccagtgcacagc

SEQ ID NO: 32034 - DNA, 120 bp, Homo sapiens
atccgttatgacgggtgaccacacagacaccaaagaaaggaaagccacatgatgacaaaggcagagattaactctgggcctccagaactaagggagaacgggctgggcgtgatgactcac

SEQ ID NO: 32035 - DNA, 120 bp, Homo sapiens
aaccggggaaacacatagaacgtctaatgcatattaattgaatggattgtacaaacagagcgaaaagagaaccccatggcttagcaggaaagcagcttagagatgaaaggtttcagtgtc

SEQ ID NO: 32036 - DNA, 120 bp, Homo sapiens
aaacgaaatctccgagcaccattattgaatatcagtcatctcctgtacttcatctgcaatgccaatacaaagtgccagagatgaggtttctatatatgctctattataatattttattcg

SEQ ID NO: 32037 - DNA, 120 bp, Homo sapiens
ctccgtggtgttggccatccacagcatgagtggccgcagctccacagacacagcttcaggagtcaggggcacctcggggaccccctcagggtggcttgaaaaagaggaaggaatttgtga

SEQ ID NO: 32038 - DNA, 120 bp, Homo sapiens
ccacggctcccagcactgggtgggggacaggaaaaggcaagaggaaacccggcaggaagagcggggagggggcgtcctgtgaggagaccaggcctgggggaggagatctgggtagggttg

SEQ ID NO: 32039 - DNA, 120 bp, Homo sapiens
catcgcagtcagttggtcccctccaggacccaagggtcccggttttctgcccttcctccctcaggccggagcccatccccagacctctcctctcggggaaccaaaggctagaatcagtcc

SEQ ID NO: 32040 - DNA, 120 bp, Homo sapiens
tcccgtcccggggagtgagtcagatgcttagacaacaagataaatctttattgttgcctcgaatctgtggccttttcttttgggacctgggtttgctcggccgctccactgccaaggcca

SEQ ID NO: 32041 - DNA, 120 bp, Homo sapiens
aatcgatcaccttccttcgacgaaatatcctaggggtgggagtggggtgcagatcatggaaccggtttgggtactaattgtgtgggggacacccctcccaacctccccctttgtgacctt

SEQ ID NO: 32042 - DNA, 120 bp, Homo sapiens
cctcgcccttcgaagtcctcctattcaagccccccgcactccatccccaggaaagtcctgctctcaggcctcagtagcccccagaccagcttctgtgttgggttcctggaagccccgccc

SEQ ID NO: 32043 - DNA, 120 bp, Homo sapiens
ttccggaagaagagggaactggagctggaattactaatctatcctacttatgcgctgaagtctccataaaagtccctaaagtatgggggtgggagaggttccttgtagcgtccagcccta

SEQ ID NO: 32044 - DNA, 120 bp, Homo sapiens
ttccgggcggggaagcaccccaactccatggagacgcccaacctggaagctcccccaaacccatcctttgctcccgtgctcgggaggcgttcagatgttgccctttgcacctctttatct

SEQ ID NO: 32045 - DNA, 120 bp, Homo sapiens
cagcgtgggaaaaaccccacacacctggtcacagaagtgttgagtgtgagcctgagaaaaacaggtgtttttttctagataagatccatggaaggggaacacaatttttttttttttttg

SEQ ID NO: 32046 - DNA, 120 bp, Homo sapiens
aggcgtgagccaccgcgcccggccagggagcctttaatgagtttaaaagttgttgcattctttcctttgctaaatttggtttcacggggaacacatttcctggcccctgggatttgggtg

SEQ ID NO: 32047 - DNA, 120 bp, Homo sapiens
tgacgcaggccaggggctggcatgtgacgcgaaccgggggccacttcccgaagcaggtcagcgagaggcactctggagctgttgcccagccactagtgacgtcatgggctttcagtcatt

SEQ ID NO: 32048 - DNA, 120 bp, Homo sapiens
ccccgcctcaccctgtctttgtacaggattcggtgcactgggcagacctggcaagcggtgcccgagccaaagacttcccgcacgcggccctcctccagggcccgcagcaactgcttcatg

SEQ ID NO: 32049 - DNA, 120 bp, Homo sapiens
gatcgtgcgctccaccacccggaactcaccctgcagggcagttggcagagacacgtgtccccagagggttgccctgctgcagacctccacctctccctccctgaggatagtgagaaagac

SEQ ID NO: 32050 - DNA, 120 bp, Homo sapiens
caacgggagagacagacccaggagaaggggcagagacatgccagtgtgccccagtcccagccctctgatgccctggcccctggcacatggcgcccatcaccagaagatgccatgtcctca

SEQ ID NO: 32051 - DNA, 120 bp, Homo sapiens
acacgtggtcggcctgcaatccacacatgccctggagtgtgggtgacatagggacagcattgtcctactccctcatcctcccccttccgccccctggacccgcgggatcacagcagtgcg

SEQ ID NO: 32052 - DNA, 120 bp, Homo sapiens
aggcggaatcctgcccatcacgcttatgtactggcaggagtgtctggctgtgattggaggtgtgtgtgctctgtacagaatcgactggtgttgcttagatgtccagagtgggaggggaga

SEQ ID NO: 32053 - DNA, 120 bp, Homo sapiens
agccgcagctataagtcctaaaaccaaatgcctcctggatctgtctcctagaaacttcacagtatctcaggctcaccaggtgccacaaagccgctcctcctcctgggtccccatgtgggg

SEQ ID NO: 32054 - DNA, 120 bp, Homo sapiens
gcccggcttcctagcctgcaactcttgccctccacatggcctgagagggctcttactatacccagacatggccctgcccctcccttcctcagagccctcagtggctcccagcacccttgg

SEQ ID NO: 32055 - DNA, 120 bp, Homo sapiens
caccgcaatttctcccaaatgtaccaggctctactcccgtttggggtttggattggctgtctccactcctgccatcccccaccgactgtcccccttcccgccatctccaactgtcccctc

SEQ ID NO: 32056 - DNA, 120 bp, Homo sapiens
tcccgccatcccccctgggctgtctcctctcctgccatccctcccccggctggccctctcccaccatcacttccccggctgtccctctcccgccatccctcccccggctgtccctctcct

SEQ ID NO: 32057 - DNA, 120 bp, Homo sapiens
ccccggctgtccgtctcccgccatccctcccccggctgtccgtctcccgccatccctcccctggctgtcccctctcccaccatgcctcccctggctgtcccctctcccgccatccctccc

SEQ ID NO: 32058 - DNA, 120 bp, Homo sapiens
tcccgccatccctcccctggctgtcccctctcccgccatccctcccctggctgtcccctctcccgccatccctcccctgactgtcccctctcccgccatccctcccctggctgtcccctc

SEQ ID NO: 32059 - DNA, 120 bp, Homo sapiens
tcccgcgatcatcctggctgtccctctcccgccagccccccggctgtcccctttcctaccatcaccctgtcacctctcccaccatccccctctaagcttccctctatgccagaagaagcc

SEQ ID NO: 32060 - DNA, 120 bp, Homo sapiens
aaccgggtctgctcatctcggggaacccagcatcaccaagcatgagcctggagcatggaaggcctcagaaaacaaatggtgaatgcacagaaaggagaaacacacaacaaacaaaccaag

SEQ ID NO: 32061 - DNA, 120 bp, Homo sapiens
ggccggccgccatgccacctgcagggagtagtggaggctggaggaggctgggtgcagcgtgaggttctggaagggctggattcggggctggccccagcccttgtcattccattccaccat

SEQ ID NO: 32062 - DNA, 120 bp, Homo sapiens
ggtcggtaaatgtcttcccaaacaccaggggctcgccggggccaggcttcttatgaggcttctgtgtcatttccagctgcaggtctgcagcctgaggaaagacaggggtatcctagaatc

SEQ ID NO: 32063 - DNA, 120 bp, Homo sapiens
ctgcggcccaatggcaggctgttaagctaccaccactcactgccatctctgggctgtggaccttttggagatgcccaaaaccagctgccagccccctcctctctcagagccaagcatcga

SEQ ID NO: 32064 - DNA, 120 bp, Homo sapiens
tttcgtgcccagatctgggtggagaaagaagtgagagagggggtgagtggggcacagcaggggccctggcagctcgctcgccacctcctgcacttggaggtcccactggcctgcctgttc

SEQ ID NO: 32065 - DNA, 120 bp, Homo sapiens
agacggggcaggtggtcctgaaggaggccaagtcccctccctgccctgacgagggctcgctggaaagagctgagtcagctcccgccccctcctccatgctgcggcaaagtcaaacgcaag

SEQ ID NO: 32066 - DNA, 120 bp, Homo sapiens
aagcgcctcccaccccagagacctttggtcgcagcctggagatcagctcagacaagaaaacaaccagggaaggcacacaggtaagtgaaggcctccgggtacccaagtgctgacaggcct

SEQ ID NO: 32067 - DNA, 120 bp, Homo sapiens
gaccgacaggtcctgctcccccagagctcaggggtgcagaccccaggcccgcctccctcagacctaagtaagagtccagactctagctgcctcctccctcagacccgaagtctgggcccc

SEQ ID NO: 32068 - DNA, 120 bp, Homo sapiens
ctccgccagacccaggagtacaggtgcttattctctgaaggtattcgatcaactgggctctgattacctgaaatacaaacccattttggcagtgactccaattcccttcagcccctgggg

SEQ ID NO: 32069 - DNA, 120 bp, Homo sapiens
aggcgggtcctcccagaggggagtaggaagagcaggtctggctgtgtccagcaggctgggccctctctggtgacctttgacctcacaaggcctctttccccagccctgtggggaggcgtt

SEQ ID NO: 32070 - DNA, 120 bp, Homo sapiens
gggcgtgaggttgagagagacagagtggcctggcctggcctgccctgtgagctgggtgagttggcactgattctggaagatggacgtgaatgggcgtggtcacttgtcgctaggtgagtt

SEQ ID NO: 32071 - DNA, 120 bp, Homo sapiens
cagcgtggtcttgctggtgtgaggctccagggattccggggtgatcagagcgtgggtccccagattgcctttgggtggcgacatctagactgctcagccttgcagccatgcttctgccca

SEQ ID NO: 32072 - DNA, 120 bp, Homo sapiens
gtgcgacagccagcctgtgggcaggagagctgccctcagagccaagatgaaaaaaagagagtaagagatggaagaggaaggatgagaaaaagaaacacagaaaggggcgcacaaacagaa

SEQ ID NO: 32073 - DNA, 120 bp, Homo sapiens
tcacgctgagtctccagtgaatcaaaggatgccctggtgccctgcggtcacaccccttagcaaccaagtacaaggagaggaagcctcaaatccctccatcctgcccggatggagcctcat

SEQ ID NO: 32074 - DNA, 120 bp, Homo sapiens
tcccgacaatatgcccttccttggaagcggtggtactgaccaaggctgagatcagatctctgggctctgaacttgagaaacaatatgtgtggaacggcaggaggaaaaagaaatgagtgt

SEQ ID NO: 32075 - DNA, 120 bp, Homo sapiens
tgccgatttgggatgcaagtatctggaggccccttgggtcttattgtcagagaagggtctctccttataggatttcattagtgggtagattggatggcgagagataggacagcaagttct

SEQ ID NO: 32076 - DNA, 120 bp, Homo sapiens
actcgaggggcctcatggctggggagcggctttatcttagcaaccagggtcaagggaggttgttactctggtttagaattaggaaaatacaaagggtggggacagagctgggagtgcctc

SEQ ID NO: 32077 - DNA, 120 bp, Homo sapiens
caccgccctcggccacgccacacatttctaacatagcccatcctctgtccgtgccccagggctgcatttttctagccactgccgtgtttctaagacttgctgtctcacttctgcctctgc

SEQ ID NO: 32078 - DNA, 120 bp, Homo sapiens
ccccgctcctcgccgacctggctttttgctgcctggagcctcgctctgaggtccctccccctcccagctgttgtctgcccttttgctgggggggggggggggctattcttaggcccccag

SEQ ID NO: 32079 - DNA, 120 bp, Homo sapiens
gcacgtgggaagcagctgccctcaggaagcgactgggctgttctgggttcccttagggacacagtcggacctgaatggattccagaccccaccccaaaccagaggctgtgaatgagtaaa

SEQ ID NO: 32080 - DNA, 120 bp, Homo sapiens
tgccgcctgatggctttctccttggacaacagcgtgccgcctgatggctttctccttggacaacagcgtgtctctttccgtcttcaccctggggccctggaactccccctcctctctaat

SEQ ID NO: 32081 - DNA, 120 bp, Homo sapiens
ccccgatattccatgcttctctctccttctaggactggctttctgaaacatctggtggcctctcttctgtccccagtctattactcttgcctgtggctccatccacccttctcccttggt

SEQ ID NO: 32082 - DNA, 120 bp, Homo sapiens
tgacgatgatcataacaatgacaatcaccgcccacacaatgtgctaccttcatgccaagaactctactaaccactttgtccttattaactgtttcctcctcccagcaccgctagaaggta

SEQ ID NO: 32083 - DNA, 120 bp, Homo sapiens
agacgctattagcatgtccattagccaaggacacacaggcagcaagtggagggtgaacttgaacttcaagctccagaatcctgctccttcctgacctcaggcccacttctccccagctct

SEQ ID NO: 32084 - DNA, 120 bp, Homo sapiens
ctccgtctcagtctgtctcatacttgccatctgtctgtccattcgcccatgtctgggatccacccacccacttccaggccctgcatctgtctgggtgtcctatcacgcctccttcctgtg

SEQ ID NO: 32085 - DNA, 120 bp, Homo sapiens
ggccggggtgggggcctccagcagttccacctgggtcctcacgccctgctccgtgtacggccccaccaggaagtagttgtcgccccattcgtcccctgtcaccttcgccttcgtctgcag

SEQ ID NO: 32086 - DNA, 120 bp, Homo sapiens
caccgtgtagatgccacccactgtgggcccaagcgtgtgagggcaggccccggccgaggtccatagttctggggcctggggtggggtgggccggggatgtagggggcactcaggccccag

SEQ ID NO: 32087 - DNA, 120 bp, Homo sapiens
acacgagggctggagggcagtcctcctgggtctaagggagaagggggctggggtcaggaccctgaaggaggagggggctcaggctagacttctgggtctgagagagaaggggctgggtgc

SEQ ID NO: 32088 - DNA, 120 bp, Homo sapiens
ccacgtgttgataatggaagcgggctcatgggagttcgttatactgctctgcctccattaaatgcttgaacttctccataatagaaaagaaataaaagaatggatcaagttcagtagggt

SEQ ID NO: 32089 - DNA, 120 bp, Homo sapiens
tcccgtcaaggggacggtgcctccttgctgagcgcttgtacttggtgttactgactttctcacagcttccaagtgcagcaggggttgctactcccatttttaagataaagaaatggaggc

SEQ ID NO: 32090 - DNA, 120 bp, Homo sapiens
gcacgcttccaaagagtgagagttccaagatgggacctcgagtacctcaaagcctaattcccaactccacgacccacttccgttgagtctctgctctgggctgctacttagatgagccct

SEQ ID NO: 32091 - DNA, 120 bp, Homo sapiens
tgccgtcagggcgctgcacgcatacgctggctgtggggcgctgcccggcattgggtctgtgctaccttctttgagcttttgttctctatcttcaggacttgggggtaccattgctttgct

SEQ ID NO: 32092 - DNA, 120 bp, Homo sapiens
ccccgggtaagcaagtgctccagggaactcacacagtgtgctggggtggtttccctctggctgcccttcaggaagctcagctgttgtttggccttcgtccactccccagccctgcagcat

SEQ ID NO: 32093 - DNA, 120 bp, Homo sapiens
tggcgttgccgggtgtgtttccttgctgctgtgacagctttcagctcttcattaaatgttagcatcttgtgaggctttttctaacctgccttgtaaagtcacccgtttctattctctgtc

SEQ ID NO: 32094 - DNA, 120 bp, Homo sapiens
tgtcgtcatctgatgtgatcataggatctccttatttacctctttcattagcatatgaaccccatgagggtagacacctttttttttttttttttggagacagtctcactctgttgcaca

SEQ ID NO: 32095 - DNA, 120 bp, Homo sapiens
taacgttccgagtctccacatgtactatttttagtacccattactcagcatctactcaatagttaccagccttgctagaaaggacttaatttgctgaaaaccaagagggaaacaaaatag

SEQ ID NO: 32096 - DNA, 120 bp, Homo sapiens
ctccgattttctcctcctctgtccctctgtcccctctgtccctctgtccctccgctgcagctgtgggtgggcatgcctgcctggtatgtggccgcctgccgggccaatgtcaagagcggt

SEQ ID NO: 32097 - DNA, 120 bp, Homo sapiens
acacggagatccagcgcgagatcggcatcagcaacccgctgcaccgactcaagctacgcctcgccatccaggagatggtctcgctcacctcgccctcagcccccgcctcctcccgcactg

SEQ ID NO: 32098 - DNA, 120 bp, Homo sapiens
gtccggcggccaattccagccttcgcttcctcagagccccgcctcttgccctcagtctagccaatcctgggcctgctcactcccctgtcccacgaccctgcttctcattggcttttaccc

SEQ ID NO: 32099 - DNA, 120 bp, Homo sapiens
gtccgtccctgtggtactccaggaggggcccaggccacctccttccctgactctctccctctcctcggcatttgctgtcccactcaaatgtcaccacctctaagaagctttctttgtcag

SEQ ID NO: 32100 - DNA, 120 bp, Homo sapiens
aaacgagtttccccatcattccggcatatcagcaccttctaattttccccatagcatttattgccttctaattattttatcttttctttcctttttttttggagacagagtttcgctctt

SEQ ID NO: 32101 - DNA, 120 bp, Homo sapiens
ttacgagacatttcaaacatacagaaaatcatgtgtacccagttcagcgattctcaaacttttgctgtacttgctctgttgtgtgtgtggggtggaggcggggagtggggagtacaggtt

SEQ ID NO: 32102 - DNA, 120 bp, Homo sapiens
caacgtgctgggattacaggtgtgagccactgctcctggccctggctacttctttctgttgagttacttgactggcctctgcacacattgggtttgagaatcatgtagggaaggcttgca

SEQ ID NO: 32103 - DNA, 120 bp, Homo sapiens
agccggggcggggaggaaggccagaggggcaggggtatcctgccaaggagagggtttccagaatgagagcctttcagctgtagccagggccacttgtgatacagtcagatgaaacctgaa

SEQ ID NO: 32104 - DNA, 120 bp, Homo sapiens
acccggctgagcctctctccttgacagtcgtcaggagaactgaaaaaggaatgactttctcactgcgttattcaaggttattttaagctccgtgtgaagttcgtgtcgcgttgcctctgg

SEQ ID NO: 32105 - DNA, 120 bp, Homo sapiens
atgcgagcctcatttcaggaaacacggcgttctttccctggctcctcatagctccgtggagtaggccgcgctattattgtcttttcattagaggaggaaatttaggctcagagaggtgaa

SEQ ID NO: 32106 - DNA, 120 bp, Homo sapiens
agccgctcgcccaaagtcacacagccgcgtcagccccgagcatgcgggctctccctgagttacccgctggatgttctttctcgtgttgaacgtcatgtgtttggatgggggcacagggca

SEQ ID NO: 32107 - DNA, 120 bp, Homo sapiens
tcccgtggggaaaggggaccgtcctcggctccagtctctccccgaggccgtcagagccagggccaggggcagcgtggactctgcctgcctctgtgggtgtggactcagtgtcgacagccc

SEQ ID NO: 32108 - DNA, 120 bp, Homo sapiens
acacgctgacagggtgctggggtcggggggcagccctgggttcacgctccgccctcgcacccccagagggaccttgtgccagtgtgggcgcccccggaccgcccaccccgcagtggccat

SEQ ID NO: 32109 - DNA, 120 bp, Homo sapiens
cttcggggcagccgtggtgaccgtgtgggacagcgatgcacacaccacggagaagcccaccgatgcctacggagagctggacttcacgggggccggccgcaagcacagcaatgtgaggcg

SEQ ID NO: 32110 - DNA, 120 bp, Homo sapiens
gggcggggcccgggcaccagggggctgcatgctcggggctccagagtggagccgggacgcccgccctgaaccctggcccctccgcccatccctgtcttggctctctttgtcccctccgcc

SEQ ID NO: 32111 - DNA, 120 bp, Homo sapiens
aagcgagggtgcactagtaaggagactagagtgccctggtgactaggggagcgggtagatgcctgaagacggtgagggttggcctgaaaagaacgctgggcctgggcttgagagtcccag

SEQ ID NO: 32112 - DNA, 120 bp, Homo sapiens
ctgcgcgcagggcctccagaagtggctgcacaacaaccttatttccatagtgggcatttgcctgggcgtcggcctactcgaggtgatctggccccgcccccacccgcgatcggccctaaa

SEQ ID NO: 32113 - DNA, 120 bp, Homo sapiens
tttcgcgtccttcggttgcctgggaaggacgagctcagggcggagcgcagcccaccccggccctcccgccgctccacccagcaccggagggtgggggcggcccagcttcagggagccctg

SEQ ID NO: 32114 - DNA, 120 bp, Homo sapiens
gtacgcagggaaagcctcctgctattggctgcgatctccctcccctttctccgcagatgactgtcatggtgctgagcgtacagctacagcgcagggcactccgccggaaatgcgagccgc

SEQ ID NO: 32115 - DNA, 120 bp, Homo sapiens
gcacgtgccgggcgctggggattcgagccccgggcccagcctgatcgctgacggcggcggcgggcacagcggcagtctgtggggtggctggggcatggcgggtgcctgccccaactgggg

SEQ ID NO: 32116 - DNA, 120 bp, Homo sapiens
caccgcagggcaagctgcccatggccctggggctctggccgctgtgggttcaagacgaggaccagcctgacactggaagtgcgggcgcagaattagaggaggcacaattagaggctgagg

SEQ ID NO: 32117 - DNA, 120 bp, Homo sapiens
ttccgaccttactccttctcagcctctacccccacttgtagcagctattcccgcctcatcagccagccctgcggcagttcccgtcgagccccgcccttttctacctatccccttctccag

SEQ ID NO: 32118 - DNA, 120 bp, Homo sapiens
tcccgcccaattcacggccccacccctgacctttctcgcccgggtgggcatcacccccgtctcgccagcaccccttcgacttctctgacctcatctcctttctctatagctcgggttcat

SEQ ID NO: 32119 - DNA, 120 bp, Homo sapiens
tgacgctctcgatattcctgtgcagaaacctggaccacgtctacaaccggctcgctcgataccgttaggccccgccctccccaaagtcccgccccgcccccgtcacgtgcgctgggcact

SEQ ID NO: 32120 - DNA, 120 bp, Homo sapiens
ccccgaggagttccctcacatgcgggacatcgtgattgctgtgagtggcggctggggaaccctgtcccccacacccttccggggacccaggcttccggttcaggtcctgcttcccagcac

SEQ ID NO: 32121 - DNA, 120 bp, Homo sapiens
caccgacctgggggcaggcagtcacctggttctccagcatcttgccggggaagccaggccgcaaacacaggtcagaggacggtgacctttcccacctccactctcagtcccctggggtct

SEQ ID NO: 32122 - DNA, 120 bp, Homo sapiens
cctcgtctggccttcccctccctgtgctcgcatttggggtccaggcccccagccttccctcagacagccactgtgccccaccttatacaatttcttttctttcttttttttttttgagac

SEQ ID NO: 32123 - DNA, 120 bp, Homo sapiens
caccgtgcccagcccacagtcttatagtgaatgagtttggatataaattggggaacaaaagtcgttttgctccagaagggcacaaaaacaaggagcggaggtgtccagtgtgtcagaaga

SEQ ID NO: 32124 - DNA, 120 bp, Homo sapiens
ccccgtaaatgcaggtggtgcctgtttgatgataacatcccagaaagcccgcaaatttcccacatgccacctgttgagactgctctactgcctgcctcccacagctgcccggagctaaat

SEQ ID NO: 32125 - DNA, 120 bp, Homo sapiens
agacggggacagattcagagagaaagggacagaggcccagagaacaagggtcccagagacttcgggacacgcttggatgcagggagggcttttgaaagcagggccgtgttgtcccctctg

SEQ ID NO: 32126 - DNA, 120 bp, Homo sapiens
gggcggctgagcaaagcggaaatcctgggtaattggaacatgtttgtgggcagtcaggccaccaactatggcgaggacctgacccggcaccacgatgagctgtgagcaccgcgcacctgc

SEQ ID NO: 32127 - DNA, 120 bp, Homo sapiens
gcccgcacaatgaccggaggaggggccgctgtggtctggccccctccctgtccaggccccgcaggaggcagatgcagtcccaggcatcctcctgcccctgggctctcagggaccccctgg

SEQ ID NO: 32128 - DNA, 120 bp, Homo sapiens
ggtcggcttctgtccctgtcacacccccaaccccagggaggggctgtcatagtcccagaggataagcaatacctatttctgactgagtctcccagcccagacccagggacccttggcccc

SEQ ID NO: 32129 - DNA, 120 bp, Homo sapiens
aaccgccccaacccctccagctccaaatctgagcctccaccacatagactgaaactcccctggccccagccctctcctgcctggcctggcctgggacacctcctctctgccaggaggcaa

SEQ ID NO: 32130 - DNA, 120 bp, Homo sapiens
cagcgccgggaccttgtgtgtctgtctgttgtctgcctgtctctatgaagggtaagggggccctggagatggtttgggggctgtgactgggagttgggggctgagacatgcaatagggga

SEQ ID NO: 32131 - DNA, 120 bp, Homo sapiens
cagcgacctaaaatatggcacggcgcaacagatgctgtgaagcaggggaagcgtgtagcagtgtggcaatgttctgatgactgagaggctgggaaaggtctcaatggtaaatggagtgaa

SEQ ID NO: 32132 - DNA, 120 bp, Homo sapiens
ccacggagagatctggagggagagcattccagggagagagaagagcaagtaaaatggccctgaggcaggagtgggcctggtgtggcagcatcagcaaggaggctagagtggctggaaggg

SEQ ID NO: 32133 - DNA, 120 bp, Homo sapiens
ccccgacccatttagcatatctttactaaggacctaagctacagggtgggaaaactcgaagtccataagggaaagtgggcatgtgtcagacagccacatgtacagctacaactatgctaa

SEQ ID NO: 32134 - DNA, 120 bp, Homo sapiens
aatcggtgagaaggatttggccggaagcaggggaggggaatggtgtaccaggcagagggaactgagatcagagggctctgagtggctctgcctgtgagctcagactcaaaagctcctgcc

SEQ ID NO: 32135 - DNA, 120 bp, Homo sapiens
ctccgtgtgccgcctcctccccatccccatcaccttcatctgccgggcaatctccttcttctggtgcagaatgtactccaggatggcctcacgctcatacaggtagccatctgggctgca

SEQ ID NO: 32136 - DNA, 120 bp, Homo sapiens
gcacgtatttagtgcctggactcagcacctgttaagcctttgccctaccatcagaggtaggtcatgggaagtgtccaaaggtgagctgctccgatggcctcggcaatgctctgagagccc

SEQ ID NO: 32137 - DNA, 120 bp, Homo sapiens
aaccgtactctcctgtccagcacagtaaatagcaggcggtgttcaaagattgtcattactctgagtcacacaggaagttttgggctttcaccccgtaaagcaatagtgactcaaactcta

SEQ ID NO: 32138 - DNA, 120 bp, Homo sapiens
gaacgagcagcccaatccagggtactgggtgggcaggaggcgacagggtcaagttcaagctgtacacagagctgaacacatcatgggggtagaagatatttgttgttgacgtgtctgcct

SEQ ID NO: 32139 - DNA, 120 bp, Homo sapiens
gggcgtaggggcagtaggtctaggaatgagggctgaccctgctggcctcaccacacccctcctcctcagctggcgttgcagacggggcgtgaacccccacccatctggcgagtccagaag

SEQ ID NO: 32140 - DNA, 120 bp, Homo sapiens
tggcgagatcctcatgtctccagaaaaaaaaaaaagctaaaattgaggccaaaggattggcattgtcccaggtcagagttccaggatggaaaacgggtggagtattctttttcttttttc

SEQ ID NO: 32141 - DNA, 120 bp, Homo sapiens
caccgcgctcggccgggagtggagtgttgtgagcgtggacagtgaggtcaggaatcatccctttagggacagaatcaccttgtggttggcctttggcatccagctgcccagattagaatc

SEQ ID NO: 32142 - DNA, 120 bp, Homo sapiens
aaccggtttggagcacctggcctgcagctcctgtgacctgtagcaggagatctagagaagcttaacagaggtccacaacatgacagaaaacaaagagacacagagaaagataaagatggg

SEQ ID NO: 32143 - DNA, 120 bp, Homo sapiens
tgacgttggcagtgacatttatttttctgggggaggggagttatatacagcagtgacccggagcccctcacccccaccaggcttaggtggggacaggaggcgttggcagaaggcacacag

SEQ ID NO: 32144 - DNA, 120 bp, Homo sapiens
gtgcgaaggcagctagtcccgagagcttgtggtggttgcttctctcttgcctgggctacaggaggacgcaggggcagcccccgcccttcttcctgggggcactgggagggctcggtggga

SEQ ID NO: 32145 - DNA, 120 bp, Homo sapiens
aaacgccagtgagtttggagtggaagggctggggacaaggacgacaggaaggggacttggctcaccggacagcccgcaccagctgctcaaaagcctcgtccacgttgagacgcagtttgg

SEQ ID NO: 32146 - DNA, 120 bp, Homo sapiens
ggccgaggcctcaaagtaggccacgtggtgggaggcgccgaaggcagaggcttctgatcgggggacctgggggtaggggggacacgggggagtcaggtccctgcactcagggtgaccgca

SEQ ID NO: 32147 - DNA, 120 bp, Homo sapiens
tgccgcaggggcttggtgtcttctaagtaagggatgggggcaggcttcgtgggcacttgccctgctatgccttagataaccaggagtgggcaggcagggaagtcagggtgttcccggcag

SEQ ID NO: 32148 - DNA, 120 bp, Homo sapiens
aggcggaaccccaaagcctggaaatccccagagcctttgccagatggatgagttctgtgtggaaatcgttgtgggggaagtgatgggagcagggaaaggaggggcgcaactgtgcggggc

SEQ ID NO: 32149 - DNA, 120 bp, Homo sapiens
ggccggccatgagcaggggaggtgctggggctggtgggaggttggctggaagggaggaatgcgaggaaggggcaaagagagctggcggacggggggtgaatgtcctttgttccgtccagc

SEQ ID NO: 32150 - DNA, 120 bp, Homo sapiens
gctcggtgatgccggggaccctgaaggtccagtttgggggtaacccatctaggtgagctgtgtgacagtggcagtcgcagcactgcaggaacagaggaggatgctgatgggggacaggtg

SEQ ID NO: 32151 - DNA, 120 bp, Homo sapiens
tcccgaacctggcgctgtgactccagatctgccttgttcccgaccaacacaacggggaagtcgtcgcggtccttgacccgcagaatctgcgtgaagagcttgcccacctcgttgaaactg

SEQ ID NO: 32152 - DNA, 120 bp, Homo sapiens
ctgcgagtgaagccggaggcatgaggtccagccagctgcagagcccaggtcctccccacacccacccactgctccgccaccagcaacccctgtcacctctgccggtcgttaatggcgaac

SEQ ID NO: 32153 - DNA, 120 bp, Homo sapiens
agccgtggccagcacgcatgtactgctctctcatggccccgaactcttcctggcccgcggtgtccaggactgcagagacagggagaggggccatcgtggggaccaggctccccgcagtca

SEQ ID NO: 32154 - DNA, 120 bp, Homo sapiens
acacgcctccttccttgtccttggggacctcgccatcaggcccatgcccgctgttggggagcagctcctcgctcactgcccagtatgtgtggcagtgccccagccgctgggcccagagcc

SEQ ID NO: 32155 - DNA, 120 bp, Homo sapiens
gcccggcccgccagagagccagtcccccacccaggcagctcagcacatgcctcacgtagctcatcactcccctgtctgtcagggacatgccagggtctggcagtgtgactggccatccag

SEQ ID NO: 32156 - DNA, 120 bp, Homo sapiens
cagcgtcctgtctcccacttcggaccccaccagccgcaggccctccgggcaggagatggtctgctggaagacttggcggccccggtagaaggctgtcacctcgaactcccactctgagca

SEQ ID NO: 32157 - DNA, 120 bp, Homo sapiens
cagcggcagcagcggcatgaaggggagaggggttgagaatcaggggctgccgcccagacctcagccctcccagcctgcagctgacactcaccttcccccggcaccaacagccgcttcagt

SEQ ID NO: 32158 - DNA, 120 bp, Homo sapiens
ctccgcaggggctgagggcagggctcaggggctacagccaggcttgggggtcccggatctgggagtggggccaacaccatgttacccagtaactcatccagaatgtcttcctggagggaa

SEQ ID NO: 32159 - DNA, 120 bp, Homo sapiens
caacgcagggaggtcaggcttgagctctgccttcaaggggcttccagcctggggacagagccagccatggcatcaacagccaaacaaacactaatgaacgccaggtgctaccattccaac

SEQ ID NO: 32160 - DNA, 120 bp, Homo sapiens
ctgcgaatcgaaatccatgaaatcccgggaaggtgtgctcgggccttgaatgctgggtgaagacttggaattttctcctgaggagaccggggcagggacagacagggtcagcactggctc

SEQ ID NO: 32161 - DNA, 120 bp, Homo sapiens
gatcgtctagagggagaggacaaggcccatggagacaggtcggagactgaggggcatgaaagttgggcacattctcacctgggtatcagaagtactgcctccaccattggtgtccggaga

SEQ ID NO: 32162 - DNA, 120 bp, Homo sapiens
acacgaaccccaagctggcagacctgagttcacaaactcgtagattttatgtgggtcgtgagggtccttgctccggtcctctgctaaacgcaacccttctttgcggttgagggcagagcg

SEQ ID NO: 32163 - DNA, 120 bp, Homo sapiens
tcccgggaacatatgcaccagtggcctcggcccaggcctggggcaacagtggtgtcaggatggtgggggaggacgacttagatcctgctcctggggccctaaccctgtctcccgagtcct

SEQ ID NO: 32164 - DNA, 120 bp, Homo sapiens
tcccggggaaccccctgcctccgtcctgctccttctggtgggctctggtttcacccccaacgaggccttcccaggtccccattgacaatcacagccacctgcacaccctcccaccgccct

SEQ ID NO: 32165 - DNA, 120 bp, Homo sapiens
tgccggtttcagagttggattgggctccagcgtgctggccctgtggcttggcgactgtcgcagtctccctgagcggcactctccccactggtccagtgagcaccgtctcatttacctgcc

SEQ ID NO: 32166 - DNA, 120 bp, Homo sapiens
ggtcgctgtgggtattcactgagagagggacacaagccaggctctggatggaaccggtttccctggcaggagctggtcaagtgtgtttgaggagcagggaggaggaggccagtagggcta

SEQ ID NO: 32167 - DNA, 120 bp, Homo sapiens
gagcgggcgacagatgagaggaggagaggcgccgggccagccaggaccctgtggtcacggtgagtgacaactcggactttgactctgggtaagccaaggtctctgagcagcggagggaca

SEQ ID NO: 32168 - DNA, 120 bp, Homo sapiens
aggcgctgatttaggcgctaatgggcgccctctggcggctgcctggggacagactgctgggggcgagggcagaagtaggggcacagggaggaggtgagtggatctcacccaagtcggggg

SEQ ID NO: 32169 - DNA, 120 bp, Homo sapiens
gggcggtggagaatgctggatttaacttagcggtgaagctgacagatttggctaatgggccagatgtggggacagactaaaggatgctggcccgagcagctgcagggcgacatcttaagt

SEQ ID NO: 32170 - DNA, 120 bp, Homo sapiens
ccccgagatggggaaggtgtggggatgggggcgatgggggtggggagcaggactggaggtggtccggtctacagtaagatcagaactcatagcacatgttgaggggaatggatataagtg

SEQ ID NO: 32171 - DNA, 120 bp, Homo sapiens
gggcggtttgtctcctttatagggccatatcccccttcacagagtaatgtttgtaaattaataagtgaaatgtacaggattacaaaccgaaccaattacagttgatcctcagtatttgta

SEQ ID NO: 32172 - DNA, 120 bp, Homo sapiens
agacgggacttactgtgggggcttagctgcaaggtgttagaaagccacagcccaagccaggtgtgacagaccctggagggagatggtgcgatgtgggggaggtcgtaggaacaggaaatc

SEQ ID NO: 32173 - DNA, 120 bp, Homo sapiens
atccgtagcggcgcaatagcccaggtccttaggccccagcaggcctccccgggagaggtgaggtgacggagaggtggatgaagcatacggaggggcagccagggcaggtgtgcccttgct

SEQ ID NO: 32174 - DNA, 120 bp, Homo sapiens
ctgcgtgtggaacagcagggaggcccgtgtggaaggagggtctagaacggcagcaggaggaggagtggaggtgaggggtgacagggcgtgtgcagattttgtggaggcttatgggacccc

SEQ ID NO: 32175 - DNA, 120 bp, Homo sapiens
ccccgtgcttttcctctcagagcagctagggagggtctgaggatccccagaacctccaagggccgggagctgactggggtgcccctgggtgccctctggcggccgtgtgggaaatagacc

SEQ ID NO: 32176 - DNA, 120 bp, Homo sapiens
gggcgaggggtgagtgccgctgcgacatgagggtggcccagaccagggcaggaggccacatcttggaggcaagactcagggtagtgttgccaggccccacccttcatgcctcgccctgcc

SEQ ID NO: 32177 - DNA, 120 bp, Homo sapiens
tgtcgtggaccccaaacagctggtcaccaacgcctgcctcataaaggtgagggggtgggcatggccaggtgccccctgggttgaaaccaaagagaggccatcacctggccctggcatggg

SEQ ID NO: 32178 - DNA, 120 bp, Homo sapiens
cttcgtcctttaaatatctttgtgagcgctgctgtgtgagaaccatgcttggcacttggcttctggcggaggaaacacccaaagctggcagctaaagcccacagcccatgcacggaaagg

SEQ ID NO: 32179 - DNA, 120 bp, Homo sapiens
gggcgatgagcggatgcacatgcacgcgggccactgcagaagagcacggggccaggctgggctccgagatgtgcctgaggtcccagctactcgggaggatcacttgggcctgggagttca

SEQ ID NO: 32180 - DNA, 120 bp, Homo sapiens
atacggcgatgagtatttgttgagctgggatgtgtgagccgggtgaagctgggtggctgaccgggggatcctgtcggggaggagtaagttgttgagtgggggaggagaggagactacagg

SEQ ID NO: 32181 - DNA, 120 bp, Homo sapiens
actcgggccaccctcctgagagccaggggaactggcgcagggtttaggttggcatttgtgttgccgtttgaagccatcatgttgttggacttgtcaaggggttggggagacagtggagtg

SEQ ID NO: 32182 - DNA, 120 bp, Homo sapiens
gggcgcctgcattctaggaggtctggacagagttagggtggcactgccaggtttgggtgttggagaggagggagcaaggaatctgggctcgaacccacatggtttattgggagccggata

SEQ ID NO: 32183 - DNA, 120 bp, Homo sapiens
agccgaggctgggtgccagtgagggagggctagcaggaaggggacagcgaggtcacaggccctctgggagcttaagggagggaggaggggatgaagcgaggtggggacgcatcccggagc

SEQ ID NO: 32184 - DNA, 120 bp, Homo sapiens
catcgagttcacacgctgccacaagaggaccggcttctccaccagtgaggcggggcccacagggctgggggccgttcccgagccagggcggaggcgcacccacgtagtggagggggtgac

SEQ ID NO: 32185 - DNA, 120 bp, Homo sapiens
aaacgggcagaaggaaccatggggacacgcgtgttccagtgtgagctctgccatgtagcagtcacgtggccttgggcaagtgacctgagtgtgcagtgcctcagtttcctcatccacaaa

SEQ ID NO: 32186 - DNA, 120 bp, Homo sapiens
acacggtccctgtctccaaagctcaatgacagggaggtgactcgcggatagcagtcccatcagctgtcatgggggtgggcattccgacagagggaacgcaagggtggggttggggggggc

SEQ ID NO: 32187 - DNA, 120 bp, Homo sapiens
caccggaagttatgggcctggggacccaggctgaaaccctgccctcctggtgcttccactctagacaagggggtcagtgacatggtgatgccagttggaggtgacctctgtcaggctggg

SEQ ID NO: 32188 - DNA, 120 bp, Homo sapiens
gcacggggttttctagcccagctgggaggcatgagaggagaaaggcagctttttgttttctgctcccctttctttttcctcctgagcacttggcaggagctgccatcacctgagatcagg

SEQ ID NO: 32189 - DNA, 120 bp, Homo sapiens
ttccgggggagctgggggggcttctcggagacagggtctgggcagagatccagtgtggtgggtctgagcaggcaggaggatggaaggcttggagcctggagtcgccgggagtggtctggg

SEQ ID NO: 32190 - DNA, 120 bp, Homo sapiens
cagcgtttgttcccttcagttcctgcactcgcttgctcccacgctccctctcatgaggagtcaccagcagcaggctgagccaaaaaagccactccagttcccgcccatgaagaggatcaa

SEQ ID NO: 32191 - DNA, 120 bp, Homo sapiens
acacgaccctgctgataacacaggagacagtaaaagaaactggccaaaaccagctggaaccaagacaggatgaaagcgacctctggctaccctcactgctcattatacactaattagaat

SEQ ID NO: 32192 - DNA, 120 bp, Homo sapiens
acccgcgccatgacagtttgcaaatgccacggccatgctgagaagttactcagtatcatctggatgggggagaaaattcgggttctgggagctccctgttccttacccagaaaactcatg

SEQ ID NO: 32193 - DNA, 120 bp, Homo sapiens
tcacgcagtccacacactgggtcaggtccccgatgagctccgagtcccccaggaagctgtcgatgaggcaataactggcctaggagaggaagaagggaccagcctaggattcaagtgggc

SEQ ID NO: 32194 - DNA, 120 bp, Homo sapiens
ccacgttgcggatattggtcagttcttcaagtcccacaagaaggacctagaagaatcatataggagaggatgggcgaggggctgggacttgaactcctgggtctgaaggaagagggggct

SEQ ID NO: 32195 - DNA, 120 bp, Homo sapiens
gggcggcagcaggggccacagtaccaagtttggatttaattctaaaggcactgggaagccattggatggttttgattattgtagtgacagagaaggcagcaagagttaggagacgtcacc

SEQ ID NO: 32196 - DNA, 120 bp, Homo sapiens
ttccgggagattaaagcagctcctgttttttctccttcctgctgccaggttgtcctcacatgggtgattgacagggcattggaggtacctgttgataactaacttgcagtttgtgttcag

SEQ ID NO: 32197 - DNA, 120 bp, Homo sapiens
ctccgtttggccacaatgcaggttggatttggggtttaaggctgggctccagtcagccctcgggagcccctgggcaggaaaacatggacaggcctacgggttcttctgccatttcactgg

SEQ ID NO: 32198 - DNA, 120 bp, Homo sapiens
ctccgtgtcctttgctggttgcttctcattgtcgtgactgctaaagggatgagtgtcccagtctctttgtgagctcatccagtctccattcaaacactgatgactcccgaatttctctct

SEQ ID NO: 32199 - DNA, 120 bp, Homo sapiens
tgccgggtgccactctgacctcagccatggcagggtcgggggatgccgatgggcgctgcacgggctctcagaggcccctcacctatggccatggccttgactgtgggggcctctgtccac

SEQ ID NO: 32200 - DNA, 120 bp, Homo sapiens
caccgatgatctcccttcatcccctacaggtggggcggtccagggtggtgggggcacagtggccccgggcagtgaccacagggtcctgacccgcggcccccgcaggcgggctgcatgctg

SEQ ID NO: 32201 - DNA, 120 bp, Homo sapiens
gggcgaccttggccttggggagagcagagcagagggagaggcagcagtcccagcggtcctaggctgtcgggaaactgcagcccagcctcagggccatgggaggtggtatccaggcctggg

SEQ ID NO: 32202 - DNA, 120 bp, Homo sapiens
atgcgaggggctgctggccaccccatgcacatgcccctgcccctccatgtcagatgcgtgcccctcggggctggccgtgtccgatgcaggccccttccggctgttgatcttgatggcggc

SEQ ID NO: 32203 - DNA, 120 bp, Homo sapiens
cggcgcgcagcgccgacttgaccgccgtctccacccagccgtgcgggtaggcggtgtgctcgccggcaaagtagatgcggccataagggaccgtccagtcatccttttcggtttgccaga

SEQ ID NO: 32204 - DNA, 120 bp, Homo sapiens
gagcgccggcggctgtaccacaaagccaccctggctgtgctggtcctccgcccaacgcttgacgacgccggtgccgtcccagagctggcgcacgacaggcccgtgcaatgccgccacgtc

SEQ ID NO: 32205 - DNA, 120 bp, Homo sapiens
cgtcgtcgagcgccaagcgcaacgcctcttcccggctcaagccggcgaacgctgccgccgcgtccgaccacgtgtacgaggccagcagcagcgcgccctcgcgcggcggcgggtagaaaa

SEQ ID NO: 32206 - DNA, 120 bp, Homo sapiens
atgcgcgacgggcgatcggtgtttgagtggccgccttcaatgtgctcctcgcgccagaagggcctgcggaagcttaggaacaccttggtggccggcacgtagtgcagcctccgcagcgcc

SEQ ID NO: 32207 - DNA, 120 bp, Homo sapiens
tggcggggcagcggcggcgagaaggtgatgcgcttcaccgccggtccgctcgccgtcagcagcaccacgtcggccttcagcaccttcagattccgcgccgggggagaggtctcgatctgc

SEQ ID NO: 32208 - DNA, 120 bp, Homo sapiens
gcacgtgcacatcgtgcggtccctgggtcatcgccaccacgggcgcgttcaacagcacaagcccggacagcgagctcagcagcgcgcgcggcagcaggtcccagccacccacgatgcggc

SEQ ID NO: 32209 - DNA, 120 bp, Homo sapiens
aggcgccccaccccaggacagaggagctttgagccagtgagacttccctctgggatgaaaaacgtgggacaggaaagtctggggcctctcagtggagacatgtgacagcagggggcttgg

SEQ ID NO: 32210 - DNA, 120 bp, Homo sapiens
gaacgcggccgtgtccctgtgcccagggactccagcctgcagcaggagggactccaggtagactgcaagcagtgcttcccaccttgtgtccagcatcgctgagcaccttggcggccacca

SEQ ID NO: 32211 - DNA, 120 bp, Homo sapiens
gcccggccacaccagcgccaaccacaatcaccctctggggcttcagggtccgattgagcccccaggtcaccaccttgagcagctgctcatagtcaggatcctgcatgcatttctcgaagg

SEQ ID NO: 32212 - DNA, 120 bp, Homo sapiens
ctgcgttcagccttccagtcctgggaggccaccaggctgaggaggatggggacgaggacgaggaggtgcagggctgggaggaggaggacagggtcaacggggttgtggcaggtcggggga

SEQ ID NO: 32213 - DNA, 120 bp, Homo sapiens
tctcggtgggagatggtgtctggggtggaggagaagggagggctgttgtgactgaggcctgtgaccactgtagcctgactctgtctcccatgggctgcccagctgctagagccggccctc

SEQ ID NO: 32214 - DNA, 120 bp, Homo sapiens
gaccgtccctgcctccctcctcaccggtctccacctctgccacagctctctcgggttcctgtctctttctcttcttttccctctttctttcctttctttcttttttttttaacagtcttt

SEQ ID NO: 32215 - DNA, 120 bp, Homo sapiens
cagcgagacgaggcacaaacggctagcacaggatagcataacaagtgccacccaaggtacaggctcagggtgctacggggacctgcaagaaggccacctgagcttcgggtagctgggaag

SEQ ID NO: 32216 - DNA, 120 bp, Homo sapiens
tgacgcaaagaggctgggcccagtgctggtgatggtggctgtgggtgtgggagcagctggctgtgtggcacctgctgtggtggctgctggcgtggccggagtgaagggcaacgtggcagg

SEQ ID NO: 32217 - DNA, 120 bp, Homo sapiens
tgccgtgggctgggctgaattccctgctgagccaatgttgaaaccggagggttgggccgtgcttccaccagtgaatgagaagcctccagatgtggtagctggagccacagaggtggtgga

SEQ ID NO: 32218 - DNA, 120 bp, Homo sapiens
ccccgaagcaagagtcgctgttccaaaagtgaagcctgtcgtctgtgtggccggagtctgggtggcaagtgagaacaggccggtggaaggggtacttgtggctggttggaagggagcccc

SEQ ID NO: 32219 - DNA, 120 bp, Homo sapiens
tgccgtctttgcagtgccaaacgtgaacccgcctgtaggggccccagtgcctccaaaattaaacccgctcatggctccggactctggtggcggcagctactctggctcccaaagcaaatc

SEQ ID NO: 32220 - DNA, 120 bp, Homo sapiens
atccgtcggtgtctgcagccttgggaagatttctaaagcagaggaagtgacattgtcagatggcagttttggaaaggcaagctcagtggcatgactgggcacagtcggtttggagggtgg

SEQ ID NO: 32221 - DNA, 120 bp, Homo sapiens
catcgagaaggatccagaagcacaaaagcacgccccaggggtcaggtacgaggagccggggtgctagggacgtgcgtggccatgttcagcccagtggaaagctcccactctgtggaggac

SEQ ID NO: 32222 - DNA, 120 bp, Homo sapiens
ggacgaggcgggagaacaggaccttggacccacctcagcctgaggagatcagatttgaggcactgccacaagcgggactaggacacacaagaacagctgtaggacctgctcccagcgtgg

SEQ ID NO: 32223 - DNA, 120 bp, Homo sapiens
gagcggatcagctcttgccaccctgagggcctctctggacctcagagagagagatggggccgggaacccaggctggatggcagggtctgggttgctgaaggccccccaggcccacacctg

SEQ ID NO: 32224 - DNA, 120 bp, Homo sapiens
aatcggagcctcccctggggttttctccaggcttggaaggcagctgcctccttcacctgtaggtgtggtgtggaggattgcacctgggcctcccttggacaccttctcaaccatctgcag

SEQ ID NO: 32225 - DNA, 120 bp, Homo sapiens
tcacgggagaccatgagccccaccagagatgggtgggggtgggggtgggggagggataaagagcaccccagaagacccatgggccacagtatttccattcagttcaaactgacttgattt

SEQ ID NO: 32226 - DNA, 120 bp, Homo sapiens
aaccgaccaaccaaccaaccagggggtgctgggaaggggttgagaggcctccatgaggctgtggaggcggataggcgtcaggctcagagctgactttaccccgagggcaacggctcgggc

SEQ ID NO: 32227 - DNA, 120 bp, Homo sapiens
ggccggtaatgctggttgagaacaggctggggaagagcctagagctgaaacgctctggttggcggtgcaggcacaggacatcaaggcctggagagggactgaggcatcagggctgaggga

SEQ ID NO: 32228 - DNA, 120 bp, Homo sapiens
cagcggacaggcgtgtgtggcgggggaggaacggcgcacacctgtgccccatccgcagcccctcttcttgtcaacatcagcttccccggggagaggcagtgatgttggtgggggaaggag

SEQ ID NO: 32229 - DNA, 120 bp, Homo sapiens
ggccgggctgtggtggagacggttgctatggaggtttctctgggaaccaggtgaaggcagccagaagatgggggcagggtggctttcattatgagaactggaagcaaacacagccccttc

SEQ ID NO: 32230 - DNA, 120 bp, Homo sapiens
cctcggcggacatctccacacccacatttcatggcatttctcacgcgctgggctgtttccagggcttcacctgttctcactcacttaactttcccccagcaatgtgacgaagcgaaacta

SEQ ID NO: 32231 - DNA, 120 bp, Homo sapiens
ctgcgtaaagtcccacaaccagtaagggctggcccaggtgtctggccccacagctgagctcctaaccgcaccgagcctctccaaaacatggtctttttttgctccccactgccaccacca

SEQ ID NO: 32232 - DNA, 120 bp, Homo sapiens
caccgtcccctgcctcatccagtcccccttcccattctccagagacttcctgggccatctccatgaccttccagaccagcctgggcttcactctcaaatccaattcaggatgatccgccc

SEQ ID NO: 32233 - DNA, 120 bp, Homo sapiens
gcccgccccagctgcagacgatggcctgagacgcctgcagggaagagaggggcgtccgctgctcgccaacccccatacgttcctgctctgtggtaggtcaggaagaagagggcaaaggag

SEQ ID NO: 32234 - DNA, 120 bp, Homo sapiens
tggcgctctgatggccgctgacctcaaaactctccatggggggtacccctctgcccattgagggggcacctagggagcctaggggtcccgtgaggccctcccaccatggttccccgcctc

SEQ ID NO: 32235 - DNA, 120 bp, Homo sapiens
tggcgagagtggcttaccaccctaattaggaacttaggaactgggagtggggaagtgtgtaacagtgtgtaaatgaagaagccttattaggctgatcagccacaaaatgggaagtcacaa

SEQ ID NO: 32236 - DNA, 120 bp, Homo sapiens
tcccgtaataggagatggtatagttggccgaaactagaggaagagtgagtgtgctgggccgtaaaggaaggaatagaaggaaagtccatcaaaacttactccattgaagtgcatgttaca

SEQ ID NO: 32237 - DNA, 120 bp, Homo sapiens
gaccgaagaaactgtagactaggaaacaattgggcatgtattaaagatggtgataggggtctgaggacagcctgagtatcccgatcaatttccttatattgattcatggttaaatacagc

SEQ ID NO: 32238 - DNA, 120 bp, Homo sapiens
gcccgagccaaaaataaaagtaagagcagcttcaccgactgacacgaagttaaaagaaaaaccccagaaagagcaagagaagccagttttgcaacagctgccagaggaaacagaaattcc

SEQ ID NO: 32239 - DNA, 120 bp, Homo sapiens
ccacgtattattgctgtatctccacagagggtaaaaactaggtcagccacacaggcagtcagctgcatctacgtgaccaacccccagtaaaaactctgaatgccgaggctcaggtgagct

SEQ ID NO: 32240 - DNA, 120 bp, Homo sapiens
gggcgggggagactctgacagtttatttttcttatgcttcctgagcataagacaacgcttaatttagacaacgctttgtgtaagcactcgacaagcactacttgtccgtgctggccttcc

SEQ ID NO: 32241 - DNA, 120 bp, Homo sapiens
acccgatgctggaggcaggggtgccatccctgtactgggggagctcagtctgatgggaggatgtggcaggcatgtggacggccatgatataaagggatgtgagaaagaggggctcaagaa

SEQ ID NO: 32242 - DNA, 120 bp, Homo sapiens
cttcggctgataacttctgagatactgcagagcctctgcccagatctccctcccacactccagatgtggtggccaaccacctcctcaacagcccctcctggatgactcctaggcaactcc

SEQ ID NO: 32243 - DNA, 120 bp, Homo sapiens
gcacggaccctggcacatcaggattgctccacaggtggtggccttaaaatatccccataacaccagggctccccagccggggagtggcagagctggctcaacctgggtctagctaatccc

SEQ ID NO: 32244 - DNA, 120 bp, Homo sapiens
tgtcgcccgcacacctgactcacgctggtgtccctccttcctctgttctcatcgttcccactctcccttcatcatcgaggctggtatcgtctaagacactgagctgagggatggggggtg

SEQ ID NO: 32245 - DNA, 120 bp, Homo sapiens
acacgttcaaggccaagggtgctctgagcccaggggaagagagggagacgtatgcaggacccgcatctcggggaaagaaaaatcctttccagctgtggggagagcactggggggatcatg

SEQ ID NO: 32246 - DNA, 120 bp, Homo sapiens
atccgcccagctctggaacccaggcatagtaacagtgcctgtctctcagaggcaccatgaggttaatgacaatgcgtacgtgcccggtactcagaggcaagcaggaaaagctggcaattt

SEQ ID NO: 32247 - DNA, 120 bp, Homo sapiens
atacggcagtggccgttttcccggcatcactctactcatttcactctcctgactgcagccctgtgagggcagtagcattaccatctcccctctgcagatgaagaaactgaggcacagggt

SEQ ID NO: 32248 - DNA, 120 bp, Homo sapiens
attcgaaaggtcaagcgacaagcggcaagcagaggcagcccagcccaccactgagctccagggtgccccatgccttccacctccccaggccctgctggggaccctgactgacttctcccc

SEQ ID NO: 32249 - DNA, 120 bp, Homo sapiens
ctccggcctccagaaggaatcagcagagccaacacctaaacttcgtacccagtgattttggacttctggcctccagagctgtaggagaataagcatgtgctgtgttaaaccactcactgt

SEQ ID NO: 32250 - DNA, 120 bp, Homo sapiens
cagcggccacaggaaactaacacaagccccacctttcatctgcaaaggcagaagctgcagagggcagcgtgggcccgaccctgagctgctgctcacgggcagctctcccaagtgcaccgc

SEQ ID NO: 32251 - DNA, 120 bp, Homo sapiens
agccgcacggattcatgtgactgatgacggatggtggttctcccctatagctcagcgaggcccgggatatatgacattatagttcagtactggacagagacacaagagttaataaaatgc

SEQ ID NO: 32252 - DNA, 120 bp, Homo sapiens
tggcgcagagagtggggtaaagtgtccactgctcgaataaccataacgattcagcttgttcttgttgttttactgttattgctttaaattacgggacatacaactccaccatctcttctt

SEQ ID NO: 32253 - DNA, 120 bp, Homo sapiens
attcgtttattcatttactctataactattcaccgagtttcctgtttatgccagccactagggaaacagcagcaaaggaaacaacacagcccctgtcttcaggatgcgcacgttctggtg

SEQ ID NO: 32254 - DNA, 120 bp, Homo sapiens
aaccgctgaacaggtcagatggagaaagggctatggaggacaataaagtaccatagaagaaaacaggatgccacagaggttggtgggtcactattcacacagggtggccaaggagggcct

SEQ ID NO: 32255 - DNA, 120 bp, Homo sapiens
cctcgcccagagggaggcatctgagcagagacccaaaggaaaccagggagcgagctgtcaatatctgggaaggagtcctcaggcagacaactttctatgcattatcctgtttagtctata

SEQ ID NO: 32256 - DNA, 120 bp, Homo sapiens
ggacgcaggttccagaattatcaccacttcataggagagtgtggcatttgtattttccaaagcaggtcacatgactatttctggtcctgtgtgctctttggaaccttgtaacccctcctc

SEQ ID NO: 32257 - DNA, 120 bp, Homo sapiens
tctcggcagagctgtgactgctcctaccaatagaggaccggcagcagtaaggccatgagacttcccaggctgggtcataaaaaacaacttgcacctggctggctcgctcaggatgctcac

SEQ ID NO: 32258 - DNA, 120 bp, Homo sapiens
caccgcacctggcctcctaccctacactggtatgattttatcttaactcgttacatccgtaatgaccctgtttccaatactgtcacattctgaggtcctggggtttagatccccaacatg

SEQ ID NO: 32259 - DNA, 120 bp, Homo sapiens
acccgtaacaagtacgtaggtggacctccgccttttcagaggctgcgtaatgtttcattgtttgcgtgaactatgattcttttaaccaagccctccaaagaaagacctttaggtgtttct

SEQ ID NO: 32260 - DNA, 120 bp, Homo sapiens
ggccgcctctgggtctgattgtcttctggtctctggcgctgtgggaggccccaggagctattgttggctccagggccggattggaagtgctggaaatggagcgtagcttggctgtctacc

SEQ ID NO: 32261 - DNA, 120 bp, Homo sapiens
agccgggcctcttgtggcctattgacacagggtcttgggcctctcccacccccaccccgccgcatttcccaaccagggttgcataattccccagcctgcatgactccgcagctgggcagc

SEQ ID NO: 32262 - DNA, 120 bp, Homo sapiens
aggcgcaggcagcagctctgatttttggaattcagaaataaaaactttgcagcaacctatgcatgtagtaacataaactgaatgtggctaaaggttgtactgacaaaaccaagccttccc

SEQ ID NO: 32263 - DNA, 120 bp, Homo sapiens
cccgctcaggcccgcgatgctgctgaggctgcgggatttctcgtaacctggggggtggggaggtgtgcagacacaggggggaagcacgaagatggggtgcagggaagggtcagacagaga

SEQ ID NO: 32264 - DNA, 120 bp, Homo sapiens
ggacggatgacaagagacagatggacagagatggaccaaggagatggagagagaaagtgaacaaatcggggagtcagtcaacatcgatgagaaagggggagacatcggggaggggggaga

SEQ ID NO: 32265 - DNA, 120 bp, Homo sapiens
ctccggattaggaggcaggttggtgcccaccgagcctcccccgccccattcccaccacagtccaccgcccttccccccctccactggtcccctcacctgaggcaaaaggtggggggcagc

SEQ ID NO: 32266 - DNA, 120 bp, Homo sapiens
aggcgggatggtgggcggcaggggcgtggggaggggctgggtggaatgcatgtgggagcagccagcggagagggcagggaacggtgcggccgccgtagcggggctgggggctgacctagt

SEQ ID NO: 32267 - DNA, 120 bp, Homo sapiens
ccacgggttctgctgtgggacgggagccgccaggcctaagatcacacatcctgtgtgtctcggaggctttagggctcagcttggagctgggcagacgggaagggagaaggcgggcaggga

SEQ ID NO: 32268 - DNA, 120 bp, Homo sapiens
aatcgtgaggtggttaagagtcggcgagcctgggcatgaatctggcttttaacctgtcaaaactgggcaaggagactgagctttctgaaccagaagtttgtagtgggattgttgtgagga

SEQ ID NO: 32269 - DNA, 120 bp, Homo sapiens
gagcgtacgaaggacttggctccaaacacagtgcttggagcagtgcctggaacacagtaagaagacctgagctgttgttagggtatgcaggcagcagttagttggggggcaaggtcaagg

SEQ ID NO: 32270 - DNA, 120 bp, Homo sapiens
gtccgggcccttaagggaggaggggttgaagggttaagcctgcaaaaatggaagaggagataaaagaggagagtcaggcagggtttagggccctgaagaggaaggagagtcactggcctg

SEQ ID NO: 32271 - DNA, 120 bp, Homo sapiens
ctgcgggtagtggaggagggagggcatggggagttttgctattaatcaggggcacagagcacggggaggccactgctggaccacagagaggaccttggactttggggtgggccaagggcc

SEQ ID NO: 32272 - DNA, 120 bp, Homo sapiens
tttcggggccacagagaggaccctggacgttggggtgggctgggggccggcgcaggtcctctctgaactccccccccacccccaccttcgcttctctgcagtggtttaagaggccagagg

SEQ ID NO: 32273 - DNA, 120 bp, Homo sapiens
ggcggggcgcacggcggccagtaccgcggacagctcccccgccgcagtgcgcagccgcagcggctaggggccgtcttaaccccttccgggccggagcctattcaacgcgcagccgcagtg

SEQ ID NO: 32274 - DNA, 120 bp, Homo sapiens
ccgccgcagtgcgcagctgcagaggctggacggcgtcgggctggtttaaccccttactccagagtgtgtcaaaagcagaaggggtaggagggcatggagtctctgtaagaaggaaaggag

SEQ ID NO: 32275 - DNA, 120 bp, Homo sapiens
gcacggggcacaggtggacagaaatgacaagaacgctgtaattactgctgtgttcccagccccagagactgtgggcagcgccagggtccaggatgtggggcacggtttcgggctgaggga

SEQ ID NO: 32276 - DNA, 120 bp, Homo sapiens
aggcgctgctgtcctacacgcgcatcaagaggccgcaggtagggccccgcagagcctctgcgcagagccaactacgtcccgcggcccacgtggtccgttcaggctgggttctgccagcca

SEQ ID NO: 32277 - DNA, 120 bp, Homo sapiens
ctccgcagagtctttcctcaggccccaccctgctcgactgggagccaggtctagtccaagcacagaggcgggccccacgctggctcccacgcctggtcggggaggggccctcctttctgt

SEQ ID NO: 32278 - DNA, 120 bp, Homo sapiens
cctcggtggtgaagcagtggaaagagtcggcttgggcagctgtgggttcaggccctgcctctgccactctgcagcctatggtaggaagggcccctctctgccctgagcctcagccctaag

SEQ ID NO: 32279 - DNA, 120 bp, Homo sapiens
ctccgggctctagagccctccggcactgggaagcagcctgcccaggttcagtgcggttggggtgactcacacacctgcccgtaggtccctctgtgtgctgcctgccgacctctgtgtccc

SEQ ID NO: 32280 - DNA, 120 bp, Homo sapiens
gagcgagccagccagccggggagacagctacagcgtgtgtcaccacactggcccccgcccctgccccgggctggggagcaggcccaggcgcgatggggaaagggcccaggaacaatcggg

SEQ ID NO: 32281 - DNA, 120 bp, Homo sapiens
gtccgcccccagcaccccagtgccatgctcccagcagctccggcctcaacctctcttccggcgggcaggcgggagggcggttacatcaatggcttccttttgtccctgtctgacagtcct

SEQ ID NO: 32282 - DNA, 120 bp, Homo sapiens
tctcgttctcctcatcccaggagccttttatgtgagtttccacagctcctcctcgcaccctctcttctctctgcacttctcgtggctccccccgatgtcttgcacaccatgctgttcatc

SEQ ID NO: 32283 - DNA, 120 bp, Homo sapiens
atacggcttgcaactattcttccagagtcatcatgccttgatacctacctctggggtcatttagctgactacctgccccacatttggacgtctctgaacatttgtcacctggtagcccaa

SEQ ID NO: 32284 - DNA, 120 bp, Homo sapiens
ccccgttgtctgtgaaggcattttcaatgctctccactgtgctagatggtgagcccatagggacagaaattgggtttgttctgactcctagagtgacttggtaaatattgttgatatagg

SEQ ID NO: 32285 - DNA, 120 bp, Homo sapiens
tctcgtctcttaaacatctacctctctagcagggctggaattagtgtgagatgagtgaggtcctggcctagcatgcaaaatttaagaaggtgccaaaaatctcagtaattgtgatagttt

SEQ ID NO: 32286 - DNA, 120 bp, Homo sapiens
agacgcatggtgtagtcccagctacttggcagtcaaaggtagaaggactgtttgaacccaggagtgggttgaagctgcagtgagccttgattgtaccagtaaactttagcttgggaggca

SEQ ID NO: 32287 - DNA, 120 bp, Homo sapiens
cctcgccccccggctaaaaagtgattggggaccttttaaaaaacttcctgctctccacagaatgggattacagccccgagatgatccataaaagattttcaggaagaatgaagagtttag

SEQ ID NO: 32288 - DNA, 120 bp, Homo sapiens
ccacggagtcaactgaggaagtaaaacttaataggaatagtctcagtgaacaatgccataaattgacacgcagccaagtgccaagttctgataacaaatcagtaagaaatgcaagttaaa

SEQ ID NO: 32289 - DNA, 120 bp, Homo sapiens
aaccggcagttttagaaattaatatggtctcacgcatgaatattcttacagtaattctacttgggtgattcaactctgacaaaaatagcagagatgttttctattatttatttaatttac

SEQ ID NO: 32290 - DNA, 120 bp, Homo sapiens
agacggactcccaaagagatcaagttgcagagggagggggagacagagtcacagcctgagagagaatagagattcacagagccagagagacaaagacagggaaagaaacaaactcaggga

SEQ ID NO: 32291 - DNA, 120 bp, Homo sapiens
aggcggaagaatttatcagacgtagagggagagacagagggagactgattcacagtgaggcagaccaagaccccgagaagaaccacgacaccaagacccagagatggcgacagatacaga

SEQ ID NO: 32292 - DNA, 120 bp, Homo sapiens
tctcggagacagggaaaagaaaacagatccactgagaggcagaaacagagacacatcgagaaagctcgctccaggaatagagggagagggacagaggtcacaagaaagacacacgcaggc

SEQ ID NO: 32293 - DNA, 120 bp, Homo sapiens
agccggcatcggagaaagtgagaaccttagcgccctgcctgtccactgctggacccctagcgtggagcataaagtttgttgaaggaaggagaggggcagggtcagacacagggaccccag

SEQ ID NO: 32294 - DNA, 120 bp, Homo sapiens
gggcgcccacaggacacacgaggcaccctagtgggggaggaacgcggggcaggatgacagattgcagggtggtgggggggagccaggctcagaggatgcccctccctccagccagccccc

SEQ ID NO: 32295 - DNA, 120 bp, Homo sapiens
ccccggagtgggtgtgtgcacgtgtggggggcggggagggaggacatttgtcccgtgtctccgggaggggagcgcctttaagccgaaaccccgccctctcggtcgtcctggcaacgcctc

SEQ ID NO: 32296 - DNA, 120 bp, Homo sapiens
acccggggctcccacatttcagcaggtgccggagctggagctcccaccgccgccgcccgtgcctccggctgccggcgcccctgcctttggctcttcctccccactcgcccgctccccctg

SEQ ID NO: 32297 - DNA, 120 bp, Homo sapiens
tggcggagccggcgcgcccggggtgccgctccctgcctggcgcgctccgcacctggaggtgccttgcccctctcctgcccacctcggaatttccctgtggctcctttgatccttcgagtc

SEQ ID NO: 32298 - DNA, 120 bp, Homo sapiens
ctacgtttctggggccatggctggtctgggccccggcgtaggcgattcagaggggggaccccggcccctgttttgcagaaagggggccctgaggcagaaggtggtccacgaagtcaagag

SEQ ID NO: 32299 - DNA, 120 bp, Homo sapiens
gaccgaactttcagactctgatctcagactttccacctccgattgttccacttccccaacctactagctagttctagaacggacagatccatgcttctcaaaactgttgcatagacccct

SEQ ID NO: 32300 - DNA, 120 bp, Homo sapiens
tctcgggggcatctaactctaccccttcttccccatcaggtttgaactaggggaggggagggggatgagaagagaaaagaaaaaattgttggtgaaagtcaaaaggcttgttaacgtggt

SEQ ID NO: 32301 - DNA, 120 bp, Homo sapiens
cctcgccacttggaggaggagcggtgggaagaccccgggaagttgcgctttcccttggattttgggaaaggggagcattcctggggtccttttgaaaaggccctcccctcatttccggcc

SEQ ID NO: 32302 - DNA, 120 bp, Homo sapiens
ctccggcttccttctgccactcgaccctgcccccctctttcccttcccccatccatctcctctccgaggctccccatccctcagcagctcccctccccctccctccctactccctccctc

SEQ ID NO: 32303 - DNA, 120 bp, Homo sapiens
tctcgtcctccagctccgcactttacccagcgacacgagaaccaaattgtctcctcaccttttttttttaatatatatatcccgaccctcactcccttggggcccaggctcagagctgcc

SEQ ID NO: 32304 - DNA, 120 bp, Homo sapiens
atacgcctcctcatctccactccccgaaccaggtcggacgcctgggtccctcactgctgggggagggggaagcagcgagaattgggagccaaaaggtttttctggggggggtgccaacag

SEQ ID NO: 32305 - DNA, 120 bp, Homo sapiens
gctcgacgtcccctcctccgtgcatcggagagttgacctatcattaacagaggtgagacagatctttttattaatcggaggtgggtggaggtagaattaatgttctgtgatccccccccc

SEQ ID NO: 32306 - DNA, 120 bp, Homo sapiens
ccccgaattctggagaaaagagctggtccccttcctaaggagaaaggagagtgaccccctcatatccggaagctttagaattgggggtccccagctctcttctccctggcagctgctgaa

SEQ ID NO: 32307 - DNA, 120 bp, Homo sapiens
gaacgatggactaagagtccctaaaaccagattgtgccccaaattgacaaaatgaaaagatcttcgaatctttttttttttttttggacggaaggagaatttccctcctttccctcctct

SEQ ID NO: 32308 - DNA, 120 bp, Homo sapiens
attcggggagaagaggccaagagatcaagaagagaggaaactcagcatgcggacagaaaagagaggaaggggccggcgcccaggccgggaggctgggggttgccctgtccagcgggctgc

SEQ ID NO: 32309 - DNA, 120 bp, Homo sapiens
agacgggagttgaggtgggggagggaacacaacgtgtggggcactaggcccagttgccatggagacaccccccatagacaacctttttccacagcccctcctcggagcagccccagtctg

SEQ ID NO: 32310 - DNA, 120 bp, Homo sapiens
agacgggcaagcaatcaggaggccaaggtcaccctgtactgggacctaggttctggtttttgttttgtttttttttaatcccctcttcgtctaaggtttccaggctcttaactatagtgg

SEQ ID NO: 32311 - DNA, 120 bp, Homo sapiens
ggtcgggggagaatgtggaagagagaaatgaaggagccacggggcagcgggtgcaggctgggaaagtattcctaattgaaaagagagttgtagtcttgcggatcacatttttcagaggga

SEQ ID NO: 32312 - DNA, 120 bp, Homo sapiens
agtcgtagaggggagtactggggggcgttcccaagaagggaagcctgtgggggcctgcggaggggattttccggggcagaggagaacctgggagctatagcggtggagcaagaggaagtg

SEQ ID NO: 32313 - DNA, 120 bp, Homo sapiens
caccgcgggggcggcggcgcctcggagaagaaggaccccggcggcctcacgcactcgggcctctggaggatctgctgcctggaaggtagggtgcgggcggccctccccgcagcccccgcc

SEQ ID NO: 32314 - DNA, 120 bp, Homo sapiens
cgccgctcccctccgagagaccctgagcctcccggggctgcctgtccctgatcctggggcccccttgggcacccctcctcctctgccagaggggcttctgcgccttcccactcgcgcccc

SEQ ID NO: 32315 - DNA, 120 bp, Homo sapiens
ctgcgtcctggcaccctgcggaattcctcggcatgctccctctgcagcccctctgcctctccgctgaacccccttatcctatctttccctagtccgtgtctcctgcgctgccccatcaca

SEQ ID NO: 32316 - DNA, 120 bp, Homo sapiens
ctccgctccacctgccccttcatttcctctccctcgtgccccgtgacatcttctctctcccgacatttcccccccagtcctctgaagtcccctgcctctcccgccccctttcacggccca

SEQ ID NO: 32317 - DNA, 120 bp, Homo sapiens
ttccggtctgtctctttccccttctctttggctgctgctcccctgaaacttcgtgccttaactcgccctcactcatgactttctctcttttctgccttgtgcttctcctcctgttcatct

SEQ ID NO: 32318 - DNA, 120 bp, Homo sapiens
cttcgacgtcttcctgactcgatgcctcaggccttcacgttaaggcttctcgctcctgcccctgctacctcctcggatcttcgacttggttcttttcctctgtcctgttctccctctcac

SEQ ID NO: 32319 - DNA, 120 bp, Homo sapiens
gctcggctccctggctctcgacttccccacttctccaagactcctgccctctgctgtgccaaccccttctctctcccactcttagcatcagtatttctttcctgagtatcaagtagctgc

SEQ ID NO: 32320 - DNA, 120 bp, Homo sapiens
ctgcggggctgggaagcaggagtcttgggtgccagttctgctgcatatctgccctgctgtgtgaccactgtcttccctcctgcaccccagcctcacagcccttgtctgcaacgtgaagga

SEQ ID NO: 32321 - DNA, 120 bp, Homo sapiens
cttcggccaaaagattgaaatctcttgcttctctttttcatccccctctatttcctctgccccttcttcctctgttttgctgagtgttcacgacaagccgggaacgttatctcgtttaat

SEQ ID NO: 32322 - DNA, 120 bp, Homo sapiens
cctcgctgttggggatgggtaaactgaggctcagagaagtgaagtcacttgcccaaggtcacctagctgagaaaggggccgagccaagagcagaactcgaatctcatggatgggattcac

SEQ ID NO: 32323 - DNA, 120 bp, Homo sapiens
atgcgctctgtctagtgtacaaagtgtttaaaactgaaagcaaaatctgaatccattgccaacagttaaaaatagggaggcttcccattgtagttctgatttccggcttcttctgagctg

SEQ ID NO: 32324 - DNA, 120 bp, Homo sapiens
tggcggaagatctagcacaagcctgtgttctaccctgaccacgatgggccggatctgagcagcagctggggggtctccacttccccacagtcacctccatctgctccgtctcgcctccca

SEQ ID NO: 32325 - DNA, 120 bp, Homo sapiens
ccacggctctcgtgatgttctttgcctctcctgtggaagtttgagttcatgtccattcactggtctgaccaagtaccaggcatagagccaagtgtgagggctcccatcatgggagcccta

SEQ ID NO: 32326 - DNA, 120 bp, Homo sapiens
gcacgtggcatctagtagggatgtcattcattcattcattcgttcattcaacgtcccatttttattgagtttatattatgtgccaggcattgttctggattctggggctgcagcagtgga

SEQ ID NO: 32327 - DNA, 120 bp, Homo sapiens
atccgagtccagatagtgagatcctctggtccccgattggctgactgatctcgttcccgccccctcctctcaccttggggcgggctgagggaggatcctgggcgctaattggccgctttg

SEQ ID NO: 32328 - DNA, 120 bp, Homo sapiens
cctcgcggcgactctgcgccgtgactggttgtggaatcccggactgggattggccaccgcgccgcagagctgtggggcaatctgcggcggtgacgggccactactgggagccggctggga

SEQ ID NO: 32329 - DNA, 120 bp, Homo sapiens
gcccgggctatacacgctatggagccgcagggagccctgccccttccgagttggggcgggagctcccagggtgatgctacagctgtccaaaccccagctgtggatccgagcctccctcag

SEQ ID NO: 32330 - DNA, 120 bp, Homo sapiens
gcccgcctcgctctgtctctctttccctatatctctctgtccctcccccaactcccttgttccacccacttctcctccccgaccccaggacctcacctgtcaccagcagctccaggacat

SEQ ID NO: 32331 - DNA, 120 bp, Homo sapiens
catcgctgggctgggaccagacacccggcccccagtctggccttcggtagcagcagcggtaaattcccccttgggctggagtcacctcctccagaaagaattctgccagctcggaggaca

SEQ ID NO: 32332 - DNA, 120 bp, Homo sapiens
tcccggaagagaaggggagcgatctctccaggcttgaaaagtccaaatctccaagcgggttggggtgcccggcatctcaaggtcacgttgaccccaggggtcacaactgtagccggctga

SEQ ID NO: 32333 - DNA, 120 bp, Homo sapiens
aaacggggctgcctgggtcctcgggcctcctgggagccccagaagatgaaagggaagttggggaaggaggaaaatcaccttggacaattactgcccctttcttagcctcagtttcctgtt

SEQ ID NO: 32334 - DNA, 120 bp, Homo sapiens
gaccgggtgggcacgccattcactcctctgttgcttcccaaaggcatcttgaggcctgagcgccggccactgtgctgggctggtggacacaggtggctcagaaatcagtgctgccctgag

SEQ ID NO: 32335 - DNA, 120 bp, Homo sapiens
aagcgatggggcctttgctgtgctgataatacacactgcaaatttctgagaggagacggtggcgggcagtgcttcttcaactcctttaacatctcccaggacaggagcacgctttcggaa

SEQ ID NO: 32336 - DNA, 120 bp, Homo sapiens
aaacgctgctacagaacaatgttaggcaggagcagcatgggcctgaggcccctctgtgggctaacgggatggatggttccaaggggacaccctgagtgggcattgaggaggctggtgtgg

SEQ ID NO: 32337 - DNA, 120 bp, Homo sapiens
acccgcaggtagtagtgagggcgggcaacagggccaggaggtgatgaggagagacactgaggcaggtactccaggggccaggctgggctctgccaccttcccaggcccccactgccaagc

SEQ ID NO: 32338 - DNA, 120 bp, Homo sapiens
cagcgatgcccaggagagaagtgggtagtcagtcctgttgggcgcttggtaagcgcaaggtgcctgtggggtggctggaaagaagcccaggaggtggttaggctcagcagccggagtgct

SEQ ID NO: 32339 - DNA, 120 bp, Homo sapiens
ctgcggtagggataccatgagcacatttaccctcccaccactttctggagtgctggtaacttccagccctgtgagtagcttctgtgacccttcaggtgacattcagaattactatccaat

SEQ ID NO: 32340 - DNA, 120 bp, Homo sapiens
aggcggctccagctaatctcatattgagaacacttaagtgtttcccactagtcctctggcttccaacagatggatcttctctggctgacaacctaagttgtgtgtcagatccctgtgggg

SEQ ID NO: 32341 - DNA, 120 bp, Homo sapiens
gggcggtgtccaggcaggacttgggaagctgggcaggctggaaatcagtgtgagtgttttaagcatgaaggtgattgaagccatgagggtgagtaaggtcacccaggtccccaagagggc

SEQ ID NO: 32342 - DNA, 120 bp, Homo sapiens
cagcgaggccagagaggaggctgctgggacaaagatggagcctgaggtgggggtggtgagggagaccagctggcccactgggtcctgaccctctgctctctcccacccgcagtctccagc

SEQ ID NO: 32343 - DNA, 120 bp, Homo sapiens
aaacggctccaagcctgtccacagcaaccagcaccctcagtccccagctgtgccgcccacctacccctccggccccccgcctgctgcctctgccttgagcaccactcctggcaacaatgg

SEQ ID NO: 32344 - DNA, 120 bp, Homo sapiens
ccccgcccccgcagcacccccaagtgccctgggccccaaggccagtccagctcccagccacaactcgggcacccctgctccctatgcccaggctgtggccccaccagctcccagtgggcc

SEQ ID NO: 32345 - DNA, 120 bp, Homo sapiens
gcacgacccagccccggccccccagcgtccagcctagcggaggcggaggcggcggcagcggaggtggagggagcagcagcagtagtaacagcagtgccggtggaggggctggcaagcaga

SEQ ID NO: 32346 - DNA, 120 bp, Homo sapiens
tggcgccaccagtgagtgaggaggcagcggggtggggggcgtgggcggggctgggcagcaggcagcagccctttccatttactctttgttcccaggttacagctcagttgtggcagacag

SEQ ID NO: 32347 - DNA, 120 bp, Homo sapiens
gcccggcagaggtggctttgagcagcagtgggggcaacaatgccagcagccaggccttgggccccccttccggcccccacaacccacctcccagcacctcgtgagtgtctcggccatcgg

SEQ ID NO: 32348 - DNA, 120 bp, Homo sapiens
aaacgaggctgtggctgcggggctggagacccaacctacctgtttccagcaaggagactgaagcctagccgggctgggcccaccccgattccagtcaccccatgccagtcacaggcagac

SEQ ID NO: 32349 - DNA, 120 bp, Homo sapiens
aggcgggagctctcccagcgtgtaggtgtccctagtgaaggagcgtgtactattggcacatcctttgacaaaaatggtagcgcactgtacatattctgcaggttggcgtttacttctgta

SEQ ID NO: 32350 - DNA, 120 bp, Homo sapiens
tcacgaacttgtattttgaaaatctcggcgtagtattccatgctgcagagtcccactcacgagacgttcctctgctgatgaatgcgtcgtggtctccgattgtttccctacagtttgatg

SEQ ID NO: 32351 - DNA, 120 bp, Homo sapiens
ggtcgttggccctccacggcccccaaacagggcaggtgagagcatctggggcctgtgtcaggctgcacttgctcctgcagcccaagtgctcaggccaggcctcttgtttcctccccaggc

SEQ ID NO: 32352 - DNA, 120 bp, Homo sapiens
tggcggaacgggcagccatcagctctggcattgaggaccctgtgccaacgctgcacctgaccgagcgaggtgagggacccaggatggtggggaagcagcgggccaaagaggaggggctgc

SEQ ID NO: 32353 - DNA, 120 bp, Homo sapiens
ggccggacccccaccctccccacagacatcatcctgagcagtacatcagcacctccggcctcagcccagccgcccctgcagctgtcagaggtgaacataccgctgtcgctgggtgtctgt

SEQ ID NO: 32354 - DNA, 120 bp, Homo sapiens
ggccgcctggcaccacatgcctcacccctctgactctgagcgtattcggtgaggggccacagggaagggggatggtctgggacttgagtcttacggaggaggcagtggctgaacctgtga

SEQ ID NO: 32355 - DNA, 120 bp, Homo sapiens
caccgccctgggtctttctgtaccacctccccccgcagggatgcatgtctgagcacccttttgatcacgacaggactagtaggcagctggcactgaccttcctgttgctctcacaggcag

SEQ ID NO: 32356 - DNA, 120 bp, Homo sapiens
ccccggaacccctgtccgacgcccccctaccaccaccagatgccacccccacactcggacactgtggaattctaccagcgcctgtcgaccgagacactcttcttcatcttctactatctg

SEQ ID NO: 32357 - DNA, 120 bp, Homo sapiens
ccccggggcagcctcgggccccccggcttcgccgccaccgccgccgtcccccctcgggctggaggggtgaggtgggtgccccactgcggccactgggaccgcaccccctccctattccca

SEQ ID NO: 32358 - DNA, 120 bp, Homo sapiens
ccccgtccccgccttccagcccagagatgttagaactgcttgggttgacagcgaggctggtccactgaggcacacctcagccccgcttccagttgcccactggctcacccgcggcccctc

SEQ ID NO: 32359 - DNA, 120 bp, Homo sapiens
ggccgaccccactctgctcatcggcacattctcaggcctccctggagaccactggggagctgtccagccccctcccaaccccagtgagtcatgagtgacctccaccctcatccccacttg

SEQ ID NO: 32360 - DNA, 120 bp, Homo sapiens
tggcgggggccggggttcagccctgatgtcctgccccattcccctggctccccacccagtttgggggccccctgatccccctctccactgttcctcccccagggcactaaggcacagtat

SEQ ID NO: 32361 - DNA, 120 bp, Homo sapiens
tggcgattccacaccaagtacatgatgtggttccagaggcacgaggagcccaagaccatcactgacgagtttgagcaggtgagggccccgccccctctcttcccgctgctagggttgggg

SEQ ID NO: 32362 - DNA, 120 bp, Homo sapiens
tggcgcagtccctcagcctgaccaagtactcctccctctggctgtctgctcagcctggaacaccgccctctcatcctccacttggccagctcctaggcctcctgtaggtctcagcccaaa

SEQ ID NO: 32363 - DNA, 120 bp, Homo sapiens
ggacgctgcaggctaccctggggcctgctgggagatgtagttctgcagtgtcacctgagactgggcgggctcactcaccgcaggacataggaacgggcaggtgcgctcttgtagatatac

SEQ ID NO: 32364 - DNA, 120 bp, Homo sapiens
ctgcgccagccaccactgcaccgtcatgttccagtaccgcatgccatcgcgcacccgcacgcagaaatctgtgctgtagcagtcgatgttgcggatggtctcatagtcatactccaagga

SEQ ID NO: 32365 - DNA, 120 bp, Homo sapiens
agccgccttctccggactggggggtggaggatgagggtgggggacagacatgcagctcagccaggccccctcccgacgcctgctagtgtcccagccccggatgctaaggaagggatcctg

SEQ ID NO: 32366 - DNA, 120 bp, Homo sapiens
gcccgccacagccatgaaaagccttgaagggctatggttgctaagctatgagtcctttagcaaccaaactcagtatattcagagaagccgccaaggatggtcccttctaaattgtcggac

SEQ ID NO: 32367 - DNA, 120 bp, Homo sapiens
tcacggttgctagggagatgttccaggcgccagtggggtccccatgatctttgttgctaaggaaaaggcattccttagcaacaatgcctaggatgtttagaaaggcttttaggaaggggc

SEQ ID NO: 32368 - DNA, 120 bp, Homo sapiens
ggtcgcagtgattattggagaagtgtcacctctagcaatacagtggctccctcatcactcatgtcgacagccccagcagtgggaaacactggcccatatgaagccttggtggcctctgat

SEQ ID NO: 32369 - DNA, 120 bp, Homo sapiens
gaccgagcagatttagaaaaaccttcaattcctgcttggctttactagggggacatcctctctctagcagctggaggtcagggcacggttattagggcagtggtaacaaattcccgtggg

SEQ ID NO: 32370 - DNA, 120 bp, Homo sapiens
atacgcagccatagaaggaaatgagaaatgaaacttcctgacacaggcaggaaacctcaggaagcagcgaggtcagagctgagttggcttctggtgacttgcaatgtcagggaatcacta

SEQ ID NO: 32371 - DNA, 120 bp, Homo sapiens
acccgggcaggtggtgccgtcctcctcttttcaagcctaacgcccagtgcagccctggtagaaaccctctctggcagatgaggcactgggagatgagtgtccaagaatgagaagaaagag

SEQ ID NO: 32372 - DNA, 120 bp, Homo sapiens
ctcggagcggctggttcctcctgcgccccttccttctgtagccttcctcactagggtttccagcgtccttgtttttttctcattctgtatttgtgtccccagggcccccatcttcccctc

SEQ ID NO: 32373 - DNA, 120 bp, Homo sapiens
ttgcgtgggctagcccgagggtaaggctcccaacagctcacctggtgccctgactttgtataaggaaaagctacggcttcctcacctgacaccagtagctgcagggggtcactgggttcc

SEQ ID NO: 32374 - DNA, 120 bp, Homo sapiens
ttccgaccacacgtatggggtgttgttttcatagccgtagcatctgaatgtacccctgttgctgaaggtcagggggcccatggggaacagggcctggaactttccatggttgtgttggtg

SEQ ID NO: 32375 - DNA, 120 bp, Homo sapiens
agccgtgaggcacaccggagggtcacgttcactcctgaggtcaccacagggcttggcagtgcggacagggtgggtctgctgtaggctttcaagagaaaaaaaggcagccgtgtttaaatg

SEQ ID NO: 32376 - DNA, 120 bp, Homo sapiens
tatcgccctgcatgttcccacatcatggatgggatggagagtttgaccttgttttcagactccagtgtttttaatatgtgcctcgacattgagtttccctctttatccagacggtacccc

SEQ ID NO: 32377 - DNA, 120 bp, Homo sapiens
tcacggggttatgccaggtgatcacgggacctggctcggcccacaggatgggtttgggtaggttttctggaaggaaattacaggttaggtcccaagatgtcctcaaccctcagatcccag

SEQ ID NO: 32378 - DNA, 120 bp, Homo sapiens
ccacggtgcccgtagacacagacagacacatggtgtgcgggcacacggaggctgggtcctccccatcacgaggttgtcccatcagcacaccgacagaaagaggaactgcccctccccagg

SEQ ID NO: 32379 - DNA, 120 bp, Homo sapiens
acccggtgccttcttgattcagccccttccaggtgagagggactgatggttcctccttccctctcagagcctccccatggaggaggctccatctcccctgtgtgtgtgtgaaaaacaggc

SEQ ID NO: 32380 - DNA, 120 bp, Homo sapiens
acacgtgagtgggaggtcacattggactccgccttgccagccacaactttgggcagatgctaagtttggaagagttgatgctcctggacaggagcagctgtaaccacccgctctggacag

SEQ ID NO: 32381 - DNA, 120 bp, Homo sapiens
agtcgtctctgggagaaatgttctttgtaagatcatgtgcatgggggtagatggacagcatgcagtgtatttgagaagagatagacaactagaaattatgtaggcagatgtggctgtggt

SEQ ID NO: 32382 - DNA, 120 bp, Homo sapiens
ccacgtgggctccagaggcgcctctgcaccatctctgggaactccctgtgcctctgtaggccaaggggggtcaggggctctcctgtgaccaggattgtaaagggccaagacaggggtgtg

SEQ ID NO: 32383 - DNA, 120 bp, Homo sapiens
gctcgcccttccctccgagtgaccttgggccggtgacctggccggccagagcgcaggtttgccccactccgggcgggcactgcgggtcgggagctacggggcctggacccgggtgcgagg

SEQ ID NO: 32384 - DNA, 120 bp, Homo sapiens
gggcgggggtctccgccgccttcccggcccctgcgctgggggcccgccttgaccgcgcacgcggggctagaatgtactcacttgagcagcacggcggcgcctgctaccgtgcccagcgcc

SEQ ID NO: 32385 - DNA, 120 bp, Homo sapiens
cgccgacagcggcagcaggtagcggctcatgccgggccggggacaggcgtcaggcgtcaggggtcggcgcggagcttgctgcacaccagccgcctgggtagctccgaggaagagcgcgcg

SEQ ID NO: 32386 - DNA, 120 bp, Homo sapiens
cgacgcagccacaggcgagcggaggcgcaggcgcggctgggcccgcgtccggaactgggctgcgaggggcggggcgcgggcggagggggcggggatcctagggacgggacctatgagcat

SEQ ID NO: 32387 - DNA, 120 bp, Homo sapiens
gctcggacgcctccgaggtccgcgcctggctgcaggccaagggctttagctccgggtgagtggggccggggccctctcggcgcgggttgatacggacgctgggagcggagcgttccgatc

SEQ ID NO: 32388 - DNA, 120 bp, Homo sapiens
gatcggccgggagtcggggggcggcagtcgtggagaccacagggagccgggattagcccgaagtgagggtctgtctggtagcaacacccaatggcaggctgtgattgccatgttttttca

SEQ ID NO: 32389 - DNA, 120 bp, Homo sapiens
ctccgactggattccttagggaaatcccgtaccctttgaaagcaggatgcggccacgccccccgggtggcaacattgtgattggtgggtggggttcaggaggtgtcgggcctgcccccgc

SEQ ID NO: 32390 - DNA, 120 bp, Homo sapiens
catcgccgggtgggcgtgacatgattgtccgggctggggcatccgccgaccggcctgaccgcgcccgggctgccctcgctcaggaccgtggacgcgctgggtgtgctgaccggggcgcag

SEQ ID NO: 32391 - DNA, 120 bp, Homo sapiens
tctcgctgcagaaggaggagctgcgggcggtgagccccgaggagggggcacgtgtgtacagccaggtcaccgtgcagcgctcgctgctggaggtgagccggaccgctggtccctgggtct

SEQ ID NO: 32392 - DNA, 120 bp, Homo sapiens
tgacgagggctcggacgccaggacaaagcgatttccaccccgccctccaggacaaagagaaagtgtcagagctggaggcagtgatggagaagcaaaagaagaaggtggaaggcgaggtgg

SEQ ID NO: 32393 - DNA, 120 bp, Homo sapiens
aggcgcccttcgcaaagagtgacgaggccccgtgggagaacggactcctcagactctccccaatagcggaagtcgatcttctgaaggatggccaatctgctccggccctggtcttccccc

SEQ ID NO: 32394 - DNA, 120 bp, Homo sapiens
tcccggtggacagacttaacgatccttgctgcagtccctccggagaggatctggactggctgggagtggggagggcgtggagacagtctacggaaagcgctagcagacccccgagagggt

SEQ ID NO: 32395 - DNA, 120 bp, Homo sapiens
atgcggcccagcctataaacagcctccgtgcttagcagatggtgtgccaactgctgtcctctacccggctaccagggggctcagaaacctgcccctcgacccagtcacagcctcatggaa

SEQ ID NO: 32396 - DNA, 120 bp, Homo sapiens
tcacgtttccctggctcgcggctgctgggcatgaggctttgtgtctcccttcccgcctcaccaacgttctcacttcattccttcctgcgtcctggccctgcccttctccaaacgctccca

SEQ ID NO: 32397 - DNA, 120 bp, Homo sapiens
aagcgttcaacctctgaggtttgcacctgctgtctctgctggctgaaacggccattccctgcctggcgaactcctgttcagcctccctggcccagctcaaacactcactgtggggaagcc

SEQ ID NO: 32398 - DNA, 120 bp, Homo sapiens
ccccgaagctagtttcccagcatccacttctccattttgtcccccacctcctgccacggccctaccaggtagaactggctgcctcccaagcatgccacagctttctggccactctttgtt

SEQ ID NO: 32399 - DNA, 120 bp, Homo sapiens
ggccgtatcaccctcaggatggaagccaccatgctcctcgcctggcactcgtggccctcccgggtctgccctgccttacgctcccctccctgggcacctcagggcacccacacttgcccc

SEQ ID NO: 32400 - DNA, 120 bp, Homo sapiens
cttcgctcctgccaacctttcaaaagaggaagctgtctccgctcccctgcccacgcaccagaagccctaggcctggccttgggagcttcctgtcacctcacagagctcactgaacgctgg

SEQ ID NO: 32401 - DNA, 120 bp, Homo sapiens
gcacgtactcccccgagctcctgacagcacaatccacgtgtcacgcatgacccctcatacagttgcgcaccataccattcccatttgacagataaggaaactgaggcccggaaaggaaag

SEQ ID NO: 32402 - DNA, 120 bp, Homo sapiens
tcacggcagatccatggcagagccgggattccaacccaggcagtctggccaaggctcacgcccttcactccttcactctaagttttcccagcaaggctgccccggggatggctgggggac

SEQ ID NO: 32403 - DNA, 120 bp, Homo sapiens
tgccgcccccaccaccaggcaggcaggaagctctgcagccccatctctgtcctgccccggctgggggtctctcctgaggctggggctggggctgggtcaccaagagggaaatagcaggtc

SEQ ID NO: 32404 - DNA, 120 bp, Homo sapiens
ggtcgctggggtggtgggtgtcagaagtcgggggggttccccctctgcaccctcctctgaggagctgaggggacatggggagtctggggtaagcccctcagccctgacactcacgtcctc

SEQ ID NO: 32405 - DNA, 120 bp, Homo sapiens
ttccgggccagttcctccaacaggctcagtacttcctcatcggccaggtcacagggacgctgcccctgggtcaggggaggagcaggatcagacaatgaaggaggtgctgggccctcccca

SEQ ID NO: 32406 - DNA, 120 bp, Homo sapiens
ccacgccctgcccctcaccagcctgggcactggccctcaccgcatgggtcagtgagtccatgcccccgccatgctcggccagcaggcggcaggcatcctccacgccccagtgtgccgctg

SEQ ID NO: 32407 - DNA, 120 bp, Homo sapiens
ctgcgtgcaggggagtccagccgtccccgtcccggagctctgggtcgtagccagcctgaaggagcaacctgggggccagggaggctcagggtcagaggccaaggcggggcccttggccga

SEQ ID NO: 32408 - DNA, 120 bp, Homo sapiens
tttcggccagcggtttggtaacgaggtcccaggccacgagactgaaacgtccctggacaggctggtaaagagccactgcccagcatccgctgccacaagaggcccctctgcaccaggcct

SEQ ID NO: 32409 - DNA, 120 bp, Homo sapiens
cagcggggtgtaaggaggcagctccggaggatgcaagtgcaggacccttgccagcccccatgcctgtcagaaggatgggacccccaaagggctgtctcagggcagtagtgctctaggacc

SEQ ID NO: 32410 - DNA, 120 bp, Homo sapiens
acccgggctggcttaaagcagtgactcccaaccagggcaatgctgtcccccaggggagacccggcaggtctgcagacatctttgttgtcataacttagggcaagggttagcggcatcggc

SEQ ID NO: 32411 - DNA, 120 bp, Homo sapiens
acccggctgcgctcagagcgctcagcagcagccccacaaggagagggacctgacccaacatgctgccagcgcccaggctgagaaaccctcacccgagacagtgttctgcgagaaaacaat

SEQ ID NO: 32412 - DNA, 120 bp, Homo sapiens
gagcgtccaccgtagcatcccctataaaaaatggactacaaatcccagtaggcgttccgcccgtggcctaggttctaaggggaggtgtttcctctgagtattctgggattcgcagtccgc

SEQ ID NO: 32413 - DNA, 120 bp, Homo sapiens
cctcggggctgcccctgggagcgcgccctctgccgctggagcgttggagaacgttagcgccccccttgccaccgacgctgggactacgagctctaaaaggccgtctgctcaggctgggaa

SEQ ID NO: 32414 - DNA, 120 bp, Homo sapiens
agacggtgtatcagaccttgcgtgctgggactcactttcagcctgcaggtccagcgccggggacaggccccaccaggacacggagccgaagccgctgccggagccggcaggtgtggtcat

SEQ ID NO: 32415 - DNA, 120 bp, Homo sapiens
ctgcggaaaagacattctgggaatcgcacacattgcccgccccgctcccctctcaccgcccctcacttctcgcccctttgcctccacatgataccttgcccacacctttatcctccaaat

SEQ ID NO: 32416 - DNA, 120 bp, Homo sapiens
tcccgggacgccccttcctctctgctcagtgcagcactgtggacccgcggcactccacaaccgctgcccagagtccccgcccttttcgaggaatcaagcaatggaagcatgtgggatggg

SEQ ID NO: 32417 - DNA, 120 bp, Homo sapiens
cagcgagcaactgaccaatgagagtgagcgaggcccgccctctacaaacttttggccaatgggagcactgagggccagccttcccccacacctaggagaagagggcgtgtggacgcggtt

SEQ ID NO: 32418 - DNA, 120 bp, Homo sapiens
tgacgacggcgccggcgggggaaggggcggtgctagaacaggttggggcggagtcagggtcggtccaaatttctggaatgggggaggcctgggctgattaaaattgagagtgaagggagc

SEQ ID NO: 32419 - DNA, 120 bp, Homo sapiens
atacgtaacggaattttcatcaattcaaataaagtgaagtgtctagactttagatggcaggcttctgagcccgctccccgccccagcacaacgtgggctctaccacacagaacagcccac

SEQ ID NO: 32420 - DNA, 120 bp, Homo sapiens
agccgagagggcaaggacggattcttccctggagcctcaagagggaccatgggccggaaaacacccggattttggactttgggtctccagaactgcaggagagtccattcatcttgtttc

SEQ ID NO: 32421 - DNA, 120 bp, Homo sapiens
ccccgaatccccccaccagagggccatggagggtcccactgggcaccaggcctggtccatggggagcgacaaagaaccttctgctgtcattaaccgcgatggtttatcacaatcatgacc

SEQ ID NO: 32422 - DNA, 120 bp, Homo sapiens
ccccgaggcctctcctacggtaacagcaacatctacggttccacacccacagggaaaacggattcagagcagcagcagggggcgggcaggctgtggggccgacagtgaacatggaggcag

SEQ ID NO: 32423 - DNA, 120 bp, Homo sapiens
aaccgggggaaggcagctggaacccagtagtggacttggaattccgcaaatcgtcctcaaacgtcttcagccagaagcgacggcggcagcggcgcctgcagacaggcgtcaggaagcttc

SEQ ID NO: 32424 - DNA, 120 bp, Homo sapiens
cttcgctgctgagggtatttctcaggctgggctgggctgggaggcccaggtccttgcaggaggagagggcctgaacaccggcccttcaagctccctagtcagtcagtcttgggcaccggg

SEQ ID NO: 32425 - DNA, 120 bp, Homo sapiens
gggcgaaggtgtcccaggccagcacgccatcagagagcgtgaagagcagcgcgccccagccggcactcccgccctgggccaggccgcgccacagcatggccatcaggatcagcccatagg

SEQ ID NO: 32426 - DNA, 120 bp, Homo sapiens
caccggcaggaccatatccggctcgaggtgctggagcacaaggctgaggtaggggccaggggccaggatgatgagcagcagcaggccgggctgcaggggagagaagccgaaggcccagac

SEQ ID NO: 32427 - DNA, 120 bp, Homo sapiens
agacgtagaggaggtgggcggtggcaaaggcggccatgcctggcgggagaggggtggggtaccagtgaggaaggcccatcctgggaatggccccgaggtcacccctcagggcctaagaga

SEQ ID NO: 32428 - DNA, 120 bp, Homo sapiens
cctcgctggagcgtgagctgcctcggtcacggctgcgccccccactgtgcctttgaccactggagctctcacaggagccctctgcacccaggctcccatccaagtgctggggcctctctc

SEQ ID NO: 32429 - DNA, 120 bp, Homo sapiens
acacgggcatctggaaagcgtcacagcaccttccactcaccagggacgaaggctgccggccagatgaggcaagcgtcccccacagccgagcacacaagggctccctggaggagctgggtg

SEQ ID NO: 32430 - DNA, 120 bp, Homo sapiens
gcccggccccgccccgggactgcccgcaggctcactgcctccatcactcaggcttaaggctcccagtgagcaccaggctcctgcagttgccctcgagcctgcccctcttcccccatctcc

SEQ ID NO: 32431 - DNA, 120 bp, Homo sapiens
tcccggccgcctcgcctgaggtccagggggtcatttcacacctgaggcctcaggcctggtgaagtccccaggtgtggaccatgtgcagggcctgcgagaagaggctggaccctgtgcact

SEQ ID NO: 32432 - DNA, 120 bp, Homo sapiens
cctcgggccctgtctccccatgagggtctgggtccactatccctacttttgggagagacactgcagaggcagggccttaacctctggcttcaaatttgcttcaacctgtatttgctcaac

SEQ ID NO: 32433 - DNA, 120 bp, Homo sapiens
gcccgatgacttccagcacacggctgctgcttggcccagcaaatcccccaaggctacgtgggaggcatggggcggcggcagggggaagagaggaagtctgtgcatctccaggctgtggcc

SEQ ID NO: 32434 - DNA, 120 bp, Homo sapiens
caacgcttaatgactagtaatgttaaacatcttttcaggtgcttatgggccatttgtataactactctggagaaatgcctactcaaatatttttccttttcatttttttaatttgaggca

SEQ ID NO: 32435 - DNA, 120 bp, Homo sapiens
gagcgagatcctgtctcaaaaaacccaaaaaataacaacaacaaaaaaaaccctcccaagtctcacctggtttctactctttttaggacctctagcagctatcttgtaactatgaatctt

SEQ ID NO: 32436 - DNA, 120 bp, Homo sapiens
attcggttgctctcactgcttattatacactaattataatgaatttgcatgctaaaagaaactccagtgggtcacagggagccaggcctggtggccagagtgtatcatgaggctggacct

SEQ ID NO: 32437 - DNA, 120 bp, Homo sapiens
ttgcggtcatggcaaatgaaagtacttgatgtatccagcagttttacagtcccttttaatgaagatgacaaagataattgttttttagcccacgattatttgaaaaacacatacagaatg

SEQ ID NO: 32438 - DNA, 120 bp, Homo sapiens
tgccgtaactcagtattggtcactagtgacatgaagccaaaggacttagggctgcctacagaagcatatatttcagtagaagtctatgaagatggaacttcagccttgaaaacatttgag

SEQ ID NO: 32439 - DNA, 120 bp, Homo sapiens
agacgctgtctcaaaagaaataaaaaaagtaagctctaccacaatgcctggcagggacatataaatttacacaaaaaatagcaattttattattgtcactgctatacacaatattacatg

SEQ ID NO: 32440 - DNA, 120 bp, Homo sapiens
gaacgcttactacatgccgcatagttctaggacgtggaactatagcagtgaacaaaacagacaaagttgctgttttattaagcttgtctagtgatcaaagaaagataataaatatatgtc

SEQ ID NO: 32441 - DNA, 120 bp, Homo sapiens
gggcgtgaaaggttagttgagactgaagtgttcacttccatagaagaacatcacttttaaccttgctttggcgaagggagtcggaaagctgagtctctatggacgggggggtgatcttgc

SEQ ID NO: 32442 - DNA, 120 bp, Homo sapiens
catcgccttaatgtctaaagatcagaaatcgctgagcaaacccgcttttgtttccttcccagaaacaatgcaaaacaacaggtggagatagtctggtctttgccctgctgtgtgtgcctc

SEQ ID NO: 32443 - DNA, 120 bp, Homo sapiens
aaacgtctgggaaaacagcctcaccccactctcctctctcttccccatttccttgtagctttattccttgcatctttgggtctactgagcagtgggtgctgaggtgacaggggaggaacc

SEQ ID NO: 32444 - DNA, 120 bp, Homo sapiens
aggcggacagtgcagggctcctccctcctacctcaggcctgatccatcgtgcccttgactttgccgtctcaaagtttcttagctgactttggctttcacatttgttctttccagagctaa

SEQ ID NO: 32445 - DNA, 120 bp, Homo sapiens
attcgtggtcaggaataggttagggaatggtcacttctgattttccaacagttgctccttctctgaagagatcttgattcctttgggaagacaagaatttttcttaataacaaaggtccc

SEQ ID NO: 32446 - DNA, 120 bp, Homo sapiens
taacgcaggtcccttttcttggaaggcttgtactatggccatgacagtgacattgccctcaccatgatccctctccaaagtggttgtctttctttaccttgtgtcttctcttgtaaaaat

SEQ ID NO: 32447 - DNA, 120 bp, Homo sapiens
gtacgagtttggaaaaggcataacactaccaatgacttattaggagtctactacatttactaattccttcctttttgaattcctataacatttccagtttgaagcatatgacttattact

SEQ ID NO: 32448 - DNA, 120 bp, Homo sapiens
tcccggagccgggcctccaggctgccagcttcggttgcccgttcttcacctagccgccggcagcgccgtagctcctcctgcagcagcgcatgttgccgctgcagtaatgccagttccgtg

SEQ ID NO: 32449 - DNA, 120 bp, Homo sapiens
tcccgagagttggctcggcacagcttctcccgccgctcagggccctcagggaaccgggcttccatcagagtgtcctgctgggccacagctgcctgggagtagaatgcaggcagaagggtt

SEQ ID NO: 32450 - DNA, 120 bp, Homo sapiens
cctcgccttcaccctccaaggcccagatcatcgctcctggagagcttggattgggagggtatttagaaaggcctgttgggatgaccatgccccacctaaacaggcatctctagcctggct

SEQ ID NO: 32451 - DNA, 120 bp, Homo sapiens
aatcgctgtaacgcctcctgaggacagacagggtgggaacagggccccagctttaggatgggagaactgcccaaaagttgaacaagggtgggtgtggggacagtaggatccggagacata

SEQ ID NO: 32452 - DNA, 120 bp, Homo sapiens
agacgctttccccaccccactccaaactgggctctaactactcagactaagaacatcctcccttcagtctcctataccatcaattcccatctcacctcttgcggtgatctcagctgattt

SEQ ID NO: 32453 - DNA, 120 bp, Homo sapiens
tttcgatcctgcagaaatgggcaagaatggggagtcagcaggcacacaaatcctgggtgcctgcccctgacagctttgtgttgaggatccagaggctggctgtccctctcccaccctctt

SEQ ID NO: 32454 - DNA, 120 bp, Homo sapiens
ttgcgaaggtgtccaagcagagacagaacagcatccggaccaatgccatcactctgggcagtgcccaggctggacaggagcctggccctggggagaagagggcctgttgcatcagcctct

SEQ ID NO: 32455 - DNA, 120 bp, Homo sapiens
tcccgtctgttcctccctcttctccttgtctgtgcctccccttcaactttggcccctcctctgagtccctaatccccttcctctgtcctccccaccatacctactgcccctcagggccag

SEQ ID NO: 32456 - DNA, 120 bp, Homo sapiens
aggcgagacaaaggaaaccatcggcgggcaccatctggtgctgagggccctggtgccaacaactgaggtcactccaatgccaggggcaaggggaggaggcagcgggagatacaaggggag

SEQ ID NO: 32457 - DNA, 120 bp, Homo sapiens
atccgcctgcctcagcctcctaaagtgctaggattacaaacttgagcccttccagtcttcttcctgatcccaaagaagaaggatggattgaatctggtggggtaaatggggagggtccct

SEQ ID NO: 32458 - DNA, 120 bp, Homo sapiens
gaacgaagacagagccttaagtaatagtacttttaataaaattaagttcttaatagcacatttaatacattaaccctcccccttcttggtttctctgcattttgtgcaacatcactttga

SEQ ID NO: 32459 - DNA, 120 bp, Homo sapiens
ggacgacagacagacatcccttcttcccacccccctccccacctgccccccggcaaccgagggtgcccatttggtttggtttctattgtacagacatctcaggatggctcacataggcgg

SEQ ID NO: 32460 - DNA, 120 bp, Homo sapiens
agtcgtcacagggcagttttcttggctgtgacctccttccccacccctccctggctggtgttctggaggggaaggctgtggagaggtgttaattctcgacaggaggaaggagaggaggaa

SEQ ID NO: 32461 - DNA, 120 bp, Homo sapiens
gctcgggtgatcactcagaacagtcccaccccactatttacaaggatctcctgggactcccatccctccatcctctcttggcccggccagcggaaccaggagggtggagagctggtggca

SEQ ID NO: 32462 - DNA, 120 bp, Homo sapiens
agtcgggcactgcatgggaggagcagctcttccctccaccagtctctcctcctgcctcacgccctttcctgctcctttaaatagcagacacactactctggcgcccccacttccacaacc

SEQ ID NO: 32463 - DNA, 120 bp, Homo sapiens
aggcggagagagtgaagggaaacactgcaggggacaggggcagagaggaggactcctctccagattcctctagcccagctttgtggggacagatggcttctgagcctttcagccacagaa

SEQ ID NO: 32464 - DNA, 120 bp, Homo sapiens
aaacgattgacatgcttctctccccaacccctagaagatctatgcaacttctgataggactccaactcccttacactgctggaaactggtgacagtttcccaaacaggatatgggggtgg

SEQ ID NO: 32465 - DNA, 120 bp, Homo sapiens
ggtcggaggtcaggaccagagggcttagggattgcaaagagcacctctagatacaggtggtaattctccctctcccttttacccaccccctcctcggaagaaggggtggagtgacacaca

SEQ ID NO: 32466 - DNA, 120 bp, Homo sapiens
cagcgggggaggtgggcagagggcgtcagaatgccttagtggccacctctggcaaaacaaaagtttctcttagctgcttccagatttaagggtgtgttgaggtatcagagttgtaactct

SEQ ID NO: 32467 - DNA, 120 bp, Homo sapiens
tggcgcaccctccagccaccactgcctccctccccccttccccagcgagcgagtatctctaagcaccttgcccctcaaatcaccgctttccaaaaggctttagtggaaaacaggtccagg

SEQ ID NO: 32468 - DNA, 120 bp, Homo sapiens
ccccggaggcatggggcacggggcttaggagaatattcggatggcttgcgtggctgtgatgtggcagacgggacactctgggtccgtcctctcgcagatgcgtactgcacactccatgca

SEQ ID NO: 32469 - DNA, 120 bp, Homo sapiens
gtccgcagggcacaagggcggcagtcacttcgctctcaaagcagaccatgcaatcccgcccgccgccggggctccgcaggccgcccccaccaagtttagagaagccctggagcggctctc

SEQ ID NO: 32470 - DNA, 120 bp, Homo sapiens
tcccggggggcgcctcgggagtccggccagctcgggtcccgcggaagtggcaggggagcggtgtgcgcccgggggcccagcgcgggccttggcggaagaggaggaggaggaggaggcaga

SEQ ID NO: 32471 - DNA, 120 bp, Homo sapiens
gcacggaggtgggcgtggcgttctcctggcccgcccacagcggggggctagtctcggccacgccgtagtacacatcctgcttgcccacgccatagcccggaaagaggtacccgccgtagc

SEQ ID NO: 32472 - DNA, 120 bp, Homo sapiens
ccccgccctgctcacccaggcgtggggcctcaaagccagagtccactccgcactcgccgatgcagcccaggctgttctgccggaaggtggagaggggcttgcagccgggctggtgcaccc

SEQ ID NO: 32473 - DNA, 120 bp, Homo sapiens
acccgccaggcgtcggagtagcggctatcgattgctgcgtcggggctccccgccaggaagtcgttttcattgttgtactcgaggatcttgccagtgcgcaccgcgatgtgcgtctcgatc

SEQ ID NO: 32474 - DNA, 120 bp, Homo sapiens
cctcgcgcgcacgctccacgttgcctggggcacccgtgatctcgaacacggggtcgcggtcacggcttggtgtgataatgtatgtgttggtttgctgctggatgcgcttgatggttgccc

SEQ ID NO: 32475 - DNA, 120 bp, Homo sapiens
ccacgcggtagggcacccgcacacggatggtcacctggccgggcagagcaggagccacaccaaaggcggcgcctgacttgttgcgggaggcacggatcatggagaagtgctccgctgctg

SEQ ID NO: 32476 - DNA, 120 bp, Homo sapiens
tcccgccgggctgtggccacgtcctcccgtcgccctgtcaccatgaacactggttcctcgcccctcaccggtgtcttgatgtaggtgttggtcttggccctcaaggccttaatcttgcag

SEQ ID NO: 32477 - DNA, 120 bp, Homo sapiens
gggcggggaaggagagagacaaagaaacgcacacagcaaggtttgtgctgggaccaataaattcctgatccttacccaaatacctagcctcccaggaacacttcagtctaccctttgaaa

SEQ ID NO: 32478 - DNA, 120 bp, Homo sapiens
gaccgccccacatgccttccactcagtagtttctctcagtgggcctcaaattcatagcgagtttgcagcaacgagtagagtgtaggggactgggaaaggtctgacaatcataagttcaag

SEQ ID NO: 32479 - DNA, 120 bp, Homo sapiens
ccccgtgtcactcttgtccccctgtcccctgggggcaagacagctgagctgggctggggctgagtacggtgagggagaggtattttggacccacactcctgctttgaagtagaagtgagt

SEQ ID NO: 32480 - DNA, 120 bp, Homo sapiens
tgccgacctgggggtctggacaagtccctctcctccttacccaccttcctcttccctgctcctagcttcacacagagcttccaagactcatacccttttgggaagcacacgtcacgtgtg

SEQ ID NO: 32481 - DNA, 120 bp, Homo sapiens
tttcggcctttcatacatcccactgtccatccccatcctccccagcacacaaacagcacattcctatacacacccgcacccatgactttcacccccaatcacatatagacccactcacac

SEQ ID NO: 32482 - DNA, 120 bp, Homo sapiens
aaccgaaaccaagtggtcctacttttctgcctctgccccaaccctccaacctgagacctgaggtgagctcattttttcctccttcctccactccagatggctgcttcttcaacgctggca

SEQ ID NO: 32483 - DNA, 120 bp, Homo sapiens
gagcgagactccaactcaaaaaaaattagaaacaccgagtgcctgctgtgtgccaggtgttagggagacagatgaccaagacttggtcctttctgtccctcacagcactttcaggaatgg

SEQ ID NO: 32484 - DNA, 120 bp, Homo sapiens
gtccgttggacccaaccactgcatgctgatttcactcatgcatgctccagctcccagacttctgggatccctttggaattcatccaattcagagtcctctactgctctttaatcatttgt

SEQ ID NO: 32485 - DNA, 120 bp, Homo sapiens
ccccgtctttgatagccactctacccatactacaggtaagaaaactgaggtccagagaattcagtagcagatctagcatcactcagcagttaagaggtaggattagaatgtggtcaccct

SEQ ID NO: 32486 - DNA, 120 bp, Homo sapiens
cctcgtccaccagcacttactgagtgctttctctgtgctgggccctgagcgaagcatgaatataagacatatgatatagacccagtctgagggtggtgacatatcaggacgtaaggacaa

SEQ ID NO: 32487 - DNA, 120 bp, Homo sapiens
acccggggaggagggaacagaagctgcaggagagggcagaggaaaggagcagttaatgtccctttgtgccatgttgtgctcaggttgggggattgggaaatgaacaagacaagatgccca

SEQ ID NO: 32488 - DNA, 120 bp, Homo sapiens
ctccgagggggttccaacctgggggcatgaggtgcccagactgaggggaggggccccaaacagggaaaatgagctatagaagccagcctttctctggcccttcctagtttccaaagcatt

SEQ ID NO: 32489 - DNA, 120 bp, Homo sapiens
cttcgtactgtcttgagaggtaggtattgtctcccagccctctggaactcaggccactcagctcgaaggtggcacagatcccaagattctggaagtttatttatgttccttgggcagagt

SEQ ID NO: 32490 - DNA, 120 bp, Homo sapiens
aaacgggcatgtctggctgggatcgtgggaaaacatgtgagaaagcaaaattactgagaggagaagggcccctgaggtcatgctggacgctcctgattccaccataggctgagaccccac

SEQ ID NO: 32491 - DNA, 120 bp, Homo sapiens
aagcggaaggaggtttgaggaaggggtccctgcttgggttggcagtttccaagaaggaaacccttcctctcctaggcctcagcaaagaccctgaggccccgcagatatggggtcttagat

SEQ ID NO: 32492 - DNA, 120 bp, Homo sapiens
cagcgagggagtccgtgtgtcccaaaatgaggactcccacctgcagttcctgggtcgggcaccttggggcgccagagccccaccacggtggtgcctgcacatcctgggtaggggtccttc

SEQ ID NO: 32493 - DNA, 120 bp, Homo sapiens
cttcgctactcagctgaaccctggtgagctggctgcatgggcactgtgggctggggaacaccaggggcagcaggcaacgttcctagctcttgaggaggagggctgagggcatagggccgc

SEQ ID NO: 32494 - DNA, 120 bp, Homo sapiens
gcacggcgggggcggcagccggggactcagcagttaaggtgtccacacacgtggtcacctcacatgatgctcacagcacaagtcagcactcagcagccacatttcattatgtaaaaaaaa

SEQ ID NO: 32495 - DNA, 120 bp, Homo sapiens
aggcgtgagccaccgcacccagccggaaggggctttttcaactcctcattttgccaacaaagttagggcccagtagagacataagggagctctagtaacaaggctgtttaggatcagggc

SEQ ID NO: 32496 - DNA, 120 bp, Homo sapiens
ggccgcactcccgttccagccaggctgagccttctgtcccctgcctctggggcctgggaaccccccttcttctttctcctgaatggcacccccgccctagaatccagacaccgagtttcc

SEQ ID NO: 32497 - DNA, 120 bp, Homo sapiens
ggccggggagctgcagaggctgggagccggccagccacccctgcccaggcagctccccgggaaatgctgataaccaacctggtgggatggaccctcattgcctccctggaagtatcaggc

SEQ ID NO: 32498 - DNA, 120 bp, Homo sapiens
caacggtttgggcttgggctatgagaagagggaaggcaaaggaggaaagacaggaaagacttcctgagagtaaggcaaaaaaaggcaaaccagagctgttggtgagaagacaacagaaga

SEQ ID NO: 32499 - DNA, 120 bp, Homo sapiens
gaccgtcttagggcccttccagatagggaaccttctctgccccaatgccccacccctgccaccaatacacacgcttctgctgcctggggctctcctattggtcctcggggggatgtggta

SEQ ID NO: 32500 - DNA, 120 bp, Homo sapiens
gcccgggtgcctgtttccccagagctccctggtgacagtctgtggctgagcatggccctcccagccctgggcctggacccctggagcctcctgggccttttcctcttccaactgcttcag

SEQ ID NO: 32501 - DNA, 120 bp, Homo sapiens
tgccgacgacgaccgcggggggaggcgggcaggggcccatgcccagggtcagatactatgcaggtaagtgtccgacagcaggaagtgtggggatagcaatagagagctggaggtgggtgg

SEQ ID NO: 32502 - DNA, 120 bp, Homo sapiens
ggacggaagtgctggtccccgcctgccctctggtggacagtctgtgaaacaggccttcagttgggcggcgtgcaggttaccacaggggaggaaggcaagtcctggctccttttttggctc

SEQ ID NO: 32503 - DNA, 120 bp, Homo sapiens
caccgtgatattgtgttaccctcttttatctttccatgctgtcctgcacaatttatctgcatatgtaaaccaacagattgacaaatgaccagagcctgattctgtgcttaaatattttga

SEQ ID NO: 32504 - DNA, 120 bp, Homo sapiens
cagcgctggtggtcagaatttgcttcacccctgccctgggccctatccgctgtcagctgcctgagctgaagagagatgcgtccagctcagaccctccgcctgctgagtaggctgggtgga

SEQ ID NO: 32505 - DNA, 120 bp, Homo sapiens
ccacgttcctcctggtagccacagactgcgtggctagtcaggccagcagcaaaacaagatatctgggagtctgctgagggttgaaggaatgcccatcgtctattctgtgtacagtattgt

SEQ ID NO: 32506 - DNA, 120 bp, Homo sapiens
gtccggatgcgcagggcagggcctgagccgtcgagctgcacccacagcaggctgcctttggtgactcaccgggtgaacgggggcattgcgaggcatcccctccctgggtttggctcctgc

SEQ ID NO: 32507 - DNA, 120 bp, Homo sapiens
ccacggggctgacagtagaaatcacaggctgtgagacagctggagcccagctctgcttgaacctattttaggtctctgatccccgcttcctctttagactcccctagagctcagccagtg

SEQ ID NO: 32508 - DNA, 120 bp, Homo sapiens
agccgggcagtctgattgtggctcaccctccatcactcccaggggcccctggcccagcagccgcagctcccaaccacaatatcctttggggtttggcctacggagctggggcggatgacc

SEQ ID NO: 32509 - DNA, 120 bp, Homo sapiens
acccgcccgcaccatggtcaggcatgcccctcctcatcgctgggcacagcccagagggtataaacagtgctggaggctggcggggcaggccagctgagtcctgagcagcagcccagcgca

SEQ ID NO: 32510 - DNA, 120 bp, Homo sapiens
caccgagacaccatgagagccctcacactcctcgccctattggccctggccgcactttgcatcgctggccaggcaggtgagtgcccccacctcccctcaggccgcattgcagtgggggct

SEQ ID NO: 32511 - DNA, 120 bp, Homo sapiens
gcccgagacgcaggggaaggaggatgagggccctggggatgagctggggtgaaccaggctccctttcctttgcaggtgcgaagcccagcggtgcagagtccagcaaaggtgcaggtatga

SEQ ID NO: 32512 - DNA, 120 bp, Homo sapiens
cagcgaggtagtgaagagacccaggcgctacctgtatcaatggctggggtgagagaaaaggcagagctgggccaaggccctgcctctccgggatggtctgtgggggagctgcagcaggga

SEQ ID NO: 32513 - DNA, 120 bp, Homo sapiens
caacgtggcctgtgtctatcttggcatgtggagtctagcaccacatgagaagggcttgcaggtactccctaccccccgacaggaagagtgtcttcaagagctttaggctagaggaaatgc

SEQ ID NO: 32514 - DNA, 120 bp, Homo sapiens
tctcgataaatattcgtggaatgaattactggatggaaaagaggtaccacaggccactttccatcctttggggcccctgtgggatgggaccatgtctgggatgggaaggttccttcatgg

SEQ ID NO: 32515 - DNA, 120 bp, Homo sapiens
ctccgctcccttctattcctcagtctttatccctcttgaatgaaagggaacagagggagcatttgctaggcacacacatgtgccataagacaatgtgcaaggcacctcacacccactatc

SEQ ID NO: 32516 - DNA, 120 bp, Homo sapiens
tggcgtggtgaggttaagtgacttgctcaattcatagattaaaaggtgacagagatggcctcaaccccaggtcagtctgggtacaggtcttgagctaggcagcctctgctcaaagcccct

SEQ ID NO: 32517 - DNA, 120 bp, Homo sapiens
tgacggggaggggaaggcctgactcaccattcggaactgtgcctgggcctgctgcagcaggctctcctgctcagactgggcaatgctgacgaagatgccaacctctgggttgaactgcag

SEQ ID NO: 32518 - DNA, 120 bp, Homo sapiens
aggcgggcgatgaaatgaccaaagctgcggatgcagcagatgcgcaccactgactgtggggagatacaggagcccagcgctgctgagcagggccctctagacccaccctgccctccagga

SEQ ID NO: 32519 - DNA, 120 bp, Homo sapiens
aaacgagtaggtacagcaagaaaactcctaggaggaccagaaaaccaggacttgggctaagaaacaagagcaaaggacactgggctggaagtgaggagacctgggttctaataccatctc

SEQ ID NO: 32520 - DNA, 120 bp, Homo sapiens
aagcgggcagcacattcccttccagctctaactttctatgattgtttgatgttcagctcggagcaggctgggcccagagttagaaaagagactgataaagatttcgaagccctaataact

SEQ ID NO: 32521 - DNA, 120 bp, Homo sapiens
cagcgaaaccacaaggactttctggatcttggcagtgggaaaagccagggtgttaaaggatgtggcttctctacgtctagcagtaacctatccttccagccctcccatgtgcccatactg

SEQ ID NO: 32522 - DNA, 120 bp, Homo sapiens
ggtcggggttggtccgaagccagtccaggaagactttcacagcaggaagcagaccttcggccatcaggacctgaagcttctcctggatgctgcgctcattccgacaggagcgtccactgg

SEQ ID NO: 32523 - DNA, 120 bp, Homo sapiens
ctccgactcagagccctcctcagaggctggggggtgggtgaatggaagagaaaaaaactgggataaacaactgacacttgggaacaggcctcagctctgtgcagggagcatgcttccacc

SEQ ID NO: 32524 - DNA, 120 bp, Homo sapiens
aggcgggaggtgcaaggtccctagagcctggggctttgatgagccgggtcctcacctgtccttgtgcccaagggaaggggtcagggccagagggaggtgcagccactgccctttgattcg

SEQ ID NO: 32525 - DNA, 120 bp, Homo sapiens
acccgcaaatggagtcttaaaaggtgcctaggtgtctgctggcctacaagggtgggaaggtgttccaggctgtgggcctggcttgagcagtggcctggaggtgagactcagcctggcatg

SEQ ID NO: 32526 - DNA, 120 bp, Homo sapiens
cctcgagaccctcttggccacttcctgttccccagtgtgagttccagtgccatgagcagccctggccccgggctgcatccctctctctccctacccctgcctttcctctatctggtctcc

SEQ ID NO: 32527 - DNA, 120 bp, Homo sapiens
agccgagggccagcgcagtgccacgtcacaggccatgcaccagctcttcgggctgtttgtcacactgatgtttgcctctgtgggcgggggccttggaggtgagtaaccttggattttcta

SEQ ID NO: 32528 - DNA, 120 bp, Homo sapiens
tgccgagggcagctggggagtccgcgaggggtgagcgaggccctctcttatgggtctatgcttgcctgtgctgctccctctgcccactagagggaagcccaacctcaggctgaggcctag

SEQ ID NO: 32529 - DNA, 120 bp, Homo sapiens
ctgcgccatgtggggcagggacaaggaggggaggagatggcctgccacttccagaccccagtgcgaaaaccttccacagaggcacactgtccatggccctgggtcaggcagtcgctcttc

SEQ ID NO: 32530 - DNA, 120 bp, Homo sapiens
actcggcgttgccacagaaaccactggggtggtgagcgaatgagtagactgggagaccccaaggcgctgggcattgttctgtaggagaaaactgtccgtcaggaggtggctgacaggtgg

SEQ ID NO: 32531 - DNA, 120 bp, Homo sapiens
aggcggggtgccttagcacggaggcccccacagatatacaaacacacgttggtgcattcacagagacactcagatccatggagggaaacatgcacacacagattcactgacaccaacaca

SEQ ID NO: 32532 - DNA, 120 bp, Homo sapiens
tcccggaccactctgggaatggcaggaatgtcagggtgacgtcaatcgtgacattcgaagtcacagtcacccagccagacaatggcacagggtaggaggggctgtccgctgccaggggtt

SEQ ID NO: 32533 - DNA, 120 bp, Homo sapiens
aaacgcacagacaagaaggccttgaagtctcagaccctcaggagacgggagagacttctccttggaaagtcctctgctaacctggagcaggtagaagaggtgttggtatgcttctagttt

SEQ ID NO: 32534 - DNA, 120 bp, Homo sapiens
tgccgtttctctttgctcagcgactttaaacccttctgcttgtccagaaccatcatatctgacagctgttccttattcctcttggtcagcttcttgcagtgggagaccacttcctgcagg

SEQ ID NO: 32535 - DNA, 120 bp, Homo sapiens
gagcgggtgatacaactagcctaggccatcccagggcacagaacatacggtctagaatcagtgccttgaagagccagggctttctgctgttcaaggaacaggcataagctgggggacaga

SEQ ID NO: 32536 - DNA, 120 bp, Homo sapiens
tctcggggaggggaggactggtgggccccatacctgcagagtgatccggttcttcaccagcaggccaatcttgatgtccatgatgttgaggtcctgctccagctgctgattggatcggat

SEQ ID NO: 32537 - DNA, 120 bp, Homo sapiens
ctgcgtaccacactgagaggagggtggggtgcatgcactgggaggaagggaggaggcatcaggattagccatgcctcatcagaggcctcctcaccagcccctgcccgagtcagcccaccc

SEQ ID NO: 32538 - DNA, 120 bp, Homo sapiens
ccccgttctgcttgggatcagcaggtccccaaccccagtcctcttctaactggttctgcttgcacttggagggcagtgggtagccttctagccaggcctgtccctgagcttcctgtctta

SEQ ID NO: 32539 - DNA, 120 bp, Homo sapiens
caccgggaaggacaggtagacgggatggacagtgggctttataatttaggggaggtcagagctagctggtgattctccttgaatcacctttggaattggcatttgagcaaaaaagaaaga

SEQ ID NO: 32540 - DNA, 120 bp, Homo sapiens
tcccgggtaatttcaccccctgtttgacaggcattgtctgaaagcggcatctcaaagcctaagagtcccccagatcccttgaggcgtcttgtccggtggcatcgctgggcaagtttggta

SEQ ID NO: 32541 - DNA, 120 bp, Homo sapiens
tcccgactccggaaccccagaacttggaaataggaagaaagttctttgtaagctttaaagcgcagcacattagtcaggggacaatgcgccgctcacagttccactcgggcccacggcgcc

SEQ ID NO: 32542 - DNA, 120 bp, Homo sapiens
gcccgggctgaggattcccgtcccactgagcagtcccaccgccctcgcccctcaggcttcacgcccgacacacgccccaatctctcccgggacagccaagcccccgaccagcggcaccac

SEQ ID NO: 32543 - DNA, 120 bp, Homo sapiens
ctgcgagacccttctctgaccctctccgcactcacaggctgcccagcctgggcccgctgctctcctctccatgttcctccttcttccaggtttgaatctcccgccgttgggccaccgccc

SEQ ID NO: 32544 - DNA, 120 bp, Homo sapiens
caccgtcggcaccgccagacaggacacttcccgtccacaccgctgagaatcctgggatttgtagttcccggccgcggagccgggccgcccaggtgctgggagaagaggcgccccaggccg

SEQ ID NO: 32545 - DNA, 120 bp, Homo sapiens
taccgctccccttacagcagttcctcgtcttgttccttccaggctccttttctgcttaacagtcttattctagctgctgcccctgccattgcctctgtcatctccacctagtattcccat

SEQ ID NO: 32546 - DNA, 120 bp, Homo sapiens
agacgtgctctcagcactatcactgctgctctctgatgccatctagtgcaggttcagctgaacacttatttctatttaaagccctattgccatctgccccttggtgtcatcattctctcc

SEQ ID NO: 32547 - DNA, 120 bp, Homo sapiens
ctccgatctggatgaagccctgtctctgacctgcatccctgtccctctgggtcttgtctctgcctttccctggcctcattgtctcctttaaaaccttcagtgtgtgtaaatgctggtcat

SEQ ID NO: 32548 - DNA, 120 bp, Homo sapiens
atacgacatatttccagatacatcagtaaagatgctgtggaaaaatttctgaaaggggcagtatagaaaacaccaacaccagtgggagtagagctgggaaggaggaccgtgatggtaaga

SEQ ID NO: 32549 - DNA, 120 bp, Homo sapiens
agacggtgccgggctgaccccccatcatgccaggctggctcaccctccccacactctgccgcttccttctttgggccttcaccatcttccacaaagcccaaggagacccaggtaagaccc

SEQ ID NO: 32550 - DNA, 120 bp, Homo sapiens
acccgggcccccactacctcctgccccccatccacgaggtcattcactctcatcgtggggccacggccacgctgccctgcgtcctgggcaccacgcctcccagctacaaggtgcgctgga

SEQ ID NO: 32551 - DNA, 120 bp, Homo sapiens
ctccgggaaacgctgatcctcatcaccaacggactgcacgcccgggggtatgggcccctgggagggcgcgccaggatgcggagggggcatcgactagacgcctccctggtcatcgcgggc

SEQ ID NO: 32552 - DNA, 120 bp, Homo sapiens
gggcgtgcgcctggaggacgagggccggtaccgctgcgagctcatcaacggcatcgaggacgagagcgtggcgctgaccttgagcttggagggtgaggcccttccgctcccgccccattc

SEQ ID NO: 32553 - DNA, 120 bp, Homo sapiens
cagcgggtccgcctcgcctgggtctcccagggctccttcccagtatctcctccgcacccctggggaccccagctccctctcccaggccgcgccgcccttcctccccctccgctcccatcc

SEQ ID NO: 32554 - DNA, 120 bp, Homo sapiens
atccgctggccctccccaggatccccgccaccccctaggtgtggtgtttccgtaccaacccagccggggccggtaccagttcaattactacgaggcgaagcaggcgtgcgaggagcagga

SEQ ID NO: 32555 - DNA, 120 bp, Homo sapiens
ggacggacgcctggccacctactcccagctctaccagggtgagcggccgaacccagcacttcccaagccccgcggagctgtctcaggggcccgagagagggcgccaggcgagctcagtct

SEQ ID NO: 32556 - DNA, 120 bp, Homo sapiens
tgacgcctcttatccccgacctccgccgtctcccgccagcttggaccgagggtctggactggtgtaacgcgggctggctgctcgagggctccgtgcgctaccctgtgctcaccgcacgcg

SEQ ID NO: 32557 - DNA, 120 bp, Homo sapiens
ccccgtgcggcggccgaggccggcccgggatccgcagctacggaccccgcgaccggatgcgcgaccgctacgacgccttctgcttcacctccgcgctggcgggtgaggcgcgggacgaag

SEQ ID NO: 32558 - DNA, 120 bp, Homo sapiens
ggacgaggagtggacctcagcttgagatcagggcagggtctccgggtccctccaaggcaccgcccccccatcagcccgcccgcccgcccaggctccagctcacctctccaaaccctccct

SEQ ID NO: 32559 - DNA, 120 bp, Homo sapiens
cctcgatcccccaactcctcttacccaagctcgatccagcacctctgcggtcccgcaccccaactccgcctcctgggtgtcagccgcccctctccgcccaccctgccctcggtcggtgac

SEQ ID NO: 32560 - DNA, 120 bp, Homo sapiens
acccgctgtggtccccaggccaagtgttcttcgtgcccgggcggctgacgctgtctgaagcccacgcggcgtgccggcgacgcggcgccgtggtggccaaggttgggcacctctacgccg

SEQ ID NO: 32561 - DNA, 120 bp, Homo sapiens
tttcggggctagaccagtgcgacggcggctggctggctgacggcagtgtgcgcttcccaatcaccacgccgaggccgcgctgcggggggctcccggatcccggagtgcgcagtttcggct

SEQ ID NO: 32562 - DNA, 120 bp, Homo sapiens
ctacgccgagaattaggcgcccaccgtgtcccctccagcgcgcgcgaagaagcttgggagtcgtggcgggggtctctcgccacccctttccggagagcctcccctccctccagacccgga

SEQ ID NO: 32563 - DNA, 120 bp, Homo sapiens
gagcggcctctccagacctgccttcccagccgggggctgcgggcctcggaccccggctggcccggcggcggggaggggaggcgggggcgcctccggcggcgagatgcagaggtgaccctc

SEQ ID NO: 32564 - DNA, 120 bp, Homo sapiens
cctcggacccgctgccgttcgcgaaccctagcagaggactcagccaccgccggggggagggtgaggcggccgggggcattaactgacctctgagtacagcaataaaataacctggggatc

SEQ ID NO: 32565 - DNA, 120 bp, Homo sapiens
ctgcgaggcgtggaggggtgtgtgtgtgtgtgtgtgcacgctcatgtcggggctgatgacccgggatcctgcgtgcccactgagcacctaagacagggtaaggggcagggctgttgctgt

SEQ ID NO: 32566 - DNA, 120 bp, Homo sapiens
cagcggaagagcgggagtgcggccggagggcaccaataggccaagggagagagagaagtggagacgtagtgggcgcctggcccaggacccacgcagaacccagcatgttgttgcgccagg

SEQ ID NO: 32567 - DNA, 120 bp, Homo sapiens
aggcgccacgcgggggcgccgcacactcacctaagattagttcaaatctgccaggggcgccccatgccaccaggcccaccctatgtgccccagataacaaatataagacaacttaaacat

SEQ ID NO: 32568 - DNA, 120 bp, Homo sapiens
aagcgtttgcggggactactgttaaagataggaaagtcatattgttgctagaattgacaggaaattaaccttgcgtaaggcggaggcaaataccaaacaccagggccaccaaggcaaatg

SEQ ID NO: 32569 - DNA, 120 bp, Homo sapiens
aaacgcctccaggcagagtcacagatgttcacaaagatgcgtcctcctgtagaggtgaatgctgaaggatatgggtcacagtaccgtcccccctttgcactgctaggatccatttgtgcc

SEQ ID NO: 32570 - DNA, 120 bp, Homo sapiens
cttcgctataaagtgcagacccttggttagaggtgagactataaggggtctcataaggacaaatcattgactttgggcccttgatatttggtgctggcccaggcatttggtcaggaaaga

SEQ ID NO: 32571 - DNA, 120 bp, Homo sapiens
ggtcgcccatgctagtgggcccttgcatagattccagatctactgccacaactactccattcatgggctcaccatggaagccctggcatgacaaaggctggtttatccactggagtcctt

SEQ ID NO: 32572 - DNA, 120 bp, Homo sapiens
aaacgtcctccctggaggatttcccctcatgttgtctttcaaggccacccctgagtggggctgtagtgtggcagcatccaagtttagctcacatcaataaatcagacaggcccatccatg

SEQ ID NO: 32573 - DNA, 120 bp, Homo sapiens
attcgtgccctctggacatgcttacacccaatcctaaatgtaccattttttgttgctactgtgcccatatgtcctcatgacttggtgggtctgaaaattcccagatcttgatggcaaaca

SEQ ID NO: 32574 - DNA, 120 bp, Homo sapiens
gcacgctgctggggcactctgggagccagtgtagaacttgccgccgttttcccacctgagagatgaggaggctggggttttaatttaccaactccggcaaggtgcggtggcttacgcctg

SEQ ID NO: 32575 - DNA, 120 bp, Homo sapiens
cctcgggcagcaagcagtctttggtttgttgagtgctaagagaatatgggtcaggccaccaacaggatctgctaccccctattaattttcaaaaccttgaatggtgccctatcaatgtcc

SEQ ID NO: 32576 - DNA, 120 bp, Homo sapiens
tctcgtacagtcattattcattttaatgctgaaactgtttcatctttggccagtggaagtcttctcaagttggctactggatctttttaaaatgaccctcacctgacctgagttttataa

SEQ ID NO: 32577 - DNA, 120 bp, Homo sapiens
cagcgtgctgggtgctcacctggctcaggggtcctctctgccccacaggggtcgtctttctctaccgagagggctctgcccgctatgctttctccttttctggggcccaggaggcctgtg

SEQ ID NO: 32578 - DNA, 120 bp, Homo sapiens
gcccgcattggagcccacatcgccaccccggagcagctctatgccgcctaccttgggggctatgagcaatgtgatgctggctggctgtcggatcagaccgtgaggtgggcaggggctgtg

SEQ ID NO: 32579 - DNA, 120 bp, Homo sapiens
acccgcaaatgaattccaagaacctccctggattgtgggatctaacagaacggtttggaatcacaaggaggaagaggcagtgggctgtagaccaccagcccctcgcctggccaagtggga

SEQ ID NO: 32580 - DNA, 120 bp, Homo sapiens
ctgcgcggcgcctcctccccgcagtgttgtgaagtcctgccccagccgggtggcatcaaggcgaggctcccgctagaccccttcgctaggtgtggtgtctcgagaagccactaggtggag

SEQ ID NO: 32581 - DNA, 120 bp, Homo sapiens
ttccgcacttgccccaggctactttttgcttgggacgagctctccacctttcctctctcaagcttaggctccaactcgcaaggtttttccaaatcaagccctttctcctgacactggtgt

SEQ ID NO: 32582 - DNA, 120 bp, Homo sapiens
caccgacagggggccttcttcaacaactgatagattctcctccctccctccacaaacgttggtgtcttcccatagtgatatcctttgctgaaaaatgatttagacctctctccatccacc

SEQ ID NO: 32583 - DNA, 120 bp, Homo sapiens
aatcgtcctttctttttcccttcttgctgtgacccaagctacactggttgatttcataggctcaggggaggcagacttctcctagcatatgagaaaccaaaatcagaagaataagtctgc

SEQ ID NO: 32584 - DNA, 120 bp, Homo sapiens
tatcggggtgtctatggaaaacatggaagagcctggggcagccagaaagcagaaagcaatacaaatgaggagtgcaaaaatgggagtgaaaacggtatcctagcagcaggtacttgagac

SEQ ID NO: 32585 - DNA, 120 bp, Homo sapiens
ccccggggtgtggtgcttagggggcgtctgttcttgggttcttatttcctccttggcttttagtcctggaagctagtgattgctttttggagagggagtgtctcagagccagagcctggg

SEQ ID NO: 32586 - DNA, 120 bp, Homo sapiens
ggccgccgtggggaatgaggctctgatagattagcagatcccactggacctagcttaatggaaaatgtctgtttccgttcttgctcagcagtctcggggtatgtgtgtcttgtcactctt

SEQ ID NO: 32587 - DNA, 120 bp, Homo sapiens
tctcgtgaggccaagaagaaatacaatactttcttattaacagactcaacagtttgtgcctcaaaaccaatgtgtgcctattgtggcccgggacactctcagccctggatgctccggtgt

SEQ ID NO: 32588 - DNA, 120 bp, Homo sapiens
tctcgggcctccagagggagaaaatgacacagggttctgagcaaaaggcaggccgagaggccagccaaccctgagggcggagcagcaggctggggaccgctcccaaggagggcagcgggg

SEQ ID NO: 32589 - DNA, 120 bp, Homo sapiens
tcccggggcgcgtgggactccgcagggagagtctccctggatccctccgggcgcgcggccccccagcgccagctgacagtgctggctgcggtccttcccagggccggcacgcaggggccg

SEQ ID NO: 32590 - DNA, 120 bp, Homo sapiens
ccgcgcccagctcccgccctccccgccccccgcctaaacagattggttcgcagggacctttccgttctctccacccctcccgccaagtcaaaatatttagcctgacaactgaggggagga

SEQ ID NO: 32591 - DNA, 120 bp, Homo sapiens
atacggggggagggtgggccaagaactgagcttcctcaaatcccgctgcggctgcagcggctcccgccaaccctttgtccccaccacaggcttcttccaagtggggctgcaccgccggag

SEQ ID NO: 32592 - DNA, 120 bp, Homo sapiens
cagcgcgcccgggcttctggggagcgctgtgtctagattctgcttcccggtgccttgacatctgcggggtaacttctggcagcctcgacccgggagaacgtggacagcccttggcctctg

SEQ ID NO: 32593 - DNA, 120 bp, Homo sapiens
tagcgccaggctccgtcaccgcctagtcccttggttctgaccaagatcccgaggaagaaggcgatcactgtgtagggctctgcctccgtctggtcaccttcttgagctcaggctgctcgg

SEQ ID NO: 32594 - DNA, 120 bp, Homo sapiens
ggtcggtctgtgtgtccctgtctcggggacttggggggccatccgtgctggggccttggcggagagaaccgtgagcctctaggaggtcgtccttcccccgctccctggggccttgcctgt

SEQ ID NO: 32595 - DNA, 120 bp, Homo sapiens
ccccgccaagagacacccctcttcccttcgctctccccagcttgagacggatgggttagtgcagccacggaggcttgcgcggtgggaggggttgggaccagccttctgctgccctgggtg

SEQ ID NO: 32596 - DNA, 120 bp, Homo sapiens
tcccggggctttccaggtgctcggcctccaaggtgcgcggtcctcagctccacccgcgggcggctcctgcgtccgaggagctaagagaagatctattaatttcttcacgaataaatcgat

SEQ ID NO: 32597 - DNA, 120 bp, Homo sapiens
aggcgatcgatgtcagccctgccctgccttgccctatcctgccccggggccggcgctggctggccggggtcagggactgaagctgagacctgaggcgttgctcactgggggctgcagatc

SEQ ID NO: 32598 - DNA, 120 bp, Homo sapiens
gatcgcacccccaggcacccagcgcgggcggggagctcgcgcctttgcgcgcgggcttctcgcgccaccctgtggcttctcttggaggcgcggtcttggctctccggactcccttcggcc

SEQ ID NO: 32599 - DNA, 120 bp, Homo sapiens
ggccggattaggcgaccccttccctttctctgccccgtctgtgtcttcctccccaggttctgcgattgatcctttggtagtccttttcgttttcttcctagagttcggagaatgttctac

SEQ ID NO: 32600 - DNA, 120 bp, Homo sapiens
gcacgcgcgccgcgaggatggagcgctgagcctggggctggctaggatgacctggacagcaacctttcctcaacgcagtcatcttccctcctccccaaatgtaaaaatgcagctgcttta

SEQ ID NO: 32601 - DNA, 120 bp, Homo sapiens
taacgtatcagcttcccacctccggcctcagcagacacctccgaggcgttctgctgcggcccctcagcgtctgccggagctgaggcggatcctcggggagaaggctgacgctgggggccc

SEQ ID NO: 32602 - DNA, 120 bp, Homo sapiens
gggcgtcagagagtaggaagcgggtggagaagaggggcaaggcggggccgggcgggggccgctggctccgccctttcctggcggctgggtctttaacaccgcccagcgcacatgtcgggg

SEQ ID NO: 32603 - DNA, 120 bp, Homo sapiens
ccacgctaccctgtgcatgggtccttcttcagaccctctctcttttgcccctggatcttctctgcccccttacaacctggaccaacttgctgcttgcattggaaatcttcctgggctgcc

SEQ ID NO: 32604 - DNA, 120 bp, Homo sapiens
ctccgttctgtcagctgcctgagcatccgcctctctttatttttctcttccattggaagactccctgcacaccctaggcagggaagggcccctctcctttcaggagtcttctctggcact

SEQ ID NO: 32605 - DNA, 120 bp, Homo sapiens
ggacgttcagagggaggaagagattggggttgcctttcagtttccatttttcatctctgcctctgtcttgatcaggctgctgattgtactaggactactgcaatttcttttcatcatgcc

SEQ ID NO: 32606 - DNA, 120 bp, Homo sapiens
tgccgtcattgttacttccctccaatccattctcctcattgctctaggtgttgggaaacacttagtaaaatctgaatgcgacatactgtttcacgcttccagagcctttgcacctgcttt

SEQ ID NO: 32607 - DNA, 120 bp, Homo sapiens
tcccgtcttcatctgacaatatcatgtgcgttcacaggaggcccttcctggcctggccttttccgtgctcccacagtgctctgagcttgcctctgtcagcgctcactccagaccacgtta

SEQ ID NO: 32608 - DNA, 120 bp, Homo sapiens
agccggcagtcaaaacatgtatgttgaatgaatgaatgaatgaatggcctgttgaccagctcccctgctgtctgctgcaattagtattctgctttagcagctggttgttgaggctactga

SEQ ID NO: 32609 - DNA, 120 bp, Homo sapiens
caccgagatgggaaagttttcatgcctgggaacaaggtccttttgcacctcaacctcatccgtatgtctgccaacctcccctgtcctcctgtcatgaggctacccgggccctgtcctgcc

SEQ ID NO: 32610 - DNA, 120 bp, Homo sapiens
ccccgactctatggagcagagctggtcctcccatctttgggctacatgtcccccaaggctctctggcacagggctggaggggccagaggaagtgctgagtctgggaggaggctgaggaca

SEQ ID NO: 32611 - DNA, 120 bp, Homo sapiens
aggcgattggagtaatgagaggagttagagagatggggagtgtgtgagtaagagctgagtgaagggctaggtcagggaaaggtgtgcctgggccagtgagtctggagtggggagctggag

SEQ ID NO: 32612 - DNA, 120 bp, Homo sapiens
ccccgatgcatgtcgaagataaataagcacacaatacaaagtaggtgtagatgctgactgagacaatggtagctgaaatgagacagggcataaatctggtagagagggaaaaaggacctt

SEQ ID NO: 32613 - DNA, 120 bp, Homo sapiens
atgcgggttcctagcctgagttggtaatctttctgccctagccaatttattttctaatcttgtagctttcatataaagggctctccgtgagattgatgatgacagtctgggcagccacac

SEQ ID NO: 32614 - DNA, 120 bp, Homo sapiens
gagcgggctcccctgttaattactaccagggagggaaggcactctattcaagggaggatagatcaaggagctaagttatatcagaagggggcaatttcaaaagctggaaagatctgtcaa

SEQ ID NO: 32615 - DNA, 120 bp, Homo sapiens
tgacgtaagtatcattctgcagtcagcggcagataccagcagagtcagaggcagagacagcatcagttttgcatctgcctgttctctcctcaactgaagaaaagagaacttcaaagttac

SEQ ID NO: 32616 - DNA, 120 bp, Homo sapiens
gggcgcccaagcaacacaatctccagggtaaataatcaaagaagcagaggcaagaccatgtgaggaaaacaaagctctgagtcccagatcacccagatgattataatagagaaggtaggg

SEQ ID NO: 32617 - DNA, 120 bp, Homo sapiens
ttacgttaagcttacaaagtgaccagtctgctccaaggtattcaccagccaccgaagcaattcccagcagagtagagccactgacaagttttgaaatagacagtgaacaaaagttctgtt

SEQ ID NO: 32618 - DNA, 120 bp, Homo sapiens
gttcgttaagagcacagatgtcataaggcagtggctctggaagcacagaatgccagtattggcatcatctgggaagttgtaacaatgcagatcctcaggccccaaactcagctcaaacac

SEQ ID NO: 32619 - DNA, 120 bp, Homo sapiens
gaacgttttgggtggggcccacagacctgtattttaacaagctctccagctgattctaaaggattctaaagattgagaacctctgacctagggcaatacatccctaccttgaaaaaatta

SEQ ID NO: 32620 - DNA, 120 bp, Homo sapiens
gagcgacattttttttttcctttctgatgaaacttcatgaaagaattgactagactatgtccatcaccatttcttcacctcctattctcacttggacccactagaaactggctccttccc

SEQ ID NO: 32621 - DNA, 120 bp, Homo sapiens
ccacgcacggaggccatgaacatcctcccagttactaagtccaggcatttctctgtccttttcgtccatgacctcttaggagaacttgacattgttaatcactccctctctttactttgg

SEQ ID NO: 32622 - DNA, 120 bp, Homo sapiens
ctccgtctaggtgttgatgacctgctaatgtgattctctatcccctcctgacctccagcccaagctccagttgtctgctgaacatctttccttggatctcccacaggcacttcaaacaca

SEQ ID NO: 32623 - DNA, 120 bp, Homo sapiens
gctcgtccttcctgcagggccagggatgggcctgtggctttgggggcaagtgagaagcagttttcattgtagcgctgggaactctcaggagagaaactctgtggtccccactttcttggc

SEQ ID NO: 32624 - DNA, 120 bp, Homo sapiens
gagcgagggcccatcctgccccactctgggtctctcctttcccagttccatgtgtggccctgtggccatgcatatgccactaagaagggctgagaggctgcagaagcacgtgctcagggc

SEQ ID NO: 32625 - DNA, 120 bp, Homo sapiens
gggcgtccttgagaaggatgcaccaactcctggggctgaggaacagggacaaacattgagtaaaggggccctctgtgccacacgagtccatgctccatgtcatagaaagggagtggggac

SEQ ID NO: 32626 - DNA, 120 bp, Homo sapiens
ggccgttctttaaggacccctgctgtagtctgaagttcctcccttgaggcgggtttcccactgtgcccaggaagctcctcatgccctggcttccttccagcctttctgtctgagaggaga

SEQ ID NO: 32627 - DNA, 120 bp, Homo sapiens
ctgcgggtctctgggcagaagacctccctgggatccaggcctccctttgcctccatcatgggagcaggctttacttccagcccctcgggcctgagggacaagagccaaagcctctcaccc

SEQ ID NO: 32628 - DNA, 120 bp, Homo sapiens
acccgcaccctgtcccagccctgccaagagaggaagccctggaaaatgccaggcccctgggaggctcctaggtcctgggagcaggatgtctggcttaaaagcccctgggagctgctgctc

SEQ ID NO: 32629 - DNA, 120 bp, Homo sapiens
tgacgggagaggaggcaagaagggccccgagagacaggtccagttggagggcagagggggcgggaggggaggagtgaaggaggcaacaccaggcagctcgccttggacgctccccaaatg

SEQ ID NO: 32630 - DNA, 120 bp, Homo sapiens
agccggcaggggcctggggcagagccaagtcctagagaaagaaagagagaaagggtcaagggagcccaacctctcgcagatgctccttgctcctcccatttcccagcccttcttgtttct

SEQ ID NO: 32631 - DNA, 120 bp, Homo sapiens
cttcgagatgggcattatctgttttgtatgctaaggaaattgaggctcaagattaagagacttgcataatatcctggccaagtggtggagctggatgggaacaggtctgtctgacttcag

SEQ ID NO: 32632 - DNA, 120 bp, Homo sapiens
tgccgcatgtatacaaagtggaaagttgcatcaaaagtccctttgttgttggggccttttaaggggctgaagtggattgactgcataatcagattgattggacaaaccaagtgttttcag

SEQ ID NO: 32633 - DNA, 120 bp, Homo sapiens
cagcgggaagagatgggccatgtgagtcagcaagaaagagagtgaatcagagagtatcagaaagagaaagagtgatgcagaaatcaaaagctgtggacacaggtgaggtccagaatatgg

SEQ ID NO: 32634 - DNA, 120 bp, Homo sapiens
gagcgacagtgcagggagaaaccccttggagacattgcgttggtgacctccagggggtattttgtgctcgtcagccctgaacaaactgcatcccccacccctacaccaaatccccaatct

SEQ ID NO: 32635 - DNA, 120 bp, Homo sapiens
agtcgcctttttccttggagaatttgggggaaggagagggctagatacccttccttcatgtccccttaacttctctttccttctcccctgaccaagggatatgctggcagtgaccccaag

SEQ ID NO: 32636 - DNA, 120 bp, Homo sapiens
agacgaaccctgtctccctcctgcagcctcagctcttccttctatctccacagctgggagagcctccccgagtggggtccagcagcagtcctgcttctccttctctttcctcagtcctca

SEQ ID NO: 32637 - DNA, 120 bp, Homo sapiens
caacgcccctccaggctccctctcgactgctgtcactgcccagtcccctcatacagcctcagatctctgcccagcccctcctcttagtccccctgtcccttgcagatgcctccaactctt

SEQ ID NO: 32638 - DNA, 120 bp, Homo sapiens
ggccgtgggatttaaaagttttgtgtaactccgtggagcagaaatccaaacccagacactcccatcccctgcccctcagacctgtcacgatgggcagctgaaggtcgggggaaggtcatc

SEQ ID NO: 32639 - DNA, 120 bp, Homo sapiens
gctcgggaagggacgagggtgtctggagaccagcttccagctccgcacccatccctctgcctgtcaggccccggccggtctccacttctctctgtttgaccggtttatctttcttcacct

SEQ ID NO: 32640 - DNA, 120 bp, Homo sapiens
tgccgatcctatggcctctctttgttgccctacctatcctgccccttggaatgcccatttccctcctctggagtgttgcctgtctcaacacttctttcccagcctggtgctctctgtttt

SEQ ID NO: 32641 - DNA, 120 bp, Homo sapiens
ctgcgcccctcgaccttcccctagtggcaacctcattcccatcagctgtgcctgggggagccccctgcctggacaccccctgatccttccctttgtccccccaacacagagacaagaaat

SEQ ID NO: 32642 - DNA, 120 bp, Homo sapiens
aggcgatgacgtggcagaggagcaggtcagaggcagaggaagtgaaagctcctagcaaacagctgagctggatgagctggcagggccagcatggggctgagtaactgggaccaggacagc

SEQ ID NO: 32643 - DNA, 120 bp, Homo sapiens
cagcgtgagaagcaggcatctgaggccattctccccagctgggggcctctgataccttctgactcaatccccaaccctcaaccctcatgtccacttccagcctcaaccccaaccccaatc

SEQ ID NO: 32644 - DNA, 120 bp, Homo sapiens
gctcggaggtggcgagacagcagcaccactctccccagcccttctcctcttgtctccactgggaaggagttggtgagacgagcaggacttctctctgccacgggagcatcatctctgtgt

SEQ ID NO: 32645 - DNA, 120 bp, Homo sapiens
ctgcgaggggcctgtgatgagatctctagggaaacgaggacaagaataaccattctaatgcccaggatggctccatagctcagctgccttcttatctccgtgccatgtggacacctcaca

SEQ ID NO: 32646 - DNA, 120 bp, Homo sapiens
ccacgccctcaggctgtgggaggagagcactgccacctcccagctgtgtgtggggacagtgggcctggccacctgtctcctccttcacctcggccccatcagggtcccttccttctgggc

SEQ ID NO: 32647 - DNA, 120 bp, Homo sapiens
tgacgcccctcaggcctgccctccacccctacccacctctgcctgcaggagggcacagcagcactcctgccctggcctgggcagccctgtccttggggcagggcagctcagcttctggga

SEQ ID NO: 32648 - DNA, 120 bp, Homo sapiens
gggcggagctggtttccctggtcagctggggactcccactgacctctacttatcaggattcggggtttaggtctctgggcctggagagcaggtcaggggcagggaaacgaggggcggggg

SEQ ID NO: 32649 - DNA, 120 bp, Homo sapiens
tgccgtgccaaggcccctgcccacttcccccaggcctggcttttcctgtccctgaaccatgttgaatggtggggcgggggctcttgggactgtctccctctcctgagctgggcatgtgtg

SEQ ID NO: 32650 - DNA, 120 bp, Homo sapiens
taccgagacattctcagcctgatccatggaccatcaattctgagagatacttcttgagaaaggaggagagaggaaaggtcagataaatttggaaagtgatacagaccagatcccttctga

SEQ ID NO: 32651 - DNA, 120 bp, Homo sapiens
tcccgagcatggcattcaaaaccgtcgtggtttcttccagtgtctccagactagtctcaaacatgcccgatgttttccccatcccacacagttcctatttgttcatggttctttcagcgg

SEQ ID NO: 32652 - DNA, 120 bp, Homo sapiens
ctgcgggtactgtctacacccctcggtgtgcttttcccatccccctgctgggtcccagttgctctttttccaccttggtttgctgcctcctggagctgctccttccaggcatgtgtgagg

SEQ ID NO: 32653 - DNA, 120 bp, Homo sapiens
gaccgacaaccctaagaagacatcactttccatttgatccagatcttgcttctcatatagaaagaaggcagtggtgtttctaagaaacaaacagccaaggaactctatctattgtatctt

SEQ ID NO: 32654 - DNA, 120 bp, Homo sapiens
ttacgtccctatattagctaatcactttcattgaaaggattcatcccattccattcaaagaatgaaagggaaagatagggcaacctggagttgttttacctttcactccttccattctca

SEQ ID NO: 32655 - DNA, 120 bp, Homo sapiens
ttgcgctcagccccacaaatcatgtagccagttttgcatgtaactctgttctcttttctgcagtccctgggcaactgccaggggatgactttggcttttttaagagataatagaatagat

SEQ ID NO: 32656 - DNA, 120 bp, Homo sapiens
gtccgatgacccaacatacttttgcataaacataaatgatatatttatcttgaggttcctctttctgcaagtttagaactaacatttgggtgggggctgtgggtttcttttttttttttt

SEQ ID NO: 32657 - DNA, 120 bp, Homo sapiens
caccgcgcctagcctgggtgggggctgtttttaaatcttatctcaagttcatgtcggctttggagatttcattaaacacgacaagcgagaatttgggatgaagctgatgtgcactgaaag

SEQ ID NO: 32658 - DNA, 120 bp, Homo sapiens
acacgggaatcatagattatatggcactggtcacagagattacataggtcaactttccaccttgactcaagaataaaggcaagaaattgtcaaaggcaattttttgtttttagttaagac

SEQ ID NO: 32659 - DNA, 120 bp, Homo sapiens
agccggggagatgagggaccatgccttccagcttcttcctggctgctggcctcgccctcccctccctgggctcagctttcctgcctcaggggtccatccatctgtctctgagctcgagaa

SEQ ID NO: 32660 - DNA, 120 bp, Homo sapiens
aggcggctggaaggaggcttctctctccactacacggaagggtaaattgaagccagtgggaaggaatctcctcacccaagacttcctggattgctggtggcagggccagatacccctctc

SEQ ID NO: 32661 - DNA, 120 bp, Homo sapiens
agacgatgctccatgcatcttgtgttctgctcacctatgagcagaggcactgactgtcttggcttcacactatcttttcaaagagtttgtagagcaaatagtcttagaagagacagagat

SEQ ID NO: 32662 - DNA, 120 bp, Homo sapiens
tctcgacagtgccaccctgtggccaggagaggccagaaatcagcacacgccacatctgattctacagcaggatagggcctctgtgcagctcagagcaaaggttgtgcccacttcataaga

SEQ ID NO: 32663 - DNA, 120 bp, Homo sapiens
ccacggtggcatcctggtgaccttgcacatttgcgcataggccacatagggacagctgacctaagtcttggcagaaagcctgtggtcttccccaaacatggaaagatgggaaccttgtga

SEQ ID NO: 32664 - DNA, 120 bp, Homo sapiens
tttcgtggaggctgtcatgagacagctgtcataactgtgtcatcatctcctgggttctgaagaggtatgaggctttttgcctcactcacccccaccccgtagggtacacaggctatgaaa

SEQ ID NO: 32665 - DNA, 120 bp, Homo sapiens
actcgccctcttttctgtgctgtcttgtggggcaagggatgggaaaagctgacacttttgccgatcttgaacttgctagctatgtgagtaataaactctctggctctaaaaagggtttgt

SEQ ID NO: 32666 - DNA, 120 bp, Homo sapiens
gctcgggagtttcaggttttctgccagcatctataaacctggggcaagtaggggcaaatctcagacgcatcacagttcttgccaccaccataagcatcaccaggaacactgcattctctc

SEQ ID NO: 32667 - DNA, 120 bp, Homo sapiens
cagcgttccttgatttctttgcagcttctaggcagggaagaaaaggagaaggcacaggtttcgaattccctcgagagcatctcaagagaagaggctgctgctagaaaatgtgagaatgag

SEQ ID NO: 32668 - DNA, 120 bp, Homo sapiens
gtccggctcattcctgttcattcacatgcagaccacccatgatctggtcttcaaatttcttctgaattccaccccactaaatacagtagcagttactactttaaactactactaaagcac

SEQ ID NO: 32669 - DNA, 120 bp, Homo sapiens
acacgcccaatttcagcatacagctaagactacacaacacacacacaagctcaacaaagagctaagaccactacacacatctccacagcaccacaggcacatctcaaaagggtctgtcca

SEQ ID NO: 32670 - DNA, 120 bp, Homo sapiens
agccgctctagcctctaattcccgctctagaacagctggccctggtcgtcagtacacaaggaaagagcccagaaccaagctcaagatacctattcaaagatccctgccagccaggtgggc

SEQ ID NO: 32671 - DNA, 120 bp, Homo sapiens
ctgcgacccccgccatttttgctgtctacttagaagggaagtcaatggcatacccaggattccttcctgatccctcaaagaaatggggaataaacactttaaacaagttccaggccactc

SEQ ID NO: 32672 - DNA, 120 bp, Homo sapiens
actcggacactggaggagtggagagggtagaagggaaagccagcaatttggcactcaggttcggaagctgggcctggaagggctgggtcctgggggcccccaaacaacatatgataacca

SEQ ID NO: 32673 - DNA, 120 bp, Homo sapiens
aaccgacaacttttgaatgcaagccactccctaagctgtgaggaggcggggcgggatgccccctcaggcgtccagatttggggaggtcaagagaagctggtctgcccctctcctctccgc

SEQ ID NO: 32674 - DNA, 120 bp, Homo sapiens
ttccgatgccaagatccgccccccatcagtccttcctacggaagctgagggctggctcccgggaatgcaggacccccataatcagtgccttccccattccatcctaaatgaggtcccatt

SEQ ID NO: 32675 - DNA, 120 bp, Homo sapiens
gaacggtctctattccaccacctgggcgtcccctctccaccctatacccgggatgttgagcgcccctgggatggtcccagctgccgcctcctcgcgagagcgcacgtcgaagagccgggc

SEQ ID NO: 32676 - DNA, 120 bp, Homo sapiens
gcccgtccggaggctaggagtgaacggagttcaggaagcgagaccgtgggcgctgaggaaggggcgcgacagccttcaggaagagggggcctaggagtcacggccgccatggcatcccct

SEQ ID NO: 32677 - DNA, 120 bp, Homo sapiens
cagcgcccctcccggtagggtgtgcacgaagacccctcagccacgccccttcgctccgccaccccactccctgccacgcctcaacccagaggaccaagagaaccgcggccccaggaatcc

SEQ ID NO: 32678 - DNA, 120 bp, Homo sapiens
ccccgcaggtacctccagccatggtgcgcgtagcaaccgcgagtctccggagtgcggccctggcccgccctctcggcgcctgcaacatctcccgttccctcccagagctgagaccggatc

SEQ ID NO: 32679 - DNA, 120 bp, Homo sapiens
atccggaagcaagggcaccgcctcccgcgccgcccccgcagcacctgttcgcggcgcctctagcaccaacccaccgcagaagcccttaacattctctagcttgggccaaaaacgacacac

SEQ ID NO: 32680 - DNA, 120 bp, Homo sapiens
caacgtgatcagggaggataaattaagcgaaaacaaagatctctctgctctcatttttttgtggatgttggattaaagagaggaaccatcaccagcctctctctgtccttccttccactt

SEQ ID NO: 32681 - DNA, 120 bp, Homo sapiens
tggcgtcagcatgatgatgtcatcagaccaaaggagacacattgcctgcctggtgaggtcaccttgagggcatgtggtggccaggccaggccaagcccagggacccttctgttgcaaatt

SEQ ID NO: 32682 - DNA, 120 bp, Homo sapiens
ctccggctggttagacactcctccctctgaccctcccacccctcctccctggagtaccaggacgctggtcaggagccttggtgactcagaagctgcctcacagcagcaagcctagccaca

SEQ ID NO: 32683 - DNA, 120 bp, Homo sapiens
ttgcgcaagggagagaacaggcccaactggccagacgggatccctgcccttggcctcccccaccctggccaggcccccacgggcctctttggagcccagccctttgtgtaccccgcccgc

SEQ ID NO: 32684 - DNA, 120 bp, Homo sapiens
ccacggctttatcatccataaactcaattctcaaatctgtatctccaactcagatttcttactgtatctcaagatttaaaaatcaaagtgtctactgaatgtttaacctgggtgtcccac

SEQ ID NO: 32685 - DNA, 120 bp, Homo sapiens
tcacgccttagtgttttggaacacatttattccctctacctagaaaatcttccacttccttctttgcttgactaacttctctcatcctttagaattgagctgaaggatttttctcctcta

SEQ ID NO: 32686 - DNA, 120 bp, Homo sapiens
cttcgcatgcattgtcttgcctaatactctaaattcagtgatgaggtaggtattgttatgtttctacagatgggggaggccaagatgtaactcatgggaggtcatatataaatagtaaat

SEQ ID NO: 32687 - DNA, 120 bp, Homo sapiens
cctcgtgattagttaggggtctctcctctgctgccataatgaagggattgtgcagcacactataaatctttattgtttggtttgtcttttctcaaatgagtctgagtaaagcaatttgaa

SEQ ID NO: 32688 - DNA, 120 bp, Homo sapiens
aggcgtgagccacggcacctggccaacaattcataagttttaagtttcacactgttgtgaatagcgtgatgaaatctctagccatcccgctcaggatgtgaatcatccttttgcccagcc

SEQ ID NO: 32689 - DNA, 120 bp, Homo sapiens
tgtcgtggctcaatgatctgagatcacctaaagcagatgattctccttctgacttatcatcaatagtggcctaaggctatatcacaatgctgtcattcaccttacctcatcaggaaggca

SEQ ID NO: 32690 - DNA, 120 bp, Homo sapiens
tctcgattcacctgttgctgttactgggtacaaatgaaggtgctaaaggaaaataagttattgctcatagcaggcaacatgagaaaactgagcctcctcagagcccctgcaacttctctt

SEQ ID NO: 32691 - DNA, 120 bp, Homo sapiens
cctcgcaatggaaaataaggcaaaatacaggaaagcactgtggtcctaattatgtatcaatggatgtaattctataagcttcaatcctttgaagttaactccctacatttgagaggaaac

SEQ ID NO: 32692 - DNA, 120 bp, Homo sapiens
gatcgtaacgccaacaaagagagctgtgcagatttcctgagctaagccaaagggacctcctgtgtagagatgggcaccctcatgtccatcactgagaaaaaaatatttcaaacagtttag

SEQ ID NO: 32693 - DNA, 120 bp, Homo sapiens
actcggatccctgtgtccctaccagggctttactcttctgctttactctgcagggacttgctgacctgatgatctgctctattcttggtttcctattaactctaagctgccccagttact

SEQ ID NO: 32694 - DNA, 120 bp, Homo sapiens
ggacgcagagagaggccattctgtcaaaagaataagagaagactgggagttgctgagaatcttagaatagtgactgagctaccccagcttctctcccacatcccccatgttaagaaaaag

SEQ ID NO: 32695 - DNA, 120 bp, Homo sapiens
aaacgaaagaaagaaaagaaaagggtagaaccaggtaatcaggaccttaaaagaaacaaactccacttctgacacacagaagcatggagtgcagatggcctgggaaggaactagaagaat

SEQ ID NO: 32696 - DNA, 120 bp, Homo sapiens
aagcgattctgggaacatggagcagagcccctctctcctaaccccataggaagtggcctggctggaaccccagcagaaggcaagactaagctgtctctgggcccctttccagttctggaa

SEQ ID NO: 32697 - DNA, 120 bp, Homo sapiens
atccgacgatactatttcctattgatcttatgtcctctcccaagaacaaactaaccaggagactgaaggatgacacaatgggcagtagcatgcaagcctgacctgggtatcctaaaaaga

SEQ ID NO: 32698 - DNA, 120 bp, Homo sapiens
tgtcgtcatcctcaccaccccagccccagtattcattggggaagccattcatcttcaggtactggtcaggagtaagtgctgagactcctccgaagtactgggggtacgggaggctaggga

SEQ ID NO: 32699 - DNA, 120 bp, Homo sapiens
ccccgagtcttctggggacacatccccaaccacaatccgcttggctctcctccttccacaggatagtaggcttccctgtttcccagtacccttccatgccctctacctgtatccaaactt

SEQ ID NO: 32700 - DNA, 120 bp, Homo sapiens
caacggcaacatggcggggtccccgggggtcacacacatacagattgtggtcattttctggcaagaggtccacatcgtgcaagaacaggcagtcccactcttcatcacgcagggcctctc

SEQ ID NO: 32701 - DNA, 120 bp, Homo sapiens
tctcgcaccccaacgttcaacagttttgccctgttaaatgttccatttccagcctggaagataatggaggggaaccagactatgtctgtaggtggcacggagaaaagggggctaaagaat

SEQ ID NO: 32702 - DNA, 120 bp, Homo sapiens
tcacgtgaatgcaggggttagaagtcagggagcagacaaaggaagagatataaggaaaggagaactggcctttattgaccacttactaaaagccagacacagtgccaaacatttacatca

SEQ ID NO: 32703 - DNA, 120 bp, Homo sapiens
aaacgttttgtaggtaaggaaactgaggtttacagagatcaagtaattaaggttgcatcattacaggtaagtaagtagcaaggcttagattcaatttgactccaaaaatccatgtccttt

SEQ ID NO: 32704 - DNA, 120 bp, Homo sapiens
acccgcagggcagagggggcagtttagatggagggctgtctgtcagccccttccatccactaacccatcactgcctcccagggcaggaaaccagggcagggccagcctgcgcattagggc

SEQ ID NO: 32705 - DNA, 120 bp, Homo sapiens
tcacgcccacagcccctccccactgagtcttagcatgaggcagcaacagaagctctctctttctcccagctaagtccgaggccccggtgcccagaaagggcagccgggatagtgaggtta

SEQ ID NO: 32706 - DNA, 120 bp, Homo sapiens
gcccgcccaggggcgccgccgaaggatctccagaatctgtgctcttcggtgcagccagtcctggggagtggggcgtggcgttgaaggggtcggccggggcacgaagaagctgtatcggag

SEQ ID NO: 32707 - DNA, 120 bp, Homo sapiens
aggcgtgtgtcctgggggttgccagccactaggacttgcagtgtcaaaggctgggccagtggcccatggcctgacagtgtctctgaggctgcagtggccccgctgtagcgcaagctgact

SEQ ID NO: 32708 - DNA, 120 bp, Homo sapiens
cagcgtgtattcaccattgagggcataggagccatctggcagcttcagggccaagtagatgctccggtggccagggtttccctgctgccggacaagaatgtgggtggcccccgcggggat

SEQ ID NO: 32709 - DNA, 120 bp, Homo sapiens
atccgtacctgtgtggaaggagtagatggggagctcaggatcacctgaatcccctcagccttctgagctgtgcttatgtgactgtatgtgtgtacatgtgtgtagatggctgtcacccaa

SEQ ID NO: 32710 - DNA, 120 bp, Homo sapiens
gttcggtctggatcagagctacatgcacatgtgccctactgcctcttatctctggacctttacacccactgcccccttattgagttgcccttccaagccccacttccttggtacctgtct

SEQ ID NO: 32711 - DNA, 120 bp, Homo sapiens
cttcggatgaatacatgggaaaccgcactgtagctgcctactcgtctatctcccgctagactgtgagctctttgagagtggaaacagtgctgagttcccctctgcatcactaggacccag

SEQ ID NO: 32712 - DNA, 120 bp, Homo sapiens
aaccgtcccctccgcacaccatgcacttgtcaaacttcttcttggagccaatgatgcgatcacagccagcatggatgcatcggccctggacacagaccgaggagctgtccggggaacagg

SEQ ID NO: 32713 - DNA, 120 bp, Homo sapiens
aaacgagacccatgtcccatcagggaagcaatgttgtcggaaaagttggatgaagtaggggatgtagatgggtgagtgccggccaccatgtgggtgataatcataacaataataattatt

SEQ ID NO: 32714 - DNA, 120 bp, Homo sapiens
gaacgttgaggtttagaaaagctaaagaacctgtccaaaagccacacaaatggcaagcagaggagccaagatgggaagtgcagtctgtctggtcccagcaccaagccctaaaccttgatg

SEQ ID NO: 32715 - DNA, 120 bp, Homo sapiens
taacgatagtacctattactcataacagttgttgtaagaattaaatcaattaaagtgcctaaggtagtgcctggcacataataaagctatataagtgttatgtattattaaaaagatatt

SEQ ID NO: 32716 - DNA, 120 bp, Homo sapiens
cagcgcatggtgtcctgcgactagtgatggaattgagtggggagatggtgcggaagtgtgatcctcacatcgggctcctgcaccgaggcactgagaagctcattgaatacaagacctatc

SEQ ID NO: 32717 - DNA, 120 bp, Homo sapiens
tggcgggatctggggttgctttagcctggggctttgccagtttgctgcccttaaaacgtgaggggaggaaggtgttgagaggagtaacccgttgagattactcttggttgggtggatgga

SEQ ID NO: 32718 - DNA, 120 bp, Homo sapiens
ttacgttagactagtgcgtcaaagccagtgtccctaggggcagggaaagagaaaagacattagctcgctaagtttaacagctgattcttgtatcttccagctgtctacgtttgttttcaa

SEQ ID NO: 32719 - DNA, 120 bp, Homo sapiens
tgtcggggtgaacagtgactagaatgtgattccccaagagagcctcggcgatgacagtttctggtcctggagtctatgggttaacccctgtagcattagcccccgtcacagtgacatcag

SEQ ID NO: 32720 - DNA, 120 bp, Homo sapiens
tagcgtcttagctccaccctcttcctggaagctgaagctggttcagcagacagctaggacttggctttttggcattctggaggaaggaccatttctacctgatgctctgtcttccttaaa

SEQ ID NO: 32721 - DNA, 120 bp, Homo sapiens
gaccggctagactatgtgtccatgatgtgtaacgaacaggcctattctctagctgtggagaagttgctaaacatccggcctcctcctcgggcacagtggatccgaggtatgtccccccaa

SEQ ID NO: 32722 - DNA, 120 bp, Homo sapiens
ccccgttgaacccaagcttagtgttcagaccccaggctctgcccagacctctctgtccgcctcagtgcttggctcctatatcctgtcttctccttgtcttcacagtgctgtttggagaaa

SEQ ID NO: 32723 - DNA, 120 bp, Homo sapiens
acacgtttgttgaaccacatcatggctgtgaccacacatgccctggaccttggggccatgacccctttcttctggctgtttgaagaaagggagaaggtaagagtgggaggaaaggatagg

SEQ ID NO: 32724 - DNA, 120 bp, Homo sapiens
gcacgttctatgaagatgtttgagttctacgagcgagtgtctggagcccgaatgcatgctgcttatatccggccaggaggagtgcaccaggtgagcaggtccccggcttccccaaatgtc

SEQ ID NO: 32725 - DNA, 120 bp, Homo sapiens
tatcgctgggggagggggtgctgagagggctctccttagtgaaggctatgccacattcagtagcacttccgtttggcttctaggacctaccccttgggcttatggatgacatttatcagt

SEQ ID NO: 32726 - DNA, 120 bp, Homo sapiens
cttcggcttgatgagttggaggaggtaagctaggagtcaatgggaaaaatctctcccccacaagaagggctagagaaatacagagatatttgaagagtgtgaggaagagtattaacacac

SEQ ID NO: 32727 - DNA, 120 bp, Homo sapiens
tggcgaaatcggacaattgacattggggttgtaacagcagaagaagcacttaactatggttttaggtgaggggaatacaacttctctccgtaggagtgggggtgggagtgggggagttcc

SEQ ID NO: 32728 - DNA, 120 bp, Homo sapiens
cttcggggctcaggcatccagtgggacctgcggaagacccagccctatgatgtttacgaccaggttgagtttgatgttcctgttggttctcgaggggactgctatgataggtaaggcccc

SEQ ID NO: 32729 - DNA, 120 bp, Homo sapiens
gtgcgaaactttttgttcctagaaaaatcacaaaaatggcattccctttagctatattcctggttacgatggcatttgttgatcttgactaacaggattattttcctgagctgtatgaat

SEQ ID NO: 32730 - DNA, 120 bp, Homo sapiens
ttacggacaagaaagcaggaaaattgccataggaaaagctggagatcctgttgctgacacccaacagtgtggcagttggaggcttgggttactccagaagccttcaggtaatacaggggt

SEQ ID NO: 32731 - DNA, 120 bp, Homo sapiens
gagcgaactttcccagcactctgaggccactggggtgtttgccaagatcctcccaccaagtgtgtcatctgagtcttgagatccgtggccaccttaaaggttttaaactggccatcagac

SEQ ID NO: 32732 - DNA, 120 bp, Homo sapiens
ctccgtactgtccccaggggctaaggggaatccttccctctgctcctgcatgctcaccagtgtgctttcattcatttggtggagaaacctgggtagggaggaggcacaagtccagccaca

SEQ ID NO: 32733 - DNA, 120 bp, Homo sapiens
aaacgttgtcattaaaatagtaaccccccatcctgccctaatgtctgtcttccctagtgcccagcatgggcagctcttcaccaatggggatcattgtggctgtggtcattgcgactgctg

SEQ ID NO: 32734 - DNA, 120 bp, Homo sapiens
ggccgatgcagtgacttctctgctgcaggtcaggagttctggaactggggcgtggctggggaggggttgcagggaagggtgggaggaaggaagaaaagaacaagtgattggaagtgccac

SEQ ID NO: 32735 - DNA, 120 bp, Homo sapiens
tttcgtctactcattgtggcaggatgtgagctctgggggcaggcaaccgaacactgacctctctaggtctcatgccaatgtctgtcatcaggagtgagcaggaaaaaggtccttaaggac

SEQ ID NO: 32736 - DNA, 120 bp, Homo sapiens
ggccgtgtcttcctcagctgagccttgcagggctggctggaaggtggagaagggatgggatgggagtgggatgtcaatgggagcctgaagatggcggggtcatctgctggagcctggggt

SEQ ID NO: 32737 - DNA, 120 bp, Homo sapiens
atgcggtagatgagacagtgcctggcacttgggatacctgatattcagcctgtctcccactggttctggtctgctatcttcaggaactaggagtgggtgggagaagcagcaatgtctcct

SEQ ID NO: 32738 - DNA, 120 bp, Homo sapiens
gcccgtttccctaaagcttaggattggctgtgataggggaaagtagcttatgaattgactggattgatgtaagtataacagaaaagagagattgtactcaaatttacagccatgtttttt

SEQ ID NO: 32739 - DNA, 120 bp, Homo sapiens
aaacgcttaagacaacagcagttattattttggtaaagaaatctgcaaattgggcagagttcaggacagacagttcttctttgcctccgtggagtgttagctggggtggcttaggttgga

SEQ ID NO: 32740 - DNA, 120 bp, Homo sapiens
tgacggctttcagctgggacctgagcctgggatgtgggccagggttcttggtttttcttcatttggacctctccacagctgcatgggtttcctcacagtttagtgtctgggttccaagaa

SEQ ID NO: 32741 - DNA, 120 bp, Homo sapiens
gcacggtaatccctggctctgagaactgctatttagagggttcttttatcttgacttgaaggtctatttcttcatttaaccacatttatgtttctaataaattacccccagttactacta

SEQ ID NO: 32742 - DNA, 120 bp, Homo sapiens
tcacgtgatgtctccatgtttcatttcctcatctacaacataggaataataataattcttcctcatttaggagcttgttacaagaattagatgagcagtgtttagcacacagaaacacta

SEQ ID NO: 32743 - DNA, 120 bp, Homo sapiens
cttcgttcctggaaatttagggtatattaaactcatgtaaaagtactttatatttaaatttaaaacagtgagcttctagactaatttagtaataatcaagtttctttttaacctacgtga

SEQ ID NO: 32744 - DNA, 120 bp, Homo sapiens
gaacggccagcatccctgacccctgctcactaaattttagtaatacccttcaatcatcatgaccacttagagtgcctggaaggttggtggtttttacatacactgttctagcgaggccta

SEQ ID NO: 32745 - DNA, 120 bp, Homo sapiens
atacgtggtggtggccagaagctctttgccccatgcatgtgttctcccttaagcctccagaaagattcttgagtttggaagcacttaccccatctgcagttttactgttactcactcagc

SEQ ID NO: 32746 - DNA, 120 bp, Homo sapiens
cagcgttcttcccacttataactgaggggctctagttttaccacgctccctgaccagcttcaatttcaccccacctcaatttttgccaggcacttcttaagggagccaaacttcatttct

SEQ ID NO: 32747 - DNA, 120 bp, Homo sapiens
tcccgcctcccttgtttttctgtttgtttttgttgaagaggtctctcgtggtccatgagtgagtggatatttatttaccttccatgcctccacacttgtgtaccccacaccccaggggat

SEQ ID NO: 32748 - DNA, 120 bp, Homo sapiens
gagcggggaaaagcagggctttattgttgtgttacctgggagtctggagtttgaaaagtgctaattaaccttcctctttttccacattacaaacctttttaagcagcgcagcactcccct

SEQ ID NO: 32749 - DNA, 120 bp, Homo sapiens
atacgttatcatggtcaatgtaaacctggtttgtgtggggtgattataaatagagtttccctcctctctgtgacagaatcacaggagaaggacccatctcgtggccttcttgttcttagc

SEQ ID NO: 32750 - DNA, 120 bp, Homo sapiens
ctccgctcctcaccgcctgactgaactcccttctctctgcgcggcttcatgtccatcctgaccaatggcctggcctcacagaagaacaaaatgtggactggctttcctcagagtaagaaa

SEQ ID NO: 32751 - DNA, 120 bp, Homo sapiens
gtgcgttctgcaggaatgccgtaaccccaagggtgttccagtgaaggccctttctgttctgaaaatgtgccacagcagggtatggccactccataacagaagtggccattgtgaggtgag

SEQ ID NO: 32752 - DNA, 120 bp, Homo sapiens
tttcgggggcagaggggaattccactgctggaagagagggctagaggggcagggtgaactaggggccactgggccctggtgggttctaggggctgttgaagggtcagaagtccttctgtg

SEQ ID NO: 32753 - DNA, 120 bp, Homo sapiens
agccgacatcagcccatcagcccctctactctcctggccgcgctctgacaggacacagagacgtcctccagcaaccaggctagggaggaaagcacacacaggcgtgagtagctgggaggc

SEQ ID NO: 32754 - DNA, 120 bp, Homo sapiens
aggcggccagatgccaggcaggctaagacaaaggtgcggaagcccaagggagaggggaggagaggatggggctggggccttcctgtgggaggtgggctttggctaaggcctaagggagtg

SEQ ID NO: 32755 - DNA, 120 bp, Homo sapiens
ggtcgtgactggggaaggacgcctgtccaggcatggcaggggtgagaacagcttgagcacaggcagggaagagatactcaggagccattgcagcctcctggcaaaggcctgtttggcccc

SEQ ID NO: 32756 - DNA, 120 bp, Homo sapiens
ccccggcagaagtgaagctggtgggtagacaactttctgcattcaaataccacttcgatgtgaaatcggtgttgaacaaccctccgagggctcacatggttcctcgaacttgggtagctc

SEQ ID NO: 32757 - DNA, 120 bp, Homo sapiens
cttcggaagtcacagagcattgctcttcttcagtgaccaaacacacctcgtgtcctcagagtccttgagcccagtagccctggggtgcaggaatccctcccacagtgctcttgacaggag

SEQ ID NO: 32758 - DNA, 120 bp, Homo sapiens
gaacgagtgttgacccttcccaatggaatccacatgtattgagccctcctatgagcctaggggtctacacggcctgttcctccttatacggctgactggacaaggggtggatatggtcag

SEQ ID NO: 32759 - DNA, 120 bp, Homo sapiens
agtcgtggatgctcgagctcgggcggcttggggaggctccttgtgctgctgctgagcagaagtgagagagctctgagggctcagaggagtataatcccagcactttgggaggactgacac

SEQ ID NO: 32760 - DNA, 120 bp, Homo sapiens
tcccggtccctgagaggagcatgaagcttcactgagtatctgtgggactgcctggggcgctctcacagctagcttctctttgaaccaggctgagtgggtttctgatctccacaaccaaga

SEQ ID NO: 32761 - DNA, 120 bp, Homo sapiens
aagcgcacagccctcgggcctctcctaacctctgggctcaggggggaaaagccagcttatcacagaggttggagggtggagctggggttcttctgagggcagctggcagacctcccactt

SEQ ID NO: 32762 - DNA, 120 bp, Homo sapiens
cagcgttttccagccctttcctggcacctgctgctgctggccgcactttaactccctcaggcactgccaaattttccttggtgctccagagccaggcaggctcctccagaaagagagagc

SEQ ID NO: 32763 - DNA, 120 bp, Homo sapiens
ttccgtgccacgatgacatctttgtcactgttggcttccagactacaagcccttccagtgggaaaactcgcagcacagacaaaccttgctttacaccataatacatttctgaagagtcac

SEQ ID NO: 32764 - DNA, 120 bp, Homo sapiens
caacgtggacaccatcaaaatcctacatgcttgctatgaactttaaactttccagcaggtagtaggaaaagagaaattcagttgaacaaagagttgtgtatacactgaactttggaaaat

SEQ ID NO: 32765 - DNA, 120 bp, Homo sapiens
cagcgttgccacaaagcttcagtctgtaaaaaaatgcactctctgtgaagtacaacaaagcaaagtgcaataagatggggcatgcctgtatgtctttacttacaatagcatggaacagca

SEQ ID NO: 32766 - DNA, 120 bp, Homo sapiens
actcggcatggcacttttcccctgccttttgagcacgggccccacattgtcattttgcactgggccccgatgctcttgttggctctggttcttctcactgcagtgctaccttccttcttt

SEQ ID NO: 32767 - DNA, 120 bp, Homo sapiens
ctgcgttgaagtcatgtgtctgtgttggtctcaatacaagctgtgcaactccagggcagggcccctgccgtatctgtctttgcatccctgacacccacggcactcacacatcctgagtgt

SEQ ID NO: 32768 - DNA, 120 bp, Homo sapiens
gggcggccctgttgaccccaactcacgctgctcttcaatgtcattctcttcttcagagaccttggctttatagtaggtgatgccccggatgacagtgggctgggaggccggccggcctct

SEQ ID NO: 32769 - DNA, 120 bp, Homo sapiens
ggccgctgtgacttcaccacctcaggcagagccaggggtcgcgtctgcagaagttcgatggagttgatctgctgggacacggtttcttcctgcagaaaccgctcttcatactgctcctca

SEQ ID NO: 32770 - DNA, 120 bp, Homo sapiens
ttccgaagagccaggcactgttctaagtgctttatacatttacatatgttaactaatttaatcttctcatcagttctatgaggtaggacatatttttatcatgatcatttacagttcagg

SEQ ID NO: 32771 - DNA, 120 bp, Homo sapiens
tgtcgctatgcttgacgtatactgcccagagaatgcagtcctcctcttggatctggcctagggatgctgggtgacttagatctggtgtaagttgttttgggtgagatccatgtgagggga

SEQ ID NO: 32772 - DNA, 120 bp, Homo sapiens
caccgcctcaggatgaagcttgttacagcaatcaaaatgggcttcctaaaacacatatcacccccagcccccaaacccttcctcctacatacagaataaagtccaaagtaaaactgatct

SEQ ID NO: 32773 - DNA, 120 bp, Homo sapiens
ttgcgtgccctgcaccccacgccctaggcactccagtcacttggctgactactgaaactcttggctctcctgagccactggatctatgttcagcctgttttctctgcctggatagccatt

SEQ ID NO: 32774 - DNA, 120 bp, Homo sapiens
ttacgggagtgggcatgggactgaattctggccagtggggtataggaagaagttgatgggatgtgcatttggaaaagttctgcataaggggggctgattcagcttggaggcatcttttgc

SEQ ID NO: 32775 - DNA, 120 bp, Homo sapiens
taacgacatcttggagctgatcatgccagccctggactgcctgcctccagagcttgttttacgtgaaagaacaacaaacatttctattgtttaaggcactgtatttgggtctcttaccca

SEQ ID NO: 32776 - DNA, 120 bp, Homo sapiens
gcacgcactgactcctcagccaggtcgataggcttctctgaggagcggactgaggagtgtccacacctgcggcccagctctggccctaggactctactaaaggtggtgacacctctgggt

SEQ ID NO: 32777 - DNA, 120 bp, Homo sapiens
tgacggaagatctcactagattcctaaacactgtgcatcagtgggtgtggcacactcactgtgaggcaaagggtgcccccccaaccccggtcttagggtttctagggccctagggagtcc

SEQ ID NO: 32778 - DNA, 120 bp, Homo sapiens
ccacgctgcaagggaagagggggtgcaggatcagaagccctcagccaacccatggggctgcctaagtggggcctgagcttccctaccctaaggaccattataggatcacagtttgatgac

SEQ ID NO: 32779 - DNA, 120 bp, Homo sapiens
ccccggcctctccttccctaggccaacccagcccttgtgctaagggccaaagccttactcgcatttttcttttgcctctttggggtgtgtgctaggctgatagtaaattgtggcagcaat

SEQ ID NO: 32780 - DNA, 120 bp, Homo sapiens
gaacgctgagttcttttggccagctgggcctggcagctgctcccaggcccagcctctctggctccataaggaggggtaggcacactttgctttaagcatctcccttatacaccagagctg

SEQ ID NO: 32781 - DNA, 120 bp, Homo sapiens
tctcgtccaaggcattgccccataccaggtcctaccttcaagtcctggctgtctgcctcccgcagcttctggagcctgaagtctccctcgcagggattgagggccgatgggggtgctaca

SEQ ID NO: 32782 - DNA, 120 bp, Homo sapiens
gcacgacgagcctgaggtgatggtttccacggtatagaagtcttccttcctggaggcccccgcattgatcctctggcaggcatcccggcccaggggtctcaccacacacttgcactgaca

SEQ ID NO: 32783 - DNA, 120 bp, Homo sapiens
gtccgagccctcagacatagccttgaccttgtcatagtcccccagcaactagacacacagaaaacgggttaggggcatgcaaacacaggtgtcagtcagcctccagaaggaggctctcca

SEQ ID NO: 32784 - DNA, 120 bp, Homo sapiens
cttcgtttgtcttggaaagctgtgcctttctcatggggccttagcctttcattatttaaaggaaaaaccagatgagccaagtcatttgtccaatagcctttgccttctgctacaatccag

SEQ ID NO: 32785 - DNA, 120 bp, Homo sapiens
ccccgaagaggcagagggaaagggcagtgggagctaagagcggctccaactggaagccagggaagacttcttcgaggagtggcatttaatctgggccttgaaggatgggttagatgtgga

SEQ ID NO: 32786 - DNA, 120 bp, Homo sapiens
acacgcgacagtaggctttctggagccccaactctgggcgcttgctgggaaaaggctcttctctcccaatcctctccaaaaggccctacatccccaaagccagggctcccttcctaggca

SEQ ID NO: 32787 - DNA, 120 bp, Homo sapiens
aagcggctgttctttacgggctgatagtaaattgtggctgtctgctctctgaaactctgcctggattcctacataaccctgctctgagaaccctgggtggattccttccttacaggaggc

SEQ ID NO: 32788 - DNA, 120 bp, Homo sapiens
gctcgggtttcaggaaagtttttgttgatagtgttccagagccccagtgtgagagatttttatgtcttttcgatttaggggtcagtgggaggtaatgggggggcagagggcatacattag

SEQ ID NO: 32789 - DNA, 120 bp, Homo sapiens
acacgtcatcatgccggctctggagagcacaaaataaacactccagagagaactaccccttacagacatgagatctgggctgaagactgtcagacgccctggctctacccatgtatctct

SEQ ID NO: 32790 - DNA, 120 bp, Homo sapiens
aggcgtgagccaccgcgcccggcctacccatgtatctcttatggtctttatctataaatgggtattagggtgttttgaagattgagtcagaaaaaacaagtttaagtacttggtaaacgg

SEQ ID NO: 32791 - DNA, 120 bp, Homo sapiens
ttacgaagcccatcactatcatgggttactcgggcccccactgacagtctgccctagctgcctgcatctgcattcccactctcccctcccagtacactccgtcatgttctcagtctctct

SEQ ID NO: 32792 - DNA, 120 bp, Homo sapiens
aaccgttttggtgtatgactgttcaggcagtcatgggtgttggtgcctagtccacatgtcttcatcatgtctacaagcatttcttgagagacttttatcactgtctttcagaaatcaaga

SEQ ID NO: 32793 - DNA, 120 bp, Homo sapiens
aaccggcataaaattcacataaaaatccctgcatcttttgctcagagcctatgaattccacgtcactggatcctcgcatcatggtgtaaaataagtcttgccctccctggttaacagatg

SEQ ID NO: 32794 - DNA, 120 bp, Homo sapiens
tggcgactctgtactgagtgcttcccatgtgccaggcatcatttgacggtcagaaatcccctgagtcagtatcatttcctcttacaaatgaggaaacaggtttagagacggacagactgt

SEQ ID NO: 32795 - DNA, 120 bp, Homo sapiens
agccgtaagtgtgccacttcatctatcttagaccctggacctcaccagttgtggctggctagcaggttgttgaattctggggatccctcagcaaccacaaccaccatccctcacgagcca

SEQ ID NO: 32796 - DNA, 120 bp, Homo sapiens
tcccgtttacctaggagcctcctgactttgctctgaaatgtctgtctgttgaaaattaaggcttcatttgccaggtggggccaaggtggctagaaatggcctgccacctttgtgtgtaat

SEQ ID NO: 32797 - DNA, 120 bp, Homo sapiens
ccacggcagcagaatcaaagagcaaggcaaagtcccacgagcaacatcattctgccatctcctttccctggctcgctgcagagtgggagctgtgccagggaactgccataaaaatgctgg

SEQ ID NO: 32798 - DNA, 120 bp, Homo sapiens
cagcgttgagtattgaataagacctgggaatccctaccaaggggcctgcccttgggagtaagggggtgaccaagaagggagcactcccctaatcccacagcaccctgtaacattctgaat

SEQ ID NO: 32799 - DNA, 120 bp, Homo sapiens
aagcgcttactgtgttccaggcactgtgccaagctctttctatgaaacgattaatttaattctcccaacaaccatgctagttaaggtattatcattatttgtatcttatagatggagaag

SEQ ID NO: 32800 - DNA, 120 bp, Homo sapiens
gtccgggacccaggtctgctgttctgtgccattgggcaacgggtcacctgtaaagacttttctggaccatgttgatgttgtccagataaagaaatgaggcatcagtgagtaggtggaaat

SEQ ID NO: 32801 - DNA, 120 bp, Homo sapiens
gggcgaggagtactgcctttgaccgtggaggagagcttgttgacttgtgatgggactcatttctgagaaacaagctctgtcccagaggaatgacatatttctttcagaccatgggctctg

SEQ ID NO: 32802 - DNA, 120 bp, Homo sapiens
tggcgtcttaaacggcatcaagtagaagcaacatcaacagtgtggccttattaccaaaaaagttgctgcagtcagaggctttcctgaaggatgacatacagagaggtcaatgcctgccaa

SEQ ID NO: 32803 - DNA, 120 bp, Homo sapiens
catcgagaagctgctctgcccctggtcaggaatattgcagaaatgagtcaagccgggttagtgttggaagaagagttggactagctcatctctgtgggctttccaacctgcagtcctcag

SEQ ID NO: 32804 - DNA, 120 bp, Homo sapiens
taccgctcaggccagtgctccttcgtgctccgactcttctcactgttctgcagcctgtggtcactgagttgctctgggatccctattatttttattggtaccttatttaatgcagctcta

SEQ ID NO: 32805 - DNA, 120 bp, Homo sapiens
ggacgtccacacctcaagcctgcagaagtgtgtctggcggcccagtggggtcctggcagccccacagtggaatgtgttgtcgggcaaaggctgctgatgagggcacctcctctaatgagt

SEQ ID NO: 32806 - DNA, 120 bp, Homo sapiens
ctgcggattacaatttgacatatttgggagaggacacaaatccaaaccatctcctcctcttacctgtccatccttcacctcttaggaaggagggcagccacagtagagcacttgcctcta

SEQ ID NO: 32807 - DNA, 120 bp, Homo sapiens
cctcggacttgctcatgaagattctgagatcctcgtcaacttggtacttgatctctgaatttccgttctaccctcagtcctcttgggccttggttttagtggaggtaggagctgagagtt

SEQ ID NO: 32808 - DNA, 120 bp, Homo sapiens
cttcgtttgcttctttgactttgtctttgatggacccccctgtcacagattaggagacaaagcacgatttgcatttgcactcagcctcctgcaaaaatgccatttctcaacattttcttt

SEQ ID NO: 32809 - DNA, 120 bp, Homo sapiens
agccgtttgtctgtccctctgcacttctgcagcactattgatttgccgtttgcttgcactttaactggatctggattggcgtgtgcctctggaaggttttccatctattgatcagagtta

SEQ ID NO: 32810 - DNA, 120 bp, Homo sapiens
tctcgaggaaggggaagggacactgcacctagggcagttagccagagcaggggttcacacagggccagggattcctgggatgtgggactttcactgctaaaaccagggcagtgccaggca

SEQ ID NO: 32811 - DNA, 120 bp, Homo sapiens
ctccgccctagtgtctacctcttagcccatcccgggttttgacctcattccctccttagttgttattttcttgggatatcccagaactccagggatgaggtggttgaagaccacaaggct

SEQ ID NO: 32812 - DNA, 120 bp, Homo sapiens
ttacgagaggaggagaaagggagatgaggccactggtgcagtggaataaccctttgtaggaagaacagggatttctgtcagggatgtttgtttagctctgtggtatgtaatttgaatctt

SEQ ID NO: 32813 - DNA, 120 bp, Homo sapiens
tgtcgggctccatgcaaagcacttaacaagatttgttactttatccttataacaactctgtgtggtgtaggtgtaataattatcccattgtccagatgaggaaactgaggtaccaagagg

SEQ ID NO: 32814 - DNA, 120 bp, Homo sapiens
gctcgcagaggtggtaagtggggaatctaggattcacttctaagcttgaacgtggtatggttgtggtatggaaccaaggcaagactccagtctgcttacatctgactcagagatcctaca

SEQ ID NO: 32815 - DNA, 120 bp, Homo sapiens
tgccgactgtccctgtttaaccaaatgtcagtccaggcagcattgtctgtgtccctgattgtgcctttctctagtctgggaacactgccaggcagtgtatgtcactagatgtaaataagg

SEQ ID NO: 32816 - DNA, 120 bp, Homo sapiens
aatcgtgtctctccctattccttcctaccagtgcagccccagactgttgtgtttcatagacagctgccgcagtgccctccagactgccaccatgcctttggctgtgccctcccaccatcc

SEQ ID NO: 32817 - DNA, 120 bp, Homo sapiens
gtccgctgtgccttgtgccctgagtatgtcctgttgaggccacttctattcctcctcttccttctacctgggaagcactcccttcccattgcggctgaagcctgtctcttcaaacctcag

SEQ ID NO: 32818 - DNA, 120 bp, Homo sapiens
tcacgtccttagcaccgtgcctggcccatagtatatacccagtggacacctgtacctcctctccacatccctgttgcatggtgactgggcccagaaggcagctagaattggcaactcaag

SEQ ID NO: 32819 - DNA, 120 bp, Homo sapiens
cctcgcctactaatgcgggtgccctgtggctgaatctggtgaatccatcaggtccaggttgaaaactactgagcagagccctgctgcctctgggtattctgttcaccacccagccctttt

SEQ ID NO: 32820 - DNA, 120 bp, Homo sapiens
aaccgcacgaaggtttatggtggaaatgacaaattgcttcttcacaacgagctcaccctgctttctaaccagttggaatcacccttgttcatgtaatattagcaatttacctgtctcctt

SEQ ID NO: 32821 - DNA, 120 bp, Homo sapiens
cagcggagagagctgggctctggaccggggagtccccggtttgactccttgcttggtcaggacttcctcaacataatcgcctggccctggtgccagggtggttgtggggctgagggaggt

SEQ ID NO: 32822 - DNA, 120 bp, Homo sapiens
tcccgagccgctaagacatagtcctcattcatattgggtgttgttgacaatcatcccatcctctgctgcttcattttgtgacttgtggacccaagtgggtctttgtttatcctgatccag

SEQ ID NO: 32823 - DNA, 120 bp, Homo sapiens
ctccgggcatatgttacttgttaatattttaaaatttgacttgttgcagtttttcagaggtattaatctaaaagccatttcatggaaaaaagcaacaaggaactggttttatttctttta

SEQ ID NO: 32824 - DNA, 120 bp, Homo sapiens
aggcgctgttctaagcgttttgcctgtagcaactcactgaatcctcataattactttatgaagaggagattcagtaacctggtcacataggcaatgaatggccaggattcgggctctaaa

SEQ ID NO: 32825 - DNA, 120 bp, Homo sapiens
ccacgacgatccctctctagggctgatggagatcatcactaaatcacctcctttgggattctctgctcgttggaaatggagtgttacctgcagagtactgctgtgacctctcctttaggc

SEQ ID NO: 32826 - DNA, 120 bp, Homo sapiens
atacgaacttccaaacgaacctgtttctctttggtcctcagccaggctttgtgacatcagctgctacagctgtggaaacagttgataaacagggtcaggctgctcagagggagaatgtgg

SEQ ID NO: 32827 - DNA, 120 bp, Homo sapiens
ccacgcgcaattgatgcacaagctgtcattgtgctgaggcttgtgggcaggggggtgtgtttctctttccttctccccttttcttcctctctttcccttgctctctttctttcttcctcc

SEQ ID NO: 32828 - DNA, 120 bp, Homo sapiens
tttcgataatatagtaagtcactgctccttattaaataagaggcctaaggggctgaggtggtgagggattgaagtgaagtctggcttggttcaggcctgaatacccaaaccaggccagct

SEQ ID NO: 32829 - DNA, 120 bp, Homo sapiens
ttccgtctccctcagagagccatgctgggaaatcttctaagcattggactttgaggttaaaataaagagtcttgcacccttggcggggatttctgaaagattgatgggattctaactgcc

SEQ ID NO: 32830 - DNA, 120 bp, Homo sapiens
aaacggctgagtagaagatgttggagatagttcatggaaatgtaggtcagtgacaatgaggggctcaggcaaattcttgagctggatcagaagcagagtgaccttgcaattgtagtcatg

SEQ ID NO: 32831 - DNA, 120 bp, Homo sapiens
aatcgttttgtaaattatctgtggcctgctggaaagctactcagtattctgttccacaaacttctgcttaatgagataattcttctctatatttctgttgctggaattgggctcacacac

SEQ ID NO: 32832 - DNA, 120 bp, Homo sapiens
actcgactctggcaaatgttgaaagtgcctaaattttttcaacattagcacaagagggcaatctggctggcttctgtcgaatctttggaaaaagtgacagaggtgctttgaatgtgggct

SEQ ID NO: 32833 - DNA, 120 bp, Homo sapiens
ttgcgaacactcaggatgttgaaggatagttacaatagttacagatttttcttaactgtactgaaaagatgactctcaggctgcaagaaacactgaaatgccttaaggagtgatgctgtg

SEQ ID NO: 32834 - DNA, 120 bp, Homo sapiens
ccccgaagtgacaggttgtctcttctgaattatcttaaggcagatttcagggctcttccaggctgaagtggaggtaagctgaggtgaagggagataagattctggggcattttgtcctgg

SEQ ID NO: 32835 - DNA, 120 bp, Homo sapiens
tttcgccttgaccatttactgaatgtttgtctatcttgctgaatagcagccaagagactctaacttctcttggtttccatctgtatttagttggattgtctgttcccttctcttctgaca

SEQ ID NO: 32836 - DNA, 120 bp, Homo sapiens
tcccgtctcacaggctctgcagagatccagggctgtcacttcaacaagtgtcagatatacacactctgcttgcagagctccccatgcatagccttaaataaatatcccagatatatctgc

SEQ ID NO: 32837 - DNA, 120 bp, Homo sapiens
tttcgtctccatctggttttcaaacatgatttcccaacttcccaattaccatctcgcaagacccctatatgtcccctctcttctcttcatctctctgataaaataaggaaccaaaacagc

SEQ ID NO: 32838 - DNA, 120 bp, Homo sapiens
ctgcgatgagtttgcaagactgctctgcccagtcttgtttgcagagagcctggttggtccatctctgtaggttgtgagtttgcgctggtttgggaacccctctctctggctgaggaaagt

SEQ ID NO: 32839 - DNA, 120 bp, Homo sapiens
gggcgccagcaaaaccggacggaggggtgtatgctgctgggtctcccatatcccattggccaggaagttgcctgctgtgccatagaagtaagaacaaaagcactagaaccaggaagagaa

SEQ ID NO: 32840 - DNA, 120 bp, Homo sapiens
aatcgatggccatggaaccagcaaggtcaaatggatcctttaaagaaagacctctgtagcattgtgaactcactggcaaaatctagtctcacaaacaagagaaacgttggtgagggcagg

SEQ ID NO: 32841 - DNA, 120 bp, Homo sapiens
atgcggggcccaccctcttgacgtcatctaaacccagtttcctcctgaagttcccacctccttgaagctgggacatcaacatgaattctagaggtacactaacatttatcccacaacaac

SEQ ID NO: 32842 - DNA, 120 bp, Homo sapiens
tctcgtgtgtggagaacaggatgggaatcctgctgcatgtattccagaagaatggctggctgaagctggggatgctgccaaacacatagatttcctgtgtccatggaggtgctgggctga

SEQ ID NO: 32843 - DNA, 120 bp, Homo sapiens
acacgaaaagatgaattgatagagatgacgcgaggaagaactgaatacactagatgttccccttcttgaactggtgatcgcctgatgatttcatcagctgccaccctgcaggccttttct

SEQ ID NO: 32844 - DNA, 120 bp, Homo sapiens
gctcgttatttatcttgtccttttgtctgagtcccatatatgtgagcctgtgtggattcagtcagaaggcagaggtgttcagaaaccaacaaagtagttggttcagtgttgctatgggca

SEQ ID NO: 32845 - DNA, 120 bp, Homo sapiens
agccgtttagttacttggtagtgaaagaaaggagagccatgttatgatgaattacaacttaatagtgagatcaaataaatatgtatttaaaaagaggagctagtaatgcctttataaagg

SEQ ID NO: 32846 - DNA, 120 bp, Homo sapiens
ccacgctccaactcaaatcccggaatgcattcccttttctccattcccgttagactctggaaggggtcaaaggcacaaagggtcataaaaaaaatcagggaatgaggtataccccgttct

SEQ ID NO: 32847 - DNA, 120 bp, Homo sapiens
cctcgcattgcctaaggtttttgagcagcctttgctaaactgaggaaactgatcatcagggatgtggaggcagcacagcctatagatctctttctaacttctcatatcatttctgggcca

SEQ ID NO: 32848 - DNA, 120 bp, Homo sapiens
tggcggatatgagtgtccatcactctagtcatgagtcatgtttcatgtagagttgatgtttttatttcctccggcttcaaaacctttcattgatagttccttttcatacatatgcatgag

SEQ ID NO: 32849 - DNA, 120 bp, Homo sapiens
ttacgcatggagaatcttatgaactaagaaggggaaggaaataccattcatgctgcctagcttctgttagttcccagggctacttagcaatcccttattcatcctggtagatgataatac

SEQ ID NO: 32850 - DNA, 120 bp, Homo sapiens
gttcgctgactctctctctctcttctggacccatcttcgcttgtttcttcagcatcttgagctgtgaactatgctctgtctctctgtcttcctggataccctctttctccctacaaatat

SEQ ID NO: 32851 - DNA, 120 bp, Homo sapiens
ccccggtacctgtgaatgtggatgttatttgaatatagggagtttgcagatgtaattaaggtgaggtcatattagattagggtggaccctaaatccaatgaccagggtccttacaagaag

SEQ ID NO: 32852 - DNA, 120 bp, Homo sapiens
tgccgtgggaaggcagcgggagcagactagagtgacgctgctgcaaacccaagaatgccaaggattgttggcagcagccagaagctaggagagatgtggaatagattctccctgagagcc

SEQ ID NO: 32853 - DNA, 120 bp, Homo sapiens
atccgacttgtaataattgttacagcagccctaagaaattaatacagatactactggctgtgtgaccttaagaaaatgcacaggggttacctctctgtttcttcatctgtaaaatggaga

SEQ ID NO: 32854 - DNA, 120 bp, Homo sapiens
atgcggcagaccctatatgtaagttatttcatttgattcttgtaacagtcctgtgaacctcttcttatcccattttgcagttaagaaaactaaggctcagagtattaacttgttttgaga

SEQ ID NO: 32855 - DNA, 120 bp, Homo sapiens
agacgagctgcaacctcgactgagcctttggctctgttctgtcaggtcttctattccacaaaattacaggcatctcagtgtatactggggagtggacaaggaagggtgcgaacctttgtt

SEQ ID NO: 32856 - DNA, 120 bp, Homo sapiens
aaacgaaaaaagagaagaggaagaggtaattttctagatgatgctcctccagcatacaccagtcaaactagtgcccctaatatttgtggtgtgttcattttctctcttttttctggctct

SEQ ID NO: 32857 - DNA, 120 bp, Homo sapiens
gtccgagggtcctgaaaagtgtgggatggatggtttaagccccccaaatgtgaacaagctacatgtatgaactcagataacacagacacacagaagaaataaattggcagcctgtgtaaa

SEQ ID NO: 32858 - DNA, 120 bp, Homo sapiens
tctcgctaggtcttaaaacctcaattggttgcttattcgttactctaggcacacagtagatctttgtaacaataagttagacatttgtataattttattcattgaagaaaccttaggaat

SEQ ID NO: 32859 - DNA, 120 bp, Homo sapiens
tctcgaggtctctcccagccctggaatcccaggcttccttccagactgtgctgcgatgaagcagatctgtgatatacatcccagtcatggtgacaaggggcgacttgacagtgtggcccc

SEQ ID NO: 32860 - DNA, 120 bp, Homo sapiens
aatcgagaatggctaaaatgaggaatgaagaagatggaaattacaataacttcaaataaaagcaagccagctgatgtgattaaaaagccctgtatatacagtggggggaaaatgataatc

SEQ ID NO: 32861 - DNA, 120 bp, Homo sapiens
ctgcgacaggagtgtgaaactgtgttcatgctgcagggctggttgagaagagaaaaagacacaccagtaggcaggcagcatgctggggataggagtaaggggtgcattcttcctatagtg

SEQ ID NO: 32862 - DNA, 120 bp, Homo sapiens
aaccgaagttcaaaaccaagaggaaaaaggaaggtattcctcactaccatgtgtccaggcctgaatcactggcttctgggttcctgaaaaatatgattgcaaaatagtgattggtcatct

SEQ ID NO: 32863 - DNA, 120 bp, Homo sapiens
acgccctctggttattgtgtagtgccgaggccatgaagctaaaccatactttgagtctgagcatttggaattagcatttggttctgggattggaaatgttttcttatcaaggaaggctgt

SEQ ID NO: 32864 - DNA, 120 bp, Homo sapiens
acacgttttcactgtctataaactgctaggaatgtgtttcttcttactgtaaatgcttctcccagagcatttttgactctactaagattgttgcctaatggcacaccttgagcgcccaga

SEQ ID NO: 32865 - DNA, 120 bp, Homo sapiens
ttacgagaatctcaccttcatgtttgggagcttttcatttagtgcaatgtttatctttccagtggagctgccccacctgacacgtcagcaggccctccgttgtgcagaaaaaacatgttt

SEQ ID NO: 32866 - DNA, 120 bp, Homo sapiens
aaacgccctgtctttagggagaagacactaaccacgagcacctggcaggcgggatgggcacgtgccatggcacctgggctcagtccctggcctgcttgttttccttctcgtgatatgttc

SEQ ID NO: 32867 - DNA, 120 bp, Homo sapiens
gctcggagtgaggattaaaaagattgcccagagccactcatctgccctttcagggcacagggtcctgggagtgatgtcagggctgcctggagacctctgcacactggactggataggttg

SEQ ID NO: 32868 - DNA, 120 bp, Homo sapiens
gctcgagggcacagggccgcagtggtctcacagcacatgatgcgatggggatcgagcccagcctccctcccactctgtggggaacgaccacaaatgaggttttagcagcacactgataag

SEQ ID NO: 32869 - DNA, 120 bp, Homo sapiens
gggcgggggtttgtgccagggtccctgcaaggcagtgcccactgcagtggaggggctactgagtcatcagggtgataaagcaagaggtaaatgaggcctgaaaggatgaccagcaagcat

SEQ ID NO: 32870 - DNA, 120 bp, Homo sapiens
agacgtctcctgggtcaaaactgattctattctgccccagcactggatggctgttctaagtgaatgatggtagtgcctgagagctcagtcccgggtgagctcagccccatctgcctctta

SEQ ID NO: 32871 - DNA, 120 bp, Homo sapiens
taccgtcaaagaagcctttaaaactgcagagattcttccccatgcaaataggaaagggcatccagccccttcttcccagggtggggcaaggactgaccacatagggaccaagcagaggcc

SEQ ID NO: 32872 - DNA, 120 bp, Homo sapiens
gaccgccagccccagacccatagtttctgattcagtaggtctgaggagggcctgagagttcccaggggttgctggtactgccagctgggcacctttgagaacctctatcttagatgattt

SEQ ID NO: 32873 - DNA, 120 bp, Homo sapiens
ccccgggcttcagtcgctcagttcgccgccctgctttgggacattcagcctggagcctcccactgtggcctctctgttagtgggaacaagtaattaagtccatatagcccttgtagagag

SEQ ID NO: 32874 - DNA, 120 bp, Homo sapiens
tttcgtctctcccaaggaaatctactctggaagctttaagttgtccagtgaaagcatcttcaagtacatctcccctccaggacgccccctccctgctactgtttgcactgggggcacagg

SEQ ID NO: 32875 - DNA, 120 bp, Homo sapiens
aaacgaatcacttggctattaacaacacagacgaggaagcaagcttgaggaaatatttaaggaccacctcagactccagactgtattctccttcgtgcaagttgcctgaggagtctgttg

SEQ ID NO: 32876 - DNA, 120 bp, Homo sapiens
ttccgacaaaccgcaacattttttttttactgtttaaccagccagctgtttccagtgccatctgcttagctacctatttcctgaatcatcgctccatgtctgccgccacctgctttctag

SEQ ID NO: 32877 - DNA, 120 bp, Homo sapiens
ttgcgtttattgggaaattcttgttggcttggtctgatgttcaagcacatcccagtgttcagcccacttcgggggctcactcacagcaacttagaacaattccctgtggttgtcacagga

SEQ ID NO: 32878 - DNA, 120 bp, Homo sapiens
gaacggtttgcagcttcagcaagatgcatgccccccactttatcctgagcctgcaatggatggatcccccttgctggataggaaagctcaagacaagcggggactgcccctgttgttttg

SEQ ID NO: 32879 - DNA, 120 bp, Homo sapiens
tcccggagaggctgtgtaagccatctaggaagcgatttcacgtgtaagaaagctagagggggaggtgggggtggcagtcttgtccatgcctctccctaccccacccccttaatcatcagt

SEQ ID NO: 32880 - DNA, 120 bp, Homo sapiens
catcgactgtgtaggtggcacatgctgtgacctggccaggaggcttgctaagacgcatgtgggggaggtgtcaggtgggttctccgcactctggattatttgtggccggcctgcctgcct

SEQ ID NO: 32881 - DNA, 120 bp, Homo sapiens
tggcggcgactgccactgctgcctctgtgctgtacttccctcagagccccagcctgctccgaattgcttccatgcctgtgtttaagatggtccatctgcccgggtcacgtttctaccttc

SEQ ID NO: 32882 - DNA, 120 bp, Homo sapiens
tcccgtccctttcctctgacttcactaggctatgttaattcatctttcacatttccactcaggcatcccttcctccaggtggcttcccggacaccaccccaccccttctctgcgttcccg

SEQ ID NO: 32883 - DNA, 120 bp, Homo sapiens
ctccgtgtccttttctgtaacagctgtgaggcacagatgttaacggctgctttctgaccctcagactggtgctgagcttatgagacttttagggacttaacactgactcaacactagctc

SEQ ID NO: 32884 - DNA, 120 bp, Homo sapiens
gtgcgcttttccattccccttatgaaacatctcctgcccctaacttactatgggaacgttcctccatgatctctttccatcctccctttcctgtttgctcacttcttttcttgctcatct

SEQ ID NO: 32885 - DNA, 120 bp, Homo sapiens
gctcggtcttcttgacctgccttttgccatctacctctctctttggatctcctgcccctgggtccctgcttgccctgcattctccatactcacggagaatcaggacctccagaacagccc

SEQ ID NO: 32886 - DNA, 120 bp, Homo sapiens
cagcgtgggcttggtcaggaatgatccaggctctgaagggttaaggctggagcctggatggatggagagggttattagttatcgtttggagagtggagtgaaggctcctcccctgttgcc

SEQ ID NO: 32887 - DNA, 120 bp, Homo sapiens
acccgcccctttcacatgatctctgactatagctgtggaagcggggagaagataaaggagggaaaaaaaagttcacaaaataatttagaaagtccttataaatgcttgtgttttcattta

SEQ ID NO: 32888 - DNA, 120 bp, Homo sapiens
agccgtggtgggaagggattaaatcaaatctttcgggggagagctcagctctaggctttcatggtcaaaatactaaaggtcagctccgcgtgtgtgccccaactgtcctggaagcttcaa

SEQ ID NO: 32889 - DNA, 120 bp, Homo sapiens
aggcggcgggggggtggggatcacaggaaggggatcaagtcttagatggaggggaaggaagtggagatggatatgggtgggaataaggcagaagggagcggtgtctttaagtctgtccta

SEQ ID NO: 32890 - DNA, 120 bp, Homo sapiens
acccggggggtcgccggaggtgggtgaatgtgtgggggagccaacaccccagttcaaaggaaaggcaggaaacagccctaggcaaaagaaaaaggaaacctctcggctctggcagcagcg

SEQ ID NO: 32891 - DNA, 120 bp, Homo sapiens
ggacggggagttaggatggcagagtctcatcttctggagccccatcagatcacccttccttccctcccaccctcctcctttactaacaaagcccgtcccactgactttcagggaaacagg

SEQ ID NO: 32892 - DNA, 120 bp, Homo sapiens
ggccgggatggtggaggaagtgatccttctcccaggggatgcccggaggagctggggctaagcctgccgcctggtgggagactctccaaagaggaagaatctgggcttctaggttagcac

SEQ ID NO: 32893 - DNA, 120 bp, Homo sapiens
ggccgtgaggatcctcctctgagctcattcttaatgggctatgtgaccttaggctagtgagtcactattgggagcagggccaagatcaaggagcctgctggggcttcagacaccttggga

SEQ ID NO: 32894 - DNA, 120 bp, Homo sapiens
tggcggagaaaatgccaatctcccttccccatgttggaaatggcaacttcttttagccaaaccgaaatgaactcactgacctgggggcttctgagaatcgtggggtcccctttgtactaa

SEQ ID NO: 32895 - DNA, 120 bp, Homo sapiens
tcccgcccttcagacatgggagaacaggtcccaggaggagaaaaacacccgagaggccaaacttgggcagtgagcagagagttattttggaatcagcaaaaggacatggtggggggagag

SEQ ID NO: 32896 - DNA, 120 bp, Homo sapiens
ccccggagccatgccagagcaggccatgggcaggccggcggctggcgggttggaggggagctgggcccggctacttaaggcacctccagaactgaagtttcctttgtgtcccatccccag

SEQ ID NO: 32897 - DNA, 120 bp, Homo sapiens
ccccgcttctctgctacaatcttttgtctcctccagaaaccatcaggggatgcctatgctctgtgtcttcaattctccccatccctgggagatcagggccctctctgattaactgtgaga

SEQ ID NO: 32898 - DNA, 120 bp, Homo sapiens
ttgcgcccagctctctgcctctcctgtctgctccagcacggtgaggataccttcctggttgatattttcattccctgaactgtgatcttcttccagaaagacactagctcatcaggaacg

SEQ ID NO: 32899 - DNA, 120 bp, Homo sapiens
cagcgtttattgaatgattggcatgtggcaggaagtgcgctcaagcactttatctgcatcatctcacataaaccccatgagagaggtgctagtgttatccccacttaccaatgaggaaac

SEQ ID NO: 32900 - DNA, 120 bp, Homo sapiens
gatcgtgtggcctcactttgtgactgaacctgcagagatcagagtcaaaaggccaaagggattagtctgaggaagccctgtgacacttaagtcccagtcccagcacttgtcactcaggct

SEQ ID NO: 32901 - DNA, 120 bp, Homo sapiens
tgccgcttcgtcacctagcatagtgcctgatgtatactaggtgctcaataaatgttgaatagacaaatggctgcatgactaaatgaatggttgaaagttggaggcttcttgcaggaggag

SEQ ID NO: 32902 - DNA, 120 bp, Homo sapiens
aatcgcagaagccagtaagtggcagagctggaaatcaaacacaagtcagtctgacaacagaggctgtaccattgctgcccaatagaatgccctgcgatgatggatgtgttctagaactgt

SEQ ID NO: 32903 - DNA, 120 bp, Homo sapiens
aagcggctagtggccactgcgctggacagtgtaggtcttgcgttgtctctcagagaggtagtagagagcagagggggcccagaagcagtcccccatattttcattcctctccagaggctc

SEQ ID NO: 32904 - DNA, 120 bp, Homo sapiens
ctccggctgggcctgggaggcctgggtccctttaacttctctgcctgtgggtggcatggcttggcaaggaggaaggagccattgaaggagaagcacacacacacattatgcaatcccagt

SEQ ID NO: 32905 - DNA, 120 bp, Homo sapiens
ccacgctttgctcttgagaagcttctcctggctctgggcacaggcaggggaacacctccccaggctctctgagagccacaactaattgcatgggggcaggagtgaccttttgcacctgac

SEQ ID NO: 32906 - DNA, 120 bp, Homo sapiens
tgccggggagagctagagatgtcccctcagcctgcgatgggcctaagtccctcccaggaggattcccctgcagtgctgagggtggggaccggccccagaactgtctccatctcctcactc

SEQ ID NO: 32907 - DNA, 120 bp, Homo sapiens
atacgatttaacctgaagttggttcctgtggtggtgccaaaccatgatttcccaaatctagcatttttgagagagaggaacctctcctgggtctcgtccctccctgacctttctctgcca

SEQ ID NO: 32908 - DNA, 120 bp, Homo sapiens
catcgatgaaacaccacgatgcagtggacagtctctgacttctgacttccatggtcttttaactcagggcaaacaaaacaaaacaaaaaacaaaaaaccccacctttttgtttctctccc

SEQ ID NO: 32909 - DNA, 120 bp, Homo sapiens
cttcgggcgacactgtgggtgcccagcatctccctggctcagtctgacctgcacaaggtttgcctttgcttagcaactgccagggactctctctcccctcacaaataaccccccactcca

SEQ ID NO: 32910 - DNA, 120 bp, Homo sapiens
tcacgcaggactctgtgcaaagccagagagaacaggttgtgctcttatgtgtgtgtgaagatagacacactttttcctgatggaagtacactcccttgtttggatatttgtgaaaattgc

SEQ ID NO: 32911 - DNA, 120 bp, Homo sapiens
aagcgcctgctattcagggggtgtttggaaatgcatggggtgtttttcttcatttaaaattttcttttaagagagaaagtctcagtctgttgtccagcctggagtgtagtggtactaccc

SEQ ID NO: 32912 - DNA, 120 bp, Homo sapiens
caccgggtctggctagtttttaattttgtatagggatgaggtctcgcaatgttgtccaggctcatggggtgtttttgatggtcacaataatagggagatgctccaaacacttatgagcaa

SEQ ID NO: 32913 - DNA, 120 bp, Homo sapiens
cagcgagtgggacagtcccgcccagtaaagaactgctcatccacaatgccaacggagcccccacaagtaacatgaggtgctctctggtgctttcctctctgaactcagttctgtgggttg

SEQ ID NO: 32914 - DNA, 120 bp, Homo sapiens
tcacgtctcatccatgccccaactcattctgcccgggaagccttctctgctgaccctctctcctgagtgtctgttgtactctccagtctgggcacatggtctagaacctaattgggaggg

SEQ ID NO: 32915 - DNA, 120 bp, Homo sapiens
aagcggagtacatatatggaggtttgccgtccctttgtgagtaaaaagtccttccccagcaacattgtcaactccttgatggcccagaccttgtcctgggctttgtctccatctcacaca

SEQ ID NO: 32916 - DNA, 120 bp, Homo sapiens
ggccgggaacttagcattcgtctaatggaaccaggtcctctgattccagattctgtgttctttcctctctaccccatcacctgcttctcttgttgacagaaaaattcagcaagtgttctc

SEQ ID NO: 32917 - DNA, 120 bp, Homo sapiens
ctccgtggcggccagcctgtttcctggcttttttcagtgggagagaaccccacctttggactctcaacagtggcctgtcctgctccttgccaaaccacgagctgtctcctgccatggcag

SEQ ID NO: 32918 - DNA, 120 bp, Homo sapiens
gcccggctcagcctggccctcatggggaggggttgctgctgaaggttgtctgggcagcccgttaagccctagtcagagactgagaggagaaggctctggagaaagctgctggtccactgc

SEQ ID NO: 32919 - DNA, 120 bp, Homo sapiens
gagcgctgtgagcaacagccttcattgattgggtgccggcttggaactaagcatggggtagcttctttatagaggttaggccattgtagcagctgggggagacattgacactaggcagta

SEQ ID NO: 32920 - DNA, 120 bp, Homo sapiens
ccacgtcccatgcccacaactgcccctctcttctctcctctccattcccctcctgcacgtctctccctgagacatttcccattcccatcccatcatggctgtgtccagttgagaggactc

SEQ ID NO: 32921 - DNA, 120 bp, Homo sapiens
tctcggccttgaaatccccacttcacctccctcttccagctctgcacgctcctcttccttccccttcccctggcaccagccttaccccttttccttttgtgagagagccagccctgaatg

SEQ ID NO: 32922 - DNA, 120 bp, Homo sapiens
gggcgggtggaggggttcaggccccctcctccgcaggggagaacaatgaggccgctagtcagggtggtggggcagagggagtgggtggggtgggggccatggagggacatcagaggctct

SEQ ID NO: 32923 - DNA, 120 bp, Homo sapiens
ctgcggcccggcccctggggggacagctgagtgatgaggcctgagtcacacgccctgagtgctccttgaactcccgctgcgttcctgtcgagacacatccagaaatgcacagggtaaata

SEQ ID NO: 32924 - DNA, 120 bp, Homo sapiens
tttcggcacctcgagcctcctgcctcactgagaatgagccaggggtgggacaccagggggaggagtccgatctggcccagcttctgcgcttgggtttctgtgggtgccaccctacgttcc

SEQ ID NO: 32925 - DNA, 120 bp, Homo sapiens
cttcgcatttcagccacaatccaagactagtggggcctgaaaacatcctgaggaccaaaccctggcttaaaatccatccacaggctgggcgcagtggctctctcctgtaatcccagcact

SEQ ID NO: 32926 - DNA, 120 bp, Homo sapiens
gcgctttcgagtgctatcctcaaaactttctaagtcccctctgatgcctggggttggctagagtcagcagtgccacctggagtggcgccccaggccctgtttctccccttgtacatgctc

SEQ ID NO: 32927 - DNA, 120 bp, Homo sapiens
catcgtggggttttgggacttaggtcctggtccccagaggacagctagtgagcagatcgttttcattggctggcacagcacttctttgagggattaggtgagattgggccatgagaatag

SEQ ID NO: 32928 - DNA, 120 bp, Homo sapiens
cttcgaattgttcctacagacaaaggctgaaaaaaatgtatttgcctggggcactgacaccctaagggcagccttatcctcatccacatcctccccttccataaagaaacctttagcctt

SEQ ID NO: 32929 - DNA, 120 bp, Homo sapiens
acacggaaactgacaacctacattttcccacatccttcctgaccaaactttaacaaaatcccaagtactcttgacttcagaatgtcttctctccttcctctccatggtcttcttcacccc

SEQ ID NO: 32930 - DNA, 120 bp, Homo sapiens
gtgcgtccttaaagccctttctcttctcccgtaggatgctgcagaacaatcagctgggaggaatccccgcagaggcgctgtgggagctgccgagcctgcagtcgctgtgagtcattagag

SEQ ID NO: 32931 - DNA, 120 bp, Homo sapiens
aggcgccccctctcccagtccacgttccagacagcatgccgctcctggctttggtttctccggggttttctgttgtcatcagtgtgtggctgtgtacactcctatgcatatttcaggaaa

SEQ ID NO: 32932 - DNA, 120 bp, Homo sapiens
ccacgccccactgggggactgtgggaatgggacctccctaggtgaggccaccaggccagcggtcctggggcgactggtgttctgccattggagcctgggtttaggggtggagactgccgc

SEQ ID NO: 32933 - DNA, 120 bp, Homo sapiens
catcgtggaagccagacccagcctgagggtggaagcgggagcaggtgctccagggtgatgtaacccagcccagtgggagccgctgggcttcatccacataatgcacagcccaaggcctgg

SEQ ID NO: 32934 - DNA, 120 bp, Homo sapiens
atccgatgggagagtgaacagatattttgggagaagtcaaagttggggggcaagattggggcacagcagttagctagtgggggaaactgagtcatagtgggcatgcagtgtgtccgaaca

SEQ ID NO: 32935 - DNA, 120 bp, Homo sapiens
tggcgctgttcagtctgtggatgtggaagtcagacaacttctgacttctccttgggtggaaggagaaatgaggtgggaaaaggtgactttccttctcatgactgatatttaggccccatt

SEQ ID NO: 32936 - DNA, 120 bp, Homo sapiens
ccccgtggtgagggctttcctctcctactccttccctgggtgccctctaccctcctgcctctgtgtctggtccctggcacccctcagctgctcgatcgatcggccccagtggcagaacct

SEQ ID NO: 32937 - DNA, 120 bp, Homo sapiens
gggcgtctggccccagccctctcctctccctccatccagcctcacccctggacagggccaggcaacccagtgtgcccctagaggccaacgtcggaagaccagaggccaggcaagcctgtg

SEQ ID NO: 32938 - DNA, 120 bp, Homo sapiens
ctgcgatgggaagaaggcagaaggcccaggggctttggacatagagcagggtggaagctgcaagtactgggaaggaagagagtttcacagaaacaaagctttgtcacacagaaatgagtt

SEQ ID NO: 32939 - DNA, 120 bp, Homo sapiens
tcccggaagccctccttcgggagaactgtaagtaagaggtgggtgtgtctaaagacaataccattaatgaatgttctggccttacctaaaaaggtttagcaatttggggataactcttgg

SEQ ID NO: 32940 - DNA, 120 bp, Homo sapiens
tggcgttcaaaagaaccgtaagatagatagatagatagatagatagatagatagatagatagatagatatcaaggttccaagcttcaagtaaccaagagtatatacggttatttcttgga

SEQ ID NO: 32941 - DNA, 120 bp, Homo sapiens
gcccgctggcagggtttgtacgtgggtggccaggtctgaccccaggcagccaggatctgggtctggtttctccatccagcaagccctgcctctggctttgctcagccctgtgtttcctgc

SEQ ID NO: 32942 - DNA, 120 bp, Homo sapiens
aagcggaaatccctggtcactgacttggggagaggtcagggagggaagattcttctcccctgatgtcacccagctgtttgtaacccaagcagcagcagaacaagcacacttgatgtcatg

SEQ ID NO: 32943 - DNA, 120 bp, Homo sapiens
gaccgatgcaaagggttcctagactgcaaatgtcatttctctttctgacccccactggttgtagtaaggtctgcagatacagtatcacctagccgtcacgtggtccagccctcttggggg

SEQ ID NO: 32944 - DNA, 120 bp, Homo sapiens
gtccgtctgctgaaaggctcatgcccctcaccctacccagccttagggactgaagcagcaagacaggatagatgttaaaggatctgggctcatgctccctcaggtgggcagctcccatcc

SEQ ID NO: 32945 - DNA, 120 bp, Homo sapiens
caacggtgttcctggaggacaggtgctggtgtaaactgacaaaaatggtagctgctggtctatcctcaaggagaggagacaggtggaagtgggaaccgaagaaggagttttactcttccc

SEQ ID NO: 32946 - DNA, 120 bp, Homo sapiens
tgacgccctatccctggtccctaacatctttgcttcagaagttaaagacatttcaagttatttgcaaagagtcaactgaggactttgtagaaattgttacttttcaaattcccacttccc

SEQ ID NO: 32947 - DNA, 120 bp, Homo sapiens
gccggtagttgacgtttacttcccttttgaccggagcaactgctcaggttcaggtgactcgggttcctgcaagagcaaggggtccgggctggccaaagcagactgaggagggcctgtagg

SEQ ID NO: 32948 - DNA, 120 bp, Homo sapiens
aggcgtggggccttcaatgctaggctggagagcttgcatataatttccctggcatataatttcaaaccatcgaggggttttgagcagaggagtgatgtgatcactgcagcattctgagca

SEQ ID NO: 32949 - DNA, 120 bp, Homo sapiens
tggcggggaaggaagaaaatctgcatgcaactggccctgtgcagttgaaggccctgttgttcaagggtcacagatttagcttcacttacccacccctcagatcagaattactcaagattt

SEQ ID NO: 32950 - DNA, 120 bp, Homo sapiens
agacgcaaggaaattatgccaaatggtgaatatattgggtggaagataaatgagagaaggttgtatgtgtcactgatctcaactatagcatttgctgctgatatagaacatgctgtgtat

SEQ ID NO: 32951 - DNA, 120 bp, Homo sapiens
gggcggtcatggaaggggtgggccaaagccagaaactgacaggagagtgtagctcatgccccttaatgggttccaatcagccaggtgtgggtggggaggtgtagacaggatgggggcaag

SEQ ID NO: 32952 - DNA, 120 bp, Homo sapiens
taccgtccttcttgtcccctcttctcccaggctctggcccagaaggaggacatggaagagcggattactacactggagaagcgctacctggctgctcagcgtgaggcaacatccatccat

SEQ ID NO: 32953 - DNA, 120 bp, Homo sapiens
caccgccaggtacctcctcagggtggggtggggatgggcattgtacttagccctggaggtgtcctcgtgaacctactggtgatggctgaggagcccctggggtcctgcaggtcacccttt

SEQ ID NO: 32954 - DNA, 120 bp, Homo sapiens
aggcgtctcgggcagccaacaaccaagattgtcccttgctgcttctgacctgtcatctgctctctgctgaggctggggtgggggtgggggcttcagtgctcccttttgaatcacttcacc

SEQ ID NO: 32955 - DNA, 120 bp, Homo sapiens
gcccgacacctgcaggagctgctggaggtggcagagcagaagctgcagcagacgatgcgcaaggcagagacgctgccagaggtggaggctgagctggcccagagaattgcagccctcacc

SEQ ID NO: 32956 - DNA, 120 bp, Homo sapiens
gagcgcgtgggaggcgcactgggccaggagccagaaaactgcttcccgccgtgtgattccagggagcacactgccttgtgcctgtcagttggaagagtaatccctgtcctcatcaccctg

SEQ ID NO: 32957 - DNA, 120 bp, Homo sapiens
cttcgaacccgtggcgagaagaaaaccggtgtttaggaagcaccaggcacagtgctcggaagggagaggctggccggccagtgtgcagctcagctgcttcgaggacggaacctgcagcct

SEQ ID NO: 32958 - DNA, 120 bp, Homo sapiens
ctgcgacctgggaaaagtcatcccctcccttaactgggcctcagtgtccttatcactatgttggagttagacgggatggtctcggaggtctttccagcctcgaggaatgaaggattgggt

SEQ ID NO: 32959 - DNA, 120 bp, Homo sapiens
gcacgggctgaaatgattaatacagtcaagtgagtcatcgcaggaggagtttaaggaaggatttcctgactataagagatgtggctttctagaatatcttgccagcagagacagtagggt

SEQ ID NO: 32960 - DNA, 120 bp, Homo sapiens
agccgtaaccatgcggggctaacatttgttgagtgcttactatgttctcagtgttcgccttggattatttcatttagtctttgtgatggtccagtgggcctgggtgctattattacccac

SEQ ID NO: 32961 - DNA, 120 bp, Homo sapiens
aaacgaaggcacatagaggtttggtaacttgtctaaggtcacacaggtggtaagagggagccaggatttgaacccaggcggtgtggcatgagcccatgctcttcagtgtggttctatcca

SEQ ID NO: 32962 - DNA, 120 bp, Homo sapiens
aggcgtagaggtttatggtagctcatgctttcaagtggagctttttctggaagcatggggattatttacagtctcttgaactgctagcttcaggatgttttaaggctaggcctgagcgag

SEQ ID NO: 32963 - DNA, 120 bp, Homo sapiens
gagcgtcactggtactgggggccatgatccccagggccaccctggcaccagggtgcaggggatgcggggcctgagcaggaagaacagagatctgcgggctgcaccgacccatccctgccc

SEQ ID NO: 32964 - DNA, 120 bp, Homo sapiens
gaacggcatggcaacattgaggagcacctgcggcagctggagggacagctggaggagaagaaccaggagctggcacgggtgagggcaccaggccgggccctcaggccccctccttcccgc

SEQ ID NO: 32965 - DNA, 120 bp, Homo sapiens
caccgctcaaggtcgcacatgggcagtgcagcagacgtgcggttctccctgggcacaaccacacacgcacccccaggcgtgcatcgccgctactcggcattgagggaagagtctgccaag

SEQ ID NO: 32966 - DNA, 120 bp, Homo sapiens
attcggccgcgtgcctggctccagttacgcagacggctggtgtgtggggcaaatccttccccttccctcccgtgtcaatgacagctgcagccctggggttgaggccatcgtcagctgcaa

SEQ ID NO: 32967 - DNA, 120 bp, Homo sapiens
ccccgcttgccttggcctcctggtgggcaagaggtgggggctggcaggcagccaacagtccctgaggccccactgaagtgtgtgtgcgtgtgcctgggcgtgcaggcgtgtgtatctggt

SEQ ID NO: 32968 - DNA, 120 bp, Homo sapiens
ggtcgggcgtggggggtgggggagcttcacgggtaagatggaattggcagactttctggaacaaaagctgtggttcatggcggagacgagggagggatgacaggttaactggcccttggg

SEQ ID NO: 32969 - DNA, 120 bp, Homo sapiens
actcggctatggaatggtggggacaacaggggcggcctcctttggtagcgacacctgagctaaagtgtgagggccacataggaattagccgagccagggagacatctgtgtgtggaggaa

SEQ ID NO: 32970 - DNA, 120 bp, Homo sapiens
gggcggagtggggagatgggactggacagctaggctggggccagctgtgagggccttgcagcatctgttttagtttaagagttcccctgaggcagtgggagcattgatgaatttcgtgca

SEQ ID NO: 32971 - DNA, 120 bp, Homo sapiens
gcacgcgaggaggaggttggggaaagaggaaggagaaagaggaatttgctgagacagggagaggtctgtgtgtgaaggaaaggggtggtctgggaacggggaggaggaacatggccacct

SEQ ID NO: 32972 - DNA, 120 bp, Homo sapiens
gaacggtttgatcaggggaagaagcattttgggtgaagccttatgattttcgatgctctccacacacgttggcacctaaacctgagacagcacctcagattggtttctggattacccaaa

SEQ ID NO: 32973 - DNA, 120 bp, Homo sapiens
gaccgggacttaaaagaattctaagattctgcctctggccacgaattctgaagggttctagcatcaattcaaggagatgtttagtagaagacagaactctgcatgttcccctttgtggtt

SEQ ID NO: 32974 - DNA, 120 bp, Homo sapiens
ggtcgataacttgggtccatctggctggaaaacacccccaaggctgaggctcctggggagactctctgaactggggatgacccgcttgatgccattctctgagactgcttggatgcaggg

SEQ ID NO: 32975 - DNA, 120 bp, Homo sapiens
tcccgtcaggccatgggttgtcctctgccaaggagcctcctgctgcttctgttccccacccctgatccaggcaagggaggagaggcagaggggctggctgacacacacatctctttcctt

SEQ ID NO: 32976 - DNA, 120 bp, Homo sapiens
ctccgaattcagtatgcaggagcctatggtgcctgccaagctggggacccaggcagagaaggaccggcggctaaagaagaagtaagagccacaggccagggtctgccagggtggggccca

SEQ ID NO: 32977 - DNA, 120 bp, Homo sapiens
cctcgccctcttggggtggtcaggtgttcctgccccatttcttgttgtatttcttcagaggaagaaggaagagcagagcagaggaagtccagggtggggagcaagggttgtgggtctcca

SEQ ID NO: 32978 - DNA, 120 bp, Homo sapiens
gcccgcaggaaaggaatgccctttgcccagtgggatggtcctactgtggtctcctggttggaggtaagcctgagcaaagggagtccactcaggggtctggagggaaggatgcttggggtg

SEQ ID NO: 32979 - DNA, 120 bp, Homo sapiens
ttgcgtcagcccaagaagctgtaggatttttggaggagtttctatgaagttgtcagtagggtgatttttctcctctgatctttgccaatggcctctgcactctgctcagtccccgcccag

SEQ ID NO: 32980 - DNA, 120 bp, Homo sapiens
acccggggaaccacagcaaggagtggtggaggagctcggcgtgctgagccagagtggggaaagaaatctggtaaattagggcacgtttgcgtttaggcatcaatttagctgtccccaccc

SEQ ID NO: 32981 - DNA, 120 bp, Homo sapiens
tgccgtcatgcccccgcaggtgactgtctgtggcttctgggtcccagaacagttgctctcaggtcatgccttctgctttcagagaggtaggccgtcttcagatcctgtatctaaggatgg

SEQ ID NO: 32982 - DNA, 120 bp, Homo sapiens
ttgcggactgaggaggaaactgagattggagagaggaggagcttacgcaagattacttggctgggagttctttcctcctcccatctggatgcttgctcccccgcctctgatgtaaaaagc

SEQ ID NO: 32983 - DNA, 120 bp, Homo sapiens
acccgcccctcaaggaacagaaaaggaaagtatgcagcctcagtgggtgaagtcagcagatcagtggcaggcttagaggggaatgaggcggagggaagttgctttgtgattgagaagata

SEQ ID NO: 32984 - DNA, 120 bp, Homo sapiens
catcgggtggcttcccggaagtttctgagtgcttgaggggcaacctgccgaggtgtcagctctgcgtggaagccggagaatggccaggatgccttttacccagaggcagatctgtagggg

SEQ ID NO: 32985 - DNA, 120 bp, Homo sapiens
ggccgcaccctgacatttgctatttatttccaagcataaaagcaatccatgttgattgtgaaaaatggaagaaagaataaagatggtaaaatcaccagtaattctaccacctacagagaa

SEQ ID NO: 32986 - DNA, 120 bp, Homo sapiens
ccccgggggcatttggcattctttagcccacttccccttctgggctgggttgggcaggactgtatgggccccaagtctagtccttattgcctggtctctttcctgaaggcctcggcatcc

SEQ ID NO: 32987 - DNA, 120 bp, Homo sapiens
attcggcaggtggggacagacacatagagcagagaggaaggaagtggagagacacggctccttgggcggcatgaatcactcctttaacctcagccttcttaattcaagcccagagggaac

SEQ ID NO: 32988 - DNA, 120 bp, Homo sapiens
tgccgcagtccaaagaaaagcctggcaggcaggtggtcgtggggataaggagaagaaggagaggcagatgggtgggtcttggcatacacgtcctcttagaaatactggtttgaaggtggg

SEQ ID NO: 32989 - DNA, 120 bp, Homo sapiens
caccgggccctggtacagatagacctactcattcattaattcattcatttgttcatttattcaacaaatacttattgagtgctcatatgagccagggtctgttgggatactttcattaat

SEQ ID NO: 32990 - DNA, 120 bp, Homo sapiens
tgccgccagctacagcatcccaccctcatctgcctggatggctaaaatagcctcctgctggttttcttgccttccatcattccctgctgcaacacattctccacacagcagcctgagcta

SEQ ID NO: 32991 - DNA, 120 bp, Homo sapiens
attcgattatattattcctttgcttaaaatgacttcccctcgtacttaggataaaccccagaacacttgctgcagccctctcagccctaggtctcttctctgactgagccggcctctctc

SEQ ID NO: 32992 - DNA, 120 bp, Homo sapiens
tctcgggccttcacccctgaggctccttcacactagccctctcttgccactcttgcctcagcacctctccccgatggtgccttctgcctagaaggctctgtcccagatctttccctggct

SEQ ID NO: 32993 - DNA, 120 bp, Homo sapiens
gctcgttggtggtcctttggctctcggctcattttctcatcctcagagaggctgccctgcccactcactctctcctggggtatcctcttatttcgcttggtaggtcttttcactctctaa

SEQ ID NO: 32994 - DNA, 120 bp, Homo sapiens
tcacgtgttctccatctcccagagtggcagagctgggtccaatatgggctttgcacttggacatactggagtcttagaaattcttttcctgctttttcctggcagagtggccttggacat

SEQ ID NO: 32995 - DNA, 120 bp, Homo sapiens
ccccgccttccgctcccaccagcccacatccagtggggtctcagtccagtcctcacatgcccgctgtcccaggggtctccctgagcctgccccagctgggctgttggctgggggcatggg

SEQ ID NO: 32996 - DNA, 120 bp, Homo sapiens
ctacggagggaccaggtgtctagaggcaacagtgttctgagcccccacctgcctgaccatcccatgagcagtccagagcttcagggctgggcaggtcctggggaggctgagactgcagag

SEQ ID NO: 32997 - DNA, 120 bp, Homo sapiens
ctgcggtgaggcaggggagtctgcttgtcttagatgttggtggtgcagccccaggaccaagcttaaggagaggagagcatctgctctgagacggatggaaggagagaggttgaggatgca

SEQ ID NO: 32998 - DNA, 120 bp, Homo sapiens
ctccgttcccacctctgaggactctggaccccaggccataccaggtgctagggtgcctgctctccttgccctgggccagcccaggattgtacgtgggagaggcagaaagggtaggttcag

SEQ ID NO: 32999 - DNA, 120 bp, Homo sapiens
ccacgccctggggagtgagcttggtgcggtaggtgctggcctcaaacagccacgaggtggtagctctgagccctccttcttgccctgagctttccggggaggagccttggagtgtaatta

SEQ ID NO: 33000 - DNA, 120 bp, Homo sapiens
gcccgttgccgggcctggactgtcctaggtgaccccatctctgctgcttctgggcctgatggagaggagaacactagacatgccaactcgggagcattctgcctgcctgggaacggggtg

SEQ ID NO: 33001 - DNA, 120 bp, Homo sapiens
ggacgagggagtgtctgtaaggactcagtgttgactgtaggcgcccctggggtgggtttagcaggctgcagcaggcagaggagagtacccccctgagagcatgtgggggaaggccttgct

SEQ ID NO: 33002 - DNA, 120 bp, Homo sapiens
gtccgggggtctaggactttagggatctggggaaggaccaacccatgccctgccaagcctggagcccctgtgttggggggcaaggtgggggagcctggagcccctgtgtgggagggcgag

SEQ ID NO: 33003 - DNA, 120 bp, Homo sapiens
aggcgggggagcctggagcccctgtgtgggagggcgaggcgggggatcctggagcccctgtgtcggggggcgagggaggggaggtggccgtcgagttgaccttctgaacatgagtgtcaa

SEQ ID NO: 33004 - DNA, 120 bp, Homo sapiens
gggcgcccatccccaccactgttgagggcaataagacagcttcagcagacaggaagcaatgacgggggctgggaggagctgcgagagggggcacgtggaggcgttggagcaaggagggtt

SEQ ID NO: 33005 - DNA, 120 bp, Homo sapiens
ttacgcactggcggtagcaaaccctgatcagaaagggagatcctgaaaactcacaggtccagaacaccccccatccccccacctccctgccccagccatgacatcctgagacctctccca

SEQ ID NO: 33006 - DNA, 120 bp, Homo sapiens
cctcgtgacacagcgcctcccccagatgatgtcgctcactggcacagaggccccgcactgttaacaccacgcatctttatttgagtgcttcccacccagagtgcaactccgcagggcact

SEQ ID NO: 33007 - DNA, 120 bp, Homo sapiens
ctgcgccttccagcaccccttgagcccagttagtctggcctggggcctaccaggcccattcctgagttctggacaccagcctctggggaagggaggccagcaggtaccaggggcggttcc

SEQ ID NO: 33008 - DNA, 120 bp, Homo sapiens
agccgtcgctatggaagcgggggtcttgggcatctctggagtttgactgtaggcctggtggacctggcccctcaggcctgcagcacctggaggaggacatgcttcctgagcccctggtgt

SEQ ID NO: 33009 - DNA, 120 bp, Homo sapiens
gctcggctgcaggccagagaggtgcagagtggggagggggagcagcatcctcttcctcaccaggcctccctccctcaggtgcaatgcccaggtctgagctctgcccactgcagttctaga

SEQ ID NO: 33010 - DNA, 120 bp, Homo sapiens
ttccgtacttatgcagagcctcagaaccaccaggggaaggaaggcagggaaaggttgttatccccagttttcggatgagagaatgtgtccaaagagaacacccttgctgaagatcactca

SEQ ID NO: 33011 - DNA, 120 bp, Homo sapiens
tggcggtccacggaatcaccccccttccaggagacaccggcatcgcctggccctgcaacatcactgtgagtctctggacatgcgtgctagttgcctgtgtccacaagtttgtgtccacag

SEQ ID NO: 33012 - DNA, 120 bp, Homo sapiens
tcccgtgacttcagtgtgcggctgaggctggaagagatgctgcagttagagcttgggggaagtggcggggaactggaaagttcacggttatacaccctcttctacacctgtccaccctgc

SEQ ID NO: 33013 - DNA, 120 bp, Homo sapiens
tgccgcttggaaagtaatcagcacagcctgaccccagtcttaccaccccttctcttcggccttgattttaagctgtctgctgcctctagtccagttccagagaggtgcttactcctgttc

SEQ ID NO: 33014 - DNA, 120 bp, Homo sapiens
tcccgtcctcaaactctcacctttgacctccagccggcagtccacagatgcctcccccagcacatttatggccttgcaggtgtagaccccagaatcaaaggggctgggtttccggatctc

SEQ ID NO: 33015 - DNA, 120 bp, Homo sapiens
agacgccttgctcagagagggcgcggtatttggggttgccctggatctccatcttgtttttcatccagatgatcttgggctgggagacatggtcagaagagagctggggaggtatggact

SEQ ID NO: 33016 - DNA, 120 bp, Homo sapiens
gctcggacactgcagaacaactgggtgctgtagccaggggtggaggtgtggtcagccaggggctgggtgaatgagggggcttctgagaagtctcgctcaataaaccctttaggtttggca

SEQ ID NO: 33017 - DNA, 120 bp, Homo sapiens
agtcgggtgcatctgagcttacaggagtgagggagacctgtcaggactgactatgattcaagatctatggatagcaagtcgtggcttatttgcaggaacttggacaatctcaaagaggca

SEQ ID NO: 33018 - DNA, 120 bp, Homo sapiens
ccacgtttcctttgggtttgtcgttggagacttgactggctttctttttttaaacaaaagtttcttcctaattctgtgcagttcaggctagtgttaaaaaaagtttgccttctggaaccc

SEQ ID NO: 33019 - DNA, 120 bp, Homo sapiens
ggtcggagagggccttggggcacacaagggacagggaaaagggcccggggtttaacatttgacgcaagaaggtcaggtgcctgtgtggagacagtaaatactcctatctctcttgtccat

SEQ ID NO: 33020 - DNA, 120 bp, Homo sapiens
atgcgcaggtcaccctttaggttcccttcggacactcactgcctgagactcggcggctgctgtgatgctggcagccacacacctctttggaataagcacacagcctccaaaggggcatct

SEQ ID NO: 33021 - DNA, 120 bp, Homo sapiens
agccgtggagtgaggagacggcaagtgttccaggggcagacgcccaggagaaacccagagagaggggtgcagagacgcggaggaagaagcagagacagggagagagttagcacagccagc

SEQ ID NO: 33022 - DNA, 120 bp, Homo sapiens
ctccgggcccaaacccacctgccttctggatgtgggcgagctccttggtgacggtggccgaggtgctgagtccacacaggttttctgagaagacccggaaggagtacgagttgccgatga

SEQ ID NO: 33023 - DNA, 120 bp, Homo sapiens
tagcgctccagcactgtgaaccattgctgcagggccccgggtgtcaccctcatttctcacccctgtcctcaccctccctgcttaccctggagacctttcctcacaggaactcattccatg

SEQ ID NO: 33024 - DNA, 120 bp, Homo sapiens
aaacgtcttagaaatgcaggccctcagcccccaccctggacctactgagtcagactctgcctcttagcaagctccccaggtgactcatgtggacattaagatttgagaagcatggctcca

SEQ ID NO: 33025 - DNA, 120 bp, Homo sapiens
gcccgggccagccctcttcacagtcttcaggaggcatctgaggtccagagaggaagagtcttgctaagggcctcctagggagtcaggttagcagtgggcagaccagaactcgatccctag

SEQ ID NO: 33026 - DNA, 120 bp, Homo sapiens
actcggtccctagactcagtgggatgggccttccccaccaccttgaccacttcgtaccccgaccccactttgcctcagccagcctcacccctgtctttttgtctgccttctgcaccatgt

SEQ ID NO: 33027 - DNA, 120 bp, Homo sapiens
tggcgtccactgaagagcagcattgcagccccagacgtccaggagcctgatgctgctggggggtccaggtttctctgtaggcccagagtgtgagaggaagtgagtgtgagggccaggctg

SEQ ID NO: 33028 - DNA, 120 bp, Homo sapiens
ccacgcgcacagtgagctcgtagcggccagagtcggagcgctgggccgagcgaatgaagaggatggagtcctggtccccggtgcgcatgctcacccgctggctgtccagggcatggccgt

SEQ ID NO: 33029 - DNA, 120 bp, Homo sapiens
tctcggggaagcctgtcccactggcccttctcaggaggggcagcagaggctggagccacaggtgctgcccacagccacatcttccaggtgtccatcccgctctgggggcccacctgccca

SEQ ID NO: 33030 - DNA, 120 bp, Homo sapiens
ttgcggaaggatgaagccgtctcgctgggtctcagctggacccttggagaccctgccatctcccaggctccccttaaatgggggccctggttcccacccaggctgttacccttggtgggg

SEQ ID NO: 33031 - DNA, 120 bp, Homo sapiens
gaccgtctctcccacctggcggatgtaggtctgacggaggtggcgggggacacggatcttgggggcctctggatcaaagcaagagtctgggcttagcagtgcagtggggtggctgattgg

SEQ ID NO: 33032 - DNA, 120 bp, Homo sapiens
cagcgcctccatggtgtgaactggtaagcatcctgggcactcccttggcgcctcgactctgccaggatgggatttgtcctgcagcccaggcattcccaagcaccagatgggccccagctg

SEQ ID NO: 33033 - DNA, 120 bp, Homo sapiens
tgccgtcttcctgctctaatatccccagctctccacaagcccaggactttcagagaagcctttgtgaaaccctgtttgtccattcctctgtctccaggccctattgaaaggtttaggatc

SEQ ID NO: 33034 - DNA, 120 bp, Homo sapiens
gggcgggtatccccccttcttcctctgtcaccctcccaaaatctgttagtctcagagccgggaagtccttcttgaagtcctatttcagctgcctgctatgctaaggaatgacattctgac

SEQ ID NO: 33035 - DNA, 120 bp, Homo sapiens
gggcggaggaggacaagacagtgagaaggaacacggtgtctctgaggattagctgagtgggcacttggctctgggagctcaggcatggaatgctctagggacagctgcagggggtcaaga

SEQ ID NO: 33036 - DNA, 120 bp, Homo sapiens
caccgtcccaaccaagaagccttcctggcacctccaggactagggtcgacacagccataatgcagctgcctggtggggccacatctcacctagagccaaaggctgggaattagggttggg

SEQ ID NO: 33037 - DNA, 120 bp, Homo sapiens
tttcgaatccagacttgacccctcctgtggatcccctctccttctggaggccttgtctagagctaccagaaatcatccatcccctagtggaggagcaagaaggaaggtggagaaggcttc

SEQ ID NO: 33038 - DNA, 120 bp, Homo sapiens
acccgatcagctccgggaggggagcgaggggaggattgaggctaatgcaccttgcaaatagaaatattagcaatggggatggcagctggcctgcggggccccagtgaggtatgccctctg

SEQ ID NO: 33039 - DNA, 120 bp, Homo sapiens
cagcgccttctctctgtttcaagacctttgagagaatctggaacccaggccacaggaaatgggcagaaaatgagcatttatggccactggagagattgagattagatgggagatagaaca

SEQ ID NO: 33040 - DNA, 120 bp, Homo sapiens
aggcgtgggggctggaccactcagggaaatggcttcttagacctccagaggccccttactgctgaggaacctggaactttcttaaggcaagatggtgatagcgtgtggcttgtgcatgtg

SEQ ID NO: 33041 - DNA, 120 bp, Homo sapiens
gagcgtgggacgggggaaatgactgcctggttccctctacctgctggcctcagtttctccattagataaggtgtttgggaagggctgggtagctgaaggccaggatgggctttaccaatg

SEQ ID NO: 33042 - DNA, 120 bp, Homo sapiens
tctcggatgtggatgggctggtccagcatggccggcgggccagcccctgcagaactcactgcagacacgcgcaggaggaacttgtctcccagagccaggttccgcacagtctgctgggtc

SEQ ID NO: 33043 - DNA, 120 bp, Homo sapiens
ggccgggcactcacaggcacccactccgaggctgaggggatggagagagtgtgaggtctttgcaatgtggccacaggcgcccctctccatggggcttcttttcctgctggtgatctgggg

SEQ ID NO: 33044 - DNA, 120 bp, Homo sapiens
tcccgctttctcctcactgtctcttacgctaacattcccctctccagctcctccctttccacttcctacagttcggggtcctctgagacttagcacttccttcccttctcaccaaaggag

SEQ ID NO: 33045 - DNA, 120 bp, Homo sapiens
gctcgcatcccctccttctgtatctctcccagactgaccaaccacagggcctgtgcacttgtccctgcagccctccatgacaacctcccctgggtgtatgcaagacttagcccagcactc

SEQ ID NO: 33046 - DNA, 120 bp, Homo sapiens
cctcgcccttcgggatgggttgcagttgtaggcagatctggaagatgccctagtggaggagagcactctgaagcttctagactcttccaagcaggctgtgggcatgggctttctcagtgt

SEQ ID NO: 33047 - DNA, 120 bp, Homo sapiens
gttcgataaaatgttaagactgggaatcactggaaagccagaaaatgccatgtgtcaggaaggagggagaacattaagaacttttattgctggtattggagcagtcactctggaaaatgt

SEQ ID NO: 33048 - DNA, 120 bp, Homo sapiens
ctccgtgacccagccgtgccgctcatataacacccacacatgccccaggagacatggagaagaaggttcatggcaatgttatttgtaattgttgaaatgtgggggaaaacagctgtccct

SEQ ID NO: 33049 - DNA, 120 bp, Homo sapiens
ttgcgtctcatctgtctcatctacattaaatccaaatgcagtcaacaccaggctcccttcttcaaggtacatccgtaggcggtaaggccagaaaggaagatgaggccagtacaaaagtta

SEQ ID NO: 33050 - DNA, 120 bp, Homo sapiens
tggcgattgcctctaggtggaggaacagggatatctgtgatcgtgagggctgcaggggtgctaatgaggtttcctttcctgacctgggtggtggttacacaggttcttactacatagtta

SEQ ID NO: 33051 - DNA, 120 bp, Homo sapiens
acacgacacccatgggcaggggactgggagtgaaagcagggtaaggaaccactctagaagtcggggccagcagtcttcacccctctgaaggtgcctggagcagccatgtgtgtatttatt

SEQ ID NO: 33052 - DNA, 120 bp, Homo sapiens
agccgatctgggtgtcccccatcccagggattgaccggcttgcttctgccttcacagtgtactccccattctggtgcccactcctcacttcagtgattcctctttctattccagactcat

SEQ ID NO: 33053 - DNA, 120 bp, Homo sapiens
tctcgtctccttttcttttcagatctggtgcctcctgagggcagggtttgtgtctctttctgctggacttccccatagccatgcttgggtaagggcctgactctctcaacagatctctca

SEQ ID NO: 33054 - DNA, 120 bp, Homo sapiens
ccacgtggtgctgtggtagaatcagaaaaagtccccaacccccattcagctctgccacttgctgacctttttagcatgactcagcccccttgagcctcagctcctcacaggattgtggta

SEQ ID NO: 33055 - DNA, 120 bp, Homo sapiens
gcacggagcagatgctctgaggaggccggttctccttctccaaccccaccttcatttctggctctcccatgagatttccaccctctgcagttgagatgatcctgtggctcccccactaaa

SEQ ID NO: 33056 - DNA, 120 bp, Homo sapiens
aaacgcatacagcagagctacatggatcccttttgccagaatggagatgggtcagatagcagttataactccctttaagagccttcaacattaaaacaggcaactagcctgggcgtggtg

SEQ ID NO: 33057 - DNA, 120 bp, Homo sapiens
aggcgaccgggccctttggcctgcgatgagatgagaaggtccttcctgaagcctggagatggatgcgatttgagaacagcttatgtggtaaggaggctgtggtagagagaataatggctc

SEQ ID NO: 33058 - DNA, 120 bp, Homo sapiens
caccgctggctggctgaagctcagtggttgctgcagatgtggaacccgaaaggtggaagggcagggaaggcctgtggggtcagctagtgcagactgagatcctgaggaatctgtaaggac

SEQ ID NO: 33059 - DNA, 120 bp, Homo sapiens
atgcgtgttgcacaagggtggggtgtgtgtgtgcgtctgctcgtgcacatgcatacacgtgtgtcaggaggaggaagccatagagcaagtcccccatgtttagctcaggatgatattgca

SEQ ID NO: 33060 - DNA, 120 bp, Homo sapiens
tgccgactgtacaatgggacacagaggacttgggatgagaagtgacttgtccagggggcaaagacctcttgatcttccctccataccaagtcacatttgcgtccaggcgatggcagtagg

SEQ ID NO: 33061 - DNA, 120 bp, Homo sapiens
tgtcgaacatgaagccctgtcctggctcatgttatggagccaagtcccttcatactccagggttgggtgaagtagctctgggttgtgcagcagaaggcagcccaggacttaaccgtgggc

SEQ ID NO: 33062 - DNA, 120 bp, Homo sapiens
atacgaactaaggctacagcttggccatcttactctagatgccaggaaggagcttagggaaataagggcaccagcgggtgggtctgggctggtttgggtggactggctcccccgtgtccc

SEQ ID NO: 33063 - DNA, 120 bp, Homo sapiens
agacgaaggccaaggacaagcagtggtaatggcagtagttgtggacaccgggtccttgtcccttccctctagatgccccccttctcaggtgacccctttactgtccccccttggagtgtg

SEQ ID NO: 33064 - DNA, 120 bp, Homo sapiens
gcccgggtgacagctgggaatggcaaggacaccctggaggagggagtgggtggggctggggccatcctaagcccccaagatcccacatgcctgtggtgggggccaaggaatgaaaggaat

SEQ ID NO: 33065 - DNA, 120 bp, Homo sapiens
aggcgaggcccaagacaaatgtcaatgtgggcctttggaagggttgtttctttccttgagatatatttgaaatacatttgttgccttaatgcctgaattaattaagagggatctggctac

SEQ ID NO: 33066 - DNA, 120 bp, Homo sapiens
gagcgcttgttagtagttaatctaccctagaccaggaggttgcatctggggaggaggcctaggaaaagcacggtgtggaggagggggttgccgggagaccctgcagctgcacccagctcc

SEQ ID NO: 33067 - DNA, 120 bp, Homo sapiens
agacgcacccctgtctactgctttgtcacctttttcattctgcatctcagatggagctgctctcttagccaggatccccttcagttccccccaaactcagcaacaccaggccctagagtc

SEQ ID NO: 33068 - DNA, 120 bp, Homo sapiens
ggccgtagttagtttgctttaacacaatgtagggaaaggctgtacctgtgggaggggacatggagccaggggagaagaaagaaggagggaagaatggagggagcaggtttattgagcctg

SEQ ID NO: 33069 - DNA, 120 bp, Homo sapiens
ctgcgtactcagggaggactttggttatttggatgcttgtaggagggcgcattctgctaaaaggagactacagtttttgctaaatccttgacaaacccagctcacagaagttgaagaaag

SEQ ID NO: 33070 - DNA, 120 bp, Homo sapiens
aggcgtgcacgacttcactgactcctcacatttcttccatcctacagcagaggactgaggctctgcttctttgcctgaagtcacacagctggagtgcagcacgccagaagtcacccctgc

SEQ ID NO: 33071 - DNA, 120 bp, Homo sapiens
gctcgttgggatgtggttggtgtatccctcaattgagacctcagggggcggagcacgtgctcaagcagcttgtgctctggactgaggagagcaggtttcaaaatgcccatggacaggcag

SEQ ID NO: 33072 - DNA, 120 bp, Homo sapiens
tgccggagtgacggggacactgttcctgcgctctggtgctgggttgactcacatggggggccaagctgcctccccctcatctcacctgtcccagtccccagctgccttcccaagtcccaa

SEQ ID NO: 33073 - DNA, 120 bp, Homo sapiens
caccgtgtgcatgctctctggcccatttcaggccttggttctggactcagaattggttagaatcagtcttcagtttaaatgcctataaagtgagaataatcattgttccttcttcatctg

SEQ ID NO: 33074 - DNA, 120 bp, Homo sapiens
gaacgggggcagtaggtgagatagggcctgcaaagggcccaaacaggatttatctcgaagacccctgagtaccaggggtctgaattcttagtgtaatgctgagtggctgctcgcagagcg

SEQ ID NO: 33075 - DNA, 120 bp, Homo sapiens
acacgtgcgtgaaggtccgcagaagctcctgtttccaggcttctgagccaataaccaaagaacgtgttgcacttggggccgcgctctggctgccatcacctgtgtactggaaactgccca

SEQ ID NO: 33076 - DNA, 120 bp, Homo sapiens
ttacggctctgccaaaacaacatctggggaagctccaataggttcagggcctcttctcttgttttttgtctggagataaagggggtttatcctgggcccctgggagtgaggatgaggagg

SEQ ID NO: 33077 - DNA, 120 bp, Homo sapiens
tctcgtaccataggagaaggcctagagggagaaggtgtgggaggtcacattcttggggggcctccaggataacagacttttagcagatcgttcccatccttttgctcctgatacaccgag

SEQ ID NO: 33078 - DNA, 120 bp, Homo sapiens
agtcgcagaaacaaaaacacatcactagggacctttccagccatattggtctggccatctgtccacgtctcttccccttccccagctcccacctcatcccgtcttcactgtctctcctgt

SEQ ID NO: 33079 - DNA, 120 bp, Homo sapiens
ctccgccatccttcttgccttcacccttccctgaccacacagccagggtggcaaaggagggtgagaagcccagatcattcatcttcccacagacactactgggttagtagagcacagcag

SEQ ID NO: 33080 - DNA, 120 bp, Homo sapiens
caacgcgatgcagagtaacatggagaggatgaagaggtgagttaggggagcacacagcctgcatccaggaccctggaggccctgtccctccgagacacgaagaccactctgcagtcgtca

SEQ ID NO: 33081 - DNA, 120 bp, Homo sapiens
gtccgaaggacacatgttctcatccccattccactgtgggtgtgctctgtggtagtctaactctcaccaccctcctttccaaaccctttcattgagccccctttgggcccagaaaagtcc

SEQ ID NO: 33082 - DNA, 120 bp, Homo sapiens
gtacggtatccttgctaggcatctgacctcggtgggccacggggcaactttgacccattggctccactggtctgcttgtggattaataccaaactgggctatgtgctcatttacacacaa

SEQ ID NO: 33083 - DNA, 120 bp, Homo sapiens
aaacgtttgagctcagtctaagaggctaccagggccctggataaggatcttatacaaacgagtatgccctggatacgcagccaatcctttcccctgatgtgagcctggttctctgggccc

SEQ ID NO: 33084 - DNA, 120 bp, Homo sapiens
attcgatgggcaggggagtgagggtgggaccaggcagtagataagtgaggctggctggacaaaagccatggtaaacttgaggagtgagctcaaaccttgtctgaacagagcctctgttcc

SEQ ID NO: 33085 - DNA, 120 bp, Homo sapiens
cagcgctccccaccttcaactggtggtacccgttaaacttgtgcttgggacggcagcctccaggcttttgctcaaggaatgccctgtccccttcctttccacctactttagccaggttca

SEQ ID NO: 33086 - DNA, 120 bp, Homo sapiens
tcacgtttttaagttcacacttttccaatgttcactgttcagtgttcacactttcaagttcacagtttttcagtgacatctctccttcacagactgggctacatggccttcccctgagtt

SEQ ID NO: 33087 - DNA, 120 bp, Homo sapiens
gttcggttttataaccctgaatttatagctagaatgtagactagagaccttgcctgaacagtgtctggtacttagtaggtattagtgaatactggttgaacaaatgaatgtcaaagttgc

SEQ ID NO: 33088 - DNA, 120 bp, Homo sapiens
tgacgccttgaccgtgtgtataccttgattgtatatatctgtttctactttgggacttgagttttctggctccttccttggaatagctttccgcacaccttcttgtgcaaactgccattg

SEQ ID NO: 33089 - DNA, 120 bp, Homo sapiens
tgccgattctctatttctggtgggttgtaagaaagttcaagactgacccctctgatttccaatactcttgcttatgtaggtaggtcttcttattgcctcttggaactctgacccatttcc

SEQ ID NO: 33090 - DNA, 120 bp, Homo sapiens
ctacgtgtagctcacaatctggacacatagatggaaacagctcatttatctttagtgtttgcagtttcttttggagcccagcatggctgggcatggtctgcttggtccttttgtccattc

SEQ ID NO: 33091 - DNA, 120 bp, Homo sapiens
acacggtccaggaaaggattaggtccagtttattgtgccatttcatgcagcacatatgagcatggcctagtttccagaaaagtttcctactctggaaacctgggctgctacaagattgag

SEQ ID NO: 33092 - DNA, 120 bp, Homo sapiens
ctgcgatttaaaggtttcagaaaaggctggtggtgcgagatgagatgctgcccactagtggctagaaggcagaactgtgagcctgcatgtaaggcaggccctgggacatggggtttggga

SEQ ID NO: 33093 - DNA, 120 bp, Homo sapiens
ggacggtggtaattaagtttcttcgtacttgggtctgaaataagagaacaaagcctactgcctttgacccctgcctactgcatcagcgtgatcaactgaaactctctccctttctctctg

SEQ ID NO: 33094 - DNA, 120 bp, Homo sapiens
tttcgctgtctagagcctcagaagcttccttgtgcattagggtgtgtatgcatgctgctatctttgcctggacctgcccttccatctcttcgtctggattactatgctctcactctgtat

SEQ ID NO: 33095 - DNA, 120 bp, Homo sapiens
catcgtcacagctctttctcagtctaactacatgatcctcagtgtgatttttttgccgttgttcaaggactgtcactgcactggactacaagcccccaagggcaggggctgtttgctttt

SEQ ID NO: 33096 - DNA, 120 bp, Homo sapiens
agacggccagggtcagatcctggccttgatgcgtccttcctgggtgacctctgtgtctttgtttccagtttcctcctctgtaaaatagtgaaaataataatctccatggtagagaatggt

SEQ ID NO: 33097 - DNA, 120 bp, Homo sapiens
aaacggagaggcagaggattcctccttatagttagataattcctgccctatgtgccacatctctgtctcctccacatggcatcttcctgtactggagatccaaggcagaggggccttatc

SEQ ID NO: 33098 - DNA, 120 bp, Homo sapiens
tcacgtcagagaagtatagtcaaattagtttactttggcttaagatggagttgtaacatttgcaacatgcttggtacagaatttagtgcccaataactatcagttgttatttccctatca

SEQ ID NO: 33099 - DNA, 120 bp, Homo sapiens
atgcgacatttgctaagcacctatcacaacatctggcactcaaaggctttcacgatatgaacacaggatgaatgagaaaacaaatggggggtaaaggtttgttttcctcttccagggcca

SEQ ID NO: 33100 - DNA, 120 bp, Homo sapiens
caacgggctttggcaggcttggctgccctcagatctgcacagttgccactagagggcagaagcagttaagacaacaatacccaggactagccagatcccgaattaccggctttgcaagag

SEQ ID NO: 33101 - DNA, 120 bp, Homo sapiens
gcccgaacagaatagatgagaaagagggctcatcagtccaaggcctgtgtgacctgcgacctcaccaggtcctcctaaagtaaccctcctgcagtctgctttaaatgactccactcttgt

SEQ ID NO: 33102 - DNA, 120 bp, Homo sapiens
agacgaatggagcggcccactgccaacagagcatttttccatgcacagccctgggctgttgcaggaccaaggtggctgtctggagggctggcacagtgagcctctgtctccgtttctcct

SEQ ID NO: 33103 - DNA, 120 bp, Homo sapiens
ggtcgaaagtttccaggactgccacactatcagctgggggaagtttactcaggagctactgctgttctttcatttctccactctagagaaagatctctccctcctatcagtggagaaggt

SEQ ID NO: 33104 - DNA, 120 bp, Homo sapiens
acccgaagtaaaacgactatacttacctcaagttgaacttttcagagagtgaccacgtccctctgtctggcctccttgggttggagaacgtgtgagagaggaagagagagaggagtgaaa

SEQ ID NO: 33105 - DNA, 120 bp, Homo sapiens
gtgcgtgcctgtgccagaccagggtcccgccccaaattcctaatcaaatattgtgaaaaggggctgaggaacccggatcctggtttttttcagctctgctgcaggggcggagttcacgct

SEQ ID NO: 33106 - DNA, 120 bp, Homo sapiens
ccacgcaaatccttcggtccgcctgacgctataaaaaccaccttttttccactcacttatcttccctgaaacattggcagccctgggtccctttctgctgaatgagttagtggcgcccta

SEQ ID NO: 33107 - DNA, 120 bp, Homo sapiens
aagcgcctggatttctcattaaagccacaaaggcagatgcagggatggggagggccagggtttggtaagagacatcttaactccttcagcaacccacatgtccctccagagagcgagaac

SEQ ID NO: 33108 - DNA, 120 bp, Homo sapiens
actcgcgcttctcagctccccctatagacaggtcatcaggctagtggataagggagcatgaatgacaagggacagccggctctggttccagttctatccctaagcagtgtagacttttct

SEQ ID NO: 33109 - DNA, 120 bp, Homo sapiens
ctccgacctgcctctgttatgtcacctcattctgtcaggatttttttttttttatttttgaccctgctttcagccaaggaattagggttttagtgatataaagtgactagctggtaagtg

SEQ ID NO: 33110 - DNA, 120 bp, Homo sapiens
cctcgactaagatgaagcttaattaattacgattgaccaatctgcctgaatctgggggcaggggggttttaaagtgagatggggctggggtataggggttctcttcctcatcccacccat

SEQ ID NO: 33111 - DNA, 120 bp, Homo sapiens
ttccgtttaataaatttgagcatctactatgtgttgggcatgatcctaagtgttggagacacaaagaaggcttcggtataatgcctgattataataaagcagatctgaatgtagcaaact

SEQ ID NO: 33112 - DNA, 120 bp, Homo sapiens
aaccgagcctgggaaacacttttaaatgagcctagatagcctggacagattcaccattgggtacagatgtttatttttttaaattccagcatgctgactaattctgcatttactaacaat

SEQ ID NO: 33113 - DNA, 120 bp, Homo sapiens
aaccgggcaccaccaaaaagacagtatctccatggggttttttggccatttctaaagtggtgagatgtgcaccaggtctttagctatccatcctgttccaaggcaggcctgggatgaagg

SEQ ID NO: 33114 - DNA, 120 bp, Homo sapiens
atgcgttggcacttagtaggcaatcagtaaagggttatgaaaggaattgtatttttggctccccacagagtatgtctgtcttcagtactcaatgctgggtggaaaaaccaccaccaacca

SEQ ID NO: 33115 - DNA, 120 bp, Homo sapiens
tggcggaaagaggtggcccctgaggcgctcagcatttgccctgagacctgcattacaacccatacttgtctgaaagagtcagctctccccacctgggaatgcgagttgaaaaagagctct

SEQ ID NO: 33116 - DNA, 120 bp, Homo sapiens
tcccgctggatcgtggtgggtcatagcaggacccaccctacctactgcaacaggcctgtcttaccctgtcctctctgtccaccagaaccaggtttccatggaaaccaaacctggagggta

SEQ ID NO: 33117 - DNA, 120 bp, Homo sapiens
agccgcaggcatgactaggaaggcagccgaggaggaggcagtgaggagtgggagggagcggggagcaggaggcgatcctctaagtcggaaaggccgtggtctgcagctggctactgtgga

SEQ ID NO: 33118 - DNA, 120 bp, Homo sapiens
tagcgtcaccaattattgggatttgacatgagcaagtgcttttatttggaaggaaataaagaattgaaaggttagtagctgggacatgtgcttgcctaatcatactgttatccttagaga

SEQ ID NO: 33119 - DNA, 120 bp, Homo sapiens
ccccgtggaggctcagagatgtgtggggatatcatcagccagcattttaagtaagtggaagaagtgactggggtgcagggacaaagttgatgctttaactagtgtcctctctgctgtgtg

SEQ ID NO: 33120 - DNA, 120 bp, Homo sapiens
ttccgcctgtcttcttctctctcccggctttaagctggatgccactccaactacagaggaccacctctgacaaactctctcctctcttctgtattctgtatgcagagatgagtgtgtgtg

SEQ ID NO: 33121 - DNA, 120 bp, Homo sapiens
gggcgatgggtcaagcagtttgaatggcttgtactggctccctctcctttcccacaaaacctcatccagacccctgtctgtgccatgattgaggcaaccacatggcagccattgagtttg

SEQ ID NO: 33122 - DNA, 120 bp, Homo sapiens
agccgtcagctgccaggagcttctcatgaagcctcagtacctcccaggcctgggaaaaatgcaaggagacacgaaggagccatcgtctaaggcccatggcatccgggaattgagtgggct

SEQ ID NO: 33123 - DNA, 120 bp, Homo sapiens
ggtcgagggaaccttgagtgctgctggcagggcctctggcagttcgtgtggtaactgcagcgccaacccagggcaaaagagcccagtggcatgcactcacttcctctttcagctttgcaa

SEQ ID NO: 33124 - DNA, 120 bp, Homo sapiens
cagcggaggaggataccagtcccagagtgctgagagcagcaatgattcagccacccctccttcccatggtgcacatccatccctacaaggccctggctcccctccttatccctgcttctc

SEQ ID NO: 33125 - DNA, 120 bp, Homo sapiens
tctcgcctttattggagccctgatgaagcactgctgtgtatgaagtggctcggtgttaatagaaactcatcatattcactgataatcctccattgcctgagatgggccaattaggagctc

SEQ ID NO: 33126 - DNA, 120 bp, Homo sapiens
cgattttgagctgcattctttatatctgttctgtctccactattaggctgggaccaacctgagtgcaaagtctgggtctcctgtcaacccctcgggacaagggttactttttttttccca

SEQ ID NO: 33127 - DNA, 120 bp, Homo sapiens
catcgggacaactgaccactgtctggacagagatgaggaagaggatagggattcagcccttggagatgagccccatcactctcttcctggattccaagttcataccactctggcggctcc

SEQ ID NO: 33128 - DNA, 120 bp, Homo sapiens
tcccggcatccggtgttgctgttggccgggcctgcctgccacacagccagggactgaaggacattttattccaaatgagggcagtcagctgaatttccaaaccaaagatttttccacttc

SEQ ID NO: 33129 - DNA, 120 bp, Homo sapiens
tgccgcacaggatacattcctttctacttggcctggtcaaattccacccatcctctctgggccctgttcagattttctttcctccagaaagccttcctaaactacctcattccactaatt

SEQ ID NO: 33130 - DNA, 120 bp, Homo sapiens
ccacgtgcccagccaaggtggctgtcaaggacacatccataagcagtctcctctgtcctcaatagacagctcttcttcatctctgcattctggggctggctggcacagtgctgggcacgt

SEQ ID NO: 33131 - DNA, 120 bp, Homo sapiens
agacggaagctccagcagaacctttagcaccaggatgcagaaagagaatgagaaagagggatgggaggggaggaaatgcctgggctgtgtgccagccccgcatgccttgagccaagctgg

SEQ ID NO: 33132 - DNA, 120 bp, Homo sapiens
gttcgtggtcctctgtgctctggaatgtgacaggggcttgccagggcatcgtggagtggctcctctgcaagccactcactcctcaccctggacagagctgtgctggcagctcctcctggg

SEQ ID NO: 33133 - DNA, 120 bp, Homo sapiens
gcacgggtgccccacggtggacagaaagcaggccgtgatctcactcctcctgaaggcttttgtcccattaactaaagggctcagaagcctttgtccccatagggtgttgttccttccctt

SEQ ID NO: 33134 - DNA, 120 bp, Homo sapiens
cagcgtggtacactcgtcctcaggtcagccctgggtccctgtgtcatcctctgccaaatcaggcagacacccacccccttctcatgggcgtatcttgcccagtgcaactttaagaacaga

SEQ ID NO: 33135 - DNA, 120 bp, Homo sapiens
agacggtccctgctctaggcagaggcatggagagcagaggcaaagggaacggaggccaaggagccacagaggctaaggtgaagggctgaggcgcaaggctgcaggaggagtggggttctc

SEQ ID NO: 33136 - DNA, 120 bp, Homo sapiens
cctcggagcttactatagtgccacccacataataggtgctcagtaaatgtttgtcaaatgaatgccaggcctgcagggtgctgggatatactgtaagccctcatcgagcttttattctaa

SEQ ID NO: 33137 - DNA, 120 bp, Homo sapiens
tcacgcaaaaggcccgagtgaccagagaggaaaaagatgggtggtggagggacctggcagggctggcacagaagcccccacaggagggcagcagggcacctgaagataggctcaggagcc

SEQ ID NO: 33138 - DNA, 120 bp, Homo sapiens
cagcgcccaattcagggcttagagcctgggagggaaacccctagaggagaagctggagtgagcaggctttgaaccacctccacgcccacccaccatgggctccggatgagggatggggcc

SEQ ID NO: 33139 - DNA, 120 bp, Homo sapiens
tgtcggagaagctgccagaatgatttaatcccactgcaatgtggcagctaatgaatttcatatcccctccctaagctcagccgctagagtagcccaaagacagaggagagaagaagaagg

SEQ ID NO: 33140 - DNA, 120 bp, Homo sapiens
agccggaggggaggaaagggttggcagatggaggaatgggagaaaagtgggaggcacgaagacaggagggagaaagaaaaggcagggagaggaaaagaagagaaagagccagagagggag

SEQ ID NO: 33141 - DNA, 120 bp, Homo sapiens
aaacggtctcaggtccacagcaatcagagtgtaacagcctcaggaaccaaattccccttggcccaccctccctgtgaatagagacagcaacgggagcccaccagaaacctggacttagag

SEQ ID NO: 33142 - DNA, 120 bp, Homo sapiens
ggtcgctggctccccttatctctctgtgtctttcccttcctccttctgcccacacttccccacacctccccacctcccctttttttccctctctccagaaaaaacaggagggagggtggc

SEQ ID NO: 33143 - DNA, 120 bp, Homo sapiens
gcccgcccggagagctactgcattcagcaggagcccggcagatgagtaatgctaatggcataatagtgctaaggacaacacctgcccttcacccagcacctgtctccaaggagcccaaag

SEQ ID NO: 33144 - DNA, 120 bp, Homo sapiens
ccccgcaccacttcggtaactccacagcctttcatggagccctggcccatggagcagacagttggggctgccagccaccttccaaaacatgttttgcctttttgccttcattctgtggct

SEQ ID NO: 33145 - DNA, 120 bp, Homo sapiens
ggacgctagtcccaccccagagtgcctcccaagaaagggcacctaggatggtctccccaggcatggctggggtggctgcaatgcactgcagagaggtgactggatggaaggggcagcatt

SEQ ID NO: 33146 - DNA, 120 bp, Homo sapiens
tcccgagctcgtagcctcggcctggagctctcttggctaaatccattgttgatgacgccaaagccagcataaacactagaaggaaacacagtgtctcttggcatggacacctcatgacag

SEQ ID NO: 33147 - DNA, 120 bp, Homo sapiens
catcgtgctatttcacgagccacagccataaaaagtctttatcctttactatgtacctttggggtcagacagtcgttatgggtcctggtgccctcagatcatcctgtctgcttccgtatt

SEQ ID NO: 33148 - DNA, 120 bp, Homo sapiens
tagcgcagaagcaagcatgccttgctccatggagcactttgactagtccccaggcccctgctaccctctctgggcaccgacctgggagggagaacaaggataaagccaagcgtggcccca

SEQ ID NO: 33149 - DNA, 120 bp, Homo sapiens
aagcgtgggcgtaggggttcagggaaaatccataagtgagtgtgtgcgagtggaaggcagagtaagcataggaacagaggggtctgctcaggtgggctgcctgccagggaagaatgccag

SEQ ID NO: 33150 - DNA, 120 bp, Homo sapiens
agtcgggaggctcacaggctcagaaggcagcggggtgggcagacacgtggcccagcccctgaaccctgtgatttggctctgaacaaggctagggctgtgcacggggggttagaaggaggg

SEQ ID NO: 33151 - DNA, 120 bp, Homo sapiens
ccccgagctgcaggccaaccagtcatttttccagactggccaagcagaacaaaataaaggagaaataacaaagaaaggaggccgaagcttgtgggagaaatgaggggagtgggcgagggt

SEQ ID NO: 33152 - DNA, 120 bp, Homo sapiens
gaccgcatagacagcgtgaatcccagagtcaggctgcctgggttcaaatcccagcttcaacccttactgtaataccttaacacttactgactgtatgataacactctgctttagcttcct

SEQ ID NO: 33153 - DNA, 120 bp, Homo sapiens
agacgccacctggacaggaaacagcatgagtacaaaggtaggaaggtgtggagtctaccctgtggggcttgtgtgtctgaaaaagaggagagggtcatgttccggtcatggagtggagtt

SEQ ID NO: 33154 - DNA, 120 bp, Homo sapiens
ccccgcctctctctccctatccatgaaaagggcaacaacagggttggctggtcaaacttctgtccataccacctgccgcctccgattcatcaacacgccttttgcctctcctaatgagag

SEQ ID NO: 33155 - DNA, 120 bp, Homo sapiens
ggacgcctcccccgcctcctgcttcctttgccaggctcttggggagctgggctgcctggaacagcagtctgcggggttagccgtttcccccaccaggtcacatgtacacatccatggaca

SEQ ID NO: 33156 - DNA, 120 bp, Homo sapiens
atgcgagcctgagtctggatgtggctcctgcagggagtggggggagcaggtgtgtatgcattggggaggaacgatggtgggggtgtggcaaccaagcagggatggcaggagcgtatgtct

SEQ ID NO: 33157 - DNA, 120 bp, Homo sapiens
aggcggcagggagagtgaatgaacactcgcatttgcatttctcccaggaataaatgtgtggggtgggagcggggagattgcctaggctggctgtgggggtggagggcctctggctgcaaa

SEQ ID NO: 33158 - DNA, 120 bp, Homo sapiens
gcccgccaaatgtgccatctgcctactggatgccctccaggatccagggctatctttccctccacccagcagagcctctgatggtgtcttttcccaggtggggggctgccaggggtacaa

SEQ ID NO: 33159 - DNA, 120 bp, Homo sapiens
cctcgagggccaggctattagatctgcctcttcacctggtgtgccagggcagagatgagttctgccaagccatctgctctgagggcctggaaacacacggattcaggactcctggggaag

SEQ ID NO: 33160 - DNA, 120 bp, Homo sapiens
tcacgtcacctctttgggcctcactctcctcatctataccacaaggacttggactagatctttagggggcctcacagctggaattcagtatctggttggtggaaaggagtagggaacaag

SEQ ID NO: 33161 - DNA, 120 bp, Homo sapiens
aatcgagcttagtgactagcagtcatgttctgagcatggggttgtttaagagaggacatctgtgtgcatgcaccagtgtgtgcctcgtttgtaaacaaggggactcttgtgaatgtgtct

SEQ ID NO: 33162 - DNA, 120 bp, Homo sapiens
gagcgtgtaaaaacactcaagtggggcggtggagggagggggctgctaggagataccccccaagacatagtcccagctggtagggaatttgtgcatgtgatgagagcactgagtctgcaa

SEQ ID NO: 33163 - DNA, 120 bp, Homo sapiens
ctgcgagccattcccacaacactctggagagcctgtccctcagatcgctgcccttcctcgtgcccacttgccaggaccagccgctgaagggattctcagtcccatctgactccccatgag

SEQ ID NO: 33164 - DNA, 120 bp, Homo sapiens
aggcgattcctttgaagttctgcctctgcggaatgatgtcctgaacccagacaactatggtgaagtcattgacctgagcaactatgaggagctcacagattatggggaccaactccccga

SEQ ID NO: 33165 - DNA, 120 bp, Homo sapiens
gtgcgggtgtctccagcctccacctctttctctgtgaggtggaaattcttatccctccatagggacttgtcacttagatgatactaagaaacaggacacaaacctgggacttctccttct

SEQ ID NO: 33166 - DNA, 120 bp, Homo sapiens
cctcgctcctgcaaccagcatcagtcccgccaagagcactacggctccagggacaccctcgtcaaaccccacgatgaccagacctactacagcagggctgctactgagttcccagcccaa

SEQ ID NO: 33167 - DNA, 120 bp, Homo sapiens
ggtcgcaatatccctaggtcataggccaagcagctatgacccagcaccagggggtaccaaagtggaacgtggttggggttggggcatggagggtcagggctacccttactagcagggaga

SEQ ID NO: 33168 - DNA, 120 bp, Homo sapiens
tgacgggggaagcaggttgagtggtaattagattacagacaattaaaagcctgtagagaagaataactaactttgtggctgtcacttggcatgggagcaaatgaagcagtcacactgctt

SEQ ID NO: 33169 - DNA, 120 bp, Homo sapiens
ctgcggctggcatccctggcagtgaggcctcagcaatctgctggaaatcagaagtgggcagaggaggggtgaagttcattctggacctgcttgcccgcggtttccctgttctcttctcgg

SEQ ID NO: 33170 - DNA, 120 bp, Homo sapiens
caccgcctttcagaggaggagttcgtttgtctccagaggaggagttttatgaggacgatattaaggtattcattagaaatggccatgcaaggccgggcgcggtggctcacgcctgtaatc

SEQ ID NO: 33171 - DNA, 120 bp, Homo sapiens
ccccggtgcctaaccactgtgagatgtcagacaaaggctgaccttgtttctctttcatgaggattaccacttctgacgtctcctagagcttccatggagaatgtaaaattaaatgtggac

SEQ ID NO: 33172 - DNA, 120 bp, Homo sapiens
aatcgcaatcaattttcattgcagtttctgttggagttggcttacttctttccttgaaaggttcttgtaagaactagctgcagtcacaagatgattcatgattaggagcatgctgaagtt

SEQ ID NO: 33173 - DNA, 120 bp, Homo sapiens
agccgggaggtcttgggtgatgactcccttgtctctcggctcttggccaactggtccaccactgacaagcctgttcaaagccattctatccctcacagcccagggagtgttaccactccc

SEQ ID NO: 33174 - DNA, 120 bp, Homo sapiens
catcgcccggcccctgcccagacagcccaccttggcagccccaacagcccaccttggcagccccaaccacacaaaaggctatagcttaagttggaaacttttattattacacggggcttg

SEQ ID NO: 33175 - DNA, 120 bp, Homo sapiens
aatcgtattcttttaaaaactgagatggggctattttaaggcagccaaagattacctgtttatgtatgatgcatgtaaaactgtatggagaattacgtgaacacctataatcactcagga

SEQ ID NO: 33176 - DNA, 120 bp, Homo sapiens
tcacgtcactctaaggtagagaacctgggagcgtgggattctggttttccttgggttagtttggggaaggtgagtccttaaagctgccgggataacaaaataagggagtggaaggtagag

SEQ ID NO: 33177 - DNA, 120 bp, Homo sapiens
aggcgtcagaatcctctagaaggcagatctcttgcttcccttatccgaggggcacctctgcgccttccttgctgctgagttccttctccattcctgtgggccagggacaggaatgctgag

SEQ ID NO: 33178 - DNA, 120 bp, Homo sapiens
tttcgagttgccaaggaaaccgcacagcctatctgcatcttctgttttgttcctgtcaaaaccatgaaactttctaaggccaaatcagtgggagctctgtcagagttggtcagcaaggag

SEQ ID NO: 33179 - DNA, 120 bp, Homo sapiens
ggccgctccagcgtgaagcctcctgcacggatgccctcccacacagctgtgcatgcacacacgcacacgcgtgcacacacaagcacacaccacccccacacacccgcacctccaatcagc

SEQ ID NO: 33180 - DNA, 120 bp, Homo sapiens
caccgggaggagagaaaaatggaaaacaaatagggaaaaaaatccaccctgcccaccccacagagccacacacccacactacttccatccccctctcctctgagtcttgcagggctggag

SEQ ID NO: 33181 - DNA, 120 bp, Homo sapiens
ctccggcgtggtggctccagagacagcgtgccagtcaggctaccctaggaggtgagtcctgggagcaggaggaggcagcaagcagagaaagggatatggaggaatagccccgtagttcca

SEQ ID NO: 33182 - DNA, 120 bp, Homo sapiens
gaccggagttgaaacaatggccagttccccaggagacttggcttaggaattggtctcctagaattattgagcccttatctaaggaagctccacctttcactctccctcttcaaactcatg

SEQ ID NO: 33183 - DNA, 120 bp, Homo sapiens
atccgtgtggcagcatgtgtcagaacatccttccttgaataataattccattgtatggatgtgccacacttgtttgtccattcatctgcccatggaggccctccttttttaaatcacatt

SEQ ID NO: 33184 - DNA, 120 bp, Homo sapiens
tctcgacaaatacttaatgcgcatgacatcacctgaacccagaagtgctagctagagagaagtgattatctggggccagaaccttgcatttgcttgccttcctagggaaagaccctattg

SEQ ID NO: 33185 - DNA, 120 bp, Homo sapiens
ctgcggactgggaattccctaagggaaagagccttcttcctttctttttctaatcttcctccacccttttttgttctcctcccttttgtacctccacaacacaccaggaggtgtaccgcc

SEQ ID NO: 33186 - DNA, 120 bp, Homo sapiens
ctacgtggctatgattatgggattcttgtttgatgtagttggtgggaaaagcagaggacatgctccctgaaaagaccaggaacttactggctagtattgttactggtgataaaattgtga

SEQ ID NO: 33187 - DNA, 120 bp, Homo sapiens
atacgtggtaattaacctacagtggtgccacagttgctgcttctgggtagagcagagcggtgagcaactctgtctcctttccaagctggcaccagctcaggaggaagcatccaaggggat

SEQ ID NO: 33188 - DNA, 120 bp, Homo sapiens
cttcgctttcccaaagtagcttaattttggcccccgttcttcgtgcctcctaggttttgttgggtggacatttaacatagtagaaagctgactcctcttcctattaacctcctaggttta

SEQ ID NO: 33189 - DNA, 120 bp, Homo sapiens
gcccgtgatctactgagaggagaaagtttcaaacaaagcaaccctagataatccttctacaagtacattagcaaaggagcaatgttccctgtaggttctagggagtggatatgggcagca

SEQ ID NO: 33190 - DNA, 120 bp, Homo sapiens
attcgctggcagtctggagtaaggttctggagtgtggcctatacttatttttcctgtgctcttttcttctttcctcttctcacaattgctcagttactcagtagactagtgttggaggta

SEQ ID NO: 33191 - DNA, 120 bp, Homo sapiens
tttcgcttacaccaacttttttttctttcttctcctcgatatgtttgtccttcttgctcgggtgctaccttttaaagcccaaagttgggaatccagggagctgcgatgattaactgcagg

SEQ ID NO: 33192 - DNA, 120 bp, Homo sapiens
agacggcaaagtttccatagcctcactgccgtgggacttcccccgcatgaaggcgagctctctttcttggtctggccattggaggagggagggaagacagcagcctggcgtgtcctcagc

SEQ ID NO: 33193 - DNA, 120 bp, Homo sapiens
ctgcgaatccttgtgtagtggtggggaaagagagaagaaagcagcctgtcaccaggggttggattttagcatccatatgtctattccccaccatgctctgtaggctcagagtggaacgga

SEQ ID NO: 33194 - DNA, 120 bp, Homo sapiens
atccgtgaccccagtgacacagatgggtcctgggttggtgctggctgtggcagccccacaagtgcctgacttgcttttcagcacattcctgctccttccactgtgtgagccactgtggac

SEQ ID NO: 33195 - DNA, 120 bp, Homo sapiens
ctccgaccaccatcccaccattcttccaggttttgccttggaggttgaagtggtgtttaaagtggtatgtataggagtttagaatcaactgggttgtgttcacctttgcctctccctaga

SEQ ID NO: 33196 - DNA, 120 bp, Homo sapiens
agccgtactgactgctgagggtctgttcttaattatatcttcactgagattatgcagtactttacaaacacccatcagaatttaaacaggatctttctttttcccttcctatgctgttct

SEQ ID NO: 33197 - DNA, 120 bp, Homo sapiens
actcgggagtccaaagaagctggaacctagagaactcctgacagcaggattcaggctttcctccaattttccagatcccttcccagagctgccactgtttactttctgattcccagagag

SEQ ID NO: 33198 - DNA, 120 bp, Homo sapiens
cctcgttacagcccctggccatgcctgtagcctaggactcctaacactggcacaattttctactgccatgtactgcttccttagatcacaaatatgtgtcctggtgtttttctttctttt

SEQ ID NO: 33199 - DNA, 120 bp, Homo sapiens
acacgtttccctaagcattccttcttcccttaggggagagaaggtttctaccacttggctggagaatcatcttgagctgtttagtggaggacagtttatgaaaaggaaacaaaacacatt

SEQ ID NO: 33200 - DNA, 120 bp, Homo sapiens
acacggagacacctttcaaagtctttgccatcaggcagaaacggttcaaacctctcacttcctaatccccaccccatttttccaagcaatgtgactcaggccaggagcaagagaaagcac

SEQ ID NO: 33201 - DNA, 120 bp, Homo sapiens
gagcgttttggtggatatcccgaggattcatgacagcctctagcaagaatgaatgaaaacagagatgtgagcttcctttacatttatgtcccttccctgcaacccaaacactttgctgtt

SEQ ID NO: 33202 - DNA, 120 bp, Homo sapiens
tttcgaccccacttttttctttcttgttcaaacaggtaaaaaacaaggagtccctgaaaatcgcaacaaaggtaacctctccaactactcatttaccatctctacctgcccacactcaaa

SEQ ID NO: 33203 - DNA, 120 bp, Homo sapiens
attcgttttatttttgtagagtcctttaaaacattttttactgatttcatgttgcttgtcagcatgacctcatttgtcctggtctatgaggcagggcagagatgagcccgatttcataaa

SEQ ID NO: 33204 - DNA, 120 bp, Homo sapiens
gaacgagcacagctaagggacttgccaagtccgagtcagaacccgagttccctgactctcccccttagatcagttatgcagtttaactgtgacaaaatgggggtctcctctggggggctg

SEQ ID NO: 33205 - DNA, 120 bp, Homo sapiens
ccacgccaccttgctctagaaagcagagcggtgccgtcctcagaatgacggactaaccatggccaacacggctgctcacctgctgtgtcccagatctgtgccaaggatttacaccaatta

SEQ ID NO: 33206 - DNA, 120 bp, Homo sapiens
tgccgagtctcctagggatctggtacatgtattttgactgccagtttacggatgggaacgatgagactcagagaacttagatgagcccaagattgtacattgagtttgtggcagagttga

SEQ ID NO: 33207 - DNA, 120 bp, Homo sapiens
tgacgctcaaactcgagccctctgctctttccaccgcacacgcagacctctcacctgggcccttctagaccctctctgcaattattttttcccctccatacaggtagatctgtgaaggtg

SEQ ID NO: 33208 - DNA, 120 bp, Homo sapiens
cctcgggtcaggactgcaggcagtgggggaagggaagcactgcagggagctctaatggcccaatgcgggcagagagagggccaggaagggatgctcatctgtctccctctttggacagag

SEQ ID NO: 33209 - DNA, 120 bp, Homo sapiens
tgccggtggctttttcagtctccatagaaaatccccaaggctcccttggggcgggctgccatcagctcttcctgcactcttaatcacaccgtggagcacgggcagctcctgtagacacag

SEQ ID NO: 33210 - DNA, 120 bp, Homo sapiens
ccccgtcctgccactcccttctatgagcgcagaccttctggtttagagcttcagtctggaccattgtgctgtgtcctctccaggcggggagggcatcaggagtaaacctccttccacggc

SEQ ID NO: 33211 - DNA, 120 bp, Homo sapiens
agccgtacagtaagtctcccagggttgtacggcaaggcaggggcagagctgttctgtaaacaggcgtcagttcagttgccttgaaaccgccaactctaagatggacatccgaggggaaag

SEQ ID NO: 33212 - DNA, 120 bp, Homo sapiens
agtcgaggaactgattttaggggaagactaaatctctttctctatccccatcttcttgtcgtctgggtcccttgaactccctgctgagaaatcctaaatacaccttgtctctgggttgcg

SEQ ID NO: 33213 - DNA, 120 bp, Homo sapiens
ggtcgggcaggtctggcactgtctgggtcttgctgcttctagacacttcaattagggatgttaattatggccttgtgaacacaggctctcccaaggcagccgctctccagccctgctgcc

SEQ ID NO: 33214 - DNA, 120 bp, Homo sapiens
tctcgcctctgtccatctgcagattaaagatgccctgaaagcataacttattagcagttttttgttctctccatcttttaaaaaattggattaaagtagacataatgtaaaatttacaat

SEQ ID NO: 33215 - DNA, 120 bp, Homo sapiens
tagcgtccccttcctctctcactccagccctgtaactctattctactttctgtctctatgaatttagctgttctaagtacctcacataagtagacacatacaatatttgaccttttatgc

SEQ ID NO: 33216 - DNA, 120 bp, Homo sapiens
agacggatgctgggtttgaaccaatgctgcgtgtctcccagagcctcatttcaccatgtactatgagggcttagtctacatggcttagacttgtcacaaagcaaaagccgataatgccca

SEQ ID NO: 33217 - DNA, 120 bp, Homo sapiens
tggcgggtaaacatggctgtttgcagactagttgcgcttgtcctttccgctgtctgtagtcatccctatggtccccaccttcctctccctctggggttggcaggagaacgcaagggttaa

SEQ ID NO: 33218 - DNA, 120 bp, Homo sapiens
agccggggaagggaaggcaccgtggcttggccagataagcggtggcgctgcgaatgtggggcttccttggcagatttgtagcctttccgcctgtttgcactgtggggcacctgctggggc

SEQ ID NO: 33219 - DNA, 120 bp, Homo sapiens
tggcgggccctggtgttctgcaggtgcatgtcttctgcttgtttgaccatgtgggggaagggggtggcggtgggtcagggagcaaacatttttttgattttcacaaacaccatcatattc

SEQ ID NO: 33220 - DNA, 120 bp, Homo sapiens
catcgcccgaggccctgtgtcccagctgggccctcccagtcctcttccagtcttcccttccgctgtcccaccccccaaccgtctgctaagactccaacattcagcttccttccaacatac

SEQ ID NO: 33221 - DNA, 120 bp, Homo sapiens
gggcgtggcagcaacctcctgggtgagagaggaaggctgtgctttctttcagaggccagaggccctggggcagaagggaacccaccagggtttgggcaaggcagggaaacagacctgaga

SEQ ID NO: 33222 - DNA, 120 bp, Homo sapiens
attcggaacagagcatgaacagagcgttttcttgaatatcaatagggctgttgtctggaatagcaatgaaagtaacctcaacactcagcattttcatgctgcaaagcctcagcaggctga

SEQ ID NO: 33223 - DNA, 120 bp, Homo sapiens
tttcgggctctcccccagatgtcacgttcttcttcttatggaacctaaatccaccttcaatcttcctgacaatggtaattgtttgcgtgacaggatgagtgacagcatcggatacacaga

SEQ ID NO: 33224 - DNA, 120 bp, Homo sapiens
ctgcgagcaaggttctctggacagcagggtgatgaggagaaaggaaccatggaatttacggggcacaatgtgacagagctgggagggccctagaggtcatctgaaccaattctacgtagg

SEQ ID NO: 33225 - DNA, 120 bp, Homo sapiens
gcacgttagatcagtgctggaattaacctcaggcctgcttgatgccttgacagtcttataccaaactgggccttttattttgaaaacgctactccatccccagggcgggttctgtcagcc

SEQ ID NO: 33226 - DNA, 120 bp, Homo sapiens
agccgctaccattccagcacaagctacaagcgccccactcggcaccttcctccacaggcagcccacagcggggctggaggtagtcagctggggagttagcctaaggctcagtgagtggct

SEQ ID NO: 33227 - DNA, 120 bp, Homo sapiens
gcccgagcctgcagcgatggtgaggagctgagtgctagctggaattccacagggtggctcctgggacccacaggggcagctcagagcctggaggatttgctcccaccatggggtggagaa

SEQ ID NO: 33228 - DNA, 120 bp, Homo sapiens
ggtcgggggggcggggggtctcttaaaagttcccgcctcctcaggtttcagagctggctgggtacgcgcttctggtcagcgaggggcaccagcacgcagcgacagggggtgcggcccgca

SEQ ID NO: 33229 - DNA, 120 bp, Homo sapiens
acacgcagcatgccgacagtgggcaggtggccaccaggcgtgcctaagagccccgggaggaggggggcgtgtgcagggccaagggaggtgtgagcctagttttggtagcgacgaaatcaa

SEQ ID NO: 33230 - DNA, 120 bp, Homo sapiens
atccgtacacaaaccacgttccaaacctttcttgcgcagcagccgcgcacccctgggactgacacccggaaggatgcgaggactgggtccccgcatccccctggcagccctggcaggacc

SEQ ID NO: 33231 - DNA, 120 bp, Homo sapiens
cctcggccccgcgcccactccgctaccttggtccgaacttgctcgggtttccaatgcggccgcagctcctggatgaggcgcagggccccgggaaggatgtcgtccgggtccacggaaatg

SEQ ID NO: 33232 - DNA, 120 bp, Homo sapiens
tgccgaagtacgcgacggcggcggccctcggggggcccggcggctcccggcagctggcgctggccgccgccttctcctccatgccccatgagcactgcgggcaaggcgtgtgcctcctca

SEQ ID NO: 33233 - DNA, 120 bp, Homo sapiens
ggacgcgcgcggctgaggggccgaagggggcacagccattcccagcagccccaccccctcggagccgcggcagacgctagccccggcgggggggtccggcgagggagtgggagtggtaga

SEQ ID NO: 33234 - DNA, 120 bp, Homo sapiens
aggcgcgagctgcccgcttcgatcgccggctcgcggcccgccgcccaccgccgaccccggagcgccgcggcccgccgcgattgtgacatcacgggcggtggcccgcgggaacgcccccgg

SEQ ID NO: 33235 - DNA, 120 bp, Homo sapiens
tccgaggccgcgagactccagctctctcccggtagcctggggtggaggcgggggagggctcgtcctgcgcccccacctcatcctggaatagagagatccgctgctcccacgacgtcagct

SEQ ID NO: 33236 - DNA, 120 bp, Homo sapiens
gctcgcccctctgtgcccctgctccgtgcccccagtccccggaccccgggaaatggctctgcaggggcggcccctgctgcatctcaaaggtccttccctgcagagagcccccccccacac

SEQ ID NO: 33237 - DNA, 120 bp, Homo sapiens
ccccgacagaaacacactgcatgaagaggggacattgggtgatagcgttggggtgagagtgtgccagtccagcagactgcgctgtcccctggcaggccactgaacagccagggcgttgga

SEQ ID NO: 33238 - DNA, 120 bp, Homo sapiens
gagcgtgtgaatggagccaggtagcaggccagcggtgtacccgagcccagtgctttgcttggcattcggggtgtgaagtggacagaccctcgcgcgtcctggggaggacagccaaatgcc

SEQ ID NO: 33239 - DNA, 120 bp, Homo sapiens
tggcgcagctaagggccaaagcaaggcatggtgatggctgggggtgggaaggaaggggaaggggtgacaaggtgtcccggggcaggttgctgtggggaggagacatggagagaggccagg

SEQ ID NO: 33240 - DNA, 120 bp, Homo sapiens
ggccggctcagggggcaagtccctctactagccagattctcctttggtcattctctgccaccttctgagcagggctctgttggctgccagccctatttgttgtagtgaggcctcagggat

SEQ ID NO: 33241 - DNA, 120 bp, Homo sapiens
gtgcgtgtgtgtgtgcgcgtgtggtttttgttgttgttgttgttgtttaaaaaacccagagaggaggtgagggggaagggagggtagggaatcttgcttttttttttttcctttttcccc

SEQ ID NO: 33242 - DNA, 120 bp, Homo sapiens
atgcgaaaaatcgcaaggaatcctgtgagaccatttgaaaaaatgtaaattatattgaatgaagttgacggaagcataatagtgaactcccacagctgataggttctgcaaatgatttct

SEQ ID NO: 33243 - DNA, 120 bp, Homo sapiens
ttccgtctttctcgtgagggtttctgcagtgagttctgtctggtttctcattacccagagccctgagctggacaacaaacaggaaactcaaatgtcactctcatatcctggtcctaactg

SEQ ID NO: 33244 - DNA, 120 bp, Homo sapiens
gtacgagagagagacagcactacccaagagctccgcacaccccagcacacacacacatcccccaaacacttttctggcatgcatgtgcgtgcacaggcacgcacacacacacacacacac

SEQ ID NO: 33245 - DNA, 120 bp, Homo sapiens
gtgcgcacgcaggcacacacacaaacacatcccccaaacactttctggtcagaaataccaaacccagtgcatcagactaaccagaattgagacagacttcactgaaagtcctgccttgcc

SEQ ID NO: 33246 - DNA, 120 bp, Homo sapiens
atgcgaaggcactttgtaaatgaaagcagtctataaatgggttgctcctatctcgtaactcctaaccacttctcatcaagggtgttagccctgggccaacagatggataaagggggagga

SEQ ID NO: 33247 - DNA, 120 bp, Homo sapiens
acacggtgcacgaaggatgaggaagatttcaccaggcagagatggaacagggtagtacaggggtgggcaacaccttaagcaaaggaagggaaataagagagcccaggacacgttcagaga

SEQ ID NO: 33248 - DNA, 120 bp, Homo sapiens
aggcgaggttggtttgtagctggaaagagctttgaacatgaggccaaggatactggccggtttccatgcctctggtagagtctgggtttccagctgacattctcggaagctaagggtcat

SEQ ID NO: 33249 - DNA, 120 bp, Homo sapiens
aaccgtctcctcctcatcaccccagcccagccccaacccagctcagcccttctccagaaacaaagccaagcccacacctgctatctctgacctcatttcttccccactaattgatcagaa

SEQ ID NO: 33250 - DNA, 120 bp, Homo sapiens
agacgcccagccagggcgcagagagagcgctgggcgaagaggggtcgatggcccgcgggaacagggctggggttcctgtttggggaccggccggctgccaggcccctcgccctactgctt

SEQ ID NO: 33251 - DNA, 120 bp, Homo sapiens
ctccggagcgccgttgaccataggcccgtacaggccgccgccgtaggtcggctccttgtgcaccgccgcagcagcggcggccgagcggtcacgcatgagatcgctaaaggcgtagtccat

SEQ ID NO: 33252 - DNA, 120 bp, Homo sapiens
acacgcgtgtcaagatatccagcggcgtccgctgccgtggacccgagcctccgcccagccctggcgccggcgcggcctcaccctcttctttgtcagcctctgaaccggattcagagccca

SEQ ID NO: 33253 - DNA, 120 bp, Homo sapiens
tagcggagcccgggctgtcctcctcgccgccgccgccagggccagcgctgcctgggcagctgccacctgcctctttggaggcccgagctaggggcgaaccagaaaaggactcgccatcgc

SEQ ID NO: 33254 - DNA, 120 bp, Homo sapiens
cgccgttctccgagcctgagccgggccgcacctctggggacgacgtcccgggccccgagtctgcgccgtcgggtgataagggcttcaccggcggcggcagcgggctgcccgggcggcctg

SEQ ID NO: 33255 - DNA, 120 bp, Homo sapiens
cagcgtcttaggaaacaggtcaaacttctgcaacttggcctctgggaggggagaaaacgtgtcgtgaggagcggttagctagaagacagcagtcacagcacctcggccctttggatctca

SEQ ID NO: 33256 - DNA, 120 bp, Homo sapiens
ttccgctctgagcccctacagccctgaccccagggctccctctctttctgtactcctcagaaccccaactacctgtgccctgtaaactcgatgttcagtgctgctttccccacgtctgtg

SEQ ID NO: 33257 - DNA, 120 bp, Homo sapiens
tgccgtggagaagtggccaggtccagggttcaaacaagagacaacataacttctgcctaaccacgctgtacagaagagcccactgtatagaaaatgcctgccctggcagtgcagcctgta

SEQ ID NO: 33258 - DNA, 120 bp, Homo sapiens
aggcgccttggttatctaggaggtcccaagcttctctacaggcagaagtacagcccctgtttctaatccaccctttccaaaattgagacctgagaagttcttccctcccaagtttagagc

SEQ ID NO: 33259 - DNA, 120 bp, Homo sapiens
gagcggatccctcctttccctcaacggctctggcctaatttcttccctccccacaaaaagccacgggggtccagaaaaagagggtggtgctaggcaggcagtaggaagcgaagaggaaaa

SEQ ID NO: 33260 - DNA, 120 bp, Homo sapiens
gtgcggaagaaactagaaggagggagggcgcagcaagcggttgtccagagggcgttaggaacgcgagaaggggaaaagaaactagggcgtctcagaacctagggcgtctcaaaacctagg

SEQ ID NO: 33261 - DNA, 120 bp, Homo sapiens
aagcgcagagcgaacgaagatgcgcaggtttccacctggggagaagacgaagcaaagaagcagggacctgcctgcgtttgggtagaggcgagtaaaaaaattaaagcgtgtacatttcgg

SEQ ID NO: 33262 - DNA, 120 bp, Homo sapiens
gcccgatgcaggagaaaggggtaaagtgcaaatgctccagaagcgggagaaaggagagtttctgtacccacgctccatacccgaggctgggcgagcggtgaaccctagcagtcgcggcga

SEQ ID NO: 33263 - DNA, 120 bp, Homo sapiens
acacgggggttctactctttctgaaccgagacaagcccctgggccccgtgccccagagctacgatcctgctgcccctacctgcggcctggccgcgctctcacctgagccccctgcgccag

SEQ ID NO: 33264 - DNA, 120 bp, Homo sapiens
ctccgcctccggtccccgcgggcgctcccgctccaggtcccccgccgtcggcggcgcacactgaaccgaagacctcgtaggcgggcctcggggggatgatgccgttggcggcggccagcg

SEQ ID NO: 33265 - DNA, 120 bp, Homo sapiens
tggcgcacaggcagtccttccagcgacagtagcgtttgtggcccttgagggccgacaccacgccatggttgcgacagcgcgcgcacttgggggtccgcgggtacttctcggctgcccgca

SEQ ID NO: 33266 - DNA, 120 bp, Homo sapiens
tggcggcccccgcagcaagccgcctgccacgctcaccggtagcgatgcagcggccgccgcggctgccgccaccgacgccaccgacgccacaggcggccccgtcgctgttgccgccgccgc

SEQ ID NO: 33267 - DNA, 120 bp, Homo sapiens
cgccgtcgccgcgccgggcacgctgggcagctccgagcgcagctccatgacaggacctgacgggaaagaaggtgggagaggggagagacctggtgaggagcacaccgcgcgctaggccaa

SEQ ID NO: 33268 - DNA, 120 bp, Homo sapiens
aagcgccgccttgaggaacccaagctggagagggaaatttgggccgcggaggctgggctagaggggccagaattgctgggaggaggtgcagtcggaacctccttgtgagccctagcacct

SEQ ID NO: 33269 - DNA, 120 bp, Homo sapiens
acacgctaggggtaagattttgtctgaattagtgattccgctggaaaaaataaagagacatgtaaagtgtgaaagtcactgattcagatggctgtaatgagaatttggaaaagttaagat

SEQ ID NO: 33270 - DNA, 120 bp, Homo sapiens
agacgggtgagagaaatgctcgtttgacgggactgggattagagcgacagttttggcccagaagttaggctgatgccaagggcaaaacaggaaaacccggagcaaaacggtcagtttggt

SEQ ID NO: 33271 - DNA, 120 bp, Homo sapiens
attcggccaaagaaactttctgtataggcaaacccagcccaaagatgagcttcatgggcaaggaaaacagtgaaaagcagctgatctgggtgtccgggatccaggggccgcgcctgggag

SEQ ID NO: 33272 - DNA, 120 bp, Homo sapiens
cttcgcagtctggagtagtagtcggggcggaagacgtatcctgcgaaaagttaggcatttcgggagggggatctttctcgaagaccacctcacactgccctcccctcccctccgggttta

SEQ ID NO: 33273 - DNA, 120 bp, Homo sapiens
agtcgtcagacacgccctccccgtcttggggtcccaggggacccctctcgagcgcaggctcctgcgttctgatctcagagttggggtcctaggacacggatggcccagcaggccgcacca

SEQ ID NO: 33274 - DNA, 120 bp, Homo sapiens
agtcgccttcgcaactggccataaacggacaccagagtccctcccacgccgcagccccataaggcccaagcaggcccagctccccgcttctgccgcggtctcctctgcttcccgcgttcc

SEQ ID NO: 33275 - DNA, 120 bp, Homo sapiens
ccccgtccctgccagagcccgcgacagagtccttgtgtctccgtccgagagtcccagacctcctctctatgagcgttgcctcctctcccagacccttcgggcgtccctaaggcccacggg

SEQ ID NO: 33276 - DNA, 120 bp, Homo sapiens
ggccgcagaccaggtctccacccactgctctccctgcggccctcaactacctgccttgggctccgggatcctcctcctccgctggcgctgcacgcgcctcccggctccactggcgacgct

SEQ ID NO: 33277 - DNA, 120 bp, Homo sapiens
ggccgcttccctttgcccccggccccttatctgaccacgtcaccctccttcagtcaccatgtccgaacttccggacccctcagaacgcagcgcagtccaaccctcccttcagaaatccgg

SEQ ID NO: 33278 - DNA, 120 bp, Homo sapiens
ggtcggaggctcgtctgcgggccgcgtggttggaacccgcgacctgactctcgccgtgccgggtcccctcgcggtgcgcgccggacgctgcgcgcagccggggcccagttgcccggcgct

SEQ ID NO: 33279 - DNA, 120 bp, Homo sapiens
agccgctcgcccgctctattgttggtccttagggctccattagacagaattggacaacaatgtggcgcctgccattggccaggggaggcagacggcgctctgattggccgggcccgcgcc

SEQ ID NO: 33280 - DNA, 120 bp, Homo sapiens
gcccggggagccccgcattctgcagtgtccgaaagattcgaaactccaaaagctccactgcgtgcctctgggaggggagggggcgcgccaggaaaggagtggaaaaaagtgggcgaggag

SEQ ID NO: 33281 - DNA, 120 bp, Homo sapiens
gagcgttgaaaatttcctgacaagtagtttccgtgcgcccgagagcgtgtgaattgctcctaattaccgtgtccggtgcgcctctctgcgtagacttgtgtaacctctcggcttctgggg

SEQ ID NO: 33282 - DNA, 120 bp, Homo sapiens
gggcgccggctcggctgcaccgctcttactggcctggggcgcttggcaaagccgagcttcccaagtggctctggagccctgaggcgggatggggggcaggtgacaattcaattactgcgg

SEQ ID NO: 33283 - DNA, 120 bp, Homo sapiens
ggtcggggtaggggcgggacaagggtgcgggggtggggaagggagggtgttcaaggcataaatgccaggacgatttttcctgccttcttcctgctatgtttcggcgcgctcccaaatccg

SEQ ID NO: 33284 - DNA, 120 bp, Homo sapiens
gatcgtatctcagcaactacatttaatgagacagtgggaaaaagagagctgtccacttttaaatcagcatatttctaactaaacaatggcaatggctaaatctttaaaatgcctatttct

SEQ ID NO: 33285 - DNA, 120 bp, Homo sapiens
tgccgaagaggctactaagaaacccaacatgcagagttctctataagtgcagccgacagtgttgactgaaactaaacttggaaatccagggcactaatgcacaatatcaagcaataaaac

SEQ ID NO: 33286 - DNA, 120 bp, Homo sapiens
aaccgaactgagtcatgaggctaaaatttcatttactgccaaccaaagcgcaactctaaaaagcttatttttattcacaatccgaggtttcttctgcccttcccccagccattttttttg

SEQ ID NO: 33287 - DNA, 120 bp, Homo sapiens
ctgcgttatagtcctcaattgatttggcaagttggtaaagtttaatgaaataaacaccaacagttacaagttctcaggctttttgctatgtacataaacacaaacactaccatgtaagca

SEQ ID NO: 33288 - DNA, 120 bp, Homo sapiens
aaccggagctggaagaaacaaggatggctgctatacatggcttcattttacacacaagatactagatttggaagagtcctcagaattcatcagttgcttgtatcccaaccaggagatctt

SEQ ID NO: 33289 - DNA, 120 bp, Homo sapiens
ctgcgtctataaggaagacaatgtaaaacagtgccattaatctactctgcccacttgttttttatagaattgcacttcctttttatttcatgtgatttaaaaaacacaagtgcacacatg

SEQ ID NO: 33290 - DNA, 120 bp, Homo sapiens
atgcgcaaacacagacaaattaagctacttgcctaaatgtcattcacttagttaatgtctaggtcagaacaataatgcggatttttaaaattcttaatccattttccttttcttcaagaa

SEQ ID NO: 33291 - DNA, 120 bp, Homo sapiens
ccacgctgatgctcagacgtgatgtgatgtttatgtttgctttgctgttttctgttgcccatccaggcctttgcctttctctgagatgtgaaaaaagtggtgggaaccatcagcaacaga

SEQ ID NO: 33292 - DNA, 120 bp, Homo sapiens
taacgcaccaaagacaacctacttaacctctcctttaggaaatattaagtaagctcctccaaagaacagccctgagagatacttaaaagtgtgtctggtcaggttatctgagtctaactt

SEQ ID NO: 33293 - DNA, 120 bp, Homo sapiens
ttgcgggtgtgagccactgcacttggccccaaaacaatttttaacggatgatgctgggacacctacatataaccacatagttaagtgaagttgggcccctttcttactatatgcaaaaat

SEQ ID NO: 33294 - DNA, 120 bp, Homo sapiens
acacgtatgtgaaccacaagactgaagaaatctagcctctgaaaaacccatagttggagtttattttctctaaaacaatttagttatttttgtttgttaggttcaaggatttaagagacc

SEQ ID NO: 33295 - DNA, 120 bp, Homo sapiens
ttgcgtgtggatgacagctcatcaaaactggtcaactaggactgaggctaagattcaggaaggtaatttagactggaaatggtaattcaagggttgaagaactcagagctggcagagatc

SEQ ID NO: 33296 - DNA, 120 bp, Homo sapiens
tgacgttggggagatgttagaataatttacaaatattggcatttacaaagctcttagttatctcatgattatatcaactctttaaagtgggtactgttatctgctttattcaaagacatt

SEQ ID NO: 33297 - DNA, 120 bp, Homo sapiens
gcacgggctgtaaaaagaagaggcttgagccagaaacgtgagcagggcctgggtcgggtcagctcgggccaccctggtagaactaactgccttgctgtgtgtgccaggcacaccacatcc

SEQ ID NO: 33298 - DNA, 120 bp, Homo sapiens
cctcgcttgatcccaaagccaatgccagaaaggagtccgtaccccacctctgcttcctgggaccccagagctactggggcagagccgggagtcaaccccagcaccttgcccactaaatgc

SEQ ID NO: 33299 - DNA, 120 bp, Homo sapiens
aaccgtggccctgcgggagaccccctaccccacccagtcctccctgcacaccacgccccttcctcagaagtcctgagacaggagcctggctctgtgctgccctcaagtggccaagccccg

SEQ ID NO: 33300 - DNA, 120 bp, Homo sapiens
aggcgccggacatccgggagtcctgcctaaagcaggcggaaagcggcctccacctggcagccccacccatgccggggcctcagcccgcccttcacaacatgagggaaagctggtcttcgt

SEQ ID NO: 33301 - DNA, 120 bp, Homo sapiens
tgacgtggagacaccaagtcccggtgactttacctcccgtctcactctaggatcctgctggccttgccctacggctctcattatcggactgccaccatctccacaccgtctccctgttcc

SEQ ID NO: 33302 - DNA, 120 bp, Homo sapiens
acccgggatgtctttctgctgtcctggtacacattgtctcctatctccctgctcccactcctgtcccctgcaagccatttcgcacactgacctttttaagtcagatcatgtcagttcctt

SEQ ID NO: 33303 - DNA, 120 bp, Homo sapiens
gcccggcgccctctgcgcagacaccgcccgggccgggagctcgctccctcctcacacgtccccacctatttggcgctagaagttcttctccgggacctgaggtccactttactgtcactt

SEQ ID NO: 33304 - DNA, 120 bp, Homo sapiens
ttccgccccgaagcggcccccacctgagccgtcaccatcctcccgcattaatgggggcattcgtgcagacaaagacagcccccagagtcaggcctggattttaatcccaccatctcgccc

SEQ ID NO: 33305 - DNA, 120 bp, Homo sapiens
aggcggggaaaacacggtttagcactcactgctagctggcagttcacactgccttctcaaatgatccccataattgctattttacagatggggaaactgaggcatggggttcatttgatt

SEQ ID NO: 33306 - DNA, 120 bp, Homo sapiens
tcacgcatggtcactcacctaataagtggcaagctaggactggaatccatccctcctgaatccaaagccaacactctggcccctttcccccttggccccctctcccctgcattcccagtg

SEQ ID NO: 33307 - DNA, 120 bp, Homo sapiens
caacgctccccaaatgtccactgtgcaccgagccctgaggcggtgtctccacctgacctgatcttctggcacagaaagccactggcccatgaagagttaaccagtcaccatctcctggcc

SEQ ID NO: 33308 - DNA, 120 bp, Homo sapiens
ggacgtcagaagaggaagcagaaggggacagcctgcagaagcaaccacggtgggaacaggacttgtaccagatcccaggggagccaggcagtttgggcttggtggtagctgcttaaaatc

SEQ ID NO: 33309 - DNA, 120 bp, Homo sapiens
gcacgaaaaagataattaactactagaagtaagctatgatgacatccaccagcaactataaagaatccagacaaggggagagactggggagcttcctggaagaggtggtgacagaactga

SEQ ID NO: 33310 - DNA, 120 bp, Homo sapiens
gatcggggagcagcatggatgaaggcatggaagtgggaaagggtgaggctggtgagaccacaagcaatacatgtaaagaggatgatgaggctggggcccctatcacatgtcatgcacttt

SEQ ID NO: 33311 - DNA, 120 bp, Homo sapiens
aaccgggggtggatccagaagcttacaatggggaggccgctgttcaaaaaaagaatacaaatttaccaatacaggttgagcattcctaatttgaaaatccgaaatccagaatgctccaaa

SEQ ID NO: 33312 - DNA, 120 bp, Homo sapiens
ctccgcttttactttgaaacatcgttacctaaattcttatatgctttaatcaggcctgagtggctatgaacgaatcccaagcaaccttagattcagaattgcaaaataaagctgtcactt

SEQ ID NO: 33313 - DNA, 120 bp, Homo sapiens
atgcgtgcacacgcacacacaaacacacacacctcccttcactttcttttctacaaaatgagagaaaaagctcaaagaattctgcagcagtacatttctggggtcgcagggaaaggtaaa

SEQ ID NO: 33314 - DNA, 120 bp, Homo sapiens
aggcggcaacatggagaagggaagacagcatttaacaagtcctccagattagtatagccaagtttctccttcgagcttcaagactacatttcagtttccatctcagacataacccaaaat

SEQ ID NO: 33315 - DNA, 120 bp, Homo sapiens
atacgtaggcacaatgttcttaagatgtctatggaagaaagcatacaaataaagctatttgtacactgttacttttaaacatttgagatggccaaggagctcactaaccgtttgtcagat

SEQ ID NO: 33316 - DNA, 120 bp, Homo sapiens
ggtcgcaatgtgggtcgcgatgttgtgattttaaacagtcccttaccatgagaatcattgttgcagcccgatccttccatacctcaacctatttatcatgcaaagaccatcccccacctc

SEQ ID NO: 33317 - DNA, 120 bp, Homo sapiens
acacggggaaaaatttctgaaaatacccaacaaattctgcaagctcaatcttggaaattttctttcctccttatgtgagcagatgaatgttttcagtcttgctgcagcatgttagagata

SEQ ID NO: 33318 - DNA, 120 bp, Homo sapiens
actcgctattctctccctgaccctggccttggagaattgtgtcttctgaaatatattctcagaaattatgctctataccggatcttagaggggcattttggatccacataacccatgaca

SEQ ID NO: 33319 - DNA, 120 bp, Homo sapiens
ctgcgcaccctccatccagtgacccagtacaaatgccgtctctcgcagcttcacagaccgctgctgctgacttaggcctcggctctgactctggttcccttcctcctgcctttcagtcag

SEQ ID NO: 33320 - DNA, 120 bp, Homo sapiens
ccacgtctggtaaacacaaggaatgagacaaggagtaggtcacagagctcagcagaacaaaatcaggtgtttagactaggtgtcagcaaacggtggctgtttttataaatagtgcctatt

SEQ ID NO: 33321 - DNA, 120 bp, Homo sapiens
taacgcttcattatccacaaccatataatattatcccctctgttagcacaaataatcggagggtttacaggactgagtgggagcctcccatccatccaggcagactacgttttccacagt

SEQ ID NO: 33322 - DNA, 120 bp, Homo sapiens
tgacggatacttagaaaattgaatgttttatgcagcttcagattggaaatagcagtgtggttttcaccacagggaaccctcttaatgtaaatccaacccaattacacacacacaggcagg

SEQ ID NO: 33323 - DNA, 120 bp, Homo sapiens
aggcgccaaatttgcagcaagactgagtttcgcccagcagcaaatgaagcacagctccagagaggaaagagaggtctgtcagcgagggtgtgggagctgcagaaggcacctcaaccctaa

SEQ ID NO: 33324 - DNA, 120 bp, Homo sapiens
acacgcaaggaaggtagcaaaagtcatccccagatcctgtgcaatggtcaaagaggtatagtaaatggctaataaatagaagctgtgaaaattgcaactgtaatacccaacttgccctgg

SEQ ID NO: 33325 - DNA, 120 bp, Homo sapiens
aagcgcttcaggaggaaaggatgccaaaatgtgtccccagccacagagtggctcagcagactcccccggctccaattcttggaaataagtagctccttttttccagaagaaaataaactt

SEQ ID NO: 33326 - DNA, 120 bp, Homo sapiens
actcggggccctggaagtgtgagtgtgcctgaagacgtcggcagtggtttacggagcaccccagcattggggaagaagcccagtttcctgaaagtgagcatggcctgagtctgtgtctgt

SEQ ID NO: 33327 - DNA, 120 bp, Homo sapiens
acacgtgcctctgtacatttgtatagtgggtgcacatgtgtccaggtgtgtgtgtgagtgtgtgtgctcccatgcaggttggtgggaatatgtgcctgtatgtggctttgcctctgctcc

SEQ ID NO: 33328 - DNA, 120 bp, Homo sapiens
ctgcggagaagtgtggagtaggtgctgagtcctcttgagagatttctgtcagggatgtggtgaggaaacagacccagagtgccccaccacagcctccaggaatgggttctgggttctctc

SEQ ID NO: 33329 - DNA, 120 bp, Homo sapiens
ccccggactgtgggaattatgactttccaacaggaggggaatgaaggctgctcccagcttctgggcactgctaggagatcctgggaaagaataacctgtgagtccagcccacaccctggg

SEQ ID NO: 33330 - DNA, 120 bp, Homo sapiens
gtcggatggaaggcaaaacttaggttttctatggcacagttttcaggaagggcaagtcactctttggctctttgggaaactccctcaccccataccccactcagaccacctccaaatgct

SEQ ID NO: 33331 - DNA, 120 bp, Homo sapiens
ctgcggcaggaaaagtctcctcgagcctgtgaaagagacgaaggagagcagggcattacatataagccagagtgacttggaagtctgcagcctgtctccttcgaaggaagacagacaaca

SEQ ID NO: 33332 - DNA, 120 bp, Homo sapiens
gttcgctctggtgccttgagctggtgagatggaggaagtgaaatgcaaagttaggtgggtctgaccccaaacccttcacacacatcttcgtgctgcactctgagggaaacgacatagggc

SEQ ID NO: 33333 - DNA, 120 bp, Homo sapiens
ctccgtgcgggtgtgtatgaatgttgattcaacccttgttaagcactgaccctcggaggtagctacaagccagagtgtcagctgcccagaagctggaaagaggtcagaacaaatgttcca

SEQ ID NO: 33334 - DNA, 120 bp, Homo sapiens
ccccggtgcagtgggaggacctttggagcccaccaagcctggattcaaatctgccccctaacttgttagccaattgaccttgaacccttccttgcacattgttcccttcatctgcagaag

SEQ ID NO: 33335 - DNA, 120 bp, Homo sapiens
attcggagttagggagactgaaagagtcaggaaggggaagaaaataaaagagacagagacaaacatggccagactcgaagtaagtcaatcagacaccaagatacggatggggacaaaaat

SEQ ID NO: 33336 - DNA, 120 bp, Homo sapiens
gcacgctggaccacaccagttcctccctgcctgcactctgctcagctgttccctctgcctggaaggctcttcccccagattcttgcatagctggcttttcctcccctttccagcctttgc

SEQ ID NO: 33337 - DNA, 120 bp, Homo sapiens
gtgcgatttggtggcagggttgggtgttgactggcagtgcacgcctgttctcagcagctgggcaaaggcggggctatctgtgatggaagcataggacaggagcctgcatctgtggatgga

SEQ ID NO: 33338 - DNA, 120 bp, Homo sapiens
tcccgaagtgctagaattgcaggtgtgagccaccattccccgtcttgttctgtttctatattgtgtccctaggatctagcacagtgactaccgtaagaaatacttggaggaaagaaaaaa

SEQ ID NO: 33339 - DNA, 120 bp, Homo sapiens
gagcgagggattctgtgaatgtcctacattcattcactcactgatttatttacccaactttcactggccacttctcatgtactagactatagagatatcaacaaagcaggggtagtccct

SEQ ID NO: 33340 - DNA, 120 bp, Homo sapiens
ctgcgttctggcgcctgcagggagagcacactgaaagcagcatctttttgtgcctcctgtagaacagcagccccaaaaaatgctgagccaaatgctccactgtcaaacaagcttgaatct

SEQ ID NO: 33341 - DNA, 120 bp, Homo sapiens
ctgcgcgcccctgcttcccttcttggattgacacatcagaatatcaaagattctgagaagttttgcaataaaaaatgcataattaaccaggtctgttccaaactttttcagcctgaaacc

SEQ ID NO: 33342 - DNA, 120 bp, Homo sapiens
aggcgagatcgcctccctcttggcccagggtgtgagcctccctgtcctgttaggccaagtttctcctcacccagagcttattcccgacagcacgccctgtggaggggccctgccgccaca

SEQ ID NO: 33343 - DNA, 120 bp, Homo sapiens
ttccgaagcctgggtttcttggcacctaagggactgctgccctgacagtgctccagcaaaccatgcctgtgccatcttgcccccacatgtgctggagtcatggagatacctcctgttgtt

SEQ ID NO: 33344 - DNA, 120 bp, Homo sapiens
ggccggactctgattggaacagcaggagggctggaggcctggcctgacctgcaggcctgcacgatgatgccagagccccaggttttggcagagcctgaatcctgcttgccaagggaattt

SEQ ID NO: 33345 - DNA, 120 bp, Homo sapiens
cctcgtgtttctgattcacttaggctcagctcatcaaagtgctatttggtgaaagctgcttacatctcaacaagtcaaaggacctcctgtggaattgtgatttagctttgtccaaagatc

SEQ ID NO: 33346 - DNA, 120 bp, Homo sapiens
ccacggcggaaggattcaagtcatgcctctcccacttcaggaagaactgtagccactagatatgctttgagaaatgtacttcacttttctgagcctcggtttcctcaattataaactggg

SEQ ID NO: 33347 - DNA, 120 bp, Homo sapiens
cagcggactaacccgccttcacatgtttaatggtgatcagacccataaaggttcaggccatcctttgaatggatttgacttgattccttagtaataatgggaaccattattgcacatcca

SEQ ID NO: 33348 - DNA, 120 bp, Homo sapiens
ctccgtggacaattccctttgcctcaagtcccacatcctcctcatcctcccctctaagcccatgttctggttcccatctccatactcccactgtgtccaaacagtcattattgtctgccc

SEQ ID NO: 33349 - DNA, 120 bp, Homo sapiens
ccccgcagcagccagaacaatattttaaaaactaataataagcatgtcctacagcttcttaagtgcctgctatgccttccatttttcttagaatagagggtaaaccctcaccttagcctg

SEQ ID NO: 33350 - DNA, 120 bp, Homo sapiens
atccggtctaggacaagtctccaaagaatgatagtttttcctttaaaacacttatatctgtttataattatggattcttggcataactatatgactataaactccagagggcagagactt

SEQ ID NO: 33351 - DNA, 120 bp, Homo sapiens
gaacgagtgaatgcatgaatgaatcaaggaactaggaacagctattctgtggagttcagctcaccctccagcagctggccaaagtcccatatttagcaatcctcatgagagatgggaggg

SEQ ID NO: 33352 - DNA, 120 bp, Homo sapiens
attcgaacccaggtctctccaacctcacctcttcctcctgtctccttacaggagccatctggagttgggtggcccatctcagaaggagttggatgtctcgcttggagtctccatgacaat

SEQ ID NO: 33353 - DNA, 120 bp, Homo sapiens
gggcgacccctcacttggctggcatcaaaggtgaggttgctttccaggtagaagggcacagccagtggcaacgaatgcagaaaccaccattggtttcaagaattctagatggtggctgtc

SEQ ID NO: 33354 - DNA, 120 bp, Homo sapiens
atccgtaaaatgggtaagagtaatctctgcctcgtgggctgccaggagggtcagaggacatggacctaaatggaatgaccacaataggaacagaccccaaaacctgtcaagctgagccag

SEQ ID NO: 33355 - DNA, 120 bp, Homo sapiens
gctcgaggttgtgctggccgagcggaccaggcacaggcatttttccctcttgctgagcaatgcggattgcgccaagcgttccctctccttttgtgcatgtttttcatgacccgctgccaa

SEQ ID NO: 33356 - DNA, 120 bp, Homo sapiens
gggcggctgccaccatttacccagcacaagaaaactgcctttcttcccccatttagggtctggttttaatttctacagtattctctttaataacaatgcctaattaaaacatctgttaaa

SEQ ID NO: 33357 - DNA, 120 bp, Homo sapiens
taacggccttcctaattaggcttttctttaaaaaaaaaaaaaaaggaaaaagaaagaaagaaacattctacaaattaaaatctcgctcttttttatgataatgtaggctgatggtccagt

SEQ ID NO: 33358 - DNA, 120 bp, Homo sapiens
agacgggagtcatgctaagccagtataatgacctttgtaggatggagaaggaaattggagagaccctgcatttaatgacaggcattgtaccaagagcactctcatttgtaatctcaatta

SEQ ID NO: 33359 - DNA, 120 bp, Homo sapiens
ctccgatttgctcactgcttggtggtgagcatcatggctgcctcccataatcatctgtagcttgtccccggtttctttctacaaattcctcgtcagcttgatgctcctacctgatcctcc

SEQ ID NO: 33360 - DNA, 120 bp, Homo sapiens
acacgccaccggcagcaagctggagcatgtggtggagtaggaatacagcctagtgcctgctggggcacaccccacaagggaggagtcaacagaaaaatgtccaaagtgatcatcctcaaa

SEQ ID NO: 33361 - DNA, 120 bp, Homo sapiens
agccgcatcagcatcacctaggagcctattagaatgcaagttctcaggccccatccagatttactgaatgagaatctccgaagctggggccttgcaatctctggttttctgtttgttttt

SEQ ID NO: 33362 - DNA, 120 bp, Homo sapiens
acacgaaagaaaaagaatcacatttccagtattttcccaccactgttgcagctcagggcaggagcctcaaagaggcgagggaagtgaccaggggacacacagccagggcagtgatcggtg

SEQ ID NO: 33363 - DNA, 120 bp, Homo sapiens
ctgcgtcctgggccaagctgggagcccaggaaaggacattccaggaggaaatgcgtggttttcactccagtgcccctccatggaccacagcccttcccttccctcactctcaggtcctga

SEQ ID NO: 33364 - DNA, 120 bp, Homo sapiens
ccacgtggggcgacccaggtggtctgtggccagggaggctgagtaggcagcagggcccatgagaggtgggggctgtgtcaccacaggctgagaacacacacactcgctttcccataagaa

SEQ ID NO: 33365 - DNA, 120 bp, Homo sapiens
acccgccaggaccaccacaacaccaactttctcaggaaacctggatggggctgaggactcaggaactgacatgaggcaattggaggcctccgaggggggagagaggaaccacagttggtg

SEQ ID NO: 33366 - DNA, 120 bp, Homo sapiens
ggacggagtatgaggcgtttgctgatctcagcagaccaagtgcctcctgtccctgcagagaacccgaggggaggaactgacagcagggggaaaagtctgatgaccaaagtcaggacagag

SEQ ID NO: 33367 - DNA, 120 bp, Homo sapiens
agacgaagcagagagcccatagacaggaatagacatagaagggcagagacattggggccaagcgagactccacgaaaaggagaggtctggatggacagttacaggcacaagaggaaggga

SEQ ID NO: 33368 - DNA, 120 bp, Homo sapiens
gtgcgggaggaactggtatggagggtggactggtttggagaatgggtgtggaggcttgaccaggggaaaacaagatgagaagccagggaggagataaacacagtccctcagccagagtgg

SEQ ID NO: 33369 - DNA, 120 bp, Homo sapiens
gaccgcctatatgaaggctggagcagtggaagatggggtcacagtaagtttaggaaaacttaggagatattaaacaaacttggctgcggtaagagacagagaagcagcagccaggggtga

SEQ ID NO: 33370 - DNA, 120 bp, Homo sapiens
aaacggactgaaaccatgtgtagccttggctcgagaagttcccactggacccagtctcttgctaggggcagtgccatagccctgatgcatgcataatctcactttcttctcacaacaaat

SEQ ID NO: 33371 - DNA, 120 bp, Homo sapiens
cagcgagaatgccataatttcttctcatttatcaggcctgatagaagctgccaaatgcttctagaatgtaggctctgtaggcggcgcagccagaattcaaacccagacctcctcagatat

SEQ ID NO: 33372 - DNA, 120 bp, Homo sapiens
actcgagtcaccctcctaataaaaattccatgttccatcagcagaatgcttccatcccaattagatcaattttctctaagtagcaataaatgtgcttttctttcagaggccagcccgaca

SEQ ID NO: 33373 - DNA, 120 bp, Homo sapiens
ctacgagtgtgtggggtcaggggtcacagcaccaccacctccagctcattagtggggcccattcatctttgctgggacaccagcactcaacatggtggcagggctcagggtgggggtgtg

SEQ ID NO: 33374 - DNA, 120 bp, Homo sapiens
gttcgccagagacaggagcagaaaagcaggcctgctcacaggccggcaggagccctaggcccaagagctgagaaccggagctgcctggttaaaggttaacctggtctaggatgtctgtct

SEQ ID NO: 33375 - DNA, 120 bp, Homo sapiens
atccggctcctgcctgctaacagtttcccttccggccaactccccaagccgatccttgaaatccatctaagcaaggcctacaggggcctggagaatgatactgtcactctcctgtggtgc

SEQ ID NO: 33376 - DNA, 120 bp, Homo sapiens
gtgcggggacctgcctggaataggccctttgatttgcaaatccagacactggaaatgggagcctaagagagccccactctatcctgccctgcctgggccactgggcctggtagaagcttg

SEQ ID NO: 33377 - DNA, 120 bp, Homo sapiens
gcccgacccagcagctgaggattggggaaactagggaggcagactgcagatcaggaggcaaggcataagagagaccttgactctagaagactggcagggattgactggagaaatgatttc

SEQ ID NO: 33378 - DNA, 120 bp, Homo sapiens
ttccgtttgcctggtgtgatgggaaagaactgtcagccagtgtatacttctccccatctaaaatacttctgattctgtgggtgaggatttgcaagaaggcactctgccagggggagggac

SEQ ID NO: 33379 - DNA, 120 bp, Homo sapiens
actcgaggtttttagaagaagctgaagggttctgtatgctgcatggaagattgagttcaaatcctacttctgacaccatatgatattatttttcccatctctgtaggatgggaatttctt

SEQ ID NO: 33380 - DNA, 120 bp, Homo sapiens
ctacggtcatgcagatttctattttcccagggcctgacacagaatagatgctcagcagattatgacacatgtggcttcttttgctgtgagccagtcatgggatgaagacacattgcctat

SEQ ID NO: 33381 - DNA, 120 bp, Homo sapiens
tgtcggaagttgccccctcacaattccacttcatcttgtttgttaggagtgagtcacagtgtccagcccacactcaaggggaggggaattaggctatacctcttgaaaagcggagtaaca

SEQ ID NO: 33382 - DNA, 120 bp, Homo sapiens
gtccggaaatagacctataattatatgaccgctcgaaaacgccaagacaatttaatggggaaagggccatcttttaaaaaataatgctaggctattcacagtagcagaaacatggaatca

SEQ ID NO: 33383 - DNA, 120 bp, Homo sapiens
tagcgctgacttttgctttctagtccctgctagtgtgttggaatcttaccccatacagatgcaaactatgaaccaagaagtcagcatctatgcctagccaataattggttgttttctcgt

SEQ ID NO: 33384 - DNA, 120 bp, Homo sapiens
cagcgcctttgctacttccttcaggcacattcctaggaaagattggcagtggggtttgctctttgccagcactcctgccggtttgggggttatggatgccaggttgggctccaggcactc

SEQ ID NO: 33385 - DNA, 120 bp, Homo sapiens
ggacggtaacagcacctgacaagtagggatgatcacattgtattcagaagcctggtggagctctataaacccaaatttctaacagtctccaatgtaatgccctgtaatagaagctgtcct

SEQ ID NO: 33386 - DNA, 120 bp, Homo sapiens
tatcgttgacttttggcttcctggcaaatgtctcatttgccttgtcatttgttgattccttttccctgatctctgtttggtgtgataatgtacagcaaagctgaaaaccgcagggctaca

SEQ ID NO: 33387 - DNA, 120 bp, Homo sapiens
cctcgccatcgactcacttcctttagacctctgctgaggtctgaagagatctcgacccaatgtttttccttctagccctcatcataattgtctttatgtaacagagtgtttatttaatgt

SEQ ID NO: 33388 - DNA, 120 bp, Homo sapiens
tggcgctgtgtctctcttgtgctcctcatgttgtcaatgcccaacacagagaagagcagggtccacagaacttcaagcctaagccagttcaagccacactctgtgagcactcacgttctg

SEQ ID NO: 33389 - DNA, 120 bp, Homo sapiens
cagcggtgagcatgcctcccctcacccatgctgattaaccagatagcctccatgcccactgactactgaccaccaggacttacctaagccagtggatctcctgtgaggcagaaaactcat

SEQ ID NO: 33390 - DNA, 120 bp, Homo sapiens
ggccgacttgggttctagttcccacctagtcatgttatgtggctttggggcaaattgtagaacttctctgaatctctgtttcctcatcagtaaattgtggaccatcattcctgattagaa

SEQ ID NO: 33391 - DNA, 120 bp, Homo sapiens
ctacgctagctccgtcccgcccacgtaaagacctgccactaggtggcagtccatctcagctaccccaccgctccttactccacagaggctggctaggacaaagggtctcaatgtcatgct

SEQ ID NO: 33392 - DNA, 120 bp, Homo sapiens
ggacgcacttgaggaaatcaacgttaacacacaagtttccactacagcaagacaaagtcagaagcagcagccccaggtcactatccagctgagtgggttgcctgagcacacgctcttaca

SEQ ID NO: 33393 - DNA, 120 bp, Homo sapiens
ttacgatgaaccagagaggactgcagacttgccaaggcctagctatatgcttggagccaggatttgaaacttgatctttggggatgcacgtgcctcagactattggtgagtgtgctggtg

SEQ ID NO: 33394 - DNA, 120 bp, Homo sapiens
cagcgtgtctgcatatgcttatctgtacacaagtctgtaagagtcccccttctccccatacaatgcccccatccctgccaggcttctttttgagctggcgaaatagctgcttgtattctt

SEQ ID NO: 33395 - DNA, 120 bp, Homo sapiens
ggacgtggtgctgggcagaatgaatatgctgcagccctgatgggctgtgctggctgggctttgccttcttgggtcaaggcgagcctgggcattaggcctttgtcattatgctatacatca

SEQ ID NO: 33396 - DNA, 120 bp, Homo sapiens
tgacggcctcttcgtacccctggcttttcttttccccagagttcccctgaatgttgtcctctcatggttctgagttggggaggagtgctaggtcatggatttttgggtataacgtgtgac

SEQ ID NO: 33397 - DNA, 120 bp, Homo sapiens
attcgctctgtcacctgccaccagggcagaggccattcctctctggggagtctccttgtgaatttctggggaccagctctggctctctcaagaaagaggatgctgccatatttgttctgg

SEQ ID NO: 33398 - DNA, 120 bp, Homo sapiens
ttacggaagacagtacaagggatcaggtgtggccaacaggaacttgggagcattggatgcctggcgtggagctgcgctatgcttacctggttcctatctcaggcacctgttctgccttca

SEQ ID NO: 33399 - DNA, 120 bp, Homo sapiens
caccggaagagcagactggtttctgtttcaaaaggcagagtttgtggttgttctgcagtttctgatctagccatttcccctgatggaagctcctccttctgtcattggaagccctgtgtt

SEQ ID NO: 33400 - DNA, 120 bp, Homo sapiens
tctcggttaggtcttttatggcccagttctccctgcccctgtttctacccgagtataactgttcatttttgttccccatccctatttggttttccctccttctgcctgtgtacctgcctt

SEQ ID NO: 33401 - DNA, 120 bp, Homo sapiens
gtacgtgtttgtatgcacgaggcatcaagtgtattagtaccacaggaaggagcttctcagttgggcccttggtggaagagaagggagccggggaggtggacatttccagactaggaatca

SEQ ID NO: 33402 - DNA, 120 bp, Homo sapiens
cctcgggaggggcttgaatgaggtctaggggggtcagaataatgttttatgaagagccagaagactggggaaggatggctgatgggtgagaaccaggggtcagggaaaacagcagaaaag

SEQ ID NO: 33403 - DNA, 120 bp, Homo sapiens
tgtcggggagctagggttagggccagaagcaatgcccactgttccaggtgggatagatgtggagttttgtgacagttgctagagggacaggacaggaagagagcatctgggggagttggg

SEQ ID NO: 33404 - DNA, 120 bp, Homo sapiens
ggccgttaggacattccaggcaggttggtgtgcagttcgggctggaagggctcctggggtgggggctggccaggcaaatgctggcactgcatctggctccgaagttaccaggccagtctg

SEQ ID NO: 33405 - DNA, 120 bp, Homo sapiens
aatcggtgatttctgggctggaatgtctgccctccagccagcaggcagcccctccctgtgctggagagtgtgtcagagcctgtgcacctttgctgagggagcagaggagtccattggatg

SEQ ID NO: 33406 - DNA, 120 bp, Homo sapiens
ttacgacttttgatcttaccaacatctttctgatgctattgtgttactcttatgttactctcttcacaggtgtagcagtgaggtcagagtggctgtcactttattgagatcacatagcta

SEQ ID NO: 33407 - DNA, 120 bp, Homo sapiens
gctcgtgcatgttttttctaccaccctgccttctagagaaactcagtcaagccctttgctttacacatggtaaaactgagactctgagaagttaaataaattattcatcattgcctcaag

SEQ ID NO: 33408 - DNA, 120 bp, Homo sapiens
gcccgtgtacctctctgactatgccttgtgaaggccacgggagcatgcaagggccttggatagctaagataaggaaatggtcccaggcaaaatggtggtctgggtccaggatggttgctg

SEQ ID NO: 33409 - DNA, 120 bp, Homo sapiens
tttcggtgttgactctgggagaccccagcttgatcttggcctctttgctaccttcctagttgacattcgtgaaattaaggagatccgcccagggaagacctcacgggactttgatcgcta

SEQ ID NO: 33410 - DNA, 120 bp, Homo sapiens
ttccggccggaccagtcacattgctttgtcattctctatggaatggaatttcgcctgaaaacgctgagcctgcaaggtgggagttaagggggtagaggaggtagaggatagttaggggaa

SEQ ID NO: 33411 - DNA, 120 bp, Homo sapiens
cctcggggcagctattgataccttgctcacagccacatctgaggatgaagtgaacatgtggatcaagggcttaacttggctgatggaggatacattgcaggcacccacacccctgcagat

SEQ ID NO: 33412 - DNA, 120 bp, Homo sapiens
ctccggaagcagttttactcagtggatcggaatcgtgaggatcggtaagtactgagctgtggctgtagcccagcagggtggggatgggcatccagaaccttagccaggcctctaagtagc

SEQ ID NO: 33413 - DNA, 120 bp, Homo sapiens
gcccggagagccagaggacccaggggaccttaagtggggccaggagggtgggcagaaggttctgccacgtgtagctttctgcacaaagtcctctggtggccttggtgtgagctggtgaga

SEQ ID NO: 33414 - DNA, 120 bp, Homo sapiens
tagcgtgtgaagggtgccctgaaactctggctctgagacctggtatggcagccagaggggccaaggagagaagggggagcaaagaccagatagtgtgggtgctgcaccatggtgaggtcc

SEQ ID NO: 33415 - DNA, 120 bp, Homo sapiens
tagcgccagaaagaatgtccttaacagattgattttggggtgtgagaggcattgaggataatagtatgctgtttggcttgagcaactggaaaacagagtcaccattgactgagatgagaa

SEQ ID NO: 33416 - DNA, 120 bp, Homo sapiens
gttcgaggcatgttaagttttctgatgcctattagctgtccagggagagatgttgagtaggcaggtggttagagtgagtttaggtacatacacagtaggggctacagattttaacttggg

SEQ ID NO: 33417 - DNA, 120 bp, Homo sapiens
gtgcggtaagaggagaacccccagagtgttgagttctggcagcccaaggaagaagacagtggtgaaatctgaccgttgacccttggatttaacatggtgagaagagcggtgtcaccctag

SEQ ID NO: 33418 - DNA, 120 bp, Homo sapiens
tagcggtgaggggctcaagggaatgagagggagcaagatgactcttgcaaggagttttgctatggaggggagcaaagaagagggcagtagctggagagctaagcaggggcaagacaggtg

SEQ ID NO: 33419 - DNA, 120 bp, Homo sapiens
gttcgtatgctgatgggaaagagaccacagagggcaagatcggtgatgcaggcagttgcaaccagaaggcctctgtttcctcactggaaaacaaggaccctgatagcacctacctcctgg

SEQ ID NO: 33420 - DNA, 120 bp, Homo sapiens
gggcgcctatatagagccagccctccctccgcagtgcttgatccactcagtgtggcgctcagccccctcggggaattttggtgcctcctcccaggctcttggggcccagaggaggtggtc

SEQ ID NO: 33421 - DNA, 120 bp, Homo sapiens
gggcgcttgttctctcagtttctttcctggagccaggccctgtctagccccaggaggtgcccagttgccagtcattgtatttggtggagcatgcacctcctccttcctccctctcatggg

SEQ ID NO: 33422 - DNA, 120 bp, Homo sapiens
tgccggtaggaggggaggcctggagtgtggtttttcttcctcccatgcctgacccactttactgaatctgttcacatcttccttgccagaattacaggttttttttgtttgttttgtttt

SEQ ID NO: 33423 - DNA, 120 bp, Homo sapiens
gctcgacccacaggtcagaggtcatgagaagctggatgagaccactggggatgtccctgttttctcagtatatcagccaaggacctgaagaacatgctgtcccaggtcaactaccgggtc

SEQ ID NO: 33424 - DNA, 120 bp, Homo sapiens
atgcgcttcctccgagagcggctgacggtaagtgccacccagggctgtctgtagatgggggcaggggaagccaagagcccttcagctgggggcctgactgcctgactggcactcctgctc

SEQ ID NO: 33425 - DNA, 120 bp, Homo sapiens
cagcgcagcggggacatcacctacgggcagtttgctcagctgtaccgcagcctcatgtacagcgcccagaagacggtgcatgagccacctgccctccctcaacccctgcccctgctcttc

SEQ ID NO: 33426 - DNA, 120 bp, Homo sapiens
gggcgattcttgatccaggtgggaggcagtgggagtagggaaccatgctggaccattctgggaagctgtgctggctgggagttgggttctgccttccgtggggcaccttgttgtctgttg

SEQ ID NO: 33427 - DNA, 120 bp, Homo sapiens
gagcggccggagctttgccgagtgtcccttcctgagttccagcagttccttcttgactaccagggggtatggctgggctgacattggcccaggctggtaggttgtggggggctgggctca

SEQ ID NO: 33428 - DNA, 120 bp, Homo sapiens
gatcgcctccaggtgcaggagttcatgctcagcttcctccgagaccccttacgagagatcgaggagccatacttcttcctggatgaggtgagcccgatgtttcacccattttttgtcaag

SEQ ID NO: 33429 - DNA, 120 bp, Homo sapiens
acccgggctccaggagctagacgctccttagggatgccaccttgtttctacctactgtgcaccttgcccacccccagttgggacagagcactctctctcctacccccaacctaccatctt

SEQ ID NO: 33430 - DNA, 120 bp, Homo sapiens
actcgcagctggatgcagtatgcccggacaccatgaacaaccctctttcccactactggatctcctcctcgcacaacacgtgagtgtggctccttcaggcccacccagcttcttccccag

SEQ ID NO: 33431 - DNA, 120 bp, Homo sapiens
gaccggggaccagttctccagtgagtcctccttggaagcctatgctcgctgcctgcggatgggctgtcgctgcattgagtgtgcgtggggtccagggctgggggagggaagatgggaggc

SEQ ID NO: 33432 - DNA, 120 bp, Homo sapiens
ccacgtgaggactgggccaggctgggggtggtaggccagtgggtgtgaggaccctggctcacaagtccctctttggtctgttccaggaatggtatccccactactttgttctgaccagca

SEQ ID NO: 33433 - DNA, 120 bp, Homo sapiens
caacgaggatgaggaggagcccaaggaggtgaggaaccagctcaggtctgggggctgggccaggtcaggcctgggccagggtcacagtatctttgctgttgccttcccctgacaggtcag

SEQ ID NO: 33434 - DNA, 120 bp, Homo sapiens
gggcgtgacgggcgtcacatcgctgagcgcctgcttactgagtactgcatcgagaccggagcccctgacggctccttcctcgtgcgagagagtgagaccttcgtgggcgactacacgctc

SEQ ID NO: 33435 - DNA, 120 bp, Homo sapiens
atgcgtatgttcagtcagcgtgtgtacacagacatcacatcacccagagataatcagttaacatttgagcctttgatccaggacaataattaggctttacatggaacataatttcaccta

SEQ ID NO: 33436 - DNA, 120 bp, Homo sapiens
tttcggttcatttgaagcccacacctttggttcatgtgactgcccacacctgagctcctcaggagattggcctccctccttgaggctccctccttgagttccaccctcatttggggtgga

SEQ ID NO: 33437 - DNA, 120 bp, Homo sapiens
aggcggaacgggaaagtccagcactgccgtatccactcccggcaagatgctgggacccccaagttcttcttgacagacaacctcgtctttgactccctctatgacctcatcacgcactac

SEQ ID NO: 33438 - DNA, 120 bp, Homo sapiens
ctgcgctgtaatgagtttgagatgcgactttcagagcctgtcccacagaccaacgcccacgagagcaaagagtgagggaagggcctgggggcggacaaggcagggcagggccatgggtgg

SEQ ID NO: 33439 - DNA, 120 bp, Homo sapiens
ggccgggcctgactctgcctgttctcaggtggtaccacgcgagcctgaccagagcacaggctgagcacatgctaatgcgcgtccctcgtgatggggccttcctggtgcggaagcggaatg

SEQ ID NO: 33440 - DNA, 120 bp, Homo sapiens
ttccggtgaggggtgtggcactgggttgtggggccttgcttgggtctgagctgccctgaccctgtgtgactgttttgtccttgtgaagggctgagggcaagatcaagcattgccgtgtcc

SEQ ID NO: 33441 - DNA, 120 bp, Homo sapiens
actcggagttcgacagccttgttgacctcatcagctactatgagaaacacccgctataccgcaagatgaagctgcgctatcccatcaacgaggaggcactggagaagattggcacagctg

SEQ ID NO: 33442 - DNA, 120 bp, Homo sapiens
agacggggcatggcaggggaggcaggagagacccagaatcttaccagtctctggatgtgtgtaacagcaagacctggtgtgttgtagaagttcgtgggagggcccctgactccagctggg

SEQ ID NO: 33443 - DNA, 120 bp, Homo sapiens
ctccgcctggtggatggtatggagggcagagccacaggaggtgagaccagtgagggaaaaagtcaggacccatggcagcacagctggtgataagggccctggacagaaggaaggggtcta

SEQ ID NO: 33444 - DNA, 120 bp, Homo sapiens
tgtcgtcagtagacagggctggctggggagagagaggcctgttgtccactggcacctgggactcaagtgatggagaggagcggcaggaggaatgtggggagtgggaaggcttttcctgac

SEQ ID NO: 33445 - DNA, 120 bp, Homo sapiens
ttccgaggcccaagaggttgtgagagatgtgtggttggtgagcgaccgcaggtctcccagggccgacccactccctagcccctaccccttaagtcagcagtgaccctttaaactgctcct

SEQ ID NO: 33446 - DNA, 120 bp, Homo sapiens
cagcggggtaggagctgggaggcacactggccactcattccccggcctcatggagccctgttacacaggttcttttttgttttgcctttttctctaaaaaggcctgggccctatttctca

SEQ ID NO: 33447 - DNA, 120 bp, Homo sapiens
tcccggggaggcactcagggccactgcagaccctgccttcttggcctgccagccctgactcctgggagcggattcaaggttctccctgtggcccagggtggggcttaaggttccacctgg

SEQ ID NO: 33448 - DNA, 120 bp, Homo sapiens
tcccgaggtatttcactggcagaggccctgcctctctgatcatatctgtcctggagcttccctgcagggcagtaacaagaactataactagggcctgttgatggcagtgtcatctcccac

SEQ ID NO: 33449 - DNA, 120 bp, Homo sapiens
ggacgagctgaccttcatcaagagcgccatcatccagaatgtggagaagcaagagggaggctggtaagccagtggtgtggtaggcccagagtccaagggccccagtggagctggggcccc

SEQ ID NO: 33450 - DNA, 120 bp, Homo sapiens
gttcggggtggttgctggaggtcagcaccctgtggctcccacaggtggcgaggggactacggagggaagaagcagctgtggttcccatcaaactacgtggaagagatggtcaaccccgtg

SEQ ID NO: 33451 - DNA, 120 bp, Homo sapiens
acccgcaagccaaatagagaagggatagggtgcttgccaggctgtcccctagaaggaaaaggtgctggcataccaggtggttgaaggactggatctgggggtctaggctgaaaagggaag

SEQ ID NO: 33452 - DNA, 120 bp, Homo sapiens
gggcgctgaggcagtgaggatcatccttaggacacagatggaaaccaagccaggggcctgtatccccagtgcagtcacaggtaacacagaagaatcatttttaccccagcatgaggctgg

SEQ ID NO: 33453 - DNA, 120 bp, Homo sapiens
gggcgttctttttcaggaacccaagattctcaaaaatgacactcctcccctcccaaaataaaaaagctcctttatagtcaaaaacgaaaacaagtaatcaaaatatacaaagcatatgta

SEQ ID NO: 33454 - DNA, 120 bp, Homo sapiens
acccggagatggcttcagcctgggccgccccagctgcctagtgcactggtgtccctccaacacaggctactcccccaacacccatgtgccaccaagtttctcaactgcacacgccagatg

SEQ ID NO: 33455 - DNA, 120 bp, Homo sapiens
atgcgcgttttacgagaatcaaatgagtatttatactgtatatgtgtgtgtgtatatatatatatataaattaatctgcacgtatataaacactaaaaggagaaattccaagtgtctgtt

SEQ ID NO: 33456 - DNA, 120 bp, Homo sapiens
actcgccattcttggcaattcctcaaaggtttttgagaccaaacatctttactccccaaattaagaatacaaaaataggctgcaaaacttgccaagtactcacaagtccctgtttgagac

SEQ ID NO: 33457 - DNA, 120 bp, Homo sapiens
acacgtaataacatgacttgtctgtggcttcaaaactatgtcttaaataaaaataatcttctatgatacattttgctttcgagtacaatccagagaaactgaggaacaaaattcaagctt

SEQ ID NO: 33458 - DNA, 120 bp, Homo sapiens
gcccgactcagaggatgttttgacctgttctcctattgctaagaaatggctagaaaagcttggacccctttagggtcaccatgttccttcccctgcgcaggtttttaaaaacacatgaaa

SEQ ID NO: 33459 - DNA, 120 bp, Homo sapiens
aaccgtttatcatattatattcctatggcttctgctgctagttgtcctctgaagcagccaggcggttaatgctgctgccaggcagccttagagacagcagatgcccctgtgcagtaaatt

SEQ ID NO: 33460 - DNA, 120 bp, Homo sapiens
aggcggtccagttcctcatcaagaggaagagggttttgtgcaaaactgctctccagggctctgagctgctcaggggctctctccttgtatttggttggtgtgaagtcaggagtctggtgc

SEQ ID NO: 33461 - DNA, 120 bp, Homo sapiens
tgtcgtttggcagaagggtgggttgctagtgtggctgttgtcggaatgcaggttacctcagggaccttggacgatggggagaaggacacctctggcacagagtcaatgatgatggaactg

SEQ ID NO: 33462 - DNA, 120 bp, Homo sapiens
catcgctctggagcccttcaagttccggcagtggtatctacgatcactgaaccatttccgcacctctctggtactgaggcccgtcacttttgtgagatgttcaacttcgctctgccctgg

SEQ ID NO: 33463 - DNA, 120 bp, Homo sapiens
ttccgacagaagctccctttcagagctgacagctgttcatgagatttcttatttttgtagatgctagcatcaaggaaggcttgggaggttatgctggggcaggccgtgaggagcgactgg

SEQ ID NO: 33464 - DNA, 120 bp, Homo sapiens
ggccgcattgaccaccttcacagctgacgttgtatttgaacacacagtgttaatgggtgccacacctggctgcttggggacggatgtcaccgtgagggggagaggggaacttgttgcttg

SEQ ID NO: 33465 - DNA, 120 bp, Homo sapiens
gaccgaaaagaaaacagaattcacttcaatttcatcatcaaagtccacgaaagcttgcaaagcacttccatatccttctcaatccatcctcatagtctcctgaattggttattattggcc

SEQ ID NO: 33466 - DNA, 120 bp, Homo sapiens
tatcgagcaagaaaggggaggtgatatgaccagtcacacacgacatatttttggcagagccagatattctgattctaaattcagtgttctcttttagactatattcattctgaataccaa

SEQ ID NO: 33467 - DNA, 120 bp, Homo sapiens
taccgtcagaagagggtctgtattgcttactcttatgtattaatagagaactcttttaacatgaggcttggtgattagaccacggtaagtcagtaggactctataacaaaaagaacatgt

SEQ ID NO: 33468 - DNA, 120 bp, Homo sapiens
aagcgtcagccaccgcacctggccttccccctcaactcttatttttgtctaatcaccaacagaaatagcccactctagtcagatattatcacctctaaagtaaacattaatttgttcttt

SEQ ID NO: 33469 - DNA, 120 bp, Homo sapiens
tatcgtttaacaaagacaaatgtttattcttatacagagataaattcttttgaagggaaacccaaggagaagaatgtcttggaactgtgtttaagagaaaataggtaaagcaggaggctt

SEQ ID NO: 33470 - DNA, 120 bp, Homo sapiens
agacgtaaaggaaatttcaatttgaaccaagcaaaagaaggaaactctaaaactgtgaatataaccatagaaccctaggggggaacaaactcaaattcagagataagtgaagctggatgt

SEQ ID NO: 33471 - DNA, 120 bp, Homo sapiens
aggcgctgggactacagaatgaagaaacagcaccacaaatgacaatgcacacacccacccagaaggcagctgactgaatccctggacgtatatccctggtacttagcaggaccagcactc

SEQ ID NO: 33472 - DNA, 120 bp, Homo sapiens
actcggatcacacaaagagttctcaatcctggatgcacatcagaatcatctgctgagctttttagaaataccaattgcctgggccccaccgcaatgcaactgaatcagtatttatagagg

SEQ ID NO: 33473 - DNA, 120 bp, Homo sapiens
taacgccaaacattggggcaacattaaaataagaggctttcaagataaccaatttgaaaggaaagcattcatgtttgacaaagttccattatggttgttagaaaatctgcttagtctgta

SEQ ID NO: 33474 - DNA, 120 bp, Homo sapiens
ctacgatggcagagccagtttcttaaatcataaaatctccaggacagcttcaaggtctaaatgatcatgtggaaaagtggctacagggactcagttaattagttaccatctcctctccca

SEQ ID NO: 33475 - DNA, 120 bp, Homo sapiens
acccgcgttttctttttccttcaccacaatgagttgggtagcaggagagaaggatataaaggcagaagctcatctttcattcagtctatttgctgcctttgacggctatcacaattcagc

SEQ ID NO: 33476 - DNA, 120 bp, Homo sapiens
tcacgcagtatttcattgtaactctatccctcaagcactactagactggggagacaagtcaacagggtgctaagtgctatcacagaggtaatctactttatgctccaggagaaatggaaa

SEQ ID NO: 33477 - DNA, 120 bp, Homo sapiens
gcccgaggggtcagagaaggcttttggaggaggggcacctgagacgaagctggaaaggcaagtagtgttggcctaatgggcaggatagggtttattctatgcagaggggcacaggggaag

SEQ ID NO: 33478 - DNA, 120 bp, Homo sapiens
agacgggccagaaagacagaagggctaaggaggagggcctttcaaggcagaagtcgctcacagtgtgaaggaacgcaaaccaagtcagacaagggctaaaaggcctagacttaggtaacc

SEQ ID NO: 33479 - DNA, 120 bp, Homo sapiens
actcgcaggaagcctggctaagaacagggagtgagctaacaggaaatactggatcaaattgtattttccagcctgaacctcttctttaagctccagactttcatctcctcttgaattcct

SEQ ID NO: 33480 - DNA, 120 bp, Homo sapiens
caccgactacactcaatttatattctggcctccccactacccattctccatacaacagtctgggtggtctttttaaactataaatcaggccatcataccaccccatactcaaaatataca

SEQ ID NO: 33481 - DNA, 120 bp, Homo sapiens
ttgcgctccagtatcttctcatacacctctcctcctcttagtcttgtaccaacctggtctcctttcagtccttgaattcattaagaacagtcctgccttaggatttttgcccttcctcct

SEQ ID NO: 33482 - DNA, 120 bp, Homo sapiens
attcgacctattcctgttgaacatgataacaattataatcagttgatgtattcagagaccaccgaggcaaacaggttatgtttttctctataataaatgtctccaaacagctatactttg

SEQ ID NO: 33483 - DNA, 120 bp, Homo sapiens
gcccgggatagagcctggaatctgtttttttaacatacatcctcatatgattttcatgaacacgtttagaaacacaatactacatgcctctagtgctgccctcttgaattgggattcctt

SEQ ID NO: 33484 - DNA, 120 bp, Homo sapiens
ggccgactccttcctgagagacctggcaaccaataaaccttccaggtcactacttttccatctccctcgggtaaaatcccctgatcctttcagattcctgcagggtaaccacaacatctc

SEQ ID NO: 33485 - DNA, 120 bp, Homo sapiens
attcggcccactttccttttctccatcctaaatatcctacaatccttctgatggcttctctgaccacacagatggctgaaacaactctccagcctctcagttacttgacctccttgaatt

SEQ ID NO: 33486 - DNA, 120 bp, Homo sapiens
atgcgtccctctctagccacatcctattactccatcactccacacacccattccttgacttcaacaacactggtccttttctcctccccatctagcctagatacctttagctatcacgtt

SEQ ID NO: 33487 - DNA, 120 bp, Homo sapiens
tctcgggctcccttcagggatttcctgatgttacagaaaatggtatgtatgacgctgccctcctggccaccttgacatagctctgctcccaacagggctcttctgagatagcagccagac

SEQ ID NO: 33488 - DNA, 120 bp, Homo sapiens
caccgcccagtcgtttctaagcctggctcgtcgccgttgctgctccgccaagcctttcctcggtgccctctctcttttagaacaaattacttcatctccaggcccttctcagggcagctt

SEQ ID NO: 33489 - DNA, 120 bp, Homo sapiens
gggcgtcggaaaggtctttggtccaggaaagccgcgagccacagatccaagaggaaaaagccgttcccggcccgggccttgcccaaggcacgagagtaaatgcaccttccgcgtgcctcg

SEQ ID NO: 33490 - DNA, 120 bp, Homo sapiens
cggcgcacctgggctcacctgtcccctcccgcagtgcctgcagacagggagggagcgcggctgggccagaaggctgatcaccgcctgccccctgctggccagtgtcagtattgagcccgc

SEQ ID NO: 33491 - DNA, 120 bp, Homo sapiens
tgccgctcgaccagaacgtcccagggatggaatgaaggtgcgggcatttatggagcgcctgctgtttgtcaggcgaggtactgataagcgctggagtgtaaggatgtacgtgacctgctc

SEQ ID NO: 33492 - DNA, 120 bp, Homo sapiens
atgcgaacagatgacgcgaggggcctgtccagtctgggagatacgggtgggttcaggaaaagctgcccccaggaggggacgtttgagcgccaggagccgcgcaaagtcatttcatgtcat

SEQ ID NO: 33493 - DNA, 120 bp, Homo sapiens
aggcggctttcccccttgacaaaacaggaaatgggatcaaattgaggaaggaattcacccaagatcacacagcaagctggaagcaaatctgggaggagctaggtccgccccgttccgaaa

SEQ ID NO: 33494 - DNA, 120 bp, Homo sapiens
aggcggtggcacagggacttggggcggggtctggtgggcggggcatgaagtctggccccgcccccgcctccgaggccaaagggcgccctgggcggggatcggagcaggggcggggtcttt

SEQ ID NO: 33495 - DNA, 120 bp, Homo sapiens
ggccgcactaggatcgtagaaggagtggagccgtgctctcaccctgtcttagaggacccggaagcgccaagtgactgagggccgaagacactcacctgtggagcctgtgcacgtaggtag

SEQ ID NO: 33496 - DNA, 120 bp, Homo sapiens
aaccgttcccataaaattagataagtgtttttgtgtattataatgtaacaacacttttagaacttttagaacaagatgaatggaataattctctatcacttgtttagttttgagggagtg

SEQ ID NO: 33497 - DNA, 120 bp, Homo sapiens
acacgaatatatgtgtatatataaacatgtaaatgtgtatgtatgtatacatacatctatacatacacacacatttttctggagttaggggctggagcagacagagacagataaataagc

SEQ ID NO: 33498 - DNA, 120 bp, Homo sapiens
gctcgttttcctctacggtcttggggtcttcagtagactgatttcctattgaaaatcaactaggctggtaatacaggtgcctggtgaggctctcctctgctgccgagtaaactgctttct

SEQ ID NO: 33499 - DNA, 120 bp, Homo sapiens
cctcgcccctgaataggaagcctggcctaggacaccgtacacatggcaagacttgtcaagtggctgtccctccctccactttttagggtatgggcagggaagggcagagaagttagtgcc

SEQ ID NO: 33500 - DNA, 120 bp, Homo sapiens
ctccgcttctggcctgcctccaatccctcctccagagctgcctgctccattgcaaggaggaaacacctctatgtttgctgcaaacacagcgcctgcctgagctctgagctaggactccct

SEQ ID NO: 33501 - DNA, 120 bp, Homo sapiens
ctgcgtgtaccatcttaaaatctggaagcccctaaaaagaacatttgtttaaatgtcttttggtctttttgctttaagccttttctcatctattaatttctttaataactggatcaatac

SEQ ID NO: 33502 - DNA, 120 bp, Homo sapiens
ggacgcaagaagagatgagtaaaaaatctacacttacccatgagccagatactgtctcatccactgtctcatttaatctttgtgacaatcatagttctcagtttttgctgctaagaaaac

SEQ ID NO: 33503 - DNA, 120 bp, Homo sapiens
cctcggtaggaaattgggtctttctgatctcaaaggttgagcccctcaatattccttctgttctttttgccccatctggcacccgttactagcacagaagcccggaaagtttaagaaaca

SEQ ID NO: 33504 - DNA, 120 bp, Homo sapiens
atacgtatagctccagacatggccagtgcattgttgatattgccaccccagcaaactgcctagaacttggcccagagcagatgctaggttaacatggtagatgagtgaatttactttctc

SEQ ID NO: 33505 - DNA, 120 bp, Homo sapiens
taacgaagccagtgctttgaaccaccaccctgacattttgggggtaggtcaggggggtagctacaaaaccagctagtaataattcattgaaaatatgctggatccagcatttttatgtaa

SEQ ID NO: 33506 - DNA, 120 bp, Homo sapiens
ccacgttctctgtccagagattgcccagatatcctttaagacccagcttacattgcaccccctctccaaagcctttccaggattttctgggcagtgagccagcctctcctctgtgcagcc

SEQ ID NO: 33507 - DNA, 120 bp, Homo sapiens
ggacggggagctctaaaccttgtcggatccactgcaacaagttttgggccttggaaagcctgcattagagctttagaaatagacaaatacacattgtcctgtccagagtcccatttccaa

SEQ ID NO: 33508 - DNA, 120 bp, Homo sapiens
cttcggcagcctggccccagctgcccctcaaggctgttctttcccatacacgtcactgtctctcacaggggtcccgctttttcagtgggtacataagcctgccttcctggcacagacata

SEQ ID NO: 33509 - DNA, 120 bp, Homo sapiens
cttcgagcctcttaaaaggggagccgctgttctgcattcatcctccatgaccgtggcctcttctgcttcctcctcagaagccagtgggtttgttctgcaaattgctagtcagaggaggcc

SEQ ID NO: 33510 - DNA, 120 bp, Homo sapiens
ccccgtgccaaacccaccgcagggaggcctgctgcacctcctcctgggaggtctccctagggcatcacctgagagcatgcaaaacaaaagccacacaaccaaaccatttttccaaggagg

SEQ ID NO: 33511 - DNA, 120 bp, Homo sapiens
gcccgctgccttccccagtggatgctctatccttcaccagtgctcatgagcatttgtggaggggtcctcttccatggccagccaacagccccacttctgcaccctggctcataccattca

SEQ ID NO: 33512 - DNA, 120 bp, Homo sapiens
acacggatatctggggactcctaaaaacaccatctctgcctgaagaaatttccctagcatctgctaaagcaggctagcaaagaggaatgggggcttactccatcttttaacaaattgact

SEQ ID NO: 33513 - DNA, 120 bp, Homo sapiens
tccggtaacttcatcctgcattctagtgcaggggtctcacctgtttacgttttggctccctggtaagttacacctgaggacaggttcattcccttcagcctcattatcatgcttcccctc

SEQ ID NO: 33514 - DNA, 120 bp, Homo sapiens
aggcggcttcccaccttctcatctcagccctagacaatgtgaaggtccaaattatggcatcacggcaacattggcatggtcctttttaactcctaacactttgattgtggccttggacag

SEQ ID NO: 33515 - DNA, 120 bp, Homo sapiens
taacgacttgagagattttcagagactctgttctctgacgacgtgtctatcctgtaccaaataactttgccttgaatagtgagtaaaatagaagaagacagcaaacacagagcacaggca

SEQ ID NO: 33516 - DNA, 120 bp, Homo sapiens
gaacgatctccaaactctgacatcagggtcacctttgcttttgattatgtaatatggtattttgttacttgaggttaaagtttatgcttcagttgcagataaaataaagaagagggcgat

SEQ ID NO: 33517 - DNA, 120 bp, Homo sapiens
gagcgcaagagtgagagagagaaagaaattaagagcaataaggccagtctttaaacaaagtaccattcacacgagcaaaattgttctcattacagttattttgccctcccctaagcctcc

SEQ ID NO: 33518 - DNA, 120 bp, Homo sapiens
tggcgaagtaaaccatatgctcctggctggtgcaaggagctcagagagagcccattctaaccgagaacaaaggttcggggaaaagcagtttcccgcacaatgcagctgaatgattgacag

SEQ ID NO: 33519 - DNA, 120 bp, Homo sapiens
ctgcgaaggggacaatggagctggcagcctgacaccggtgcagctgggaggggaaggcttggtttctgcacattaacacatttgacatttggtatctaaagggaagggctaataaataac

SEQ ID NO: 33520 - DNA, 120 bp, Homo sapiens
acccgccaacgatgacactctgtaatgacagcttttactaccagccagttaatcctccactccagttctgtcctttcaggccatctggtgttgaattcttatttacttatttttattttc

SEQ ID NO: 33521 - DNA, 120 bp, Homo sapiens
ttccgcaccaaggtctgcagaaagtggagtgagtggagtttttaccaggtgaccttgggtttggggttcagctgcatgaaaccagttagtcatcttgggtccagagggatgggggaaatt

SEQ ID NO: 33522 - DNA, 120 bp, Homo sapiens
cctcgcataataaatctgcataataggatctggactctaataggaagaagcataaagtgctagggggtgggagatgacgaagaaatcccttcttcctcagaggatttcaggaagttgccc

SEQ ID NO: 33523 - DNA, 120 bp, Homo sapiens
tgacgaagacagccagccacagtttcatgcatgttggcagaacacacaagacaccagggtcagagacaaaggactttactactcacagcattggcagtagccagaatatcagcttttgta

SEQ ID NO: 33524 - DNA, 120 bp, Homo sapiens
taccgtgtaatcgtaagaatctacactttgagggtttgccattttgttgataggaaaaaaaattgctatgtgcagtgatactgtaatcaaaatgacaagcaatggaaaaggaatttcagg

SEQ ID NO: 33525 - DNA, 120 bp, Homo sapiens
gtacgtagcagccacggctttgattctggtcagaattactcaggtttcctctctacaattgcttaaccttggccatcaaattttgtgccacttcttatgctaccattgtgggcatatgga

SEQ ID NO: 33526 - DNA, 120 bp, Homo sapiens
attcgtttcatcttatcttgcaggcaggggaccctgatttcattaccaaggttgtaggcacaaaatgggatggctagggttcacaatgacccccaccccaaccatggacttgttctgctc

SEQ ID NO: 33527 - DNA, 120 bp, Homo sapiens
tgtcgtctaaataatgtgctttggatgtcttgacccataacaagatagcactgttccttaatctttccaaaggaatctatagcattaatacagatagagggttcctgccaagtctcgtgt

SEQ ID NO: 33528 - DNA, 120 bp, Homo sapiens
ttccggaagactgccacctctcagccggcaactccaaactgagctggcaaacacagcattaaggactcagaaagcattgggggaggggatttagtaacaaatctgagtcatgaaaacaga

SEQ ID NO: 33529 - DNA, 120 bp, Homo sapiens
aaacgactgaaagagaaaacataattaacttccagtgtagaatgctagtgccttggggaaaatcctgtgcaagtgtagatgtaagcaattttagggacgaataccgaaaaagctgttagc

SEQ ID NO: 33530 - DNA, 120 bp, Homo sapiens
catcggggacggggggccttgactattattttattttaattaagaatgttggttacaggagtgaagggataaagtcaggttgcaatgaggcaaccttcctgttggacagggcctcctgca

SEQ ID NO: 33531 - DNA, 120 bp, Homo sapiens
ccccgccccacttaagatatttctaatttagcattttatattttaagtcaggtgaagaccatgttcgatctattctccatgggatgagattcccttcctccacactaagtgactggaaaa

SEQ ID NO: 33532 - DNA, 120 bp, Homo sapiens
acacgaacaaggtcagggcagtggatttaaaagggagaacaaagaaaagcaagactgatgagctccagagatgcagaaaagaaggtgaggtgctgaaaatgtgtcctcacttgactgagc

SEQ ID NO: 33533 - DNA, 120 bp, Homo sapiens
tcccgccaagtgctgtctgctgtgacagggtcttcatcttttcagacagtctcaaacagcaggagaatcaggaatcacaataaatcatcaagttcagacccctggtgctgctcctctaat

SEQ ID NO: 33534 - DNA, 120 bp, Homo sapiens
atgcgggctcatcactgaggacagagaccctgcactgacagcagagccctgtcacccgtcagaccggccttcctgcaagagggctgcagctgctaaagccttagagaacaggacattcac

SEQ ID NO: 33535 - DNA, 120 bp, Homo sapiens
caccggggaggagtctgacctgtgcagaacagagccagacaggctggcggagactctgccagatgtgaacagcagctggtgtctgctgtcccatggcagacaagagacactcaaggaaag

SEQ ID NO: 33536 - DNA, 120 bp, Homo sapiens
gaacgggactgccaggcatatggtagcattggaggacactgcatttcagagagcatggattttactggacatttccaaccaacaacagagctggcagcagacgtcatcgtttctgttcct

SEQ ID NO: 33537 - DNA, 120 bp, Homo sapiens
ccacgtgtccatgaggaaaagtcagtttcctgttttgtgctcatctctgctactctatgaaaatcttggctttgtaacacttatggaaaagagccgccctcagaatgctgaaaacatgat

SEQ ID NO: 33538 - DNA, 120 bp, Homo sapiens
caacgtggccttaacagaccttcagatcaaaatggcttaaccaggacagttatcaaggattaaaattaaaactgccccagaactgggtgtaatggctcacccagcctcccaaggtgctgt

SEQ ID NO: 33539 - DNA, 120 bp, Homo sapiens
tcccggagctcaggagaaatgtagaagcccaggccccggcccacacaactcaagcagaatctgcatttcacataatccccaggagagccctccgacactgagatctgaaaagccctggct

SEQ ID NO: 33540 - DNA, 120 bp, Homo sapiens
gtgcggtagaaacaaagagcttttctggtttactttcagctcaataaccacgacaccccagagccccagcattccagtcagctgcggcttcactctgtgtacactgcacactaaatcagg

SEQ ID NO: 33541 - DNA, 120 bp, Homo sapiens
aatcgcttcaaaggcaggccccacacaagcgtgcacaccacacccaaggggctgggagcacaaagctcaaccaacagcctgaggccctgcttccaaacgctttcttatttcctgtttcta

SEQ ID NO: 33542 - DNA, 120 bp, Homo sapiens
tctcggaaagggcacctgtggagggaaggcaaggctgggctcagtggccctggccctggccctgcagggcatggcaatagccaacagcgggagaggaggctgtgtcctctgagactcctt

SEQ ID NO: 33543 - DNA, 120 bp, Homo sapiens
ctccgtgcaggagctagtacacccctctaggggcacaaccctttgtcctgaaacaacactgtgagaggaggaggagacaggcttttctctcccagactactaggagcaagcttggaaggg

SEQ ID NO: 33544 - DNA, 120 bp, Homo sapiens
gtgcgcattaccacagggccaactgaggcctgtgcaacccctcacagccaacctgttcctactgaagccacacaacaactcagcctgcctggaaggacgaagacacccttctgaatacct

SEQ ID NO: 33545 - DNA, 120 bp, Homo sapiens
ccacgtgtgccaacaacccacagccattcacctaggcccatgatgctgcggtgaaagacatgtgaaccccccagaatgtggcttctgatgggacatggggacctttatgataaataatga

SEQ ID NO: 33546 - DNA, 120 bp, Homo sapiens
gtccgttgtccctagaagcaaagtctctttgctccaaggtccttacccaggtgcgtggacctgtcacttatgggctatttcaaactacagcctctgtcctggaagcctccgaggccccct

SEQ ID NO: 33547 - DNA, 120 bp, Homo sapiens
cagcgagtttagctggaggcagttccagaagtggggcaaccacatggccttacgtttaatgcttgggtgaacatgctcttattgcacaccaggggcacggtggtcaccatcaccattgcc

SEQ ID NO: 33548 - DNA, 120 bp, Homo sapiens
agccgaggcaagggtataaactctctggtctgaaatgcccgggaaatctccggctgagcctcatagatctaggaaaagcaaaaaagagatttaggtggtgctagaagtaagtttcaaacc

SEQ ID NO: 33549 - DNA, 120 bp, Homo sapiens
tagcggtaaaggtccgagactccccacaaggcagagtggaagattaaccctcaaatctacttgtcaaagacaaatcaggtcaggagactggctgttaacagagaaaggaccttcagagca

SEQ ID NO: 33550 - DNA, 120 bp, Homo sapiens
ctacgaatggtactacttaccagttcttgctgcacttgacaggcacctgacaaatgatgtcaggaagggatgtcaagaagccatcttctcaaagcttcctcacaacgctttgggataggc

SEQ ID NO: 33551 - DNA, 120 bp, Homo sapiens
agcgactggcaaagtagggcccagcacctatcattgtaatttgattgggacacaggtaaacctacttatttacatctatggatgctttgctggcacaactgagtggtcacaacagactgt

SEQ ID NO: 33552 - DNA, 120 bp, Homo sapiens
cagcgcccgttctcaccacttctcaccaatctgataatgaacaagcaaataaataaatcagcaaataaatgtatgaacagtcagaagcctaagccaggcaaaaagcacagtgacagtgga

SEQ ID NO: 33553 - DNA, 120 bp, Homo sapiens
gtccgggaaggcctccctgaagtggtgaggtctgcacaggaacctgaatgaaatgaatgagtgggccacgtgtctactggggaacagggaacgatgcaattcagtgttctcaaagctttc

SEQ ID NO: 33554 - DNA, 120 bp, Homo sapiens
agacgcacacccacaagttgattcaatatgctcattaaatgctcatctatttcatgggcctagttatggaggaaaaatgctttaaaaagggggaacaatgcatgtgttttaagcatggtg

SEQ ID NO: 33555 - DNA, 120 bp, Homo sapiens
attcgactataaaagtctgctgttatgttttggcaggaaaatgagctcattcttactgatgaaagaaaaaagaaatgatgtgacaagttaaatcacagtgacctcagaatcaaaacacgt

SEQ ID NO: 33556 - DNA, 120 bp, Homo sapiens
atacgattacaaaaagaaagtcttaaagaatatgatcaaaaccagtagatttgaacttaatatgtttccttactgatgaaatgttaccacaattgtgaaatgtgaaacaaaatgttaaaa

SEQ ID NO: 33557 - DNA, 120 bp, Homo sapiens
aaccgtgactcatgggcagcctgtcaaggagagggaggactgttttagtatcagtttggagctggacttcctggattccagtgcaacctctgccatttaaccagtgtaagtgtctcgacc

SEQ ID NO: 33558 - DNA, 120 bp, Homo sapiens
ctgcgtcaggactgctgtgaggcccatgtcagggccaaccctctctggcaaggcagacgccttttctgagctccagctgacgaacactgtctttaggtaaacatccgcagcacctccctg

SEQ ID NO: 33559 - DNA, 120 bp, Homo sapiens
aaacgagttagataatgtccacaattctagttctaacctactacagttccactagacactcacatatgtggtgacttctgaggaacatacacaccctggggtccacaagagtgttatact

SEQ ID NO: 33560 - DNA, 120 bp, Homo sapiens
ggacgggcccatcataaatccaaacccatgcataagcaccttaaaagttttgatgtgtacagccaaacttcccagcagaaacattaaactgtagtatgttccagcccccttcaacagtgt

SEQ ID NO: 33561 - DNA, 120 bp, Homo sapiens
ccacgggaatttgaagaaactactggccctggcagcagcaagatatcctgaacctagtgcctggtaacaagtaggaaaaaaaaaaatctgtccgctgcattatgcagagaccacatctcc

SEQ ID NO: 33562 - DNA, 120 bp, Homo sapiens
gagcgccccacacagaccaggctgaccacatacagggtgaccgccacctgcactctcctcctaaatcgtcccggcagtcacgttccaggggcagtccagatctcccatcctgggagggag

SEQ ID NO: 33563 - DNA, 120 bp, Homo sapiens
ttccggccaggacatgggactgctcctcacctccagacaggccaggattccagggaatcttaccgagcaactgccatgtgctgagctaagtgctgccatttatcatcttagtgaatctct

SEQ ID NO: 33564 - DNA, 120 bp, Homo sapiens
tctcgtaacacaggtctaagccaccaaagaaactaactttgttttttaaaacgacatctcccaaggaaatccaggtagccaaggctatgagtctgagtaggttccatagccataaagcct

SEQ ID NO: 33565 - DNA, 120 bp, Homo sapiens
gcccgactctgcctctctgaagtctgcatttatcctctgtgacggcattgttcagcattccagacggcataacaggaacaactctgttcactcttgaccagtgatatcaaaatggtactg

SEQ ID NO: 33566 - DNA, 120 bp, Homo sapiens
acccgctcacccacctccctgccccacatccttcaatctggtgtacacagcaactgcaaaggctgcagactttttttgaacttggaagaaacggtttgcagtaggtttttcaaaacaaat

SEQ ID NO: 33567 - DNA, 120 bp, Homo sapiens
taacggacaagggagtacacctacctttcacttccaacacctgcactatagtgctgtcatcacccgcaattaaaaaggagagagcaaactgaacgtaggcctgccgaacgtcgtacactc

SEQ ID NO: 33568 - DNA, 120 bp, Homo sapiens
tcccgtctcaacatcaccagccccccagccttgtccccagtcaccaggggatgcaagtctgaaaccaatgctcattctccatggaaagtaaaaaattttttccgttctctttccccggta

SEQ ID NO: 33569 - DNA, 120 bp, Homo sapiens
tttcgtttcttggccactttggtgtagagcaagactctcagcctgcctagatccatctcctctcgcttgctgatgaaaataatctatgtttttgaaaatccagagatgatgaaatggctg

SEQ ID NO: 33570 - DNA, 120 bp, Homo sapiens
tcacgttactaaccctgttaggccttcccagggttgtagccagcactgtccacatgcatcagccaccaaccagggcactgggcacgtttggggagggccccaacaccgtgacagcagcca

SEQ ID NO: 33571 - DNA, 120 bp, Homo sapiens
agccgctgatcagcttcccctcccagtatcattaagacaaagctgtgtcacatcactcctcgttttgtatctaaggaactcaaggcatgtggtcatgtcagtctctcatcagctgttcca

SEQ ID NO: 33572 - DNA, 120 bp, Homo sapiens
agccgcatgagagcgtaagctaaaggtaacacatcttactgaggccttcatctcttctggggagtgaagacttcaccttattcaaaaaaaaaaaaaaaaaaagcagaggaagggactaaa

SEQ ID NO: 33573 - DNA, 120 bp, Homo sapiens
ccccgggtgtcctcagcagcagcagtgaaaatccagtcacattcggcctctgccagcctcacaggtgttttcagatccccttttatgctgcaacattttccgcagcaaccaccgccattc

SEQ ID NO: 33574 - DNA, 120 bp, Homo sapiens
taacgactgccctaaagcgtgaccaggcaagcttggtttagcagaaccagagctgctgctttccaacgttctagggagtttccttcctttagcacactttccttaatgatggcagagcac

SEQ ID NO: 33575 - DNA, 120 bp, Homo sapiens
gcccggaaggaagggaagagcagtaaggagggtggagagagggagtaggggtttctgccctttgttcccagctacagcccaggctggcccggctccctgtagcatttgctgaaggcagca

SEQ ID NO: 33576 - DNA, 120 bp, Homo sapiens
cctcgatggggaaaaaggcacctgctttctccaggatgaaatccatggtgtcccccagaaactgagtgtgccacttagaacacttgggaattcccacactgaaaaattcccttttttttt

SEQ ID NO: 33577 - DNA, 120 bp, Homo sapiens
atgcgatgcgtactcgtgacagctttcagagtagtgtttcagagtctgagagaagagcacactgtcctaccaagttatctcctttctttctcttgacttagaagatttttcactcttttc

SEQ ID NO: 33578 - DNA, 120 bp, Homo sapiens
ttccgaaattctcaggcttagaaatcataaatcatcgtactgtactgaggaacaagagaaacccaggtcaccagctccttttccctccctgcctgctcaacaggagatgacaggtggaaa

SEQ ID NO: 33579 - DNA, 120 bp, Homo sapiens
gaacgctccttccaaagctaatgatgcaaaatgttttgtggacaggccaccctggacacaaagactcagaatgaaaagaggtcttgagaaccccagtgctgtggtcccgctctgtggaac

SEQ ID NO: 33580 - DNA, 120 bp, Homo sapiens
tcacggcaggctgtggagaaccacacagagcagatcttgtggtcttgcttgttccactttcaagtgcaaaggtccctctcatctgatttccgtattttttttattttaagttagaatgtc

SEQ ID NO: 33581 - DNA, 120 bp, Homo sapiens
ctccggtgacatctgtgggccaagtcatttcaccatgacctttggccatgccacatgcagtcatctgaaagctgcaccttctggggtctgaggggtttcttgggtattttttcctgattg

SEQ ID NO: 33582 - DNA, 120 bp, Homo sapiens
tggcggggccagcattcttcacggagctattccacgagctactatgagaacatggtgactcagagaggctcacgtgtctgcactaaattcagacctaaagtaataagcagattcttggga

SEQ ID NO: 33583 - DNA, 120 bp, Homo sapiens
gaacgaggacctagagaacagcagcaaaaagctgagccttcccaggacctggaggagggtgttctgtgagcttccacagagcagatgccttaaaaacgaaggagctgtctggaaaaaatc

SEQ ID NO: 33584 - DNA, 120 bp, Homo sapiens
ccccgagggagaagtgggtcccatcctcttgagtttgatgagggtgggaatcagctttgtaatttttattttttggcctgtggatggttcgtaagctggaaagggtttgggtccccaaga

SEQ ID NO: 33585 - DNA, 120 bp, Homo sapiens
ccccgatgcacagctctcctgtgtcctgtgtggggctatttaaggatgaaaggccaggactgtgaatcctgatggtcacagctctctcagcttaaagctaggggaccccgctcgaagggg

SEQ ID NO: 33586 - DNA, 120 bp, Homo sapiens
taacgccctcagaaaccctgatgtagaaaggactgtgaagaaaagtctgtgactctgctctgtgccccttgcttggctgttcaaggtaaaaagctccagctcacagagtgaaagcctgct

SEQ ID NO: 33587 - DNA, 120 bp, Homo sapiens
gctcgcccttctccctcacaatcaagcacttgcgtccattgcccttggtgtacgtgcaagggtgaggaccagactcttctctgcatttgtggccatagccaaaatgccagagcccttctt

SEQ ID NO: 33588 - DNA, 120 bp, Homo sapiens
ccacgcatgcgtgtggaaatacaaacctttggctctctgagctggtgcattttctccatctaattgaatgctatgaaatcatttgcttcttggcccaggagccaataacacctgcgtgtg

SEQ ID NO: 33589 - DNA, 120 bp, Homo sapiens
tgtcgggccactgtagctgtacatgaaggctttaaactgcactcggcctgttctccccagagaatcatcagtttacccctcgtgtccaaacatgctttaatatcatccacctgaaaaagc

SEQ ID NO: 33590 - DNA, 120 bp, Homo sapiens
tcccgtctcctacccgctatccgtccctcccttcagtcccatgggcagagcatttgccgtctgcagagaatttgcagacagtcccagggcggtcccatggtggcacctctctaatctgtc

SEQ ID NO: 33591 - DNA, 120 bp, Homo sapiens
ctccgggcatctctcccctggacatcgaagctgcctcccctcttcgcttagcagccagagggattgtatttatttatttcaaaaaaattgttggagacagggtctcgctctgtcatccag

SEQ ID NO: 33592 - DNA, 120 bp, Homo sapiens
caccgtgcccagcctgatgtctaatcttgaaggagactgacccaaagtcttttctgaaagatcttacagcaggtggggtccatcagaatttatgcctcatccggcagaagagaaactgaa

SEQ ID NO: 33593 - DNA, 120 bp, Homo sapiens
tcccgaaggctgggcctgaggccgccaggcttcagaatgtgccccctgtctgggcatccactgtggtgcataatttcccgctgtggtttacattttccgggtgagctccagggattctgc

SEQ ID NO: 33594 - DNA, 120 bp, Homo sapiens
ctccgaggccaagtgtgggcaggcctggacttttcagccaaagatcgaggtgccagaggttcccactgccaagacagcggcacttaagcagccagccttattatctaaataaacacaggt

SEQ ID NO: 33595 - DNA, 120 bp, Homo sapiens
cctcgactcacccccacccactgtgtgtgcttctgtctgtccgccgagcagccacgccactggaggaagttccggcctctgccatctccatagccattacgtccccactcacccacaggg

SEQ ID NO: 33596 - DNA, 120 bp, Homo sapiens
tgccgatttttttttttactgcacaagcattgttaatgtgttctcccttccaaatccttccagagcccaacccacactctcccttggcccattctagaagcgtcaaacatattagacgca

SEQ ID NO: 33597 - DNA, 120 bp, Homo sapiens
atgcgtcttcctctgtagttgacattctcctcccctgactgtccaccctcttgttttcctccaagagggccacgtctttcagatgctgcaactggtcttgcacacctgaaactcacctga

SEQ ID NO: 33598 - DNA, 120 bp, Homo sapiens
agacgtgagcagacatgcacaggactttgtgtggctggggtccctgcccctgtgccttcatactctccctgacctatgcttcttcacagcaccagcccttggcctctctgggcatgaacc

SEQ ID NO: 33599 - DNA, 120 bp, Homo sapiens
tctcggcccacctcaaatgcaggacagttttcttttgtttttttttttaatgactttatgatcgtgtccttcaaactgcctactcctaacaacttccctcatctctcagtagcaccactg

SEQ ID NO: 33600 - DNA, 120 bp, Homo sapiens
ggtcggtccctcacccaccctttcatggagactggggtagtggggctcagagatcaacctgcaggccccgctcttctctagctgtgtgaggttactgaacctctctgtgtctgctgtctc

SEQ ID NO: 33601 - DNA, 120 bp, Homo sapiens
tcccgtttctctcccagggaatcctctacactgtcccctaaagacaatagtgtcaggcatttctttaggcttcctgttgcttgcagagtaaagtctgaattctttagctaagcctttgaa

SEQ ID NO: 33602 - DNA, 120 bp, Homo sapiens
attcgctgtggtcgccccgcctactcccgcctttccagcctgtggccagcccctgcaggggctcctagcccactgccttagtgttcatgctttctctcttgcctgcctctacccaatttc

SEQ ID NO: 33603 - DNA, 120 bp, Homo sapiens
ccacgcacagcgatctctcccgcctctgacctagcacctcttgtctgcaccacgtcctgctgacagtgattcactgtttccactatcagacaccagctctcacatgtgtgttttgactct

SEQ ID NO: 33604 - DNA, 120 bp, Homo sapiens
tcccgaaggtgctatgggaagcagagatgcaaaatcatcgtcaacaatcaccattttggaagcccctgtttgccaggcgtgaaaaaatacctcactgtgacctacgcatgtggtaagaac

SEQ ID NO: 33605 - DNA, 120 bp, Homo sapiens
ccccgaccagctgcctgatgacactgcctcttttgggggagggtggtgaccatgtgaacggcaggagtttgcccagaacaagccaaacactgctcctcctgaagctgtttggtcatccca

SEQ ID NO: 33606 - DNA, 120 bp, Homo sapiens
acccgagagccctttttttctttcttattcttgtttatgatattcatgtcagataagcaatagaattttctttggtcaaaatttgtgtaaaagcacctttagcaatcagattggcagcca

SEQ ID NO: 33607 - DNA, 120 bp, Homo sapiens
atgcgagttcacagtcgaattatgtgtctcctatttaaccttccagttctgcttttaggccctaaatgactaactctctgtactgccaacagctattttatctacatgcccacagtgttg

SEQ ID NO: 33608 - DNA, 120 bp, Homo sapiens
acacgacagcattactttgttttcctgatgtctttaaatgataaaatgaaatgccttcttcgtttagattctaatttcataaagccacgtaaaagcaaatcagcagtttattattttctg

SEQ ID NO: 33609 - DNA, 120 bp, Homo sapiens
gagcgtaccactatctacataaatacatacactgaaaatgcataataacttcagctgctctgataccaaatgccaacatccatgaaaatgtcctacaagagagggagggagctgcatcaa

SEQ ID NO: 33610 - DNA, 120 bp, Homo sapiens
ttgcgctgatgaccctgggccaattgtcctaagatctgttaggtctgtgatctgggagggccctggagatcctgaggcagcaggtgaggcctgaggcctgggaccccaaacccagctaaa

SEQ ID NO: 33611 - DNA, 120 bp, Homo sapiens
gtacggatacaccacctcttgttgactcattcatcctcttgttgactcattcatctgtggatgggcacttgggttgcctccacgtttgagttattgtgaatcatgctgccgtggacgtgg

SEQ ID NO: 33612 - DNA, 120 bp, Homo sapiens
aaccgtgactccctcccagcccatcctccaggccccctagagttttaaccacaagcagccatggtcaccagtttcttgtgatctttctaagagtatgtgagcatatgtgctatgccatgg

SEQ ID NO: 33613 - DNA, 120 bp, Homo sapiens
cctcgttcccatgatctcacagtccatccagggagacagacttgtaaccgaatgccatgattacaaccagctcaatgggagatgaagaaggaggtgtgttcggaaacctgggaactgagg

SEQ ID NO: 33614 - DNA, 120 bp, Homo sapiens
aaacgaaaagaatatataggtaaagtgcttagtacaaccgtctgggaaatagcaaagtccccataatgccagctgccgttactgttatgtctagtatcgaacttctcctggaaatcagcc

SEQ ID NO: 33615 - DNA, 120 bp, Homo sapiens
gaacggcaagaggtcggggcaagcagctctctctggtcacttcttcaagggggtggttgctgaggctttggaagggaatttagtgagctcagaccctctcaaggctactgtgctccaagt

SEQ ID NO: 33616 - DNA, 120 bp, Homo sapiens
gaacgaggtaatcttgtgacagaaatactgcctgatgctgtcagtttgatggtcgaaaaggttttaggtggtatcaaattttattactagcattcctggtctccatgaaagaaccacata

SEQ ID NO: 33617 - DNA, 120 bp, Homo sapiens
caccgtgcatacagcagacacttggtttccttttgatattgactcaaacagggactggattaaaaaaagaagaaaataacaacaagaccacagacttaagctgatcagtggtctaacact

SEQ ID NO: 33618 - DNA, 120 bp, Homo sapiens
ggacgtgaccctgtggtcctaccaccactagctacctgtgaccttgggtgagtcagcaagtggatgcaaagggaacacacacagcacggtgccacagcgggcaccacctgccccccgccg

SEQ ID NO: 33619 - DNA, 120 bp, Homo sapiens
tcacgtacttcctgagatctgctgcacccaaacacaccaagctcagagaggcttttgaggcagacaagggcagggagagaggatggttcttctcgcatgggtatttaaggagtgtagtgt

SEQ ID NO: 33620 - DNA, 120 bp, Homo sapiens
aaacgcatttatcatgtcaccatcttggcaagccactgtagcaaatgtaaacccttactggatactgaacatccttcacaatctgtcaacgtatctttcacatgaaacttctaactactt

SEQ ID NO: 33621 - DNA, 120 bp, Homo sapiens
tttcggaattttaactatcaaagatccatcttcgagtcccactttttccataaagcagtcctctctcctctgaaagagtagccaccctttggaacactgattgaacattttgccaaacac

SEQ ID NO: 33622 - DNA, 120 bp, Homo sapiens
aaccgcttaaaattttttaaactgaggttttgagagacgtaagagatgtctgtacaatatacctgcctcattattctaaggagtcttcatctagtatcagataaggctgctgaatgggag

SEQ ID NO: 33623 - DNA, 120 bp, Homo sapiens
aatcgcaaatctgtctctacaaaatacaagaatttgcacaacactccttcaaacagaaataaacctgtgtcttaggctaaaatgagaaaccttctttctctgttcaacagcagtctgcac

SEQ ID NO: 33624 - DNA, 120 bp, Homo sapiens
cttcgatttttcaagatcttctttatattccttcttgagcaattttactatctttttgctataacttgatttcttcactttgaaaacttcttcattttcttaaaaaggaaattaaatgaa

SEQ ID NO: 33625 - DNA, 120 bp, Homo sapiens
aaacggaaagactctcaaaggatgtgctctttgggccaggcagagaagaggttcgggttaggaagggcgaggcagtgcagatataagagtcattggcgcagatgtcagaatgactaaagt

SEQ ID NO: 33626 - DNA, 120 bp, Homo sapiens
cagcgctatttcctaccccagggtcttgggcctattcaagtgagattccatgcattgtattctattactagatgctgtagcctttaacctatatgtgtatagaaccctcatgctaaatgc

SEQ ID NO: 33627 - DNA, 120 bp, Homo sapiens
caacgcaaatggtggcaacttatataattagccaacctgttttaaaacgaaattttgctatgctggtgaggtcttggcaaagtgctacatccatatgtagccagttacaatgtaagttgg

SEQ ID NO: 33628 - DNA, 120 bp, Homo sapiens
taccgtgtccctgggaagtaggtgcggttgtgacccttgcttcatggatgaagagacatgttcagagtggttaagatacacagatcacactgttggaataaaagcagaacaaagctgagg

SEQ ID NO: 33629 - DNA, 120 bp, Homo sapiens
gatcgtgcagtatgacatccctttatatctgtgtctggcaacagggtaaatgttaacccaggaacgtgagtgtaagtatctagcattaacataattattttgaaagcaacatagcaatat

SEQ ID NO: 33630 - DNA, 120 bp, Homo sapiens
aaacgcattgcaccgggttgcactcgctttgagaacactaaatataaaatttcctggaattatagattcacagagtcacaaaggcctatgagggaaggaccagtgctggtgacagagaga

SEQ ID NO: 33631 - DNA, 120 bp, Homo sapiens
gagcgcagcagtccccagcccatgttctggctgtttcatctcaatgacacttgggaagcgaaccttgtgtggagcatggaggggtgggacctccttgtgaggctgacaaaagagggctgg

SEQ ID NO: 33632 - DNA, 120 bp, Homo sapiens
cagcgccagtgattaaatgccggattacagaggaaacattctttccatcctccccagcccccaacctcagcccatcaggcccattcacaaggctccttcccccaaatattggccacggtg

SEQ ID NO: 33633 - DNA, 120 bp, Homo sapiens
agacgctgctccgctctcacgctctgcctgtagttggcactcggttattttcttgtaccttctactggccaagcactcatgccttgctgcacatctagctagttttctctcttttccaga

SEQ ID NO: 33634 - DNA, 120 bp, Homo sapiens
agacgagacatgtcatgtcgggtagcatcatttgcaacagcctcgtcatccagctgacatggatatttggttctcctttgttactaaggccttgcctttccaggagcatccacatagact

SEQ ID NO: 33635 - DNA, 120 bp, Homo sapiens
gaacgagtgacttagggaatcagaacacaaactgtcatgccagattgcttggactttgtgacttactacctaagtgaccttgaacaagctcagtttccttgtctgaaaagtggagataat

SEQ ID NO: 33636 - DNA, 120 bp, Homo sapiens
gatcgggacccctttcctgtaacaataatggcacaacccaaatacaactactttaatgtttcagtcatctctttccattatgtctctaactgcatttatatttacagttataatgtgcat

SEQ ID NO: 33637 - DNA, 120 bp, Homo sapiens
gcccgccctgaattttctcctcatgactggttgtggcacaactttaaacccagcagagcatggggaggaagctggagtttgtattttcagttttgttcaactctgtgaattaggagtacc

SEQ ID NO: 33638 - DNA, 120 bp, Homo sapiens
taccgttttcccatcctagtcacgaagtagtcctgaattgtccttgagtagaagggagagatttatggactgaatcctggtccaagtcagagagaaaagtattctttagaaagacatcgt

SEQ ID NO: 33639 - DNA, 120 bp, Homo sapiens
gatcgaggagtaaaaaccattgataatcttcttagcattctggataatttattggtttctttctcacattgagagctctaagcctgcctaatatttgttaagacttcttggcagctcttt

SEQ ID NO: 33640 - DNA, 120 bp, Homo sapiens
agtcgcaacagtaggacagagtacttggttacccctcaaccagccctctgtctgttaacatcttatataccatacatgaaaattaagaaattatactaagcatgagactattagctaaag

SEQ ID NO: 33641 - DNA, 120 bp, Homo sapiens
gtgcgttctcacggttagactagcgttatgcattattggaaaggaaaccacaaagtgattgacgtgtccgtctcagtgcaccatgccatcctcaccatcctcaccacttggctaaggtga

SEQ ID NO: 33642 - DNA, 120 bp, Homo sapiens
caccgagattctccactgtaaactttccgttttcccctttgtaattattaaatattttagagggggagatactttgagacaatgcaaataaatatcctgtttctgcttaaacattcacag

SEQ ID NO: 33643 - DNA, 120 bp, Homo sapiens
agccgtactttttgtcctccaaagcaatagtttaacctcagctaaatgtcaacaagctatcaatggggacttttggagttggtgatgggcacaggagcctcaaagccattcacttcttcc

SEQ ID NO: 33644 - DNA, 120 bp, Homo sapiens
tcccggaagcccagcattccgggaaaggactggcagacctcctgacttcctccaccagctgtctgaccaccgcacactgtggttgtgacttgggatttcagagccaggagcaggacccca

SEQ ID NO: 33645 - DNA, 120 bp, Homo sapiens
aagcgtggcaaggcagacttcatttagggggattatcacaataggtctagggactattacaatggggttttatagtagggcagagagattgggctcaactctgtatccgacaaggaaaag

SEQ ID NO: 33646 - DNA, 120 bp, Homo sapiens
aagcggggattctggctaactgtcctaatgggtttcttgctgaacacaggccagggtgatcagacagcacctgcaggatggtggaggatgagcaacttccccagatctggaaggtgatca

SEQ ID NO: 33647 - DNA, 120 bp, Homo sapiens
cgattgatgcagaacccttggagaacgggccctgaatccaggagccaaatggttccttgcacagagcggaaaggattagggtgggcgaccagtttgggagcaagaagcagtatcccacca

SEQ ID NO: 33648 - DNA, 120 bp, Homo sapiens
acacgcagactctaaacagattctccattctacatgtagaggaagaaatcgagaataatattttgcttttaaaaaaaaaatttggtggctggttcttcttgctctccaagaaagcttgtt

SEQ ID NO: 33649 - DNA, 120 bp, Homo sapiens
aaacgaagatgtacagctcctctcctgggtgaaaagcacacagtccaaagagtcgtatttgtcaggctcacaggatgggcgggagaggaggtgggactggtgggcggtggcttttcaccc

SEQ ID NO: 33650 - DNA, 120 bp, Homo sapiens
actcggcaagatataaagattaagaaaagataacaagagatgaataaatgaggtagtggaattgcttgataactggagtagtgccttagaagctctctcccaagttagaactattctttg

SEQ ID NO: 33651 - DNA, 120 bp, Homo sapiens
tctcgttccttttgtgaattttgccttcggcttggttctgttttctggaaaatactatgcaaacatggaaatgggtaagttgtctgtcaatgcactttgcagatggcatggataaatgaa

SEQ ID NO: 33652 - DNA, 120 bp, Homo sapiens
acacggtttgcacagcgtagacatactatgagagtctatgggatggatgtttgagtcaaatgtggcacgttcatagaccacttggagtatacaatcaaagatccaaagaaaactattggt

SEQ ID NO: 33653 - DNA, 120 bp, Homo sapiens
agtcgcctcagtcttgcttgctgctggactgtgccattgatggtgacccccatgggggcaggctggggtcaggctggagtccttcagcccttctggggagctgctgctttctagccaaac

SEQ ID NO: 33654 - DNA, 120 bp, Homo sapiens
agacgtggcaatttgccagagtggtcccttcatttagagtaaggaattgtgtgagtgaggggcctgcaggctggtaaacagcttgtccatctccagagaggacccaccagtgtcaatggc

SEQ ID NO: 33655 - DNA, 120 bp, Homo sapiens
ggccgattgagaacagggcacctcgctgatagtcacagagacgaccaagactggaatttcaagtggaatttctccaaaccatgttggaacactcatgaatctgacttgcacatcaggctg

SEQ ID NO: 33656 - DNA, 120 bp, Homo sapiens
tggcgcactcagcccattgtatactaacgtgtttccatgctatcttcccagctggggcatgagttcatcagtgtattccagcacatctgggttcacattccaactcctgtctcctaatag

SEQ ID NO: 33657 - DNA, 120 bp, Homo sapiens
gctcggtaaaggacattccagctaacgaatggttctcgggcactgtgggtaagcatggggttatggctggacagtgtcactgggcacttggtagattaggaatttcttttctggaccttg

SEQ ID NO: 33658 - DNA, 120 bp, Homo sapiens
tgtcggtactgacacttcatcccgaatctccttcctgcatcaccccaaagcaggacatggaagtataaaccttcttcacataagccagctaaccttgggattttatgtagtgcagctcat

SEQ ID NO: 33659 - DNA, 120 bp, Homo sapiens
ccacgcggtaccctgtccttcccccaccacctccctcccccgacaaacaccacattgtcaacaaattaaaagcaatcatgccaggtttctaaattagtctctctctgtatctctgctggc

SEQ ID NO: 33660 - DNA, 120 bp, Homo sapiens
atccgtccagctgctcaggcttagaaaactaacaaagtcctccactactctgcaccctcacttgtctatacggagccattcatcaaagtttgccaatttcacctcctaaaaatgtcttcc

SEQ ID NO: 33661 - DNA, 120 bp, Homo sapiens
tgtcgtgtttctccatgttccatcccctggcctcaaatctgggttctcctcttctgtttccttttctcaggctggtgagtcagctggacagtcatctgagtctggagttggggccaactt

SEQ ID NO: 33662 - DNA, 120 bp, Homo sapiens
tctcggtaatgaatgagttctcactctattggttcctatgataaccaattgttaaaaaagagcttggacctctctcctcctctctcttcttccttcctctctggctgtgtgatgcctgct

SEQ ID NO: 33663 - DNA, 120 bp, Homo sapiens
taccgcagccctggctaggacgctaggcggtggagcgccctatccaggtgcgccgccgcaccatggatcaccgcgcccggtcccgcagtcccgccatggcctggggaggcccgaagcccg

SEQ ID NO: 33664 - DNA, 120 bp, Homo sapiens
ggccggcccatctccggctccgcggacccccggctcaggcgggagggcaggcgggtccctgcaggcccccagggagcccgggagcctctctctggcgtcattcagtcccggggcaacctg

SEQ ID NO: 33665 - DNA, 120 bp, Homo sapiens
aagcgcggtagatattggagagggggcgtctgttggggggacctggcgtcattactgatggctagcagggaggagggaacgggttgtcacctcggcctcataaggccgtgagtgagtagt

SEQ ID NO: 33666 - DNA, 120 bp, Homo sapiens
caccgtgactgtcttttgcgctgtgtggaaactccggtaaaactctttgggcaacagtcttatcaccagctcttcaacgtgtgcagcccttctggtcctgtccctgttctgggccccagg

SEQ ID NO: 33667 - DNA, 120 bp, Homo sapiens
tggcggtggaggaagaggcttcccggctgtggaggaagccagacccttacaacacaagacgagaaccagacctgcgtgggggagctctggatgctacaggggctcaaggaggggtggagg

SEQ ID NO: 33668 - DNA, 120 bp, Homo sapiens
tgtcgaagggggtggcttccagtggggtggaccgctctgtcaatgccagcgtgtgtctagcatctcctggggtgggggtgtggggaagggaggtgtaggatgaagccctagaagcctcag

SEQ ID NO: 33669 - DNA, 120 bp, Homo sapiens
atccggtgggctggatactgaagcccacccctgccttgacctcaattttcagtatcttcatctgtaaaatgggaacaacctgccttcctcctagccctaaaggggctgctgtcaagattg

SEQ ID NO: 33670 - DNA, 120 bp, Homo sapiens
tatcgtctcactgcaaaggtggggggcagcttaacttcaagggcacttcaaggatagccaggtggctgtcagcccagctttccaggatgggagcaggatcttgacagaagggttgactgg

SEQ ID NO: 33671 - DNA, 120 bp, Homo sapiens
cttcgttaggttgcatttttgtttgttgtcctttcatttccctggggcagcaccccttcctgcaagctccaggccttcctctggaatgctcctagagcccaacctctgctggtgcctgag

SEQ ID NO: 33672 - DNA, 120 bp, Homo sapiens
acacggcctcacagtcactcagattgttagcagaagacaaaaattacaaggggagggcgtcatgtgattcttacacaccctccaaatccagcagacaccttggaagccacaggtagcttc

SEQ ID NO: 33673 - DNA, 120 bp, Homo sapiens
ttacggatgagaacctgagatggagaaaggacaactggagatctctgagtctctgagcccacactccctacctccctgcacctccaggcactctgctggcaggatcttgggcaaatgccc

SEQ ID NO: 33674 - DNA, 120 bp, Homo sapiens
ggccggtgagagactaaattaaactatgtctgtcaagacacctgaaactcctggcacaatttaggttgccttcaagtggtcacagttgtcattaggtggaagtcaacaccccaatcattg

SEQ ID NO: 33675 - DNA, 120 bp, Homo sapiens
cagcgaaaaaacacataacacacctttgcccacatttacatgtattttacggaccatgtttcacatcagtccgcatgcacatctgcacgtgtgtgcattcggcagtatttaccaagcacc

SEQ ID NO: 33676 - DNA, 120 bp, Homo sapiens
cggggcgccaaggaacaactcagcactgtccctgagctctgtacaggttccacttcccaaacccccccaacgcaaggcaaggcctctgttctcacctttgcatgccctggggtgcctggt

SEQ ID NO: 33677 - DNA, 120 bp, Homo sapiens
gcacggttagttctctgggaatatcctttgcattgcattgtggacgaggagggcccatgctctacatggaaaacagacctgggtcttttttttttttttttttttttttttttagatgga

SEQ ID NO: 33678 - DNA, 120 bp, Homo sapiens
ccccgggcataagcaatcattgtgtagcttaattagatattccccgtgctagtgtgagggacatatgtccattcactctgacaaacactgacagcggccggcgctttcatgatcctgctc

SEQ ID NO: 33679 - DNA, 120 bp, Homo sapiens
caacgcaagtgcgagctctcccaaggacctgtggccccagccggccccggcacaatcagcccgcattcaccgattggttccagtttattaatagcctatgaacttctcatctgctcccgg

SEQ ID NO: 33680 - DNA, 120 bp, Homo sapiens
cctcgggatccgagcggatctgggtctgctgggccaggcgcactttgtattttccaacacaaagaacaatggatttgaggagttgtaaattgcaagagtggaaaagcagatcacgtttta

SEQ ID NO: 33681 - DNA, 120 bp, Homo sapiens
cgctgttctcactttgttctcagtgctttacagatatcacctcactcaatcaccaccctcctaggagattaattcgatttttattcttgttttgcagatagaggaaactgaggtactgac

SEQ ID NO: 33682 - DNA, 120 bp, Homo sapiens
acccgcgtagcccaacatcaaagctggcatgacagctttctctctccaagggtgtctagcatcacactgagctcccatctctgcaacttttcttttcttttctttccttccttccttcct

SEQ ID NO: 33683 - DNA, 120 bp, Homo sapiens
acacgcatcacaagacaaatttaggctcagaaataaccttaagtaataagctgtattaagccacaatgccatttattaaaaataaaataaaccttcttataatatttgcaaaacacaacc

SEQ ID NO: 33684 - DNA, 120 bp, Homo sapiens
attcgataatcttgagtgttgtcatcagaaccaagaacactgtataactgcctatgtccttccacattggaaataaagacaactatgacaactatattgcattgtacacaacaactacac

SEQ ID NO: 33685 - DNA, 120 bp, Homo sapiens
aagcgcttggctcaggttttccatcaggcccagaagagccattttggggcagcacagagacctcagaggaatgagctcaactgagcggctgtagtttgcaaaagctgccgaccagacaag

SEQ ID NO: 33686 - DNA, 120 bp, Homo sapiens
gttcggcaaaaaagataaacgtagaagccagtcccagatcttagagcacctcaatgggacatgtggatcattttctgtagttaacaaggaacccttaaaagaataagccattcttgttac

SEQ ID NO: 33687 - DNA, 120 bp, Homo sapiens
ttacggcttttgaattgtgatggcttttgcctgcaatatctgtatgtttatggcaaaatcattattttgagatgaactatctggataactgtcggagagaaactgcaggctgcatttcac

SEQ ID NO: 33688 - DNA, 120 bp, Homo sapiens
gaccgacccactttctgtgcagtgtcagaagctcaagagagaagccagaagaaaaagacacagtagcctgtagccttcggtgcacatctgcaaagaatgcatgcctattgccactattgc

SEQ ID NO: 33689 - DNA, 120 bp, Homo sapiens
gtccggggctctatcattcatcttctaagccaaacttctgccaagtcctctcatttgtccatcgaacatttccgtaccggctgtttttccatcttacctcgccaaagttgtttatattct

SEQ ID NO: 33690 - DNA, 120 bp, Homo sapiens
caccgaagaacacctgccataggtatcaagcataaatgcttcttcatcaatggttgcttgcatcgaaaagggctcagaaagataggactcctgactgttccctcagaaaacgtttgtgtt

SEQ ID NO: 33691 - DNA, 120 bp, Homo sapiens
tcccgatccagaatgtgggacgatgcaattgaataagtgtgggatgctttcttcatagcataatgctacacgatgacttcctacagacacacacactgagagagaccaagggaggataaa

SEQ ID NO: 33692 - DNA, 120 bp, Homo sapiens
tcccgaaatgaaatgtgatgtttctgaattccttctggctgccgctgaaagcccccacttttcctggtgactgtgggaggctgcgatgtggtgggggtggggcacggagtactgggcgct

SEQ ID NO: 33693 - DNA, 120 bp, Homo sapiens
ccccgccctcaggacaaaaagaaaaaaaaaaaggattaaattcgggttgggtctggctagtacaaattgcatgcagagtatacagttgctttgcatattgcatgtgctttcatggagagg

SEQ ID NO: 33694 - DNA, 120 bp, Homo sapiens
aaacgggggaagagggagggcagggacactaaagaggggaaaaaactaaaaacaacttgctgttttcatatggtcggatagaactgttttgtctttgtaactgtgcagaatgtcaatggt

SEQ ID NO: 33695 - DNA, 120 bp, Homo sapiens
caccgtgtcgtgacaagattttttttttttaagttaagctaagctcacacccgagctgtagccccccgaggtactgcagctttaattgtgttcagtatgatctacagaacaatatgtctt

SEQ ID NO: 33696 - DNA, 120 bp, Homo sapiens
cagcgcacggttccccttggcattgctgcaaagccaggcctcgctttagtgaacccgttcaggaatgtgggttaattcgccgaccctttttacccccacagctctgtttttgtgaggttg

SEQ ID NO: 33697 - DNA, 120 bp, Homo sapiens
acacgttttcttttgcttaattaagttgttcagtagaaggctggtcaaacagttgcatctacgtggggagtctggagatgcacagaaagccgtgggcgtttccaacataaaaagggggat

SEQ ID NO: 33698 - DNA, 120 bp, Homo sapiens
agacgggtcattttttcaaagttactgctgcctgagtgaccacaaccctgtgcgcagccctgaaaggacattaaagctgcttaaatacaactaccttcggtttactttttaaaagagaga

SEQ ID NO: 33699 - DNA, 120 bp, Homo sapiens
aaacgaagcggtcccatttatgtagcattttatttctttccggactttttttttttttttaaggcaaagagtgggctcatttgcataagagatgcccatacattatgaattactgctagt

SEQ ID NO: 33700 - DNA, 120 bp, Homo sapiens
tcccgctttcgttccttggtgatattatgacaaccacacacagtatcagtctcatggattctcaaaggaactgagggcctgattggaggcctcctccatcacgtctctgtccctttttga

SEQ ID NO: 33701 - DNA, 120 bp, Homo sapiens
ccccgattttctgtggatatttggtcccagcaagagtttttctcattgcacgtactgtgtgatatatttaaccggaggcaggtggaggcactggcacctgggctttgggatcctagtgct

SEQ ID NO: 33702 - DNA, 120 bp, Homo sapiens
ttccgcagcacctggcaccgtcactgtgctgataatcaacaccatgattttcagcagttatgaagcccgggtgcccattggtgaagcatcaggcttgcagggctgctcaagggatgtttg

SEQ ID NO: 33703 - DNA, 120 bp, Homo sapiens
gcccgtgtctagccatgcctctgtcaggaatctgtggtgtgacttctgacaagagttttatccctctggatctgtttccttggctggaaagtgaggaaatcgatccaaagattacctcgc

SEQ ID NO: 33704 - DNA, 120 bp, Homo sapiens
tgtcggcgaccctacgccagttttccttgagaaacagcgccaccttcaggtcataataaccataagagagctgaccgtgaaggtgcttctccggcaggagcgatttgccctgatccacag

SEQ ID NO: 33705 - DNA, 120 bp, Homo sapiens
ccccgcagtcctctgggatgcggtcacacacttgtgagtctgccgctgggttaagatcaatgcgtatggacatggagccaagctgagctaactggcccacaagggacagatgcatgacct

SEQ ID NO: 33706 - DNA, 120 bp, Homo sapiens
cagcgtggatgctgtgttactagtgttcagtggatggcggcagagggaccaaacagaaggcagtatcaccaaagaactgtccatcctcgcatgccaatacccacactccatagagaaaca

SEQ ID NO: 33707 - DNA, 120 bp, Homo sapiens
attcggttaccatttgccagccaaggcctgcccagccagacctctcgtctgagcactggtattccccttagacatctaacaggcacatcagagtcaacgtgtccaaagccaactcatcat

SEQ ID NO: 33708 - DNA, 120 bp, Homo sapiens
tctcgtctcctccccattgtgcaaaacctgcactcaaccaagtcaccagtgacttgttcagcacttaatccctcctgatatctcagtgaccttggactctgtcagccacttcctcccaga

SEQ ID NO: 33709 - DNA, 120 bp, Homo sapiens
cttcgcagctgtgatggcgctctggtggcttttctataatctctctgctccttttctgtctcgtctgctcgctgttgcctgtagctctgccctcacatcctgtttcctttctccaatctc

SEQ ID NO: 33710 - DNA, 120 bp, Homo sapiens
tctcgcagtctaaatcgtcttcattctggacatatggaagcagccgcctccaggaaacctctgcaatgcccttagcaattccacctctctgtgccttcagttgaatgaatcatttctttc

SEQ ID NO: 33711 - DNA, 120 bp, Homo sapiens
agtcgccacaagccatgacaagtctgcgatttcatggtctttttttattttgatgatatttccccagtgtttgggggacagaagaatgcccacaatctataggtcttagtcacatggatg

SEQ ID NO: 33712 - DNA, 120 bp, Homo sapiens
caacggtagggaaacgaaaattctcacacattgcaggtggttatgtaaattggtatagccccgcgggtggtcagtgtgacagtttctatccaaattacagatgcatagtttcattgccag

SEQ ID NO: 33713 - DNA, 120 bp, Homo sapiens
agccgatggggagccccaaataagagaaggaagggacaccgtgagtgatatttatccctcagcttcctgcctgcactgtcctcttggtctggctgtgtccagtggtctcatgtcatagct

SEQ ID NO: 33714 - DNA, 120 bp, Homo sapiens
cttcgatttcctgtgtctgtgacttcaatttccttagcataagacaatgaatcttgggtatttccccagacaaaggatgccacttcaccaggaagtgactaagggaagaacacctgtggg

SEQ ID NO: 33715 - DNA, 120 bp, Homo sapiens
ggacgtgcttacctgcacttctgtgtgaccttatgttatctggctttcaaaggggtcgctttcttttaatacccagctaactgactccactcattaccttgtgcttccacaggaagattt

SEQ ID NO: 33716 - DNA, 120 bp, Homo sapiens
tctcggctgctcaccactgaccacctgggaagcaattctccaagttgctacccctttctttgtgcctaataagataatcctaagtagctggtacaaagaaatatttgttgaattaatgga

SEQ ID NO: 33717 - DNA, 120 bp, Homo sapiens
aaacgtcaacagtgaccaggtggagagactatgccttagacacatctgtgtccacacttctggaaaatcaccagaaacccctaaaattgtgcatactctttttttttttttttttttttt

SEQ ID NO: 33718 - DNA, 120 bp, Homo sapiens
agcgacatcagcactgggcttccggaggcacctggaggagggagcttccttcccaccttgtcttcctccagcgccactcatcccatgtaggggacaaacaaaaccttccagaggtgggca

SEQ ID NO: 33719 - DNA, 120 bp, Homo sapiens
caccgctcacctctcggtccctcattttctcccagcaatcacactgtgctcaacctgcccttttccttatttactctcctttctatctagcacagccaccttctctactttctccaattt

SEQ ID NO: 33720 - DNA, 120 bp, Homo sapiens
ccgatgtatctcaagtgtctagaacaatgcctggcatctaagaagtgcttagtaaatattttttgaggaataaaaaagtaaatgagtttgtctctctctctctttttttggcggaggagt

SEQ ID NO: 33721 - DNA, 120 bp, Homo sapiens
atgcggccaaccttgctggaggaaggtgccctgagccaaagaatgggagtggcctctagaagctgggaaaggcaaggaaatggattctccctggaggctcgagaaggaccccagccctgc

SEQ ID NO: 33722 - DNA, 120 bp, Homo sapiens
atacggtgccggaaatgcaagagataggatgggccctctggccacgcttttctccaccctttggttgctttcttcactcgagggcaccgtgttgccatgctccctccccaagggcccgcc

SEQ ID NO: 33723 - DNA, 120 bp, Homo sapiens
gggcgagttgccacttgtatcctagagctgggcagggctgcccagcactggagaactcagctccaggaccctggggccagccttgttgagcagcaagctctaatgaagagcacacagaac

SEQ ID NO: 33724 - DNA, 120 bp, Homo sapiens
acccgcttagcaccatgtcacttagcctctctgggctgcagcttcctcgtgtataaaatgaaacaactgagctataagctggagcctgtgaagaggagcagccgtgagggcccccaagtc

SEQ ID NO: 33725 - DNA, 120 bp, Homo sapiens
tatcgctgttttccactttggtatgggacaatgacagccttgccaggacaacaggagccattgcctggaagaccaggtggggaggcagcaaggcctgctcaaggcagcagagggatgcgc

SEQ ID NO: 33726 - DNA, 120 bp, Homo sapiens
tttcggtcaaactagaagcaggttgggaatgaaaggaacattatttcccagaataattttttctctgttgactaacttgaggtatctagattaaccgtgagatacaaaatgttggccagg

SEQ ID NO: 33727 - DNA, 120 bp, Homo sapiens
tgtcgccagggcttttcataccctcttttgacatttcactggtcttccacggcagtcattttcactgtatttatctgtctgtacctggagcggtgtctttttttctaaccctgcatcgtg

SEQ ID NO: 33728 - DNA, 120 bp, Homo sapiens
aatcggcagttgtaaaggtcgtagatgaaatagacaagtatttataagattaattttatcttacccttgttctctttttctcttcttgaatttcctccttcaaatatatgaactatttac

SEQ ID NO: 33729 - DNA, 120 bp, Homo sapiens
tggcgattctcagactggataatcagctcctggggaatcaggcgctgacttttttttttttcctcctgcttttactcagagatcatcttttcatattttgggatttgtgcagtcatttca

SEQ ID NO: 33730 - DNA, 120 bp, Homo sapiens
tgacggatgtgctagataagcttaatgtgagtcattcaagaaccaagcccctgtttgaacctgtccattgagggccctgtttatcagaggttgaagcattttttagctagcagctgatct

SEQ ID NO: 33731 - DNA, 120 bp, Homo sapiens
tctcggtagagatctgagaactggtttgtctcctgcaatgaacagattgaattccttataaatatgttactaaaaggtaccttttgtgtccattttacagatatctgacatgattattta

SEQ ID NO: 33732 - DNA, 120 bp, Homo sapiens
agccgatgcccctaagtaaagctaccagataaagagaggaaagggggaaaaaaggaggagaatgaagccaccgtgtaacatctgttagagactcaatgtgagccctgtgagttagtcttc

SEQ ID NO: 33733 - DNA, 120 bp, Homo sapiens
tttcggttaattctgtataagtagaatgctgataactccttagagaaatgtgattcagtaataaccttgtttccatgtgactacttatctaatctgccatgcatctgctttaaggaaggt

SEQ ID NO: 33734 - DNA, 120 bp, Homo sapiens
taccgattcacactaaaagacagtcaaggggttgttttcctttgtgtgttgtaattcttagcaggatcctaaaaatgaaagttttaaaatgtggaatagcatgattaatgaggacattta

SEQ ID NO: 33735 - DNA, 120 bp, Homo sapiens
acccgtcattcttttaaatcaggtttaatttattcctgatatttatatgattcttatatgtcatgtaattcttatgacatataagagagaaaacattaatctagagtaggtaatttccta

SEQ ID NO: 33736 - DNA, 120 bp, Homo sapiens
ttgcgtttcatagtgacaatagaaaccatttactcttggcacaggtgctaaggtctgaatacaactttaaggagacagtgtctgcattgaagagcttatgttttaagaaaggagtttatg

SEQ ID NO: 33737 - DNA, 120 bp, Homo sapiens
actcggcgttcagggaatcagagactttcttcaagtttcccttgtcttttaaatagggacgtatttgcaagttcttatctgtttggaaattcctgtagcaagttcaggtttagtcattct

SEQ ID NO: 33738 - DNA, 120 bp, Homo sapiens
caacgctgtaataatataccaacttttaaagctacctcataatagctcttaaaaacacatttaaaacacttagaggtgatcctttttcctagccatcagtgggacaaattaattcctttt

SEQ ID NO: 33739 - DNA, 120 bp, Homo sapiens
gctcgccgatgtatccttctggcctctccattttcagggtagagttactgtttacagtgacatgtttcacagtctgtgtgaccagccagtgtgaatcagttcgtctattgcctggctttc

SEQ ID NO: 33740 - DNA, 120 bp, Homo sapiens
tcacgaaactcctcagtttttttgggttctcattatgtgtttatggatggaattgttctctttatctggtttgggtggttttgtttgtcagtggccaatgtggtggatatttcaacacaa

SEQ ID NO: 33741 - DNA, 120 bp, Homo sapiens
tgacgtttgaataaagaaatagcaaaaagcaaaaacatatacaccagaatcttcccaacaaaattgccacagccttccattcctctgtccagcagtcttcctgggaccacatcttgagag

SEQ ID NO: 33742 - DNA, 120 bp, Homo sapiens
agacgtatttatttctccctctctgactgtagtttatttaaactgagtctcctactgtgcgtttgtctgatgtctaaggccactttcataccagaagtgaagatgtttatgattatttta

SEQ ID NO: 33743 - DNA, 120 bp, Homo sapiens
cagcggggtgtgtttctgtcagctttcctctgacttcaccacctgctgtttcctacaccgtggtttctgatagcctgaagctactttactcatactgcctcatatttgaagtagtgtatc

SEQ ID NO: 33744 - DNA, 120 bp, Homo sapiens
gctcgctctcatcctaaagtaagggaatgttatgaaatgtgatgatgaggaaatgttgcaggtgatctgtatcttaatgagaaagtgttgctctttttcgggaacatatctgggcttcac

SEQ ID NO: 33745 - DNA, 120 bp, Homo sapiens
cctcgaattggctagttaaccaccagcttgatgagatgcgtagagtttagatatgctgtaagaataaagcatgtcattaaacatatattttgccttgctttcaaacctttgctttcctgg

SEQ ID NO: 33746 - DNA, 120 bp, Homo sapiens
acacgtatctctgggtgttgttgcggcagtaaaaatgtgtttgagtctgtgtagtaggttgtgctttttaaaaaaaaagtaagtcgtaagtcttctcagtttgtgtactgggtttctttt

SEQ ID NO: 33747 - DNA, 120 bp, Homo sapiens
agtcgttaagaggcaaaaatggacagtcaacaatatgcaaaaattaaaatgtctatgtttcaaaatatatgagaccaagggttacataaagggttacccctgttacataaagattccgaa

SEQ ID NO: 33748 - DNA, 120 bp, Homo sapiens
aagcgatttggaaggcaatttggcagtgcctgtttagatttaaaattctcgttccctctgccccagaaattctatttttctccttcctctcattcttctccttcctcttttgggcacatg

SEQ ID NO: 33749 - DNA, 120 bp, Homo sapiens
acccggctggcttggaggagaattaaaaggaaagacagggtggttccctgcaaactatgcagagaaaatcccagaaaatgaggttcccgctccagtgaaaccagtgactgattcaacatc

SEQ ID NO: 33750 - DNA, 120 bp, Homo sapiens
ttgcgtgagacccccgcccctttggcagtaacctcttcagagccctccacgacccctaataactgggccgacttcagctccacgtacgtgttggtgggctctttctgatgatttttgaaa

SEQ ID NO: 33751 - DNA, 120 bp, Homo sapiens
tggcgaattggagattacagtccctgaactggatttaatgatatcattgtctaacagtgacttaccatggtacaaaatgaagcctgttatcttgttttgttcaataatgtatttgtatct

SEQ ID NO: 33752 - DNA, 120 bp, Homo sapiens
gggcgggaggaagtggagggaaggatgtaaggaatagcaagtttttcatactttattttcacataaaaggctgaaggcgctaaagaaggtcccctcatctaatctctgctttaagaaaaa

SEQ ID NO: 33753 - DNA, 120 bp, Homo sapiens
ctccggggctttgcagttacagagtatttccctagcctgtatttcatgtaccctcacaactaaccttaagtggcacagtattgttcccattttatcaatgaggaaatcaaatgccttttc

SEQ ID NO: 33754 - DNA, 120 bp, Homo sapiens
gcacgaatgagaaaccagaaacggataactgggatgcatgggcagcccagccctctctcaccgttccaagtgccggccagttaaggcagaggtccgcctttactccagccacggccactg

SEQ ID NO: 33755 - DNA, 120 bp, Homo sapiens
ccccgtctcctgtgctaggccaggtaaaggcagccagtgagagtgtgaagacttagcatgctatctagtgccaaaaacttcagcaaatgctttttggcaatgtcattttgaagcaagcct

SEQ ID NO: 33756 - DNA, 120 bp, Homo sapiens
gctcgaaggcagacagtcagaatgtatttaaggaaaatcacatacccctccatttgtctagaccattgagttttttttggaaaaggtagaccaattaaaggttaatgggaggctctgaaa

SEQ ID NO: 33757 - DNA, 120 bp, Homo sapiens
gctcggaaagaataatgtctgaaaggataaaggtggttattctgaatagttctcttttgcttaatacaataatgataaaatactcaaatttctatcaataatcatgccaaacagcaagtg

SEQ ID NO: 33758 - DNA, 120 bp, Homo sapiens
gagcggtgtgcaggaagattagagtggagggccggcagggcggtgccaccagtcagggggctgttggtgtcacccagctgagacctagggcaggcctggacccagctgagttcatgttca

SEQ ID NO: 33759 - DNA, 120 bp, Homo sapiens
tgccggtggaagcagaagaggcgagcacgtgggagagactgcagaggagagtgaagaggttggagtcacaatgcctatgggagccgaaggaaaggaaagagggctgggattgagaataag

SEQ ID NO: 33760 - DNA, 120 bp, Homo sapiens
aagcgggaagggagaaaggcagaaaatgaaatgaatgcgcagttaaagggaagagttgtgttttagttgtgttgagttgaaggtgaacgtgggaccctgtctggcaggctgtcggaatat

SEQ ID NO: 33761 - DNA, 120 bp, Homo sapiens
gcacgagactgggattatagattggagccattcccatagagaacattatcggatatcaggaaatgtgtgaggtcatccaaggagagggaatacagggagaaaatagcaaatccacaggca

SEQ ID NO: 33762 - DNA, 120 bp, Homo sapiens
gcacgtgtgtgttctgtggtctggaagaagaagaggagctactcagcaggaaatggtactttcctttgcatctgtcctagctcagcatttagcacgtgtcacatgctcagttaacagtaa

SEQ ID NO: 33763 - DNA, 120 bp, Homo sapiens
taccgtggtcagggcaaagaagagaccattcattgtgacaggtagagctttgtaacctgggaaggagaaggatgaaaccacactgcaggggcgtaaaaggaaatgagcagcaagaaagtg

SEQ ID NO: 33764 - DNA, 120 bp, Homo sapiens
cctcgggaaagcaagaaccagccatgttgccagtggagatgggaatggaaaagtgaagtgtcagaggatatagttggtataaggcagaaaacattaaaagcacagaaaagacaggagtct

SEQ ID NO: 33765 - DNA, 120 bp, Homo sapiens
accgaaggagttctccataaaaaattcctacctcttactcaacacgaggctcgacattaaaggaacatcatctgaggtttagagagaaacatacattgtccatcataaaaatgaactttt

SEQ ID NO: 33766 - DNA, 120 bp, Homo sapiens
gtgcggtgattctctttgtggggagtcacgatgtttgacagcggaactttgttgggttttgctaagttctggaatgtgacagtaaatccagtgtgacctgtcattgtttgatcttgtcat

SEQ ID NO: 33767 - DNA, 120 bp, Homo sapiens
ctgcgcagtaagcactggcttcccccaagcagaatgccatcagggctaagtggaggctgagtgtgatggggctggtccgcatcagctgggaggataatgttcagtattaagctctcttcc

SEQ ID NO: 33768 - DNA, 120 bp, Homo sapiens
ttacgctttggagtaaactttcttgattagatcattatggtcattgatttttaaatgcccaagaatggtagcaatattttgcctgtataaacagaagtattctggtgataatcgccccag

SEQ ID NO: 33769 - DNA, 120 bp, Homo sapiens
ctccgttgatcaggactgaatttaagtgctgttatccgtatgaattggaagtgctctcactgttgttaaatagagccctaaaaatttgatcacataaactgtggtcttaagatagtgcaa

SEQ ID NO: 33770 - DNA, 120 bp, Homo sapiens
gcacgttagtggagagtttcagggtataaatggagtcatttaacagatccaatgcacatttaaaaaaaccaacaagaattaactccttttttttttaagtgttgacagtcaattcacagt

SEQ ID NO: 33771 - DNA, 120 bp, Homo sapiens
gcacgaaaaagaaaagaaagaagcggatgtgaaataatacggtttctgtggcacgtcttcctggtctaggtcatttgaactttttggctatcatattcttagaaaattataggttgaaac

SEQ ID NO: 33772 - DNA, 120 bp, Homo sapiens
agacggatttgcttgtctgtctggtgcccagctccaactgggcttacatggctagggaaaagaagggaaatttcacgtagtctaggattttattttagtcagataaatactggatggagt

SEQ ID NO: 33773 - DNA, 120 bp, Homo sapiens
ctccgttttaagtgtaagttttctaagttttgtacacttgtcattccagagggtccagatatttcatagatgaagcccaggtgggctttgctttgcactgaaactagcaagaaaggacac

SEQ ID NO: 33774 - DNA, 120 bp, Homo sapiens
ctgcgtatgccaggtcccttgaggagcaagaacatccagtgccaaataggacactagtttggtctttctccaaaccataaactcttggaaccaagagctggtctttggtgtgttgcagga

SEQ ID NO: 33775 - DNA, 120 bp, Homo sapiens
cagcgtagacatcccagctggagctcccagtcagagcctaggctgggccagtagaccatgctgtggcctttcttgcttgccccaagctctgcaaagcatcaggcagggccaggcctgcac

SEQ ID NO: 33776 - DNA, 120 bp, Homo sapiens
gaccgccaggtgcttctatcctggtggccgacccctgatagcatgcagaacagaatgagagcggcttgcttaagggccagagtcttacttgttccctggagtgagtagaaaagtaggaaa

SEQ ID NO: 33777 - DNA, 120 bp, Homo sapiens
tctcgtcagaacatgagacctttttgcgttcttcctttccattcttctttacttcattccctctttcttcttttttttctgtccttctttccttcttttctcctttcgttcacaaaccac

SEQ ID NO: 33778 - DNA, 120 bp, Homo sapiens
gcccgtggaaatggtgtgtttcagagcctggtctgtggtaccgctggagtttttcccatgggacttttcacattcaggaaaagtacagaactgttcacatttttttccctgtgctgaatt

SEQ ID NO: 33779 - DNA, 120 bp, Homo sapiens
tttcggggttaataggaccacgcaaacccaaacctctcctcaccttggctgacttaaatgggcattctggaacctagggctgtgggtattttgcttcaatctgtcttcaagacactgccc

SEQ ID NO: 33780 - DNA, 120 bp, Homo sapiens
aaccgcggccacaaatgccttcccccaaggcgttttggtctttcgtgtgaagtggttcccaatctgggaagtggtttttgttctttctttgcgtgatttcataagcgagatccttctggc

SEQ ID NO: 33781 - DNA, 120 bp, Homo sapiens
cttcggtaaggaaggaagaggagtcgtgtcccgatgttgcctccaagacagcatctatcacagattttcttccccggggacatcatcgcaggtcttgaggacatccatggaaatggccct

SEQ ID NO: 33782 - DNA, 120 bp, Homo sapiens
tatcgatggcaggaataagtattagcgtcacgtgacataaaatcagattttctttcccgagcctttgttgttaaaatcaaatgaacaaagaaacagagtcctggcaacagtgtttgaaca

SEQ ID NO: 33783 - DNA, 120 bp, Homo sapiens
aagcgcgagaaagcgtacctgggtaatgcatggccccgcggggtgtcctgcacagctgggcaggagggagggccatttggctgggctgaaaatcctcagaatagaagaatcccctggacc

SEQ ID NO: 33784 - DNA, 120 bp, Homo sapiens
tcccggccctgccccagggcccctgcaccagctgtgccctttgccaggaggctcctccaccacctcttagaagcctgtgctccatgggtcctccactgaccacctcattcaatatgcagc

SEQ ID NO: 33785 - DNA, 120 bp, Homo sapiens
acccgcactcctgaagccccttttcatttcccagagcactgatcaccatcgaacattccactccactaacttaggtgatgtgtgccttgctcacagcccatctccccaccgagaacgggt

SEQ ID NO: 33786 - DNA, 120 bp, Homo sapiens
tcacgctccgtcatcagtgtttggaacagaccaggctcacattggggctcaataactcaggatgaaagaggagtctggacaggtttccgccctgccctctactccctccacctcagctcc

SEQ ID NO: 33787 - DNA, 120 bp, Homo sapiens
gggcgtgggggcggccggaggaagaggctgaggatacatgggcaggatccagggggtcctcagagtcacagcaccgttggcagccgctggccacagctctgtcaaaggtgagctccacca

SEQ ID NO: 33788 - DNA, 120 bp, Homo sapiens
gagcgctgcccagacgggacccagggcggctgtccccatggtgacctggaacaaggaaggagggacaggaactatacttcactcaacatctactatgtgccgatgcctggggtgggcggg

SEQ ID NO: 33789 - DNA, 120 bp, Homo sapiens
ctgcgtcctccagccacagcactcctgacctaactccagagggaaggttattgtccccatctatcagacaagaagactgagacctccacagagcagcaagttccccaagatcgggaggag

SEQ ID NO: 33790 - DNA, 120 bp, Homo sapiens
ctccgggcacccagtccatggaggcttctgctccacacaggccttggaaggatgaagcccctctgaaaacagccacagctgagagcagacagggatcccaggaagctttgctggggcagg

SEQ ID NO: 33791 - DNA, 120 bp, Homo sapiens
gaccgtcagatgctttcccgcccgcgcacctccctctggcactttcttgccaccgactccactatctccagcaaacacatgccctccgggcaggaggactgaggttagtgaacactgggg

SEQ ID NO: 33792 - DNA, 120 bp, Homo sapiens
aaacgtggagggttctggaggcttgttctcaggagaggggatgggtggccgagcccatgctttggtgtgagaacaccatagttctgaaaaaaaagagataagagagttcattgatcctag

SEQ ID NO: 33793 - DNA, 120 bp, Homo sapiens
caacgtccatgagagcatgtggggtggtgcgcggtgatggtgtcattgcatcgctgagcagtcaggagaaggaatactgggtccttgactgcagcccattgctagtctttagagtgcctt

SEQ ID NO: 33794 - DNA, 120 bp, Homo sapiens
ccccgttggagggacgtgatgctgagggtgtgcagcttggcaagggctggcgctagtccacctccctgctcagcacctttgtgcagtcaactatctatgcaacccaaccttatccagaag

SEQ ID NO: 33795 - DNA, 120 bp, Homo sapiens
catcgtagacctgccaatcagatgccaaggtggtaaattggaattaaggggtaggactaggaggtataaaaaattctaaaggatcagaaaagtgtaagtgttggtgaggatctgtctctg

SEQ ID NO: 33796 - DNA, 120 bp, Homo sapiens
aggcgctagagacagtcctgggttgggtgggcaggaagccgggcaaaaagacctttgaggtggtgcagcttctgggggctggtgccgagttatcacaggatcagaaactctgcttttgaa

SEQ ID NO: 33797 - DNA, 120 bp, Homo sapiens
tggcgtttctttgtttatttcctttttgttctcctttaacatttagtagaattcaaaaatattttttttgtggttaatacatgtagacaaggtacaattattactttttaaaatgccacc

SEQ ID NO: 33798 - DNA, 120 bp, Homo sapiens
gaccgcttgcgggctcaggttccctcccaggccctcggccacggctgtccacagagcctctcccatctggtctccggccctgacttcccaaccagagcctggtacgtcaccccccatctc

SEQ ID NO: 33799 - DNA, 120 bp, Homo sapiens
gagcgtgtgcaaaggccatggggctggaacatgtttagcgagttccaggaaaagcaaggaagccagtgacatcagagaggcaacagggggccaggcatgtgccatgagaggagaggccac

SEQ ID NO: 33800 - DNA, 120 bp, Homo sapiens
catcgctattcccatgtcccaggtggctcagagatggaaagccacctgccagccacaaagctggcagtggatacaaacttgcgtggcaccaacatgaatgagttgatggcggggagacag

SEQ ID NO: 33801 - DNA, 120 bp, Homo sapiens
cctcgggcaattcagttcacctctcagagcctccatgtcttcatgtaacatgggcaccaaaactccctacctcatgggacctacggggacagcaggtgctggggtaaagccatcaccctc

SEQ ID NO: 33802 - DNA, 120 bp, Homo sapiens
tggcgggatgcgcctcgggcccgtagaggacagaccttctctccacccctctctgccattgcgtccccagggaagacatgctgctgccccaggccccagcagctggcagggccaggactg

SEQ ID NO: 33803 - DNA, 120 bp, Homo sapiens
ccccggttcaggacaactcggttgccgcagcaaccggtacgcgccaacgctataatttagagatcaacagcctcagagcctgcctcttcccaagagaaactccctctccgggcccaggga

SEQ ID NO: 33804 - DNA, 120 bp, Homo sapiens
gtccgcagaggaggcttaaaggttatgccaacccctaggattcccgcctgccccttgccaggacccacagtcctcccatcgttgggaggagcgcttttcgacagcagcccaaccacagct

SEQ ID NO: 33805 - DNA, 120 bp, Homo sapiens
actcggtggaaatagatctttcagcccaggttcacatggatgggtggacatcactcggagagggtgagggactgacctaaggtcacacagagagccacccaaggaagttgtctccaagac

SEQ ID NO: 33806 - DNA, 120 bp, Homo sapiens
ctgcgccgataactttcctcctgcagccctagcttggagccagccctctctcagccctctgcattcccgacctcacacctcatgccaccaccgtcagcccaaaggcccctcctcactcac

SEQ ID NO: 33807 - DNA, 120 bp, Homo sapiens
cttcgggcaggtcattccttgtctctgggcctcagtcttcccatctatgaaatgagttctcccctaagatgcatggtggtatctgtcttcagaatggagcccccagaggagccagaggat

SEQ ID NO: 33808 - DNA, 120 bp, Homo sapiens
tcacgctgtgggggcgtctagaccatctcctgccaagccccagccccagggaggaacgttttccactctttccccagggaagccccagagacagcccccgagaatcagactagtctgaac

SEQ ID NO: 33809 - DNA, 120 bp, Homo sapiens
acacggggacatcaaatcaacattgccatggagaattaaatgggaatttgcaaaagctcctagcccagtgcctggcgagcaaatgtgtttcctcgctgggaagcggggaagcgatgggca

SEQ ID NO: 33810 - DNA, 120 bp, Homo sapiens
attcggcctcacccgtaaggcgagagtcacctggcaggtgctcatctggctctgcttgaatacctctaggattgaggagcccactatctcacaaaacaaccacagctgctccctatcttg

SEQ ID NO: 33811 - DNA, 120 bp, Homo sapiens
ggccgaattcagagctgggccctcaaagctcctgggtcctgtctgggcttgccacagtgttacacagggacatctgtctgtctgcttccagatagagctgggagccagaagccctggatt

SEQ ID NO: 33812 - DNA, 120 bp, Homo sapiens
ctccgcccacaaaccatcactgtgaccctgatgggtctacttccccctcaggcctcagtttccacttttgtaaaacgaaggcatcagaccagtgatttaagctccaaaccttctgtctga

SEQ ID NO: 33813 - DNA, 120 bp, Homo sapiens
ccacgggcccctgagtgtctatggtttcagagtcagaggccttatctctactcctgtctcctgctttcatagctgttgcctttgaggattctgtcatccccattttacaggtggggagat

SEQ ID NO: 33814 - DNA, 120 bp, Homo sapiens
agccgcagaacttaagggcaccttctttcaggagaatcgccaagatcttaagtggccagccgttctctatacagatgtggactccacatgaggcaaggggctgcccaaggtcacagagca

SEQ ID NO: 33815 - DNA, 120 bp, Homo sapiens
ccacgtcctgcctctagccgctgcccccagaagcccccgagcatctagggctgagatgggaagagtgagcaggaagacaggaaagaaagttgagggctggccacttgcccccggccctct

SEQ ID NO: 33816 - DNA, 120 bp, Homo sapiens
cctcgtgcagggggagcggcggcggtggtgatgtaatgcactcggctttcgtcccggtgccaatctcagaagagagacgacagattgcgtgagccaaatttggcatcctagggggagagg

SEQ ID NO: 33817 - DNA, 120 bp, Homo sapiens
ccccgaggtgcctcccctccctcccctcagggcccccatctcttccccagctagcctggccctggggcctcccctcctcactctgaggggccagcctggcttctccccggaccccttgag

SEQ ID NO: 33818 - DNA, 120 bp, Homo sapiens
gcccggcactgccaggcctacccgccacccccaccccacactgctccagctctgtttcccaccgccgctagtttcctggttaccatgttgccggttgtcatgtcgcttacatgtcctcgt

SEQ ID NO: 33819 - DNA, 120 bp, Homo sapiens
ccccgcagaggggccccctcctcctcacaccccccttagcactcgcccccgcctcccccagatccacattaagaaccagcccgccctgtaagcctacactgttcctcctccccttccttc

SEQ ID NO: 33820 - DNA, 120 bp, Homo sapiens
tttcgcaaatgtctacgaacctactatgctccaggctggcgcacgcggctttcacagacctgacacagtctggaaactgctcaacaccctgatgaagtcagtatcatcatacctattctc

SEQ ID NO: 33821 - DNA, 120 bp, Homo sapiens
cttcgtcagctatttccgccatattcccactgccccacgcccacctccacccactagctgttcatctctcttaaggtaaagtgagtctttactcccatctccccagtgctttccccagcc

SEQ ID NO: 33822 - DNA, 120 bp, Homo sapiens
gcccgccttggaggtcactggggcagggagtgacgtccccatgccacagatgtggaagatgacggttgggaggagagtgaccagcccagggggctgctctcccagccacctgagctaatt

SEQ ID NO: 33823 - DNA, 120 bp, Homo sapiens
acacggctccaacccttctctgggcctccctccctgagttccccacttcccccaaacctgctgctgaacattctactgctcttgaggccctgctctgtcagctggccaggctgccctgcc

SEQ ID NO: 33824 - DNA, 120 bp, Homo sapiens
gcccgccgctccaccccacccagcttgccacctcccaactccctgcatcctgtccatcctgaagcagggacactgggggcagaaatgtgggtagggggcagggaggctgacactggtggg

SEQ ID NO: 33825 - DNA, 120 bp, Homo sapiens
ctgcgggaggctcattgagacctctcttgccttggggtgctccctacacacggaggaaaaagcagcctctgcctccctccccagcctgtgtctatcactgtgaacgtgcagtgcctcctc

SEQ ID NO: 33826 - DNA, 120 bp, Homo sapiens
ctgcgccctggggtcgtgtggcgccaagtaggtgctcaaaacatgagaagtgagatttcgttcttcagatcacagggccatttgcaacgaggatgcagctggggaggcggaaaggcggca

SEQ ID NO: 33827 - DNA, 120 bp, Homo sapiens
ccccggcatgacaactggggtgggtggaggcagggaaaggtcatggctggggcaggaggtcaagaccccttccacccacctctctccccctttccaggccacaacccagaccgcgacgct

SEQ ID NO: 33828 - DNA, 120 bp, Homo sapiens
agacggacagacggacagagcccgcccgtggagcccgcccgctcccggggagtcacgggaccgcgcgcgcggcgccgggcagccgggacccggctccggatcaggtgcggagcgggcggg

SEQ ID NO: 33829 - DNA, 120 bp, Homo sapiens
agccgctttcacactccattatttcacacgcttggtaacagctactctgagatactggtggaggtgtccccatgtctgagtctcagagaggagagagaactccacgaccacacagtaagt

SEQ ID NO: 33830 - DNA, 120 bp, Homo sapiens
gcacgaacttggaaggaggccaccgggtgcagggcctagctctgcccctgatgagccccgagttactgggggggcagccaggccctccatcttcccacctggaaagctgagaatgaatcc

SEQ ID NO: 33831 - DNA, 120 bp, Homo sapiens
cagcggcttgtggccaccgtcagggctggggagtggtgtttgccggaagtcctcggaatgccagcgcaaggacgaagggtggcccagcctctcccctcctcgtttggccagccgcggtct

SEQ ID NO: 33832 - DNA, 120 bp, Homo sapiens
cctcgctctgtgactcctgaatccgggctccgggtcttcgttcgcgcctcgtcactctggagacgctgcgagcggcttgcggttgccgtaggaacctcgccagggcctccgcgaggcgca

SEQ ID NO: 33833 - DNA, 120 bp, Homo sapiens
gcacgactccgcgcgctgagagccgcgttttggtcaccgagagacacctgtcgccagcggcgaggggtgggggcgtcgcggcccgggttattatgcttttctttttaattgaggtgtaac

SEQ ID NO: 33834 - DNA, 120 bp, Homo sapiens
caacgtgctttttaactcaacacttctgtgacttatccacattaatccaagttcttttctctttttcacggctgattcaattgtacgaatacccacaatttatggagacatttgcgttgt

SEQ ID NO: 33835 - DNA, 120 bp, Homo sapiens
gcacgaatgctggtatataaacttttctgtacaaggatcctggggtacctgtgcaaggatttctctaggcattacagtctagggtataaagcttagggaggaattgctgggtcgttttca

SEQ ID NO: 33836 - DNA, 120 bp, Homo sapiens
gtacgcaactaatcctaaactggttaccatgccttgctttgtctttcctgctgagaaacttcaaaaaagagtgtggcctgtcccttccccatgctcctttctgcctcctggccagcactg

SEQ ID NO: 33837 - DNA, 120 bp, Homo sapiens
tcccgctgtggccctgcatggtgtgctgagtttaacattactcatgatttccagggcgaattgccaggggaattgcaagtaacatgaaacttttctttcaatggcactgacctctctgta

SEQ ID NO: 33838 - DNA, 120 bp, Homo sapiens
acacgacacatccacttacatctcattaactggatcttagtcacgtggccacacgtagcggtaggggaggctaggaaatacaatctttatttcagccaggtacatgcccagcaaaaaatt

SEQ ID NO: 33839 - DNA, 120 bp, Homo sapiens
ggccgcaagtggtatgaggagagtatcatgggaagctagagcgaagaacgctggattcgtctgggcgagagctggagggcttccaaggagagaagacatttgcattctgtcttttaggat

SEQ ID NO: 33840 - DNA, 120 bp, Homo sapiens
aaccgtttgcttttatagaaatgggatatttgaatgggcaggagaaagccgaaaggacttcccagacatcgtgcagctggctgtccaacagctactggtttttatagtgttgaggtggtt

SEQ ID NO: 33841 - DNA, 120 bp, Homo sapiens
ttgcgaattactttccatttggagtcactaatgtctgtgcttttcaaataagattggtccctctacgttcaatagcattagtcttctagcatttcttaaatgaacccataaaagaactaa

SEQ ID NO: 33842 - DNA, 120 bp, Homo sapiens
caccgcacccagccccgctctttttaaaaaagtaacctttttaacacaggcaaaaaagcatagttcataagtgtacagcttgatgaattacccaaaatcaacacagacctaagagaacca

SEQ ID NO: 33843 - DNA, 120 bp, Homo sapiens
tcccgctgtctagaatgttctttctgtagttccttattgtttgggtgtcaaatgttactgccatagagaggccttttctttttctttttttgagacagagtctggctctgtcgcccaggc

SEQ ID NO: 33844 - DNA, 120 bp, Homo sapiens
ctccggagaggccttttcttgaccacccaaccataagtttctcccagtcactacctcacatcaaccttttgatttaattacagccctgtcactaccagatgtgtttctcattggtctgtt

SEQ ID NO: 33845 - DNA, 120 bp, Homo sapiens
gaacgctacactgctaggggcctaaagagtgcctggcacaagacaggtgctcaaggaatgtttgctgaaatgttcagtgtttatttttgttgtccttctctttccctgtaaacatcagta

SEQ ID NO: 33846 - DNA, 120 bp, Homo sapiens
cagcgaggactgcgcgggcctaactacttctagtcggggtcatcaggcaagatcatcacctgagttgctatggactgcagccatgctgttgtgtccattaagacaccacagaactgactc

SEQ ID NO: 33847 - DNA, 120 bp, Homo sapiens
gcgttgatgactctcgagatgtttgatggtgaaaggaaaaacaggagatggtagctttgcagataagcaggggcaagggaaggggggtggttttcctttccttagtttaggagcttgttt

SEQ ID NO: 33848 - DNA, 120 bp, Homo sapiens
gtgcgggggaagagagtcacacatgctgaaggggttagccagccagggaaggagcaggggtgctctcagagacaggacagctgggaaaggctgagggagtgattgtggaaattaaatcca

SEQ ID NO: 33849 - DNA, 120 bp, Homo sapiens
tgacgggttgtcatatagtaggagctcagtaactgtttggtcggttggtcctgccttctgtctgattcccttccttgtcctgagctcaaactcatttctccagctgcttgctggacatgt

SEQ ID NO: 33850 - DNA, 120 bp, Homo sapiens
tgtcgtcattatctcttgcctgcattattagaattacttcctaactggactccccccttactggtctctcacttgctggtgcacacttggcactgctactcaggagatctttctaaccca

SEQ ID NO: 33851 - DNA, 120 bp, Homo sapiens
ctacgggtgtctcaatgcctggtgcagaaggtgtgtcgctgctgtccgtctgttgtgctgcttccacctctcatgtagtctcccgacactccatgtcacccatgctgctcctcaacacac

SEQ ID NO: 33852 - DNA, 120 bp, Homo sapiens
ccacgccacgctttgttcctctggctaggatgtccttcctccttctgcaggcccagcacttgttgacctagcttggcatcagccctttgcagaactgtcctcggcttccccaggcagtgc

SEQ ID NO: 33853 - DNA, 120 bp, Homo sapiens
cctcggtggctgttgttgaatgaagtagcgaatgctctgcttgatggagaggtctgtggcactgtcatgttttaacttggtgtgtgcccaggttttctctcaggtagagaggacccctgt

SEQ ID NO: 33854 - DNA, 120 bp, Homo sapiens
ggtcggggggtggtggcctttgttaggtggggttcctggctggctggttggcaggctggttggtcaggactccctctcctgctgatgtctgggctcttgtcaccagatgggactgagtat

SEQ ID NO: 33855 - DNA, 120 bp, Homo sapiens
ctacgccacagtgaagagcatggcggaacagatagaggccgatgtcatccttctgcgggaacggcaagaagctgggggccgcgtgcgtgattacctggtccggaaacgagtaggagacaa

SEQ ID NO: 33856 - DNA, 120 bp, Homo sapiens
ggccgcgggacattttggggtccccattcttcacagaggttggtgactgagcctgtggcacttggcgtgtcagctccatcctttcccctcctgaggcggggaaagagtgtccaggtgtct

SEQ ID NO: 33857 - DNA, 120 bp, Homo sapiens
agacgtgggctccttgctctaattctgcacttccctgtcactttgggaagagcacgagagaggccagccgtgcattctgtggccattctctgtgggtgtgtttcttttcccttcagcctg

SEQ ID NO: 33858 - DNA, 120 bp, Homo sapiens
ttgcggctcttcctggcagcacccagaagctagtgggagttaagggagatagccgctgtgggagtctgggcccttctgatgactctacagcagcagctctaggaaccttcccactgtgct

SEQ ID NO: 33859 - DNA, 120 bp, Homo sapiens
caacgacattctgggctttgacagtgaaggcaatgtagtgaacaagcctgacagccacggcggcagcctggagtggaccaagatctgtgagaagtccacgaaagtcattaccttcatcga

SEQ ID NO: 33860 - DNA, 120 bp, Homo sapiens
cttcggcatgacaggccatctgcctgacttctgcatgctcatggtgagtgggaggcgccccaaggaggggaggcgtcagcagggctgcttgggtctggttatgtgcaagtctgaaactgt

SEQ ID NO: 33861 - DNA, 120 bp, Homo sapiens
catcgggtgaggctggcgagttttgcaggggtgcccagtcctctgagtaatggtcttctcaaggcttgaaccttgatctctcccttacattagactagggaaggtatcctcttggtaaaa

SEQ ID NO: 33862 - DNA, 120 bp, Homo sapiens
aaacggagaagacagccataggaggcacaggccacagtcgagaggccctgagaggtggcctcctggagcctgggaggaggatcggccagtgcacagcccttgttgagaggctcctgtgtg

SEQ ID NO: 33863 - DNA, 120 bp, Homo sapiens
ggtcgagcgtgattaaatttttaagcagctattcctgctcggaacattaaaaacaaccaaaaagtgtttaagcagctcatctaatagattaactgagaaagaaagggagcagagggctct

SEQ ID NO: 33864 - DNA, 120 bp, Homo sapiens
gagcggcaaggcctgtaaccttgtgcacatctccacagctttcacagcaggagtaaggaagagggagggcgggaagggacagagtcagagacacacatgcctcgagtgttccctcggcaa

SEQ ID NO: 33865 - DNA, 120 bp, Homo sapiens
tctcgattccttcagctgcctgtattaataaatgtagtaaacataagcatctgttcatagcaaacttgatcaagttgctgcacaaacacaggttctcaagcaaattctccctaaactgga

SEQ ID NO: 33866 - DNA, 120 bp, Homo sapiens
tgccgttccttctgttctacccatgagccgcagtgttgattccttcccacaaacactgagggctgggctcttgagacccagacctgtcctcagggacctcacatgcaatccttcagcaag

SEQ ID NO: 33867 - DNA, 120 bp, Homo sapiens
gaacgctgctatgtgcccagcggtgttgctaaggtgctgggaacaaagatgaagtagatgggcaaggatccttccccgcagaagcccacagtccagcgaggaggtgcatgtgcagtgtgc

SEQ ID NO: 33868 - DNA, 120 bp, Homo sapiens
tgacgggtgggcattagctggaggaaaaggtgggagatggtaaggcaggatcagagccaagaacaggcttcacgggggtctgtagccccagagataagcccccacccttccacagcttaa

SEQ ID NO: 33869 - DNA, 120 bp, Homo sapiens
aagcgtatttcatgctttcactcactgcctcccgttgtcctgaagccaccaggtggctccagcctatcctgacctctggcttccttgacagtgcactgtgggagcatcaggcagacagcc

SEQ ID NO: 33870 - DNA, 120 bp, Homo sapiens
ctgcgcactggggacaaggccactgtacacttccgcttcatcaagacccctgagtacctgcacatagaccagcggctggtgttccgggaaggccgcaccaaggctgtcggcaccatcacc

SEQ ID NO: 33871 - DNA, 120 bp, Homo sapiens
cctcggtgccatctctctactcccttagaggtatcctgtggcctcctgtcctgggcagtggtggtgaccatggagaggagaaggtagggttagggtatgatcttcctccatagaaaactg

SEQ ID NO: 33872 - DNA, 120 bp, Homo sapiens
gggcgtgagttctcttggggcttaagctgttggtgtatcctggacacttgcccactgcagaccttgcccctggtcttggaggggcatttgatagaggggtttgacccctgctccgtacaa

SEQ ID NO: 33873 - DNA, 120 bp, Homo sapiens
cttcgggaggccctgagttaacacttgccctagacttgttacgggggcagcagcagcgtgctggggctggagctgcagcatgctctgaggagtctccaccagcttagcaatcaggagatc

SEQ ID NO: 33874 - DNA, 120 bp, Homo sapiens
tcccggagctccacttgccaggctctgtgcaggctctgggctctgggggctggactgagcgggaggtgggagcaaggttcaccaatttctctgcaggaatagtagctgcagcagagaaca

SEQ ID NO: 33875 - DNA, 120 bp, Homo sapiens
ccccgcagctccagcctcagcctctctccatggctcccacagctcctccagaccaccaacaactccccaatgaactccaagccgcagcagattaaaatgcagtcgacgaaaaagggcccc

SEQ ID NO: 33876 - DNA, 120 bp, Homo sapiens
tgacgaaacgagacgaggggggcccgtctggtgggccagcagtaggagcacccccacctggagatgaagcctcctctgtaggggcagggcaaccagctgcgtccagcaatctccagcctc

SEQ ID NO: 33877 - DNA, 120 bp, Homo sapiens
gcacgggcccctcgcagcttcggcatggtggtgggggctgtggcttttactctgattcggtgagggtgacatgtaggcaagcctcaaacctggctagagggtctcctccacagctctggc

SEQ ID NO: 33878 - DNA, 120 bp, Homo sapiens
tgtcgaagcttccctttcatagtaagattaagtattgcaagtattgctggtgtgagtgtccaagtgatatatgtgtgcactgcagtccagcaggtttgagagacactgccttagagggtc

SEQ ID NO: 33879 - DNA, 120 bp, Homo sapiens
tgacgtgcacacatcctgaaggggaggtggctttgggatgtgccagtgcgcctcttactcggcatctcctgccagctgtctcccacaggcactctctcctggcgtgatgaaggcctggtg

SEQ ID NO: 33880 - DNA, 120 bp, Homo sapiens
gttcgttcgcttcctttctctctctcctgctctgctttgtgcttctctgaacggccgcttctcacaccctcatcatgtgtgtcctacccaccctgtaaggaaggcagggcaggcactggc

SEQ ID NO: 33881 - DNA, 120 bp, Homo sapiens
ccacgcagcctgctcacgcatcttccgtccctgtctccccgctgctcagcacctctgctctctggccctgctcctgatgggccagtgcttctcaagctccttctctctctttcagcctaa

SEQ ID NO: 33882 - DNA, 120 bp, Homo sapiens
tcccgctcaggccacagccggagcctccgcattgcccccacccccattttccaggggggttgtaatttataagctgacgaaggtagccagacttccggaggactgaccatctctcactgt

SEQ ID NO: 33883 - DNA, 120 bp, Homo sapiens
ctgcgtatctgtctctgagaatcctcggggcggtcaggggatgtcaggaggggaaggagccgccctccctatcttgctgctcctcttggcactcaggggcaccttccatggagccagacc

SEQ ID NO: 33884 - DNA, 120 bp, Homo sapiens
acacgtcgtctcaaaggaggaggagagggaccagcagggccctggtggttcccactcacgtcgtcccgcacggcctggatctgctggggcagcaggcccacttcttccgccaccgagctc

SEQ ID NO: 33885 - DNA, 120 bp, Homo sapiens
agccgccagctcctgctgcaggccggccagctggtcctccagccgcctcagctccttcacagagctctcctggaaggactcctgggtcatgctggtcccagagagagaagagtaagcctc

SEQ ID NO: 33886 - DNA, 120 bp, Homo sapiens
tcccgcttttcacccaatgttgcggcactagggtgtgctcctgcccagggcggcacaaaagaggctcaggagaggtggggagggccatgcagagatgatccagggtccagggctcaggcc

SEQ ID NO: 33887 - DNA, 120 bp, Homo sapiens
atacgtcaggcacgtcagcaagagcagcggcagcaggaaccagaggaacgtcttcagggacgagaagcgcctggaccacgcgggagggcaggacgggggaggcggaggtgtgaggggagc

SEQ ID NO: 33888 - DNA, 120 bp, Homo sapiens
ccacgttccacccagggagtaccctgagatgttttcctgggtgctgaactagagctaaggaggatagcttgagcttctcactgtgccagggccagcctggacacgtcagagcctttcctg

SEQ ID NO: 33889 - DNA, 120 bp, Homo sapiens
gcccggacctggattacggccagagggatcctgacttctgggttccgtgttcttctgcctaaggggcacattctcaaatcctggttctgctggtttagggacttggggaatgaacccata

SEQ ID NO: 33890 - DNA, 120 bp, Homo sapiens
actcggggggttagattgtcccaggcccaagaaggaagatggactttctgggaaaccccacttcttgcctggagtcagtgggcctaccctgcaggaggaaagccatcgtgtgtctgagag

SEQ ID NO: 33891 - DNA, 120 bp, Homo sapiens
aggcggtaccaggtggtgccagcccaccagtagagaagtctgaagagccggcctggaagaatgaccatcaagccgaaggctccatatggtgtttgggggcaccgctcctttgtcccgtct

SEQ ID NO: 33892 - DNA, 120 bp, Homo sapiens
tgccgtcctccctgcccctaccccacccccacctgccagtatgcctctgtcctgccctaccgggacccaggtccttggatcccacctgcccacaccctctgtcctgctctgcagctactc

SEQ ID NO: 33893 - DNA, 120 bp, Homo sapiens
ccacgcaagggggtccccacagctctgggctcccagtgattattctagaatgacctttccccaatggtcctacagtctctctgcatgggcaggatgcccaactgcagagagatgggtaag

SEQ ID NO: 33894 - DNA, 120 bp, Homo sapiens
gcacgggttgcagcccacctggcgaagtggccaccatccagagtaaggagcccgcccgtgagacggcgcttcggagccgcgagctggaactctgctggtccacatccgagtagcctgcgg

SEQ ID NO: 33895 - DNA, 120 bp, Homo sapiens
gaacgaggacactggctcagtctctgtcactttcgagcctcttccttcactgtcttctgtgagccaagaccacaagtcacccaccctccttcacatccccacagccccacacaggcccgg

SEQ ID NO: 33896 - DNA, 120 bp, Homo sapiens
ggtcgccctgcgccgccggctgcagcgagactgcgtggtggaggaaggagctcatcttggagaaatagcaggatgcggccagggcaggattggaggattgtattatccagaggggcaggg

SEQ ID NO: 33897 - DNA, 120 bp, Homo sapiens
caacgttctgctgaacagtgcaccgtaaaggggtcccttggggcatagacaagagatgggcccagggagggggcggctggccccagagacacacagcaagcccatggcagagccagaggg

SEQ ID NO: 33898 - DNA, 120 bp, Homo sapiens
ccccgacccaggccctcacctcctgggcttgaagagggcctgcctgtgtttggggcatgtcacagtcagcctcagttgggtacccaagacttctggactgcaaggtggagatgaggtcag

SEQ ID NO: 33899 - DNA, 120 bp, Homo sapiens
gagcgtgggctgggggctgaggggggaattggctgacccgaggccacagtatcctccctcactggaggtcctgcaggtcatgctggtcacccctgttgatgtggaagtggagctgggtgg

SEQ ID NO: 33900 - DNA, 120 bp, Homo sapiens
cctcgcaggtcaggttgaagcattgggttttgtccagggaagtggataaactgttggctgggaggttaggccacgctaaccagcatggtccctctggttatcatcaggcaagaagtaagt

SEQ ID NO: 33901 - DNA, 120 bp, Homo sapiens
ctccgtgcctatagcatagcttgaggcccagctccatcccttactggcagagcaggttaccggccctcagacctggaagaaggggcctgtgttcctcaggcctggccctgtggcatccct

SEQ ID NO: 33902 - DNA, 120 bp, Homo sapiens
cttcgtggctccccactgtgggcccaataacacatgtgtctcgcccagccccgtcttcagcgctatgcactcgtcactcatagctcgttggctgcagtgccctgaccgctcctcatctcc

SEQ ID NO: 33903 - DNA, 120 bp, Homo sapiens
gcggcagcacgctcccttccacaggcgacacaaggcctcgtgaccaagccctcaccctccaccttctcacactgactgcctcggcacctcttgctccccactcttgggaggcctgtggtt

SEQ ID NO: 33904 - DNA, 120 bp, Homo sapiens
tggcggggcactcactgctctcccaggcagagggacaggccctggggttggggcctgtgactccctttagacatgtccagacaaggtttccgatttttgccccacactgactctggctgg

SEQ ID NO: 33905 - DNA, 120 bp, Homo sapiens
gagcggactggggtgttagtggggggaggccctcctccccatactgcagatggcagcgaagaggcggggttggtggcaggcctgtggtcactgcctccactataaatgctgcaactgccg

SEQ ID NO: 33906 - DNA, 120 bp, Homo sapiens
tggcgatggtgagggaagcagctaggagatggacggcccaaggcgtggccaggccgcggggagcccagctgtctgtgggggacggggcaggagggaagtggacggaaggtctgagaatgc

SEQ ID NO: 33907 - DNA, 120 bp, Homo sapiens
cagcgtgtgtggaagagcagggactatccaggcaggcagcccaggttcaagtcccggctacagctgctccctagctggaccctgggtcagacactccatcctccaaacctgagtttctcc

SEQ ID NO: 33908 - DNA, 120 bp, Homo sapiens
gcccgtcctctctccccacccccatatcctctcccatccacggccactgcccggcttccctgaacccattgtgagcttcctggagcccccactctgcacgggcggctggtccctcaaaca

SEQ ID NO: 33909 - DNA, 120 bp, Homo sapiens
ccccgtcttctctcttctggcaaatgaacctgtcttgcttttctgttcctgggtctggccctcagtagcctgtatgctgggtggcaaggacggtgccttctccgtggtcacggacctctc

SEQ ID NO: 33910 - DNA, 120 bp, Homo sapiens
ttacgggcagcaagggccctggaaggccaggtgtccacgtctggcatgggtcttggggagtggaagtaaagccaccggggccaaggaaacccctgggaaacacacctgccatggttccgt

SEQ ID NO: 33911 - DNA, 120 bp, Homo sapiens
caacggtgaccacaccattgtctgggagcaggaaggggagactgtgaatgacccatttctgggaaggcaagtgaggagggttctgctgcagtgacaggagtgactagggtagaaggtttg

SEQ ID NO: 33912 - DNA, 120 bp, Homo sapiens
gctcgccacctgtggtgccaccgtacggtgtgactgtgagggccagacactgcacaagcctcatctcactgaatctccacccaccccgaggagctggtgtcagcaccccgtccacaggtg

SEQ ID NO: 33913 - DNA, 120 bp, Homo sapiens
cagcgataatgcggtgcacacctcgggggtgtcacctgttccagttgcggtcccaggcctcccgtcaacctcgtgaggtgggtgcggtgtatccccattctacagacagagccactgaag

SEQ ID NO: 33914 - DNA, 120 bp, Homo sapiens
acccgaaccagctctgcgggcctcagcacccacgctcctgccacccccaccaccctggttgccggctgagccagcctcgctttttggcgcccacgtgcagcagatgaaaggagagaacag

SEQ ID NO: 33915 - DNA, 120 bp, Homo sapiens
gagcgggcggtaatcagcgcagctattctaggcctcggcgcctgctccccacctccagcgccggcccccgcctctccgttcactcccttctgccaatccctccgcaacacccgagtggca

SEQ ID NO: 33916 - DNA, 120 bp, Homo sapiens
atccgccaagtcccagagggccaggaccagctggaaagccacccaaccagatggtcagccttgaggcaacgactgcgccttctcgttcttgtctgtcccactgctcttggaccgggtgcg

SEQ ID NO: 33917 - DNA, 120 bp, Homo sapiens
acacggcagcaaccttccccttggctgcatgggtctggtctgagcaaaccttacctgctcgccatgaggctgcccagccaatctgttgatggatcttgttagtgctggacgctcagtctc

SEQ ID NO: 33918 - DNA, 120 bp, Homo sapiens
aggcgggctctccccgctctccccacgcccggggtgttcacttctgaggctcggattcaggggacaacccctgagggggcttcacaggcctgcacgtggctcctgtcctcaagtcacttc

SEQ ID NO: 33919 - DNA, 120 bp, Homo sapiens
ctgcgtttaccccaagtgccttggggtaatgtctagttttctgtcctgagagcagccctctcccttggtaagatcccgttttctgttcaagcgtcggctgtcaggccttaccccactgga

SEQ ID NO: 33920 - DNA, 120 bp, Homo sapiens
ccccgccctatcttacaatgttacttttcgtatgagtgaaatgatggggcccatgtcctctgcagtggaccgagagctcactgaggccagacctatggcttgtctttgtatcctcagctc

SEQ ID NO: 33921 - DNA, 120 bp, Homo sapiens
ttccgcccgagatgggtttggggtgagcatgtgacctacttctggataatgagacataattgccttctgagggctttccagagagttttcctccctcataaagaaacagatgtgatgagg

SEQ ID NO: 33922 - DNA, 120 bp, Homo sapiens
acccgccacttttgtctgtgtgaccttgagcatgtcacttgacttctctgagcttcggtcttctcatctgtgaaaactgtggattaaatcagctgatgtatcaagtacttagcccactcc

SEQ ID NO: 33923 - DNA, 120 bp, Homo sapiens
tgtcgatgttagcctccggggagcatggatatattttttgaatggctctgtcatcctgaggacccctccaatgccctctgcaggacccaggacccaccgtgctccagctcagccacacga

SEQ ID NO: 33924 - DNA, 120 bp, Homo sapiens
ggacgtccaactccttttccacttcctgcctctgccggcggctgctgtggctgagggccacacgctccttctccagtgccagcacctgggccagcagctgcccctccagctggtccatct

SEQ ID NO: 33925 - DNA, 120 bp, Homo sapiens
ggccggtgggcacagcagagactggggctggggcagctgagaggttcacacgggctggaagctcctgctgttcacagggcagagaaacagaaatcaactgaggggaggaaggacaggctg

SEQ ID NO: 33926 - DNA, 120 bp, Homo sapiens
taccgcccctgctcagtgaccccaggggagcctcagcttccccagtatgcaaaatgggaatgacaatggccaacatcaggcaacagatgcatcctgggtccctggcaggctctgttcctg

SEQ ID NO: 33927 - DNA, 120 bp, Homo sapiens
tgacggcgagcagcaggcagagctggccccggccctcaaggacagctcaggctgtggtgggggtgtggggcgtggccatgagtgctgtgaaggtcccccaggtggtttcagggtgcagct

SEQ ID NO: 33928 - DNA, 120 bp, Homo sapiens
gaacgccccaccctagtccttcatagcagcaaggctagacactgataggctggtaaaggggcggaccatcttagtcttcattccctcactcagcaagcttctctagaacggtccttggca

SEQ ID NO: 33929 - DNA, 120 bp, Homo sapiens
gggcgtgaaacagggacttctggagcagggccccggtggcttgaccataccagggtgacaggtggttgaaatcacatactttggagtcagacagcccagggttcaaaaccagctcggtaa

SEQ ID NO: 33930 - DNA, 120 bp, Homo sapiens
gcccgggatgaggtctaagtgttcagagttccccatgacatgcctgtcttatcttaagaccccaagggcagcagaactggggcaggagctgggagggtttccttccccttctcctgctgg

SEQ ID NO: 33931 - DNA, 120 bp, Homo sapiens
gaacgcaggtgaggccgcaggtccagactcttcaaggggacagtctgtggcagacatgtcacagaaatgtcagtaggagattaataattcaatgagctgctaggagctaaattaaacctt

SEQ ID NO: 33932 - DNA, 120 bp, Homo sapiens
ccccgctaccaggcctgatgcttgcgaactccccaggggcctgggaagtttttgctcagtcagttccttgctcccaggcttaggccccagacacgaactcattgcattctgtgattcagt

SEQ ID NO: 33933 - DNA, 120 bp, Homo sapiens
ctgcgaggggatggccttgcagcctgggacaagtatagaatcccctgtccagcctcactggcccagccaatggccttgtcagtcatttgctgggtgacactggacactgctggtggctgc

SEQ ID NO: 33934 - DNA, 120 bp, Homo sapiens
ggccgcgtgttccttctgagctgtgcactcctccttaacttctctgagcctgttttctagccatgggacaaggggagaagtgcgtcccctgcatcagagtgctgggggcaaaggaccact

SEQ ID NO: 33935 - DNA, 120 bp, Homo sapiens
gcccgagacttgggagctgccagtgtggacagcaatgtgacctcattttgaggagttgcaggaaccggccctcggctctgccactgccccgtgagagtagggacaggtgggctgacactc

SEQ ID NO: 33936 - DNA, 120 bp, Homo sapiens
ctccgagatcatttttccccttctataagatggagacacggaatgctcagcctccagggctggccagcattaaatgatggcgtgtaagggaagtgcccagagcctggcccacagtgggtg

SEQ ID NO: 33937 - DNA, 120 bp, Homo sapiens
tgccgggggcatggttttgggtgcatggggtaggtgggaagactgaatgggacgctcttgctgccggctgagccttagcagacaccttgcaaacattccctctctgaatccacttaacat

SEQ ID NO: 33938 - DNA, 120 bp, Homo sapiens
gctcgcccgccccctctgcatcactcgccacgcagcctctcttggcatctgccaagcggcctctccagaagccctattccctctctgtcccacctgtcccttggctcccatgggaaaggt

SEQ ID NO: 33939 - DNA, 120 bp, Homo sapiens
ggtcgtccaggctggctctggaaagggacccatgaaagcagcgggagaggggggactctggccaccattatccaccccccccacctcttgtgtaagaggtcacggcctcccagccacgca

SEQ ID NO: 33940 - DNA, 120 bp, Homo sapiens
ccacgaggatggggtggaggccaggtgaaggtgggcatgggatgggcgaggagccttacagtgcactccccgcttacattcatctttgctttcccgagggctccttctgtcaaggtgcct

SEQ ID NO: 33941 - DNA, 120 bp, Homo sapiens
gaacgagggctctacagccagacagtgggctccactgctgccttggggccagttccttaacctctctgaaccttggtttctttgtacctccctcacagagattttacaaggattaaataa

SEQ ID NO: 33942 - DNA, 120 bp, Homo sapiens
tgccgcatagtaagtgctcagtaagtgttcgctataatggttatttggctcccactccaggatgggaggaggcaatcagcttgctgggctgggttaaggatgtggtttatgccaaagaaa

SEQ ID NO: 33943 - DNA, 120 bp, Homo sapiens
ttccgttgtatacatacattaaattagcacaaaaatggaacaggggaacacacatgcatggcctgtagccgcatcattgggccaactcttggaaagtggctcctggcctcagccataaaa

SEQ ID NO: 33944 - DNA, 120 bp, Homo sapiens
gggcgacagagctagactttgtctcaaaaagaaaaaaaaaaaaagtcaatatcctctgacccagtacccagtaataccactcctgggaattcagcctaaaaaaatcaacagacttaaaaa

SEQ ID NO: 33945 - DNA, 120 bp, Homo sapiens
tgacgcaattgaatgcagcattttccccaaaaccttttgatttatttcaatgaacaacaataacaacacaaataaaaatggaaaagaagacactttcccctaagcccttaaatgtggctc

SEQ ID NO: 33946 - DNA, 120 bp, Homo sapiens
gagcgggggccagatccaaagtggtagcctaggagcaggccgaggagttaggagagccccatggtgggcttaaggaagacccttggggctgcctggaggaggatggagggaagggtgtgc

SEQ ID NO: 33947 - DNA, 120 bp, Homo sapiens
aagcgtgtacagagatgaggccaatcagaactggggggagagggaggggccaaggatggtttctcagggcacatggaggtacctggttcaagctgaaacacagtgtggttagggggctga

SEQ ID NO: 33948 - DNA, 120 bp, Homo sapiens
ggccgatgtgttgatgggtctggagcttgggaaggaaacctgggctggacactgagtttggtttggggcccctccgtggaatgggtgtgggaagcctcagggcatggctgagtgtaccca

SEQ ID NO: 33949 - DNA, 120 bp, Homo sapiens
agacgggcacatgccttaaaggaggaggaccctgcaaggagacagaggcagcagacagagggaggaggagggctgctgtgagaggcggctggaagcccagggcatggagacctgcaagag

SEQ ID NO: 33950 - DNA, 120 bp, Homo sapiens
taacgggtgcatgggactccgctgagccaagtggtctcaccctgtgtctgctgtgctccagctccagccccagcccctcccagaggcccccaaaagactagctgtggctgttgccacgct

SEQ ID NO: 33951 - DNA, 120 bp, Homo sapiens
ccccgcccttctctgtctgtggctgctgcactcagaaaagaggaaaaggtatacatggggaagccagggctcccccagcctggaaggctgacctgttgccaaattccagctgccaggatc

SEQ ID NO: 33952 - DNA, 120 bp, Homo sapiens
cagcgggctaaccggaagggaggccaccctgccaaatgctgcaggtgctgggggcacaggtccaaggcaggtccaagcctgccagccccagacgtgggaggagccacctgtgccatctgg

SEQ ID NO: 33953 - DNA, 120 bp, Homo sapiens
gggcgtgggggcaggggctatggcaggcacgaggaagtttattcaatgaaagtcaaaaattgttttttacatgactaaaacctgttgcctaaaacctgtttgttcctattttgagttttg

SEQ ID NO: 33954 - DNA, 120 bp, Homo sapiens
aggcgagaaaactaagacttcccttcattgcatactttcacctttttcctgattattttcctgctcttggttctctcatcctagaaatcccccagagctggagtcggggaagaggtgggt

SEQ ID NO: 33955 - DNA, 120 bp, Homo sapiens
gcccggcttttctcctgcctctgccacctctcttaggacgtttctgagctgagttttctcatccgtaaggtgaggggttggctgcaatggctgactggctgcactctgacaccctgtggg

SEQ ID NO: 33956 - DNA, 120 bp, Homo sapiens
agacgtcctggagggctgtcagaccacgacatcctcagccttgtgagtgggcatcaccagtgctgcttgcccaggatttaacttaaaaagccccgggagtaaggggtccctgcatttact

SEQ ID NO: 33957 - DNA, 120 bp, Homo sapiens
ccccgcctctctcctccctccaacttgcctgctgcactccacctgggtggaggtagcagagggggcagcgcgggctttggcctctttctctctcttccttccacagatctgattttgttg

SEQ ID NO: 33958 - DNA, 120 bp, Homo sapiens
tcccggatgtttgtcctgcccagtctgtctgccttgcacttctgggagccccaaattcattcttacagggaggaaggtggccatgggactccaggggggaaatgactggcccagggtcac

SEQ ID NO: 33959 - DNA, 120 bp, Homo sapiens
gctcggggggccctgttctccattcagcccccacccaagagctgtgggcttccaggtgtgtgaggctgggcgcctggcacctgagctcctgcggtttgggtcatagtctgagccagagtg

SEQ ID NO: 33960 - DNA, 120 bp, Homo sapiens
tcccggctctgtgtaatgaggggaggaccccaagtcctttggacagcgcatccatctcctggccataaagtgtgagcgtggagctgggctgatttgggggtgtccggaagaaggaaatga

SEQ ID NO: 33961 - DNA, 120 bp, Homo sapiens
gtacgtgccaagcattttcacacacctacatttgattcaatttccactacaagtggacactgttatacctattttacagacacagaaactgaggctcagagaggtgcctggagacggaaa

SEQ ID NO: 33962 - DNA, 120 bp, Homo sapiens
gtacgtgttagctatccttagagtaattctgagttgggaaggataattagagggagccccctcccccattttataggagatgatacagagaccagagagggtgattgaccaggctgaggt

SEQ ID NO: 33963 - DNA, 120 bp, Homo sapiens
gaccgagaggctgcaaaccaggccgcctgtctcatggacaagggtctctttatggtgcctgagtttgaaaggcaggcaggcaggcagatgagccccccagagggaaccagagatgataag

SEQ ID NO: 33964 - DNA, 120 bp, Homo sapiens
agccgtgtgtgccagcagggactgccaagggagctagcgagtgacgatcgttttaatgagtccccttgggggacagggtccacatttgccttttccaaagtgtgtcctgtttccttgctc

SEQ ID NO: 33965 - DNA, 120 bp, Homo sapiens
tcacggctgggagtatctgagcctttaccgagaactcctagggatatccagatcttctctgaaagagcctgttgctggcgctgcagtttcaggccctgaggcgtgataggcaggataagc

SEQ ID NO: 33966 - DNA, 120 bp, Homo sapiens
acccggctttgttctgtttccatcagcccaccctggctccgcaccgatgtttcccaggcccttgtgttcataaaggctgattgctggcggccgtcatttaaatggaggctcatgtctttg

SEQ ID NO: 33967 - DNA, 120 bp, Homo sapiens
gtgcgccccctgcgtgtctgctcgctattaggaatgttcacattcatctttgaatctcattgtcctaaagatttcagaaggttggggagggagcaagatgcaggggaaagagagctctgg

SEQ ID NO: 33968 - DNA, 120 bp, Homo sapiens
ccgagtggacagagagagtgaggtcagcgagggaggcagggccctgcaggccatggaggagagcctgggccttgatccaagtacagggaggaggcccccagtgacaactcactgcagagg

SEQ ID NO: 33969 - DNA, 120 bp, Homo sapiens
aggcgaaggggcctggcacagcaagctggatgcagaggctgagccctgggtgaggttccgagggccaagaggcagatgcatttccaatctgctgcagcgcagcctccccgatgtatattc

SEQ ID NO: 33970 - DNA, 120 bp, Homo sapiens
ctgcgatgaatatccttaaacacatgtcttcatgcacttgcccagttatcttcttgggataccgttggtgggatttagagaaaaatcactcacattagggagggtatatactgctgactt

SEQ ID NO: 33971 - DNA, 120 bp, Homo sapiens
gggcgtagcatagcctcacatcctaaattaaagtcagttcaccggctgctgctcgggtaactggcgagagaaaagagcctttgcctctccgcagccggggaatttccaaatcctgaaatt

SEQ ID NO: 33972 - DNA, 120 bp, Homo sapiens
gcccgtaatgtttttcattctgtgacaggcttgagcatccttttcttaaaggagacaaaggagataaaagggcctgggctcagaattttgcaagcagaacacacggaggttgtgccaaga

SEQ ID NO: 33973 - DNA, 120 bp, Homo sapiens
gctcgatggccagctaattcttgtttatccaacaagccatgctagttgctggggagacccagagaaatgagacacagtccctgttcatgggggttagctgtgtagtagagttgatagacc

SEQ ID NO: 33974 - DNA, 120 bp, Homo sapiens
gagcgggtgttggggatggggcagaggctactccattatcacagacttcagagtgtctttccagcaagactagccacacagtctgcctttaaagtcccctggtaagtcactcaaaatgat

SEQ ID NO: 33975 - DNA, 120 bp, Homo sapiens
tggcgcttttattatcattggaacaggtggatggggatgtcagccctcctctggcaggaccaaagcactggccatctgcaaagggaggacatttgggtgtcctcggacttgggcaaaggt

SEQ ID NO: 33976 - DNA, 120 bp, Homo sapiens
agccgggtgtgtttcaaatgaaccgatttaatcagacttgccttttctgtttctcttcctccaggatctcttttaactgaacttaccccttcaatttgcttacttcaatagcttaacgag

SEQ ID NO: 33977 - DNA, 120 bp, Homo sapiens
tcacggggtgatttcaggatgccacgttttgtcattcagactttctctggtgacttgatgagagtctacaaagatgtggacgggtcagtattatctcttgtaaatggaaaaagtgatgtg

SEQ ID NO: 33978 - DNA, 120 bp, Homo sapiens
gtacgtgtttgccatcccagatgagggggatactgtttgttctctttccctccaagtagcaggtggggaggatgctggatgtatactggcaaaggaaaggactctctgtcctcatctcca

SEQ ID NO: 33979 - DNA, 120 bp, Homo sapiens
tttcgagctagagaatccagcagtggccaacctgcagattcattccttgtctctgaggaacaacaactgagcccccgtcccatcccatcctgtgggacctgggccatacaggggattcag

SEQ ID NO: 33980 - DNA, 120 bp, Homo sapiens
taacgttccaccaatcagatgcatttgctagagttttcaatatggaacagttaaaggaggaaagagggaagcataaaggatccattgtgttggtgtggatcacagtagaaacagccaggt

SEQ ID NO: 33981 - DNA, 120 bp, Homo sapiens
cagcgtggtttccttccttgtcaagccgctatagcaccagcttcccaatcctacaggctgctagctagcttcctgattttggaggcagaaacagtatcctggagctccagttctaatgtg

SEQ ID NO: 33982 - DNA, 120 bp, Homo sapiens
tcacggattttccaaataaggaagtgaacaaccaaatctgagtgacttgattcctaggacgaatctactcctccttaaagacagaggctctgggaagactcttttagtaagccctccaga

SEQ ID NO: 33983 - DNA, 120 bp, Homo sapiens
caacgcactcattgtatggtgaacataattatccctcatgagtaatccgctaagcctttctgttgagcctctggagaggaagaaatttgcttcattcactttaaaaaaatattttaaaaa

SEQ ID NO: 33984 - DNA, 120 bp, Homo sapiens
agacggagccatagatacattttctcacttgcctaatgagcaaagtgacagacagtgaaacagttcacacttgagtaattctctagtcatcagcaactgcagaggggcccctcctgctag

SEQ ID NO: 33985 - DNA, 120 bp, Homo sapiens
aggcgggtggtcaggagatgtaataaatagaccctggctctgctggccagaataagttatcacaaagagagaggtcttagggtacactccccaaggaaatttaacctgaaaaaagagccc

SEQ ID NO: 33986 - DNA, 120 bp, Homo sapiens
catcgaaggcatctccagccttacattcaattagaattaaattaaaacaatggaaaaaagaaatcacctgctcctcatcaggccagctgcctggagcgggtggggtggctaggaatccgg

SEQ ID NO: 33987 - DNA, 120 bp, Homo sapiens
aaacggcgctgtcttctctagacctcgctgtcacggaagcatcctttccggggaaaatggggaaagtgggcaaaggttaaagccagtcaaggtggtgaagaaggggtgtgtgtgtgtgtg

SEQ ID NO: 33988 - DNA, 120 bp, Homo sapiens
atgcgtccaagagataggtagaaagcatctttttattgactactttcatgggcctatgcaagtgtgcataggggaagcagatcttgcaaatccaccacctttctggtttgatcattagaa

SEQ ID NO: 33989 - DNA, 120 bp, Homo sapiens
ttgcgacctcctgctgacactgggtgtgggctctgtgctagtttagccactttaaaggggaacgaactgaggtctcagtctgctaagctatttgctgaagctcacatggccagtaaatgg

SEQ ID NO: 33990 - DNA, 120 bp, Homo sapiens
tcccggtatccctcaccaggaggctgataaaggaaaagtgccgagtgagacgttggccagagaaatgggagctgagctcaaaacatgatgtctcttgtccattatcactagtttatccct

SEQ ID NO: 33991 - DNA, 120 bp, Homo sapiens
tagcggagtgcgtggctaacagctaccactctgttaagcccatcccttctgagtatcaccatcttcttcattgccacctccacacaccccagtatttacccttagccctcttattgaaaa

SEQ ID NO: 33992 - DNA, 120 bp, Homo sapiens
atacgaaataaatttctggtgacatttcacccactcagttatgatggatgctgtataattatttttatcttagtatccattgcttattaggaacttaacaggaattctctcccagagaag

SEQ ID NO: 33993 - DNA, 120 bp, Homo sapiens
gttcgtgtttgaaatcagaaatattaactcccacaaccaagaccctgggtcccctgtggtctagaaacacagactagttaaggagtgtaagttggaaaaggccttgggatgctttcatga

SEQ ID NO: 33994 - DNA, 120 bp, Homo sapiens
ccacgaagtagagagggtaagaattgaccttgggtctgtacgactctagagtctgagggcttgaccatcaccatgacacaaaacacatgcttaggagctactctcagagcagaggtcatc

SEQ ID NO: 33995 - DNA, 120 bp, Homo sapiens
aaacgttttctcaacaacttttctagttctttgtttcttttcttctatagtatagtctggctgccagtagaagctttttgggacatggaagagcatacatgtcttttcaggatagaacag

SEQ ID NO: 33996 - DNA, 120 bp, Homo sapiens
tggcgtgtgttgtgcatttgggctggggcaggagaacttaactgaggtttcattgtacctccactatgaagagtaacagggctgcacctgctgtcttgtccttctgcccctttaatgtca

SEQ ID NO: 33997 - DNA, 120 bp, Homo sapiens
agtcgtgaaactggagtgcaaggccaggtggaggaatggggttgactcaatggcaatccaaggctgacagctgtgctaatggatgacttaggcaagaaatacagtgattgactcatgaaa

SEQ ID NO: 33998 - DNA, 120 bp, Homo sapiens
aaacgttcctcatttgaagtctgggaaaccctccacactctagtgctgaccagcacttttgagagaaaccgcagatccaggggctagtaatgtgtactaacaagctttgtatcctgaaat

SEQ ID NO: 33999 - DNA, 120 bp, Homo sapiens
cctcgcagtccccagcaaggagcctgaatacagcatgtcattatgattaattgtgggtaatgagggtcttatgaaaccaagaaagagaagcgtttatttctctgctgctacagttatagc

SEQ ID NO: 34000 - DNA, 120 bp, Homo sapiens
ctccgatttgttttcaagcactctacagaggacagccaaaatagaataggaaatgactattctccagccatcctttacttccctgccaggcatttcagtaaattaacaggcagggaccgg

SEQ ID NO: 34001 - DNA, 120 bp, Homo sapiens
aatcggacaacagaccacagtgaataaaagaattcttttatggaagcagcgggtgttttcgtcattctctaacctaccagaaggtggtgcaaattcactgctgatacagtaaaggaggac

SEQ ID NO: 34002 - DNA, 120 bp, Homo sapiens
ggacgtggctttcttttccagccctaccctgtccaagtacagtaaaacagagagagagagagagatttaaaaataaattagacaggaatatttaatctttttaaaaacaaataactcccc

SEQ ID NO: 34003 - DNA, 120 bp, Homo sapiens
acacgcatttttgaaatgaaaattaacctttctcctaggaagataatataggatgtagaagacccaacaagagtgtttaaaaacaaacaaaaacaaaacaaaaaacaaaacagaaacctt

SEQ ID NO: 34004 - DNA, 120 bp, Homo sapiens
ccacgtttccaatagtcaagagtatttttagagatgggacatctacctagaaagaagaaagttttaaaaaacaatttgttatttcagtaacatatcaactgagggcaccatcaaaaatat

SEQ ID NO: 34005 - DNA, 120 bp, Homo sapiens
tttcgaattagaatttctaaagaaaacgcatccagagagtgacctcagagttctgggtaactactgatttttcagcccgaaatcgagcataggtttagcaaacgttaccagggagaacaa

SEQ ID NO: 34006 - DNA, 120 bp, Homo sapiens
tgccggattacattttcatttaactttggtgccgtgccttgtaattagtttttcttgatctgtttcttggaaggaaaaaaaaaagttaggggaaaaaaagataaaaaacaagcttgtagg

SEQ ID NO: 34007 - DNA, 120 bp, Homo sapiens
tcacgcctggcgtgaaaagaaccaagaacactgaacccagggcagcagcgaatcccacgccccacgctccctcttcccaaacctcaatatcgttgcttaaaatcttccgggcttattgtg

SEQ ID NO: 34008 - DNA, 120 bp, Homo sapiens
gggcgcttggcatgggaagagagccgctcgtgatttatttgggagagggatggggttttggaaaggaaattggggggtttacaaggaggacgggtgggttttactcaacaacttattctt

SEQ ID NO: 34009 - DNA, 120 bp, Homo sapiens
gggcgttttcgtggactggagaggagtttcgatcccgtctcgggctcacctgggaagccccctcctggcgcccgctttgtttggcgttcctttaaagcccggtgttggcagagcgaccca

SEQ ID NO: 34010 - DNA, 120 bp, Homo sapiens
tgacgtctttccccccgtaggagtccgaacaatgtctgggggcttggcacgcatgaagataaaagaattttattttaaatgcgatacatgtcaggattagacagcgtttcctttcagcta

SEQ ID NO: 34011 - DNA, 120 bp, Homo sapiens
gagcgaatcttcatttcctgtttcactgcttcccccgaaagaaacttttctttttctttttctttttctttttttttcttttctttctctcccccagcagagagtccgagagaaaagtgc

SEQ ID NO: 34012 - DNA, 120 bp, Homo sapiens
ccacgaggtccccggaaagcagacttagctcctgatcgttgtcaatctttgggcaacccggggcctcgcaacggctcgggtttagtgtgatctggggaggctgcagcccagttccggcta

SEQ ID NO: 34013 - DNA, 120 bp, Homo sapiens
taccgtgggcgcctgagcagagccggggcgagttgtaaacctcagagaaaggcacttgtccccagcaaaacgcttggagaggaccgtgcacgctgtgctgcccccgccccgagacgcgcc

SEQ ID NO: 34014 - DNA, 120 bp, Homo sapiens
cgccgggccgccgggtcaccggttttccgaaagggacccggcagagacaaagtgccttcgccgctgcgataggttggttttactttgcaataaacagcccctaatgggaccgggcgccgg

SEQ ID NO: 34015 - DNA, 120 bp, Homo sapiens
gggcggagagctcggcccggggcgcggcctttgccgcctggctctgcgggccgccccgccgggcgccaggttttggggggtggcccggccccgcgtccgccactgcaggccgctctcctc

SEQ ID NO: 34016 - DNA, 120 bp, Homo sapiens
tcccgcgcacacagcggagaaaaaaggacgcaaacagcattttacacttttcccactttagcgggaatcggaggagccgggcgagaaagcccgaaaagggaggcggttatttacgaccgg

SEQ ID NO: 34017 - DNA, 120 bp, Homo sapiens
cggcgggttggagtctggcaccagatggtgggggtctgtcaggcccggccgccccgcccagcgccccgcaaacagcgcccggttggcagcgtcgcctgagcagcccccatcttcgcttcc

SEQ ID NO: 34018 - DNA, 120 bp, Homo sapiens
tcccgtatattttctcccgtccaagtcgatcaaagacggactttaaaaattactcgcaattagacccaaaaaagtcattcgtgatctttgggtattagcacttaacggccagtggtctct

SEQ ID NO: 34019 - DNA, 120 bp, Homo sapiens
ggtcggggtgggggcgactgggaccaggtggaaggtagtgtagggttaagaagcgtcagacctcggagaagggcctcacttcctcttcgttttgtcgccctttgtgttacatacggggca

SEQ ID NO: 34020 - DNA, 120 bp, Homo sapiens
ggtcgtcacagcaacagggacatgacaggctggtatctctctcgagctccagggggcccctaataggattgaagcgaaagatcaagcgaatggtttcctattttaggcccgtaataactc

SEQ ID NO: 34021 - DNA, 120 bp, Homo sapiens
aaacgaaacgtgaggccacgtgggtgtggggagtgcgtgtgctgggtgggtgtcctttatctgtgtgtttctggagtagagagaggaaataaatgaaatgcgtgcggcaagaggagcggt

SEQ ID NO: 34022 - DNA, 120 bp, Homo sapiens
aaccgagaatgcctgggaaatctgaatgcaaacagccctggaataatcagcaccaccaacatctgtcaccacagctgtttcttttctggttggtgagagaacccgtctctcttctgtggg

SEQ ID NO: 34023 - DNA, 120 bp, Homo sapiens
catcgtctttctcttccaaacagaatcctccaggtctctgtttatttagcctgcttaaaagtagaacacaatacaaaacaaaacaagcataatattgccaccttttaggtgaaaataagt

SEQ ID NO: 34024 - DNA, 120 bp, Homo sapiens
ctccgttaaaaacaaaaaaagccccccaaaacaggtgagtagttgtattatgttttttcttttcattcaattcacaaataattattaagcttatggaacgtggaaaacaaaatgctttgt

SEQ ID NO: 34025 - DNA, 120 bp, Homo sapiens
acacgtgatgtctggctggagtaaggagcagagaattcatgaaagaagcagtagcatttgcctaggagttgaagattggttgagatttcgatgagttgaggtgggagaaaggcattcaaa

SEQ ID NO: 34026 - DNA, 120 bp, Homo sapiens
atccggagggaacaacaaattagtttttgtttcagaggatggagggagatagagcaggaatgaaagaggagagagataaaggcaggctaagacttgcctgtggatgaggggagccccaga

SEQ ID NO: 34027 - DNA, 120 bp, Homo sapiens
tgacgatctttcttccagtgttgaagagctttctttgtcaaagctgggcacttggcctcatggttgagcttcagccagacttagaaagccagcatcccagagctcagtgactttgtaggg

SEQ ID NO: 34028 - DNA, 120 bp, Homo sapiens
ggacggaaaaccagcttgtagaagctaaattttccccaagacacattactcctccttagcattcgttaccatttttataccattattgagaaagaaaattagagaaagataccccagagg

SEQ ID NO: 34029 - DNA, 120 bp, Homo sapiens
ctccgcaactgccaggaagtgaggaaatgttccaacgatgaaactgatctggcatttgtttacttttcagttgcatccagtgtctgcttaagaatgttctgatgggcagatacctagatt

SEQ ID NO: 34030 - DNA, 120 bp, Homo sapiens
cagcggcactctctgccctagttcccttcctgaaaaacgaggtgaattgggtgattttaaaggttctttccagctctgtgtgagtggatcagtgatgtgcctcttgctttgggttttccc

SEQ ID NO: 34031 - DNA, 120 bp, Homo sapiens
atgcggcagccctcctgcatgtgaaattgtcgagtagaatagctattatttcccactgatgaaccacaaatgggctgaagatatttgcatacctttttacacacaatatataccagcact

SEQ ID NO: 34032 - DNA, 120 bp, Homo sapiens
aagcgagtcctaaagtaaactttcagaagtccagttagtatctgctttaagaatcttcaggtctctgaaaacctttatctaagagggtggggaggggggaatctttgccaactataggtc

SEQ ID NO: 34033 - DNA, 120 bp, Homo sapiens
ctccggaaccaagtccaaatgaaaggcgagcctctttgaccctctgccctccctttcctgccttctcttctcctgggtttcaatggttgattgaacggtgtgttaggttcactgaacttg

SEQ ID NO: 34034 - DNA, 120 bp, Homo sapiens
cttcggttccaagcagggacaaagtcagcttccaggccaatttccatatgaaagcagctgagatctctttccccattttggaattccaggcagcaccctgggctctgacttctcagattc

SEQ ID NO: 34035 - DNA, 120 bp, Homo sapiens
tcacgtttctctgaggctgatggcgtaagagagggatttgtttattagggtttgagatgggcagggagaagtgggaggtcccacgtaggacagagagaaggtggaagagtcaatgcttgt

SEQ ID NO: 34036 - DNA, 120 bp, Homo sapiens
tatcggtgccttgatttttccgctcgaaagtctttccaatcttaatacctggtcacatttcagttctgttctgaacaatgctttgcttctttcttttgttggggagtaaggcacagtgat

SEQ ID NO: 34037 - DNA, 120 bp, Homo sapiens
tttcgttgtgtctcctaaaaaatgtcacttttatagcagggcacaattgtctagaagactataaatattagtatcatttggacaccgcaaagttgtcacagaattcctgccatggatatg

SEQ ID NO: 34038 - DNA, 120 bp, Homo sapiens
atccgtgggtttttatgcttgttcccatatacatgagcaatgtatatgtgtgcatgtggtatattttcaactgtgcgcataagggtgtttgggtatgtatgtgtatgtgttggtgtgtga

SEQ ID NO: 34039 - DNA, 120 bp, Homo sapiens
agtcgcattcccggcgggctccaaacctcagactctgcctggaggtacagtatgctcttccgaaagcagaaattattgaaacacagaatgtctcctaagttgtgctggccaggtccccaa

SEQ ID NO: 34040 - DNA, 120 bp, Homo sapiens
agacgaagaattttcaagaaagagtttcccacccccaactgctgcacactgagctgcattgtccagggagaggtggtgatgattaattgtgcccagttccctaggacccactctgccctt

SEQ ID NO: 34041 - DNA, 120 bp, Homo sapiens
tttcgtaggcttctagacagggagaatgatttactgactagttgagaataacagatatcaggtcttaggctcaatctagtttaatgtcttttaaataaacaggcctggttttgccttggg

SEQ ID NO: 34042 - DNA, 120 bp, Homo sapiens
caccgttgcctttttcctggcttttattctgaatggtttgtctcagctcccagatcttgtttactttgtttgggcctgacccctggacttattctgcagcctagcggagacctagggtgt

SEQ ID NO: 34043 - DNA, 120 bp, Homo sapiens
aagcgtccttggtgggttctcattagttccaaggatggaacccccaacttctggccagctagaactgtgttctaaggatttctgcaggaatgagatttaataagaaataaagaggaagag

SEQ ID NO: 34044 - DNA, 120 bp, Homo sapiens
cctcggagatcccaaatcgcttttcatctcatgtgtcaatcaccctcagaccatgtccacttttcattactaacacgccatcacatgacctgctaatctgtcactttctgacagcggtta

SEQ ID NO: 34045 - DNA, 120 bp, Homo sapiens
cagcgaagtctctacactcaggggctggccaaattatgggtgacatgcacatcttttgactagtctgtagggatgtatttcccctccttattacatgcaaagccactctgtcattgatat

SEQ ID NO: 34046 - DNA, 120 bp, Homo sapiens
taccgtattattcatagcttgatctcccagtagctatcagcccagtctgtgagccaggagctgtgtacgcattcagcatacctgatgactcactccagacgcttcaagtccttttggccc

SEQ ID NO: 34047 - DNA, 120 bp, Homo sapiens
ctccgagcaccaagtcctctggtggaaaaggctggagcaccaaatggggggagacctggagggtgactccagcacagtatattctcctctgctcaaatgtggcttttccccaggacctcc

SEQ ID NO: 34048 - DNA, 120 bp, Homo sapiens
atgcgcagccagacagtggccctggattgacccacttcaccattcctgcccctcattcattccctcaaaaagcaaatattacccttaggtgggtgttttgctcaatgtcactggattctt

SEQ ID NO: 34049 - DNA, 120 bp, Homo sapiens
taacggagaaatatttggggccatttgcctcctcccccactccacccctcagacttggagacgcacggtgggaggcaggcctcggtgcgacctttgtttttaatcttctgacaccagcag

SEQ ID NO: 34050 - DNA, 120 bp, Homo sapiens
tgccgtcgctggagcctagacaccagcccagaaaggagaatccacgcagaactgcttccctgacattctggaatctcccagagccctcaaggtctggagcccagagggaaacgtggggca

SEQ ID NO: 34051 - DNA, 120 bp, Homo sapiens
agacgagggctagcctgctgagagtcgtggctctgaagctgggcagagaggctggctttccttccgaggcctgctcagttccgcccaaaatatatctgttggctcacgtagctcctcacc

SEQ ID NO: 34052 - DNA, 120 bp, Homo sapiens
gcccggctgtgcacaggcccccgcaggatctgcacagcgagctgggtggtggcgaggacataatttaaaactgttgcctagtgtcttcctaagccgtgcccgactctgagaaaaaaaaaa

SEQ ID NO: 34053 - DNA, 120 bp, Homo sapiens
aaacggggcaggcggggctggggtgagcatctgaggaagaaggcccccaccccacccccagccagagaaagaataggaagcgacttctattcagggttcacaggggtccctagcccccct

SEQ ID NO: 34054 - DNA, 120 bp, Homo sapiens
ttccggctggctttgatcagttttgcgttctactggtcaacaggagagcccagcgggctgcgggggagggggaaaggggaaagggagggaggagagagaaggagtcggactgtgaaatta

SEQ ID NO: 34055 - DNA, 120 bp, Homo sapiens
caccgctcggggtcccattgtcttagagccagttctaggcggcagcgaaatgaaaagggaggggagagcagaggaaggagaaagtcagctttgtagcgtttttaattgcctgtttgtttt

SEQ ID NO: 34056 - DNA, 120 bp, Homo sapiens
ctccgccaattacaggcaaattaatatttaaactttgggaggctgggaggaaatgcttacaaaataggtttcagattccagggtgtgcggccttcggctttcggccattctagggttgaa

SEQ ID NO: 34057 - DNA, 120 bp, Homo sapiens
tttcgatttcttctctcatcgtgccaggggcgatgaggttcagttgtgcttctggaaggatccagggttgagggttctccaatcgcagcaaagggcccgggctgggtgttgccgagcggt

SEQ ID NO: 34058 - DNA, 120 bp, Homo sapiens
cctcggctccccggtggaccatgcccctccagaggtctggcccagcgtcgctctgctctgcaaaaaagtggctctccgctgatctcgaatgcaccagcgagcctccagattctgggtgaa

SEQ ID NO: 34059 - DNA, 120 bp, Homo sapiens
agccgattttggaaatccatatgccgccctagcaaacacatcaggattgaggttaccgcataagagcagcctgcagaggccaggaacatgcagggaaaagccctccatgcttttgtcttt

SEQ ID NO: 34060 - DNA, 120 bp, Homo sapiens
gaacggaatcacgttttaggaaacctccaaatcagacagcaatcaatgacatcaagttctgataaaatgtcacagaggcaggaggctcgggtgaagcctgggcatcttttggtttttttc

SEQ ID NO: 34061 - DNA, 120 bp, Homo sapiens
tttcggaatgtgttgtttttgcttattttttttaaattgacataggtaccctgtgatggttatcacctgccacccccctcacctcctagaacacttctcctcattaccggtgccgtagag

SEQ ID NO: 34062 - DNA, 120 bp, Homo sapiens
tcacgggtacaggaatacacaaaaaactggtaggaacttaggtgcaccaatatctgcacattattgtatatgcacacaagtatgtgtgggcacctgcccgtctagctgcacacgtgtggg

SEQ ID NO: 34063 - DNA, 120 bp, Homo sapiens
tgccgaagagagaaaaaatgtgggagtggaatttacaatttaaaaaaatcctggacaaagataatacctcctgagaaggaaacttcccttcctccccttaacctcttaagatctgagagc

SEQ ID NO: 34064 - DNA, 120 bp, Homo sapiens
gtgcgccccccttggtgaggaagaaagttaggctttgttgggatgcctaagggaaccctctttggtttagggcccagatacggcagacgtgcgcccacctcgggttcaaggcccaagcag

SEQ ID NO: 34065 - DNA, 120 bp, Homo sapiens
ctccgaacagctttcccagcatttgggcctcctctcctccggcattgcgggcccaggagatccgagccccgcgaggctccgcaggccgcccccggacctgctgcttcgccaacagaagcc

SEQ ID NO: 34066 - DNA, 120 bp, Homo sapiens
tcccgcaaacgaagtgcagtgagtccaggcggccaagaggccaggccaaagtgcccctcgcccaagcgggctgtcggggagggaggaaggcaggcccccttctatctctggataaaaaaa

SEQ ID NO: 34067 - DNA, 120 bp, Homo sapiens
ggccgccactgggctgggcctggaccggtgcggggagctgccccgcagcccaggcagcgtttccgaagccaggactgtggttgtcggcctttgagttcccttgaacgcaatcggagacca

SEQ ID NO: 34068 - DNA, 120 bp, Homo sapiens
aggcgtgtcccgccagacccttcagacccaggctaaacccaaatctgggtcgcgcttccccttcgccctgcattcgttgtgcggtgatcgcaaggcccggccggctccccgcccggcgtg

SEQ ID NO: 34069 - DNA, 120 bp, Homo sapiens
gtgcgcaggggcgctggggcgctgtgtgcccggacccacgtccttcccgagcccgcaaacaggagagccgccagcgctcgtgagcacagtgtacactttatttcagactacaggtttctg

SEQ ID NO: 34070 - DNA, 120 bp, Homo sapiens
tagcggcggttcagtctcgcagtctgtggggtcgtatttctcaacaagtctccggaaaacgaaaggggggcagaacagacagaccgacagaagggacccgggaggtgggggagaagaggt

SEQ ID NO: 34071 - DNA, 120 bp, Homo sapiens
acacgaaaggaaacacactctcgcacacaaagaaaagtcccagagaaaccagggccggcgatgcgggtcgggaggcaccggagaagcaatgacattcaaatgaaaaaggcaacgaaaacg

SEQ ID NO: 34072 - DNA, 120 bp, Homo sapiens
gggcgggggcagcgaggcggtgggggaggggataaaataattataataattataataattataacaataataataaaggagattaataaaaatgtccagcaaatagagatcgctacacgt

SEQ ID NO: 34073 - DNA, 120 bp, Homo sapiens
ggtcgtaagcggtttggctagatagagctttaaggagttcgcagtttcgtcccttatactgggaatagagaatggatcttatttttcgatagcacctgtccgagtctttctcccttttca

SEQ ID NO: 34074 - DNA, 120 bp, Homo sapiens
ctgcgtttcaacgtcattgtccattctgaggctctctttctgtctctctcgctcttttccctgcgctccctccctccttggagcagatgctttctcccccagcgaggggccgggagacga

SEQ ID NO: 34075 - DNA, 120 bp, Homo sapiens
cgacggcggcggtgccgggagggggcgcgggcgcggccccggcctgtggcggctactcgctctcgtctttgtcctggaccgtggtggtggagtggttgtacagtccctgggccatgaggt

SEQ ID NO: 34076 - DNA, 120 bp, Homo sapiens
ctccgtgatgtagcggtttgcctggaactccgccttgagtctctgcagctgctcggccgtgaacgcggtccgcggccgcttgtcctccttctcgttcttcttcttcttcagcttcctggt

SEQ ID NO: 34077 - DNA, 120 bp, Homo sapiens
gtgcgcggacctgcagcggcggagagggccggggtggggtgggggtggggaccgagggcagaagggaggggggagagggcaaaggaagccgtgagaatagcattgccgagctgggccgcg

SEQ ID NO: 34078 - DNA, 120 bp, Homo sapiens
ccccgcgcttccggggcgatctcggaggccctgctgaacccctggctccctcccgccagccaatccctggatcgaagtgcccctcaccagaccactggggtccccgggttccctttggga

SEQ ID NO: 34079 - DNA, 120 bp, Homo sapiens
gaccgaaatcacaacatttccaagccaagaaggcaggaatccaagatgaggagatatttggagctcatatggcccagcccagagttgggggtcaggggcctgctgtcctcaccgccccgg

SEQ ID NO: 34080 - DNA, 120 bp, Homo sapiens
agtcgccagcctgcaaacaaatcttcctctcctcctcaagaatcatacctacaggagaaactacaataagaccccatctgcttgtagctattgacctcagaaaacaacgggatagtgagc

SEQ ID NO: 34081 - DNA, 120 bp, Homo sapiens
agccggctgggagagggctgcttagctccaaagtatttggtgtctgcccccctccccgcacccctccctcccacacacacctcctcgccttctttctctttggcctaaaggaagcctttt

SEQ ID NO: 34082 - DNA, 120 bp, Homo sapiens
aaccggctgcgtggggcagggtctctcttatctgggtcttccttatctcccctttcaactgatgcaatttcaggattaaaaactcctgaataacaaaaacaagccggattggctttctct

SEQ ID NO: 34083 - DNA, 120 bp, Homo sapiens
aagcgggaaaaccaggagaggattgaactgttggtgtgtgcctcaaaagcctgcacctctgcccacctgcttccacacccaagtcttctggcatttacttgctgggtcctgccttggata

SEQ ID NO: 34084 - DNA, 120 bp, Homo sapiens
tgccggcatctccaaacctagctacagagaggaaggctgggcagcctactcctggggcaggcaggaggctggggtaaccagctgtcctatgacaaagagtccaggcctagcatactgcag

SEQ ID NO: 34085 - DNA, 120 bp, Homo sapiens
cagcgactcagatctgggtcgaggctcatcccctcctcccccaactgcccaagcaggagaaggagctggtcccctacctacccaggcccataagaaggaaagtggccaagaacaaagcca

SEQ ID NO: 34086 - DNA, 120 bp, Homo sapiens
attcgtaattagctgagcggggagaaatagcccaagaaatgcacacagccccaaaaaggccccactgcccgttctgcatccgggacatgttgaagtgttgttgtatgtgtgtgcagaggc

SEQ ID NO: 34087 - DNA, 120 bp, Homo sapiens
gcacggactcttgtaataaaatcgttcctagtctcccggccagcccgagccgtgcagcctgacagctcaatcactctatccatcaggcgagtcaatcaaagcagcttttcggaggttcag

SEQ ID NO: 34088 - DNA, 120 bp, Homo sapiens
gcccgacgtgtcaataacggggctcgagatggcgggagctgatagtgcgcatcgatccgcgcccggccggcagctgtggggcggcgagagaccagccagaggaaagcggcgcgtggctac

SEQ ID NO: 34089 - DNA, 120 bp, Homo sapiens
ctacgttgttcccggccccctgccggaccgggtgtctggagtgctgatcttgggccaaagcttctgccgctctcccagacactgcgggccggggcgtcaggcaggccttggccttctctc

SEQ ID NO: 34090 - DNA, 120 bp, Homo sapiens
tcccggagcccagctcaggtctcctcctcgggttcgccaagcgcgaggggcacacggaaaagtggtggaaggaaagccgagaaaaacaggcctacggatgccagaagtctgctggatgtg

SEQ ID NO: 34091 - DNA, 120 bp, Homo sapiens
gtgcgggtgaaaaaaggaaagcgccgcgcggggaggatgcgggaaccgttccgcggagaagctacggaggaaactggctctcatgcccttggacacgcttcctggcctgagcctgacctg

SEQ ID NO: 34092 - DNA, 120 bp, Homo sapiens
acccgggtcagactcttttcgctacccagccgggggagagggacggctttcagacgctttcctccctgtcttcctgtgtttcccatgtttatcaatgtaaacggtctctccgcagaaaat

SEQ ID NO: 34093 - DNA, 120 bp, Homo sapiens
tatcgagatggtgtttgtgtctgtaaggacacacagtgaatataatttttctgaacaaggccttctctggtcaaatctggccttcggacgatcaggctggtgggatttcagacacacatc

SEQ ID NO: 34094 - DNA, 120 bp, Homo sapiens
aatcgagacccgagcctcctgtgccacgagctgtagcttctcgggtggtggccgcagaggccaggatcgcatagctggatgaacattcggttgtgactggaactggggtgaggaagcagg

SEQ ID NO: 34095 - DNA, 120 bp, Homo sapiens
aggcgtgagagactggagtacccgaggccgggtttgctctccctagcgccgcagcttggcgttctggggcggtccgcggggccagaaggcatggcgcagcccggagttgggtactcaccg

SEQ ID NO: 34096 - DNA, 120 bp, Homo sapiens
ggacgatccgaataacgtgtgcagtacacccaggcgggccatacgagaggctgctgcgagtcagttttgaccacgggcccgccgttggctgagcccataagtaggatagccgggttgccg

SEQ ID NO: 34097 - DNA, 120 bp, Homo sapiens
cgccctcccccacccgcgcccgcacccgcgtccctccccctccttcaggccgggactcaggagggggcagaagaaacccgggaggggtgaattttgggatgtaggcaaatggagaagcaa

SEQ ID NO: 34098 - DNA, 120 bp, Homo sapiens
ctacgggagcaggggcagtaggcaggagcctggctgttttgcacccccacgcctaagaaactcagctttttattttctcctctgtctctggttgctgttattgaaggatgggtggttgtt

SEQ ID NO: 34099 - DNA, 120 bp, Homo sapiens
tgccggtttgtgtgtttgtgggtgggtgtgggtttgggtgtgtgtagtggagggagggggagtgagacagggaggtcggtgatgtgaaatagacctagagttggttactttcagaggcgc

SEQ ID NO: 34100 - DNA, 120 bp, Homo sapiens
ctacggctcccctgctccaggctgtcccacctctgagaggctgcacctgccctccttcctccctggagggcctttgcctcatcttgatctggatcaatcccccattatccttttaagccc

SEQ ID NO: 34101 - DNA, 120 bp, Homo sapiens
cagcggtcaagactggcacaccagtttccttctccccatcagtctccctcccagcatagactctgggaagatctgggtaaaagcagccagagtccttcccagaacactatttcctgggtc

SEQ ID NO: 34102 - DNA, 120 bp, Homo sapiens
gcacgagcccgttgtgggctccatgattcctggtctctcccatggtttgagccgacgccccctagcctgagcccggagggactctattgcatcaggcagtggaggagaggaggcagatgc

SEQ ID NO: 34103 - DNA, 120 bp, Homo sapiens
acccgcctcacccccagaagcctctggctgtgcctcctgccagggcttggagcatcagttcaatccatgggcggggtgagggcgggggcctgcagggcctgactccatattgaagtgcac

SEQ ID NO: 34104 - DNA, 120 bp, Homo sapiens
tgccgcgcgccgtcgctggacagctcccattcagcatctggggcaggagtccttgtgctgccagctcctaacaagggcactaatttctgaatgcttacttgatgactttaattgaaaaat

SEQ ID NO: 34105 - DNA, 120 bp, Homo sapiens
gtccggatttacagcattaagatagaggttaaatagctcctcctccccttctctccccaaatcttggcatcggccgtgttcctctgggcaggaagcacacaggctccacagacgaccagt

SEQ ID NO: 34106 - DNA, 120 bp, Homo sapiens
gaacgtgcagctgaggggacactcactcattcaatcccttcattaattcattctctctgtgaatacttactctgtgctgggggctgtccaggctcagtggaggcagcaggaactgacaga

SEQ ID NO: 34107 - DNA, 120 bp, Homo sapiens
ctgcggctgcctcacaatccggggaccttggctgtcagaagtgggtggacccttccagctcacctggtccaactcctcattatacagagctcatggggcaggggtgcccctcacccccat

SEQ ID NO: 34108 - DNA, 120 bp, Homo sapiens
atccgtggctagcgaccaccaccccccatcccttctccccagcctcacagaggtagtggcagcttcaagtccccctgacacccaacctgaggtctcccccttgcccttcccaccccctct

SEQ ID NO: 34109 - DNA, 120 bp, Homo sapiens
aagcggtttctctgtgatcctggataaaattatcagcatcttccatgcccccaggtgtaagttccctgcagtcagctctactccctgagctggccacactcactggctgtcttgagggtg

SEQ ID NO: 34110 - DNA, 120 bp, Homo sapiens
ccccgccagggatttcatgacaggagcacccagggcctgttcctggatccatcatcccatcctgaggcctcagcccttgcctttctgtggggtgggagaaaggcatgggcttgaacttcg

SEQ ID NO: 34111 - DNA, 120 bp, Homo sapiens
ctgcggttatttgctttgggcctttagacagatcacaaccttgctgtgccttggtttgttcacatgtaatatggagatcataatggggtcatttcgagcattgaatagtggaatacatgt

SEQ ID NO: 34112 - DNA, 120 bp, Homo sapiens
aagcgatttacagccatctccctaaactggacaggtgtgtgtttggtgtcttctccaacctgctatatgtgacagctttgaagtgagagaacttccagttgcctacattttgaacttagt

SEQ ID NO: 34113 - DNA, 120 bp, Homo sapiens
aaacggagactagtgattttgcagcctcacaaatggcccacattaggtaggaagttaatttgatttgcatgtcaaaggagcgttatctggtacctgatgtaagactaattttattattaa

SEQ ID NO: 34114 - DNA, 120 bp, Homo sapiens
atacggtactgccgggagctatttttaacctcccacctcagccccactcagcaaacaaatcattctttgaaggacactgcatttgcaaaagcgaattaggtgaataaatatccatctatt

SEQ ID NO: 34115 - DNA, 120 bp, Homo sapiens
gtccgcctggcaggtttccacgacgttgacagtgggcacggcggaaagggccactgtttgaagtgccagtccaagagtgagtggagaggcgctggcttgggttcccacctgggaactgtg

SEQ ID NO: 34116 - DNA, 120 bp, Homo sapiens
ccccggggcctgggccagggcggggggattggtaatgtctcacccaccccaggcacgagggcaatggataggcctggtccagctcactgcctggaacatcccacgctcagcgcagaggac

SEQ ID NO: 34117 - DNA, 120 bp, Homo sapiens
acccgggtgtcttcgttctcccacttactattgctgggaccttgaccgagttacttaaccttttcgtgtctcagttttctcatatacaaaatggggataatttctatcattttgtggtgg

SEQ ID NO: 34118 - DNA, 120 bp, Homo sapiens
catcgttattgggatagggagaaaggtaagaacagaagtgtccctcaggggcagccataaaatatcttggaggagcatgggccttacagtcagacctaggttccattccagctccacctg

SEQ ID NO: 34119 - DNA, 120 bp, Homo sapiens
gagcgtaagctctgtaacatggtgcccggcactgagtaaatgatcaatacacaatggatgtttagtaacaggagagttactcttatcaagattaatacagtcaattattccattccttga

SEQ ID NO: 34120 - DNA, 120 bp, Homo sapiens
atacgcacaccttgatacattatttatggatcaggtggcacagcattgcaggcagcagcagggcaaagacagtgtggaatcagagtcgggcagcgttggatgggattccggttctgccac

SEQ ID NO: 34121 - DNA, 120 bp, Homo sapiens
gcccgtgcatgtgcctggaatcttcccctctggtgtcccctcaatgcccatggtgcttcctgcacagggtgtaccatagttgcttgctgtctcctgctgaagcctgctgtgaagagggac

SEQ ID NO: 34122 - DNA, 120 bp, Homo sapiens
acccgaagctcctctcccacctccagcagcaaatgtctcccctggggctgtcctgtgttgtgtttgaaccctgctctggggctcctgcccgccacctgtagtggctaccatcagaagttc

SEQ ID NO: 34123 - DNA, 120 bp, Homo sapiens
ggccgagctccatggcagacatgctgagctgcctctgtgtgtcttggctaactctgccctttcctaaccccacggctcaccctgcccaggagcagggatgaggcccatccctgattcagc

SEQ ID NO: 34124 - DNA, 120 bp, Homo sapiens
agacgctgaggctgcagattcagctgccactgcctgatggcctccaacctggctggattaactggcccatagggagctggctgcccccacaagccagctccctggcctccctgggcaaac

SEQ ID NO: 34125 - DNA, 120 bp, Homo sapiens
tagcgcccggtcatcccctcattccagcactttgcttcttcctgcattgtgtagctggcctttctcctaagagccttaaaagggcaggtcatctttggccacctgcatggccccggcgcc

SEQ ID NO: 34126 - DNA, 120 bp, Homo sapiens
gcacgcctccagagggcactctccacagggattactatgtaaatggcacctcctaaagttgtgcagcatagggaccctagggcttgagcatgccccacccgcctccgctgcttcaagccc

SEQ ID NO: 34127 - DNA, 120 bp, Homo sapiens
atacgcaaaactcttttgctgagcggctcccagggcaggccacggccttggagacagccatgtcgggggcccatggggactacctggatgagcattttgcttgtggttgctgatgtccac

SEQ ID NO: 34128 - DNA, 120 bp, Homo sapiens
ccacgagctgggcaagatgcttactgtttgcagcttccctccttgagtagttggcctggcttggcaggtgggccagaggctgggaggcctgggcagcagagaaaagacccctagcctggg

SEQ ID NO: 34129 - DNA, 120 bp, Homo sapiens
cctcggtttcctcagctgctcagtgaggccctgcccactcctgtggcctgtgacgccgtctgactgccccacttttctcccgcaggtgcccatctgcggtgaccagccagaagccaagcg

SEQ ID NO: 34130 - DNA, 120 bp, Homo sapiens
tctcggagatggcgctcgccatgggcttcatgcccgtggacatgggatccctggcgtcagcctgggaggtggaggccatgcccctgcgcctcctcccggcctggaaggtgcccaccctgc

SEQ ID NO: 34131 - DNA, 120 bp, Homo sapiens
cttcgtctgcttctatgcctacaacttcgtccgggacgttctgcagccctatgtgcaggaaagccagaacaagttcttcaagctgcccgtgtccgtggtcaacaccacactgccgtgcgt

SEQ ID NO: 34132 - DNA, 120 bp, Homo sapiens
ctacgtgctgctgtcactcgtgtacttgcccggcgtgctggcggctgccctgcagctgcggcgcggcaccaagtaccagcgcttccccgactggctggaccactggctacagcaccgcaa

SEQ ID NO: 34133 - DNA, 120 bp, Homo sapiens
gatcgggctgctcagcttcttctgcgccgccctgcacgccctctacagcttctgcttgccgctgcgccgcgcccaccgctacgacctggtcaacctggcagtcaagcaggtacccacccc

SEQ ID NO: 34134 - DNA, 120 bp, Homo sapiens
agccgatacccacgggtgcagccttaccaggtgccaactgcagattctgttccaatggggcagcacccacatcctcctgcccaagattttgagtatcagtgaacaaagcagatgaaaatt

SEQ ID NO: 34135 - DNA, 120 bp, Homo sapiens
gggcgttgagaggatcaggagtgctaaggcgcaaaggaaagcaagcgtgggcggtgggggtgcaggtttgaagatggtccaggaggacttgcagagtgagtgctatgtgagcagagctgg

SEQ ID NO: 34136 - DNA, 120 bp, Homo sapiens
ggccggtggcctgctggggtgatgttgcaggccacggggcatagtccttgggcagaagtgtgcctggtacgttggaggagcagccaggaggcccatgtggctaaagctgaacaaggaggg

SEQ ID NO: 34137 - DNA, 120 bp, Homo sapiens
aggcgaggcctgagaggaagagcttcagccttaggctccgagtgaaatagggagctggtgaaggtttgaatttaggtgttgatcggcctgacattttaagtggttctctctggtttttgg

SEQ ID NO: 34138 - DNA, 120 bp, Homo sapiens
cagcgaggaagccgtgcatatgcccagatttgaggcagtggaggctggaggcagtgggagcagtggaggagcaaggagatcctgaaggcacatgtgaagctggagtgcatggaattgccg

SEQ ID NO: 34139 - DNA, 120 bp, Homo sapiens
ccccggggctggttgatgcataggtcctgcccactccaggacgctagtcacccaacagggttcagcccaggtgctggtgagacacttctcatccacccctcattccagcctggcagcccc

SEQ ID NO: 34140 - DNA, 120 bp, Homo sapiens
ctccgagcatgggggattggcaggactgggaagcagggctgggcacctcctgagaaccacagacctcagcccctactcactgtcagggttgctgcttctctgccagcagctactcgactg

SEQ ID NO: 34141 - DNA, 120 bp, Homo sapiens
cctcgtcctttgccacccacagataccggcatcattgcatctgtgggctcagaatttcctaagacaaaggaagaaccccagacttcaggcagaaaagcaagatgcttgatggaaatgaga

SEQ ID NO: 34142 - DNA, 120 bp, Homo sapiens
gctcgctgtgttccaggaaccattctaagagcttcgtacaccactgtgaattcatttaaccccatctcatccctgtaggccaggtgctattatatccttatttcatagatgagaaatctg

SEQ ID NO: 34143 - DNA, 120 bp, Homo sapiens
ccccgttctcctattaccttcaccccaagctacatctgcacatggctggcacaggatggtctgaaactctcatctgaccatgtcactgctgaaaagatccagtgaccccagtgtccttgg

SEQ ID NO: 34144 - DNA, 120 bp, Homo sapiens
ctccgcagcctcatctccccttctcctgtgacgtgtcaacacttgggtcccatactgtcctctaaatgggcagagctcattcctctcggcttggaacgcccaccccaggacaccttgaca

SEQ ID NO: 34145 - DNA, 120 bp, Homo sapiens
aggcgagagccaccgcagcaggccttaaatgttttttaaacttctttgaacttaattccatctgaaatcatccagcagcctccagagataacaaataacaaagttaaggaaaaagcatgg

SEQ ID NO: 34146 - DNA, 120 bp, Homo sapiens
atccgtgtgaattggtgggtccttagacaccttcagcatagaagcattattcccattttcctgttgtggaagctgaggcacagagagttgagagttatcataagatcacactaagagagt

SEQ ID NO: 34147 - DNA, 120 bp, Homo sapiens
tagcggtgagtactaaagccaccctccttcccctccgccaggccagcagatgagtcgttggcaggatcactgcatctgtcatcccctcgccctcactccagcctttttttccctccacag

SEQ ID NO: 34148 - DNA, 120 bp, Homo sapiens
cctcgtgctgagcacactgcacacgctcacctacggctggacccgcgccttcgaggagagccgctacaagttctacctgcctcccaccttcacgctcacgctgctggtgccctgcgtcgt

SEQ ID NO: 34149 - DNA, 120 bp, Homo sapiens
agccgcagactcgccaggatccggagaggctgggagagggagagcaccatcaagttcacgctgcccacagaccacgccctggccgagaagacgagccacgtatgaggtgcctgccctggg

SEQ ID NO: 34150 - DNA, 120 bp, Homo sapiens
ccccgggcacacgagggacggtgccctgagcccgttaggttttcttttcttggtggtgcaaagtggtataactgtgtgcaaataggaggtttgaggtccaaattcctgggactcaaatgt

SEQ ID NO: 34151 - DNA, 120 bp, Homo sapiens
tgccgtacgttaagagaagagcagatcatgctattgtgacatttgcagagatatacacacactttttgtacagaagaggcttgtgctgtggtgggttcgatttatccctgcccaccccac

SEQ ID NO: 34152 - DNA, 120 bp, Homo sapiens
caacggctctgcccagagccatccctggagcatgtgagcagcggctggtctcttccctccacctggggcagcagcaggaggcctggggaggaggaaaatcaggcagtcggcctggagtct

SEQ ID NO: 34153 - DNA, 120 bp, Homo sapiens
gcccggtggtgggaggatggagggattgggctgaagctgctccacctcatccttgctgagtgggggagacattttccctgaaagtcagaagtcaccatagagcctgcaaatggatcctcc

SEQ ID NO: 34154 - DNA, 120 bp, Homo sapiens
tgacgtcacctcctttccagagccattagtgagcctggcttgggaacaagtgtaatttccttccctcctttaacctggcgatgagcgtcctttaaaccactgtgccttctcaccctttcc

SEQ ID NO: 34155 - DNA, 120 bp, Homo sapiens
ccccgggcgtcagagttgagccctgcctgggctgaaggactgtcttcacgaagtcagtcctgaggaaaaatattggggactccaaatgtcctctggcagaggacccagaaaaccacactg

SEQ ID NO: 34156 - DNA, 120 bp, Homo sapiens
ggtcgaaacatcattaagttgcaccatctataaaagtcagggacactaaaatttgcgctttctcctgaaacctcaagctctttcacagtcctttgcctttgtgtatgctattccctcttc

SEQ ID NO: 34157 - DNA, 120 bp, Homo sapiens
agacgtgaccataatgaaaccaatttgccctcctggcaactctgaggactcaaggagcaatggcagagccggctaagccctccggcactcagggagcaatggcagagctggctaagctct

SEQ ID NO: 34158 - DNA, 120 bp, Homo sapiens
ctccggcactcagggagcaatggcagagctggctaagctctccaggactcagggagcaatggcagagctagctaagctctccaggagttctgattaaatgcagcctgactgaaaggcctc

SEQ ID NO: 34159 - DNA, 120 bp, Homo sapiens
tggcggtcagccataatcaggaaccacaagtattatattatttagaaggaatgtatcttccaggacatagacttgttctcaatgaacaattttcttccagaagtgcaagcatcctgccgc

SEQ ID NO: 34160 - DNA, 120 bp, Homo sapiens
ctgcgtcttctataacaataagtcagcaacattattaattcaggctagagacaaatctgatggaaagccttccagttattaaacatgcaattctttaaggtgttgtgccaacaagttcca

SEQ ID NO: 34161 - DNA, 120 bp, Homo sapiens
attcgtaatgcatactgagcactcaattaacatactctctaaaaacagacaagtaaaactctccaagtcaaataaatagcataataagaaagggtgccaaggattaccactcgtctctta

SEQ ID NO: 34162 - DNA, 120 bp, Homo sapiens
cctcgcatgacaaggagcctgtgggggatacagcacagagaaactggagatcaataaggaggagctgtaaaaagatgcaccctgtgcaaacagtaagttaaggtacagttaaattttaca

SEQ ID NO: 34163 - DNA, 120 bp, Homo sapiens
cttcgctcagtccacgctaactgtaattacaattttcacttactgcagttgacatttatctgaaccccttttgagaaactaatatgttgtgtggctcttcagcaatagtaggttcagaga

SEQ ID NO: 34164 - DNA, 120 bp, Homo sapiens
aggcggcagtgcagtcaggtgcagagtgccttggcatgggaatctgaaatgaatgtgcaatctaaaatccaataaatacactgccacttcatcccttcgtcttactatcaaatgaaacca

SEQ ID NO: 34165 - DNA, 120 bp, Homo sapiens
aatcgattttaagtataaaatcccaagaaaaattaaatgcaatgtatttaaactcttaaactaatttatctcaataaactcatctatcaacaaggatttacccatatgtctgagtcccta

SEQ ID NO: 34166 - DNA, 120 bp, Homo sapiens
caacgtagtatgaggcacagcccctgttgtctggaaaaaggagcctgagacacacgcactgattttgtggtacagaaaatccacaatcttggaagctgacatgtgacaataactgcacac

SEQ ID NO: 34167 - DNA, 120 bp, Homo sapiens
gggcgaggtgtggcttctgtggcaatctgagaccaaaaggacaaagtttcaccctctctcccgctctaggagtatagcctagcctcccaaatgtcataaaatcctaatctataaatcatt

SEQ ID NO: 34168 - DNA, 120 bp, Homo sapiens
agacgtcccaagtgctgtgccttttatttcatgacttgcttcaaatatttgttttggatctgctggcagagaagatttcaaactacagtttgaagaaaacaactagccaaaaaaaaaaac

SEQ ID NO: 34169 - DNA, 120 bp, Homo sapiens
cctcggtctttgatagactgggtacatgcctgtaatttccaccatggtgtgggaaggtaaaacgggaaacactctacagaggttcactctgagtcctgcttctggaatcccccagtttcc

SEQ ID NO: 34170 - DNA, 120 bp, Homo sapiens
gtccgacacccacattaccgagtaaccagattatcactgtttctatgtaagagtgaagaacggccaccataacatactgtcgaaggaagaaaacacgcatgacctaaaatattgctaccc

SEQ ID NO: 34171 - DNA, 120 bp, Homo sapiens
tcccgaaagagaagggggagccacagaatcccacaatattagctgtacagacaagatcacccaaaggggcgaggcgtgaacgacagggttccagttgggggcagatgacagaagtgacac

SEQ ID NO: 34172 - DNA, 120 bp, Homo sapiens
acacgcaaaatgaaaacgaaccacgagggagttctggaattattacaggacctggcttgccgagaatgcttccctcagataaacacttagagtttggccgctgtatcttgttttaaaatg

SEQ ID NO: 34173 - DNA, 120 bp, Homo sapiens
ccacggggatctgcagtgcagataaaaagccaaaggatgaactagagaatttctccctgagaaaagaaatcttcaaacacctttttttcccctaatttccccacttgcagcctttctttt

SEQ ID NO: 34174 - DNA, 120 bp, Homo sapiens
tcccgcaacacaaatgagattgtcagtgggggcatcaccaagcgtcacctcgtctgtgaggagcccacagcacctctggtccatcttagctggaatctggctttagtgacacactgactt

SEQ ID NO: 34175 - DNA, 120 bp, Homo sapiens
tctcggagccacagttccctcatctggaaaatgggtagaatctgcacctcacagtgctgacaaaatggatcagtgtttagcgcagtgcctacccaacagcagctggtttgtggcccaaag

SEQ ID NO: 34176 - DNA, 120 bp, Homo sapiens
ccacgcaagtaagtgggggttatctgaggatgtcctccccaaacaaatagttgcaagattcacaagtctggaaatcggggctgaggaccaggagccagccagaagggaacatggaaaggc

SEQ ID NO: 34177 - DNA, 120 bp, Homo sapiens
agccggggctgagcagaaggtcatgtgtccattgaaagccagagaaggagaaagagaaaacccccggggctggctggcttgatcagaaccaggcttgggctgggaagtggtgagggggta

SEQ ID NO: 34178 - DNA, 120 bp, Homo sapiens
cagcgagggcggcttttgcacagttgtgcctttggggtctgggtcagggcaagacaaggcctgtgccctttgcagctcccatggaagagaagttcagaatgtgttttctcctgtttattt

SEQ ID NO: 34179 - DNA, 120 bp, Homo sapiens
aaccgcagcacaacagatgtgccatgggggggcctctcctcccactccaagcagagaacccatccccttcttggtaacaacccgctgcgtcaggtacagctcaacccttggaagagtagg

SEQ ID NO: 34180 - DNA, 120 bp, Homo sapiens
gaccgaggcaggtgtccccatcaatggagctttattgagccagctttgagggcgtgcctgggaaaaacacacgagccacacagacagatctgtggctgtttttctttttccaaagaagct

SEQ ID NO: 34181 - DNA, 120 bp, Homo sapiens
gggcggggtggcagtgacaggaatggttacatacttgtgagacctcagtcagtgcctactaagtctacgttttactaaaataagatttgaaggaaaagggaatagaggaagcagatgtct

SEQ ID NO: 34182 - DNA, 120 bp, Homo sapiens
gggcgtaatgaggtatgtctgaactcccatcctatcatgctcaggaactcagcttccaaggtttctctggggtcctcttggccaaaagggggtacgttcattctgctggggagcttggat

SEQ ID NO: 34183 - DNA, 120 bp, Homo sapiens
ctccgtttgtcaagctccaggactggggtaaaggatttgacaaggtctgttgggcagggatggaatcagatgaatatctaagtggaagatatacagacaattgtaactacccctctttct

SEQ ID NO: 34184 - DNA, 120 bp, Homo sapiens
catcgaggtggagaaaaaataaccacatttgtttggcatatttgcatttttaatagtccctgaggagttcaggaggaaacagggttttacatccccttttagggacgcaagtaggattgc

SEQ ID NO: 34185 - DNA, 120 bp, Homo sapiens
tgtcgtagaattgtagagggacacagaaggcagtgtgtgggcggagctttcacaggacagtggaagcatctatgaggccaaggggcaggggtctgtgtccttggaggcatatgggagatg

SEQ ID NO: 34186 - DNA, 120 bp, Homo sapiens
agccggagcttctctctgctgtgcactccccagggacggctccgccactatcccgaggctgcccgtctacattccagctgtggacgctgctggctgggcctgagcagggtctcgggaact

SEQ ID NO: 34187 - DNA, 120 bp, Homo sapiens
tgccgggtaaccctgggcctacccagatgcctgtgggatggggacttggtcctgaggaccctttacggacagcccactctgtgtctccgtgctgacctagcctggcacctggagtctcag

SEQ ID NO: 34188 - DNA, 120 bp, Homo sapiens
gtgcggccgtctcagggttgcagcaggatgcctcgtttcaagttgcagctcccctgccagctcgggtcagcctctcttgcattggaagcagctggggcatttccagagcatggaaaaagg

SEQ ID NO: 34189 - DNA, 120 bp, Homo sapiens
agccgcaggctccaggccatgaggctggacaatgcctggctggttggccagacagatgtggacggtgccagcacgtctgagaggcttcctaacttgggtcacgtcaggcagggcccccag

SEQ ID NO: 34190 - DNA, 120 bp, Homo sapiens
ccacggcggagatgaggaagctgaggttccaagagggggaagtgagaagtgtgggtgacagagctggtgataatggagctgggatcccactcagccttcccatctccccagcctgggaca

SEQ ID NO: 34191 - DNA, 120 bp, Homo sapiens
gatcgtttcctgaacacgagtgacactgccttgttctctcccagccctggctccagcgtctgggcacagaaggcacagaacagacccagggtttcccagcgtgcgatgagctcaccactc

SEQ ID NO: 34192 - DNA, 120 bp, Homo sapiens
gtgcgtggctctagccaggctggagggaatgtggcttgggggagctggacagtccctgtggcctcctcagtgcttgtggaggctgccttgcacggtccccaggctttgaatgcagcatct

SEQ ID NO: 34193 - DNA, 120 bp, Homo sapiens
ctccgggactccccagtcccccaagccaagcaggaatgggaggcaggggagagcgctcccagcttagcttcggatacctgtcctggctctggccttcccagggagccctggcagggaagg

SEQ ID NO: 34194 - DNA, 120 bp, Homo sapiens
tgacgcctctctctctctcttctcctgccccgcaccctcacccccttcccatatatttcaactgtttaaatcaatttccataacttgtaactgaaagagccctgacttatacttagggaa

SEQ ID NO: 34195 - DNA, 120 bp, Homo sapiens
ctgcgtgtctgggtctaaggtcttcaccacatgactacacaagtgcaataaacttgctctgccccgttgcggtgttgaataaaccaaacaaaacgatctgccctctcgtgaatgtcagct

SEQ ID NO: 34196 - DNA, 120 bp, Homo sapiens
gctcgctgtttacactctggaaatgtggactggctttctcaggaaagcaggcttttctttacttttcttatttctctcctccatttgtcagcatccttttgaatatttatataaattatt

SEQ ID NO: 34197 - DNA, 120 bp, Homo sapiens
gatcgaataaaagagagcaaataagaaccatgcctgaaaggcactgttactagtcttcccaaggccttatcttcactggatggagcaaagaaaggtcaggtgtacccccacctcccagag

SEQ ID NO: 34198 - DNA, 120 bp, Homo sapiens
taacgagagtgcagacacagagcctgtttcagggtggactcatgcatggaccagcctctgtttgcctatggttctcttggctctgccctccttggagttggataacaccaggatggtggc

SEQ ID NO: 34199 - DNA, 120 bp, Homo sapiens
agacgcatttcaacgcagaggaggaagtgctagcggacccaccccaaggtgcacagttagagaaggagcctctgcggcggccggagccccccacggacatccccttgaggcccccccagc

SEQ ID NO: 34200 - DNA, 120 bp, Homo sapiens
tcccgcccccagacccgtcgagcgagctcccctccctgaaatcctcgccccgagatctccggccggcgagctccgccccctgaagtccccatcccaagatccggggccggcgagctccgc

SEQ ID NO: 34201 - DNA, 120 bp, Homo sapiens
tcccgaagtccccgcccccagatccccggccggcgtgctttgcggccgccctgccgcgcgcacatgtaggcgttccgagcggcggcggaggtgagcgcacggacgagcgggagggaccct

SEQ ID NO: 34202 - DNA, 120 bp, Homo sapiens
ctccggcctgatgcgacccggtaacgcgttcagactgcggagtagcctaggggcccagagtggaagcgtagcgaggacccctctgcggggctcctgcagcccctcctcccccagccaccg

SEQ ID NO: 34203 - DNA, 120 bp, Homo sapiens
cggcgggctgcatggtactgtgttctaggcccaccccgcagcgcgatggccctagggacgttggactttggtccagacctttcctttcttagcctcactttccgcattgggaaaaaaaaa

SEQ ID NO: 34204 - DNA, 120 bp, Homo sapiens
gcccgaatgataatgattcttataggagttcttgattaagataggccaagcggtaccctgcgtttttgtttgcggcaactcattcgttgctcattaagcacttttcacggacaggaatac

SEQ ID NO: 34205 - DNA, 120 bp, Homo sapiens
tgacgtattcacggatgaagtgataggatgcccggggatgtttcaaaataaaccagttggacggaagtgtggtggaaagagaaatcaaacaagattggccatgagttgatgggattgaag

SEQ ID NO: 34206 - DNA, 120 bp, Homo sapiens
gagcgggctctgccctggaccctgtgtgtgcaacagtgctgttggccgggcactgtccccatcctcctcctggcccctttgaaggtaggtgtggccacatgactgctctggccggtggat

SEQ ID NO: 34207 - DNA, 120 bp, Homo sapiens
atgcgcagggtcacttccccgcgaaagcatttgagagccaaggtgcccttctctgtcgtacacgcccctgatggggccccagaccttgggcccccggtgagggtggcggggagcagagcc

SEQ ID NO: 34208 - DNA, 120 bp, Homo sapiens
aaacgccatgtcttcattctctatccctcccccacctttcacacccagccctttgaaaagcagaaagcaatgcacagatgtaaggagctgttttcattcttgtggttacgagccctcccc

SEQ ID NO: 34209 - DNA, 120 bp, Homo sapiens
catcgttgtgcaaacataagaaaataaagtaggccacatgagctcagatgacctggtttttccctaagccaaaaacccagcttagaatgggaggagctgacttaatttctcagaatctca

SEQ ID NO: 34210 - DNA, 120 bp, Homo sapiens
ttgcggctctggctaaaactgaaaaaaggagtgtgagacaaaagcctcatttggtgacctagttcctggcacgtattagtggctctttttaagcagctgacaaatggatgaatgaacaaa

SEQ ID NO: 34211 - DNA, 120 bp, Homo sapiens
cctcggctcagggactcacaaggctgcaatcaaaggatcagctgggctgcattctcatctggaggctggactggggctggtctcagagcctgggcacacgctgttgagtagcctcaaggt

SEQ ID NO: 34212 - DNA, 120 bp, Homo sapiens
tgtcgccttacggttgtaggactgaagtccctattttcttgctggctgtcagcaggaacccctctcagcttctagaggttgtccatagttccttgttatgtggcattctcacaacatggc

SEQ ID NO: 34213 - DNA, 120 bp, Homo sapiens
atacgagttactctctcccttcagcccactcagatccgtgtgtgtgtgtgtgtgtgtgtgtgtgtgtgtgtgtataaaaccccctttgccatataatgtaacttaatcaagggagtgaca

SEQ ID NO: 34214 - DNA, 120 bp, Homo sapiens
cggaagatttcttttagggagagtatctcgcacagcagcagtaacgggatttgcattcatctcctcacccccagcatgcccccactcattcttcaagtttcgactcaagatccccgcctc

SEQ ID NO: 34215 - DNA, 120 bp, Homo sapiens
ggacggtgccctgagaaggaccagcggaacttcggcttcccttgctgttgccccagtcctggcagcaatcagcttcctctgctttcttgtcgtttcagctccccaggacctggtgcaccc

SEQ ID NO: 34216 - DNA, 120 bp, Homo sapiens
gaccgctggctggcaaagcctgtccctgtgttgttaagtcggattccccagagggagaagcagacgggccagcagcttgggtcaggtaggcaaccccgcgtcagaggggagggtggccca

SEQ ID NO: 34217 - DNA, 120 bp, Homo sapiens
gttcggcttgcattccggtggggagttggacaacacacgagcagatccataaagtgatatccgagagtgatctgtgccgccaagaaaggaagacaggtcctgcgacagggctgactgtgg

SEQ ID NO: 34218 - DNA, 120 bp, Homo sapiens
gcccgcactggagactagtgtgtcccaccagacttccacgtggcctgcgagtgctcagcaatagtgacaacagggtctctactccatgaaaaaccatccccagacccgaaagcactgctt

SEQ ID NO: 34219 - DNA, 120 bp, Homo sapiens
ggccgcctagaatatggatgcattggagacctaatcaccaacttagaccataaagatgggagccacaccctagggatcgcagagcaggagctggaaagagcctgggtccctgaggacatc

SEQ ID NO: 34220 - DNA, 120 bp, Homo sapiens
gagcgcctccctcaattattcacaggacagggacacgaacctctccttgtatgagtcactgtagtttaggttttctgccaaatgcggaagggactatctcagtctcttggattcttttgt

SEQ ID NO: 34221 - DNA, 120 bp, Homo sapiens
acccgtgtgtctcagccgttcccctttgtgagcccctaagtgccttacagaccatgtatttattagtggtctattgttaataatcatagtaagctatccaagctgactttttactgagct

SEQ ID NO: 34222 - DNA, 120 bp, Homo sapiens
cttcggagtttcatggttataagagaatgaaaacctcagaataaaatattaggctctttgatctgtgtgaatagtcactcttgagctgttctgggtgtgtttttctgtgatttcccagct

SEQ ID NO: 34223 - DNA, 120 bp, Homo sapiens
tatcgtgctaagcgtcgcactcagtctcagctgcctgttaacggcaataggaggactgatgcattagcataacaagggatctgcagctagcctaggcgctctgagtactccatgcacaga

SEQ ID NO: 34224 - DNA, 120 bp, Homo sapiens
ggacggtgggcagggaccagagctgggtggggagggtggaagggcatctgagaacaggcaggcatagaaggcaagcgcaggagaggtagagtcagaggggtggacagagatggctcactg

SEQ ID NO: 34225 - DNA, 120 bp, Homo sapiens
ccacgatggtcctaatccttgcctcctggtatttacacccttatgtcattctctcctacaatgtatatgtctgacttgtgtaacaaatagaatattgtaggcatgatggtgagttccaag

SEQ ID NO: 34226 - DNA, 120 bp, Homo sapiens
cagcgaaaatcacttaattctctgactctcaccctcaccatctctcaaatgagagggttgcacagaaggacgcctaaggtcattctaacttgaacagtctgagaaccctcattctcacca

SEQ ID NO: 34227 - DNA, 120 bp, Homo sapiens
cctcgaaagaaacatgtgactttgtggatgaattatagactttaaattgcaaaggcagccacatcaatatatccatctaggcgtataccatattatcaaatatgtaaaatggaagacatt

SEQ ID NO: 34228 - DNA, 120 bp, Homo sapiens
ttgcggtttgttttgtttttccctaaataactagactaccgtttgacactaagacatctacagaagcattgcataagctttttactttgactgtaaatttacatctttataccattttcc

SEQ ID NO: 34229 - DNA, 120 bp, Homo sapiens
acacgggcatctcaaatgagagggcagcatacatacatgtaattggttgcttttttctttccctcggcagtctgtaaaaaatgtgaaaatgctcctgcttctgcctagccattaaaaggc

SEQ ID NO: 34230 - DNA, 120 bp, Homo sapiens
aatcgttaaataatggtgctgattataaggctgctaactgcagatgctgtaattgtctgtcataaatcttagtcatttgtgacaggagcacaatgaaagggagcatctgcttgagggcaa

SEQ ID NO: 34231 - DNA, 120 bp, Homo sapiens
ctacgaaaatgtacttggatgtgtctcaatattttggagagccattcatgttgcttccacaaatgtgaagttattattggtttgtattgattttgccacctttttttttttaaagagaca

SEQ ID NO: 34232 - DNA, 120 bp, Homo sapiens
ctccgacccagggaaaaggctcttgattgagttatggctctctggctgcgtggtgtgggaactgtttgcacttctcatggctgagagaagaccctggaaatgacacgttttacacctctt

SEQ ID NO: 34233 - DNA, 120 bp, Homo sapiens
tcccgtccctctgggacgaagaatctgtttgcagtaatcactggcagtgttgacagaatgttcaaaaccatctgctcaagggcaagtgttaactctatcaaatcctaatattttaagcac

SEQ ID NO: 34234 - DNA, 120 bp, Homo sapiens
ctccgtccttccagctgcttctgtgaactctcctctgccgtgtctcatcccccatggctgctcaaatgtgattcctctaagcctctcttcctgtccagctgcatctgttcacctcccctg

SEQ ID NO: 34235 - DNA, 120 bp, Homo sapiens
gatcgatctacttctttagctcagggacagcaagaggaaatgattccagcagctaaacagcttttatgcagagagaatatttaaatattctcagtttgcctgattccccttcacctcatg

SEQ ID NO: 34236 - DNA, 120 bp, Homo sapiens
aaacgtgtatagtaaaagtagttcatttactatcttaactcctgaatctggtcccttaatgcagcaccttagattgaccagttcctcacgttgccctccagaggtattttaatggtgctt

SEQ ID NO: 34237 - DNA, 120 bp, Homo sapiens
atacgagaaactacttcatgggattgttacaaagataaagtgcaataatgcatgtgtctggcatagagtaagctctttcagtgtcagttagtattagcataattaagtgcagaatgtttg

SEQ ID NO: 34238 - DNA, 120 bp, Homo sapiens
ttccgagtcacttaaactctaaaagtcagaaaactaatgataatctctctcttcttctcccacacatataaccagtcagcaaggcctggctttcttgatgattattcttgggtcaaaacc

SEQ ID NO: 34239 - DNA, 120 bp, Homo sapiens
cctcgctgtctaatcctgttgctatataaatatgtctagggtgctgatttggtcatgcaactccctaggacactaagaaactttacatacactcctcattaccagctggatgaaataagc

SEQ ID NO: 34240 - DNA, 120 bp, Homo sapiens
atgcgtgcacattggaagggaagaagcatcgttgttagatattcctcttcctctgctcttctaactccatcctttcttccccttgtcaggcaaatatgaccacaaacctcttctcccgaa

SEQ ID NO: 34241 - DNA, 120 bp, Homo sapiens
gcccgcacatcccctgtcagagtttggagctggatatcttctccctaaacttaggcagttgcttcctcagcagacttgcagcctctggtctttctcccagtccaggctgttcaaacactg

SEQ ID NO: 34242 - DNA, 120 bp, Homo sapiens
ttccggtttcctgcttgaggcacgtcttttctcaagcccgtctttccaaaactatctccaaacatctctctttccctcccagtacgtgcacattcgtggagcaacacagccgtgtgctca

SEQ ID NO: 34243 - DNA, 120 bp, Homo sapiens
actcgtaggacttaccacaccctgtcttctattaatattgggcatgtgccctgtgctaggctagttaaatgttcttgaataaaaatattgactgtagataatgaacactaatctactttc

SEQ ID NO: 34244 - DNA, 120 bp, Homo sapiens
ttgcgttaattaaaaagcaactaacattcattctttcattttgtttgtcttttgaaagaatcagttaaataatatgtgcttaactggagattaagaggaaagggtcttataactattgtt

SEQ ID NO: 34245 - DNA, 120 bp, Homo sapiens
tagcgatgatccacataagcttggaacaaatagccatgtgtgtatgggatttagaggaggcaagttctcatcttttgttgtagagattattgcttctgtcttacttcattcacttgattt

SEQ ID NO: 34246 - DNA, 120 bp, Homo sapiens
atacgtggcataactttatatgaaaactaaaatgattatatattaaaaccactcttgaaaaaagatagccagaaaagcagaaacaaatttttaaagttacaacatttttaggatgaaaat

SEQ ID NO: 34247 - DNA, 120 bp, Homo sapiens
ttacggaattataaactttaaccttaaagatgactcatttcaacaccctcatttataggtaaaaaagccccaaacccctggagttaggtaccttacctaaaaattataatacaagtgact

SEQ ID NO: 34248 - DNA, 120 bp, Homo sapiens
tgtcgggggagttttaatgtaaaaagaaaagtggcaagaaaggtgtttatttatagatgaaaatgcatgtaatttttgttattctttagaaatctaaagttattgtatttatttattttt

SEQ ID NO: 34249 - DNA, 120 bp, Homo sapiens
aaacgtcagatttacagctcagattcaggttactttatgtcaaattctctatctacgtagacaaattcagccaggtcttgctatgctggagcagctttcactgtgggaggaggtggtgga

SEQ ID NO: 34250 - DNA, 120 bp, Homo sapiens
ctccgccattctcattaccaaacttgtagtcagaagaactctgcctgagcccctggtctgctgcttccttgcttagtgatccagaacaggacctattaactttctcagtctccaaaagaa

SEQ ID NO: 34251 - DNA, 120 bp, Homo sapiens
ctacgtatttgtgctgtcgtcccttaaaactgtggatataagtccacagtctatatcaagtcaaacttagttaagttagcctgcaccatttagccaggaatgtatgtgctcctgttacaa

SEQ ID NO: 34252 - DNA, 120 bp, Homo sapiens
cctcgatggcttcatatatcacctgtcaggtaatcttccagagaagcttgactttaaccatttgttctgtggttcaagtgatgaatgagatgggttagatcatttaattcactatatggc

SEQ ID NO: 34253 - DNA, 120 bp, Homo sapiens
atccgttttcactcagcagctgccttgtttccagaacagctgagaccgagtgttgaatcctctgttatgccaattttaaaatgtccaaccaatactgagaatgtgtgttttgagtattaa

SEQ ID NO: 34254 - DNA, 120 bp, Homo sapiens
gctcggatataacctattgtgaacaagtgtgagaacttttaatacactaatagccttagacctcaaatcctggacagcttattagtgcttattagtgcccatgtagtaagtcctcactaa

SEQ ID NO: 34255 - DNA, 120 bp, Homo sapiens
tctcgggaacactatgacaaacctactctgagtgctaattaggaccaacttgagcatacgtaagcagccctttaactgttttctttgaaacggttccagttagtccttttaaatgaactt

SEQ ID NO: 34256 - DNA, 120 bp, Homo sapiens
acacgtaaaacagacaggaattgacccatgacttggaagactcagcctcacccacctcaccctaatccaggtcctgaataacaggttcccagtcccataacctctgacaaccatttccgt

SEQ ID NO: 34257 - DNA, 120 bp, Homo sapiens
agccgtactatgttgcccaccaggggaaatactagaaacggggtcctcagaaaatgataggtgagaaccagagtaaacagcccagatggggtcattttccaaatggagctaaaggtagaa

SEQ ID NO: 34258 - DNA, 120 bp, Homo sapiens
ccacggctgctgtgagagctccatcagctttgaagttatggccagagacaaaccatttatgtgtttttggcacttctaatcatctgacaagacacacagccaaacccgtgtacttttccc

SEQ ID NO: 34259 - DNA, 120 bp, Homo sapiens
gtccgccccccaaaaaggctgagtgacctacccagagaaactggtagagctgtgagtcaaggccatgatggctattaagggacagtttgaaagctagacaaacagctttcgaatagcaaa

SEQ ID NO: 34260 - DNA, 120 bp, Homo sapiens
agtcgccataggtaaaagctggtgagggttaaaagttgcctccctaatctggattactagatcctgagctgtacaaaattaacagaaataaatatctgataaaggtttgtaagacaagca

SEQ ID NO: 34261 - DNA, 120 bp, Homo sapiens
tcccgaacagctatagtgacatgagcaacttcaagtcttccccctccccttcccagtcccccaagaacaggcttaggtgtagtgatggcattgtcatgttgaagttgaattgagagcttt

SEQ ID NO: 34262 - DNA, 120 bp, Homo sapiens
ttacggtggttgaatttttaatacttcttggtttacaaattgttttggtatacacttaatctttagtttattttttgtagtttgtttatattttattattccttccttttctgtcaatat

SEQ ID NO: 34263 - DNA, 120 bp, Homo sapiens
ttacgtgacacaatttcagtcctcaagatgctcacagtctagacagggagacagaaaagaccatagaaagtaaaaggcaatgctatgggaattacctaggaaagatatttctttcaatga

SEQ ID NO: 34264 - DNA, 120 bp, Homo sapiens
aagcgtgctttctttccataagaccttttgattgggaatcactgtaccaggtcttttgttggcatatattttttttcttttccttgctcctcagtttacctttttttcctatttgatagt

SEQ ID NO: 34265 - DNA, 120 bp, Homo sapiens
ttccgattgacttgtatcatctgatttaagttatatccatctctgggcttcagttacttccatggttatgtgaaatcacaaatttttaggtatgtcagtgaatctaaatgtagataaagt

SEQ ID NO: 34266 - DNA, 120 bp, Homo sapiens
gcacgttttgcttatggaacgttgccagaagcagttttgaaggtgttttaaaaatgaagacatctggcagctggcatacttacaattcatttgccaaagacaagttgcacgctgctggaa

SEQ ID NO: 34267 - DNA, 120 bp, Homo sapiens
ggtcgtgcaccaggtaagaaaggagtcaggtggagctggtgcataggcagccacacactgaaaaactgttggctctgtgaggttttgatgggctaaatcaggaagcatgtgtgtcatctt

SEQ ID NO: 34268 - DNA, 120 bp, Homo sapiens
caccgtctttgtcactataacactttaaaagaggtaaaaggcaaaaaaaaaatccaagctaagaaaattggcagtgaatcataaggctgtgacatgtcaataaaagtcttgccaatttgg

SEQ ID NO: 34269 - DNA, 120 bp, Homo sapiens
aaacggaatttgacacaacattggacaaacatgttcctgtcagttgtctggttctgtttttttcaggcagaaagaatctgtgggattatggatttacagcttaccctctaagtgaattac

SEQ ID NO: 34270 - DNA, 120 bp, Homo sapiens
taacggtacaccaatggatgccctctgactgaaaatttacttggtatttcatagtattagcatagtttttggggttttcagttttaaaatcttttcttgtaactggtagtcactaaatac

SEQ ID NO: 34271 - DNA, 120 bp, Homo sapiens
ttgcggttacagttttgttgtaagagacagttgacacttaccttacctaaaatgaagacagaattaccagccttagagaggttgcaaacttgtggcctaggtacagaatctagtccaaaa

SEQ ID NO: 34272 - DNA, 120 bp, Homo sapiens
aatcgcaagatcaggcatcactccctcttgaaaacagtctgctagccctggcccgcttccagtagtgtgaggagcgtgagtacttcccattcaccggagtcctgcacacctgtttcctcc

SEQ ID NO: 34273 - DNA, 120 bp, Homo sapiens
cctcggcccctgtcctcctttggatttgcttcctttcttcatgaagtaccttctctgcccacctcaggttctgtgggttgagactccagggtttccagctgcctcctggtctagcttggg

SEQ ID NO: 34274 - DNA, 120 bp, Homo sapiens
tagcgcattcctggatttcaaggcagggacttggtaaactctttgatagtattatgccacttaataatgtactttttgttcatacgtttcctcataaactggtattgcctttgagaggtt

SEQ ID NO: 34275 - DNA, 120 bp, Homo sapiens
tgacgtggtcttagtttcatttaagcaagatgactggttgctgagttggctggactgtcaagggacaagggaagaagtagggagatagaagttagtggtttaatgcaataaaaccaggga

SEQ ID NO: 34276 - DNA, 120 bp, Homo sapiens
aaacggttgagctctggatatattttgaaggtagagtcaacaagatgtgctgatggacaagatacagggtaaagaaaaagagaagagtcaaggaagacaccaaagttttaagcctaagca

SEQ ID NO: 34277 - DNA, 120 bp, Homo sapiens
taccgagaagtagtagtattaggaataagaaaagtactgagtcttgaccattgaatatcacaatgtggaggtaatttgtgacattgacaaggagcaatttgggttaaataatggaaacaa

SEQ ID NO: 34278 - DNA, 120 bp, Homo sapiens
aaacggaaggtgagcagcactagagaggggctgactttctatcacctccattaaatttattgtttattatatgtctctcacatacaagaatgtagctccagaaaacaggacagtacattc

SEQ ID NO: 34279 - DNA, 120 bp, Homo sapiens
tgacgatttctggtgaaaatttgagtcccagagaagtttcgtaaattccttgcccagcttatgatgtcagagttgaatctaaaacctgagtctcctcgttctcaatacaatgaacattcc

SEQ ID NO: 34280 - DNA, 120 bp, Homo sapiens
acacggtttttttcttttgcatacataagtaaattagaatttttgtccaaaataagagaactaaaatttgcttttattaactcaaattttatggctcatttatagttctgtaaaactata

SEQ ID NO: 34281 - DNA, 120 bp, Homo sapiens
gaacgtcttcagttaactagaggattttagaaaatcttaataggtttaaatcagcatagatagagacttgtaacatgcctgtaatggaagttaaaaattaggtcttcaatcatgtaacca

SEQ ID NO: 34282 - DNA, 120 bp, Homo sapiens
aaacgctcattgtatataaatgcgtatatatggttaaactgtgtgtttattttattaaacagttcaatctcaattaattaagctattgtcatatacatgtaactgcgtgagtactacctg

SEQ ID NO: 34283 - DNA, 120 bp, Homo sapiens
aaacggataagtagcactctttataaaatcttgtcttcagaatgcttaattctgtctggttgagccacatgacacactgatagactcttaggttcccagggtaattataggccacaccta

SEQ ID NO: 34284 - DNA, 120 bp, Homo sapiens
tcacgtgtcatcagaaatattggcattcggcaggttggtacatgcccactgccaagtcctcttactgcatcagacaaacttcataagccttcctgaacctatttggtagaaacaggatca

SEQ ID NO: 34285 - DNA, 120 bp, Homo sapiens
ctccgtttgaaactaaattctcccagcagctacacctcaagcagtggacatctatttgctttctccttttccaggccgtggtatgagtcaagtaggataggacaaaggtgacctgctgag

SEQ ID NO: 34286 - DNA, 120 bp, Homo sapiens
tcccgatcctgcctaagttcattgtaaatagtttgacagggggaaaaatggctttcttcttcttgctaatgcatctttgatatgtactacatctagatccacttacaagtagttgctatg

SEQ ID NO: 34287 - DNA, 120 bp, Homo sapiens
tttcgtttcaattggcatttagagaactagccacacaggctgctccccatcttcctgcatgataccatttcttcctgttctccttatctatagctgtgatgatgcacagctttctctttt

SEQ ID NO: 34288 - DNA, 120 bp, Homo sapiens
ccacgataggggaagcttttatcaccgtggggtttggaggcctcagtaaattgaaaattgcaaatgaaatccactgggcttgaattcatcagctattatgtcagatgacctttggcagct

SEQ ID NO: 34289 - DNA, 120 bp, Homo sapiens
gaacggcattgtgttgcagattaagattttctccccctatttctagaggtcagcccccaggcccctgtctggtatctacctattgtccaatcagtttcaatatctgcttcagaggacatg

SEQ ID NO: 34290 - DNA, 120 bp, Homo sapiens
ggtcgcagtgtagcaatattgactggcacatgttagtttaatctgacataccaaggaatgtgacactagattctttcagagttgttgatctctaggtgatttttgttaccagctctggtt

SEQ ID NO: 34291 - DNA, 120 bp, Homo sapiens
catcgtaagtaaacagataaaagaacaaaaatgcatatacaagtaattgctgagggtctataaagtgctactgaaaacaggaaatttattgtaaggcttccaggtagcatatgtctgtga

SEQ ID NO: 34292 - DNA, 120 bp, Homo sapiens
ccccgatcagtggaagggaacacctgtatctccattaattcagtctccttccttagctcatggagagaaaagatgttcttcttagaaggtactattgtcaaagaaagataaatcatattc

SEQ ID NO: 34293 - DNA, 120 bp, Homo sapiens
attcgtatgactattacttttccatacagcaaagtattttacatgctactgaaaaactttaattacaaaaacacttcaatgtaattaataacaatttcttcgcatttacacaatgggaaa

SEQ ID NO: 34294 - DNA, 120 bp, Homo sapiens
taacgtatgtaattttaactatggcatcttttttaattcattaatataatcagatattatgccatcttctgatagttctctcttgaatcagatcaatctcaaaactttgctcttgcaaag

SEQ ID NO: 34295 - DNA, 120 bp, Homo sapiens
gggcgcttttgctagggctgaagaaatatgaatcctgtctttcagtgtcccaaaaataccaatatattttatttcttggtcttttgttatctgttattctctttcctttttacctttttt

SEQ ID NO: 34296 - DNA, 120 bp, Homo sapiens
ctccgggactcttggccaacagcactgttgtctatacagacggctgtgtatctgttcaagagtccaacaactgtgtgtgtgtgtattttggtaagctattatttctgggccaaagatttc

SEQ ID NO: 34297 - DNA, 120 bp, Homo sapiens
acccgctgctactttttagttttctgatcaaaaacattgcacataaatggaaatgtattaaggggagaaaaaatatttttaaagatttttcttaaacccaacaaagcatatatagacatg

SEQ ID NO: 34298 - DNA, 120 bp, Homo sapiens
caacgtttccaaaggaataatcattttataattttatagaatatagttaatgcaatatggtaccaagagttgccaaacatccaatcaactggcttgtcaaaatcctttactgtgcaaggt

SEQ ID NO: 34299 - DNA, 120 bp, Homo sapiens
aaacgtattgaatattctggtactttcccctctagccactacttccttcattggactgcaaggtatttctgtttggaaaagtaatggagtccagtcaacttcattgatcgccaaggactg

SEQ ID NO: 34300 - DNA, 120 bp, Homo sapiens
aaacgtactaaatatttaaccacatgttaaatatattagctgaccactaatattctccagatttcaagtctgctttccttttgacaaactcctcgtataccatatcctaaatatagtctg

SEQ ID NO: 34301 - DNA, 120 bp, Homo sapiens
taccgcagttctaattaagaaggctattataaaaaaaatcatatagatcaaattttacaggcgggactaactcagactcatgaagatcggtgtagtgttagtgcaaaaaaaaaaaaaaac

SEQ ID NO: 34302 - DNA, 120 bp, Homo sapiens
atgcgaaaagcttttcattaggtaccttattttatataaacttttttgtcatttaatcacttttaatgattaaacaacatgtagcttacacaattagaaaatggttttaaggtttcaaaa

SEQ ID NO: 34303 - DNA, 120 bp, Homo sapiens
tgtcgtatttattctgtacctttctagtaaactggaggcttgtcagagtagtgaataaatgagtatgctgttttctttaaaaaaagatatttagaaatccatctgatttcctcagtgcct

SEQ ID NO: 34304 - DNA, 120 bp, Homo sapiens
tgacgcttgcataatagcattttttggagcactgttagagcaagggagtcttcgcaatgctaaagaaaaaaggaagttaaaaaatttaaggatgtttcactttcaataaaaaaaatccta

SEQ ID NO: 34305 - DNA, 120 bp, Homo sapiens
aggcgcaaaaaagaaacttttttgtgttgatgttttactaagtgagctaaggagaattttagaatcatgcaatttactctggaggcatttactgtacatagctatagtgatggtaatttc

SEQ ID NO: 34306 - DNA, 120 bp, Homo sapiens
ccccggggagccaaagccaccagtccataggccttacttggagtagttaggtccaatgcacagagtagggctttagagccagagatgcttgattcacatcgtagcgcttctgtttactaa

SEQ ID NO: 34307 - DNA, 120 bp, Homo sapiens
aaccgtgatcttgggcaagctccttcacctctctgagcctgtttcttcattcttaaaatgagaataataatatatatcttactcgctgaaagccaagctggcttgcagggaattgacttt

SEQ ID NO: 34308 - DNA, 120 bp, Homo sapiens
tatcgagttaggtctcactggtatttgaatttttctaacagtgtgtttatatctctggacagtttctttacatttttatcttatattctagtatttctataatggtgtctaagttccatg

SEQ ID NO: 34309 - DNA, 120 bp, Homo sapiens
atccgatatcgttcagatagcacagtggcaagaactcagccctgaggcccacagacctgagcatgtacctcaggtcagctctgccatttgccagcttgtttgccttagacaggtctccta

SEQ ID NO: 34310 - DNA, 120 bp, Homo sapiens
caacgcacaggaagggctcctgtcagcgaaactgaatgaattagaactgactgtttaatcccaacacaactcagacattcattctagttgtgttaacactggattcaagcccagacttcc

SEQ ID NO: 34311 - DNA, 120 bp, Homo sapiens
ttccggttatgtttatgtcagtattaagtcttatcagaatattccatattctgcctcttgaaatcaaagcacatttgttgatctagctccaataggtataacttaaatgtgatgatgaaa

SEQ ID NO: 34312 - DNA, 120 bp, Homo sapiens
aaacgcagactgagacactctatcaaatggttaagagcatgggtttcaagtcagatccacctggatgtgagctctgggtctagcacttgctaaccatgtaatcttgggcaatttaacttc

SEQ ID NO: 34313 - DNA, 120 bp, Homo sapiens
aaacgataggaaaataattcaaatgtaaagtttgttccaggcatagcagtagcacagaggagaaaaaaacttgtgacagtttcatccttgaatggcttcactaatctagctttctataac

SEQ ID NO: 34314 - DNA, 120 bp, Homo sapiens
agccgggggaggcgatagcacaaaagagggtagaagatgagagcacgctgactgcaaactgtgtgtgtttcagagggtggatttcctagctctgacttctagcaaataattttcaaaatg

SEQ ID NO: 34315 - DNA, 120 bp, Homo sapiens
taacgtattattttaaaatgtttctctaagacgcatttattacaagggaacactctttaggaagcattaacactcacagtccctaaattttaaattggtccctaatattccatttggtaa

SEQ ID NO: 34316 - DNA, 120 bp, Homo sapiens
ctccgattcttattcagtattttctgtgattctcctttattatacctttctagtgcaatggaaacttcagctatctgtggtctagtctgaactgtacctggggtagtgacaatggccttc

SEQ ID NO: 34317 - DNA, 120 bp, Homo sapiens
tctcgctggacctggtctttcaataagacattattgactggcatcttccccagaacaggtgcttaggaatatagtcttgctgctttgagtcctttagactggaaaacaactatggaatag

SEQ ID NO: 34318 - DNA, 120 bp, Homo sapiens
gatcgcttacaatttttgcttttaaaaatgatataatacccatattggctgcagaaaatatttaaaatgtgtgcttttcaaagaatgatcagatcatttattcatctttagataaagatg

SEQ ID NO: 34319 - DNA, 120 bp, Homo sapiens
attcgccggagtctggtttggtttcacagaggttctcagaattcccatctgtgacaattaatgctgaagacattgataaatcaacccttgtgttttctctcttctttaacagacatcagt

SEQ ID NO: 34320 - DNA, 120 bp, Homo sapiens
atccgaaactccaaaatcctaaatactccaaaatttgaaactttttgagcacccacgtgacaccacaagtgaaacgtttcatacctgatcttgtgatgtgtcacagtcaaaactttgttt

SEQ ID NO: 34321 - DNA, 120 bp, Homo sapiens
tgacgcataacttaaataaataataaaataaatgtgactgtggggagggctaaggcaaagagaccttagcacaagtggcataagacacgaagttccagggcatacggtttatataaaaaa

SEQ ID NO: 34322 - DNA, 120 bp, Homo sapiens
tggcgatgggtgactgatgtggcacacttatgaagaaaagcctctttttccatgcttgtttttcctccccaaggagccaacagagtttctattctccaactctgctcttcaccttaccca

SEQ ID NO: 34323 - DNA, 120 bp, Homo sapiens
gagcgagactccatctcaaaaaaaaaaaaaaaaagtccccaggtgactctaatgagcagctaatttctgagaaccagaagtctaatatgtctgccttttcctctaggcctccctacagcg

SEQ ID NO: 34324 - DNA, 120 bp, Homo sapiens
ggtcgtggcaatgctgtctcagaatgtccgtttctagagtacagagaagaaattctagcttgacgtccacgtgcatttgtctgtgtttcagaggaaattccaattctaaactcttggaag

SEQ ID NO: 34325 - DNA, 120 bp, Homo sapiens
tctcggcatgctgaagagaattgctgttttttggcacctgaaacacttttacccaagggttctgattatttaaataattggtatgctataaatattctggttgacagaaatgtggtttaa

SEQ ID NO: 34326 - DNA, 120 bp, Homo sapiens
atccggccagcgatgccaattgacggtctagcccccatccatgggaaagggaatgaagacacatcagcggcctgcacatttagctttggaaacgatttcctttaaatctatctctccctt

SEQ ID NO: 34327 - DNA, 120 bp, Homo sapiens
cttcggacattctgggggagggtgaagacaaaggtgaagtctcagcctccagtgtctctgaaacttaaattgcctcaagtgctttcaaaccagcaaggagctcatttagaatttggggat

SEQ ID NO: 34328 - DNA, 120 bp, Homo sapiens
cctcgagatgaataaccctttcatacactgtgggctccctctgattttctgactaaaccagaccttagtggggcgtagaaatctgtaacagcaaaaaggttcacacaaatgtaaaaacaa

SEQ ID NO: 34329 - DNA, 120 bp, Homo sapiens
aagcgtttggccgtgttgccttgtacatgacttttggagccctcactaaaaagctgtttaccctaatttcccagtaatgtcttcatttcttggtcaggagatttagattatctcattacc

SEQ ID NO: 34330 - DNA, 120 bp, Homo sapiens
gaacgctcttggcagttgagattcagaccttgacagttgtaaccgatagactgggctggggcaacgctgatgaaaggcaaattcctgagagaaaaatcacccagagtaaggagtttggca

SEQ ID NO: 34331 - DNA, 120 bp, Homo sapiens
ctgcgcccggccaagatgtggtgtttctaatggcaggcacttgaacccaattgaaccctgagagctctctgagagggctgtgtgtcttgggaatgagagagttatgaggtaaaacagaaa

SEQ ID NO: 34332 - DNA, 120 bp, Homo sapiens
gagcggggcagcgctccccgacggagctctgaggtcctagtgagcctcacattattaggctctgagtgctggggggatttttcagaaacaaaagaaaagcttctaaattttaaagagtga

SEQ ID NO: 34333 - DNA, 120 bp, Homo sapiens
ctccgtgccgatcacagctacctcattaccatgttcctccaagatggccgcccctgaggagaatcatcaactgggctttacggaagagagaaatccaaacgaccatcagcaacaaatgaa

SEQ ID NO: 34334 - DNA, 120 bp, Homo sapiens
agacgcaaaagaacgacaaggttaagagaattttcagatagatgatcagatgcagaaccagggattcagagaagaatgaagtctttctcctcccatgtcctcctcccactgggatatcat

SEQ ID NO: 34335 - DNA, 120 bp, Homo sapiens
actcgggagagagagaagagtttactatgcaatgaaaataattttctcccaatgtcatcttcgccctttggacaagtgtagtgagcaccaattgaaggggttgagaagtaagtggtcagg

SEQ ID NO: 34336 - DNA, 120 bp, Homo sapiens
ctacgaaaaacgtaaagatgaacagggagttataagtaagcaattcagtgacgtttactcttgaatgaaaaggaatgcccataggtggtgttggtcttcattctagtggtagtcttctac

SEQ ID NO: 34337 - DNA, 120 bp, Homo sapiens
cttcgttggggttcccacaatctctattatctctagactcccacagaccgctgcactttgggatggagagcctgaataattcaagtccgagttctgatgatactaaccagttgctgtcat

SEQ ID NO: 34338 - DNA, 120 bp, Homo sapiens
cagcgactggacagggggtgggatgtggactggctgatcctgttatagagaacattaatgactccaactgggagagccagggcaaggtcacaagtgacagacacataaaaagccatcttg

SEQ ID NO: 34339 - DNA, 120 bp, Homo sapiens
gatcggaagaattttgaaataatagctcccccactgttcagtactgcaagtgggctacctctatgcctcctagaatgctaaccacatcactcatttcataaagagtactttcaggacatt

SEQ ID NO: 34340 - DNA, 120 bp, Homo sapiens
aaacgtttactcacagtttgcttgataccagagctgaagtaacttgattattcttttctggtttaaaacatgttttaaatgaccaaatgaaagaaaaaagcaattagtagtacttttttt

SEQ ID NO: 34341 - DNA, 120 bp, Homo sapiens
atacgttaagacttttgtacaaatatgtctagaaggacactcatttgtaataattagttaatagaacattcagcaacaaaatgttctgttgggagacacactttaattttttccaaatct

SEQ ID NO: 34342 - DNA, 120 bp, Homo sapiens
ttacggaaaacatttaacagtcaagttgaatttcataaaatattttatgactaaagttgagggaaaaggcacaaagaaacaacacaaatgaaatttaaatttaatgaatattctgttgtt

SEQ ID NO: 34343 - DNA, 120 bp, Homo sapiens
ccacgttagagggaaatagtaattgatctgtagctcctagatatctggctgttgatctcagtcatacacagagattctcagtcatacccaggaaacaaaaggtccagaacagtagggctt

SEQ ID NO: 34344 - DNA, 120 bp, Homo sapiens
tgtcgcattcctacactgagaaaagcattctggtgctttctgagataatcatatgcttctcagggttttgttatgatttttctattaaggccaactacgcgtaatattggtgggcatggc

SEQ ID NO: 34345 - DNA, 120 bp, Homo sapiens
aaccgatacctaaaaataaaagcctcagttgggtggaaaagctctgaaaagcattttcgttcaagacagttcaacaaactactgtaactggaaaatttttcagtttgaataagtcacttg

SEQ ID NO: 34346 - DNA, 120 bp, Homo sapiens
tttcggctgctgcaccaggtaaatggaagtccactcaccactcactgtgtgtgacagtctatttttttcccaccgtggagtttttatgttgatgcttctctaaaactcttttttcagagt

SEQ ID NO: 34347 - DNA, 120 bp, Homo sapiens
agacgtcctgcaactatgccattcagttcacaaacatttactgaacacccactgaatgtacaacagtgcgtaagacagacaagaggctgatatcgtgggactcatgttctactgagccct

SEQ ID NO: 34348 - DNA, 120 bp, Homo sapiens
actcgctgctcatctatgtcattctttgcgctactgaaatatgctctcttgctctaactcttgcatttcacactggacctctatattttcagtgatggtatattttccacatgcataagt

SEQ ID NO: 34349 - DNA, 120 bp, Homo sapiens
cagcgtcttcacgtgccgtcttgctgtttttgtatgttccatatacgaatgtgtgattgtgtatgcattgtttgtgtatgttcaatagctgcaccttcacaggtgggatagaaacagcag

SEQ ID NO: 34350 - DNA, 120 bp, Homo sapiens
acacgagactgggagatctgtggtatgtgaggcaactcattccccttcactgaaagggtctctgtttcctcatctacagaataagggagctggattgtgaaatctaaagtacctttcagt

SEQ ID NO: 34351 - DNA, 120 bp, Homo sapiens
taacgtggattgcattcattgtttctaatgctattgatacccagttagtgtaggtgccaataagcactgccttggattctcttgtgcttttggttttcttggaaaaagaatgccctttaa

SEQ ID NO: 34352 - DNA, 120 bp, Homo sapiens
gtacggcgtttcttcttgacgaagattccaagaaacagctgtgtgattctaagacatccctctgttctctagtaattttaacgttaaaatgaaacctcaaacaataacctcaggtttcat

SEQ ID NO: 34353 - DNA, 120 bp, Homo sapiens
ttccgccaaacctggcctcatcctagacctgtggactcagaatctccagggagtgatttacatttcagttttgaaaaaatttgaaattttttcctttttttttttctttttagaaatagg

SEQ ID NO: 34354 - DNA, 120 bp, Homo sapiens
atacgtgacatctttgctgtcagtgatagtgaagtgaaatacataccaaatatgtcttgacataacttgacagaaatgtatgtcttcttttctctcatttatttttgtgataagaatatg

SEQ ID NO: 34355 - DNA, 120 bp, Homo sapiens
aggcgctgacatttgtcaaaacaactttcctcaacacatcaaaatgttcctttctcttttgtgttattcagatgtgttcgggtaactacattttagaaaatagtgactgtcaaagaatca

SEQ ID NO: 34356 - DNA, 120 bp, Homo sapiens
atccgtgagggtcttttaaattaaaccccaaatctaatgtaactaaaagtatgctattttttgtgtgtgctttctcccctacaatctgacaaaagtaaatgacacaagttggttctttct

SEQ ID NO: 34357 - DNA, 120 bp, Homo sapiens
agacgccaatgctttattaagtatatttttttctcacttaggtgcgcattccctggtcagacaattagttgaggttctttccagagaaagtgttacccaccaagaaaaactcttttaacc

SEQ ID NO: 34358 - DNA, 120 bp, Homo sapiens
attcggtgctctgaagacagaaagcagaaaaatccaccctttccccccgcaacttcacttaaggagatgaaagcaaatgaaattaaaaagccaatagtaaatactaaatccaagaagttc

SEQ ID NO: 34359 - DNA, 120 bp, Homo sapiens
atccgtttgctcctagctggtgacatttggaatagtaagcaggcagcattctttgtgtccagtgagttcatagaaagttaaacctacttttgacaacagactcaagcttagttaccatta

SEQ ID NO: 34360 - DNA, 120 bp, Homo sapiens
agacgaataccagagaccaaaatttttgccagcttggcatcagaaagtgtactttgattgcatgtctaaactaggggtgtgattgctttctttcaatgaaaccaagataaaatgttgtca

SEQ ID NO: 34361 - DNA, 120 bp, Homo sapiens
acccggtaagttgagaaaactacttatgtctggcagcttattcgaggtaggtagatgtgtaaagatgcccaggacatttgctgtctgatctgtgaggagcatccctatagttagctcctc

SEQ ID NO: 34362 - DNA, 120 bp, Homo sapiens
ggacgctaaaagaaagcagagattaaaaattcatgcagaggaccaaaaagataaacctgacagctgactccaagaaacaaaagtacacaggagaaaaaaaaaatcctagcagaatttata

SEQ ID NO: 34363 - DNA, 120 bp, Homo sapiens
gttcgggtaaggtagggaaaaaggccagcacatgtctggcccctgtcaggtgccacagaaaagtaggaatttttcttgttccaaataagatctagtccctggccatgccctggtcttcca

SEQ ID NO: 34364 - DNA, 120 bp, Homo sapiens
catcgaatgttccttgagagcacctttgtactgattcctgtagcactcagaatgcctcatataaaaatccccagactgtgctggaaactgtgggcctttcttgccaccatcctctttatt

SEQ ID NO: 34365 - DNA, 120 bp, Homo sapiens
aaacgatcagaccctggccttaaggaatctacaatcaagcatttatccttggtcccatctcctcaggactcagggcactccaaggtggcaagtagccaggaaggcaaacaaagccacact

SEQ ID NO: 34366 - DNA, 120 bp, Homo sapiens
gagcgttttaatacttaaaatttttttaacgttggttccttttacgataagatatggaagacagatgtaaaaaatatataagcttttcaaaaatgaataatgtttttctataggcatttt

SEQ ID NO: 34367 - DNA, 120 bp, Homo sapiens
agacggtgggggatatatttggttcataaacattggcataactaataaacaattatggagtgtcttctaggtgcagggtgctggggctacaaaggatttcggtgagtggtacctgccttc

SEQ ID NO: 34368 - DNA, 120 bp, Homo sapiens
gtacgaaggcttagatgacaagaggtttttgcatctagaacactgagcagcaatagcaggcatgagagacatagggagattaataagatactatgtccctgagaatgagccctatctgcc

SEQ ID NO: 34369 - DNA, 120 bp, Homo sapiens
acgaatataattgtgtctaaaggtcatgagaataacactgggcaaaagcaaaaatattctaacttctgaattagaacccgaagcataaaacttgttccacagggtcagccctgtgactgt

SEQ ID NO: 34370 - DNA, 120 bp, Homo sapiens
aggcgacaatgaccactagctttgccatgtttcaaaaatctgttgttccacaggattctgaaatgaaagcaaattttttttctttcaaagcaaaatggtaaaatggaaaactaatttaat

SEQ ID NO: 34371 - DNA, 120 bp, Homo sapiens
gtccggaaaactgagtgtagattagaggctctagctgccctagtggctgccagcagtgactcaggggccagagttagctgtagccagactcactacaaaatgaaaatgtgggatctcttg

SEQ ID NO: 34372 - DNA, 120 bp, Homo sapiens
tcacgttgcaagcccatgagaattccctgcaacatgtccaggagggcaccatgactactctatgcaaatgaggaggccagcaactgcacacattgtatttcctctgttcaagcctatgct

SEQ ID NO: 34373 - DNA, 120 bp, Homo sapiens
acacgagttcaaagataaattattatgaactttaaaacagtgacaagagtgactcaggctcttctgagtgagaggccctatgactacacaggtcatatgtccatcaacatgctctcttta

SEQ ID NO: 34374 - DNA, 120 bp, Homo sapiens
aaacgttcaaatgtattatcatcagtgacaacaattctcatcaatccttggaatgacagttacactgtgctaaaatgccaaatatgtatgtgaaaccctcacctatttataaagggtatc

SEQ ID NO: 34375 - DNA, 120 bp, Homo sapiens
ctacgttctaaatgtcaggacctgccaagatttgttaattatcctaactccctctgctggcggatttaactacaacccagattcaaaactcaatggaacacagtaactgtttaaaatgtt

SEQ ID NO: 34376 - DNA, 120 bp, Homo sapiens
gtccgaagaaggaagaaaactacaaggtgaattttagttgagaacgtaactcactataatataaataaactggaggtttaatagtattttttaaaccagcatctgggataagatttgtga

SEQ ID NO: 34377 - DNA, 120 bp, Homo sapiens
ttccgccctctcatcaacaggggctttagtataaagggcaatgaagtagaacgtgatgaggcgaacaggagccagccgagtgaatgcttctataattacacagtagcctggagtagctct

SEQ ID NO: 34378 - DNA, 120 bp, Homo sapiens
gcccgggttttcatttgtctgtaggttactgtcgacaagcagccttctttccccttgccattattcttcacagagattatcaaagctcccattccactgcaatattcccagagcaatgag

SEQ ID NO: 34379 - DNA, 120 bp, Homo sapiens
cttcgctattttatggttactttccaaccaatggtcaaaaagtaattttttaaataatttattctacagtgtttagaatgagaataagaagaagaaatggtttattcttactactgactg

SEQ ID NO: 34380 - DNA, 120 bp, Homo sapiens
taacgtcgttaaaaagggctacggagtgtgtgtgtgtttgttgtgtgtgtgtgtgtgtgtgtaaataagttgggttcttcttgttaattcagatgtaatgtgataaacattctttaatgg

SEQ ID NO: 34381 - DNA, 120 bp, Homo sapiens
aaacggaaatcttggtaacagattgcatatctcacagttgttttagttgtcattttctatctagaaaaaatgctgtgagaatacttatttaattagcagctagttagctatgaattcatt

SEQ ID NO: 34382 - DNA, 120 bp, Homo sapiens
catcgttctgaacatctttaatattctcacaggttcagaaccattttggagagtcaggcaaaaggaaagtgtctgatattctactcatcctaacgttgctgttaatattttggtatttgc

SEQ ID NO: 34383 - DNA, 120 bp, Homo sapiens
tcacggcaacggcagcacttttttcatgttgctgtttacaatcttcaaaacacaatttttattggagcgctctgcttcttttggaatgggtatttattgagagaaggattgaatggacaa

SEQ ID NO: 34384 - DNA, 120 bp, Homo sapiens
ccacgttgctaccagctgatctttgcttttccctgccttcctgcacatctgcataggattcataccgtgctttgtctggggatggagaatgctggaaagacaggggaagttgttaggatc

SEQ ID NO: 34385 - DNA, 120 bp, Homo sapiens
ccacgcagggccattctttcttttgcagacatcttcagcaataacacttcagtgcctcaagggtttgaaagaagaattacaatttaaaaggaaaactcttcatgtatgatttgcatatga

SEQ ID NO: 34386 - DNA, 120 bp, Homo sapiens
tgtcgtggtgggtctgaatgacaggctgaggctctcctccttttgttgcattcttcttgttgtttgtcacttggttttcttccagtcattctctttctgctccagttcacatgtcactct

SEQ ID NO: 34387 - DNA, 120 bp, Homo sapiens
tcccggaacatgccatcccttttccacaagctctcttagcctcataagcttttatcccattctaattattcttctaattccatccttcaagacccagttcagatatcgcctctctggcac

SEQ ID NO: 34388 - DNA, 120 bp, Homo sapiens
gctcgaggtctgcatgccgcttggtccacaccctgccttaatgcttagagtcttggatgtctctctcctgctcttccatgaagctctgcaggagggacagggcctgctttttcattatta

SEQ ID NO: 34389 - DNA, 120 bp, Homo sapiens
tttcgtgtttagtgcattgaggactcccagagtttttaatagataaatgagtcaatgggcatctgagttgagatccccaaatagcatatctactagtcataacatctaagatttgtataa

SEQ ID NO: 34390 - DNA, 120 bp, Homo sapiens
taccggggcaggtggtattattcttattttagaaattatagaatggacttagagtttaagttacttggtgaaggttgagagtagagccagtgaatgattattaactttttgtaatttttg

SEQ ID NO: 34391 - DNA, 120 bp, Homo sapiens
ctccggtcagtgttgcccatcctgtgccgtgaacccctgggcagctctgaattgtttccactgcttccttaatcctggtctcagctagctttagcgttgggtttggaccagccaaagcct

SEQ ID NO: 34392 - DNA, 120 bp, Homo sapiens
caccgatacgagatgaaagtcccaggaaggtcagtgggtggtcagggtcccagagctccctgcctgtgagcacaccctccctgctcagaagcccgatggcttctcctttcacatccgctt

SEQ ID NO: 34393 - DNA, 120 bp, Homo sapiens
ccccgggttgcaaataagttcatcccattagatgaggatttcacaatcctccctttgagaaaaaatggagttaaagcaacccagatttaaattgagagtagtctaataacttccaagtaa

SEQ ID NO: 34394 - DNA, 120 bp, Homo sapiens
attcgctgatgtgtattcacctttctaaggcttttttttttcttttaacttatttttccttcctcatttatacttcagccctacctcacaagcacccgaagcttgtctccaatgtctgga

SEQ ID NO: 34395 - DNA, 120 bp, Homo sapiens
gggcggagccctcatggcctaaacacctcccattagacctcacttcccagtgctgttgcatttgggattcagtctctaacacatgaatatctgggagacacattcaaactatggcactag

SEQ ID NO: 34396 - DNA, 120 bp, Homo sapiens
gcacgaggagtatgcagcccacctattctatgcttggcccagtggtgatacacagtacctctcttctgcttacagcacattggcctgaaatggtcgtgtggtcccactcaagggggaagg

SEQ ID NO: 34397 - DNA, 120 bp, Homo sapiens
acccggcacttggtcttccatgctttcattattagggaaactagatttgtagcacagctactggagagtactaggatcctagtaagctggctttacaaacatggtgtgtactgcctattt

SEQ ID NO: 34398 - DNA, 120 bp, Homo sapiens
aaacgtaagataataggaacaaatacatgtgaactgctggacggctattcaaaaatagtttgccagagtaactggtaagcctgaaatctgtgtagccatgaaagggctcatcatcggctt

SEQ ID NO: 34399 - DNA, 120 bp, Homo sapiens
ttgcgggtacctattttcaggaacagtagagtccagaatttccttgctacccagacttacactgtaaggcagataagccagataggagattgtttaactgcttcagagcagcctccaaaa

SEQ ID NO: 34400 - DNA, 120 bp, Homo sapiens
gagcggacatatgcaagccataaagggtaatgaggcagcatttgggtatttcttgtaataaagttcctctgcattgcacgaactgatgtgcacaaagacactgcctttagatggggtaat

SEQ ID NO: 34401 - DNA, 120 bp, Homo sapiens
aggcggggatcaaacgagatcaggaatggaaagcactctgaaaaccatactgcactacacagagcccaggggctttgttactgtcatgtatccatacgaaagtgacagcaatgtcaaagg

SEQ ID NO: 34402 - DNA, 120 bp, Homo sapiens
gttcgtttggtgcataaaccttttgtgatctgtgccattgacctgagtccaagtagccttcagagggtcctttaatctggtcccattcccataggtcagggagcagggcagagtgaactg

SEQ ID NO: 34403 - DNA, 120 bp, Homo sapiens
cctcgaagcaggcctagtaccagctagtcacccctcttgggaaaagcagacagctttaatcaatagcaatatcctttggtcttttatgttttctcgcattcagactaaacacctattatt

SEQ ID NO: 34404 - DNA, 120 bp, Homo sapiens
gaacggcaaagagggttttgtctcaagggtgtacgttaactaatttttagtggtagcctgcagcgctctgttgaggattctgagcctggatcctggttcagtggtagagtcttataatca

SEQ ID NO: 34405 - DNA, 120 bp, Homo sapiens
tgacgatcagggtacacatcttgaatcagaaaccctgggcacagaccagcagtctgcgtggtaacaggccctccgagtgattctgatgacactcgagtttgagaaccagggcggtctagc

SEQ ID NO: 34406 - DNA, 120 bp, Homo sapiens
tctcgcagcttacgaccttgaccctgggctctgggggcttccgccgaggagggaggagggcacaggcggtcacaaaggagggcgggagtggaaggggtgagcctggaagagaaagtgcga

SEQ ID NO: 34407 - DNA, 120 bp, Homo sapiens
atgcgagaagagggatggagcgaaggaagaggatcagaaggaggaaaggaaggtagcggggagggcacagaagtggggagggagggagtggaggagggactggcaccccgcacggtggca

SEQ ID NO: 34408 - DNA, 120 bp, Homo sapiens
atgcgtccgtccccacgtctttccagggccggttctccccggtggggcccggggtcttggagaccagtctgtgcagcctgcccggcaccagcgtgagccccgggaccccggcctggcgtc

SEQ ID NO: 34409 - DNA, 120 bp, Homo sapiens
ccacgcccgcgcccccgcgccagtacctgctcctgctgcgggggggcctccagcaccggcgctgccttccgcgccgccgtccccgcggccatgcctgagccactgtgccttctccagggc

SEQ ID NO: 34410 - DNA, 120 bp, Homo sapiens
gggcgagggctcttgcttgtgggcttcatttcagattcaaagctgggctattgcacagggatctgaaggaggaagaggaaaaactagacaaattcctcagggattaggtggcctaagagg

SEQ ID NO: 34411 - DNA, 120 bp, Homo sapiens
cttcgcaatggaagcttcccactttgttagctagtagaacacgtacccactcctaaaacggcagttatttttaaaatccaggttaagctgctgtatccttttcctgtgtctgagttttct

SEQ ID NO: 34412 - DNA, 120 bp, Homo sapiens
cagcggtattatggaggagctactgaagggagccccagctgcttctggatgtgaggggtcagctctgggtacaaggcaaaggttatcggttcaggatcagacatgagccctgaatgagcc

SEQ ID NO: 34413 - DNA, 120 bp, Homo sapiens
acacgggtatcaaaaccgccaacaataagaacccaaggctatttccatataaatttggtctttgcttaaaaataaaattccatgaaagttccctaagataatcacccacacagagtgttt

SEQ ID NO: 34414 - DNA, 120 bp, Homo sapiens
agtcgctgccaggaagggaagcatgagtctggcttcggccaggacagcaagagagatctcctctaaaaacagaatacagtataactcattcttccagatcttccagggaaaactgaatga

SEQ ID NO: 34415 - DNA, 120 bp, Homo sapiens
aagcggggcgagtggtcattcacgtcgttgacgcgaatctccacctgcaccacagcgcccagcagcgtggcggcgacgaagctgtagtggtcccgccgctcgcggtccaggcgccgcgca

SEQ ID NO: 34416 - DNA, 120 bp, Homo sapiens
gtgcggatgatgccggtgtccgggtgcacgtggaagtcgtccagcagcggggagtcatcggagtcctccgacagaaagaagccgctcccctcctgctgctgcgcggccggcagcccggcg

SEQ ID NO: 34417 - DNA, 120 bp, Homo sapiens
gcgcggatgtcacctaccagcgtgtccgggggaagcccctcatctacggaaagggtgaggttgaacaactgggcagaggagcccgaggccgcccacagccacacgtgcaccaagagccag

SEQ ID NO: 34418 - DNA, 120 bp, Homo sapiens
gagcgctgcgtcctggcgccgctgctgcctgaccgcccatggggtgtatctctcctcccggggagcagaaggagcttcccgaccggagcccgccgctgctgacgcccttcgcccatcttc

SEQ ID NO: 34419 - DNA, 120 bp, Homo sapiens
ttccgcccacaagggctcatttctcctccagctccttgggaaggctctcgggtaactgccagcttgtggcaggatcgcagaaaaatccaggagcctcttcagtgtctgagccagagaaga

SEQ ID NO: 34420 - DNA, 120 bp, Homo sapiens
actcggctggttgttcccccctggtaaagtcaggtgcattatttcttttgccaaaaaggaggagattatatgaagcgcgcacacacaaggagaggatggggatctggccggagtaggggg

SEQ ID NO: 34421 - DNA, 120 bp, Homo sapiens
gggcgtggaggcagggagtcagggcgctggggaggagggagagagggaggggggaagggaggtctgcggccctgtccgctgctccgggggcggggcggtggttccccactgtgtctccgg

SEQ ID NO: 34422 - DNA, 120 bp, Homo sapiens
gggcgccagggaccgcgcgactcctgctccgacccagcctccgccgcctgccttcccctccctgccgtgtgatgcggcgcacacgagggcaaactccaacctgcgagccgcgctctgcag

SEQ ID NO: 34423 - DNA, 120 bp, Homo sapiens
gggcggaagaggagcaaatgcaaaagcactgggagacgtgcaccgcggggcgggtgggggacgcgcaggcggggcgtctgcctgggcttggccaagtgccaagtgatgatgggtgcgggg

SEQ ID NO: 34424 - DNA, 120 bp, Homo sapiens
gagcggcctctccgcggcctccccctccatccgcttgaccgtccctctgcaggcctgactcttggctcgcgctgagccaagagggtagaggttatcatcactttggggtgccaaacttgt

SEQ ID NO: 34425 - DNA, 120 bp, Homo sapiens
actcgctgcccctccccatcccatacctcatccccagcatctacccccagaaagaggcaatattgaacccccaagtttgttttgagtattcaaaagtatggaaaacccgtgccccaattc

SEQ ID NO: 34426 - DNA, 120 bp, Homo sapiens
tagcgctctaggagagcggtttcagagtggacagtgtgataccataaacagtagagaaaaatagctgcttctcagatttcagacataaggaagaacatgcttggatgtctaggtgtgtgt

SEQ ID NO: 34427 - DNA, 120 bp, Homo sapiens
tttcgtaagtttaaattctgacctgactgtatttcaaaccagaagcgactgagttttgttgaactggcaaggttgtttttctaccactgggccaaaatagggcttgcagtttgattagca

SEQ ID NO: 34428 - DNA, 120 bp, Homo sapiens
tctcgtttggagaagtgttggttgctaggagactgaactgccttttcaaggagagtactttagagagaaacaattcacatgattttcttcttttataaaatgaaaatttgtaaaatattt

SEQ ID NO: 34429 - DNA, 120 bp, Homo sapiens
gttcgactagctcttgtaatcaccatcaacaacatttaaaccttgggtagggagtagtcagcatgaaatgacatttcctctctaactcacctaatacgatgcctggcacacagtaggtgc

SEQ ID NO: 34430 - DNA, 120 bp, Homo sapiens
tcccggagattggacagacaccagagcctggggaccgcggagtgaccgggtggggctggagggcggcgccgcgccttctggggagacgcggaggtatcaggtaatcccccggcggcctgc

SEQ ID NO: 34431 - DNA, 120 bp, Homo sapiens
ctgcgccaggcagtcatgcccacccgagccctgggacctttttcacctcctctttccagggaggaaaggcggcaagggaggcgcgaggagttagttgcagccctggaggcagacactgaa

SEQ ID NO: 34432 - DNA, 120 bp, Homo sapiens
ccacgcgatccagcttagcttttaccttttctctagaggtagagagggccgggtgccaactccttgctcaacttctcactggaaaagtggctgccttcctccgtctccctcccctgggct

SEQ ID NO: 34433 - DNA, 120 bp, Homo sapiens
ctccggccaggggagcaaggcctgctgtggacatgaggaactccctgccctgtcctggtaactttcctattctgcaccttcgctttgctagcttgtctacctccttcttttcgctagctt

SEQ ID NO: 34434 - DNA, 120 bp, Homo sapiens
cttcgctcttcctcccactggaaatcttcacttcctagtccgcaaaaccgtccagcggaggtttgcaacagagtcggctcttggaatcatagccctcttaggttggtggtggttgtggat

SEQ ID NO: 34435 - DNA, 120 bp, Homo sapiens
ggacgattaaaagtagtttttaatacttaaatggtttagggctttcctgtgcctttgttctgcctaaacattagtttgatttactaaaatcctctcctaccccatttctggcatttggta

SEQ ID NO: 34436 - DNA, 120 bp, Homo sapiens
agcggcttgcatggacggcaaagagacgggagaaagttgggtctccttgcgcttaatctggcattggcagaggaatgcaacactgtttcctccaactcgattgccgcgggggtttcccca

SEQ ID NO: 34437 - DNA, 120 bp, Homo sapiens
ttccgcttcctaaggagaaaaggggctccctagagcagatcgctgacttcctcaccaacgtgccatttggggcttttcagccgcccgcgcgttaagctagctcccagcataagcgcttag

SEQ ID NO: 34438 - DNA, 120 bp, Homo sapiens
atccgcagccgcctgggcgcgctaagagatcgtgggcagacctagcccttagggcagcctaagcgcgcttcactaaagaaaaaagactgttggtatattaaagaagtgtgtgtgtgagag

SEQ ID NO: 34439 - DNA, 120 bp, Homo sapiens
gcccgagtaggaggtgctagtgaaatttatcttttgctgacggatccagcctccggaatgcccgattgtcttgatccgcggtgcggtgcgggttttaggggcgcacaatacagggtgtcc

SEQ ID NO: 34440 - DNA, 120 bp, Homo sapiens
ctgcgcgggcatcctgtggctaggcgcgggggaggggaacggctccctccccgagccccgggctgcctctgctgcttctaggggtgcatctgaacatggataaggaaatgcgctccctgc

SEQ ID NO: 34441 - DNA, 120 bp, Homo sapiens
tgtcggaaaacagcggcctcattgtgtgcccgattgaggtttcaacttgcaggcaactgagaggccattcagctgggcagcacggagttggctggtcctcggacttgagccatggccttc

SEQ ID NO: 34442 - DNA, 120 bp, Homo sapiens
ccacgatccctggcggcagtatcccagctcctccggctgggcggcgagccaaaactcatagtttcgctcctctgtactccactgaagggagggggagttgcctaaacaccaggcgttttt

SEQ ID NO: 34443 - DNA, 120 bp, Homo sapiens
acacgtgttgtgtgcgagtgagcgtggagacaagtcgagtttaagagctggatggaagaaattagaaaactctgcaccctccagggagacaaattaggagagggcgcggttgagctttga

SEQ ID NO: 34444 - DNA, 120 bp, Homo sapiens
cttcggtgacttcaggtgtgccaagtgcaaaatattctaatcccttaaagctgtggcccctccaaagcagcatcttccaaaattgcccagtaacttcttcatgagtaacttcttcattcc

SEQ ID NO: 34445 - DNA, 120 bp, Homo sapiens
cgaagtgataatccactgaccaccttttgagaaaaaatgatctatattgtatttgaatcatatccacaaggcttgagtgctgtatgtgtcaagaagtaacctatccgataaataaattag

SEQ ID NO: 34446 - DNA, 120 bp, Homo sapiens
caccgtgtgtcaggatctcacccaggcactctaggctgtgctatgcacttatgcgtacccttcctggcctgggacctgaggcctggctgctgacgctcctttcctgtaggtagcttgtac

SEQ ID NO: 34447 - DNA, 120 bp, Homo sapiens
tagcgcttctatagcagcttgtctcatttctttgacaaagcatctgccagcagcagggcagggagccctgaacatgggccactccaagcttgccgacagctctctttagtgagattggag

SEQ ID NO: 34448 - DNA, 120 bp, Homo sapiens
atacgtgcattggatctcagtggttcagcacttcctagttcttggaccttggaaattaaataaactgctataagccttggtcttcagactacagaatggcaataataatgatgctaattc

SEQ ID NO: 34449 - DNA, 120 bp, Homo sapiens
ccccgaagccaacacttccagccaatacttctagcaagcctgccgctaaccaagtaaacacccccagacaaaccaacagctgcaaacaattcctggagagttcttccgaagtgtatattt

SEQ ID NO: 34450 - DNA, 120 bp, Homo sapiens
tgccgtggctgagggtaacagtcagctgtgacctcttcctcatgactaatgctgagcaggcttggctagcctaggttcccatgtaacttatcattaagccaagccaagaactggacaaca

SEQ ID NO: 34451 - DNA, 120 bp, Homo sapiens
gagcggccgaagtggaagcagaattaatttgacagaggagctgagagggagtgaattaaaagaaataaaagattccataatctttattttttacctgtaacagctagaaagaccaaattc

SEQ ID NO: 34452 - DNA, 120 bp, Homo sapiens
aagcgaagcatttgaaataaattgtgaaatcagggcatagaagaattatatctgaaactggagaaaagaaaaaatgccttcaagaaaatagggcatagtataatgcttccgtagctaaat

SEQ ID NO: 34453 - DNA, 120 bp, Homo sapiens
tagcgctgtgatctcagcagggatttcttctttagagaaagatattttatgagcctagaagcagctttgttggaactcacaatatccttgaactgcaagcaacagcaattttagacagag

SEQ ID NO: 34454 - DNA, 120 bp, Homo sapiens
gagcgttaattcagtgaatttcaagagaaaaagaaaaaaaaaaaaaaaggaaaacccatacagttgtcagtgctaaatgaactgaaaagcagtttgaaagagcatttcagagtcagtgct

SEQ ID NO: 34455 - DNA, 120 bp, Homo sapiens
tgtcgagccccattgagtagaatggtaccaacaaaatatggtatttgtttagatatgtatgtttttatataatactttgggagatccggtacattgagcaagtgagactcacaagatgca

SEQ ID NO: 34456 - DNA, 120 bp, Homo sapiens
atccgtacacatattaaacttatgaaatctaatgatacctacttagtggggtaagaaaaaaaatttttctaagcagattttcatagaacatggcccctaaatataaaccagctgcttcat

SEQ ID NO: 34457 - DNA, 120 bp, Homo sapiens
gtacgtgctgactttgaacctaactcaattgcaggatgtggatgtatctttactgaatatgtttgtgtgtaatttcttttaatacagcagatctgtgcctaacggctgtggaaagcaccc

SEQ ID NO: 34458 - DNA, 120 bp, Homo sapiens
cctcgtgatttggtaacgtgttgagcagcacaatcaatgcccactctgtaagcagtgaacagggaggcattatgcacccccacagtggaagggaaaaggaatgtatgtatgaatggcatt

SEQ ID NO: 34459 - DNA, 120 bp, Homo sapiens
atacggatggacattttgagaagccagttacccaaatgcctcgaaacattactgttattgtgaataaaatatctggaacccactaataagccatggggaaacaggtacctttgtgaccat

SEQ ID NO: 34460 - DNA, 120 bp, Homo sapiens
gcccggcagagcccataatccataaacatgttgtttcagcgtgtgactggatcttccaccttgcttatataacatctggcccacagtcacaatgctaaataattaaataaacagcttcag

SEQ ID NO: 34461 - DNA, 120 bp, Homo sapiens
cagcgtgtgtgaaaattgcctccaggagggtaataaatccaacctccagctcccagattttcacattcaaaaggaacttatttagcctgttgatcatttcccatttatttgtagtgggag

SEQ ID NO: 34462 - DNA, 120 bp, Homo sapiens
tctcgtctctcttcttcttcctctcttcccttgtttcttcctccttctccctcctcctgtgtcactattcttgactctatccctccagtggtatttggtatttgttttctgtctccctat

SEQ ID NO: 34463 - DNA, 120 bp, Homo sapiens
tcacgaatgcctatttgaccataaggcaggctgctgatttagtatctcagtagtgggtctgaatggggaaccctcccacctacatggaggaaagcagtggagatgctttggacagcatca

SEQ ID NO: 34464 - DNA, 120 bp, Homo sapiens
caccgtgccgtgcccagcctccattttcttaaataagttttgcatttactcatgagaagggagacagggttgccaacaaatgaaaataatcactgtggtcacaatgtaataggagccagg

SEQ ID NO: 34465 - DNA, 120 bp, Homo sapiens
ctacgcttctaaagtagagactgttagtcccattgcacagatgaagaaactgaaaattagggaagtgaagtgactaacccaaggtcacatgacttagcaaatgacaaaatggccttccaa

SEQ ID NO: 34466 - DNA, 120 bp, Homo sapiens
tcacgttgcccagccacccactcaccatctttccttcctgttcatttgtttatttcttcatctgctgatccattccatgaatatgcactatgcccttactctaggcacaggggacagagc

SEQ ID NO: 34467 - DNA, 120 bp, Homo sapiens
tctcgttattaaggacgtctttgtattagcctgaagtctgtgcagtgcctcccgtaccacagagagccccagacacagccacacacctttgattcattgagtccaggaatggcctttgca

SEQ ID NO: 34468 - DNA, 120 bp, Homo sapiens
agacggagacatggaaacagagataagcagaaagacaaagacagagagatgctggggttggtatagtttgaaagaggcagaaagaacacatattcagatgccttaaggcaactaaaagtg

SEQ ID NO: 34469 - DNA, 120 bp, Homo sapiens
tcccggaagtctctatgcctacagggaagggtgcaagtctaaccccactggcaggcttttcctgggaatacagaaagagagggcccccgaatatggacttctggaagcttctggtgtgta

SEQ ID NO: 34470 - DNA, 120 bp, Homo sapiens
gatcggccagccttctccagactgctgcgtcaactggctgaaattgcagaatcaggactttagtagagactgagtaccaggccacgggctgcagatcctgaatggaggaaggatatgtcc

SEQ ID NO: 34471 - DNA, 120 bp, Homo sapiens
tgccgtagagaatgatagagcagctgctcacacaggaggccggatattctgagaagcagctttatgaggttttacagagtatgctgctacctctctccttgaagggagcatggcgagacc

SEQ ID NO: 34472 - DNA, 120 bp, Homo sapiens
tgacggtggagaaccatgtggtgcaagaagagatcttaggtctcttcttttataccaagctcatcttttataccaagctgtgcaggtgactatgcctcctcttctgcacagaatgcttcc

SEQ ID NO: 34473 - DNA, 120 bp, Homo sapiens
atccgatcctcatcaacagagggcagcattgtgttggtcaatgttcccttggcgagcaattgaaacttgtttaggccctagggttgagcaattttaaggttgagactccaagtctcctaa

SEQ ID NO: 34474 - DNA, 120 bp, Homo sapiens
taccggccgaaggaagggaaagttaagagtgatagggcatgaagtgaaaggcttcaggtgggaagtgctcttaagtagcacaagagaggtgggtggaacctgagtaggtagggagaagtg

SEQ ID NO: 34475 - DNA, 120 bp, Homo sapiens
agacggcagaccctgtcatcaccagctcctgcccagtgtgattgagagtgggactttgtggggaaggggcaagatgaaaggtgacgcagcaggaggtttccacagagagcttgcgttgtt

SEQ ID NO: 34476 - DNA, 120 bp, Homo sapiens
tcacgggcattgcaaggtacattgagcaggctacagtccactccagcatggtaagtctctgtgacccacgtgtgcagacatgctccctgctgggctggcaggggccgcgggcagcttctc

SEQ ID NO: 34477 - DNA, 120 bp, Homo sapiens
ctgcgccatcccctgtcggtgcctagaaacatacagttcccctttattgtccagctttgggaatcctactcaactgttagggcccaacttagtctccactactcactttcttgagctcct

SEQ ID NO: 34478 - DNA, 120 bp, Homo sapiens
tcccggcaacttaatgacagctaatgaggacggagttctccacaggttgtactggctgtgcaaagcagcctccaggcgttatcacatttcccccggagaagcagctgaaatctaagtgtg

SEQ ID NO: 34479 - DNA, 120 bp, Homo sapiens
tgccgaagaaccagggatatccagggttctgattctctttcatcaaattgttgcatgactttaggcaaatctctcaatctttcttgatattcagaatttgtacacgggtaaaatgagtta

SEQ ID NO: 34480 - DNA, 120 bp, Homo sapiens
ccacgaaggacttattgctttagatttcttaatttcaggttgggaacaaaaatacaaatctagtctctgtattttgctgggtgttacgttttgcaagtaacagagacacaaacttaggct

SEQ ID NO: 34481 - DNA, 120 bp, Homo sapiens
ctgcgtctggctttgtctgtttgtgaagggcaaggcctctttgttttctgcagggggcctctcttttctgccttgtttttactcccagttaacaatctcacagtgtcttagggttgcaca

SEQ ID NO: 34482 - DNA, 120 bp, Homo sapiens
catcgctgcctccgtggacccaccaggctcctatggagattcagatgaatcttctgaatcagggaggcagaactgaagtttgtttgactcctttgaacgcaactctgttcgtgatctgta

SEQ ID NO: 34483 - DNA, 120 bp, Homo sapiens
agccgtggccgtgtttatcagtcagacccctgggctttgccctggcctacgtctccccaggccatgcctgtctgcacgcagccaagtcaaactctatttccaggggctgaagtagacctg

SEQ ID NO: 34484 - DNA, 120 bp, Homo sapiens
cctcgaggacagaggtctttgaaaatgcaactaagcagagtgcaggaaggcagatttagtcaaagtcccactgcctgattttaatttgatagtgcctgctttctttgctttgttttcaca

SEQ ID NO: 34485 - DNA, 120 bp, Homo sapiens
caacgtaatgaactattcttgtatgttgcctgggttcaaatccaagctccaccacttactagctacatgggttcaagaactcattctgctttctgcaagtttcagatttttttttttttt

SEQ ID NO: 34486 - DNA, 120 bp, Homo sapiens
tgccggccatcaccagaagctaagtagcagcaagaaaggctcctctctcctagacccttcgaagagagaatggcccggctgactctgatttcagacttctaactgccagaactgtgaaca

SEQ ID NO: 34487 - DNA, 120 bp, Homo sapiens
gcccggcttcccaaagtactgggattacaggcctaagccaccacgcccagccatgaaaagactgtttcatcgttagtgaaatggaaatccatcacagggtgataggctgtatcaaaagct

SEQ ID NO: 34488 - DNA, 120 bp, Homo sapiens
cctcggactcagaacacttccccacatctttccaaggctacaatgtctgtgccatttgcagtgtcctccaccatgtaactgccctctgagcagggacaacgtggcacactgggagattag

SEQ ID NO: 34489 - DNA, 120 bp, Homo sapiens
aaccgtctccaccatcaaccacttgaggtttcaaaacatgtcccttctatttttaagcaagcagcagtctacttctgcattataaatttagttcccttttccccagatacctggtgacgc

SEQ ID NO: 34490 - DNA, 120 bp, Homo sapiens
gggcgagagagcatgtttcttctaattctcaacaccacttcagtatgaacttaaaaatcaatggatgactggattcagatgaacatttacagtctgaattttgccattcatgaatgctag

SEQ ID NO: 34491 - DNA, 120 bp, Homo sapiens
taacgttagccattgttagggttataatctggagttctaactacagtgttttgtacaaagtgcatgctgaataaatatttgcagactgataaattataggcagtatattcttgccagggg

SEQ ID NO: 34492 - DNA, 120 bp, Homo sapiens
taacgatgtattcatccaacattccagctgccagggtcctctgtgaacactgattctctgtccacgaagcttccaaagacacaaaccctactggggctaaaatgacgctactttatagaa

SEQ ID NO: 34493 - DNA, 120 bp, Homo sapiens
tcacgaagtcctccaggtaaacagctccattagcctctccttgtatcacctatcaccttcagcctcagactacagccaggctgagtgactgggagatgtctgatttttcctttgcagctc

SEQ ID NO: 34494 - DNA, 120 bp, Homo sapiens
taacgaaagcagaaaatgagattctccttcttttctccagacgtttaagacagtacttaataaacaaaaaatgccatatccattaatattctttctcatctggttctcttagtagtaact

SEQ ID NO: 34495 - DNA, 120 bp, Homo sapiens
aggcgcagtaacttgccaaggttacacaattataggaagcagaactgtaattcatatgcaagttttattccaaagcccgttttttttctactaaacaatacccactcctattctgactac

SEQ ID NO: 34496 - DNA, 120 bp, Homo sapiens
caacgagttttagtttacttttgagtcacaaaagaaattttcattcccttctgacatggcagaagctgtttgaagaatgaaagtggtagtagaagcaacactgggccaggtgcggtgctt

SEQ ID NO: 34497 - DNA, 120 bp, Homo sapiens
ctccgttcctttgaaaggcagcctccttcactggacttatcagtatcacatgcttcaaaagataaggctcatcgtttagcacgagaggagtatgatttaactgtaaaaagtcagcatgtg

SEQ ID NO: 34498 - DNA, 120 bp, Homo sapiens
tgacgaaaaataaaacattctgttagaaaagaaatgtggatctcgcacccagaaagccaaatgaaatttcaaatgcagtgtaaagaaaagtagtcatatcctgggcctaattcagaactt

SEQ ID NO: 34499 - DNA, 120 bp, Homo sapiens
tgacgtccctattgagcagactccagtagaagaaaacagtgcttgaaagtggcggtatttctctcgcacaccttggctaaaatagttctctttcctatggaatttttcatttttctgatt

SEQ ID NO: 34500 - DNA, 120 bp, Homo sapiens
cctcgctaggcccaagagtgaaagagaagaatagcaagtctgtgaatgtgaggccgagtcccagaacagtgaaggcagtgttcttcgacttggctgaacatttacattgttagacatggt

SEQ ID NO: 34501 - DNA, 120 bp, Homo sapiens
ctacgcatggtacaaaatgactttgtccatctacctttggtaatgcatgtaattaagtgtgagacaattataaccttgcagttctctttggggggcctgaaatatgattcagctgctggg

SEQ ID NO: 34502 - DNA, 120 bp, Homo sapiens
ccacgtatgttctcaacctgcagtgtgctcagtgcctgcacatcacaactcaggtgatgaagggatggcagttttacatgaattaatcagtttccttcttaaccccatgccatttccctc

SEQ ID NO: 34503 - DNA, 120 bp, Homo sapiens
tctcgccaattgcctgcacgtgctcggagaagcttgcaataccgttagtgtgttaatactcacacagctggacctcagcaacacaaggcttactagaaagcgaagacaatagcaaagctg

SEQ ID NO: 34504 - DNA, 120 bp, Homo sapiens
agccgttccctaaggaactcttcgccccttacactggagcaattgatctctctgctcctcaaccaggaaccgtagagccctacagggcacacagccagttactaaggactcagggcctgg

SEQ ID NO: 34505 - DNA, 120 bp, Homo sapiens
acacgactctgtcctctgtacctccccaccctgatgcacagcacactattccacctaaatgacaatcctgcctccccggactcgagtggatggtcacagttctttactggactcagtgtt

SEQ ID NO: 34506 - DNA, 120 bp, Homo sapiens
tgtcgttttctcctgccgtcttaaatcaagcctcaatggggaacagactcactcagaattccccccaccaaggacactgtataagtcacctatgatatatagggtcagattctcatatct

SEQ ID NO: 34507 - DNA, 120 bp, Homo sapiens
aagcgaagaaagtaactttttcccagacaaaaccaggtggcctgaccttcagttgttgtgtgtcactatcatctctggtgttcctgcggagtctcctcaagaggggatctcttgccacta

SEQ ID NO: 34508 - DNA, 120 bp, Homo sapiens
acccgagctcacttgccctcccttcctgagtcctgccaaggtcatttcctccccagaatccaccagtggtgctgctgtgactatcacccctcctagaggttttctactcgataagaagca

SEQ ID NO: 34509 - DNA, 120 bp, Homo sapiens
tcgggattaggctgggacgccctccagcctgagggtggggctggaatgttgttcctgggatgagggtcccctagggaaccagactcagccctcacagcagccaacacagagccagctgcc

SEQ ID NO: 34510 - DNA, 120 bp, Homo sapiens
gttcggggtcaaggaggggggattcagccctggggctcaggaaatggctcgtgacaccgtctgtctacgcacctggcagtgccacctgggcagagggcacgccatttcagagcatgagac

SEQ ID NO: 34511 - DNA, 120 bp, Homo sapiens
caccggccccactgagggagcggacccctggcactcagtgccagcaggaaaaggagggacctgagggtgcacaggagggagacccgatcagggacactcaggcagctccgtggcgggcgg

SEQ ID NO: 34512 - DNA, 120 bp, Homo sapiens
cctcgctgggctgaccctggcaccagctctggaaatgcaggcaggagcgaaggggcaggcctgggccactccctccccatcctccctgggccccacccacaagtttccagagcttcaggc

SEQ ID NO: 34513 - DNA, 120 bp, Homo sapiens
tcccgggcaggcggctgcgtggcctcactcagcctccctgggcacctcggaggcgtcggcccggcagatgggacacgtccggttggcctgtgggaacatgcacgtcaggcgttgctctca

SEQ ID NO: 34514 - DNA, 120 bp, Homo sapiens
gtccgctggagccagaacttccgagatgatgacaaggacaaggagggaaacagcccaggccagcccatccccccgtcactgcatgaggaatacccaggagcagacctgggcagtgttacc

SEQ ID NO: 34515 - DNA, 120 bp, Homo sapiens
actcggagcagctgccgcgcctcgaagtcactgaagcagaccacacacctgtggaggggcgcggagcgtcacctccacgctgagggccatgggaaggctcagtggagtgtgactcccctg

SEQ ID NO: 34516 - DNA, 120 bp, Homo sapiens
gggcgtcccacggcagccagctgtgttcagaggggtgggaggtggggcagggtactcacagcgtctgctccgactgatggctgtccgggttaaagcggtacgacgggagctgctctatgt

SEQ ID NO: 34517 - DNA, 120 bp, Homo sapiens
ccccggggcttggcatctcccagccgctcggccaggttcaggagggcctgcatgcgggcaggagacggggtcagcggcgcccagggctgcaggtctcccaaaccccacctcccagcatgg

SEQ ID NO: 34518 - DNA, 120 bp, Homo sapiens
ccacgtccaggtccaggctgatggtgggccccattgctgttggtgacattggcagcatcgagctagagagagacaagtgtgggggcccagggtcaaggtcaggagtggggcacacagagc

SEQ ID NO: 34519 - DNA, 120 bp, Homo sapiens
agccgctctcctgactccctccttgcaaacagagcccagaacgttgcagcggggaagggagcccagctggcgtgcctgtcaggttaaggggggaacgccaggtggcttcagaggccctgg

SEQ ID NO: 34520 - DNA, 120 bp, Homo sapiens
gggcggatgtgcggatacttacaggaagtagggcaggaagctggggtagtagggtggtgggggtgggggtgggggcggcgggggcagtggctgctgcaggcggtatctctgggtgctcag

SEQ ID NO: 34521 - DNA, 120 bp, Homo sapiens
ctccgtggcatcatgtgagaatatggctgcaagaggggccaggtgcaggtcagcccagcaggcctgcctcccagccgccccggagcccaggtgcaagtcagcccggtgggcctgcctccc

SEQ ID NO: 34522 - DNA, 120 bp, Homo sapiens
cgtgaccttggaggagtgacttcgttttctcgcctgtgaaaagggaaacaatacgaccccatggtcgttcagagaatcttcgcttcccggagagtgtgtcccctcccccagccccggtgg

SEQ ID NO: 34523 - DNA, 120 bp, Homo sapiens
gggcgcggaggtagctaatagctgtctggggtcagcagatcttggttccccgctttgggccattctctgaccctcacttttcaagtctgcggaatggaattgatgataccttcttcagga

SEQ ID NO: 34524 - DNA, 120 bp, Homo sapiens
aaacgaggcggccggccgagacatcgggagggattacgttccccgcaacccctgtgtccccatcgctagagccaacctggaccagggcatggccggcaccagctcaggccgcgggtcccg

SEQ ID NO: 34525 - DNA, 120 bp, Homo sapiens
cggcgccggagggtagccccaccgtccccgcctcctgggcgcattaggccagcgaaggctgcaccccgccgcgggccgcgctctggctggcatgcaggtggtggtagtccctgcagaccg

SEQ ID NO: 34526 - DNA, 120 bp, Homo sapiens
ccgcgcctcccacaagctgcacaaccaggtcgtctgcttagcccaggtttagctcctctgcggagggctgatgagacggtggagcggctgcctccgggtctacttagtttttaaagctgc

SEQ ID NO: 34527 - DNA, 120 bp, Homo sapiens
acacgtgcatgcaacatatgatccacgctcacttggggtggcaacttaacatgtaaatgtattacaattacgccctatacatcaaaaggcctttttgtgacatggaaggtgcatgagtaa

SEQ ID NO: 34528 - DNA, 120 bp, Homo sapiens
ctgcggttatggctggtggaacaggggctcagttcgtcagcagctgtgaactggatgagctgtaattgctttaatttggcttttctcgaggccagtgcttatttagctgctagagaaaaa

SEQ ID NO: 34529 - DNA, 120 bp, Homo sapiens
ccacggaatgtctattctttcagtcctgcgaactctattttaacattaacgctggtcggttattgtgtgtcgcctgtaaaagagaagggtataatgaggcatgattgacctcccatcccg

SEQ ID NO: 34530 - DNA, 120 bp, Homo sapiens
ggccgtttagtcagtgggaggcataggattttatttttagtttacagtagcaaatgtgttcctttgtttgctttcaagcttgtttaattcatttttggaaaagttaacatattcaatcag

SEQ ID NO: 34531 - DNA, 120 bp, Homo sapiens
gcccgggcagaaagtcaggccagcccaccgcttatcagctctgtgacttcaagcaacgcccttctcctccttggggaccctgaagaacccacctcctgctcccccagggctatagtgaga

SEQ ID NO: 34532 - DNA, 120 bp, Homo sapiens
aaccgatcaacttctaaacattagaagatttcatgtgacagtaagatttccagcttctcttggaaaactaaaatttggcagtctgagcgtgcttcctgcctggcaacattcagctggagc

SEQ ID NO: 34533 - DNA, 120 bp, Homo sapiens
ccacggtgtcctagacactgaggctgactgtctgctgccatcaatcatggaattctcactgtcgtttttctcacagccggcccttcatgtatgttaccctcctggcctgtagccacctga

SEQ ID NO: 34534 - DNA, 120 bp, Homo sapiens
agtcgagcccttactatgtgcaaatcccacccgcctgccaggcagctgttgtagtcctgttttccagaggaagaaacaggttctaagaggcaagcttggctcagctgataacatgcccct

SEQ ID NO: 34535 - DNA, 120 bp, Homo sapiens
tcccgtccccaacttgtattttccagcctctgagatgggataaagtccagggtagggacagagagcctggtcagggaggtagaaagatgtggggtcaagccccagcttagtcattgacat

SEQ ID NO: 34536 - DNA, 120 bp, Homo sapiens
tttcgcttcagagcttacaaacccttattccacattcatcatttcatttttttctccctacagcccttcaaagtaaacattactggctccatgacacagatgaaattaaggcttggagaa

SEQ ID NO: 34537 - DNA, 120 bp, Homo sapiens
gatcgaaaaaggtccccctgggacaggacaagggtggacaggagcagagactaggcaggagtgaggaggctatggcaggtgttcaggtgagcgatgatgatgcctgaaccacggcggcat

SEQ ID NO: 34538 - DNA, 120 bp, Homo sapiens
ggccgtgctgatacatttgagtccagaactgagttctgccgtggccaaagctgaaggcagacaagggagcccatccacctccagctggtgccggaggtcatgggaggggtgtcggcacat

SEQ ID NO: 34539 - DNA, 120 bp, Homo sapiens
ggacgtacacatcaggtacacaccaggtagggagacacaagggccctaggccaaccctgaggcacgccaacatgaagggactggctgggaaaaggaggctgcagcaaagaatgagaagca

SEQ ID NO: 34540 - DNA, 120 bp, Homo sapiens
aagcggggtggaaggcagccatggtggggggtaggttgatgaggaaataggagtaaggaaatggagtgggcaagtagacaacttcctcagaaagtctgggctttgagagagaaaacagga

SEQ ID NO: 34541 - DNA, 120 bp, Homo sapiens
agtcggctaccacagtgagtgaagcttaatcctgcagggaactcttggaaaatggggtaaatacacattttggaattctcctggctgagggcaagggaggtggggtatttatatcccaac

SEQ ID NO: 34542 - DNA, 120 bp, Homo sapiens
tgccggtaggcacaaaaatgataagggcacccaaagggatgtggtcagagttctggcagtgcctgctatgtggacactggagcctctttaaaatctgggtcctctgccatgctctgcaac

SEQ ID NO: 34543 - DNA, 120 bp, Homo sapiens
tttcgggcaggtaggctattgagaggtgcaagtgaaatcatggtgcccttgaggagccaggaaggacttcccaaaggccgctgcttgtcacattttgttttctctttttaaaaaacacga

SEQ ID NO: 34544 - DNA, 120 bp, Homo sapiens
gctcggcctggccttcccccaccctcagcccagagcctgtttccaggcaacaggatggatgcagggatggtttgaaggggagagagctataaatagggaagggagaaaacaaaaataaag

SEQ ID NO: 34545 - DNA, 120 bp, Homo sapiens
gaccgacgaacagcggggacgggggacagtccccagccctccatcagtgggagagggcagttttcaggttagccacccagcaatggtcctcagggtgctgacatgggtgggaaggcagtc

SEQ ID NO: 34546 - DNA, 120 bp, Homo sapiens
cctcgccccatctgctgactcatattctcctgcccagaacccccctccccgggacccggccccagctccacactgtcgggggacccccagccctgcagccccagaaaccccgccccttac

SEQ ID NO: 34547 - DNA, 120 bp, Homo sapiens
caccgacgtagaggacgccctccttggtcttctccgccgcctcggtgaccccctgcttggttttctccgcggctgccacaacgccctccttggccatggacaggcccttcatgaacacgt

SEQ ID NO: 34548 - DNA, 120 bp, Homo sapiens
tggcggcctggggagggcgatacacgggcaccggtgcactggccccgcactctcaccccagcccctcccgcgggacgcagatgcccccctactcccgagaccgcggcgcccttctggacc

SEQ ID NO: 34549 - DNA, 120 bp, Homo sapiens
tcccgctttccccccatcccaccccactccccagtgcgaagcctcagggccgcggagagtcctagcgtccttgaaacctggggacgcgggaggggccactgcctcggttatccgggccct

SEQ ID NO: 34550 - DNA, 120 bp, Homo sapiens
ccccgtcgaaccggagtgctgggttcggcgcgaatatccaggacccgcctgtacacgcacggcacagtcacacggtcatgcacacaaacatacaccacggacaagctcacgtgcacacac

SEQ ID NO: 34551 - DNA, 120 bp, Homo sapiens
acacgcagacgctccaacgcgcacgaataccccgacccacatgggcgcggacacacgtccccacagccgcccgggcagctgcaaacaccggagcatactcacatactccggggtgcacac

SEQ ID NO: 34552 - DNA, 120 bp, Homo sapiens
tgacgcgcatcccccgggtctccctccattttccatccccttccccagctccctcctgtcgccccagtcccctctccatcctcatcccgttccccatccccggcgcgcggccgcctcacc

SEQ ID NO: 34553 - DNA, 120 bp, Homo sapiens
atgcggggccggggctggggatggagcggcggctgcggcgggcggacgcgggggctccgctaggccaggccggggtggaccaggggccggaggggggatagggccgggatcaggcgctcg

SEQ ID NO: 34554 - DNA, 120 bp, Homo sapiens
ggtcgcgggtcctgagcaggagcgcagcagtgcccgggtctcgggtgcgtagccagccaccgctcgttcctcgcgccctgcgagctcgcgcgctccggctccggctccggctccggcgct

SEQ ID NO: 34555 - DNA, 120 bp, Homo sapiens
ctgcggcagctctgagctcagcgcccccgctggcggccgcgccgccccttcggcctgactgacagggggcggggagggtgacagcgcgtagccgatgagcctcccggggcgggcccggga

SEQ ID NO: 34556 - DNA, 120 bp, Homo sapiens
ggacgcgcccctgggggccccggccgtaagactcgcgtagtctgttgggagttgagggagggggacaacgcggcgtgtgaagagtggggaagaaatcacgcgactggatttggagttctg

SEQ ID NO: 34557 - DNA, 120 bp, Homo sapiens
gctcgaatctcagctgtgctttttattaaccgtgggaccttgagctactcggctctcctttctgaatgacagtttcctcctctgtaaaacaggaatggttaattcaacgaatgtttactg

SEQ ID NO: 34558 - DNA, 120 bp, Homo sapiens
gagcgcttagtccagtggtgcaggtttaaggctggaggcagcggaaaaggaaaacaaggttcctggtctcgggaagcttaccatgggggtgtctgtacgcgtgtgtgttcgtgcgctcag

SEQ ID NO: 34559 - DNA, 120 bp, Homo sapiens
aaacggatcaacatccaaagcaacaaggtcattacagcttgtaagttgtgaaggtaacggtgatgtaacacggggactagaggaggggtgcttgagacagggtgctcagggaaggcctct

SEQ ID NO: 34560 - DNA, 120 bp, Homo sapiens
ccacgatgggtgaggacaagatccatagagagtgcaagtgcaaaggctccaaggcaggactgtgctgacaaaagacagcgcagctggagagccaggatggagggaggtggagaacaaaac

SEQ ID NO: 34561 - DNA, 120 bp, Homo sapiens
ttacggtggggactgtcaaaatgatcacagaatgccaggcacacagtaggccctcagttggttctatgatagaattatgcccaagaagctgtagtatcccagaggaaagggactctgaca

SEQ ID NO: 34562 - DNA, 120 bp, Homo sapiens
catcgagcaggctagggagaaagagaattttaggctgtgggtacagcatgggcaaaggcactgtggccagaaatgcagggtgtgtaagtgacaggtaattaggcgagggggccaccagca

SEQ ID NO: 34563 - DNA, 120 bp, Homo sapiens
ggccgctggtagaactgcaaattggcgcagacattttggaaggcaatctggcaatgtttaccaagcataaatgcatgcgcctttggagccaacagctccccttccaggaattgatcccgt

SEQ ID NO: 34564 - DNA, 120 bp, Homo sapiens
gtgcgactctagccatacatgcacacaaagatacctgtgcaaggatgttcactgtagcatgtttttttgtagcaaaaaactgaaaatgatctaaatgatcatctgtacaggactggctag

SEQ ID NO: 34565 - DNA, 120 bp, Homo sapiens
ccacggtcagggaagggaaggtgataaaggccttggccgtggctatgtgctgaggggaaggagcctgcagataaagcaggtgggtggggaggtcgcaggaggtggggtcatggccctggg

SEQ ID NO: 34566 - DNA, 120 bp, Homo sapiens
gtacgacagcctttccccctctgagactgcacgcccagggacctgcccagggtcaggtgtgagagtgaccagcctggacatccagggctcttcccagtagggaattgaggcaggaaggtg

SEQ ID NO: 34567 - DNA, 120 bp, Homo sapiens
ccccggtggggagtctagctggtgttctgaaggcccaggcagagctgtggccatggggcaaagccactggcacaggccagatcctaggtggatcctgctagggatgattgagattcctgt

SEQ ID NO: 34568 - DNA, 120 bp, Homo sapiens
ggtcgtgagccgtggaagctgactctggcaggcggaggttaaaggggtaggatggggctgggctggggaggagtgttgagggcggggccgcagtcacacggctttagggtagcaggagag

SEQ ID NO: 34569 - DNA, 120 bp, Homo sapiens
cttcggtcaggtgtagaggctcagtatactggcgccgtcgctacccccgctgacacagctgctattgctccttggcaggagtgtcttggccaccgtctgctccaatttggagttccagga

SEQ ID NO: 34570 - DNA, 120 bp, Homo sapiens
ccccggatcccgttcacagcccttgtgcctcttcctctctccgctggaaaggccctggctaccggggaaggatgaggggggagggtcctggggctgctcccagccctgagctctttgttg

SEQ ID NO: 34571 - DNA, 120 bp, Homo sapiens
tatcggcctctgggcctggggtgagaaggtaaggcagcgggcgggcgtggagctggtatgggacgaggtggtgggaaggtcagctccccacacctgcctctgctgcccggcacagggcgt

SEQ ID NO: 34572 - DNA, 120 bp, Homo sapiens
tctcgaacatctcagcgctgacagatctgggaggccttgaccccgtgtggctgtttgtggtagttggaggcgtcatgtcggtgctgggctttgctggctgcattggggccctccgggaga

SEQ ID NO: 34573 - DNA, 120 bp, Homo sapiens
aatcgtcatcgttagattcatgttgtctatatttactaggatcctttccgtggtatggtaagtgaccgagacctggtggcccaagcataaaatatttattgactcaaataagaaaagtcc

SEQ ID NO: 34574 - DNA, 120 bp, Homo sapiens
tgccggtgcattttgatccaggggctgccacagtttcacttggcctggtttctccctgtttctcgggctccccccgtttggctccattcccaggtggcaggaggctcaggaacagagccg

SEQ ID NO: 34575 - DNA, 120 bp, Homo sapiens
atccgaaccttggaaactaaaggtttgcatggaggatggtttttcagagacagcagggtgtgattaccagacaaagggaattggatgggtaggtaacaacagatgcctattaccatcata

SEQ ID NO: 34576 - DNA, 120 bp, Homo sapiens
gggcgcctctgggtcttggtggaggtagggatggagcccttccctgtggcacacccaagccctgggaggtcaccagagccctgcgtttccaacccctactgtctgtatgcccaaccccag

SEQ ID NO: 34577 - DNA, 120 bp, Homo sapiens
ctccgtgttcctcggtctcatcttcttcctggagctggcaacagggatcctggcctttgtcttcaaggactggattcgagaccagctcaacctcttcatcaacaacaacgtcaaggccta

SEQ ID NO: 34578 - DNA, 120 bp, Homo sapiens
taccgggacgacattgacctccagaacctcattgactttgctcaggaatacgtgagtccagtgtccagcctgggacacctgtaggaggcgccttcctggcagacgaatgagggagcaagt

SEQ ID NO: 34579 - DNA, 120 bp, Homo sapiens
tagcgggccccaggagagagacccaggagtgtcctcgtccgaggagagccagcccctgctgatccttatgggtccccatttgcctagtgccatagggccacggccttgggaaacagaggg

SEQ ID NO: 34580 - DNA, 120 bp, Homo sapiens
ccacgctagcagctcccaggccagggcctacgacacacgggagaatggaggaaatgtgacataaaatatagatttctacttctgctaaaccttgggcccacggtattggctgcagctatg

SEQ ID NO: 34581 - DNA, 120 bp, Homo sapiens
tctcgcccactcacccctaaccacaaacacacagtcacacactgtcacccacagtcacaaccacacctagtcacacactcgcaggcacacttgatcacacctacacctacacatggtccc

SEQ ID NO: 34582 - DNA, 120 bp, Homo sapiens
acccgatcacacccacacacggcgacaggcccttggcaccattcaccaccaagagtcagctctggatccagaggtgaagcagagctggtgcctgcttcaagcagctctcaacccagggca

SEQ ID NO: 34583 - DNA, 120 bp, Homo sapiens
tgccggacccagagccaggccctgaggattcggcggggaagaaagctgggacctgtcctctcagggctggcagtcgggaagagacagatggtgaacaagcagaacaaacaaatgtgtgca

SEQ ID NO: 34584 - DNA, 120 bp, Homo sapiens
atacgtgtgtatgcaaaattgtacattgtggtaagagtcaaaatgaagggtggagaatgggaaggcctctgcgtggagagcttgaagcctcccaaaggaggagaaggaagagaagggaga

SEQ ID NO: 34585 - DNA, 120 bp, Homo sapiens
tggcgctgagcaggtgccaggaggcaggtggaggctgagccctgccctgggaccagcacatgcagggcatgtggcaggcctgactcctccagctctctggctcggccacggggcctgcct

SEQ ID NO: 34586 - DNA, 120 bp, Homo sapiens
tgccgagcttgagctcccccagccctgtgggctgctctccagcccctgcgctgctgctcagtgagggctgtgtgcacccgtgtgccccacaagaccatggttcatggcagatcccaaact

SEQ ID NO: 34587 - DNA, 120 bp, Homo sapiens
actcgccattgctcctgcctaggggacagcttagggtgttctgggtgggggtgatggggtgtgggatgatgccagccggcatggaggaaatggggtggcacggctatgggggtggcagga

SEQ ID NO: 34588 - DNA, 120 bp, Homo sapiens
cagcggtctctgctgccacagggcttggcccagcgcctgcctctcaggtagtctggaggaagccacagtcattgaaccagtatccttgtcccactccctccctttttctagcctctcttg

SEQ ID NO: 34589 - DNA, 120 bp, Homo sapiens
ggtcggggaagggggagctcagtgtcccctcccttgcacccctctgcctccaccagcctggaggttgggcccaggcctgtgggggtggggaggtggccacccacttggctgtcccagccc

SEQ ID NO: 34590 - DNA, 120 bp, Homo sapiens
ctgcggagcccgaggccccaatgactggaacctcaatatctacttcaactgcactgacttgaaccccagccgggagcgctgcggggtgcccttctcctgctgcgtcagggaccctgcggt

SEQ ID NO: 34591 - DNA, 120 bp, Homo sapiens
ccccgctccgctctgccctgctctgggggcgtggatgctgggggacgtcattttacatgggtggcactgaggcctgttggggcgcggctgctttccctgttcagcaagacctgtcttttt

SEQ ID NO: 34592 - DNA, 120 bp, Homo sapiens
tatcgtagtgagatggaaacagcaggaccctggggcacagggatggggactggcctggaggcctccctgcaccctatacctctacataaacacagccgcagccattgtctgctcctggcc

SEQ ID NO: 34593 - DNA, 120 bp, Homo sapiens
tgacgggggttgcctgggtcattgccagccagcaccccactgggccaccgttgcagggtagcagggagtggggacctctgtccctttacgactttcttcagggcagaaacctctcctgat

SEQ ID NO: 34594 - DNA, 120 bp, Homo sapiens
tcccgcaacctcactctagtagagcctgtgcctgcctactagcgctctggggttcggagagtttgggaatttctcagagccaactggctcaggcttgggaaggctggctgctgccctcag

SEQ ID NO: 34595 - DNA, 120 bp, Homo sapiens
ctccgcctcatcagctatgtgaaggggtgtgtgtggagtgatcctgccgccccctccctgggctcgtccagagatctcaaactccgatgcccctggggccacgtatgttgtataaatgga

SEQ ID NO: 34596 - DNA, 120 bp, Homo sapiens
catcgtgatgagagaaagttcgcacaatctagtcggtaacagccactttccttgagaccaagagagtgcggtggggatgggggggagagcacgggtccccgtctgacagtggccgctgcc

SEQ ID NO: 34597 - DNA, 120 bp, Homo sapiens
caccgctggggtcctggctgctctgtcattgagggatgctgggcactgctgccgggtggccagggtatggggcatgtgcccagcaatgtggctccttggccccgctggccagtgtcctgg

SEQ ID NO: 34598 - DNA, 120 bp, Homo sapiens
aggcgctggctgtgagtggtttgtacatgctacaataaatgcagctggcagcattgtgcatgtgtcttgcattttcactttcattttatgcctcaaaccacacaacaccctgtgcggtgg

SEQ ID NO: 34599 - DNA, 120 bp, Homo sapiens
ctccgagaggggagggaggttgcctggagcgcacagctgggaggaggcacaccaatctgaccctcctgctggagtttcgcaccacacctgtcctgtgtgtctgatatatttgggtaaaac

SEQ ID NO: 34600 - DNA, 120 bp, Homo sapiens
gggcggtacattcatcccccaagtgtgagttgaacatcaactcaggggtggagatacagagaagggcaaggtcttgcctgtgtgctgcattcttgtggggaagacatggaaagcaagctg

SEQ ID NO: 34601 - DNA, 120 bp, Homo sapiens
aggcgagcggaggggcaccatctctgggctgctctgggggaacgatgttctaggttttggtaccagcttctgtagaggcctggaagccagcgtgggctccatgtgagggagcctggggtg

SEQ ID NO: 34602 - DNA, 120 bp, Homo sapiens
aaacggcataagcacaaggaagtggtgtaaccaagatatgtttggaaacaagattgaagagatgggatgggagtgatgagtaggagtggttgaggccctggctgggaacacggagttctc

SEQ ID NO: 34603 - DNA, 120 bp, Homo sapiens
gtacgcctggggaaggataagcccccaggggcagctgcagctctgatctcgggattggtggggctgaacctcatttcctgggaggggcaaggtccccaggtgccctgtgccctgagaagg

SEQ ID NO: 34604 - DNA, 120 bp, Homo sapiens
gagcggtggtggctcaacagagggcctgtgacagcccagcgagctccccagccccagtgccctgtagggagcggccaagttctcaaggagggcctggaagggagtcccagttgtgacaag

SEQ ID NO: 34605 - DNA, 120 bp, Homo sapiens
ggacgcagacagctcatcggctgccaactcggaacagagatgacagccaagaaccacatgtcccagtgtatgtcttgggggtgccagcagggatgacatcgaccgatgacccatctgcca

SEQ ID NO: 34606 - DNA, 120 bp, Homo sapiens
aaacggaggttggaaaggaagcatgcatatagtaggaaagtaaggtggtggttttggcacacctgcgtgagtggcctgaacattcacacccacaatccagggctgaatgagggacagtga

SEQ ID NO: 34607 - DNA, 120 bp, Homo sapiens
ccccgtccctggtcatgtgatgggcactggtgtgtacctgagcatttcctcctcgctctccctcctgggggtaggtgtcaggggaacagagagggctgggtgagtggtgaacacagccat

SEQ ID NO: 34608 - DNA, 120 bp, Homo sapiens
tcccgggtgcctgggtgacctggtggccagaggagagggagaggcctggaggaggctgggacagaggaaggctcagaggaggcactgggcggtggtcagcagacttaagagccagaatcc

SEQ ID NO: 34609 - DNA, 120 bp, Homo sapiens
ttccggttcctgggcatattccctaagcaatcggagcctccggtcctcaccccaaacaaggtgggctccacatgtctgcctggcccacatctttctccttcctggttctcacttgggaaa

SEQ ID NO: 34610 - DNA, 120 bp, Homo sapiens
attcgactttacctgaacagcttcaaaccactctcagtaaccagggtgatgggctctactgattggccagacatagggtatgtgcccacccctctgagtgagcgagcagcttcttccaaa

SEQ ID NO: 34611 - DNA, 120 bp, Homo sapiens
ggacgatgcctgcaggaaaaaacaacagctgtcccctacttggggagggagttggggggcgctggaagcacagaaggcagtgagtgccaagcagagaggaaggctgctgctgggggagga

SEQ ID NO: 34612 - DNA, 120 bp, Homo sapiens
agccgatgggcagccctgcgggcaggcagagggagaagctggggtccatggcccgaagcgcagcttgttgctgctcgggagaagaagccctgtctgggacctacagggacagacccctta

SEQ ID NO: 34613 - DNA, 120 bp, Homo sapiens
acccgcggtgcctctccagactcagagtctgacacctgcccctctggcagacgcgatctccactgtgctgggaagctgctgctggcttccgtgtcttcctggggttgccccagatggcca

SEQ ID NO: 34614 - DNA, 120 bp, Homo sapiens
gggcgcacctgaatctggccctcttaggggggccgagacgcagcgtgaagcgggcagaggccgtcttggctcccaggggcttgccttctaatgaggccaaagccaggtgcttttccttcc

SEQ ID NO: 34615 - DNA, 120 bp, Homo sapiens
gcacgggccctcaggaaatgtaggtggggaggccagtgattcgggaggaaaatggaccccccctgccctcggggagaggtgctgctttcagtacggtcctgcctccatctggctgggtga

SEQ ID NO: 34616 - DNA, 120 bp, Homo sapiens
agccgagccaccaggtgctgcagcaggtgttgggggctgcccattctgacagagctgccaggcaagaaacttcaacctgctactcctggagctgggagcccacctgggagctccaggtgc

SEQ ID NO: 34617 - DNA, 120 bp, Homo sapiens
ggccggcccgaggtccctgagggttctggaggtctcttgagtgcagagctggctctgtgggtacacaaggacatgtgtcggggaagccgggaggagctgccctggggatggccaggcctg

SEQ ID NO: 34618 - DNA, 120 bp, Homo sapiens
ctccgtctggctgctcctctcccgctctgctgcatgctggcctccgcaagatggattttcctggctgtgccaatcttgctgccacctgttcgcgctgtgctggagccagcaaagtggctc

SEQ ID NO: 34619 - DNA, 120 bp, Homo sapiens
gaacggtggccaagcctcgtcgccccccttgctcccttcctttgttgcagcggcagcagctcggccgagccatcctgtcacctgctgtcagctgggcagcccctgctcttccccaccaac

SEQ ID NO: 34620 - DNA, 120 bp, Homo sapiens
cttcgtggccacgttgcagggtggggcccaggcaggcacttcacagcagccctcagcaccccaccctccgtccctggcccagactgaatccccttccctctcccccactccccaagggat

SEQ ID NO: 34621 - DNA, 120 bp, Homo sapiens
ccacgacagggcagggtggcatgggacacctccaggtagtgcaacctccgaacctccgggagagggagggctctggaaactccctgcaccagcaacccaacccgcgcccgaggctggagt

SEQ ID NO: 34622 - DNA, 120 bp, Homo sapiens
acacgttggctccaccccggtttcctcagctgccaatgggctgagtctgtgcctgtgcaccccacaatgtcactgtgaagaacaaacagagggttagtgccttaaactccttcaagaaca

SEQ ID NO: 34623 - DNA, 120 bp, Homo sapiens
gtgcgtgggatagagaaatgcaaactgtaaagggctgtgcagctgaggagctgtttttgcttttctcagtggcgtcgaggccccaggggccaaaggctgtgcatgccgctctcagggaga

SEQ ID NO: 34624 - DNA, 120 bp, Homo sapiens
atgcgggcttgtgcctgtcttcagcaacactggctccagctgagggggcatctgacagcagagagacaggcacatcagaagatagagcgagacacaggcagacagacaataaacacagat

SEQ ID NO: 34625 - DNA, 120 bp, Homo sapiens
ggccgatggctctcctgatggaagcagacaggcagcggaggtggtggcagggttccagtagcctggggcctttctctcctccaccaggatccttcccagggaaggatctatcccttccct

SEQ ID NO: 34626 - DNA, 120 bp, Homo sapiens
tcacgagcccatgggcacacaggtacagtgtccactcatgctcacaacagtgcctcttgcagttatggagggggctgggtattgggggttggactctccaaattccagagacgctactga

SEQ ID NO: 34627 - DNA, 120 bp, Homo sapiens
agcgccaatttatattatcgaccggccccgtaggcgtttgagtttgcgaccctgccctcaccctgctcattcccctcccgacccagactaggaccctctctttttccgatcactcccccc

SEQ ID NO: 34628 - DNA, 120 bp, Homo sapiens
caccgcacgcggctgtcatttcctttctccttcaaggcagccctctgtttattttaacccgattagggaatgggggtggggcacaggagactccagcagcggtcactgctggaggctcca

SEQ ID NO: 34629 - DNA, 120 bp, Homo sapiens
agacgacgtgacttgaccaaggtcacagagctggaaggtgaagtcgcctggaccctacccccggtctccctagctgccaaagcccagctcgttcctttacacccacgtcgcgggcgccgt

SEQ ID NO: 34630 - DNA, 120 bp, Homo sapiens
gtgcgctctcggggctcaaacaccgcgcgcccagtcgggtgtgctgcgcctgaaggttgttttccttcggcgaacggcgccgaggggttagggaaaccttgggtcatggtgtgaggcgcg

SEQ ID NO: 34631 - DNA, 120 bp, Homo sapiens
ctgcgaggctgggactgcgggtgtccccgagtctggcctgccagctctggtggccagggcacctctgcgcgcgggccagggccccggggctctcccgcagtcccctaaccaagccgcggg

SEQ ID NO: 34632 - DNA, 120 bp, Homo sapiens
cagcgtaccgcggcgcccggacgaccccggagcgcggccgcgaggaaagggcgggggagaggactgcagcggaacctgcccggggcacccctgccctgggcggctctccgcaggctggcg

SEQ ID NO: 34633 - DNA, 120 bp, Homo sapiens
cgccgcgccggggtcgccgcagccccgggcccctcccgggccacctgtgcgcagactggcgggcccgcgagagcccggatccggagcaccgatccactccgggtttcagactcctgcccc

SEQ ID NO: 34634 - DNA, 120 bp, Homo sapiens
catcgctggagagccaggtggctgctggggcagagccaaaagtggttgggaggcagaactggggactgagtcccaacccctaggccaggaattgagggcccacttctgctggcaaataac

SEQ ID NO: 34635 - DNA, 120 bp, Homo sapiens
gggcgtccagaaggtcagggtcccagtgcccaaggcccacccccttcctgggcactgatgtcaggtgcgacaggcagcttcagaccccaggggcccagaaccccaggcacatggaggagg

SEQ ID NO: 34636 - DNA, 120 bp, Homo sapiens
gcacgcctcctggccctgcatccagctcctccctgcatggcttcagtttccttgtctgtacaactgactcaaaaagaacccacctcctaggattttgtgcagattagacgggctgaagtg

SEQ ID NO: 34637 - DNA, 120 bp, Homo sapiens
acacgttagcaatgatgatgccatggcagagggcactgttcagtcctctccttcgggaagtgggggagtccttggctgtctttgtggaagacggagcgactggggagccaggagggaggg

SEQ ID NO: 34638 - DNA, 120 bp, Homo sapiens
gagcgccaagggccagccgtcaccctgactggtggggcccccagagccgggcctctcccacactgggatatcagagctgtgtccgtctggaaggctcagggtcaccttgagctccaggca

SEQ ID NO: 34639 - DNA, 120 bp, Homo sapiens
ggccgggggaatctgtctagattgacagcacctgaagcgccttggggagggaggtccggaccctgcatcccacctcggccctaggtgtccccagccagggcggcaggtggaactcccgcg

SEQ ID NO: 34640 - DNA, 120 bp, Homo sapiens
ccccgggctgatctcgctgcgaaagggaggggaacgtccccataacccgagcacctcctgcaggccggggcttccgatgcacccgtgtcgccattcccgttttacagatgaggccgagca

SEQ ID NO: 34641 - DNA, 120 bp, Homo sapiens
caccgcaggaagtggcagagctgggaccttattgggcagctactactctgcccgatctcccccaccacacaccacacccaccttgtgggctctcctatgtggctatttactgccagggcc

SEQ ID NO: 34642 - DNA, 120 bp, Homo sapiens
aggcgccggccaaggatcccaaggcaggaaagcgccttccttccccagttttccctgggccgtgtgaccacataattaccctggattccattctatttaattgcagcttattaagttcta

SEQ ID NO: 34643 - DNA, 120 bp, Homo sapiens
aggcgaggcccctcagcaggaaggggcccttggttggggccataggagcccgtccccccatcacagcactccccccgggagtttctgagttccctttgcggtgggttcaggtacttagcg

SEQ ID NO: 34644 - DNA, 120 bp, Homo sapiens
ctgcgtttgcgacatcttggctcagctcctgcccagtgctaggccctgtgcctggtgctgggaccggtggcaagacagatgtggtcctgctgttgtgacatgttttacggaagagtaacc

SEQ ID NO: 34645 - DNA, 120 bp, Homo sapiens
aggcgtgaggaggaaaacagactgggaaaggggagggagaggaagagctccttcacacaggccaggtcctcggtgacagtgactccgcgggagcagagatgggacgggttagagcaggca

SEQ ID NO: 34646 - DNA, 120 bp, Homo sapiens
gagcggtgccgcccccgccctgcccctttgttctttgtggttcagcctgtctgcatgtcctcctcgtgactcctgtgtccgtccttgtgaccaggcccctggagcccactggggaagagg

SEQ ID NO: 34647 - DNA, 120 bp, Homo sapiens
ctccgatctcggggaggtggctgctgcttcagtgacaccttcatgcacacgttactatggaaaccagagtgccgtgcttgcctgtatgtgagcgtaggtcgggggagcagccctcccttc

SEQ ID NO: 34648 - DNA, 120 bp, Homo sapiens
atccggcacgctcctagacaggagacactgccctctccccaccttcgtgcattcaccacacactgggcatgggccctgggactctgggctcagacctgtccctgccgtccagggagtcct

SEQ ID NO: 34649 - DNA, 120 bp, Homo sapiens
actcgactgtaaaggcccctggggtccagcccctgcttcctgtctgaccaaacacgtctcgccctcactcactctgcccaggccacactggcctccctgctgtcctcaaacaagcccagc

SEQ ID NO: 34650 - DNA, 120 bp, Homo sapiens
gggcgctgctcagatggcacctgcctgagccccgctccctcgagagccctctcacccgcccctttctgaaagtctgccccttctaccttctctgctgcacttagtccgccccttctacct

SEQ ID NO: 34651 - DNA, 120 bp, Homo sapiens
agacggggactgtgttgtcttgcttgcgctggatcccggtgcccggaacagttcctggcacacagcaggcactcaataattatttgttgaatggatacgtttcatgtcttggaagaaggt

SEQ ID NO: 34652 - DNA, 120 bp, Homo sapiens
atccgtcccaggctcagttcagtccaaggctccttgcccaggggtctcttgcctcccattgccaccggccccggggactcatctgcttcccctcctttctgtagctgccacccccgttgg

SEQ ID NO: 34653 - DNA, 120 bp, Homo sapiens
acacgcacacacacacacatgcatgccacacacacatgcgcacacacacacacgccttgcccctcctccttgctattcctgagaagatgtgtggtttgggggttgcccagtttgctgctc

SEQ ID NO: 34654 - DNA, 120 bp, Homo sapiens
tgccgagcaggggcaccagctccagctgacgtgggcagccagttctctcctgagagaggcagggccagccagtgggctctggggctcaccgcaaatggggttcccacttcagggcttgag

SEQ ID NO: 34655 - DNA, 120 bp, Homo sapiens
aagcgcccgtcaggaatctgctagtcagtgaatgaggtcttctaacttaattccaagcgggcagccaggccaggtcacgtcccttgccagtgggaaagctgtgacatggcagaaggagcc

SEQ ID NO: 34656 - DNA, 120 bp, Homo sapiens
ccacgagccactgcaaccaaggtgtgtccgccctggcagtgttctcacacgcccgtccgtcagtggccccagaggcagcagcggtaggcaccccaccccgaggccccagttgctaatgcc

SEQ ID NO: 34657 - DNA, 120 bp, Homo sapiens
gcccgcattaagcagccttgtgctgcacggcatggaccgaggatgcacagtctgggggtggggacaaagcctcctgcctgcttctcctgtgacaacagctccagcaccagcgaggacagg

SEQ ID NO: 34658 - DNA, 120 bp, Homo sapiens
gagcgcacagcccctcacatcaaagatggggtagggccgggtctgcagcccccgcctcaggcactgccctccaggagcttgtggggctgaagggcacccctcaccaaggcactgcgtgga

SEQ ID NO: 34659 - DNA, 120 bp, Homo sapiens
gagcgcttaaaggtagtgctgttctcccaagctgagccgcctgggccatgggtgaggctcctgaaggagggccgggctccccacagcaccacgggggatggaggaaccattaacagactt

SEQ ID NO: 34660 - DNA, 120 bp, Homo sapiens
cctcgttctcagcctgcccaccccaccccctgagagtgtccacactgggtgtcttagagaacggggcaggtggtgcccagaacggagggaagcggcccagctaccatgatctcaccagag

SEQ ID NO: 34661 - DNA, 120 bp, Homo sapiens
ggccggcgacagggacaaagtgatagaaaaatctggacacccagtgtgagagcccagaggcttgtgaggaggggtctgggaagcagtcggagaaagtcatgttagagaaattaagaggga

SEQ ID NO: 34662 - DNA, 120 bp, Homo sapiens
tgccggctcagctgggcggccgctcttcccgcaatgcagccctaattgaatttcgctgttaacaatggaaacacattggctgccggcctctctctccctttctgataagccaatgacccg

SEQ ID NO: 34663 - DNA, 120 bp, Homo sapiens
agacggggcaggaggagggttgctgcccccgctcctgagttgtcagagggtcctcagcctgcctcaggccagatatggcagaaggtggggggctgagtccagcctggagcggagtccccc

SEQ ID NO: 34664 - DNA, 120 bp, Homo sapiens
gagcgggtcctagacccccagctccccctctgctggctgctctctcaccctcttccaaagtttctccctagtgcataggcgccccagctcacccttcggatgcagacagtcccgggtccc

SEQ ID NO: 34665 - DNA, 120 bp, Homo sapiens
agacgacatccccatcccggcacgtgggaaaccctaagtcccagggcgctagcatcatactacataatcactgcaattatattgttaatgactgttattatattatcacgtcaggatcta

SEQ ID NO: 34666 - DNA, 120 bp, Homo sapiens
ctgcgccttgcttatttctgagtcccagaagctggcacattaccaggtatgccatcatacttttagaactgcgtttcttttcagacctggtgccaaaccactaattctctctggcttgca

SEQ ID NO: 34667 - DNA, 120 bp, Homo sapiens
tcacgtcattatcctcctccctcaccttccatggctgcttactgccttccagataaagcttcaactctttaacttaaccaaccaagccctgaagggtgaggctctgtgtctgccccatcc

SEQ ID NO: 34668 - DNA, 120 bp, Homo sapiens
ccccggcacatacactagacatgcttgttgtggtcagttcctctgaagcctggtgtttctctggactctgctggaatctctgcctcttccccttcttgcctggctattcctgaatatcct

SEQ ID NO: 34669 - DNA, 120 bp, Homo sapiens
tgccgagagctgttgagaaaggctgtgtgtcagatcctcttcagacatctgggaaagcagcagccccttcagaggacccctggcaagctgttaaatcactcacccaggccagacttcttt

SEQ ID NO: 34670 - DNA, 120 bp, Homo sapiens
ccccgggcctggtgaagcaggcgaagcagatggtcggaggccagcaactacctgcacttgccgccaagagtgggcaatcttttaggtctctcgggaaggccccagcctccctccccactg

SEQ ID NO: 34671 - DNA, 120 bp, Homo sapiens
tcacgggcagggctctggcccatagtggctggacagacactggcacagtcttgctggtctgctgggagcacacagacattggcacagacttgctggtctcttggaagagggcaagacccc

SEQ ID NO: 34672 - DNA, 120 bp, Homo sapiens
ccccgaacactttcccactgttattctttcctcatatcccaacactcagaactcttgtgacattagccagtgggggcttatggttgtgtgaaccatgtatgaaaatccagtgggccccaa

SEQ ID NO: 34673 - DNA, 120 bp, Homo sapiens
catcgtgaaataaaaagtccactctggagtcaagtatggaattcaattccgctggtcaggttggaaggtataggggctctcaaagcgatttccccaaccagacagagccccattgagggc

SEQ ID NO: 34674 - DNA, 120 bp, Homo sapiens
tggcgatttcctgagcattcacgtgttctaggccgggtgctagtcactgatgagagatacaggcctcatccctgtgagcctggattccaaggctttcaggaacctttgaccaggaagtaa

SEQ ID NO: 34675 - DNA, 120 bp, Homo sapiens
ctgcggtgtgcatgggtgcgtgtgcatgcgcgcacactcacagaggtctcctctatagatgcaagggtgctgcattgaggccagcaaggctgttggctgtggggtcgccgctgctgcttt

SEQ ID NO: 34676 - DNA, 120 bp, Homo sapiens
agtcgggctctgtgcgaatgtagatttccagcagtggaagaaggcatttggcaagcttctctttctttgcttttgtttctacctatttttctctttgtacatgaatccaccccatcccta

SEQ ID NO: 34677 - DNA, 120 bp, Homo sapiens
cctcgggcagtggacatagggaatctctggcaagctctgagctagacacaccagcttcaggaagagtaccagatcctgatgggaaatttcttttccccattccttttccctcctgagtgg

SEQ ID NO: 34678 - DNA, 120 bp, Homo sapiens
cttcgcctccctgagaattgctgtgctctgtattgagagcacctgcctgctgacttagctcaaaggcaagccagaacccttccctgaagactggcaagaggtggtgtttagagcaacgtc

SEQ ID NO: 34679 - DNA, 120 bp, Homo sapiens
ccccggccctaacgtctcctggccattatctcttagttatggctttcacgctctcaataggattctgtatttggtcccaatttcctcaagttcttattgaggttactcccatcaattcca

SEQ ID NO: 34680 - DNA, 120 bp, Homo sapiens
ctccgttccatgggccagcacaggcaggcgccactctgctgacatgaggacctggggtagctcagacatttgactacccaagcccagaaaggagctgggtccagcccttacggggaattc

SEQ ID NO: 34681 - DNA, 120 bp, Homo sapiens
ccacgcccttgtcctctgtcaaaaagagaggtggcagctcagcaccattctgttgggatcaggtaactcaggaaaggggctagatgctgtgggcctagagtaagtctccataaaggctgg

SEQ ID NO: 34682 - DNA, 120 bp, Homo sapiens
tgacgtaatcctctgccactttctggaagagctcgtctggcaggaaaaatgatgatcagcgagggcccaatgccagtagccctgggatctcccagtgacccagccctctgtgccctattc

SEQ ID NO: 34683 - DNA, 120 bp, Homo sapiens
tagcgctcagagcctgctgtgtcctaaagagtaaggcctgagtcaaacttaaggccacgttctccagaccccgctattttccagataaggaaacgggtctatgagaaatgggtctgtgag

SEQ ID NO: 34684 - DNA, 120 bp, Homo sapiens
gtccgggcgcagtggggggcctcacctggatgtgcatcctggcacggcgcagcaggctcagcgtggtgtaccgggcacagtcggcccccaggggcatctgctgcttcagccgctccaggc

SEQ ID NO: 34685 - DNA, 120 bp, Homo sapiens
caccgcttcaactgggccctcctgtggggaagaggtctggagggcagtgccagccccaccttgccggccacaggaatggcaggggagggaaggccagagggcagtggcccctgggggctg

SEQ ID NO: 34686 - DNA, 120 bp, Homo sapiens
tggcgctgtcagggcaggactgggactcacctgcgcttctccagttcattgtgcactgacctgccaatgccagagaggatgaggtgaaggggaatcagctactgcccatgccccaatccc

SEQ ID NO: 34687 - DNA, 120 bp, Homo sapiens
agccggtactggagggaggggcattcaaataggagggaacagcatatgcaaagggctggggagaggagagaagaggaggaagccagcgggggaggtgagtggcctgatgtgtggggtgcg

SEQ ID NO: 34688 - DNA, 120 bp, Homo sapiens
gtgcgagtggaagcgggaccccaactgctgttggcagttcccggcacatctagaggtgctcaagaaatagtccttgaatgaatagaaaggtgtgagtgtgtttggagagtggggagatgg

SEQ ID NO: 34689 - DNA, 120 bp, Homo sapiens
gaacgcttcctggagcgggacacctggcccaaaagatgcaagcaacaagtgggcagaggagggcccgaccaggggcggcgcccacccccacccccactcccgccgcccccggcctcctca

SEQ ID NO: 34690 - DNA, 120 bp, Homo sapiens
caccgcccgctgtcctgcgcgccaggagcctgggggggtcgcttcttcctcctgtggatggggcctggactgcgatgcgggcacagggacgcataaccatgctcggcctctgccagagag

SEQ ID NO: 34691 - DNA, 120 bp, Homo sapiens
acacgcatacctgaatgtctgtgtgtgcacagccatgcgggcaagttatccatctgtctgcacacctggccacatgcatggaaggagcctgtaggtgtctggggctagaggtaccctgca

SEQ ID NO: 34692 - DNA, 120 bp, Homo sapiens
tgccggggagaggggtactgagcacatgtttgtctggcacacagtaggtatgaggtaagtgtgtgccgagtaaagtacacgtgtggatacacaggtcccagtgcacgtgtgtgcatgtcc

SEQ ID NO: 34693 - DNA, 120 bp, Homo sapiens
gaacgcccccagggtggacaaaggtgcctaggtatgtttactcgtgtgctgtgagcccaggcatgaacttagagctccctggtcctggccagaccaggctgggctccttgctgggcacac

SEQ ID NO: 34694 - DNA, 120 bp, Homo sapiens
acacggaagcctctgccttgtgttggtgcccgtgcgggatgctgccaggagtgtgttggtggcgtgtgtgtgcgtgaacgtgtgtgtgtgtgcgcgtgtgtgtgtaggaagaggcgttcg

SEQ ID NO: 34695 - DNA, 120 bp, Homo sapiens
gagcggtgtttcaggatgtgagggcccgcaggagccgagtcaggctctctccactgcctgcccgccaccgtgcaagctctggccggcgctgcccacagtccccatggtgggcagcccccg

SEQ ID NO: 34696 - DNA, 120 bp, Homo sapiens
acccgtaaagatggagggaggacatgaatgtgtgctgccagagggtgcctgccacacagtcaaagctcaggaaattggggccttactctcaccttagcattttcaggtgccagcagctcc

SEQ ID NO: 34697 - DNA, 120 bp, Homo sapiens
gaccggccgaggtccaagcctgggtccgtgtgtcactggccaccacacccttccttgccctttcttcccctttttctccattcactcaccacttcttctcaagcaggctgaagcagggga

SEQ ID NO: 34698 - DNA, 120 bp, Homo sapiens
cagcggaggggggcgagtccgggtgattctcggggatctgggggagggcgatgactgcgtctccgaggctgggaacaccgtggcggtgcagccgggggaggaggagcccgggcgcgggca

SEQ ID NO: 34699 - DNA, 120 bp, Homo sapiens
ttgcggccgcgcagggaaaggcttcgtcccgtccctcctcgcagccctctgccgccctcggagtggggactttctcctgtcgccgtgggaagcaccgactttcgttgggggatttgactc

SEQ ID NO: 34700 - DNA, 120 bp, Homo sapiens
aaacgctccccaagtgatcttaatgtatggtctgagaactactgctctgtaaacaaaatgttagtttctcataaggaataacatgcagcttctccttgcacagggcttggtatacagtat

SEQ ID NO: 34701 - DNA, 120 bp, Homo sapiens
gcacgttaagatctcatagaccttgttctctgagagctgtggagaagctgtgaatcgcttttctgtcttggcatttcccggcgggacccatgaagaaaagagctttccttctcagcattt

SEQ ID NO: 34702 - DNA, 120 bp, Homo sapiens
ctgcgccatcctggcgcggagctggccgcactgggggaatgggacacaatcttgccttccatgccccagccactctctcactgcggaatcaccaaggagggaaagatgagtccctgagca

SEQ ID NO: 34703 - DNA, 120 bp, Homo sapiens
aaacggtgtgctcccggatccaggccaggtagtaggccacatcggtgtagacgcctggcttgttgcggtcaccacagcccgatccccagctgatgatgccttgcagggtgagccggcgct

SEQ ID NO: 34704 - DNA, 120 bp, Homo sapiens
cagcgggcctccggaatcaccctgggtcggaaacacgcagctcagcgctgtggacctgagatttgtgcctgacggcctcggggaagggcgccaaccgggctaagagctcacctggcacgc

SEQ ID NO: 34705 - DNA, 120 bp, Homo sapiens
catcggtgccgccctcgaggaaccctgcgcagagcatgccggggaggatggaggatccgtgcacgtccggggctgagcagcgctccagggagaggaacggtacctgcgcctcctgcagga

SEQ ID NO: 34706 - DNA, 120 bp, Homo sapiens
ctccgcccctgcgaacacagagcgccttcttcacaccccatctgacaacgcttgccgcccggacgatggacaaagctgctccaggcgcttgtaaacccactcatgcccttcctctctcgc

SEQ ID NO: 34707 - DNA, 120 bp, Homo sapiens
gcccgaaggggaggaggtgccattaattcaatttcataggcaaggaggctgaggtccagagaaaagccaggatttgaatgggcggagcggaaacagaaacccctcccccaccacccatcc

SEQ ID NO: 34708 - DNA, 120 bp, Homo sapiens
agtcgcagaacctggctcccacactagcccggagcgcggggccagcgtcctagttggcctttgcagcccggcgcccagagggaaccaagagcaagttcgattctccctgtatccccagga

SEQ ID NO: 34709 - DNA, 120 bp, Homo sapiens
cagcgccacccattctgtaggcacccggaacgataccaaagtcgcgggcttcttccgcctaacccagtgatcaaaggtctcctcccctacccctgcccctagcagttgtgcctaccctcg

SEQ ID NO: 34710 - DNA, 120 bp, Homo sapiens
agccggccacctggcagagcgtggtctcggagggtcgcgcggcgccgcttggcaggcacaccggctgaacgtaaggcgacaggagcgcgcagctgccgtccgcatcctcctgaaggcgca

SEQ ID NO: 34711 - DNA, 120 bp, Homo sapiens
tgccggggccaccatgctcccaatgttgctgcctggaccgtggcatcatggtccagccttcctcactgctacctgccttatttgctctccataggccctgaaaggacctttccaaaatgc

SEQ ID NO: 34712 - DNA, 120 bp, Homo sapiens
atgcggatcagaccatgattttcctgagcttaaaatccctcaggggttcccatgagccacagcaagcactggctaaatatgacccacagatggcttttgttttgctggtatgatattttt

SEQ ID NO: 34713 - DNA, 120 bp, Homo sapiens
tggcgacatcacctgcaagcccggagcagccatcaccggggcctcgccgcagcccccttaagacaggcgtgtgccacccgctcacccccggccccaccatcgcctactggcttcacctgc

SEQ ID NO: 34714 - DNA, 120 bp, Homo sapiens
acacgttgttttgggtgggcagcgcccgcacttggcctacgtcccccacccctgcctgacctagccgtcacctctccaacaccaccccctgccggcccccaccccaaggctcccacatac

SEQ ID NO: 34715 - DNA, 120 bp, Homo sapiens
gcacgacgcagtcagttcccagaacaggcacacccgttcccacctccaagcctcagcatgggagactggcctccctcccaaatgcctgctccccacccgggggccaggccctctggtttc

SEQ ID NO: 34716 - DNA, 120 bp, Homo sapiens
cagcgtggccactgcttcctggggaaggacctctgaacaagaggcttgttcaggtcatttcctcctctgggtccccacagggtgctcctggcttccaccacgatgacaccacatcctaag

SEQ ID NO: 34717 - DNA, 120 bp, Homo sapiens
ttccggaggcacctcccccctccgctgtgagcaacgcaggatgaggaccggggtctccgggtgggtggccagcacaaggcgggcgcatgtttgctcaactgcactcacacaccaaaggct

SEQ ID NO: 34718 - DNA, 120 bp, Homo sapiens
agtcggtgtcccctgctgctcaggtggcagcttgggcaggaggggctgctaaggtggtgaagtcccagggctgctctgtttttgagcctataatctaaaattttagcttatgtcaggagc

SEQ ID NO: 34719 - DNA, 120 bp, Homo sapiens
cttcgtagtatcccacctcaggagggctatcacctcagtgataactttgtgacccccagaatgaagtctaaactcctcctctgcccttgctctcctttcccaatcaaatctcccccactc

SEQ ID NO: 34720 - DNA, 120 bp, Homo sapiens
ccacggggttccagtcagcctaggctcttcaccttcccatgagcctgtgtcccaccagcctttgctgctctgcccactgcctgctgtaatctcagttggttcctctgccttgttcaaaga

SEQ ID NO: 34721 - DNA, 120 bp, Homo sapiens
gaccgggcaggccagactcgggcaccaggccacgcaggcagagcccacgggtgccaaacacacactaaccacgggctctgcgttctcatcctctcgcagccgcagtcggtgcagcacagg

SEQ ID NO: 34722 - DNA, 120 bp, Homo sapiens
agtcgcgccagcccgttagagagccgctgcccgatggcacccgcgtctatgtcttccacgctgctggcgttcacgatcacgtcgacacccttccgcaagaagacggcagtgctcaggcgg

SEQ ID NO: 34723 - DNA, 120 bp, Homo sapiens
tcccgccatccccaccccagcacgcagaccctggtggctgtccccacccccaagagcgctggcccctgacacgcacctggaagaactccgccaccttagccacgtggctggcacaagcgc

SEQ ID NO: 34724 - DNA, 120 bp, Homo sapiens
ttgcgggcatcaggcacatcttcgcccacctgcaaagtacccagcaaagagggggtcaggaaaggacaaggggggccctacacgatagggtgcatcttccccggggtgggaagagggtgg

SEQ ID NO: 34725 - DNA, 120 bp, Homo sapiens
ccacgggtgtcagagggccgacggggagggcgactgctctgggccttcagttcccttccccagccccggccgcatacccagttgatgagcagctctgggccctcagcccccttccccagc

SEQ ID NO: 34726 - DNA, 120 bp, Homo sapiens
ccccggccgcatacccagttgatgagcagctctgggccctcagcccccttccccagccccggccgcatacccagttgatgagcacgtattttggcagagcagcttgggagtccttgacac

SEQ ID NO: 34727 - DNA, 120 bp, Homo sapiens
agccgtacatcaccttctggttctcaaagtgtcccgaaagctcctgcaagcccccttctagggtaatcaggagagtgtcaggtctctctgcctcctaaacccttcccaaaaagagcctgg

SEQ ID NO: 34728 - DNA, 120 bp, Homo sapiens
tggcgcacagggatgtagctttgcctgtgactcctgcagggcctgatttgggggtaggactgaggaagtgtttgttcttcacactcaggtctcattcttcacacatcatcatgtctcacc

SEQ ID NO: 34729 - DNA, 120 bp, Homo sapiens
aggcggtgaatagggcccttcccccaaagtgtcccagctgtgtggcttcagataagtcactttccctgttggaggctcagcctcagaagtccaacattcaacaaggctctgagattcctc

SEQ ID NO: 34730 - DNA, 120 bp, Homo sapiens
gcccgtctcctttccctgagaggtccttgcctagtctatcccatcatatccactgtcatctgcatcccaccctcaaatccaccccagttgctttcccatcccagcttcagccccatgctt

SEQ ID NO: 34731 - DNA, 120 bp, Homo sapiens
gcacgtgtcccccccaacatgtgtcacggcacatcttcagtccaacccatcccagtctcatcctgatcccagttcccaattcccaaccacagccccccatctcggctccatgaccactta

SEQ ID NO: 34732 - DNA, 120 bp, Homo sapiens
ccacgcctgtgccctctcagatggggccagctaggagatcctttgcattctctctcaagcctcacgcctcccagaggagtcccaagtagagttccggaagcagcatctaaccccagactc

SEQ ID NO: 34733 - DNA, 120 bp, Homo sapiens
ccacggcagggctcctccaaggacgctcagggccagcctcttggcacctttatctcctaaagctctaagcacagaacgggagggggcctcagaaaagtaccccctgcaagggagtggaca

SEQ ID NO: 34734 - DNA, 120 bp, Homo sapiens
ctccgttccttgctaggttgggaccctgaaaccgtccacagcgcttagaagccttttccaccactacaaagcctccaacctcgacctccctgagcaaacttcacctggtcccaaccgcac

SEQ ID NO: 34735 - DNA, 120 bp, Homo sapiens
caccgcggaggaggaggtggttctagccaggcctccgagttctgcgttgggtaattggctatgccaagagaaggagagcagggctgcctatgtggcagtgttcctggcgctttggagttg

SEQ ID NO: 34736 - DNA, 120 bp, Homo sapiens
agccggggaggggcagcagatggctggccatgagcatctgtggcctcagcctcttccagcttcctttgatttgtcctagctcacagctcctcgccccccccgctcccctcaccccccagc

SEQ ID NO: 34737 - DNA, 120 bp, Homo sapiens
acccgcatcacacactaggccctccctctgctttatttttccccatagcatctccatcatctcacattctgtatgaaatgtttgtttatttaagaatcccacagcaccagagacatctgg

SEQ ID NO: 34738 - DNA, 120 bp, Homo sapiens
ctgcggtgctctttccagggtgtgttctttgttaggacaatgaagacacacagctaatgtgtcttatctaacatttccccagggccagcacacagtggatgtgaatgaacacacgaagaa
